United States Patent Application Publication US 2014/0004565 A1 - sequence listing, part 92

SEQ ID NO: 2276748 - RNA, 19 nt, Artificial Sequence
  Description of Artificial Sequence: Synthetic oligonucleotide
aaugucgccaguaucuugc

SEQ ID NO: 2276749 - RNA, 19 nt, Artificial Sequence
  Description of Artificial Sequence: Synthetic oligonucleotide
aaacauuguagggagacuc

SEQ ID NO: 2276750 - RNA, 19 nt, Artificial Sequence
  Description of Artificial Sequence: Synthetic oligonucleotide
auuguagggagacuccugc

SEQ ID NO: 2276751 - RNA, 19 nt, Artificial Sequence
  Description of Artificial Sequence: Synthetic oligonucleotide
gaugugaaacauuguaggg

SEQ ID NO: 2276752 - RNA, 19 nt, Artificial Sequence
  Description of Artificial Sequence: Synthetic oligonucleotide
ucuugcauauacugggugg

SEQ ID NO: 2276753 - RNA, 19 nt, Artificial Sequence
  Description of Artificial Sequence: Synthetic oligonucleotide
ucuacuguugcuauacaga

SEQ ID NO: 2276754 - RNA, 19 nt, Artificial Sequence
  Description of Artificial Sequence: Synthetic oligonucleotide
uaaucaagagagcuccagg

SEQ ID NO: 2276755 - RNA, 19 nt, Artificial Sequence
  Description of Artificial Sequence: Synthetic oligonucleotide
guugcaaaauccaaguggg

SEQ ID NO: 2276756 - RNA, 19 nt, Artificial Sequence
  Description of Artificial Sequence: Synthetic oligonucleotide
uguaguacaggccaugguc

SEQ ID NO: 2276757 - RNA, 19 nt, Artificial Sequence
  Description of Artificial Sequence: Synthetic oligonucleotide
cauaaggggagaaccaugg

SEQ ID NO: 2276758 - RNA, 19 nt, Artificial Sequence
  Description of Artificial Sequence: Synthetic oligonucleotide
gguugcaaaauccaagugg

SEQ ID NO: 2276759 - RNA, 19 nt, Artificial Sequence
  Description of Artificial Sequence: Synthetic oligonucleotide
ugagaugugaaacauugua

SEQ ID NO: 2276760 - RNA, 19 nt, Artificial Sequence
  Description of Artificial Sequence: Synthetic oligonucleotide
agccucauaaucaagagag

SEQ ID NO: 2276761 - RNA, 19 nt, Artificial Sequence
  Description of Artificial Sequence: Synthetic oligonucleotide
cuucaucucggcuugacgc

SEQ ID NO: 2276762 - RNA, 19 nt, Artificial Sequence
  Description of Artificial Sequence: Synthetic oligonucleotide
aauaugaaucccuggacuu

SEQ ID NO: 2276763 - RNA, 19 nt, Artificial Sequence
  Description of Artificial Sequence: Synthetic oligonucleotide
gauaguuccaaggaugccc

SEQ ID NO: 2276764 - RNA, 19 nt, Artificial Sequence
  Description of Artificial Sequence: Synthetic oligonucleotide
caugugcuggccuugauag

SEQ ID NO: 2276765 - RNA, 19 nt, Artificial Sequence
  Description of Artificial Sequence: Synthetic oligonucleotide
agggaagaacuccauaagg

SEQ ID NO: 2276766 - RNA, 19 nt, Artificial Sequence
  Description of Artificial Sequence: Synthetic oligonucleotide
auugcaugaugauaauguc

SEQ ID NO: 2276767 - RNA, 19 nt, Artificial Sequence
  Description of Artificial Sequence: Synthetic oligonucleotide
acuccauaaggggagaacc

SEQ ID NO: 2276768 - RNA, 19 nt, Artificial Sequence
  Description of Artificial Sequence: Synthetic oligonucleotide
augaugauaaugucgccag

SEQ ID NO: 2276769 - RNA, 19 nt, Artificial Sequence
  Description of Artificial Sequence: Synthetic oligonucleotide
agcuuuugagaugugaaac

SEQ ID NO: 2276770 - RNA, 19 nt, Artificial Sequence
  Description of Artificial Sequence: Synthetic oligonucleotide
ugacaggccaguauuucgg

SEQ ID NO: 2276771 - RNA, 19 nt, Artificial Sequence
  Description of Artificial Sequence: Synthetic oligonucleotide
cuacuguugcuauacagag

SEQ ID NO: 2276772 - RNA, 19 nt, Artificial Sequence
  Description of Artificial Sequence: Synthetic oligonucleotide
aaaggcgcauucccuaggg

SEQ ID NO: 2276773 - RNA, 19 nt, Artificial Sequence
  Description of Artificial Sequence: Synthetic oligonucleotide
gaaauaugaaucccuggac

SEQ ID NO: 2276774 - RNA, 19 nt, Artificial Sequence
  Description of Artificial Sequence: Synthetic oligonucleotide
uauugcucaggucacacuc

SEQ ID NO: 2276775 - RNA, 19 nt, Artificial Sequence
  Description of Artificial Sequence: Synthetic oligonucleotide
uuugcauccaagccauugc

SEQ ID NO: 2276776 - RNA, 19 nt, Artificial Sequence
  Description of Artificial Sequence: Synthetic oligonucleotide
uucuacuguugcuauacag

SEQ ID NO: 2276777 - RNA, 19 nt, Artificial Sequence
  Description of Artificial Sequence: Synthetic oligonucleotide
aacauuguagggagacucc

SEQ ID NO: 2276778 - RNA, 19 nt, Artificial Sequence
  Description of Artificial Sequence: Synthetic oligonucleotide
ggaagugaaauaugaaucc

SEQ ID NO: 2276779 - RNA, 19 nt, Artificial Sequence
  Description of Artificial Sequence: Synthetic oligonucleotide
aucuaguugcugcugucgc

SEQ ID NO: 2276780 - RNA, 19 nt, Artificial Sequence
  Description of Artificial Sequence: Synthetic oligonucleotide
aguaucuugcauauacugg

SEQ ID NO: 2276781 - RNA, 19 nt, Artificial Sequence
  Description of Artificial Sequence: Synthetic oligonucleotide
aagaacuccauaaggggag

SEQ ID NO: 2276782 - RNA, 19 nt, Artificial Sequence
  Description of Artificial Sequence: Synthetic oligonucleotide
aucuugggagcacuguccc

SEQ ID NO: 2276783 - RNA, 19 nt, Artificial Sequence
  Description of Artificial Sequence: Synthetic oligonucleotide
accaagaugcaguaguucu

SEQ ID NO: 2276784 - RNA, 19 nt, Artificial Sequence
  Description of Artificial Sequence: Synthetic oligonucleotide
ggaagaacuccauaagggg

SEQ ID NO: 2276785 - RNA, 19 nt, Artificial Sequence
  Description of Artificial Sequence: Synthetic oligonucleotide
ugaaacauuguagggagac

SEQ ID NO: 2276786 - RNA, 19 nt, Artificial Sequence
  Description of Artificial Sequence: Synthetic oligonucleotide
uguugcuauacagaggcug

SEQ ID NO: 2276787 - RNA, 19 nt, Artificial Sequence
  Description of Artificial Sequence: Synthetic oligonucleotide
ugaaucugacucuaucucu

SEQ ID NO: 2276788 - RNA, 19 nt, Artificial Sequence
  Description of Artificial Sequence: Synthetic oligonucleotide
aucugaaucugacucuauc

SEQ ID NO: 2276789 - RNA, 19 nt, Artificial Sequence
  Description of Artificial Sequence: Synthetic oligonucleotide
uacuucguuaucugaaucu

SEQ ID NO: 2276790 - RNA, 19 nt, Artificial Sequence
  Description of Artificial Sequence: Synthetic oligonucleotide
gaagugaaauaugaauccc

SEQ ID NO: 2276791 - RNA, 19 nt, Artificial Sequence
  Description of Artificial Sequence: Synthetic oligonucleotide
augacaggccaguauuucg

SEQ ID NO: 2276792 - RNA, 19 nt, Artificial Sequence
  Description of Artificial Sequence: Synthetic oligonucleotide
ucggugauuuccauauugc

SEQ ID NO: 2276793 - RNA, 19 nt, Artificial Sequence
  Description of Artificial Sequence: Synthetic oligonucleotide
uccaagugggcgcucgugg

SEQ ID NO: 2276794 - RNA, 19 nt, Artificial Sequence
  Description of Artificial Sequence: Synthetic oligonucleotide
uuaaaggcgcauucccuag

SEQ ID NO: 2276795 - RNA, 19 nt, Artificial Sequence
  Description of Artificial Sequence: Synthetic oligonucleotide
caguaucuugcauauacug

SEQ ID NO: 2276796 - RNA, 19 nt, Artificial Sequence
  Description of Artificial Sequence: Synthetic oligonucleotide
caggucacacucuacuucg

SEQ ID NO: 2276797 - RNA, 19 nt, Artificial Sequence
  Description of Artificial Sequence: Synthetic oligonucleotide
uacuguugcuauacagagg

SEQ ID NO: 2276798 - RNA, 19 nt, Artificial Sequence
  Description of Artificial Sequence: Synthetic oligonucleotide
uguagggagacuccugcca

SEQ ID NO: 2276799 - RNA, 19 nt, Artificial Sequence
  Description of Artificial Sequence: Synthetic oligonucleotide
ugucauugcugcuaucucu

SEQ ID NO: 2276800 - RNA, 19 nt, Artificial Sequence
  Description of Artificial Sequence: Synthetic oligonucleotide
uggugguuguaguacaggc

SEQ ID NO: 2276801 - RNA, 19 nt, Artificial Sequence
  Description of Artificial Sequence: Synthetic oligonucleotide
aacuccauaaggggagaac

SEQ ID NO: 2276802 - RNA, 19 nt, Artificial Sequence
  Description of Artificial Sequence: Synthetic oligonucleotide
aagugaaauaugaaucccu

SEQ ID NO: 2276803 - RNA, 19 nt, Artificial Sequence
  Description of Artificial Sequence: Synthetic oligonucleotide
cuucauauucucuugcgga

SEQ ID NO: 2276804 - RNA, 19 nt, Artificial Sequence
  Description of Artificial Sequence: Synthetic oligonucleotide
aaauccaagugggcgcucg

SEQ ID NO: 2276805 - RNA, 19 nt, Artificial Sequence
  Description of Artificial Sequence: Synthetic oligonucleotide
uucucuugcggaugucugg

SEQ ID NO: 2276806 - RNA, 19 nt, Artificial Sequence
  Description of Artificial Sequence: Synthetic oligonucleotide
gauaaugucgccaguaucu

SEQ ID NO: 2276807 - RNA, 19 nt, Artificial Sequence
  Description of Artificial Sequence: Synthetic oligonucleotide
uaaaggcgcauucccuagg

SEQ ID NO: 2276808 - RNA, 19 nt, Artificial Sequence
  Description of Artificial Sequence: Synthetic oligonucleotide
cuugcauauacuggguggg

SEQ ID NO: 2276809 - RNA, 19 nt, Artificial Sequence
  Description of Artificial Sequence: Synthetic oligonucleotide
guaguucuccauuuugaug

SEQ ID NO: 2276810 - RNA, 19 nt, Artificial Sequence
  Description of Artificial Sequence: Synthetic oligonucleotide
ucaggggaaugacaggcca

SEQ ID NO: 2276811 - RNA, 19 nt, Artificial Sequence
  Description of Artificial Sequence: Synthetic oligonucleotide
auaacaguucuggcugucc

SEQ ID NO: 2276812 - RNA, 19 nt, Artificial Sequence
  Description of Artificial Sequence: Synthetic oligonucleotide
agugaaauaugaaucccug

SEQ ID NO: 2276813 - RNA, 19 nt, Artificial Sequence
  Description of Artificial Sequence: Synthetic oligonucleotide
cauucacauagucauccag

SEQ ID NO: 2276814 - RNA, 19 nt, Artificial Sequence
  Description of Artificial Sequence: Synthetic oligonucleotide
gugguuguaguacaggcca

SEQ ID NO: 2276815 - RNA, 19 nt, Artificial Sequence
  Description of Artificial Sequence: Synthetic oligonucleotide
guuccaaggaugcccagcc

SEQ ID NO: 2276816 - RNA, 19 nt, Artificial Sequence
  Description of Artificial Sequence: Synthetic oligonucleotide
ucugacucuaucucuuccu

SEQ ID NO: 2276817 - RNA, 19 nt, Artificial Sequence
  Description of Artificial Sequence: Synthetic oligonucleotide
uccucggugauuuccauau

SEQ ID NO: 2276818 - RNA, 19 nt, Artificial Sequence
  Description of Artificial Sequence: Synthetic oligonucleotide
auuaaaggcgcauucccua

SEQ ID NO: 2276819 - RNA, 19 nt, Artificial Sequence
  Description of Artificial Sequence: Synthetic oligonucleotide
cucggugauuuccauauug

SEQ ID NO: 2276820 - RNA, 19 nt, Artificial Sequence
  Description of Artificial Sequence: Synthetic oligonucleotide
acuugucaaagcucaguug

SEQ ID NO: 2276821 - RNA, 19 nt, Artificial Sequence
  Description of Artificial Sequence: Synthetic oligonucleotide
cugaaucugacucuaucuc

SEQ ID NO: 2276822 - RNA, 19 nt, Artificial Sequence
  Description of Artificial Sequence: Synthetic oligonucleotide
uucauauucucuugcggau

SEQ ID NO: 2276823 - RNA, 19 nt, Artificial Sequence
  Description of Artificial Sequence: Synthetic oligonucleotide
gaagaacuccauaagggga

SEQ ID NO: 2276824 - RNA, 19 nt, Artificial Sequence
  Description of Artificial Sequence: Synthetic oligonucleotide
ucucuugcggaugucuggg

SEQ ID NO: 2276825 - RNA, 19 nt, Artificial Sequence
  Description of Artificial Sequence: Synthetic oligonucleotide
augugaaacauuguaggga

SEQ ID NO: 2276826 - RNA, 19 nt, Artificial Sequence
  Description of Artificial Sequence: Synthetic oligonucleotide
ugguugcaaaauccaagug

SEQ ID NO: 2276827 - RNA, 19 nt, Artificial Sequence
  Description of Artificial Sequence: Synthetic oligonucleotide
ggauuaaaggcgcauuccc

SEQ ID NO: 2276828 - RNA, 19 nt, Artificial Sequence
  Description of Artificial Sequence: Synthetic oligonucleotide
cagcuugcagaucucaggc

SEQ ID NO: 2276829 - RNA, 19 nt, Artificial Sequence
  Description of Artificial Sequence: Synthetic oligonucleotide
auaaggggagaaccauggg

SEQ ID NO: 2276830 - RNA, 19 nt, Artificial Sequence
  Description of Artificial Sequence: Synthetic oligonucleotide
guggcuuugcauccaagcc

SEQ ID NO: 2276831 - RNA, 19 nt, Artificial Sequence
  Description of Artificial Sequence: Synthetic oligonucleotide
ucacacucuacuucguuau

SEQ ID NO: 2276832 - RNA, 19 nt, Artificial Sequence
  Description of Artificial Sequence: Synthetic oligonucleotide
ucuaguugcugcugucgcc

SEQ ID NO: 2276833 - RNA, 19 nt, Artificial Sequence
  Description of Artificial Sequence: Synthetic oligonucleotide
ugcaucuaguugcugcugu

SEQ ID NO: 2276834 - RNA, 19 nt, Artificial Sequence
  Description of Artificial Sequence: Synthetic oligonucleotide
aggccaguauuucggcugc

SEQ ID NO: 2276835 - RNA, 19 nt, Artificial Sequence
  Description of Artificial Sequence: Synthetic oligonucleotide
ucucuguauaacaguucug

SEQ ID NO: 2276836 - RNA, 19 nt, Artificial Sequence
  Description of Artificial Sequence: Synthetic oligonucleotide
ugggaauaccaagaugcag

SEQ ID NO: 2276837 - RNA, 19 nt, Artificial Sequence
  Description of Artificial Sequence: Synthetic oligonucleotide
caagagagcuccagggaag

SEQ ID NO: 2276838 - RNA, 19 nt, Artificial Sequence
  Description of Artificial Sequence: Synthetic oligonucleotide
gaucuugggagcacugucc

SEQ ID NO: 2276839 - RNA, 19 nt, Artificial Sequence
  Description of Artificial Sequence: Synthetic oligonucleotide
gcuugcagaucucaggcgg

SEQ ID NO: 2276840 - RNA, 19 nt, Artificial Sequence
  Description of Artificial Sequence: Synthetic oligonucleotide
auauacugggugggaauac

SEQ ID NO: 2276841 - RNA, 19 nt, Artificial Sequence
  Description of Artificial Sequence: Synthetic oligonucleotide
caguacuugucaaagcuca

SEQ ID NO: 2276842 - RNA, 19 nt, Artificial Sequence
  Description of Artificial Sequence: Synthetic oligonucleotide
aucaagagagcuccaggga

SEQ ID NO: 2276843 - RNA, 19 nt, Artificial Sequence
  Description of Artificial Sequence: Synthetic oligonucleotide
aaccauggggaagugaaau

SEQ ID NO: 2276844 - RNA, 19 nt, Artificial Sequence
  Description of Artificial Sequence: Synthetic oligonucleotide
uuuugagaugugaaacauu

SEQ ID NO: 2276845 - RNA, 19 nt, Artificial Sequence
  Description of Artificial Sequence: Synthetic oligonucleotide
uaggguuccugugugccgg

SEQ ID NO: 2276846 - RNA, 19 nt, Artificial Sequence
  Description of Artificial Sequence: Synthetic oligonucleotide
uucaggggaaugacaggcc

SEQ ID NO: 2276847 - RNA, 19 nt, Artificial Sequence
  Description of Artificial Sequence: Synthetic oligonucleotide
gcaaaauccaagugggcgc

SEQ ID NO: 2276848 - RNA, 19 nt, Artificial Sequence
  Description of Artificial Sequence: Synthetic oligonucleotide
ucauauucucuugcggaug

SEQ ID NO: 2276849 - RNA, 19 nt, Artificial Sequence
  Description of Artificial Sequence: Synthetic oligonucleotide
gcuucauauucucuugcgg

SEQ ID NO: 2276850 - RNA, 19 nt, Artificial Sequence
  Description of Artificial Sequence: Synthetic oligonucleotide
uugagaugugaaacauugu

SEQ ID NO: 2276851 - RNA, 19 nt, Artificial Sequence
  Description of Artificial Sequence: Synthetic oligonucleotide
acuucguuaucugaaucug

SEQ ID NO: 2276852 - RNA, 19 nt, Artificial Sequence
  Description of Artificial Sequence: Synthetic oligonucleotide
guagggagacuccugccag

SEQ ID NO: 2276853 - RNA, 19 nt, Artificial Sequence
  Description of Artificial Sequence: Synthetic oligonucleotide
acaguacuugucaaagcuc

SEQ ID NO: 2276854 - RNA, 19 nt, Artificial Sequence
  Description of Artificial Sequence: Synthetic oligonucleotide
agcuugcagaucucaggcg

SEQ ID NO: 2276855 - RNA, 19 nt, Artificial Sequence
  Description of Artificial Sequence: Synthetic oligonucleotide
uaguacaggccauggucag

SEQ ID NO: 2276856 - RNA, 19 nt, Artificial Sequence
  Description of Artificial Sequence: Synthetic oligonucleotide
uaaugucgccaguaucuug

SEQ ID NO: 2276857 - RNA, 19 nt, Artificial Sequence
  Description of Artificial Sequence: Synthetic oligonucleotide
auugcugcuaucucugguu

SEQ ID NO: 2276858 - RNA, 19 nt, Artificial Sequence
  Description of Artificial Sequence: Synthetic oligonucleotide
uucccuaggguuccugugu

SEQ ID NO: 2276859 - RNA, 19 nt, Artificial Sequence
  Description of Artificial Sequence: Synthetic oligonucleotide
agaaccauggggaagugaa

SEQ ID NO: 2276860 - RNA, 19 nt, Artificial Sequence
  Description of Artificial Sequence: Synthetic oligonucleotide
ggccuugauaguuccaagg

SEQ ID NO: 2276861 - RNA, 19 nt, Artificial Sequence
  Description of Artificial Sequence: Synthetic oligonucleotide
ggcgucagaacuucagggg

SEQ ID NO: 2276862 - RNA, 19 nt, Artificial Sequence
  Description of Artificial Sequence: Synthetic oligonucleotide
cauggggaagugaaauaug

SEQ ID NO: 2276863 - RNA, 19 nt, Artificial Sequence
  Description of Artificial Sequence: Synthetic oligonucleotide
uuaucugaaucugacucua

SEQ ID NO: 2276864 - RNA, 19 nt, Artificial Sequence
  Description of Artificial Sequence: Synthetic oligonucleotide
caucuaguugcugcugucg

SEQ ID NO: 2276865 - RNA, 19 nt, Artificial Sequence
  Description of Artificial Sequence: Synthetic oligonucleotide
cucggcuugacgccguucc

SEQ ID NO: 2276866 - RNA, 19 nt, Artificial Sequence
  Description of Artificial Sequence: Synthetic oligonucleotide
ugacucuaucucuuccucu

SEQ ID NO: 2276867 - RNA, 19 nt, Artificial Sequence
  Description of Artificial Sequence: Synthetic oligonucleotide
agccauugcaugaugauaa

SEQ ID NO: 2276868 - RNA, 19 nt, Artificial Sequence
  Description of Artificial Sequence: Synthetic oligonucleotide
ucaucucggcuugacgccg

SEQ ID NO: 2276869 - RNA, 19 nt, Artificial Sequence
  Description of Artificial Sequence: Synthetic oligonucleotide
caggccauggucagcauuc

SEQ ID NO: 2276870 - RNA, 19 nt, Artificial Sequence
  Description of Artificial Sequence: Synthetic oligonucleotide
uggguacgcagcuugcaga

SEQ ID NO: 2276871 - RNA, 19 nt, Artificial Sequence
  Description of Artificial Sequence: Synthetic oligonucleotide
ucguuaucugaaucugacu

SEQ ID NO: 2276872 - RNA, 19 nt, Artificial Sequence
  Description of Artificial Sequence: Synthetic oligonucleotide
caggccaguauuucggcug

SEQ ID NO: 2276873 - RNA, 19 nt, Artificial Sequence
  Description of Artificial Sequence: Synthetic oligonucleotide
aggaugcccagccucauaa

SEQ ID NO: 2276874 - RNA, 19 nt, Artificial Sequence
  Description of Artificial Sequence: Synthetic oligonucleotide
cauauugcucaggucacac

SEQ ID NO: 2276875 - RNA, 19 nt, Artificial Sequence
  Description of Artificial Sequence: Synthetic oligonucleotide
ggcuucauauucucuugcg

SEQ ID NO: 2276876 - RNA, 19 nt, Artificial Sequence
  Description of Artificial Sequence: Synthetic oligonucleotide
gguggcuuugcauccaagc

SEQ ID NO: 2276877 - RNA, 19 nt, Artificial Sequence
  Description of Artificial Sequence: Synthetic oligonucleotide
cacucuacuucguuaucug

SEQ ID NO: 2276878 - RNA, 19 nt, Artificial Sequence
  Description of Artificial Sequence: Synthetic oligonucleotide
cuaggguuccugugugccg

SEQ ID NO: 2276879 - RNA, 19 nt, Artificial Sequence
  Description of Artificial Sequence: Synthetic oligonucleotide
ugaugauaaugucgccagu

SEQ ID NO: 2276880 - RNA, 19 nt, Artificial Sequence
  Description of Artificial Sequence: Synthetic oligonucleotide
uuguagggagacuccugcc

SEQ ID NO: 2276881 - RNA, 19 nt, Artificial Sequence
  Description of Artificial Sequence: Synthetic oligonucleotide
cguuaucugaaucugacuc

SEQ ID NO: 2276882 - RNA, 19 nt, Artificial Sequence
  Description of Artificial Sequence: Synthetic oligonucleotide
cuacuucguuaucugaauc

SEQ ID NO: 2276883 - RNA, 19 nt, Artificial Sequence
  Description of Artificial Sequence: Synthetic oligonucleotide
aguacaggccauggucagc

SEQ ID NO: 2276884 - RNA, 19 nt, Artificial Sequence
  Description of Artificial Sequence: Synthetic oligonucleotide
ugcuauacagaggcugccc

SEQ ID NO: 2276885 - RNA, 19 nt, Artificial Sequence
  Description of Artificial Sequence: Synthetic oligonucleotide
cauuguagggagacuccug

SEQ ID NO: 2276886 - RNA, 19 nt, Artificial Sequence
  Description of Artificial Sequence: Synthetic oligonucleotide
acacucuacuucguuaucu

SEQ ID NO: 2276887 - RNA, 19 nt, Artificial Sequence
  Description of Artificial Sequence: Synthetic oligonucleotide
guacuggcggagcuccucg

SEQ ID NO: 2276888 - RNA, 19 nt, Artificial Sequence
  Description of Artificial Sequence: Synthetic oligonucleotide
cuugcggaugucuggguuc

SEQ ID NO: 2276889 - RNA, 19 nt, Artificial Sequence
  Description of Artificial Sequence: Synthetic oligonucleotide
guaguacaggccaugguca

SEQ ID NO: 2276890 - RNA, 19 nt, Artificial Sequence
  Description of Artificial Sequence: Synthetic oligonucleotide
uuuccauauugcucagguc

SEQ ID NO: 2276891 - RNA, 19 nt, Artificial Sequence
  Description of Artificial Sequence: Synthetic oligonucleotide
caguaguucuccauuuuga

SEQ ID NO: 2276892 - RNA, 19 nt, Artificial Sequence
  Description of Artificial Sequence: Synthetic oligonucleotide
agagcuuuugagaugugaa

SEQ ID NO: 2276893 - RNA, 19 nt, Artificial Sequence
  Description of Artificial Sequence: Synthetic oligonucleotide
auauugcucaggucacacu

SEQ ID NO: 2276894 - RNA, 19 nt, Artificial Sequence
  Description of Artificial Sequence: Synthetic oligonucleotide
ucccuaggguuccugugug

SEQ ID NO: 2276895 - RNA, 19 nt, Artificial Sequence
  Description of Artificial Sequence: Synthetic oligonucleotide
ugauaguuccaaggaugcc

SEQ ID NO: 2276896 - RNA, 19 nt, Artificial Sequence
  Description of Artificial Sequence: Synthetic oligonucleotide
ugcaaaguacuggcggagc

SEQ ID NO: 2276897 - RNA, 19 nt, Artificial Sequence
  Description of Artificial Sequence: Synthetic oligonucleotide
cucguggguacgcagcuug

SEQ ID NO: 2276898 - RNA, 19 nt, Artificial Sequence
  Description of Artificial Sequence: Synthetic oligonucleotide
gagagcuccagggaagaac

SEQ ID NO: 2276899 - RNA, 19 nt, Artificial Sequence
  Description of Artificial Sequence: Synthetic oligonucleotide
guuaucugaaucugacucu

SEQ ID NO: 2276900 - RNA, 19 nt, Artificial Sequence
  Description of Artificial Sequence: Synthetic oligonucleotide
cauccaagccauugcauga

SEQ ID NO: 2276901 - RNA, 19 nt, Artificial Sequence
  Description of Artificial Sequence: Synthetic oligonucleotide
aaaauccaagugggcgcuc

SEQ ID NO: 2276902 - RNA, 19 nt, Artificial Sequence
  Description of Artificial Sequence: Synthetic oligonucleotide
ggugauuuccauauugcuc

SEQ ID NO: 2276903 - RNA, 19 nt, Artificial Sequence
  Description of Artificial Sequence: Synthetic oligonucleotide
auaguuccaaggaugccca

SEQ ID NO: 2276904 - RNA, 19 nt, Artificial Sequence
  Description of Artificial Sequence: Synthetic oligonucleotide
guggguacgcagcuugcag

SEQ ID NO: 2276905 - RNA, 19 nt, Artificial Sequence
  Description of Artificial Sequence: Synthetic oligonucleotide
uggccuugauaguuccaag

SEQ ID NO: 2276906 - RNA, 19 nt, Artificial Sequence
  Description of Artificial Sequence: Synthetic oligonucleotide
ugcuaucucugguugcaaa

SEQ ID NO: 2276907 - RNA, 19 nt, Artificial Sequence
  Description of Artificial Sequence: Synthetic oligonucleotide
ugcagaucucaggcggugg

SEQ ID NO: 2276908 - RNA, 19 nt, Artificial Sequence
  Description of Artificial Sequence: Synthetic oligonucleotide
uccauaaggggagaaccau

SEQ ID NO: 2276909 - RNA, 19 nt, Artificial Sequence
  Description of Artificial Sequence: Synthetic oligonucleotide
gucagcauucacauaguca

SEQ ID NO: 2276910 - RNA, 19 nt, Artificial Sequence
  Description of Artificial Sequence: Synthetic oligonucleotide
uaugaaucccuggacuuuu

SEQ ID NO: 2276911 - RNA, 19 nt, Artificial Sequence
  Description of Artificial Sequence: Synthetic oligonucleotide
ucgccaguaucuugcauau

SEQ ID NO: 2276912 - RNA, 19 nt, Artificial Sequence
  Description of Artificial Sequence: Synthetic oligonucleotide
uugacgccguuccccaggc

SEQ ID NO: 2276913 - RNA, 19 nt, Artificial Sequence
  Description of Artificial Sequence: Synthetic oligonucleotide
ugcugcuaucucugguugc

SEQ ID NO: 2276914 - RNA, 19 nt, Artificial Sequence
  Description of Artificial Sequence: Synthetic oligonucleotide
aauccaagugggcgcucgu

SEQ ID NO: 2276915 - RNA, 19 nt, Artificial Sequence
  Description of Artificial Sequence: Synthetic oligonucleotide
cugacucuaucucuuccuc

SEQ ID NO: 2276916 - RNA, 19 nt, Artificial Sequence
  Description of Artificial Sequence: Synthetic oligonucleotide
acauuguagggagacuccu

SEQ ID NO: 2276917 - RNA, 19 nt, Artificial Sequence
  Description of Artificial Sequence: Synthetic oligonucleotide
cuucguuaucugaaucuga

SEQ ID NO: 2276918 - RNA, 19 nt, Artificial Sequence
  Description of Artificial Sequence: Synthetic oligonucleotide
uggguucuacuguugcuau

SEQ ID NO: 2276919 - RNA, 19 nt, Artificial Sequence
  Description of Artificial Sequence: Synthetic oligonucleotide
caaagcucaguugcacagc

SEQ ID NO: 2276920 - RNA, 19 nt, Artificial Sequence
  Description of Artificial Sequence: Synthetic oligonucleotide
uugcuauacagaggcugcc

SEQ ID NO: 2276921 - RNA, 19 nt, Artificial Sequence
  Description of Artificial Sequence: Synthetic oligonucleotide
ucuugggagcacugucccc

SEQ ID NO: 2276922 - RNA, 19 nt, Artificial Sequence
  Description of Artificial Sequence: Synthetic oligonucleotide
aaggcgcauucccuagggu

SEQ ID NO: 2276923 - RNA, 19 nt, Artificial Sequence
  Description of Artificial Sequence: Synthetic oligonucleotide
uauaacaguucuggcuguc

SEQ ID NO: 2276924 - RNA, 19 nt, Artificial Sequence
  Description of Artificial Sequence: Synthetic oligonucleotide
gauuaaaggcgcauucccu

SEQ ID NO: 2276925 - RNA, 19 nt, Artificial Sequence
  Description of Artificial Sequence: Synthetic oligonucleotide
ugcccagccucauaaucaa

SEQ ID NO: 2276926 - RNA, 19 nt, Artificial Sequence
  Description of Artificial Sequence: Synthetic oligonucleotide
aggcgcauucccuaggguu

SEQ ID NO: 2276927 - RNA, 19 nt, Artificial Sequence
  Description of Artificial Sequence: Synthetic oligonucleotide
ucagaacuucaggggaaug

SEQ ID NO: 2276928 - RNA, 19 nt, Artificial Sequence
  Description of Artificial Sequence: Synthetic oligonucleotide
uaccaagaugcaguaguuc

SEQ ID NO: 2276929 - RNA, 19 nt, Artificial Sequence
  Description of Artificial Sequence: Synthetic oligonucleotide
uaucugaaucugacucuau

SEQ ID NO: 2276930 - RNA, 19 nt, Artificial Sequence
  Description of Artificial Sequence: Synthetic oligonucleotide
cugguugcaaaauccaagu

SEQ ID NO: 2276931 - RNA, 19 nt, Artificial Sequence
  Description of Artificial Sequence: Synthetic oligonucleotide
cuccauaaggggagaacca

SEQ ID NO: 2276932 - RNA, 19 nt, Artificial Sequence
  Description of Artificial Sequence: Synthetic oligonucleotide
ugugccggcgucagaacuu

SEQ ID NO: 2276933 - RNA, 19 nt, Artificial Sequence
  Description of Artificial Sequence: Synthetic oligonucleotide
uacuggcggagcuccucgg

SEQ ID NO: 2276934 - RNA, 19 nt, Artificial Sequence
  Description of Artificial Sequence: Synthetic oligonucleotide
gcuucaucucggcuugacg

SEQ ID NO: 2276935 - RNA, 19 nt, Artificial Sequence
  Description of Artificial Sequence: Synthetic oligonucleotide
augcccagccucauaauca

SEQ ID NO: 2276936 - RNA, 19 nt, Artificial Sequence
  Description of Artificial Sequence: Synthetic oligonucleotide
agugggcgcucguggguac

SEQ ID NO: 2276937 - RNA, 19 nt, Artificial Sequence
  Description of Artificial Sequence: Synthetic oligonucleotide
ugguggcuuugcauccaag

SEQ ID NO: 2276938 - RNA, 19 nt, Artificial Sequence
  Description of Artificial Sequence: Synthetic oligonucleotide
gcagaucucaggcgguggg

SEQ ID NO: 2276939 - RNA, 19 nt, Artificial Sequence
  Description of Artificial Sequence: Synthetic oligonucleotide
ggugguuguaguacaggcc

SEQ ID NO: 2276940 - RNA, 19 nt, Artificial Sequence
  Description of Artificial Sequence: Synthetic oligonucleotide
cugcccagagcuuuugaga

SEQ ID NO: 2276941 - RNA, 19 nt, Artificial Sequence
  Description of Artificial Sequence: Synthetic oligonucleotide
cagaacuucaggggaauga

SEQ ID NO: 2276942 - RNA, 19 nt, Artificial Sequence
  Description of Artificial Sequence: Synthetic oligonucleotide
ucauccaggcgcucugcau

SEQ ID NO: 2276943 - RNA, 19 nt, Artificial Sequence
  Description of Artificial Sequence: Synthetic oligonucleotide
ucguggguacgcagcuugc

SEQ ID NO: 2276944 - RNA, 19 nt, Artificial Sequence
  Description of Artificial Sequence: Synthetic oligonucleotide
accauggggaagugaaaua

SEQ ID NO: 2276945 - RNA, 19 nt, Artificial Sequence
  Description of Artificial Sequence: Synthetic oligonucleotide
uugcauauacuggguggga

SEQ ID NO: 2276946 - RNA, 19 nt, Artificial Sequence
  Description of Artificial Sequence: Synthetic oligonucleotide
aggguuccugugugccggc

SEQ ID NO: 2276947 - RNA, 19 nt, Artificial Sequence
  Description of Artificial Sequence: Synthetic oligonucleotide
cauaaucaagagagcucca

SEQ ID NO: 2276948 - RNA, 19 nt, Artificial Sequence
  Description of Artificial Sequence: Synthetic oligonucleotide
auaugaaucccuggacuuu

SEQ ID NO: 2276949 - RNA, 19 nt, Artificial Sequence
  Description of Artificial Sequence: Synthetic oligonucleotide
ugguuguaguacaggccau

SEQ ID NO: 2276950 - RNA, 19 nt, Artificial Sequence
  Description of Artificial Sequence: Synthetic oligonucleotide
uuccugcggggcuucauau

SEQ ID NO: 2276951 - RNA, 19 nt, Artificial Sequence
  Description of Artificial Sequence: Synthetic oligonucleotide
ccagccucauaaucaagag

SEQ ID NO: 2276952 - RNA, 19 nt, Artificial Sequence
  Description of Artificial Sequence: Synthetic oligonucleotide
auacugggugggaauacca

SEQ ID NO: 2276953 - RNA, 19 nt, Artificial Sequence
  Description of Artificial Sequence: Synthetic oligonucleotide
ucggcuugacgccguuccc

SEQ ID NO: 2276954 - RNA, 19 nt, Artificial Sequence
  Description of Artificial Sequence: Synthetic oligonucleotide
caaaguacuggcggagcuc

SEQ ID NO: 2276955 - RNA, 19 nt, Artificial Sequence
  Description of Artificial Sequence: Synthetic oligonucleotide
ggggaagugaaauaugaau

SEQ ID NO: 2276956 - RNA, 19 nt, Artificial Sequence
  Description of Artificial Sequence: Synthetic oligonucleotide
ugcucaggucacacucuac

SEQ ID NO: 2276957 - RNA, 19 nt, Artificial Sequence
  Description of Artificial Sequence: Synthetic oligonucleotide
uaguuccaaggaugcccag

SEQ ID NO: 2276958 - RNA, 19 nt, Artificial Sequence
  Description of Artificial Sequence: Synthetic oligonucleotide
auauucucuugcggauguc

SEQ ID NO: 2276959 - RNA, 19 nt, Artificial Sequence
  Description of Artificial Sequence: Synthetic oligonucleotide
ucgccgucgcucuucucug

SEQ ID NO: 2276960 - RNA, 19 nt, Artificial Sequence
  Description of Artificial Sequence: Synthetic oligonucleotide
auaaugucgccaguaucuu

SEQ ID NO: 2276961 - RNA, 19 nt, Artificial Sequence
  Description of Artificial Sequence: Synthetic oligonucleotide
gggagcacuguccccauac

SEQ ID NO: 2276962 - RNA, 19 nt, Artificial Sequence
  Description of Artificial Sequence: Synthetic oligonucleotide
cauauucucuugcggaugu

SEQ ID NO: 2276963 - RNA, 19 nt, Artificial Sequence
  Description of Artificial Sequence: Synthetic oligonucleotide
aaggaugcccagccucaua

SEQ ID NO: 2276964 - RNA, 19 nt, Artificial Sequence
  Description of Artificial Sequence: Synthetic oligonucleotide
ugucgccaguaucuugcau

SEQ ID NO: 2276965 - RNA, 19 nt, Artificial Sequence
  Description of Artificial Sequence: Synthetic oligonucleotide
guucuacuguugcuauaca

SEQ ID NO: 2276966 - RNA, 19 nt, Artificial Sequence
  Description of Artificial Sequence: Synthetic oligonucleotide
uccugugugccggcgucag

SEQ ID NO: 2276967 - RNA, 19 nt, Artificial Sequence
  Description of Artificial Sequence: Synthetic oligonucleotide
agaacuccauaaggggaga

SEQ ID NO: 2276968 - RNA, 19 nt, Artificial Sequence
  Description of Artificial Sequence: Synthetic oligonucleotide
ccauaaggggagaaccaug

SEQ ID NO: 2276969 - RNA, 19 nt, Artificial Sequence
  Description of Artificial Sequence: Synthetic oligonucleotide
aggggagaaccauggggaa

SEQ ID NO: 2276970 - RNA, 19 nt, Artificial Sequence
  Description of Artificial Sequence: Synthetic oligonucleotide
ggaaugacaggccaguauu

SEQ ID NO: 2276971 - RNA, 19 nt, Artificial Sequence
  Description of Artificial Sequence: Synthetic oligonucleotide
cuuuugagaugugaaacau

SEQ ID NO: 2276972 - RNA, 19 nt, Artificial Sequence
  Description of Artificial Sequence: Synthetic oligonucleotide
acaggccauggucagcauu

SEQ ID NO: 2276973 - RNA, 19 nt, Artificial Sequence
  Description of Artificial Sequence: Synthetic oligonucleotide
gaaacauuguagggagacu

SEQ ID NO: 2276974 - RNA, 19 nt, Artificial Sequence
  Description of Artificial Sequence: Synthetic oligonucleotide
cagagcuuuugagauguga

SEQ ID NO: 2276975 - RNA, 19 nt, Artificial Sequence
  Description of Artificial Sequence: Synthetic oligonucleotide
cuggcggagcuccucggug

SEQ ID NO: 2276976 - RNA, 19 nt, Artificial Sequence
  Description of Artificial Sequence: Synthetic oligonucleotide
gcaugaugauaaugucgcc

SEQ ID NO: 2276977 - RNA, 19 nt, Artificial Sequence
  Description of Artificial Sequence: Synthetic oligonucleotide
ccaagaugcaguaguucuc

SEQ ID NO: 2276978 - RNA, 19 nt, Artificial Sequence
  Description of Artificial Sequence: Synthetic oligonucleotide
gcgucagaacuucagggga

SEQ ID NO: 2276979 - RNA, 19 nt, Artificial Sequence
  Description of Artificial Sequence: Synthetic oligonucleotide
auaccaagaugcaguaguu

SEQ ID NO: 2276980 - RNA, 19 nt, Artificial Sequence
  Description of Artificial Sequence: Synthetic oligonucleotide
ggucagcauucacauaguc

SEQ ID NO: 2276981 - RNA, 19 nt, Artificial Sequence
  Description of Artificial Sequence: Synthetic oligonucleotide
cacacucuacuucguuauc

SEQ ID NO: 2276982 - RNA, 19 nt, Artificial Sequence
  Description of Artificial Sequence: Synthetic oligonucleotide
cuccacggaccgguggugg

SEQ ID NO: 2276983 - RNA, 19 nt, Artificial Sequence
  Description of Artificial Sequence: Synthetic oligonucleotide
aagugggcgcucgugggua

SEQ ID NO: 2276984 - RNA, 19 nt, Artificial Sequence
  Description of Artificial Sequence: Synthetic oligonucleotide
uacgcagcuugcagaucuc

SEQ ID NO: 2276985 - RNA, 19 nt, Artificial Sequence
  Description of Artificial Sequence: Synthetic oligonucleotide
gagaaccauggggaaguga

SEQ ID NO: 2276986 - RNA, 19 nt, Artificial Sequence
  Description of Artificial Sequence: Synthetic oligonucleotide
cggcgucagaacuucaggg

SEQ ID NO: 2276987 - RNA, 19 nt, Artificial Sequence
  Description of Artificial Sequence: Synthetic oligonucleotide
uccacggaccggugguggu

SEQ ID NO: 2276988 - RNA, 19 nt, Artificial Sequence
  Description of Artificial Sequence: Synthetic oligonucleotide
gugggaauaccaagaugca

SEQ ID NO: 2276989 - RNA, 19 nt, Artificial Sequence
  Description of Artificial Sequence: Synthetic oligonucleotide
auccaagccauugcaugau

SEQ ID NO: 2276990 - RNA, 19 nt, Artificial Sequence
  Description of Artificial Sequence: Synthetic oligonucleotide
gccauggucagcauucaca

SEQ ID NO: 2276991 - RNA, 19 nt, Artificial Sequence
  Description of Artificial Sequence: Synthetic oligonucleotide
cuggccuugauaguuccaa

SEQ ID NO: 2276992 - RNA, 19 nt, Artificial Sequence
  Description of Artificial Sequence: Synthetic oligonucleotide
aggcgcucugcaucuaguu

SEQ ID NO: 2276993 - RNA, 19 nt, Artificial Sequence
  Description of Artificial Sequence: Synthetic oligonucleotide
acgccguuccccaggcuuc

SEQ ID NO: 2276994 - RNA, 19 nt, Artificial Sequence
  Description of Artificial Sequence: Synthetic oligonucleotide
ggaccgguggugguuguag

SEQ ID NO: 2276995 - RNA, 19 nt, Artificial Sequence
  Description of Artificial Sequence: Synthetic oligonucleotide
cugugugccggcgucagaa

SEQ ID NO: 2276996 - RNA, 19 nt, Artificial Sequence
  Description of Artificial Sequence: Synthetic oligonucleotide
cugcaucuaguugcugcug

SEQ ID NO: 2276997 - RNA, 19 nt, Artificial Sequence
  Description of Artificial Sequence: Synthetic oligonucleotide
ccaagccauugcaugauga

SEQ ID NO: 2276998 - RNA, 19 nt, Artificial Sequence
  Description of Artificial Sequence: Synthetic oligonucleotide
ccggcgucagaacuucagg

SEQ ID NO: 2276999 - RNA, 19 nt, Artificial Sequence
  Description of Artificial Sequence: Synthetic oligonucleotide
ggggagaaccauggggaag

SEQ ID NO: 2277000 - RNA, 19 nt, Artificial Sequence
  Description of Artificial Sequence: Synthetic oligonucleotide
gaacuccauaaggggagaa

SEQ ID NO: 2277001 - RNA, 19 nt, Artificial Sequence
  Description of Artificial Sequence: Synthetic oligonucleotide
gcucaggucacacucuacu

SEQ ID NO: 2277002 - RNA, 19 nt, Artificial Sequence
  Description of Artificial Sequence: Synthetic oligonucleotide
gacgccguuccccaggcuu

SEQ ID NO: 2277003 - RNA, 19 nt, Artificial Sequence
  Description of Artificial Sequence: Synthetic oligonucleotide
caagccauugcaugaugau

SEQ ID NO: 2277004 - RNA, 19 nt, Artificial Sequence
  Description of Artificial Sequence: Synthetic oligonucleotide
ggcgcauucccuaggguuc

SEQ ID NO: 2277005 - RNA, 19 nt, Artificial Sequence
  Description of Artificial Sequence: Synthetic oligonucleotide
gugaaacauuguagggaga

SEQ ID NO: 2277006 - RNA, 19 nt, Artificial Sequence
  Description of Artificial Sequence: Synthetic oligonucleotide
cacggaccgguggugguug

SEQ ID NO: 2277007 - RNA, 19 nt, Artificial Sequence
  Description of Artificial Sequence: Synthetic oligonucleotide
cauucccuaggguuccugu

SEQ ID NO: 2277008 - RNA, 19 nt, Artificial Sequence
  Description of Artificial Sequence: Synthetic oligonucleotide
caguauuucggcugcuuuu

SEQ ID NO: 2277009 - RNA, 19 nt, Artificial Sequence
  Description of Artificial Sequence: Synthetic oligonucleotide
ggcgcucguggguacgcag

SEQ ID NO: 2277010 - RNA, 19 nt, Artificial Sequence
  Description of Artificial Sequence: Synthetic oligonucleotide
gcaucuaguugcugcuguc

SEQ ID NO: 2277011 - RNA, 19 nt, Artificial Sequence
  Description of Artificial Sequence: Synthetic oligonucleotide
ugggcgcucguggguacgc

SEQ ID NO: 2277012 - RNA, 19 nt, Artificial Sequence
  Description of Artificial Sequence: Synthetic oligonucleotide
gccucauaaucaagagagc

SEQ ID NO: 2277013 - RNA, 19 nt, Artificial Sequence
  Description of Artificial Sequence: Synthetic oligonucleotide
gcaaaguacuggcggagcu

SEQ ID NO: 2277014 - RNA, 19 nt, Artificial Sequence
  Description of Artificial Sequence: Synthetic oligonucleotide
ggcuugacgccguucccca

SEQ ID NO: 2277015 - RNA, 19 nt, Artificial Sequence
  Description of Artificial Sequence: Synthetic oligonucleotide
cucaguugcacagcagccu

SEQ ID NO: 2277016 - RNA, 19 nt, Artificial Sequence
  Description of Artificial Sequence: Synthetic oligonucleotide
ugccggcgucagaacuuca

SEQ ID NO: 2277017 - RNA, 19 nt, Artificial Sequence
  Description of Artificial Sequence: Synthetic oligonucleotide
cuaucucugguugcaaaau

SEQ ID NO: 2277018 - RNA, 19 nt, Artificial Sequence
  Description of Artificial Sequence: Synthetic oligonucleotide
cuuccugcggggcuucaua

SEQ ID NO: 2277019 - RNA, 19 nt, Artificial Sequence
  Description of Artificial Sequence: Synthetic oligonucleotide
gugugccggcgucagaacu

SEQ ID NO: 2277020 - RNA, 19 nt, Artificial Sequence
  Description of Artificial Sequence: Synthetic oligonucleotide
gcuccagggaagaacucca

SEQ ID NO: 2277021 - RNA, 19 nt, Artificial Sequence
  Description of Artificial Sequence: Synthetic oligonucleotide
cauggucagcauucacaua

SEQ ID NO: 2277022 - RNA, 19 nt, Artificial Sequence
  Description of Artificial Sequence: Synthetic oligonucleotide
ugacgccguuccccaggcu

SEQ ID NO: 2277023 - RNA, 19 nt, Artificial Sequence
  Description of Artificial Sequence: Synthetic oligonucleotide
agagagcuccagggaagaa

SEQ ID NO: 2277024 - RNA, 19 nt, Artificial Sequence
  Description of Artificial Sequence: Synthetic oligonucleotide
cucaggucacacucuacuu

SEQ ID NO: 2277025 - RNA, 19 nt, Artificial Sequence
  Description of Artificial Sequence: Synthetic oligonucleotide
gccggcgucagaacuucag

SEQ ID NO: 2277026 - RNA, 19 nt, Artificial Sequence
  Description of Artificial Sequence: Synthetic oligonucleotide
ucucggcuugacgccguuc

SEQ ID NO: 2277027 - RNA, 19 nt, Artificial Sequence
  Description of Artificial Sequence: Synthetic oligonucleotide
gugggcgcucguggguacg

SEQ ID NO: 2277028 - RNA, 19 nt, Artificial Sequence
  Description of Artificial Sequence: Synthetic oligonucleotide
gaccgguggugguuguagu

SEQ ID NO: 2277029 - RNA, 19 nt, Artificial Sequence
  Description of Artificial Sequence: Synthetic oligonucleotide
aggccauggucagcauuca

SEQ ID NO: 2277030 - RNA, 19 nt, Artificial Sequence
  Description of Artificial Sequence: Synthetic oligonucleotide
aggucacacucuacuucgu

SEQ ID NO: 2277031 - RNA, 19 nt, Artificial Sequence
  Description of Artificial Sequence: Synthetic oligonucleotide
gggagacuccugccaggcc

SEQ ID NO: 2277032 - RNA, 19 nt, Artificial Sequence
  Description of Artificial Sequence: Synthetic oligonucleotide
ggccauggucagcauucac

SEQ ID NO: 2277033 - RNA, 19 nt, Artificial Sequence
  Description of Artificial Sequence: Synthetic oligonucleotide
ccauggucagcauucacau

SEQ ID NO: 2277034 - RNA, 19 nt, Artificial Sequence
  Description of Artificial Sequence: Synthetic oligonucleotide
gccgucgcucuucucugug

SEQ ID NO: 2277035 - RNA, 19 nt, Artificial Sequence
  Description of Artificial Sequence: Synthetic oligonucleotide
gugccggcgucagaacuuc

SEQ ID NO: 2277036 - RNA, 19 nt, Artificial Sequence
  Description of Artificial Sequence: Synthetic oligonucleotide
gcggaugucuggguucuac

SEQ ID NO: 2277037 - RNA, 19 nt, Artificial Sequence
  Description of Artificial Sequence: Synthetic oligonucleotide
ccgucgcucuucucugugc

SEQ ID NO: 2277038 - RNA, 19 nt, Artificial Sequence
  Description of Artificial Sequence: Synthetic oligonucleotide
gcuugacgccguuccccag

SEQ ID NO: 2277039 - RNA, 19 nt, Artificial Sequence
  Description of Artificial Sequence: Synthetic oligonucleotide
gucagaacuucaggggaau

SEQ ID NO: 2277040 - RNA, 19 nt, Artificial Sequence
  Description of Artificial Sequence: Synthetic oligonucleotide
gcgcauucccuaggguucc

SEQ ID NO: 2277041 - RNA, 19 nt, Artificial Sequence
  Description of Artificial Sequence: Synthetic oligonucleotide
ggguacgcagcuugcagau

SEQ ID NO: 2277042 - RNA, 19 nt, Artificial Sequence
  Description of Artificial Sequence: Synthetic oligonucleotide
caagugggcgcucgugggu

SEQ ID NO: 2277043 - RNA, 19 nt, Artificial Sequence
  Description of Artificial Sequence: Synthetic oligonucleotide
ccuugauaguuccaaggau

SEQ ID NO: 2277044 - RNA, 19 nt, Artificial Sequence
  Description of Artificial Sequence: Synthetic oligonucleotide
ggguuccugugugccggcg

SEQ ID NO: 2277045 - RNA, 19 nt, Artificial Sequence
  Description of Artificial Sequence: Synthetic oligonucleotide
cuguugcuauacagaggcu

SEQ ID NO: 2277046 - RNA, 19 nt, Artificial Sequence
  Description of Artificial Sequence: Synthetic oligonucleotide
aucucggcuugacgccguu

SEQ ID NO: 2277047 - RNA, 19 nt, Artificial Sequence
  Description of Artificial Sequence: Synthetic oligonucleotide
gcgcucguggguacgcagc

SEQ ID NO: 2277048 - RNA, 19 nt, Artificial Sequence
  Description of Artificial Sequence: Synthetic oligonucleotide
gcauucccuaggguuccug

SEQ ID NO: 2277049 - RNA, 19 nt, Artificial Sequence
  Description of Artificial Sequence: Synthetic oligonucleotide
ccauggggaagugaaauau

SEQ ID NO: 2277050 - RNA, 19 nt, Artificial Sequence
  Description of Artificial Sequence: Synthetic oligonucleotide
ggcugcccagagcuuuuga

SEQ ID NO: 2277051 - RNA, 19 nt, Artificial Sequence
  Description of Artificial Sequence: Synthetic oligonucleotide
ggcuccacggaccgguggu

SEQ ID NO: 2277052 - RNA, 19 nt, Artificial Sequence
  Description of Artificial Sequence: Synthetic oligonucleotide
ggguucuacuguugcuaua

SEQ ID NO: 2277053 - RNA, 19 nt, Artificial Sequence
  Description of Artificial Sequence: Synthetic oligonucleotide
gguacgcagcuugcagauc

SEQ ID NO: 2277054 - RNA, 19 nt, Artificial Sequence
  Description of Artificial Sequence: Synthetic oligonucleotide
ggucacacucuacuucguu

SEQ ID NO: 2277055 - RNA, 19 nt, Artificial Sequence
  Description of Artificial Sequence: Synthetic oligonucleotide
caggcgcucugcaucuagu

SEQ ID NO: 2277056 - RNA, 19 nt, Artificial Sequence
  Description of Artificial Sequence: Synthetic oligonucleotide
gcccagccucauaaucaag

SEQ ID NO: 2277057 - RNA, 19 nt, Artificial Sequence
  Description of Artificial Sequence: Synthetic oligonucleotide
ccagagcuuuugagaugug

SEQ ID NO: 2277058 - RNA, 19 nt, Artificial Sequence
  Description of Artificial Sequence: Synthetic oligonucleotide
caggcgcuucaucucggcu

SEQ ID NO: 2277059 - RNA, 19 nt, Artificial Sequence
  Description of Artificial Sequence: Synthetic oligonucleotide
caucucggcuugacgccgu

SEQ ID NO: 2277060 - RNA, 19 nt, Artificial Sequence
  Description of Artificial Sequence: Synthetic oligonucleotide
ccauauugcucaggucaca

SEQ ID NO: 2277061 - RNA, 19 nt, Artificial Sequence
  Description of Artificial Sequence: Synthetic oligonucleotide
gcuccacggaccgguggug

SEQ ID NO: 2277062 - RNA, 19 nt, Artificial Sequence
  Description of Artificial Sequence: Synthetic oligonucleotide
cggugauuuccauauugcu

SEQ ID NO: 2277063 - RNA, 19 nt, Artificial Sequence
  Description of Artificial Sequence: Synthetic oligonucleotide
guaggcucucugguggcuu

SEQ ID NO: 2277064 - RNA, 19 nt, Artificial Sequence
  Description of Artificial Sequence: Synthetic oligonucleotide
cuguccccauacaggcgcu

SEQ ID NO: 2277065 - RNA, 19 nt, Artificial Sequence
  Description of Artificial Sequence: Synthetic oligonucleotide
ugcggaugucuggguucua

SEQ ID NO: 2277066 - RNA, 19 nt, Artificial Sequence
  Description of Artificial Sequence: Synthetic oligonucleotide
gcuggccuugauaguucca

SEQ ID NO: 2277067 - RNA, 19 nt, Artificial Sequence
  Description of Artificial Sequence: Synthetic oligonucleotide
ggccaugugcuggccuuga

SEQ ID NO: 2277068 - RNA, 19 nt, Artificial Sequence
  Description of Artificial Sequence: Synthetic oligonucleotide
ccguuccccaggcuucuca

SEQ ID NO: 2277069 - RNA, 19 nt, Artificial Sequence
  Description of Artificial Sequence: Synthetic oligonucleotide
ggaugcccagccucauaau

SEQ ID NO: 2277070 - RNA, 19 nt, Artificial Sequence
  Description of Artificial Sequence: Synthetic oligonucleotide
cgcuucaucucggcuugac

SEQ ID NO: 2277071 - RNA, 19 nt, Artificial Sequence
  Description of Artificial Sequence: Synthetic oligonucleotide
cguggguacgcagcuugca

SEQ ID NO: 2277072 - RNA, 19 nt, Artificial Sequence
  Description of Artificial Sequence: Synthetic oligonucleotide
gccaguauuucggcugcuu

SEQ ID NO: 2277073 - RNA, 19 nt, Artificial Sequence
  Description of Artificial Sequence: Synthetic oligonucleotide
gggcgcucguggguacgca

SEQ ID NO: 2277074 - RNA, 19 nt, Artificial Sequence
  Description of Artificial Sequence: Synthetic oligonucleotide
gccaugugcuggccuugau

SEQ ID NO: 2277075 - RNA, 19 nt, Artificial Sequence
  Description of Artificial Sequence: Synthetic oligonucleotide
ggccaguauuucggcugcu

SEQ ID NO: 2277076 - RNA, 19 nt, Artificial Sequence
  Description of Artificial Sequence: Synthetic oligonucleotide
cgcucguggguacgcagcu

SEQ ID NO: 2277077 - RNA, 19 nt, Artificial Sequence
  Description of Artificial Sequence: Synthetic oligonucleotide
gccguuccccaggcuucuc

SEQ ID NO: 2277078 - RNA, 19 nt, Artificial Sequence
  Description of Artificial Sequence: Synthetic oligonucleotide
gcgcuucaucucggcuuga

SEQ ID NO: 2277079 - RNA, 19 nt, Artificial Sequence
  Description of Artificial Sequence: Synthetic oligonucleotide
ccucggugauuuccauauu

SEQ ID NO: 2277080 - RNA, 19 nt, Artificial Sequence
  Description of Artificial Sequence: Synthetic oligonucleotide
ccacggaccgguggugguu

SEQ ID NO: 2277081 - RNA, 19 nt, Artificial Sequence
  Description of Artificial Sequence: Synthetic oligonucleotide
cgccgucgcucuucucugu

SEQ ID NO: 2277082 - RNA, 19 nt, Artificial Sequence
  Description of Artificial Sequence: Synthetic oligonucleotide
cgccaguaucuugcauaua

SEQ ID NO: 2277083 - RNA, 19 nt, Artificial Sequence
  Description of Artificial Sequence: Synthetic oligonucleotide
gcggagcuccucggugauu

SEQ ID NO: 2277084 - RNA, 19 nt, Artificial Sequence
  Description of Artificial Sequence: Synthetic oligonucleotide
cggaccgguggugguugua

SEQ ID NO: 2277085 - RNA, 19 nt, Artificial Sequence
  Description of Artificial Sequence: Synthetic oligonucleotide
aaaauuguaaagcagcuca

SEQ ID NO: 2277086 - RNA, 19 nt, Artificial Sequence
  Description of Artificial Sequence: Synthetic oligonucleotide
aagaguauugucugaagcc

SEQ ID NO: 2277087 - RNA, 19 nt, Artificial Sequence
  Description of Artificial Sequence: Synthetic oligonucleotide
aauaauugaaagucagugg

SEQ ID NO: 2277088 - RNA, 19 nt, Artificial Sequence
  Description of Artificial Sequence: Synthetic oligonucleotide
acuuuacagauauaaaugc

SEQ ID NO: 2277089 - RNA, 19 nt, Artificial Sequence
  Description of Artificial Sequence: Synthetic oligonucleotide
uguaaagcagcucagauac

SEQ ID NO: 2277090 - RNA, 19 nt, Artificial Sequence
  Description of Artificial Sequence: Synthetic oligonucleotide
aaacaucauacauuuaacg

SEQ ID NO: 2277091 - RNA, 19 nt, Artificial Sequence
  Description of Artificial Sequence: Synthetic oligonucleotide
ugcauuagaauuuaaaucu

SEQ ID NO: 2277092 - RNA, 19 nt, Artificial Sequence
  Description of Artificial Sequence: Synthetic oligonucleotide
agugaagucacauuagugg

SEQ ID NO: 2277093 - RNA, 19 nt, Artificial Sequence
  Description of Artificial Sequence: Synthetic oligonucleotide
augaaugaaacauuaguac

SEQ ID NO: 2277094 - RNA, 19 nt, Artificial Sequence
  Description of Artificial Sequence: Synthetic oligonucleotide
auuagugguacauuauucc

SEQ ID NO: 2277095 - RNA, 19 nt, Artificial Sequence
  Description of Artificial Sequence: Synthetic oligonucleotide
gaaacauuaguacacagug

SEQ ID NO: 2277096 - RNA, 19 nt, Artificial Sequence
  Description of Artificial Sequence: Synthetic oligonucleotide
agcucagauacauugaacc

SEQ ID NO: 2277097 - RNA, 19 nt, Artificial Sequence
  Description of Artificial Sequence: Synthetic oligonucleotide
aacaucauacauuuaacgu

SEQ ID NO: 2277098 - RNA, 19 nt, Artificial Sequence
  Description of Artificial Sequence: Synthetic oligonucleotide
aguaugaacaaucugaaaa

SEQ ID NO: 2277099 - RNA, 19 nt, Artificial Sequence
  Description of Artificial Sequence: Synthetic oligonucleotide
uaaaucuugagacaguagu

SEQ ID NO: 2277100 - RNA, 19 nt, Artificial Sequence
  Description of Artificial Sequence: Synthetic oligonucleotide
aaaaugaucaauaguauga

SEQ ID NO: 2277101 - RNA, 19 nt, Artificial Sequence
  Description of Artificial Sequence: Synthetic oligonucleotide
auaauugaaagucagugga

SEQ ID NO: 2277102 - RNA, 19 nt, Artificial Sequence
  Description of Artificial Sequence: Synthetic oligonucleotide
ucaauaguaugaaugaaac

SEQ ID NO: 2277103 - RNA, 19 nt, Artificial Sequence
  Description of Artificial Sequence: Synthetic oligonucleotide
aaaaguaagcucgaaauca

SEQ ID NO: 2277104 - RNA, 19 nt, Artificial Sequence
  Description of Artificial Sequence: Synthetic oligonucleotide
agccaauaaacccucaggc

SEQ ID NO: 2277105 - RNA, 19 nt, Artificial Sequence
  Description of Artificial Sequence: Synthetic oligonucleotide
uuacguauuagauuguuca

SEQ ID NO: 2277106 - RNA, 19 nt, Artificial Sequence
  Description of Artificial Sequence: Synthetic oligonucleotide
aacauuaguacacagugaa

SEQ ID NO: 2277107 - RNA, 19 nt, Artificial Sequence
  Description of Artificial Sequence: Synthetic oligonucleotide
aaucuugagacaguaguac

SEQ ID NO: 2277108 - RNA, 19 nt, Artificial Sequence
  Description of Artificial Sequence: Synthetic oligonucleotide
aaaguugacaauggaaagg

SEQ ID NO: 2277109 - RNA, 19 nt, Artificial Sequence
  Description of Artificial Sequence: Synthetic oligonucleotide
ugaacuguaggcugaaggg

SEQ ID NO: 2277110 - RNA, 19 nt, Artificial Sequence
  Description of Artificial Sequence: Synthetic oligonucleotide
uaugaaugaaacauuagua

SEQ ID NO: 2277111 - RNA, 19 nt, Artificial Sequence
  Description of Artificial Sequence: Synthetic oligonucleotide
auagcagaauauuccagcc

SEQ ID NO: 2277112 - RNA, 19 nt, Artificial Sequence
  Description of Artificial Sequence: Synthetic oligonucleotide
aaguugacaauggaaaggg

SEQ ID NO: 2277113 - RNA, 19 nt, Artificial Sequence
  Description of Artificial Sequence: Synthetic oligonucleotide
uggagagacaaaaugaaga

SEQ ID NO: 2277114 - RNA, 19 nt, Artificial Sequence
  Description of Artificial Sequence: Synthetic oligonucleotide
aauuugucacuuuacagau

SEQ ID NO: 2277115 - RNA, 19 nt, Artificial Sequence
  Description of Artificial Sequence: Synthetic oligonucleotide
aagcacuaugaagagagcc

SEQ ID NO: 2277116 - RNA, 19 nt, Artificial Sequence
  Description of Artificial Sequence: Synthetic oligonucleotide
uauuagauuguucacugga

SEQ ID NO: 2277117 - RNA, 19 nt, Artificial Sequence
  Description of Artificial Sequence: Synthetic oligonucleotide
aaaagcuuauucuuccuca

SEQ ID NO: 2277118 - RNA, 19 nt, Artificial Sequence
  Description of Artificial Sequence: Synthetic oligonucleotide
uuacagauauaaaugccag

SEQ ID NO: 2277119 - RNA, 19 nt, Artificial Sequence
  Description of Artificial Sequence: Synthetic oligonucleotide
uauagcagaauauuccagc

SEQ ID NO: 2277120 - RNA, 19 nt, Artificial Sequence
  Description of Artificial Sequence: Synthetic oligonucleotide
uccuauagcagaauauucc

SEQ ID NO: 2277121 - RNA, 19 nt, Artificial Sequence
  Description of Artificial Sequence: Synthetic oligonucleotide
ugaucaauaguaugaauga

SEQ ID NO: 2277122 - RNA, 19 nt, Artificial Sequence
  Description of Artificial Sequence: Synthetic oligonucleotide
auacauugaacccagauuu

SEQ ID NO: 2277123 - RNA, 19 nt, Artificial Sequence
  Description of Artificial Sequence: Synthetic oligonucleotide
uaauuguugccaaaguuga

SEQ ID NO: 2277124 - RNA, 19 nt, Artificial Sequence
  Description of Artificial Sequence: Synthetic oligonucleotide
uuugucacuuuacagauau

SEQ ID NO: 2277125 - RNA, 19 nt, Artificial Sequence
  Description of Artificial Sequence: Synthetic oligonucleotide
ucaguggagagacaaaaug

SEQ ID NO: 2277126 - RNA, 19 nt, Artificial Sequence
  Description of Artificial Sequence: Synthetic oligonucleotide
aagccaauaaacccucagg

SEQ ID NO: 2277127 - RNA, 19 nt, Artificial Sequence
  Description of Artificial Sequence: Synthetic oligonucleotide
uguccauccaaccugcucc

SEQ ID NO: 2277128 - RNA, 19 nt, Artificial Sequence
  Description of Artificial Sequence: Synthetic oligonucleotide
ucugaaaaugaucaauagu

SEQ ID NO: 2277129 - RNA, 19 nt, Artificial Sequence
  Description of Artificial Sequence: Synthetic oligonucleotide
ucacuuuacagauauaaau

SEQ ID NO: 2277130 - RNA, 19 nt, Artificial Sequence
  Description of Artificial Sequence: Synthetic oligonucleotide
agauauaaaugccagaaua

SEQ ID NO: 2277131 - RNA, 19 nt, Artificial Sequence
  Description of Artificial Sequence: Synthetic oligonucleotide
ucugcauuagaauuuaaau

SEQ ID NO: 2277132 - RNA, 19 nt, Artificial Sequence
  Description of Artificial Sequence: Synthetic oligonucleotide
agaauauuccagccaaaac

SEQ ID NO: 2277133 - RNA, 19 nt, Artificial Sequence
  Description of Artificial Sequence: Synthetic oligonucleotide
gaagaguauugucugaagc

SEQ ID NO: 2277134 - RNA, 19 nt, Artificial Sequence
  Description of Artificial Sequence: Synthetic oligonucleotide
guccuuacguauuagauug

SEQ ID NO: 2277135 - RNA, 19 nt, Artificial Sequence
  Description of Artificial Sequence: Synthetic oligonucleotide
uucuaaguaguccuuacgu

SEQ ID NO: 2277136 - RNA, 19 nt, Artificial Sequence
  Description of Artificial Sequence: Synthetic oligonucleotide
ucuugagacaguaguacag

SEQ ID NO: 2277137 - RNA, 19 nt, Artificial Sequence
  Description of Artificial Sequence: Synthetic oligonucleotide
gaugccacugaacuguagg

SEQ ID NO: 2277138 - RNA, 19 nt, Artificial Sequence
  Description of Artificial Sequence: Synthetic oligonucleotide
auuaguacacagugaaguc

SEQ ID NO: 2277139 - RNA, 19 nt, Artificial Sequence
  Description of Artificial Sequence: Synthetic oligonucleotide
uaagcucgaaaucaaguug

SEQ ID NO: 2277140 - RNA, 19 nt, Artificial Sequence
  Description of Artificial Sequence: Synthetic oligonucleotide
uguugaagaacaucgauuu

SEQ ID NO: 2277141 - RNA, 19 nt, Artificial Sequence
  Description of Artificial Sequence: Synthetic oligonucleotide
uacacuagcaaugauggug

SEQ ID NO: 2277142 - RNA, 19 nt, Artificial Sequence
  Description of Artificial Sequence: Synthetic oligonucleotide
ugaacaaucugaaaaugau

SEQ ID NO: 2277143 - RNA, 19 nt, Artificial Sequence
  Description of Artificial Sequence: Synthetic oligonucleotide
caucauacauuuaacguug

SEQ ID NO: 2277144 - RNA, 19 nt, Artificial Sequence
  Description of Artificial Sequence: Synthetic oligonucleotide
augaucaauaguaugaaug

SEQ ID NO: 2277145 - RNA, 19 nt, Artificial Sequence
  Description of Artificial Sequence: Synthetic oligonucleotide
cagaauaauugaaagucag

SEQ ID NO: 2277146 - RNA, 19 nt, Artificial Sequence
  Description of Artificial Sequence: Synthetic oligonucleotide
uaauugaaagucaguggag

SEQ ID NO: 2277147 - RNA, 19 nt, Artificial Sequence
  Description of Artificial Sequence: Synthetic oligonucleotide
aaacccucaggccauuguc

SEQ ID NO: 2277148 - RNA, 19 nt, Artificial Sequence
  Description of Artificial Sequence: Synthetic oligonucleotide
ugugcaugucugauggugg

SEQ ID NO: 2277149 - RNA, 19 nt, Artificial Sequence
  Description of Artificial Sequence: Synthetic oligonucleotide
cucgaaaucaaguugaaaa

SEQ ID NO: 2277150 - RNA, 19 nt, Artificial Sequence
  Description of Artificial Sequence: Synthetic oligonucleotide
aguaggaggaucugaaaug

SEQ ID NO: 2277151 - RNA, 19 nt, Artificial Sequence
  Description of Artificial Sequence: Synthetic oligonucleotide
uuuucauuugucagaucag

SEQ ID NO: 2277152 - RNA, 19 nt, Artificial Sequence
  Description of Artificial Sequence: Synthetic oligonucleotide
uuaaaucuugagacaguag

SEQ ID NO: 2277153 - RNA, 19 nt, Artificial Sequence
  Description of Artificial Sequence: Synthetic oligonucleotide
uauuccagccaaaacacuc

SEQ ID NO: 2277154 - RNA, 19 nt, Artificial Sequence
  Description of Artificial Sequence: Synthetic oligonucleotide
ugucagaucagaauauaaa

SEQ ID NO: 2277155 - RNA, 19 nt, Artificial Sequence
  Description of Artificial Sequence: Synthetic oligonucleotide
ugaaaaugaucaauaguau

SEQ ID NO: 2277156 - RNA, 19 nt, Artificial Sequence
  Description of Artificial Sequence: Synthetic oligonucleotide
aacacucacaagcacuaug

SEQ ID NO: 2277157 - RNA, 19 nt, Artificial Sequence
  Description of Artificial Sequence: Synthetic oligonucleotide
ugaagaacaucgauuugug

SEQ ID NO: 2277158 - RNA, 19 nt, Artificial Sequence
  Description of Artificial Sequence: Synthetic oligonucleotide
aucugaaauguagaugacc

SEQ ID NO: 2277159 - RNA, 19 nt, Artificial Sequence
  Description of Artificial Sequence: Synthetic oligonucleotide
aucugaaaaugaucaauag

SEQ ID NO: 2277160 - RNA, 19 nt, Artificial Sequence
  Description of Artificial Sequence: Synthetic oligonucleotide
uuagugguacauuauucca

SEQ ID NO: 2277161 - RNA, 19 nt, Artificial Sequence
  Description of Artificial Sequence: Synthetic oligonucleotide
cugaacuguaggcugaagg

SEQ ID NO: 2277162 - RNA, 19 nt, Artificial Sequence
  Description of Artificial Sequence: Synthetic oligonucleotide
auugaaagucaguggagag

SEQ ID NO: 2277163 - RNA, 19 nt, Artificial Sequence
  Description of Artificial Sequence: Synthetic oligonucleotide
ugaaagucaguggagagac

SEQ ID NO: 2277164 - RNA, 19 nt, Artificial Sequence
  Description of Artificial Sequence: Synthetic oligonucleotide
ggaucugaaauguagauga

SEQ ID NO: 2277165 - RNA, 19 nt, Artificial Sequence
  Description of Artificial Sequence: Synthetic oligonucleotide
uaaaguacucugcauuaga

SEQ ID NO: 2277166 - RNA, 19 nt, Artificial Sequence
  Description of Artificial Sequence: Synthetic oligonucleotide
aucaagcucaucuuguuga

SEQ ID NO: 2277167 - RNA, 19 nt, Artificial Sequence
  Description of Artificial Sequence: Synthetic oligonucleotide
caaaguugacaauggaaag

SEQ ID NO: 2277168 - RNA, 19 nt, Artificial Sequence
  Description of Artificial Sequence: Synthetic oligonucleotide
aguaguacagcagugaaaa

SEQ ID NO: 2277169 - RNA, 19 nt, Artificial Sequence
  Description of Artificial Sequence: Synthetic oligonucleotide
uaguaugaaugaaacauua

SEQ ID NO: 2277170 - RNA, 19 nt, Artificial Sequence
  Description of Artificial Sequence: Synthetic oligonucleotide
caaaaugaagaguauuguc

SEQ ID NO: 2277171 - RNA, 19 nt, Artificial Sequence
  Description of Artificial Sequence: Synthetic oligonucleotide
aaguagucuccacgaaacg

SEQ ID NO: 2277172 - RNA, 19 nt, Artificial Sequence
  Description of Artificial Sequence: Synthetic oligonucleotide
uugccaaaguugacaaugg

SEQ ID NO: 2277173 - RNA, 19 nt, Artificial Sequence
  Description of Artificial Sequence: Synthetic oligonucleotide
aaugauggugccaauugug

SEQ ID NO: 2277174 - RNA, 19 nt, Artificial Sequence
  Description of Artificial Sequence: Synthetic oligonucleotide
uuaccugugugccucagac

SEQ ID NO: 2277175 - RNA, 19 nt, Artificial Sequence
  Description of Artificial Sequence: Synthetic oligonucleotide
aucgauuugugauucuuug

SEQ ID NO: 2277176 - RNA, 19 nt, Artificial Sequence
  Description of Artificial Sequence: Synthetic oligonucleotide
acaucauacauuuaacguu

SEQ ID NO: 2277177 - RNA, 19 nt, Artificial Sequence
  Description of Artificial Sequence: Synthetic oligonucleotide
uuuugaucacuucuuugac

SEQ ID NO: 2277178 - RNA, 19 nt, Artificial Sequence
  Description of Artificial Sequence: Synthetic oligonucleotide
ugaccaagggaauuuguca

SEQ ID NO: 2277179 - RNA, 19 nt, Artificial Sequence
  Description of Artificial Sequence: Synthetic oligonucleotide
agcacuaugaagagagccc

SEQ ID NO: 2277180 - RNA, 19 nt, Artificial Sequence
  Description of Artificial Sequence: Synthetic oligonucleotide
uaaaugccagaauaauuga

SEQ ID NO: 2277181 - RNA, 19 nt, Artificial Sequence
  Description of Artificial Sequence: Synthetic oligonucleotide
uaugaacaaucugaaaaug

SEQ ID NO: 2277182 - RNA, 19 nt, Artificial Sequence
  Description of Artificial Sequence: Synthetic oligonucleotide
aaugaucaauaguaugaau

SEQ ID NO: 2277183 - RNA, 19 nt, Artificial Sequence
  Description of Artificial Sequence: Synthetic oligonucleotide
uccgucgucuccuauagca

SEQ ID NO: 2277184 - RNA, 19 nt, Artificial Sequence
  Description of Artificial Sequence: Synthetic oligonucleotide
uuuuacacugucuggguaa

SEQ ID NO: 2277185 - RNA, 19 nt, Artificial Sequence
  Description of Artificial Sequence: Synthetic oligonucleotide
acagauauaaaugccagaa

SEQ ID NO: 2277186 - RNA, 19 nt, Artificial Sequence
  Description of Artificial Sequence: Synthetic oligonucleotide
ugguacauuauuccacuga

SEQ ID NO: 2277187 - RNA, 19 nt, Artificial Sequence
  Description of Artificial Sequence: Synthetic oligonucleotide
cauuagugguacauuauuc

SEQ ID NO: 2277188 - RNA, 19 nt, Artificial Sequence
  Description of Artificial Sequence: Synthetic oligonucleotide
cacuacacuagcaaugaug

SEQ ID NO: 2277189 - RNA, 19 nt, Artificial Sequence
  Description of Artificial Sequence: Synthetic oligonucleotide
agcuuauucuuccucaaga

SEQ ID NO: 2277190 - RNA, 19 nt, Artificial Sequence
  Description of Artificial Sequence: Synthetic oligonucleotide
ggagagacaaaaugaagag

SEQ ID NO: 2277191 - RNA, 19 nt, Artificial Sequence
  Description of Artificial Sequence: Synthetic oligonucleotide
uauugucugaagccaauaa

SEQ ID NO: 2277192 - RNA, 19 nt, Artificial Sequence
  Description of Artificial Sequence: Synthetic oligonucleotide
accugugugccucagacca

SEQ ID NO: 2277193 - RNA, 19 nt, Artificial Sequence
  Description of Artificial Sequence: Synthetic oligonucleotide
uuuaacguugacauuucuu

SEQ ID NO: 2277194 - RNA, 19 nt, Artificial Sequence
  Description of Artificial Sequence: Synthetic oligonucleotide
gguacauuauuccacugag

SEQ ID NO: 2277195 - RNA, 19 nt, Artificial Sequence
  Description of Artificial Sequence: Synthetic oligonucleotide
guaaggaucaagcucaucu

SEQ ID NO: 2277196 - RNA, 19 nt, Artificial Sequence
  Description of Artificial Sequence: Synthetic oligonucleotide
gaagccaauaaacccucag

SEQ ID NO: 2277197 - RNA, 19 nt, Artificial Sequence
  Description of Artificial Sequence: Synthetic oligonucleotide
ugugucauccuuaauuguu

SEQ ID NO: 2277198 - RNA, 19 nt, Artificial Sequence
  Description of Artificial Sequence: Synthetic oligonucleotide
auugaacccagauuuuaca

SEQ ID NO: 2277199 - RNA, 19 nt, Artificial Sequence
  Description of Artificial Sequence: Synthetic oligonucleotide
agugguacauuauuccacu

SEQ ID NO: 2277200 - RNA, 19 nt, Artificial Sequence
  Description of Artificial Sequence: Synthetic oligonucleotide
ucauuugucagaucagaau

SEQ ID NO: 2277201 - RNA, 19 nt, Artificial Sequence
  Description of Artificial Sequence: Synthetic oligonucleotide
uuguugaagaacaucgauu

SEQ ID NO: 2277202 - RNA, 19 nt, Artificial Sequence
  Description of Artificial Sequence: Synthetic oligonucleotide
guugacauuucuucuuacc

SEQ ID NO: 2277203 - RNA, 19 nt, Artificial Sequence
  Description of Artificial Sequence: Synthetic oligonucleotide
cuauagcagaauauuccag

SEQ ID NO: 2277204 - RNA, 19 nt, Artificial Sequence
  Description of Artificial Sequence: Synthetic oligonucleotide
uagugguacauuauuccac

SEQ ID NO: 2277205 - RNA, 19 nt, Artificial Sequence
  Description of Artificial Sequence: Synthetic oligonucleotide
agcagaauauuccagccaa

SEQ ID NO: 2277206 - RNA, 19 nt, Artificial Sequence
  Description of Artificial Sequence: Synthetic oligonucleotide
ucacauuagugguacauua

SEQ ID NO: 2277207 - RNA, 19 nt, Artificial Sequence
  Description of Artificial Sequence: Synthetic oligonucleotide
uuagauuguucacuggauu

SEQ ID NO: 2277208 - RNA, 19 nt, Artificial Sequence
  Description of Artificial Sequence: Synthetic oligonucleotide
gucagaucagaauauaaaa

SEQ ID NO: 2277209 - RNA, 19 nt, Artificial Sequence
  Description of Artificial Sequence: Synthetic oligonucleotide
aaguacucugcauuagaau

SEQ ID NO: 2277210 - RNA, 19 nt, Artificial Sequence
  Description of Artificial Sequence: Synthetic oligonucleotide
gaccaagggaauuugucac

SEQ ID NO: 2277211 - RNA, 19 nt, Artificial Sequence
  Description of Artificial Sequence: Synthetic oligonucleotide
cuucuaaguaguccuuacg

SEQ ID NO: 2277212 - RNA, 19 nt, Artificial Sequence
  Description of Artificial Sequence: Synthetic oligonucleotide
guaugaaugaaacauuagu

SEQ ID NO: 2277213 - RNA, 19 nt, Artificial Sequence
  Description of Artificial Sequence: Synthetic oligonucleotide
uaguccuuacguauuagau

SEQ ID NO: 2277214 - RNA, 19 nt, Artificial Sequence
  Description of Artificial Sequence: Synthetic oligonucleotide
auuguugccaaaguugaca

SEQ ID NO: 2277215 - RNA, 19 nt, Artificial Sequence
  Description of Artificial Sequence: Synthetic oligonucleotide
cuccacacggacuuggaag

SEQ ID NO: 2277216 - RNA, 19 nt, Artificial Sequence
  Description of Artificial Sequence: Synthetic oligonucleotide
auugucugaagccaauaaa

SEQ ID NO: 2277217 - RNA, 19 nt, Artificial Sequence
  Description of Artificial Sequence: Synthetic oligonucleotide
gaucaagcucaucuuguug

SEQ ID NO: 2277218 - RNA, 19 nt, Artificial Sequence
  Description of Artificial Sequence: Synthetic oligonucleotide
aagcucgaaaucaaguuga

SEQ ID NO: 2277219 - RNA, 19 nt, Artificial Sequence
  Description of Artificial Sequence: Synthetic oligonucleotide
uugucagaucagaauauaa

SEQ ID NO: 2277220 - RNA, 19 nt, Artificial Sequence
  Description of Artificial Sequence: Synthetic oligonucleotide
uugaccaagggaauuuguc

SEQ ID NO: 2277221 - RNA, 19 nt, Artificial Sequence
  Description of Artificial Sequence: Synthetic oligonucleotide
ugugccucagaccaauaaa

SEQ ID NO: 2277222 - RNA, 19 nt, Artificial Sequence
  Description of Artificial Sequence: Synthetic oligonucleotide
acaaaaugaagaguauugu

SEQ ID NO: 2277223 - RNA, 19 nt, Artificial Sequence
  Description of Artificial Sequence: Synthetic oligonucleotide
aauuguugccaaaguugac

SEQ ID NO: 2277224 - RNA, 19 nt, Artificial Sequence
  Description of Artificial Sequence: Synthetic oligonucleotide
ugucauccuuaauuguugc

SEQ ID NO: 2277225 - RNA, 19 nt, Artificial Sequence
  Description of Artificial Sequence: Synthetic oligonucleotide
uuuuaggucuguugcuagc

SEQ ID NO: 2277226 - RNA, 19 nt, Artificial Sequence
  Description of Artificial Sequence: Synthetic oligonucleotide
ucuaaguaguccuuacgua

SEQ ID NO: 2277227 - RNA, 19 nt, Artificial Sequence
  Description of Artificial Sequence: Synthetic oligonucleotide
ugccagaauaauugaaagu

SEQ ID NO: 2277228 - RNA, 19 nt, Artificial Sequence
  Description of Artificial Sequence: Synthetic oligonucleotide
uucuucuuaccugugugcc

SEQ ID NO: 2277229 - RNA, 19 nt, Artificial Sequence
  Description of Artificial Sequence: Synthetic oligonucleotide
ucuggguaaggaucaagcu

SEQ ID NO: 2277230 - RNA, 19 nt, Artificial Sequence
  Description of Artificial Sequence: Synthetic oligonucleotide
acuaugaagagagccccac

SEQ ID NO: 2277231 - RNA, 19 nt, Artificial Sequence
  Description of Artificial Sequence: Synthetic oligonucleotide
uugagacaguaguacagca

SEQ ID NO: 2277232 - RNA, 19 nt, Artificial Sequence
  Description of Artificial Sequence: Synthetic oligonucleotide
cauugaacccagauuuuac

SEQ ID NO: 2277233 - RNA, 19 nt, Artificial Sequence
  Description of Artificial Sequence: Synthetic oligonucleotide
uagauuguucacuggauuu

SEQ ID NO: 2277234 - RNA, 19 nt, Artificial Sequence
  Description of Artificial Sequence: Synthetic oligonucleotide
uaggucuguugcuagcucc

SEQ ID NO: 2277235 - RNA, 19 nt, Artificial Sequence
  Description of Artificial Sequence: Synthetic oligonucleotide
gaugucagcaguugaggga

SEQ ID NO: 2277236 - RNA, 19 nt, Artificial Sequence
  Description of Artificial Sequence: Synthetic oligonucleotide
cucgaugucagcaguugag

SEQ ID NO: 2277237 - RNA, 19 nt, Artificial Sequence
  Description of Artificial Sequence: Synthetic oligonucleotide
uacguauuagauuguucac

SEQ ID NO: 2277238 - RNA, 19 nt, Artificial Sequence
  Description of Artificial Sequence: Synthetic oligonucleotide
agaacaucgauuugugauu

SEQ ID NO: 2277239 - RNA, 19 nt, Artificial Sequence
  Description of Artificial Sequence: Synthetic oligonucleotide
uuugaccaagggaauuugu

SEQ ID NO: 2277240 - RNA, 19 nt, Artificial Sequence
  Description of Artificial Sequence: Synthetic oligonucleotide
uuguugccaaaguugacaa

SEQ ID NO: 2277241 - RNA, 19 nt, Artificial Sequence
  Description of Artificial Sequence: Synthetic oligonucleotide
aaaguacucugcauuagaa

SEQ ID NO: 2277242 - RNA, 19 nt, Artificial Sequence
  Description of Artificial Sequence: Synthetic oligonucleotide
uugugauucuuugugcaug

SEQ ID NO: 2277243 - RNA, 19 nt, Artificial Sequence
  Description of Artificial Sequence: Synthetic oligonucleotide
uugugcaugucugauggug

SEQ ID NO: 2277244 - RNA, 19 nt, Artificial Sequence
  Description of Artificial Sequence: Synthetic oligonucleotide
cuugagacaguaguacagc

SEQ ID NO: 2277245 - RNA, 19 nt, Artificial Sequence
  Description of Artificial Sequence: Synthetic oligonucleotide
uuguaaagcagcucagaua

SEQ ID NO: 2277246 - RNA, 19 nt, Artificial Sequence
  Description of Artificial Sequence: Synthetic oligonucleotide
cuuacguauuagauuguuc

SEQ ID NO: 2277247 - RNA, 19 nt, Artificial Sequence
  Description of Artificial Sequence: Synthetic oligonucleotide
aguaugaaugaaacauuag

SEQ ID NO: 2277248 - RNA, 19 nt, Artificial Sequence
  Description of Artificial Sequence: Synthetic oligonucleotide
uagucuccacgaaacgucc

SEQ ID NO: 2277249 - RNA, 19 nt, Artificial Sequence
  Description of Artificial Sequence: Synthetic oligonucleotide
aaacauuaguacacaguga

SEQ ID NO: 2277250 - RNA, 19 nt, Artificial Sequence
  Description of Artificial Sequence: Synthetic oligonucleotide
uugaaagucaguggagaga

SEQ ID NO: 2277251 - RNA, 19 nt, Artificial Sequence
  Description of Artificial Sequence: Synthetic oligonucleotide
ucuguugcuagcuccucga

SEQ ID NO: 2277252 - RNA, 19 nt, Artificial Sequence
  Description of Artificial Sequence: Synthetic oligonucleotide
ucauacauuuaacguugac

SEQ ID NO: 2277253 - RNA, 19 nt, Artificial Sequence
  Description of Artificial Sequence: Synthetic oligonucleotide
aucaauaguaugaaugaaa

SEQ ID NO: 2277254 - RNA, 19 nt, Artificial Sequence
  Description of Artificial Sequence: Synthetic oligonucleotide
gaacaaucugaaaaugauc

SEQ ID NO: 2277255 - RNA, 19 nt, Artificial Sequence
  Description of Artificial Sequence: Synthetic oligonucleotide
uuuaggucuguugcuagcu

SEQ ID NO: 2277256 - RNA, 19 nt, Artificial Sequence
  Description of Artificial Sequence: Synthetic oligonucleotide
ccucagaccaauaaaguac

SEQ ID NO: 2277257 - RNA, 19 nt, Artificial Sequence
  Description of Artificial Sequence: Synthetic oligonucleotide
aguaagcucgaaaucaagu

SEQ ID NO: 2277258 - RNA, 19 nt, Artificial Sequence
  Description of Artificial Sequence: Synthetic oligonucleotide
cagugaagucacauuagug

SEQ ID NO: 2277259 - RNA, 19 nt, Artificial Sequence
  Description of Artificial Sequence: Synthetic oligonucleotide
aaaguaagcucgaaaucaa

SEQ ID NO: 2277260 - RNA, 19 nt, Artificial Sequence
  Description of Artificial Sequence: Synthetic oligonucleotide
gccagaauaauugaaaguc

SEQ ID NO: 2277261 - RNA, 19 nt, Artificial Sequence
  Description of Artificial Sequence: Synthetic oligonucleotide
uaaguaguccuuacguauu

SEQ ID NO: 2277262 - RNA, 19 nt, Artificial Sequence
  Description of Artificial Sequence: Synthetic oligonucleotide
ucgauuugugauucuuugu

SEQ ID NO: 2277263 - RNA, 19 nt, Artificial Sequence
  Description of Artificial Sequence: Synthetic oligonucleotide
guaggcugaaggguggugg

SEQ ID NO: 2277264 - RNA, 19 nt, Artificial Sequence
  Description of Artificial Sequence: Synthetic oligonucleotide
aaaucuugagacaguagua

SEQ ID NO: 2277265 - RNA, 19 nt, Artificial Sequence
  Description of Artificial Sequence: Synthetic oligonucleotide
aguccuuacguauuagauu

SEQ ID NO: 2277266 - RNA, 19 nt, Artificial Sequence
  Description of Artificial Sequence: Synthetic oligonucleotide
guugcuagcuccucgaugu

SEQ ID NO: 2277267 - RNA, 19 nt, Artificial Sequence
  Description of Artificial Sequence: Synthetic oligonucleotide
gugccucagaccaauaaag

SEQ ID NO: 2277268 - RNA, 19 nt, Artificial Sequence
  Description of Artificial Sequence: Synthetic oligonucleotide
cauccaaccugcuccacac

SEQ ID NO: 2277269 - RNA, 19 nt, Artificial Sequence
  Description of Artificial Sequence: Synthetic oligonucleotide
aguagucuccacgaaacgu

SEQ ID NO: 2277270 - RNA, 19 nt, Artificial Sequence
  Description of Artificial Sequence: Synthetic oligonucleotide
ucuccuauagcagaauauu

SEQ ID NO: 2277271 - RNA, 19 nt, Artificial Sequence
  Description of Artificial Sequence: Synthetic oligonucleotide
acguauuagauuguucacu

SEQ ID NO: 2277272 - RNA, 19 nt, Artificial Sequence
  Description of Artificial Sequence: Synthetic oligonucleotide
aaguaguccuuacguauua

SEQ ID NO: 2277273 - RNA, 19 nt, Artificial Sequence
  Description of Artificial Sequence: Synthetic oligonucleotide
gauacauugaacccagauu

SEQ ID NO: 2277274 - RNA, 19 nt, Artificial Sequence
  Description of Artificial Sequence: Synthetic oligonucleotide
agggaauuugucacuuuac

SEQ ID NO: 2277275 - RNA, 19 nt, Artificial Sequence
  Description of Artificial Sequence: Synthetic oligonucleotide
auuuaacguugacauuucu

SEQ ID NO: 2277276 - RNA, 19 nt, Artificial Sequence
  Description of Artificial Sequence: Synthetic oligonucleotide
uaaacccucaggccauugu

SEQ ID NO: 2277277 - RNA, 19 nt, Artificial Sequence
  Description of Artificial Sequence: Synthetic oligonucleotide
agggaugccacugaacugu

SEQ ID NO: 2277278 - RNA, 19 nt, Artificial Sequence
  Description of Artificial Sequence: Synthetic oligonucleotide
cuccacgaaacguccgucg

SEQ ID NO: 2277279 - RNA, 19 nt, Artificial Sequence
  Description of Artificial Sequence: Synthetic oligonucleotide
uaaggaucaagcucaucuu

SEQ ID NO: 2277280 - RNA, 19 nt, Artificial Sequence
  Description of Artificial Sequence: Synthetic oligonucleotide
ugccaaaguugacaaugga

SEQ ID NO: 2277281 - RNA, 19 nt, Artificial Sequence
  Description of Artificial Sequence: Synthetic oligonucleotide
agaauaauugaaagucagu

SEQ ID NO: 2277282 - RNA, 19 nt, Artificial Sequence
  Description of Artificial Sequence: Synthetic oligonucleotide
ugauggugccaauuguguc

SEQ ID NO: 2277283 - RNA, 19 nt, Artificial Sequence
  Description of Artificial Sequence: Synthetic oligonucleotide
cauuuaacguugacauuuc

SEQ ID NO: 2277284 - RNA, 19 nt, Artificial Sequence
  Description of Artificial Sequence: Synthetic oligonucleotide
gaacaucgauuugugauuc

SEQ ID NO: 2277285 - RNA, 19 nt, Artificial Sequence
  Description of Artificial Sequence: Synthetic oligonucleotide
gucuguugcuagcuccucg

SEQ ID NO: 2277286 - RNA, 19 nt, Artificial Sequence
  Description of Artificial Sequence: Synthetic oligonucleotide
agcaguugagggaugccac

SEQ ID NO: 2277287 - RNA, 19 nt, Artificial Sequence
  Description of Artificial Sequence: Synthetic oligonucleotide
aacaucgauuugugauucu

SEQ ID NO: 2277288 - RNA, 19 nt, Artificial Sequence
  Description of Artificial Sequence: Synthetic oligonucleotide
uccacgaaacguccgucgu

SEQ ID NO: 2277289 - RNA, 19 nt, Artificial Sequence
  Description of Artificial Sequence: Synthetic oligonucleotide
gucauccuuaauuguugcc

SEQ ID NO: 2277290 - RNA, 19 nt, Artificial Sequence
  Description of Artificial Sequence: Synthetic oligonucleotide
cuaugaagagagccccacc

SEQ ID NO: 2277291 - RNA, 19 nt, Artificial Sequence
  Description of Artificial Sequence: Synthetic oligonucleotide
uuugucagaucagaauaua

SEQ ID NO: 2277292 - RNA, 19 nt, Artificial Sequence
  Description of Artificial Sequence: Synthetic oligonucleotide
uacacagugaagucacauu

SEQ ID NO: 2277293 - RNA, 19 nt, Artificial Sequence
  Description of Artificial Sequence: Synthetic oligonucleotide
gaacccagauuuuacauuu

SEQ ID NO: 2277294 - RNA, 19 nt, Artificial Sequence
  Description of Artificial Sequence: Synthetic oligonucleotide
guaguccuuacguauuaga

SEQ ID NO: 2277295 - RNA, 19 nt, Artificial Sequence
  Description of Artificial Sequence: Synthetic oligonucleotide
ucuuugaccaagggaauuu

SEQ ID NO: 2277296 - RNA, 19 nt, Artificial Sequence
  Description of Artificial Sequence: Synthetic oligonucleotide
agucaguggagagacaaaa

SEQ ID NO: 2277297 - RNA, 19 nt, Artificial Sequence
  Description of Artificial Sequence: Synthetic oligonucleotide
uuaggucuguugcuagcuc

SEQ ID NO: 2277298 - RNA, 19 nt, Artificial Sequence
  Description of Artificial Sequence: Synthetic oligonucleotide
accaagggaauuugucacu

SEQ ID NO: 2277299 - RNA, 19 nt, Artificial Sequence
  Description of Artificial Sequence: Synthetic oligonucleotide
ucaagcucaucuuguugaa

SEQ ID NO: 2277300 - RNA, 19 nt, Artificial Sequence
  Description of Artificial Sequence: Synthetic oligonucleotide
gugucauccuuaauuguug

SEQ ID NO: 2277301 - RNA, 19 nt, Artificial Sequence
  Description of Artificial Sequence: Synthetic oligonucleotide
gaucaauaguaugaaugaa

SEQ ID NO: 2277302 - RNA, 19 nt, Artificial Sequence
  Description of Artificial Sequence: Synthetic oligonucleotide
uuguccauccaaccugcuc

SEQ ID NO: 2277303 - RNA, 19 nt, Artificial Sequence
  Description of Artificial Sequence: Synthetic oligonucleotide
guagucuccacgaaacguc

SEQ ID NO: 2277304 - RNA, 19 nt, Artificial Sequence
  Description of Artificial Sequence: Synthetic oligonucleotide
ccaauaaacccucaggcca

SEQ ID NO: 2277305 - RNA, 19 nt, Artificial Sequence
  Description of Artificial Sequence: Synthetic oligonucleotide
uacauugaacccagauuuu

SEQ ID NO: 2277306 - RNA, 19 nt, Artificial Sequence
  Description of Artificial Sequence: Synthetic oligonucleotide
cuucuuaccugugugccuc

SEQ ID NO: 2277307 - RNA, 19 nt, Artificial Sequence
  Description of Artificial Sequence: Synthetic oligonucleotide
acacggacuuggaaggugg

SEQ ID NO: 2277308 - RNA, 19 nt, Artificial Sequence
  Description of Artificial Sequence: Synthetic oligonucleotide
ugccaauugugucauccuu

SEQ ID NO: 2277309 - RNA, 19 nt, Artificial Sequence
  Description of Artificial Sequence: Synthetic oligonucleotide
auuagauuguucacuggau

SEQ ID NO: 2277310 - RNA, 19 nt, Artificial Sequence
  Description of Artificial Sequence: Synthetic oligonucleotide
agucacauuagugguacau

SEQ ID NO: 2277311 - RNA, 19 nt, Artificial Sequence
  Description of Artificial Sequence: Synthetic oligonucleotide
gugaagucacauuaguggu

SEQ ID NO: 2277312 - RNA, 19 nt, Artificial Sequence
  Description of Artificial Sequence: Synthetic oligonucleotide
cucugcauuagaauuuaaa

SEQ ID NO: 2277313 - RNA, 19 nt, Artificial Sequence
  Description of Artificial Sequence: Synthetic oligonucleotide
acuguaggcugaagggugg

SEQ ID NO: 2277314 - RNA, 19 nt, Artificial Sequence
  Description of Artificial Sequence: Synthetic oligonucleotide
aguaguccuuacguauuag

SEQ ID NO: 2277315 - RNA, 19 nt, Artificial Sequence
  Description of Artificial Sequence: Synthetic oligonucleotide
augucagcaguugagggau

SEQ ID NO: 2277316 - RNA, 19 nt, Artificial Sequence
  Description of Artificial Sequence: Synthetic oligonucleotide
gagagccccacccacuaca

SEQ ID NO: 2277317 - RNA, 19 nt, Artificial Sequence
  Description of Artificial Sequence: Synthetic oligonucleotide
ugccacugaacuguaggcu

SEQ ID NO: 2277318 - RNA, 19 nt, Artificial Sequence
  Description of Artificial Sequence: Synthetic oligonucleotide
caagcacuaugaagagagc

SEQ ID NO: 2277319 - RNA, 19 nt, Artificial Sequence
  Description of Artificial Sequence: Synthetic oligonucleotide
ugguaguaggaggaucuga

SEQ ID NO: 2277320 - RNA, 19 nt, Artificial Sequence
  Description of Artificial Sequence: Synthetic oligonucleotide
cuuugaccaagggaauuug

SEQ ID NO: 2277321 - RNA, 19 nt, Artificial Sequence
  Description of Artificial Sequence: Synthetic oligonucleotide
cuuaauuguugccaaaguu

SEQ ID NO: 2277322 - RNA, 19 nt, Artificial Sequence
  Description of Artificial Sequence: Synthetic oligonucleotide
uccucgaugucagcaguug

SEQ ID NO: 2277323 - RNA, 19 nt, Artificial Sequence
  Description of Artificial Sequence: Synthetic oligonucleotide
cagccaaaacacucacaag

SEQ ID NO: 2277324 - RNA, 19 nt, Artificial Sequence
  Description of Artificial Sequence: Synthetic oligonucleotide
agagagccccacccacuac

SEQ ID NO: 2277325 - RNA, 19 nt, Artificial Sequence
  Description of Artificial Sequence: Synthetic oligonucleotide
ugucugaugguggaauaua

SEQ ID NO: 2277326 - RNA, 19 nt, Artificial Sequence
  Description of Artificial Sequence: Synthetic oligonucleotide
guaagcucgaaaucaaguu

SEQ ID NO: 2277327 - RNA, 19 nt, Artificial Sequence
  Description of Artificial Sequence: Synthetic oligonucleotide
aggaucaagcucaucuugu

SEQ ID NO: 2277328 - RNA, 19 nt, Artificial Sequence
  Description of Artificial Sequence: Synthetic oligonucleotide
uccuuacguauuagauugu

SEQ ID NO: 2277329 - RNA, 19 nt, Artificial Sequence
  Description of Artificial Sequence: Synthetic oligonucleotide
acccacuacacuagcaaug

SEQ ID NO: 2277330 - RNA, 19 nt, Artificial Sequence
  Description of Artificial Sequence: Synthetic oligonucleotide
uuacacugucuggguaagg

SEQ ID NO: 2277331 - RNA, 19 nt, Artificial Sequence
  Description of Artificial Sequence: Synthetic oligonucleotide
cucagaccaauaaaguacu

SEQ ID NO: 2277332 - RNA, 19 nt, Artificial Sequence
  Description of Artificial Sequence: Synthetic oligonucleotide
cuuggaagguggagauuug

SEQ ID NO: 2277333 - RNA, 19 nt, Artificial Sequence
  Description of Artificial Sequence: Synthetic oligonucleotide
agcucaucuuguugaagaa

SEQ ID NO: 2277334 - RNA, 19 nt, Artificial Sequence
  Description of Artificial Sequence: Synthetic oligonucleotide
ccuauagcagaauauucca

SEQ ID NO: 2277335 - RNA, 19 nt, Artificial Sequence
  Description of Artificial Sequence: Synthetic oligonucleotide
acguugacauuucuucuua

SEQ ID NO: 2277336 - RNA, 19 nt, Artificial Sequence
  Description of Artificial Sequence: Synthetic oligonucleotide
aagucacauuagugguaca

SEQ ID NO: 2277337 - RNA, 19 nt, Artificial Sequence
  Description of Artificial Sequence: Synthetic oligonucleotide
agauuguucacuggauuuu

SEQ ID NO: 2277338 - RNA, 19 nt, Artificial Sequence
  Description of Artificial Sequence: Synthetic oligonucleotide
gugguacauuauuccacug

SEQ ID NO: 2277339 - RNA, 19 nt, Artificial Sequence
  Description of Artificial Sequence: Synthetic oligonucleotide
auccaaccugcuccacacg

SEQ ID NO: 2277340 - RNA, 19 nt, Artificial Sequence
  Description of Artificial Sequence: Synthetic oligonucleotide
uuugugcaugucugauggu

SEQ ID NO: 2277341 - RNA, 19 nt, Artificial Sequence
  Description of Artificial Sequence: Synthetic oligonucleotide
aaggguggugguaguagga

SEQ ID NO: 2277342 - RNA, 19 nt, Artificial Sequence
  Description of Artificial Sequence: Synthetic oligonucleotide
acuagcaaugauggugcca

SEQ ID NO: 2277343 - RNA, 19 nt, Artificial Sequence
  Description of Artificial Sequence: Synthetic oligonucleotide
ugacaauggaaagggcaau

SEQ ID NO: 2277344 - RNA, 19 nt, Artificial Sequence
  Description of Artificial Sequence: Synthetic oligonucleotide
uucuuugaccaagggaauu

SEQ ID NO: 2277345 - RNA, 19 nt, Artificial Sequence
  Description of Artificial Sequence: Synthetic oligonucleotide
gcacuaugaagagagcccc

SEQ ID NO: 2277346 - RNA, 19 nt, Artificial Sequence
  Description of Artificial Sequence: Synthetic oligonucleotide
gagagacaaaaugaagagu

SEQ ID NO: 2277347 - RNA, 19 nt, Artificial Sequence
  Description of Artificial Sequence: Synthetic oligonucleotide
uaggaggaucugaaaugua

SEQ ID NO: 2277348 - RNA, 19 nt, Artificial Sequence
  Description of Artificial Sequence: Synthetic oligonucleotide
caagcucaucuuguugaag

SEQ ID NO: 2277349 - RNA, 19 nt, Artificial Sequence
  Description of Artificial Sequence: Synthetic oligonucleotide
uguaggcugaaggguggug

SEQ ID NO: 2277350 - RNA, 19 nt, Artificial Sequence
  Description of Artificial Sequence: Synthetic oligonucleotide
cagaauauuccagccaaaa

SEQ ID NO: 2277351 - RNA, 19 nt, Artificial Sequence
  Description of Artificial Sequence: Synthetic oligonucleotide
guaggaggaucugaaaugu

SEQ ID NO: 2277352 - RNA, 19 nt, Artificial Sequence
  Description of Artificial Sequence: Synthetic oligonucleotide
guaguaggaggaucugaaa

SEQ ID NO: 2277353 - RNA, 19 nt, Artificial Sequence
  Description of Artificial Sequence: Synthetic oligonucleotide
gucacuuuacagauauaaa

SEQ ID NO: 2277354 - RNA, 19 nt, Artificial Sequence
  Description of Artificial Sequence: Synthetic oligonucleotide
acaucgauuugugauucuu

SEQ ID NO: 2277355 - RNA, 19 nt, Artificial Sequence
  Description of Artificial Sequence: Synthetic oligonucleotide
ccagccaaaacacucacaa

SEQ ID NO: 2277356 - RNA, 19 nt, Artificial Sequence
  Description of Artificial Sequence: Synthetic oligonucleotide
auauuccagccaaaacacu

SEQ ID NO: 2277357 - RNA, 19 nt, Artificial Sequence
  Description of Artificial Sequence: Synthetic oligonucleotide
gguggagauuugcaucagc

SEQ ID NO: 2277358 - RNA, 19 nt, Artificial Sequence
  Description of Artificial Sequence: Synthetic oligonucleotide
gaguauugucugaagccaa

SEQ ID NO: 2277359 - RNA, 19 nt, Artificial Sequence
  Description of Artificial Sequence: Synthetic oligonucleotide
ugcuccacacggacuugga

SEQ ID NO: 2277360 - RNA, 19 nt, Artificial Sequence
  Description of Artificial Sequence: Synthetic oligonucleotide
ucuuaccugugugccucag

SEQ ID NO: 2277361 - RNA, 19 nt, Artificial Sequence
  Description of Artificial Sequence: Synthetic oligonucleotide
agucuccacgaaacguccg

SEQ ID NO: 2277362 - RNA, 19 nt, Artificial Sequence
  Description of Artificial Sequence: Synthetic oligonucleotide
gaaacguccgucgucuccu

SEQ ID NO: 2277363 - RNA, 19 nt, Artificial Sequence
  Description of Artificial Sequence: Synthetic oligonucleotide
acgaaacguccgucgucuc

SEQ ID NO: 2277364 - RNA, 19 nt, Artificial Sequence
  Description of Artificial Sequence: Synthetic oligonucleotide
cuggcucuucuaaguaguc

SEQ ID NO: 2277365 - RNA, 19 nt, Artificial Sequence
  Description of Artificial Sequence: Synthetic oligonucleotide
acggacuuggaagguggag

SEQ ID NO: 2277366 - RNA, 19 nt, Artificial Sequence
  Description of Artificial Sequence: Synthetic oligonucleotide
uucuuaccugugugccuca

SEQ ID NO: 2277367 - RNA, 19 nt, Artificial Sequence
  Description of Artificial Sequence: Synthetic oligonucleotide
uggugguaguaggaggauc

SEQ ID NO: 2277368 - RNA, 19 nt, Artificial Sequence
  Description of Artificial Sequence: Synthetic oligonucleotide
caguaguacagcagugaaa

SEQ ID NO: 2277369 - RNA, 19 nt, Artificial Sequence
  Description of Artificial Sequence: Synthetic oligonucleotide
auaaacccucaggccauug

SEQ ID NO: 2277370 - RNA, 19 nt, Artificial Sequence
  Description of Artificial Sequence: Synthetic oligonucleotide
aauaaacccucaggccauu

SEQ ID NO: 2277371 - RNA, 19 nt, Artificial Sequence
  Description of Artificial Sequence: Synthetic oligonucleotide
gcuagcuccucgaugucag

SEQ ID NO: 2277372 - RNA, 19 nt, Artificial Sequence
  Description of Artificial Sequence: Synthetic oligonucleotide
aucauacauuuaacguuga

SEQ ID NO: 2277373 - RNA, 19 nt, Artificial Sequence
  Description of Artificial Sequence: Synthetic oligonucleotide
aagucaguggagagacaaa

SEQ ID NO: 2277374 - RNA, 19 nt, Artificial Sequence
  Description of Artificial Sequence: Synthetic oligonucleotide
gugugccucagaccaauaa

SEQ ID NO: 2277375 - RNA, 19 nt, Artificial Sequence
  Description of Artificial Sequence: Synthetic oligonucleotide
ucuccacgaaacguccguc

SEQ ID NO: 2277376 - RNA, 19 nt, Artificial Sequence
  Description of Artificial Sequence: Synthetic oligonucleotide
cacacggacuuggaaggug

SEQ ID NO: 2277377 - RNA, 19 nt, Artificial Sequence
  Description of Artificial Sequence: Synthetic oligonucleotide
gaaauguagaugaccuuuu

SEQ ID NO: 2277378 - RNA, 19 nt, Artificial Sequence
  Description of Artificial Sequence: Synthetic oligonucleotide
aacguccgucgucuccuau

SEQ ID NO: 2277379 - RNA, 19 nt, Artificial Sequence
  Description of Artificial Sequence: Synthetic oligonucleotide
gcagcucagauacauugaa

SEQ ID NO: 2277380 - RNA, 19 nt, Artificial Sequence
  Description of Artificial Sequence: Synthetic oligonucleotide
cagaccaauaaaguacucu

SEQ ID NO: 2277381 - RNA, 19 nt, Artificial Sequence
  Description of Artificial Sequence: Synthetic oligonucleotide
uugucacuuuacagauaua

SEQ ID NO: 2277382 - RNA, 19 nt, Artificial Sequence
  Description of Artificial Sequence: Synthetic oligonucleotide
caugucugaugguggaaua

SEQ ID NO: 2277383 - RNA, 19 nt, Artificial Sequence
  Description of Artificial Sequence: Synthetic oligonucleotide
cacuaugaagagagcccca

SEQ ID NO: 2277384 - RNA, 19 nt, Artificial Sequence
  Description of Artificial Sequence: Synthetic oligonucleotide
gagacaaaaugaagaguau

SEQ ID NO: 2277385 - RNA, 19 nt, Artificial Sequence
  Description of Artificial Sequence: Synthetic oligonucleotide
ugugugccucagaccaaua

SEQ ID NO: 2277386 - RNA, 19 nt, Artificial Sequence
  Description of Artificial Sequence: Synthetic oligonucleotide
ggugguaguaggaggaucu

SEQ ID NO: 2277387 - RNA, 19 nt, Artificial Sequence
  Description of Artificial Sequence: Synthetic oligonucleotide
cacauuagugguacauuau

SEQ ID NO: 2277388 - RNA, 19 nt, Artificial Sequence
  Description of Artificial Sequence: Synthetic oligonucleotide
guauugucugaagccaaua

SEQ ID NO: 2277389 - RNA, 19 nt, Artificial Sequence
  Description of Artificial Sequence: Synthetic oligonucleotide
gugguaguaggaggaucug

SEQ ID NO: 2277390 - RNA, 19 nt, Artificial Sequence
  Description of Artificial Sequence: Synthetic oligonucleotide
aaacguccgucgucuccua

SEQ ID NO: 2277391 - RNA, 19 nt, Artificial Sequence
  Description of Artificial Sequence: Synthetic oligonucleotide
cagauauaaaugccagaau

SEQ ID NO: 2277392 - RNA, 19 nt, Artificial Sequence
  Description of Artificial Sequence: Synthetic oligonucleotide
gacaauggaaagggcaauu

SEQ ID NO: 2277393 - RNA, 19 nt, Artificial Sequence
  Description of Artificial Sequence: Synthetic oligonucleotide
auuugucacuuuacagaua

SEQ ID NO: 2277394 - RNA, 19 nt, Artificial Sequence
  Description of Artificial Sequence: Synthetic oligonucleotide
gaagagagccccacccacu

SEQ ID NO: 2277395 - RNA, 19 nt, Artificial Sequence
  Description of Artificial Sequence: Synthetic oligonucleotide
gucgucuccuauagcagaa

SEQ ID NO: 2277396 - RNA, 19 nt, Artificial Sequence
  Description of Artificial Sequence: Synthetic oligonucleotide
cacgaaacguccgucgucu

SEQ ID NO: 2277397 - RNA, 19 nt, Artificial Sequence
  Description of Artificial Sequence: Synthetic oligonucleotide
guacauuauuccacugagu

SEQ ID NO: 2277398 - RNA, 19 nt, Artificial Sequence
  Description of Artificial Sequence: Synthetic oligonucleotide
gucuccacgaaacguccgu

SEQ ID NO: 2277399 - RNA, 19 nt, Artificial Sequence
  Description of Artificial Sequence: Synthetic oligonucleotide
ccgucgucuccuauagcag

SEQ ID NO: 2277400 - RNA, 19 nt, Artificial Sequence
  Description of Artificial Sequence: Synthetic oligonucleotide
cuucuuugaccaagggaau

SEQ ID NO: 2277401 - RNA, 19 nt, Artificial Sequence
  Description of Artificial Sequence: Synthetic oligonucleotide
ucgucuccuauagcagaau

SEQ ID NO: 2277402 - RNA, 19 nt, Artificial Sequence
  Description of Artificial Sequence: Synthetic oligonucleotide
gucuccuauagcagaauau

SEQ ID NO: 2277403 - RNA, 19 nt, Artificial Sequence
  Description of Artificial Sequence: Synthetic oligonucleotide
caucgauuugugauucuuu

SEQ ID NO: 2277404 - RNA, 19 nt, Artificial Sequence
  Description of Artificial Sequence: Synthetic oligonucleotide
agcucgaaaucaaguugaa

SEQ ID NO: 2277405 - RNA, 19 nt, Artificial Sequence
  Description of Artificial Sequence: Synthetic oligonucleotide
cgaaacguccgucgucucc

SEQ ID NO: 2277406 - RNA, 19 nt, Artificial Sequence
  Description of Artificial Sequence: Synthetic oligonucleotide
guccgucgucuccuauagc

SEQ ID NO: 2277407 - RNA, 19 nt, Artificial Sequence
  Description of Artificial Sequence: Synthetic oligonucleotide
auuguccauccaaccugcu

SEQ ID NO: 2277408 - RNA, 19 nt, Artificial Sequence
  Description of Artificial Sequence: Synthetic oligonucleotide
uccauccaaccugcuccac

SEQ ID NO: 2277409 - RNA, 19 nt, Artificial Sequence
  Description of Artificial Sequence: Synthetic oligonucleotide
cacggacuuggaaggugga

SEQ ID NO: 2277410 - RNA, 19 nt, Artificial Sequence
  Description of Artificial Sequence: Synthetic oligonucleotide
cguugacauuucuucuuac

SEQ ID NO: 2277411 - RNA, 19 nt, Artificial Sequence
  Description of Artificial Sequence: Synthetic oligonucleotide
gccaauugugucauccuua

SEQ ID NO: 2277412 - RNA, 19 nt, Artificial Sequence
  Description of Artificial Sequence: Synthetic oligonucleotide
ggaugccacugaacuguag

SEQ ID NO: 2277413 - RNA, 19 nt, Artificial Sequence
  Description of Artificial Sequence: Synthetic oligonucleotide
gucaguggagagacaaaau

SEQ ID NO: 2277414 - RNA, 19 nt, Artificial Sequence
  Description of Artificial Sequence: Synthetic oligonucleotide
gguaaggaucaagcucauc

SEQ ID NO: 2277415 - RNA, 19 nt, Artificial Sequence
  Description of Artificial Sequence: Synthetic oligonucleotide
ccacgaaacguccgucguc

SEQ ID NO: 2277416 - RNA, 19 nt, Artificial Sequence
  Description of Artificial Sequence: Synthetic oligonucleotide
ggaucaagcucaucuuguu

SEQ ID NO: 2277417 - RNA, 19 nt, Artificial Sequence
  Description of Artificial Sequence: Synthetic oligonucleotide
ccauccaaccugcuccaca

SEQ ID NO: 2277418 - RNA, 19 nt, Artificial Sequence
  Description of Artificial Sequence: Synthetic oligonucleotide
gcucgaaaucaaguugaaa

SEQ ID NO: 2277419 - RNA, 19 nt, Artificial Sequence
  Description of Artificial Sequence: Synthetic oligonucleotide
uggugccaauugugucauc

SEQ ID NO: 2277420 - RNA, 19 nt, Artificial Sequence
  Description of Artificial Sequence: Synthetic oligonucleotide
cgucgucuccuauagcaga

SEQ ID NO: 2277421 - RNA, 19 nt, Artificial Sequence
  Description of Artificial Sequence: Synthetic oligonucleotide
ccucgaugucagcaguuga

SEQ ID NO: 2277422 - RNA, 19 nt, Artificial Sequence
  Description of Artificial Sequence: Synthetic oligonucleotide
aggcugaagggugguggua

SEQ ID NO: 2277423 - RNA, 19 nt, Artificial Sequence
  Description of Artificial Sequence: Synthetic oligonucleotide
cacugaacuguaggcugaa

SEQ ID NO: 2277424 - RNA, 19 nt, Artificial Sequence
  Description of Artificial Sequence: Synthetic oligonucleotide
caagggaauuugucacuuu

SEQ ID NO: 2277425 - RNA, 19 nt, Artificial Sequence
  Description of Artificial Sequence: Synthetic oligonucleotide
cggacuuggaagguggaga

SEQ ID NO: 2277426 - RNA, 19 nt, Artificial Sequence
  Description of Artificial Sequence: Synthetic oligonucleotide
caauugugucauccuuaau

SEQ ID NO: 2277427 - RNA, 19 nt, Artificial Sequence
  Description of Artificial Sequence: Synthetic oligonucleotide
cccacccacuacacuagca

SEQ ID NO: 2277428 - RNA, 19 nt, Artificial Sequence
  Description of Artificial Sequence: Synthetic oligonucleotide
cugugugccucagaccaau

SEQ ID NO: 2277429 - RNA, 19 nt, Artificial Sequence
  Description of Artificial Sequence: Synthetic oligonucleotide
gacuuggaagguggagauu

SEQ ID NO: 2277430 - RNA, 19 nt, Artificial Sequence
  Description of Artificial Sequence: Synthetic oligonucleotide
cuguugcuagcuccucgau

SEQ ID NO: 2277431 - RNA, 19 nt, Artificial Sequence
  Description of Artificial Sequence: Synthetic oligonucleotide
ccugugugccucagaccaa

SEQ ID NO: 2277432 - RNA, 19 nt, Artificial Sequence
  Description of Artificial Sequence: Synthetic oligonucleotide
ccuuacguauuagauuguu

SEQ ID NO: 2277433 - RNA, 19 nt, Artificial Sequence
  Description of Artificial Sequence: Synthetic oligonucleotide
ccaagggaauuugucacuu

SEQ ID NO: 2277434 - RNA, 19 nt, Artificial Sequence
  Description of Artificial Sequence: Synthetic oligonucleotide
ccacuacacuagcaaugau

SEQ ID NO: 2277435 - RNA, 19 nt, Artificial Sequence
  Description of Artificial Sequence: Synthetic oligonucleotide
ccacacggacuuggaaggu

SEQ ID NO: 2277436 - RNA, 19 nt, Artificial Sequence
  Description of Artificial Sequence: Synthetic oligonucleotide
auuaauuagagauuugagg

SEQ ID NO: 2277437 - RNA, 19 nt, Artificial Sequence
  Description of Artificial Sequence: Synthetic oligonucleotide
ucuugcuuaagcaagaugc

SEQ ID NO: 2277438 - RNA, 19 nt, Artificial Sequence
  Description of Artificial Sequence: Synthetic oligonucleotide
uuuuaaguaaagaaaaccu

SEQ ID NO: 2277439 - RNA, 19 nt, Artificial Sequence
  Description of Artificial Sequence: Synthetic oligonucleotide
gauaucuaguuucagaucc

SEQ ID NO: 2277440 - RNA, 19 nt, Artificial Sequence
  Description of Artificial Sequence: Synthetic oligonucleotide
uguugagugaaucacagug

SEQ ID NO: 2277441 - RNA, 19 nt, Artificial Sequence
  Description of Artificial Sequence: Synthetic oligonucleotide
auuuauaaacuccauuagg

SEQ ID NO: 2277442 - RNA, 19 nt, Artificial Sequence
  Description of Artificial Sequence: Synthetic oligonucleotide
aauuaagcuuugucaaacc

SEQ ID NO: 2277443 - RNA, 19 nt, Artificial Sequence
  Description of Artificial Sequence: Synthetic oligonucleotide
uugaagaaagcaauuaagc

SEQ ID NO: 2277444 - RNA, 19 nt, Artificial Sequence
  Description of Artificial Sequence: Synthetic oligonucleotide
guaaagaaaaccuuagccc

SEQ ID NO: 2277445 - RNA, 19 nt, Artificial Sequence
  Description of Artificial Sequence: Synthetic oligonucleotide
uaaguaaagaaaaccuuag

SEQ ID NO: 2277446 - RNA, 19 nt, Artificial Sequence
  Description of Artificial Sequence: Synthetic oligonucleotide
aaaaccuuagcccucagau

SEQ ID NO: 2277447 - RNA, 19 nt, Artificial Sequence
  Description of Artificial Sequence: Synthetic oligonucleotide
aagcaauuaagcuuuguca

SEQ ID NO: 2277448 - RNA, 19 nt, Artificial Sequence
  Description of Artificial Sequence: Synthetic oligonucleotide
aauuagagauuugaggcuc

SEQ ID NO: 2277449 - RNA, 19 nt, Artificial Sequence
  Description of Artificial Sequence: Synthetic oligonucleotide
aaagauucacacuucugug

SEQ ID NO: 2277450 - RNA, 19 nt, Artificial Sequence
  Description of Artificial Sequence: Synthetic oligonucleotide
uuaaguaaagaaaaccuua

SEQ ID NO: 2277451 - RNA, 19 nt, Artificial Sequence
  Description of Artificial Sequence: Synthetic oligonucleotide
cuugaagaaagcaauuaag

SEQ ID NO: 2277452 - RNA, 19 nt, Artificial Sequence
  Description of Artificial Sequence: Synthetic oligonucleotide
guuaucugcacgaugaagg

SEQ ID NO: 2277453 - RNA, 19 nt, Artificial Sequence
  Description of Artificial Sequence: Synthetic oligonucleotide
aacaccgccauuugaagag

SEQ ID NO: 2277454 - RNA, 19 nt, Artificial Sequence
  Description of Artificial Sequence: Synthetic oligonucleotide
uauaaacuccauuagguuc

SEQ ID NO: 2277455 - RNA, 19 nt, Artificial Sequence
  Description of Artificial Sequence: Synthetic oligonucleotide
caagcuuuagauuuccugc

SEQ ID NO: 2277456 - RNA, 19 nt, Artificial Sequence
  Description of Artificial Sequence: Synthetic oligonucleotide
uacuaauccaucagaauca

SEQ ID NO: 2277457 - RNA, 19 nt, Artificial Sequence
  Description of Artificial Sequence: Synthetic oligonucleotide
uucaucaagcuuuagauuu

SEQ ID NO: 2277458 - RNA, 19 nt, Artificial Sequence
  Description of Artificial Sequence: Synthetic oligonucleotide
uuacucuugcuuaagcaag

SEQ ID NO: 2277459 - RNA, 19 nt, Artificial Sequence
  Description of Artificial Sequence: Synthetic oligonucleotide
ugugccuucaugacuaaag

SEQ ID NO: 2277460 - RNA, 19 nt, Artificial Sequence
  Description of Artificial Sequence: Synthetic oligonucleotide
uucuuaccaguguugaugg

SEQ ID NO: 2277461 - RNA, 19 nt, Artificial Sequence
  Description of Artificial Sequence: Synthetic oligonucleotide
aaugccucuguuuucuuug

SEQ ID NO: 2277462 - RNA, 19 nt, Artificial Sequence
  Description of Artificial Sequence: Synthetic oligonucleotide
uucugagcaguuuaacugg

SEQ ID NO: 2277463 - RNA, 19 nt, Artificial Sequence
  Description of Artificial Sequence: Synthetic oligonucleotide
gaugaaggaagugugcugg

SEQ ID NO: 2277464 - RNA, 19 nt, Artificial Sequence
  Description of Artificial Sequence: Synthetic oligonucleotide
ugaucucugaaccuguagc

SEQ ID NO: 2277465 - RNA, 19 nt, Artificial Sequence
  Description of Artificial Sequence: Synthetic oligonucleotide
uuuauaguuucaucaagcu

SEQ ID NO: 2277466 - RNA, 19 nt, Artificial Sequence
  Description of Artificial Sequence: Synthetic oligonucleotide
uuuaaguaaagaaaaccuu

SEQ ID NO: 2277467 - RNA, 19 nt, Artificial Sequence
  Description of Artificial Sequence: Synthetic oligonucleotide
agauucuucaaccaacugu

SEQ ID NO: 2277468 - RNA, 19 nt, Artificial Sequence
  Description of Artificial Sequence: Synthetic oligonucleotide
ucuuguacuaauccaucag

SEQ ID NO: 2277469 - RNA, 19 nt, Artificial Sequence
  Description of Artificial Sequence: Synthetic oligonucleotide
guacuaauccaucagaauc

SEQ ID NO: 2277470 - RNA, 19 nt, Artificial Sequence
  Description of Artificial Sequence: Synthetic oligonucleotide
uuuagacuucuccacuggg

SEQ ID NO: 2277471 - RNA, 19 nt, Artificial Sequence
  Description of Artificial Sequence: Synthetic oligonucleotide
uguguucaaagauucacac

SEQ ID NO: 2277472 - RNA, 19 nt, Artificial Sequence
  Description of Artificial Sequence: Synthetic oligonucleotide
aaccuuagcccucagauua

SEQ ID NO: 2277473 - RNA, 19 nt, Artificial Sequence
  Description of Artificial Sequence: Synthetic oligonucleotide
gauuaauuagagauuugag

SEQ ID NO: 2277474 - RNA, 19 nt, Artificial Sequence
  Description of Artificial Sequence: Synthetic oligonucleotide
cauuugaagagcaauccac

SEQ ID NO: 2277475 - RNA, 19 nt, Artificial Sequence
  Description of Artificial Sequence: Synthetic oligonucleotide
aauccacacugguauguac

SEQ ID NO: 2277476 - RNA, 19 nt, Artificial Sequence
  Description of Artificial Sequence: Synthetic oligonucleotide
ugagcaguuuaacugguug

SEQ ID NO: 2277477 - RNA, 19 nt, Artificial Sequence
  Description of Artificial Sequence: Synthetic oligonucleotide
aacugugugccuucaugac

SEQ ID NO: 2277478 - RNA, 19 nt, Artificial Sequence
  Description of Artificial Sequence: Synthetic oligonucleotide
ucuugaagaaagcaauuaa

SEQ ID NO: 2277479 - RNA, 19 nt, Artificial Sequence
  Description of Artificial Sequence: Synthetic oligonucleotide
uccacuuuagacuucucca

SEQ ID NO: 2277480 - RNA, 19 nt, Artificial Sequence
  Description of Artificial Sequence: Synthetic oligonucleotide
uuugcagugaucucugaac

SEQ ID NO: 2277481 - RNA, 19 nt, Artificial Sequence
  Description of Artificial Sequence: Synthetic oligonucleotide
ugauggauauaaauaauuu

SEQ ID NO: 2277482 - RNA, 19 nt, Artificial Sequence
  Description of Artificial Sequence: Synthetic oligonucleotide
aauaaacugugcuuguguu

SEQ ID NO: 2277483 - RNA, 19 nt, Artificial Sequence
  Description of Artificial Sequence: Synthetic oligonucleotide
cacuguucagaaaauaaac

SEQ ID NO: 2277484 - RNA, 19 nt, Artificial Sequence
  Description of Artificial Sequence: Synthetic oligonucleotide
agauacaguuuccagguug

SEQ ID NO: 2277485 - RNA, 19 nt, Artificial Sequence
  Description of Artificial Sequence: Synthetic oligonucleotide
gaaguuaucugcacgauga

SEQ ID NO: 2277486 - RNA, 19 nt, Artificial Sequence
  Description of Artificial Sequence: Synthetic oligonucleotide
agcaauuaagcuuugucaa

SEQ ID NO: 2277487 - RNA, 19 nt, Artificial Sequence
  Description of Artificial Sequence: Synthetic oligonucleotide
ugcuuaagcaagaugccca

SEQ ID NO: 2277488 - RNA, 19 nt, Artificial Sequence
  Description of Artificial Sequence: Synthetic oligonucleotide
gaucucugaaccuguagcc

SEQ ID NO: 2277489 - RNA, 19 nt, Artificial Sequence
  Description of Artificial Sequence: Synthetic oligonucleotide
uugagugaaucacagugcu

SEQ ID NO: 2277490 - RNA, 19 nt, Artificial Sequence
  Description of Artificial Sequence: Synthetic oligonucleotide
acaguuuccagguugcugu

SEQ ID NO: 2277491 - RNA, 19 nt, Artificial Sequence
  Description of Artificial Sequence: Synthetic oligonucleotide
ugaaucacagugcuuuaca

SEQ ID NO: 2277492 - RNA, 19 nt, Artificial Sequence
  Description of Artificial Sequence: Synthetic oligonucleotide
uucaaagauucacacuucu

SEQ ID NO: 2277493 - RNA, 19 nt, Artificial Sequence
  Description of Artificial Sequence: Synthetic oligonucleotide
uuagauuuccugcuuuuaa

SEQ ID NO: 2277494 - RNA, 19 nt, Artificial Sequence
  Description of Artificial Sequence: Synthetic oligonucleotide
augucucuugacuuaaaag

SEQ ID NO: 2277495 - RNA, 19 nt, Artificial Sequence
  Description of Artificial Sequence: Synthetic oligonucleotide
ucagauuaauuagagauuu

SEQ ID NO: 2277496 - RNA, 19 nt, Artificial Sequence
  Description of Artificial Sequence: Synthetic oligonucleotide
aaugucucuugacuuaaaa

SEQ ID NO: 2277497 - RNA, 19 nt, Artificial Sequence
  Description of Artificial Sequence: Synthetic oligonucleotide
acuaaagugucugaguucu

SEQ ID NO: 2277498 - RNA, 19 nt, Artificial Sequence
  Description of Artificial Sequence: Synthetic oligonucleotide
gauuugaggcucgaagugg

SEQ ID NO: 2277499 - RNA, 19 nt, Artificial Sequence
  Description of Artificial Sequence: Synthetic oligonucleotide
uguacaaaugucucuugac

SEQ ID NO: 2277500 - RNA, 19 nt, Artificial Sequence
  Description of Artificial Sequence: Synthetic oligonucleotide
aaccuguagccucacaaca

SEQ ID NO: 2277501 - RNA, 19 nt, Artificial Sequence
  Description of Artificial Sequence: Synthetic oligonucleotide
uuguguucaaagauucaca

SEQ ID NO: 2277502 - RNA, 19 nt, Artificial Sequence
  Description of Artificial Sequence: Synthetic oligonucleotide
ugacuaaagugucugaguu

SEQ ID NO: 2277503 - RNA, 19 nt, Artificial Sequence
  Description of Artificial Sequence: Synthetic oligonucleotide
aaagugucugaguucuugu

SEQ ID NO: 2277504 - RNA, 19 nt, Artificial Sequence
  Description of Artificial Sequence: Synthetic oligonucleotide
aaaauaaacugugcuugug

SEQ ID NO: 2277505 - RNA, 19 nt, Artificial Sequence
  Description of Artificial Sequence: Synthetic oligonucleotide
uuguacuaauccaucagaa

SEQ ID NO: 2277506 - RNA, 19 nt, Artificial Sequence
  Description of Artificial Sequence: Synthetic oligonucleotide
acugguauguacaaauguc

SEQ ID NO: 2277507 - RNA, 19 nt, Artificial Sequence
  Description of Artificial Sequence: Synthetic oligonucleotide
uuagcccucagauuaauua

SEQ ID NO: 2277508 - RNA, 19 nt, Artificial Sequence
  Description of Artificial Sequence: Synthetic oligonucleotide
uucaugacuaaagugucug

SEQ ID NO: 2277509 - RNA, 19 nt, Artificial Sequence
  Description of Artificial Sequence: Synthetic oligonucleotide
agauucacacuucugugug

SEQ ID NO: 2277510 - RNA, 19 nt, Artificial Sequence
  Description of Artificial Sequence: Synthetic oligonucleotide
uaccuguugggauaucuag

SEQ ID NO: 2277511 - RNA, 19 nt, Artificial Sequence
  Description of Artificial Sequence: Synthetic oligonucleotide
agauuugaggcucgaagug

SEQ ID NO: 2277512 - RNA, 19 nt, Artificial Sequence
  Description of Artificial Sequence: Synthetic oligonucleotide
uucaguacauuguuccuga

SEQ ID NO: 2277513 - RNA, 19 nt, Artificial Sequence
  Description of Artificial Sequence: Synthetic oligonucleotide
ugaguucuuaccaguguug

SEQ ID NO: 2277514 - RNA, 19 nt, Artificial Sequence
  Description of Artificial Sequence: Synthetic oligonucleotide
ugaucaaggagcuguuccc

SEQ ID NO: 2277515 - RNA, 19 nt, Artificial Sequence
  Description of Artificial Sequence: Synthetic oligonucleotide
cuugcuuaagcaagaugcc

SEQ ID NO: 2277516 - RNA, 19 nt, Artificial Sequence
  Description of Artificial Sequence: Synthetic oligonucleotide
uuauaaacuccauuagguu

SEQ ID NO: 2277517 - RNA, 19 nt, Artificial Sequence
  Description of Artificial Sequence: Synthetic oligonucleotide
uuuugugacagaguacucu

SEQ ID NO: 2277518 - RNA, 19 nt, Artificial Sequence
  Description of Artificial Sequence: Synthetic oligonucleotide
ucauccgaaguuaucugca

SEQ ID NO: 2277519 - RNA, 19 nt, Artificial Sequence
  Description of Artificial Sequence: Synthetic oligonucleotide
uuauaguuucaucaagcuu

SEQ ID NO: 2277520 - RNA, 19 nt, Artificial Sequence
  Description of Artificial Sequence: Synthetic oligonucleotide
uccgaaguuaucugcacga

SEQ ID NO: 2277521 - RNA, 19 nt, Artificial Sequence
  Description of Artificial Sequence: Synthetic oligonucleotide
uucuuguacuaauccauca

SEQ ID NO: 2277522 - RNA, 19 nt, Artificial Sequence
  Description of Artificial Sequence: Synthetic oligonucleotide
uuagacuucuccacugggu

SEQ ID NO: 2277523 - RNA, 19 nt, Artificial Sequence
  Description of Artificial Sequence: Synthetic oligonucleotide
ugggauaucuaguuucaga

SEQ ID NO: 2277524 - RNA, 19 nt, Artificial Sequence
  Description of Artificial Sequence: Synthetic oligonucleotide
acuuuagacuucuccacug

SEQ ID NO: 2277525 - RNA, 19 nt, Artificial Sequence
  Description of Artificial Sequence: Synthetic oligonucleotide
ugcacgaugaaggaagugu

SEQ ID NO: 2277526 - RNA, 19 nt, Artificial Sequence
  Description of Artificial Sequence: Synthetic oligonucleotide
gauucacacuucugugugg

SEQ ID NO: 2277527 - RNA, 19 nt, Artificial Sequence
  Description of Artificial Sequence: Synthetic oligonucleotide
ugguauguacaaaugucuc

SEQ ID NO: 2277528 - RNA, 19 nt, Artificial Sequence
  Description of Artificial Sequence: Synthetic oligonucleotide
uuaucugcacgaugaagga

SEQ ID NO: 2277529 - RNA, 19 nt, Artificial Sequence
  Description of Artificial Sequence: Synthetic oligonucleotide
guucuuaccaguguugaug

SEQ ID NO: 2277530 - RNA, 19 nt, Artificial Sequence
  Description of Artificial Sequence: Synthetic oligonucleotide
ugaaaggccucuuugucau

SEQ ID NO: 2277531 - RNA, 19 nt, Artificial Sequence
  Description of Artificial Sequence: Synthetic oligonucleotide
cuugacuuaaaaguucuuc

SEQ ID NO: 2277532 - RNA, 19 nt, Artificial Sequence
  Description of Artificial Sequence: Synthetic oligonucleotide
ucuuugucauuuucugagc

SEQ ID NO: 2277533 - RNA, 19 nt, Artificial Sequence
  Description of Artificial Sequence: Synthetic oligonucleotide
cacagugcuuuacagauuc

SEQ ID NO: 2277534 - RNA, 19 nt, Artificial Sequence
  Description of Artificial Sequence: Synthetic oligonucleotide
cuuuagacuucuccacugg

SEQ ID NO: 2277535 - RNA, 19 nt, Artificial Sequence
  Description of Artificial Sequence: Synthetic oligonucleotide
ugugacagaguacucugaa

SEQ ID NO: 2277536 - RNA, 19 nt, Artificial Sequence
  Description of Artificial Sequence: Synthetic oligonucleotide
uguacuaauccaucagaau

SEQ ID NO: 2277537 - RNA, 19 nt, Artificial Sequence
  Description of Artificial Sequence: Synthetic oligonucleotide
ucuccacuggguuaaugcc

SEQ ID NO: 2277538 - RNA, 19 nt, Artificial Sequence
  Description of Artificial Sequence: Synthetic oligonucleotide
caauuaagcuuugucaaac

SEQ ID NO: 2277539 - RNA, 19 nt, Artificial Sequence
  Description of Artificial Sequence: Synthetic oligonucleotide
uauguacaaaugucucuug

SEQ ID NO: 2277540 - RNA, 19 nt, Artificial Sequence
  Description of Artificial Sequence: Synthetic oligonucleotide
auccgaaguuaucugcacg

SEQ ID NO: 2277541 - RNA, 19 nt, Artificial Sequence
  Description of Artificial Sequence: Synthetic oligonucleotide
agccucacaacauucauuu

SEQ ID NO: 2277542 - RNA, 19 nt, Artificial Sequence
  Description of Artificial Sequence: Synthetic oligonucleotide
gaaggaagugugcugguuc

SEQ ID NO: 2277543 - RNA, 19 nt, Artificial Sequence
  Description of Artificial Sequence: Synthetic oligonucleotide
uucuguguggucuccugag

SEQ ID NO: 2277544 - RNA, 19 nt, Artificial Sequence
  Description of Artificial Sequence: Synthetic oligonucleotide
caugacuaaagugucugag

SEQ ID NO: 2277545 - RNA, 19 nt, Artificial Sequence
  Description of Artificial Sequence: Synthetic oligonucleotide
aucugcacgaugaaggaag

SEQ ID NO: 2277546 - RNA, 19 nt, Artificial Sequence
  Description of Artificial Sequence: Synthetic oligonucleotide
guacucugaagucucuucc

SEQ ID NO: 2277547 - RNA, 19 nt, Artificial Sequence
  Description of Artificial Sequence: Synthetic oligonucleotide
ugccuucaugacuaaagug

SEQ ID NO: 2277548 - RNA, 19 nt, Artificial Sequence
  Description of Artificial Sequence: Synthetic oligonucleotide
augacuaaagugucugagu

SEQ ID NO: 2277549 - RNA, 19 nt, Artificial Sequence
  Description of Artificial Sequence: Synthetic oligonucleotide
gaucaaggagcuguucccg

SEQ ID NO: 2277550 - RNA, 19 nt, Artificial Sequence
  Description of Artificial Sequence: Synthetic oligonucleotide
agugcuuuacagauucuuc

SEQ ID NO: 2277551 - RNA, 19 nt, Artificial Sequence
  Description of Artificial Sequence: Synthetic oligonucleotide
uccuuacucuugcuuaagc

SEQ ID NO: 2277552 - RNA, 19 nt, Artificial Sequence
  Description of Artificial Sequence: Synthetic oligonucleotide
cuaguuucagauccucuug

SEQ ID NO: 2277553 - RNA, 19 nt, Artificial Sequence
  Description of Artificial Sequence: Synthetic oligonucleotide
auguacaaaugucucuuga

SEQ ID NO: 2277554 - RNA, 19 nt, Artificial Sequence
  Description of Artificial Sequence: Synthetic oligonucleotide
gucauccgaaguuaucugc

SEQ ID NO: 2277555 - RNA, 19 nt, Artificial Sequence
  Description of Artificial Sequence: Synthetic oligonucleotide
augcccacuguucagaaaa

SEQ ID NO: 2277556 - RNA, 19 nt, Artificial Sequence
  Description of Artificial Sequence: Synthetic oligonucleotide
ucgucauccgaaguuaucu

SEQ ID NO: 2277557 - RNA, 19 nt, Artificial Sequence
  Description of Artificial Sequence: Synthetic oligonucleotide
uacucuugcuuaagcaaga

SEQ ID NO: 2277558 - RNA, 19 nt, Artificial Sequence
  Description of Artificial Sequence: Synthetic oligonucleotide
cuucaaccaacugugugcc

SEQ ID NO: 2277559 - RNA, 19 nt, Artificial Sequence
  Description of Artificial Sequence: Synthetic oligonucleotide
gauggauauaaauaauuuu

SEQ ID NO: 2277560 - RNA, 19 nt, Artificial Sequence
  Description of Artificial Sequence: Synthetic oligonucleotide
cuuacucuugcuuaagcaa

SEQ ID NO: 2277561 - RNA, 19 nt, Artificial Sequence
  Description of Artificial Sequence: Synthetic oligonucleotide
uugcuuaagcaagaugccc

SEQ ID NO: 2277562 - RNA, 19 nt, Artificial Sequence
  Description of Artificial Sequence: Synthetic oligonucleotide
gaaccuguagccucacaac

SEQ ID NO: 2277563 - RNA, 19 nt, Artificial Sequence
  Description of Artificial Sequence: Synthetic oligonucleotide
guugagugaaucacagugc

SEQ ID NO: 2277564 - RNA, 19 nt, Artificial Sequence
  Description of Artificial Sequence: Synthetic oligonucleotide
cuuguacuaauccaucaga

SEQ ID NO: 2277565 - RNA, 19 nt, Artificial Sequence
  Description of Artificial Sequence: Synthetic oligonucleotide
aagaaaaccuuagcccuca

SEQ ID NO: 2277566 - RNA, 19 nt, Artificial Sequence
  Description of Artificial Sequence: Synthetic oligonucleotide
aguuaucugcacgaugaag

SEQ ID NO: 2277567 - RNA, 19 nt, Artificial Sequence
  Description of Artificial Sequence: Synthetic oligonucleotide
uuaccaguguugauggaua

SEQ ID NO: 2277568 - RNA, 19 nt, Artificial Sequence
  Description of Artificial Sequence: Synthetic oligonucleotide
aaacggaacaccgccauuu

SEQ ID NO: 2277569 - RNA, 19 nt, Artificial Sequence
  Description of Artificial Sequence: Synthetic oligonucleotide
gugcuuuacagauucuuca

SEQ ID NO: 2277570 - RNA, 19 nt, Artificial Sequence
  Description of Artificial Sequence: Synthetic oligonucleotide
ucaucaagcuuuagauuuc

SEQ ID NO: 2277571 - RNA, 19 nt, Artificial Sequence
  Description of Artificial Sequence: Synthetic oligonucleotide
ugcaugcacacucuguuuu

SEQ ID NO: 2277572 - RNA, 19 nt, Artificial Sequence
  Description of Artificial Sequence: Synthetic oligonucleotide
gagauuugaggcucgaagu

SEQ ID NO: 2277573 - RNA, 19 nt, Artificial Sequence
  Description of Artificial Sequence: Synthetic oligonucleotide
aacggaacaccgccauuug

SEQ ID NO: 2277574 - RNA, 19 nt, Artificial Sequence
  Description of Artificial Sequence: Synthetic oligonucleotide
uccugaaaggccucuuugu

SEQ ID NO: 2277575 - RNA, 19 nt, Artificial Sequence
  Description of Artificial Sequence: Synthetic oligonucleotide
ucugagcaguuuaacuggu

SEQ ID NO: 2277576 - RNA, 19 nt, Artificial Sequence
  Description of Artificial Sequence: Synthetic oligonucleotide
ugucauaccuguugggaua

SEQ ID NO: 2277577 - RNA, 19 nt, Artificial Sequence
  Description of Artificial Sequence: Synthetic oligonucleotide
uuaaaaguuucagguuuac

SEQ ID NO: 2277578 - RNA, 19 nt, Artificial Sequence
  Description of Artificial Sequence: Synthetic oligonucleotide
aaaccuuagcccucagauu

SEQ ID NO: 2277579 - RNA, 19 nt, Artificial Sequence
  Description of Artificial Sequence: Synthetic oligonucleotide
gacuaaagugucugaguuc

SEQ ID NO: 2277580 - RNA, 19 nt, Artificial Sequence
  Description of Artificial Sequence: Synthetic oligonucleotide
ucucugaaccuguagccuc

SEQ ID NO: 2277581 - RNA, 19 nt, Artificial Sequence
  Description of Artificial Sequence: Synthetic oligonucleotide
cacgaugaaggaagugugc

SEQ ID NO: 2277582 - RNA, 19 nt, Artificial Sequence
  Description of Artificial Sequence: Synthetic oligonucleotide
agcaagaugcccacuguuc

SEQ ID NO: 2277583 - RNA, 19 nt, Artificial Sequence
  Description of Artificial Sequence: Synthetic oligonucleotide
cuuugucauuuucugagca

SEQ ID NO: 2277584 - RNA, 19 nt, Artificial Sequence
  Description of Artificial Sequence: Synthetic oligonucleotide
uccauuagguucugaaguu

SEQ ID NO: 2277585 - RNA, 19 nt, Artificial Sequence
  Description of Artificial Sequence: Synthetic oligonucleotide
uucuuuugcagcugaucaa

SEQ ID NO: 2277586 - RNA, 19 nt, Artificial Sequence
  Description of Artificial Sequence: Synthetic oligonucleotide
agcaguuuaacugguugug

SEQ ID NO: 2277587 - RNA, 19 nt, Artificial Sequence
  Description of Artificial Sequence: Synthetic oligonucleotide
agauccucuugaagaaagc

SEQ ID NO: 2277588 - RNA, 19 nt, Artificial Sequence
  Description of Artificial Sequence: Synthetic oligonucleotide
uccacuggguuaaugccuc

SEQ ID NO: 2277589 - RNA, 19 nt, Artificial Sequence
  Description of Artificial Sequence: Synthetic oligonucleotide
gauccucuugaagaaagca

SEQ ID NO: 2277590 - RNA, 19 nt, Artificial Sequence
  Description of Artificial Sequence: Synthetic oligonucleotide
uuuucgucauccgaaguua

SEQ ID NO: 2277591 - RNA, 19 nt, Artificial Sequence
  Description of Artificial Sequence: Synthetic oligonucleotide
ugguugaguucuuaccagu

SEQ ID NO: 2277592 - RNA, 19 nt, Artificial Sequence
  Description of Artificial Sequence: Synthetic oligonucleotide
gaacaccgccauuugaaga

SEQ ID NO: 2277593 - RNA, 19 nt, Artificial Sequence
  Description of Artificial Sequence: Synthetic oligonucleotide
uugcuguugagugaaucac

SEQ ID NO: 2277594 - RNA, 19 nt, Artificial Sequence
  Description of Artificial Sequence: Synthetic oligonucleotide
acuggguuaaugccucugu

SEQ ID NO: 2277595 - RNA, 19 nt, Artificial Sequence
  Description of Artificial Sequence: Synthetic oligonucleotide
ugcagugaucucugaaccu

SEQ ID NO: 2277596 - RNA, 19 nt, Artificial Sequence
  Description of Artificial Sequence: Synthetic oligonucleotide
uugugacagaguacucuga

SEQ ID NO: 2277597 - RNA, 19 nt, Artificial Sequence
  Description of Artificial Sequence: Synthetic oligonucleotide
cacacucuguuuugcagug

SEQ ID NO: 2277598 - RNA, 19 nt, Artificial Sequence
  Description of Artificial Sequence: Synthetic oligonucleotide
uggguuaaugccucuguuu

SEQ ID NO: 2277599 - RNA, 19 nt, Artificial Sequence
  Description of Artificial Sequence: Synthetic oligonucleotide
uucugaaguuccuccuuac

SEQ ID NO: 2277600 - RNA, 19 nt, Artificial Sequence
  Description of Artificial Sequence: Synthetic oligonucleotide
acgaugaaggaagugugcu

SEQ ID NO: 2277601 - RNA, 19 nt, Artificial Sequence
  Description of Artificial Sequence: Synthetic oligonucleotide
cugaaaggccucuuuguca

SEQ ID NO: 2277602 - RNA, 19 nt, Artificial Sequence
  Description of Artificial Sequence: Synthetic oligonucleotide
gaaaaccuuagcccucaga

SEQ ID NO: 2277603 - RNA, 19 nt, Artificial Sequence
  Description of Artificial Sequence: Synthetic oligonucleotide
cacaacauucauuuauaaa

SEQ ID NO: 2277604 - RNA, 19 nt, Artificial Sequence
  Description of Artificial Sequence: Synthetic oligonucleotide
ucuguuuugcagugaucuc

SEQ ID NO: 2277605 - RNA, 19 nt, Artificial Sequence
  Description of Artificial Sequence: Synthetic oligonucleotide
gaagagcaauccacacugg

SEQ ID NO: 2277606 - RNA, 19 nt, Artificial Sequence
  Description of Artificial Sequence: Synthetic oligonucleotide
uuugaggcucgaaguggca

SEQ ID NO: 2277607 - RNA, 19 nt, Artificial Sequence
  Description of Artificial Sequence: Synthetic oligonucleotide
aagugugcugguucucaau

SEQ ID NO: 2277608 - RNA, 19 nt, Artificial Sequence
  Description of Artificial Sequence: Synthetic oligonucleotide
cugguauguacaaaugucu

SEQ ID NO: 2277609 - RNA, 19 nt, Artificial Sequence
  Description of Artificial Sequence: Synthetic oligonucleotide
uaucuaguuucagauccuc

SEQ ID NO: 2277610 - RNA, 19 nt, Artificial Sequence
  Description of Artificial Sequence: Synthetic oligonucleotide
cuccauuagguucugaagu

SEQ ID NO: 2277611 - RNA, 19 nt, Artificial Sequence
  Description of Artificial Sequence: Synthetic oligonucleotide
cucucuggugucauaccug

SEQ ID NO: 2277612 - RNA, 19 nt, Artificial Sequence
  Description of Artificial Sequence: Synthetic oligonucleotide
cauccgaaguuaucugcac

SEQ ID NO: 2277613 - RNA, 19 nt, Artificial Sequence
  Description of Artificial Sequence: Synthetic oligonucleotide
agcaauccacacugguaug

SEQ ID NO: 2277614 - RNA, 19 nt, Artificial Sequence
  Description of Artificial Sequence: Synthetic oligonucleotide
uugggauaucuaguuucag

SEQ ID NO: 2277615 - RNA, 19 nt, Artificial Sequence
  Description of Artificial Sequence: Synthetic oligonucleotide
uucgucauccgaaguuauc

SEQ ID NO: 2277616 - RNA, 19 nt, Artificial Sequence
  Description of Artificial Sequence: Synthetic oligonucleotide
cuguagccucacaacauuc

SEQ ID NO: 2277617 - RNA, 19 nt, Artificial Sequence
  Description of Artificial Sequence: Synthetic oligonucleotide
gcuguugagugaaucacag

SEQ ID NO: 2277618 - RNA, 19 nt, Artificial Sequence
  Description of Artificial Sequence: Synthetic oligonucleotide
ggaacaccgccauuugaag

SEQ ID NO: 2277619 - RNA, 19 nt, Artificial Sequence
  Description of Artificial Sequence: Synthetic oligonucleotide
aaaacggaacaccgccauu

SEQ ID NO: 2277620 - RNA, 19 nt, Artificial Sequence
  Description of Artificial Sequence: Synthetic oligonucleotide
aaggagcuguucccguggu

SEQ ID NO: 2277621 - RNA, 19 nt, Artificial Sequence
  Description of Artificial Sequence: Synthetic oligonucleotide
uuuccagguugcuguugag

SEQ ID NO: 2277622 - RNA, 19 nt, Artificial Sequence
  Description of Artificial Sequence: Synthetic oligonucleotide
cucacaacauucauuuaua

SEQ ID NO: 2277623 - RNA, 19 nt, Artificial Sequence
  Description of Artificial Sequence: Synthetic oligonucleotide
gccauuugaagagcaaucc

SEQ ID NO: 2277624 - RNA, 19 nt, Artificial Sequence
  Description of Artificial Sequence: Synthetic oligonucleotide
ugaggcucgaaguggcaau

SEQ ID NO: 2277625 - RNA, 19 nt, Artificial Sequence
  Description of Artificial Sequence: Synthetic oligonucleotide
ccucagauuaauuagagau

SEQ ID NO: 2277626 - RNA, 19 nt, Artificial Sequence
  Description of Artificial Sequence: Synthetic oligonucleotide
gagugaaucacagugcuuu

SEQ ID NO: 2277627 - RNA, 19 nt, Artificial Sequence
  Description of Artificial Sequence: Synthetic oligonucleotide
uuagagauuugaggcucga

SEQ ID NO: 2277628 - RNA, 19 nt, Artificial Sequence
  Description of Artificial Sequence: Synthetic oligonucleotide
cucuguuuugcagugaucu

SEQ ID NO: 2277629 - RNA, 19 nt, Artificial Sequence
  Description of Artificial Sequence: Synthetic oligonucleotide
acaccgccauuugaagagc

SEQ ID NO: 2277630 - RNA, 19 nt, Artificial Sequence
  Description of Artificial Sequence: Synthetic oligonucleotide
uccucucuggugucauacc

SEQ ID NO: 2277631 - RNA, 19 nt, Artificial Sequence
  Description of Artificial Sequence: Synthetic oligonucleotide
uagccucacaacauucauu

SEQ ID NO: 2277632 - RNA, 19 nt, Artificial Sequence
  Description of Artificial Sequence: Synthetic oligonucleotide
gguucucaauggcagcugc

SEQ ID NO: 2277633 - RNA, 19 nt, Artificial Sequence
  Description of Artificial Sequence: Synthetic oligonucleotide
gagcaguuuaacugguugu

SEQ ID NO: 2277634 - RNA, 19 nt, Artificial Sequence
  Description of Artificial Sequence: Synthetic oligonucleotide
ggauaucuaguuucagauc

SEQ ID NO: 2277635 - RNA, 19 nt, Artificial Sequence
  Description of Artificial Sequence: Synthetic oligonucleotide
gggauaucuaguuucagau

SEQ ID NO: 2277636 - RNA, 19 nt, Artificial Sequence
  Description of Artificial Sequence: Synthetic oligonucleotide
agaaaaccuuagcccucag

SEQ ID NO: 2277637 - RNA, 19 nt, Artificial Sequence
  Description of Artificial Sequence: Synthetic oligonucleotide
ccuucaugacuaaaguguc

SEQ ID NO: 2277638 - RNA, 19 nt, Artificial Sequence
  Description of Artificial Sequence: Synthetic oligonucleotide
uaucugcacgaugaaggaa

SEQ ID NO: 2277639 - RNA, 19 nt, Artificial Sequence
  Description of Artificial Sequence: Synthetic oligonucleotide
ucuuaccaguguugaugga

SEQ ID NO: 2277640 - RNA, 19 nt, Artificial Sequence
  Description of Artificial Sequence: Synthetic oligonucleotide
acacugguauguacaaaug

SEQ ID NO: 2277641 - RNA, 19 nt, Artificial Sequence
  Description of Artificial Sequence: Synthetic oligonucleotide
ggcagcugcaugcacacuc

SEQ ID NO: 2277642 - RNA, 19 nt, Artificial Sequence
  Description of Artificial Sequence: Synthetic oligonucleotide
uugaggcucgaaguggcaa

SEQ ID NO: 2277643 - RNA, 19 nt, Artificial Sequence
  Description of Artificial Sequence: Synthetic oligonucleotide
gugaaucacagugcuuuac

SEQ ID NO: 2277644 - RNA, 19 nt, Artificial Sequence
  Description of Artificial Sequence: Synthetic oligonucleotide
acggaacaccgccauuuga

SEQ ID NO: 2277645 - RNA, 19 nt, Artificial Sequence
  Description of Artificial Sequence: Synthetic oligonucleotide
gguauguacaaaugucucu

SEQ ID NO: 2277646 - RNA, 19 nt, Artificial Sequence
  Description of Artificial Sequence: Synthetic oligonucleotide
guugaguucuuaccagugu

SEQ ID NO: 2277647 - RNA, 19 nt, Artificial Sequence
  Description of Artificial Sequence: Synthetic oligonucleotide
gguugaguucuuaccagug

SEQ ID NO: 2277648 - RNA, 19 nt, Artificial Sequence
  Description of Artificial Sequence: Synthetic oligonucleotide
aaacugugcuuguguucaa

SEQ ID NO: 2277649 - RNA, 19 nt, Artificial Sequence
  Description of Artificial Sequence: Synthetic oligonucleotide
gcagugaucucugaaccug

SEQ ID NO: 2277650 - RNA, 19 nt, Artificial Sequence
  Description of Artificial Sequence: Synthetic oligonucleotide
cucgaaguggcaaucugcu

SEQ ID NO: 2277651 - RNA, 19 nt, Artificial Sequence
  Description of Artificial Sequence: Synthetic oligonucleotide
caguuuaacugguugugcu

SEQ ID NO: 2277652 - RNA, 19 nt, Artificial Sequence
  Description of Artificial Sequence: Synthetic oligonucleotide
uggucuccugagauacagu

SEQ ID NO: 2277653 - RNA, 19 nt, Artificial Sequence
  Description of Artificial Sequence: Synthetic oligonucleotide
ggugucauaccuguuggga

SEQ ID NO: 2277654 - RNA, 19 nt, Artificial Sequence
  Description of Artificial Sequence: Synthetic oligonucleotide
cauuguuccugaaccaccu

SEQ ID NO: 2277655 - RNA, 19 nt, Artificial Sequence
  Description of Artificial Sequence: Synthetic oligonucleotide
accuguugggauaucuagu

SEQ ID NO: 2277656 - RNA, 19 nt, Artificial Sequence
  Description of Artificial Sequence: Synthetic oligonucleotide
cacugguauguacaaaugu

SEQ ID NO: 2277657 - RNA, 19 nt, Artificial Sequence
  Description of Artificial Sequence: Synthetic oligonucleotide
ucaguacauuguuccugaa

SEQ ID NO: 2277658 - RNA, 19 nt, Artificial Sequence
  Description of Artificial Sequence: Synthetic oligonucleotide
cucagauuaauuagagauu

SEQ ID NO: 2277659 - RNA, 19 nt, Artificial Sequence
  Description of Artificial Sequence: Synthetic oligonucleotide
ccuuacucuugcuuaagca

SEQ ID NO: 2277660 - RNA, 19 nt, Artificial Sequence
  Description of Artificial Sequence: Synthetic oligonucleotide
gcaguuuaacugguugugc

SEQ ID NO: 2277661 - RNA, 19 nt, Artificial Sequence
  Description of Artificial Sequence: Synthetic oligonucleotide
uuaaugccucuguuuucuu

SEQ ID NO: 2277662 - RNA, 19 nt, Artificial Sequence
  Description of Artificial Sequence: Synthetic oligonucleotide
gcaauuaagcuuugucaaa

SEQ ID NO: 2277663 - RNA, 19 nt, Artificial Sequence
  Description of Artificial Sequence: Synthetic oligonucleotide
uucaaccaacugugugccu

SEQ ID NO: 2277664 - RNA, 19 nt, Artificial Sequence
  Description of Artificial Sequence: Synthetic oligonucleotide
uaguuucaucaagcuuuag

SEQ ID NO: 2277665 - RNA, 19 nt, Artificial Sequence
  Description of Artificial Sequence: Synthetic oligonucleotide
guucccgugguugaguucu

SEQ ID NO: 2277666 - RNA, 19 nt, Artificial Sequence
  Description of Artificial Sequence: Synthetic oligonucleotide
gcacgaugaaggaagugug

SEQ ID NO: 2277667 - RNA, 19 nt, Artificial Sequence
  Description of Artificial Sequence: Synthetic oligonucleotide
gaaguggcaaucugcuuuu

SEQ ID NO: 2277668 - RNA, 19 nt, Artificial Sequence
  Description of Artificial Sequence: Synthetic oligonucleotide
ccgugguugaguucuuacc

SEQ ID NO: 2277669 - RNA, 19 nt, Artificial Sequence
  Description of Artificial Sequence: Synthetic oligonucleotide
gcucgaaguggcaaucugc

SEQ ID NO: 2277670 - RNA, 19 nt, Artificial Sequence
  Description of Artificial Sequence: Synthetic oligonucleotide
ucgaaguggcaaucugcuu

SEQ ID NO: 2277671 - RNA, 19 nt, Artificial Sequence
  Description of Artificial Sequence: Synthetic oligonucleotide
aagcuuugucaaaccaguu

SEQ ID NO: 2277672 - RNA, 19 nt, Artificial Sequence
  Description of Artificial Sequence: Synthetic oligonucleotide
cuccuuacucuugcuuaag

SEQ ID NO: 2277673 - RNA, 19 nt, Artificial Sequence
  Description of Artificial Sequence: Synthetic oligonucleotide
caauggcagcugcaugcac

SEQ ID NO: 2277674 - RNA, 19 nt, Artificial Sequence
  Description of Artificial Sequence: Synthetic oligonucleotide
gcccucagauuaauuagag

SEQ ID NO: 2277675 - RNA, 19 nt, Artificial Sequence
  Description of Artificial Sequence: Synthetic oligonucleotide
cuuaccaguguugauggau

SEQ ID NO: 2277676 - RNA, 19 nt, Artificial Sequence
  Description of Artificial Sequence: Synthetic oligonucleotide
cugaaccaccuccuugaca

SEQ ID NO: 2277677 - RNA, 19 nt, Artificial Sequence
  Description of Artificial Sequence: Synthetic oligonucleotide
ggcucgaaguggcaaucug

SEQ ID NO: 2277678 - RNA, 19 nt, Artificial Sequence
  Description of Artificial Sequence: Synthetic oligonucleotide
gaggcucgaaguggcaauc

SEQ ID NO: 2277679 - RNA, 19 nt, Artificial Sequence
  Description of Artificial Sequence: Synthetic oligonucleotide
accuguagccucacaacau

SEQ ID NO: 2277680 - RNA, 19 nt, Artificial Sequence
  Description of Artificial Sequence: Synthetic oligonucleotide
ccacuguucagaaaauaaa

SEQ ID NO: 2277681 - RNA, 19 nt, Artificial Sequence
  Description of Artificial Sequence: Synthetic oligonucleotide
acucuugcuuaagcaagau

SEQ ID NO: 2277682 - RNA, 19 nt, Artificial Sequence
  Description of Artificial Sequence: Synthetic oligonucleotide
cagguugcuguugagugaa

SEQ ID NO: 2277683 - RNA, 19 nt, Artificial Sequence
  Description of Artificial Sequence: Synthetic oligonucleotide
cacuggguuaaugccucug

SEQ ID NO: 2277684 - RNA, 19 nt, Artificial Sequence
  Description of Artificial Sequence: Synthetic oligonucleotide
cuccacuggguuaaugccu

SEQ ID NO: 2277685 - RNA, 19 nt, Artificial Sequence
  Description of Artificial Sequence: Synthetic oligonucleotide
cgugguugaguucuuacca

SEQ ID NO: 2277686 - RNA, 19 nt, Artificial Sequence
  Description of Artificial Sequence: Synthetic oligonucleotide
guagccucacaacauucau

SEQ ID NO: 2277687 - RNA, 19 nt, Artificial Sequence
  Description of Artificial Sequence: Synthetic oligonucleotide
gguugcuguugagugaauc

SEQ ID NO: 2277688 - RNA, 19 nt, Artificial Sequence
  Description of Artificial Sequence: Synthetic oligonucleotide
cauaccuguugggauaucu

SEQ ID NO: 2277689 - RNA, 19 nt, Artificial Sequence
  Description of Artificial Sequence: Synthetic oligonucleotide
agcuguucccgugguugag

SEQ ID NO: 2277690 - RNA, 19 nt, Artificial Sequence
  Description of Artificial Sequence: Synthetic oligonucleotide
guucucaauggcagcugca

SEQ ID NO: 2277691 - RNA, 19 nt, Artificial Sequence
  Description of Artificial Sequence: Synthetic oligonucleotide
cgaaguuaucugcacgaug

SEQ ID NO: 2277692 - RNA, 19 nt, Artificial Sequence
  Description of Artificial Sequence: Synthetic oligonucleotide
gaaccaccuccuugacauc

SEQ ID NO: 2277693 - RNA, 19 nt, Artificial Sequence
  Description of Artificial Sequence: Synthetic oligonucleotide
caccgccauuugaagagca

SEQ ID NO: 2277694 - RNA, 19 nt, Artificial Sequence
  Description of Artificial Sequence: Synthetic oligonucleotide
ggucuccugagauacaguu

SEQ ID NO: 2277695 - RNA, 19 nt, Artificial Sequence
  Description of Artificial Sequence: Synthetic oligonucleotide
cugcacgaugaaggaagug

SEQ ID NO: 2277696 - RNA, 19 nt, Artificial Sequence
  Description of Artificial Sequence: Synthetic oligonucleotide
aggcucgaaguggcaaucu

SEQ ID NO: 2277697 - RNA, 19 nt, Artificial Sequence
  Description of Artificial Sequence: Synthetic oligonucleotide
ccucacaacauucauuuau

SEQ ID NO: 2277698 - RNA, 19 nt, Artificial Sequence
  Description of Artificial Sequence: Synthetic oligonucleotide
ccauuagguucugaaguuc

SEQ ID NO: 2277699 - RNA, 19 nt, Artificial Sequence
  Description of Artificial Sequence: Synthetic oligonucleotide
cccgugguugaguucuuac

SEQ ID NO: 2277700 - RNA, 19 nt, Artificial Sequence
  Description of Artificial Sequence: Synthetic oligonucleotide
accaguguugauggauaua

SEQ ID NO: 2277701 - RNA, 19 nt, Artificial Sequence
  Description of Artificial Sequence: Synthetic oligonucleotide
cgucauccgaaguuaucug

SEQ ID NO: 2277702 - RNA, 19 nt, Artificial Sequence
  Description of Artificial Sequence: Synthetic oligonucleotide
cuguugagugaaucacagu

SEQ ID NO: 2277703 - RNA, 19 nt, Artificial Sequence
  Description of Artificial Sequence: Synthetic oligonucleotide
cugguugugcuguuucuuu

SEQ ID NO: 2277704 - RNA, 19 nt, Artificial Sequence
  Description of Artificial Sequence: Synthetic oligonucleotide
gcugcaugcacacucuguu

SEQ ID NO: 2277705 - RNA, 19 nt, Artificial Sequence
  Description of Artificial Sequence: Synthetic oligonucleotide
ucauaccuguugggauauc

SEQ ID NO: 2277706 - RNA, 19 nt, Artificial Sequence
  Description of Artificial Sequence: Synthetic oligonucleotide
gugcuuguguucaaagauu

SEQ ID NO: 2277707 - RNA, 19 nt, Artificial Sequence
  Description of Artificial Sequence: Synthetic oligonucleotide
gucauaccuguugggauau

SEQ ID NO: 2277708 - RNA, 19 nt, Artificial Sequence
  Description of Artificial Sequence: Synthetic oligonucleotide
cugaaccuguagccucaca

SEQ ID NO: 2277709 - RNA, 19 nt, Artificial Sequence
  Description of Artificial Sequence: Synthetic oligonucleotide
accgccauuugaagagcaa

SEQ ID NO: 2277710 - RNA, 19 nt, Artificial Sequence
  Description of Artificial Sequence: Synthetic oligonucleotide
cuuagcccucagauuaauu

SEQ ID NO: 2277711 - RNA, 19 nt, Artificial Sequence
  Description of Artificial Sequence: Synthetic oligonucleotide
cggaacaccgccauuugaa

SEQ ID NO: 2277712 - RNA, 19 nt, Artificial Sequence
  Description of Artificial Sequence: Synthetic oligonucleotide
gcaauccacacugguaugu

SEQ ID NO: 2277713 - RNA, 19 nt, Artificial Sequence
  Description of Artificial Sequence: Synthetic oligonucleotide
cuuaagcaagaugcccacu

SEQ ID NO: 2277714 - RNA, 19 nt, Artificial Sequence
  Description of Artificial Sequence: Synthetic oligonucleotide
ccugaaccaccuccuugac

SEQ ID NO: 2277715 - RNA, 19 nt, Artificial Sequence
  Description of Artificial Sequence: Synthetic oligonucleotide
ucccgugguugaguucuua

SEQ ID NO: 2277716 - RNA, 19 nt, Artificial Sequence
  Description of Artificial Sequence: Synthetic oligonucleotide
uucccgugguugaguucuu

SEQ ID NO: 2277717 - RNA, 19 nt, Artificial Sequence
  Description of Artificial Sequence: Synthetic oligonucleotide
cuggguuaaugccucuguu

SEQ ID NO: 2277718 - RNA, 19 nt, Artificial Sequence
  Description of Artificial Sequence: Synthetic oligonucleotide
cgaaguggcaaucugcuuu

SEQ ID NO: 2277719 - RNA, 19 nt, Artificial Sequence
  Description of Artificial Sequence: Synthetic oligonucleotide
cugcaugcacacucuguuu

SEQ ID NO: 2277720 - RNA, 19 nt, Artificial Sequence
  Description of Artificial Sequence: Synthetic oligonucleotide
cuguucccgugguugaguu

SEQ ID NO: 2277721 - RNA, 19 nt, Artificial Sequence
  Description of Artificial Sequence: Synthetic oligonucleotide
gucuccugagauacaguuu

SEQ ID NO: 2277722 - RNA, 19 nt, Artificial Sequence
  Description of Artificial Sequence: Synthetic oligonucleotide
cugagcaguuuaacugguu

SEQ ID NO: 2277723 - RNA, 19 nt, Artificial Sequence
  Description of Artificial Sequence: Synthetic oligonucleotide
cuaaagugucugaguucuu

SEQ ID NO: 2277724 - RNA, 19 nt, Artificial Sequence
  Description of Artificial Sequence: Synthetic oligonucleotide
gccucacaacauucauuua

SEQ ID NO: 2277725 - RNA, 19 nt, Artificial Sequence
  Description of Artificial Sequence: Synthetic oligonucleotide
gcccacuguucagaaaaua

SEQ ID NO: 2277726 - RNA, 19 nt, Artificial Sequence
  Description of Artificial Sequence: Synthetic oligonucleotide
ccuugacaucuguguccug

SEQ ID NO: 2277727 - RNA, 19 nt, Artificial Sequence
  Description of Artificial Sequence: Synthetic oligonucleotide
gcagcugcaugcacacucu

SEQ ID NO: 2277728 - RNA, 19 nt, Artificial Sequence
  Description of Artificial Sequence: Synthetic oligonucleotide
ccuguagccucacaacauu

SEQ ID NO: 2277729 - RNA, 19 nt, Artificial Sequence
  Description of Artificial Sequence: Synthetic oligonucleotide
gcuguucccgugguugagu

SEQ ID NO: 2277730 - RNA, 19 nt, Artificial Sequence
  Description of Artificial Sequence: Synthetic oligonucleotide
ccacacugguauguacaaa

SEQ ID NO: 2277731 - RNA, 19 nt, Artificial Sequence
  Description of Artificial Sequence: Synthetic oligonucleotide
guguccugaaaggccucuu

SEQ ID NO: 2277732 - RNA, 19 nt, Artificial Sequence
  Description of Artificial Sequence: Synthetic oligonucleotide
ccgaaguuaucugcacgau

SEQ ID NO: 2277733 - RNA, 19 nt, Artificial Sequence
  Description of Artificial Sequence: Synthetic oligonucleotide
ccuuagcccucagauuaau

SEQ ID NO: 2277734 - RNA, 19 nt, Artificial Sequence
  Description of Artificial Sequence: Synthetic oligonucleotide
aacugguccacaaagagcc

SEQ ID NO: 2277735 - RNA, 19 nt, Artificial Sequence
  Description of Artificial Sequence: Synthetic oligonucleotide
uccaaaaugauuccagugg

SEQ ID NO: 2277736 - RNA, 19 nt, Artificial Sequence
  Description of Artificial Sequence: Synthetic oligonucleotide
auuauguuuagagaggacc

SEQ ID NO: 2277737 - RNA, 19 nt, Artificial Sequence
  Description of Artificial Sequence: Synthetic oligonucleotide
auagugaaagagcugauac

SEQ ID NO: 2277738 - RNA, 19 nt, Artificial Sequence
  Description of Artificial Sequence: Synthetic oligonucleotide
uucauaauggccauuaaac

SEQ ID NO: 2277739 - RNA, 19 nt, Artificial Sequence
  Description of Artificial Sequence: Synthetic oligonucleotide
uuuacuaugauaggcagag

SEQ ID NO: 2277740 - RNA, 19 nt, Artificial Sequence
  Description of Artificial Sequence: Synthetic oligonucleotide
ucaacugcagagcagacca

SEQ ID NO: 2277741 - RNA, 19 nt, Artificial Sequence
  Description of Artificial Sequence: Synthetic oligonucleotide
agggauuuuacuaugauag

SEQ ID NO: 2277742 - RNA, 19 nt, Artificial Sequence
  Description of Artificial Sequence: Synthetic oligonucleotide
uuauguuuagagaggaccc

SEQ ID NO: 2277743 - RNA, 19 nt, Artificial Sequence
  Description of Artificial Sequence: Synthetic oligonucleotide
uucagauagugaaagagcu

SEQ ID NO: 2277744 - RNA, 19 nt, Artificial Sequence
  Description of Artificial Sequence: Synthetic oligonucleotide
agaucugcaagcugggacc

SEQ ID NO: 2277745 - RNA, 19 nt, Artificial Sequence
  Description of Artificial Sequence: Synthetic oligonucleotide
aacacucguccuuuugucc

SEQ ID NO: 2277746 - RNA, 19 nt, Artificial Sequence
  Description of Artificial Sequence: Synthetic oligonucleotide
uguacccagauccaaaaug

SEQ ID NO: 2277747 - RNA, 19 nt, Artificial Sequence
  Description of Artificial Sequence: Synthetic oligonucleotide
uucucuaccauauccaucu

SEQ ID NO: 2277748 - RNA, 19 nt, Artificial Sequence
  Description of Artificial Sequence: Synthetic oligonucleotide
agcugauacaacugcaagc

SEQ ID NO: 2277749 - RNA, 19 nt, Artificial Sequence
  Description of Artificial Sequence: Synthetic oligonucleotide
ugaaagagcugauacaacu

SEQ ID NO: 2277750 - RNA, 19 nt, Artificial Sequence
  Description of Artificial Sequence: Synthetic oligonucleotide
ucuccgugaaguaaagagg

SEQ ID NO: 2277751 - RNA, 19 nt, Artificial Sequence
  Description of Artificial Sequence: Synthetic oligonucleotide
uuggaguucacuuucacaa

SEQ ID NO: 2277752 - RNA, 19 nt, Artificial Sequence
  Description of Artificial Sequence: Synthetic oligonucleotide
gacccaaucauucugccag

SEQ ID NO: 2277753 - RNA, 19 nt, Artificial Sequence
  Description of Artificial Sequence: Synthetic oligonucleotide
aguaaaaggagcuacugaa

SEQ ID NO: 2277754 - RNA, 19 nt, Artificial Sequence
  Description of Artificial Sequence: Synthetic oligonucleotide
uaccauauccaucuggggc

SEQ ID NO: 2277755 - RNA, 19 nt, Artificial Sequence
  Description of Artificial Sequence: Synthetic oligonucleotide
auuuuacuaugauaggcag

SEQ ID NO: 2277756 - RNA, 19 nt, Artificial Sequence
  Description of Artificial Sequence: Synthetic oligonucleotide
aaugcuccaucacuagcac

SEQ ID NO: 2277757 - RNA, 19 nt, Artificial Sequence
  Description of Artificial Sequence: Synthetic oligonucleotide
uagaaugugacccaaucau

SEQ ID NO: 2277758 - RNA, 19 nt, Artificial Sequence
  Description of Artificial Sequence: Synthetic oligonucleotide
ucaggaaucuucaacugca

SEQ ID NO: 2277759 - RNA, 19 nt, Artificial Sequence
  Description of Artificial Sequence: Synthetic oligonucleotide
aaacacucguccuuuuguc

SEQ ID NO: 2277760 - RNA, 19 nt, Artificial Sequence
  Description of Artificial Sequence: Synthetic oligonucleotide
cuccgugaaguaaagaggg

SEQ ID NO: 2277761 - RNA, 19 nt, Artificial Sequence
  Description of Artificial Sequence: Synthetic oligonucleotide
aucacuagcacgcucccac

SEQ ID NO: 2277762 - RNA, 19 nt, Artificial Sequence
  Description of Artificial Sequence: Synthetic oligonucleotide
uuccgcauuauguuuagag

SEQ ID NO: 2277763 - RNA, 19 nt, Artificial Sequence
  Description of Artificial Sequence: Synthetic oligonucleotide
ucaaacauucuucuugccu

SEQ ID NO: 2277764 - RNA, 19 nt, Artificial Sequence
  Description of Artificial Sequence: Synthetic oligonucleotide
ucauaauggccauuaaacu

SEQ ID NO: 2277765 - RNA, 19 nt, Artificial Sequence
  Description of Artificial Sequence: Synthetic oligonucleotide
uacuaugauaggcagagua

SEQ ID NO: 2277766 - RNA, 19 nt, Artificial Sequence
  Description of Artificial Sequence: Synthetic oligonucleotide
auaccgcauguccaaaugc

SEQ ID NO: 2277767 - RNA, 19 nt, Artificial Sequence
  Description of Artificial Sequence: Synthetic oligonucleotide
gucuccgugaaguaaagag

SEQ ID NO: 2277768 - RNA, 19 nt, Artificial Sequence
  Description of Artificial Sequence: Synthetic oligonucleotide
cuggcauagaaugugaccc

SEQ ID NO: 2277769 - RNA, 19 nt, Artificial Sequence
  Description of Artificial Sequence: Synthetic oligonucleotide
aaugauuccagugguucag

SEQ ID NO: 2277770 - RNA, 19 nt, Artificial Sequence
  Description of Artificial Sequence: Synthetic oligonucleotide
cagaucauggaauagguca

SEQ ID NO: 2277771 - RNA, 19 nt, Artificial Sequence
  Description of Artificial Sequence: Synthetic oligonucleotide
uuuagggauuuuacuauga

SEQ ID NO: 2277772 - RNA, 19 nt, Artificial Sequence
  Description of Artificial Sequence: Synthetic oligonucleotide
aaguaaagagggcacaauu

SEQ ID NO: 2277773 - RNA, 19 nt, Artificial Sequence
  Description of Artificial Sequence: Synthetic oligonucleotide
gauuuuacuaugauaggca

SEQ ID NO: 2277774 - RNA, 19 nt, Artificial Sequence
  Description of Artificial Sequence: Synthetic oligonucleotide
accacaucaaauccaaacu

SEQ ID NO: 2277775 - RNA, 19 nt, Artificial Sequence
  Description of Artificial Sequence: Synthetic oligonucleotide
agaggaaucuucugcuacg

SEQ ID NO: 2277776 - RNA, 19 nt, Artificial Sequence
  Description of Artificial Sequence: Synthetic oligonucleotide
uccacaacaugucaccaca

SEQ ID NO: 2277777 - RNA, 19 nt, Artificial Sequence
  Description of Artificial Sequence: Synthetic oligonucleotide
aaaugcuccaucacuagca

SEQ ID NO: 2277778 - RNA, 19 nt, Artificial Sequence
  Description of Artificial Sequence: Synthetic oligonucleotide
auagaaugugacccaauca

SEQ ID NO: 2277779 - RNA, 19 nt, Artificial Sequence
  Description of Artificial Sequence: Synthetic oligonucleotide
guagaaggaagcuggauca

SEQ ID NO: 2277780 - RNA, 19 nt, Artificial Sequence
  Description of Artificial Sequence: Synthetic oligonucleotide
aggucaggaaucuucaacu

SEQ ID NO: 2277781 - RNA, 19 nt, Artificial Sequence
  Description of Artificial Sequence: Synthetic oligonucleotide
gaaucuucugcuacguucc

SEQ ID NO: 2277782 - RNA, 19 nt, Artificial Sequence
  Description of Artificial Sequence: Synthetic oligonucleotide
uucauuugcugagauuccg

SEQ ID NO: 2277783 - RNA, 19 nt, Artificial Sequence
  Description of Artificial Sequence: Synthetic oligonucleotide
auuaaacuugccaucucac

SEQ ID NO: 2277784 - RNA, 19 nt, Artificial Sequence
  Description of Artificial Sequence: Synthetic oligonucleotide
auugccagcucauauucug

SEQ ID NO: 2277785 - RNA, 19 nt, Artificial Sequence
  Description of Artificial Sequence: Synthetic oligonucleotide
gaaucuucaacugcagagc

SEQ ID NO: 2277786 - RNA, 19 nt, Artificial Sequence
  Description of Artificial Sequence: Synthetic oligonucleotide
gguacuuucacugugucug

SEQ ID NO: 2277787 - RNA, 19 nt, Artificial Sequence
  Description of Artificial Sequence: Synthetic oligonucleotide
cagaccacagcucaagagc

SEQ ID NO: 2277788 - RNA, 19 nt, Artificial Sequence
  Description of Artificial Sequence: Synthetic oligonucleotide
guaaagagggcacaauuuc

SEQ ID NO: 2277789 - RNA, 19 nt, Artificial Sequence
  Description of Artificial Sequence: Synthetic oligonucleotide
ucuucaacugcagagcaga

SEQ ID NO: 2277790 - RNA, 19 nt, Artificial Sequence
  Description of Artificial Sequence: Synthetic oligonucleotide
uccagaucauggaauaggu

SEQ ID NO: 2277791 - RNA, 19 nt, Artificial Sequence
  Description of Artificial Sequence: Synthetic oligonucleotide
ugauacaacugcaagcguu

SEQ ID NO: 2277792 - RNA, 19 nt, Artificial Sequence
  Description of Artificial Sequence: Synthetic oligonucleotide
agugaaagagcugauacaa

SEQ ID NO: 2277793 - RNA, 19 nt, Artificial Sequence
  Description of Artificial Sequence: Synthetic oligonucleotide
aacuugccaucucaccuuc

SEQ ID NO: 2277794 - RNA, 19 nt, Artificial Sequence
  Description of Artificial Sequence: Synthetic oligonucleotide
aagguauccacaacauguc

SEQ ID NO: 2277795 - RNA, 19 nt, Artificial Sequence
  Description of Artificial Sequence: Synthetic oligonucleotide
gaagguauccacaacaugu

SEQ ID NO: 2277796 - RNA, 19 nt, Artificial Sequence
  Description of Artificial Sequence: Synthetic oligonucleotide
ugaguagcccuucuccaag

SEQ ID NO: 2277797 - RNA, 19 nt, Artificial Sequence
  Description of Artificial Sequence: Synthetic oligonucleotide
uccagaaccuugaugggcu

SEQ ID NO: 2277798 - RNA, 19 nt, Artificial Sequence
  Description of Artificial Sequence: Synthetic oligonucleotide
accauauccaucuggggcu

SEQ ID NO: 2277799 - RNA, 19 nt, Artificial Sequence
  Description of Artificial Sequence: Synthetic oligonucleotide
caugacugcucagauaccg

SEQ ID NO: 2277800 - RNA, 19 nt, Artificial Sequence
  Description of Artificial Sequence: Synthetic oligonucleotide
guauccacaacaugucacc

SEQ ID NO: 2277801 - RNA, 19 nt, Artificial Sequence
  Description of Artificial Sequence: Synthetic oligonucleotide
uccaaaugcuccaucacua

SEQ ID NO: 2277802 - RNA, 19 nt, Artificial Sequence
  Description of Artificial Sequence: Synthetic oligonucleotide
uccgcauuauguuuagaga

SEQ ID NO: 2277803 - RNA, 19 nt, Artificial Sequence
  Description of Artificial Sequence: Synthetic oligonucleotide
ugggacccaagcuuggcgg

SEQ ID NO: 2277804 - RNA, 19 nt, Artificial Sequence
  Description of Artificial Sequence: Synthetic oligonucleotide
uaugauaggcagaguaaaa

SEQ ID NO: 2277805 - RNA, 19 nt, Artificial Sequence
  Description of Artificial Sequence: Synthetic oligonucleotide
gauaccgcauguccaaaug

SEQ ID NO: 2277806 - RNA, 19 nt, Artificial Sequence
  Description of Artificial Sequence: Synthetic oligonucleotide
cauagaaugugacccaauc

SEQ ID NO: 2277807 - RNA, 19 nt, Artificial Sequence
  Description of Artificial Sequence: Synthetic oligonucleotide
ugucaccacaucaaaucca

SEQ ID NO: 2277808 - RNA, 19 nt, Artificial Sequence
  Description of Artificial Sequence: Synthetic oligonucleotide
ugagauuccgcauuauguu

SEQ ID NO: 2277809 - RNA, 19 nt, Artificial Sequence
  Description of Artificial Sequence: Synthetic oligonucleotide
gagcugauacaacugcaag

SEQ ID NO: 2277810 - RNA, 19 nt, Artificial Sequence
  Description of Artificial Sequence: Synthetic oligonucleotide
uccacaaagagccgcucug

SEQ ID NO: 2277811 - RNA, 19 nt, Artificial Sequence
  Description of Artificial Sequence: Synthetic oligonucleotide
ggauuuuacuaugauaggc

SEQ ID NO: 2277812 - RNA, 19 nt, Artificial Sequence
  Description of Artificial Sequence: Synthetic oligonucleotide
ucugcuacguucccucccc

SEQ ID NO: 2277813 - RNA, 19 nt, Artificial Sequence
  Description of Artificial Sequence: Synthetic oligonucleotide
aaugcacccgccucccgag

SEQ ID NO: 2277814 - RNA, 19 nt, Artificial Sequence
  Description of Artificial Sequence: Synthetic oligonucleotide
cuauugccagcucauauuc

SEQ ID NO: 2277815 - RNA, 19 nt, Artificial Sequence
  Description of Artificial Sequence: Synthetic oligonucleotide
auccacaacaugucaccac

SEQ ID NO: 2277816 - RNA, 19 nt, Artificial Sequence
  Description of Artificial Sequence: Synthetic oligonucleotide
auggaauaggucaggaauc

SEQ ID NO: 2277817 - RNA, 19 nt, Artificial Sequence
  Description of Artificial Sequence: Synthetic oligonucleotide
uguuuagagaggacccucu

SEQ ID NO: 2277818 - RNA, 19 nt, Artificial Sequence
  Description of Artificial Sequence: Synthetic oligonucleotide
aaggagcuacugaagcccc

SEQ ID NO: 2277819 - RNA, 19 nt, Artificial Sequence
  Description of Artificial Sequence: Synthetic oligonucleotide
cuuugaccgagcugcagcc

SEQ ID NO: 2277820 - RNA, 19 nt, Artificial Sequence
  Description of Artificial Sequence: Synthetic oligonucleotide
uuagggauuuuacuaugau

SEQ ID NO: 2277821 - RNA, 19 nt, Artificial Sequence
  Description of Artificial Sequence: Synthetic oligonucleotide
uaauggccauuaaacuugc

SEQ ID NO: 2277822 - RNA, 19 nt, Artificial Sequence
  Description of Artificial Sequence: Synthetic oligonucleotide
gagaggacccucuguaccc

SEQ ID NO: 2277823 - RNA, 19 nt, Artificial Sequence
  Description of Artificial Sequence: Synthetic oligonucleotide
acuuucacaaacacucguc

SEQ ID NO: 2277824 - RNA, 19 nt, Artificial Sequence
  Description of Artificial Sequence: Synthetic oligonucleotide
cagcucaagagcuucccgg

SEQ ID NO: 2277825 - RNA, 19 nt, Artificial Sequence
  Description of Artificial Sequence: Synthetic oligonucleotide
auguccaaaugcuccauca

SEQ ID NO: 2277826 - RNA, 19 nt, Artificial Sequence
  Description of Artificial Sequence: Synthetic oligonucleotide
cccagauccaaaaugauuc

SEQ ID NO: 2277827 - RNA, 19 nt, Artificial Sequence
  Description of Artificial Sequence: Synthetic oligonucleotide
guaaaaggagcuacugaag

SEQ ID NO: 2277828 - RNA, 19 nt, Artificial Sequence
  Description of Artificial Sequence: Synthetic oligonucleotide
ucagauaccgcauguccaa

SEQ ID NO: 2277829 - RNA, 19 nt, Artificial Sequence
  Description of Artificial Sequence: Synthetic oligonucleotide
gucaggaaucuucaacugc

SEQ ID NO: 2277830 - RNA, 19 nt, Artificial Sequence
  Description of Artificial Sequence: Synthetic oligonucleotide
uaccgcauguccaaaugcu

SEQ ID NO: 2277831 - RNA, 19 nt, Artificial Sequence
  Description of Artificial Sequence: Synthetic oligonucleotide
ugacugcucagauaccgca

SEQ ID NO: 2277832 - RNA, 19 nt, Artificial Sequence
  Description of Artificial Sequence: Synthetic oligonucleotide
caaaugcuccaucacuagc

SEQ ID NO: 2277833 - RNA, 19 nt, Artificial Sequence
  Description of Artificial Sequence: Synthetic oligonucleotide
ccuucaaacauucuucuug

SEQ ID NO: 2277834 - RNA, 19 nt, Artificial Sequence
  Description of Artificial Sequence: Synthetic oligonucleotide
caucaaauccaaacugguc

SEQ ID NO: 2277835 - RNA, 19 nt, Artificial Sequence
  Description of Artificial Sequence: Synthetic oligonucleotide
aagcguuucucaaauccug

SEQ ID NO: 2277836 - RNA, 19 nt, Artificial Sequence
  Description of Artificial Sequence: Synthetic oligonucleotide
ccgcauuauguuuagagag

SEQ ID NO: 2277837 - RNA, 19 nt, Artificial Sequence
  Description of Artificial Sequence: Synthetic oligonucleotide
uggggcauccagaaccuug

SEQ ID NO: 2277838 - RNA, 19 nt, Artificial Sequence
  Description of Artificial Sequence: Synthetic oligonucleotide
uuuaccuggggaagguauc

SEQ ID NO: 2277839 - RNA, 19 nt, Artificial Sequence
  Description of Artificial Sequence: Synthetic oligonucleotide
ggaaucuucugcuacguuc

SEQ ID NO: 2277840 - RNA, 19 nt, Artificial Sequence
  Description of Artificial Sequence: Synthetic oligonucleotide
gguuuuagggauuuuacua

SEQ ID NO: 2277841 - RNA, 19 nt, Artificial Sequence
  Description of Artificial Sequence: Synthetic oligonucleotide
ucuucucuaccauauccau

SEQ ID NO: 2277842 - RNA, 19 nt, Artificial Sequence
  Description of Artificial Sequence: Synthetic oligonucleotide
cuaccauauccaucugggg

SEQ ID NO: 2277843 - RNA, 19 nt, Artificial Sequence
  Description of Artificial Sequence: Synthetic oligonucleotide
uacaacugcaagcguuucu

SEQ ID NO: 2277844 - RNA, 19 nt, Artificial Sequence
  Description of Artificial Sequence: Synthetic oligonucleotide
uauucugaguggccguaga

SEQ ID NO: 2277845 - RNA, 19 nt, Artificial Sequence
  Description of Artificial Sequence: Synthetic oligonucleotide
accuugaugggcuugggua

SEQ ID NO: 2277846 - RNA, 19 nt, Artificial Sequence
  Description of Artificial Sequence: Synthetic oligonucleotide
agucauuuaccuggggaag

SEQ ID NO: 2277847 - RNA, 19 nt, Artificial Sequence
  Description of Artificial Sequence: Synthetic oligonucleotide
ugaaguaaagagggcacaa

SEQ ID NO: 2277848 - RNA, 19 nt, Artificial Sequence
  Description of Artificial Sequence: Synthetic oligonucleotide
uauguuuagagaggacccu

SEQ ID NO: 2277849 - RNA, 19 nt, Artificial Sequence
  Description of Artificial Sequence: Synthetic oligonucleotide
cuuuuguccgugucguaac

SEQ ID NO: 2277850 - RNA, 19 nt, Artificial Sequence
  Description of Artificial Sequence: Synthetic oligonucleotide
accuggggaagguauccac

SEQ ID NO: 2277851 - RNA, 19 nt, Artificial Sequence
  Description of Artificial Sequence: Synthetic oligonucleotide
auguuuagagaggacccuc

SEQ ID NO: 2277852 - RNA, 19 nt, Artificial Sequence
  Description of Artificial Sequence: Synthetic oligonucleotide
acugcucagauaccgcaug

SEQ ID NO: 2277853 - RNA, 19 nt, Artificial Sequence
  Description of Artificial Sequence: Synthetic oligonucleotide
uucaacugcagagcagacc

SEQ ID NO: 2277854 - RNA, 19 nt, Artificial Sequence
  Description of Artificial Sequence: Synthetic oligonucleotide
uuuuguccgugucguaacu

SEQ ID NO: 2277855 - RNA, 19 nt, Artificial Sequence
  Description of Artificial Sequence: Synthetic oligonucleotide
aaugcgcugccuggcauag

SEQ ID NO: 2277856 - RNA, 19 nt, Artificial Sequence
  Description of Artificial Sequence: Synthetic oligonucleotide
uucugcuacguucccuccc

SEQ ID NO: 2277857 - RNA, 19 nt, Artificial Sequence
  Description of Artificial Sequence: Synthetic oligonucleotide
aaccuugaugggcuugggu

SEQ ID NO: 2277858 - RNA, 19 nt, Artificial Sequence
  Description of Artificial Sequence: Synthetic oligonucleotide
aucucaccuucaaacauuc

SEQ ID NO: 2277859 - RNA, 19 nt, Artificial Sequence
  Description of Artificial Sequence: Synthetic oligonucleotide
cauuauguuuagagaggac

SEQ ID NO: 2277860 - RNA, 19 nt, Artificial Sequence
  Description of Artificial Sequence: Synthetic oligonucleotide
gggauuuuacuaugauagg

SEQ ID NO: 2277861 - RNA, 19 nt, Artificial Sequence
  Description of Artificial Sequence: Synthetic oligonucleotide
acuagcacgcucccaccuc

SEQ ID NO: 2277862 - RNA, 19 nt, Artificial Sequence
  Description of Artificial Sequence: Synthetic oligonucleotide
uuaccuggggaagguaucc

SEQ ID NO: 2277863 - RNA, 19 nt, Artificial Sequence
  Description of Artificial Sequence: Synthetic oligonucleotide
uauugccagcucauauucu

SEQ ID NO: 2277864 - RNA, 19 nt, Artificial Sequence
  Description of Artificial Sequence: Synthetic oligonucleotide
uccgugaaguaaagagggc

SEQ ID NO: 2277865 - RNA, 19 nt, Artificial Sequence
  Description of Artificial Sequence: Synthetic oligonucleotide
ugggcuuggguacuuucac

SEQ ID NO: 2277866 - RNA, 19 nt, Artificial Sequence
  Description of Artificial Sequence: Synthetic oligonucleotide
aagagcugauacaacugca

SEQ ID NO: 2277867 - RNA, 19 nt, Artificial Sequence
  Description of Artificial Sequence: Synthetic oligonucleotide
ugccagucauuuaccuggg

SEQ ID NO: 2277868 - RNA, 19 nt, Artificial Sequence
  Description of Artificial Sequence: Synthetic oligonucleotide
ugcgcugccuggcauagaa

SEQ ID NO: 2277869 - RNA, 19 nt, Artificial Sequence
  Description of Artificial Sequence: Synthetic oligonucleotide
guucucgagguguagaucu

SEQ ID NO: 2277870 - RNA, 19 nt, Artificial Sequence
  Description of Artificial Sequence: Synthetic oligonucleotide
aauggccauuaaacuugcc

SEQ ID NO: 2277871 - RNA, 19 nt, Artificial Sequence
  Description of Artificial Sequence: Synthetic oligonucleotide
guacccagauccaaaauga

SEQ ID NO: 2277872 - RNA, 19 nt, Artificial Sequence
  Description of Artificial Sequence: Synthetic oligonucleotide
agagggcacaauuuccaga

SEQ ID NO: 2277873 - RNA, 19 nt, Artificial Sequence
  Description of Artificial Sequence: Synthetic oligonucleotide
uacguucccuccccagagg

SEQ ID NO: 2277874 - RNA, 19 nt, Artificial Sequence
  Description of Artificial Sequence: Synthetic oligonucleotide
cagugguucagauagugaa

SEQ ID NO: 2277875 - RNA, 19 nt, Artificial Sequence
  Description of Artificial Sequence: Synthetic oligonucleotide
cuucauaauggccauuaaa

SEQ ID NO: 2277876 - RNA, 19 nt, Artificial Sequence
  Description of Artificial Sequence: Synthetic oligonucleotide
uccgugucguaacucuggc

SEQ ID NO: 2277877 - RNA, 19 nt, Artificial Sequence
  Description of Artificial Sequence: Synthetic oligonucleotide
guuucucaaauccuggggu

SEQ ID NO: 2277878 - RNA, 19 nt, Artificial Sequence
  Description of Artificial Sequence: Synthetic oligonucleotide
acugcaagcguuucucaaa

SEQ ID NO: 2277879 - RNA, 19 nt, Artificial Sequence
  Description of Artificial Sequence: Synthetic oligonucleotide
uucugccagucauuuaccu

SEQ ID NO: 2277880 - RNA, 19 nt, Artificial Sequence
  Description of Artificial Sequence: Synthetic oligonucleotide
agguauccacaacauguca

SEQ ID NO: 2277881 - RNA, 19 nt, Artificial Sequence
  Description of Artificial Sequence: Synthetic oligonucleotide
acaucaaauccaaacuggu

SEQ ID NO: 2277882 - RNA, 19 nt, Artificial Sequence
  Description of Artificial Sequence: Synthetic oligonucleotide
uccaagcuucuuguucucg

SEQ ID NO: 2277883 - RNA, 19 nt, Artificial Sequence
  Description of Artificial Sequence: Synthetic oligonucleotide
uugaguagcccuucuccaa

SEQ ID NO: 2277884 - RNA, 19 nt, Artificial Sequence
  Description of Artificial Sequence: Synthetic oligonucleotide
accacagcucaagagcuuc

SEQ ID NO: 2277885 - RNA, 19 nt, Artificial Sequence
  Description of Artificial Sequence: Synthetic oligonucleotide
cuacguucccuccccagag

SEQ ID NO: 2277886 - RNA, 19 nt, Artificial Sequence
  Description of Artificial Sequence: Synthetic oligonucleotide
aguaaagagggcacaauuu

SEQ ID NO: 2277887 - RNA, 19 nt, Artificial Sequence
  Description of Artificial Sequence: Synthetic oligonucleotide
uuguucucgagguguagau

SEQ ID NO: 2277888 - RNA, 19 nt, Artificial Sequence
  Description of Artificial Sequence: Synthetic oligonucleotide
augcuccaucacuagcacg

SEQ ID NO: 2277889 - RNA, 19 nt, Artificial Sequence
  Description of Artificial Sequence: Synthetic oligonucleotide
uguccgugucguaacucug

SEQ ID NO: 2277890 - RNA, 19 nt, Artificial Sequence
  Description of Artificial Sequence: Synthetic oligonucleotide
agcguuucucaaauccugg

SEQ ID NO: 2277891 - RNA, 19 nt, Artificial Sequence
  Description of Artificial Sequence: Synthetic oligonucleotide
cuugaguagcccuucucca

SEQ ID NO: 2277892 - RNA, 19 nt, Artificial Sequence
  Description of Artificial Sequence: Synthetic oligonucleotide
ggcuuggguacuuucacug

SEQ ID NO: 2277893 - RNA, 19 nt, Artificial Sequence
  Description of Artificial Sequence: Synthetic oligonucleotide
uauccacaacaugucacca

SEQ ID NO: 2277894 - RNA, 19 nt, Artificial Sequence
  Description of Artificial Sequence: Synthetic oligonucleotide
augacugcucagauaccgc

SEQ ID NO: 2277895 - RNA, 19 nt, Artificial Sequence
  Description of Artificial Sequence: Synthetic oligonucleotide
uugccagcucauauucuga

SEQ ID NO: 2277896 - RNA, 19 nt, Artificial Sequence
  Description of Artificial Sequence: Synthetic oligonucleotide
guaacucuggcccuggcua

SEQ ID NO: 2277897 - RNA, 19 nt, Artificial Sequence
  Description of Artificial Sequence: Synthetic oligonucleotide
uggcauagaaugugaccca

SEQ ID NO: 2277898 - RNA, 19 nt, Artificial Sequence
  Description of Artificial Sequence: Synthetic oligonucleotide
aguggccguagaaggaagc

SEQ ID NO: 2277899 - RNA, 19 nt, Artificial Sequence
  Description of Artificial Sequence: Synthetic oligonucleotide
cucagauaccgcaugucca

SEQ ID NO: 2277900 - RNA, 19 nt, Artificial Sequence
  Description of Artificial Sequence: Synthetic oligonucleotide
cuagcacgcucccaccucc

SEQ ID NO: 2277901 - RNA, 19 nt, Artificial Sequence
  Description of Artificial Sequence: Synthetic oligonucleotide
cugagauuccgcauuaugu

SEQ ID NO: 2277902 - RNA, 19 nt, Artificial Sequence
  Description of Artificial Sequence: Synthetic oligonucleotide
agcucaagagcuucccggu

SEQ ID NO: 2277903 - RNA, 19 nt, Artificial Sequence
  Description of Artificial Sequence: Synthetic oligonucleotide
cgugucguaacucuggccc

SEQ ID NO: 2277904 - RNA, 19 nt, Artificial Sequence
  Description of Artificial Sequence: Synthetic oligonucleotide
aacaugccggcuauugcca

SEQ ID NO: 2277905 - RNA, 19 nt, Artificial Sequence
  Description of Artificial Sequence: Synthetic oligonucleotide
ucauuuaccuggggaaggu

SEQ ID NO: 2277906 - RNA, 19 nt, Artificial Sequence
  Description of Artificial Sequence: Synthetic oligonucleotide
gcucagauaccgcaugucc

SEQ ID NO: 2277907 - RNA, 19 nt, Artificial Sequence
  Description of Artificial Sequence: Synthetic oligonucleotide
ugguucagauagugaaaga

SEQ ID NO: 2277908 - RNA, 19 nt, Artificial Sequence
  Description of Artificial Sequence: Synthetic oligonucleotide
auuugcugagauuccgcau

SEQ ID NO: 2277909 - RNA, 19 nt, Artificial Sequence
  Description of Artificial Sequence: Synthetic oligonucleotide
cacggugccagccuccuug

SEQ ID NO: 2277910 - RNA, 19 nt, Artificial Sequence
  Description of Artificial Sequence: Synthetic oligonucleotide
gaguagcccuucuccaagc

SEQ ID NO: 2277911 - RNA, 19 nt, Artificial Sequence
  Description of Artificial Sequence: Synthetic oligonucleotide
cugggacccaagcuuggcg

SEQ ID NO: 2277912 - RNA, 19 nt, Artificial Sequence
  Description of Artificial Sequence: Synthetic oligonucleotide
uggaguucacuuucacaaa

SEQ ID NO: 2277913 - RNA, 19 nt, Artificial Sequence
  Description of Artificial Sequence: Synthetic oligonucleotide
cacgcucccaccuccuggg

SEQ ID NO: 2277914 - RNA, 19 nt, Artificial Sequence
  Description of Artificial Sequence: Synthetic oligonucleotide
ugccuggcauagaauguga

SEQ ID NO: 2277915 - RNA, 19 nt, Artificial Sequence
  Description of Artificial Sequence: Synthetic oligonucleotide
ucccgaguggcccguagcu

SEQ ID NO: 2277916 - RNA, 19 nt, Artificial Sequence
  Description of Artificial Sequence: Synthetic oligonucleotide
uucucgagguguagaucug

SEQ ID NO: 2277917 - RNA, 19 nt, Artificial Sequence
  Description of Artificial Sequence: Synthetic oligonucleotide
ugaguggccguagaaggaa

SEQ ID NO: 2277918 - RNA, 19 nt, Artificial Sequence
  Description of Artificial Sequence: Synthetic oligonucleotide
ucucgagguguagaucugc

SEQ ID NO: 2277919 - RNA, 19 nt, Artificial Sequence
  Description of Artificial Sequence: Synthetic oligonucleotide
auuuaccuggggaagguau

SEQ ID NO: 2277920 - RNA, 19 nt, Artificial Sequence
  Description of Artificial Sequence: Synthetic oligonucleotide
uggguacuuucacuguguc

SEQ ID NO: 2277921 - RNA, 19 nt, Artificial Sequence
  Description of Artificial Sequence: Synthetic oligonucleotide
gaucugcaagcugggaccc

SEQ ID NO: 2277922 - RNA, 19 nt, Artificial Sequence
  Description of Artificial Sequence: Synthetic oligonucleotide
agaccacagcucaagagcu

SEQ ID NO: 2277923 - RNA, 19 nt, Artificial Sequence
  Description of Artificial Sequence: Synthetic oligonucleotide
ugaaugcgcugccuggcau

SEQ ID NO: 2277924 - RNA, 19 nt, Artificial Sequence
  Description of Artificial Sequence: Synthetic oligonucleotide
guucauuugcugagauucc

SEQ ID NO: 2277925 - RNA, 19 nt, Artificial Sequence
  Description of Artificial Sequence: Synthetic oligonucleotide
gugacccaaucauucugcc

SEQ ID NO: 2277926 - RNA, 19 nt, Artificial Sequence
  Description of Artificial Sequence: Synthetic oligonucleotide
gucugucuucauaauggcc

SEQ ID NO: 2277927 - RNA, 19 nt, Artificial Sequence
  Description of Artificial Sequence: Synthetic oligonucleotide
ugaugggcccagaggaauc

SEQ ID NO: 2277928 - RNA, 19 nt, Artificial Sequence
  Description of Artificial Sequence: Synthetic oligonucleotide
gguauccacaacaugucac

SEQ ID NO: 2277929 - RNA, 19 nt, Artificial Sequence
  Description of Artificial Sequence: Synthetic oligonucleotide
ucacuagcacgcucccacc

SEQ ID NO: 2277930 - RNA, 19 nt, Artificial Sequence
  Description of Artificial Sequence: Synthetic oligonucleotide
auucugaguggccguagaa

SEQ ID NO: 2277931 - RNA, 19 nt, Artificial Sequence
  Description of Artificial Sequence: Synthetic oligonucleotide
uggcuaaugcacccgccuc

SEQ ID NO: 2277932 - RNA, 19 nt, Artificial Sequence
  Description of Artificial Sequence: Synthetic oligonucleotide
ggaagguauccacaacaug

SEQ ID NO: 2277933 - RNA, 19 nt, Artificial Sequence
  Description of Artificial Sequence: Synthetic oligonucleotide
agauaccgcauguccaaau

SEQ ID NO: 2277934 - RNA, 19 nt, Artificial Sequence
  Description of Artificial Sequence: Synthetic oligonucleotide
aucauggaauaggucagga

SEQ ID NO: 2277935 - RNA, 19 nt, Artificial Sequence
  Description of Artificial Sequence: Synthetic oligonucleotide
gaguucacuuucacaaaca

SEQ ID NO: 2277936 - RNA, 19 nt, Artificial Sequence
  Description of Artificial Sequence: Synthetic oligonucleotide
auacaacugcaagcguuuc

SEQ ID NO: 2277937 - RNA, 19 nt, Artificial Sequence
  Description of Artificial Sequence: Synthetic oligonucleotide
caucuggggcugaaugcgc

SEQ ID NO: 2277938 - RNA, 19 nt, Artificial Sequence
  Description of Artificial Sequence: Synthetic oligonucleotide
uccuugaguagcccuucuc

SEQ ID NO: 2277939 - RNA, 19 nt, Artificial Sequence
  Description of Artificial Sequence: Synthetic oligonucleotide
gcagaguaaaaggagcuac

SEQ ID NO: 2277940 - RNA, 19 nt, Artificial Sequence
  Description of Artificial Sequence: Synthetic oligonucleotide
auauucugaguggccguag

SEQ ID NO: 2277941 - RNA, 19 nt, Artificial Sequence
  Description of Artificial Sequence: Synthetic oligonucleotide
aaugaugggcccagaggaa

SEQ ID NO: 2277942 - RNA, 19 nt, Artificial Sequence
  Description of Artificial Sequence: Synthetic oligonucleotide
ccuggcauagaaugugacc

SEQ ID NO: 2277943 - RNA, 19 nt, Artificial Sequence
  Description of Artificial Sequence: Synthetic oligonucleotide
gcugagauuccgcauuaug

SEQ ID NO: 2277944 - RNA, 19 nt, Artificial Sequence
  Description of Artificial Sequence: Synthetic oligonucleotide
aucauucugccagucauuu

SEQ ID NO: 2277945 - RNA, 19 nt, Artificial Sequence
  Description of Artificial Sequence: Synthetic oligonucleotide
cuucaacugcagagcagac

SEQ ID NO: 2277946 - RNA, 19 nt, Artificial Sequence
  Description of Artificial Sequence: Synthetic oligonucleotide
cgcauuauguuuagagagg

SEQ ID NO: 2277947 - RNA, 19 nt, Artificial Sequence
  Description of Artificial Sequence: Synthetic oligonucleotide
uggggaagguauccacaac

SEQ ID NO: 2277948 - RNA, 19 nt, Artificial Sequence
  Description of Artificial Sequence: Synthetic oligonucleotide
agguguagaucugcaagcu

SEQ ID NO: 2277949 - RNA, 19 nt, Artificial Sequence
  Description of Artificial Sequence: Synthetic oligonucleotide
guccgugucguaacucugg

SEQ ID NO: 2277950 - RNA, 19 nt, Artificial Sequence
  Description of Artificial Sequence: Synthetic oligonucleotide
uugcugagauuccgcauua

SEQ ID NO: 2277951 - RNA, 19 nt, Artificial Sequence
  Description of Artificial Sequence: Synthetic oligonucleotide
aggcagaguaaaaggagcu

SEQ ID NO: 2277952 - RNA, 19 nt, Artificial Sequence
  Description of Artificial Sequence: Synthetic oligonucleotide
ucgagguguagaucugcaa

SEQ ID NO: 2277953 - RNA, 19 nt, Artificial Sequence
  Description of Artificial Sequence: Synthetic oligonucleotide
cuugccucugccuuggagu

SEQ ID NO: 2277954 - RNA, 19 nt, Artificial Sequence
  Description of Artificial Sequence: Synthetic oligonucleotide
aaucauucugccagucauu

SEQ ID NO: 2277955 - RNA, 19 nt, Artificial Sequence
  Description of Artificial Sequence: Synthetic oligonucleotide
agcagaccacagcucaaga

SEQ ID NO: 2277956 - RNA, 19 nt, Artificial Sequence
  Description of Artificial Sequence: Synthetic oligonucleotide
uuuguccgugucguaacuc

SEQ ID NO: 2277957 - RNA, 19 nt, Artificial Sequence
  Description of Artificial Sequence: Synthetic oligonucleotide
ccagauccaaaaugauucc

SEQ ID NO: 2277958 - RNA, 19 nt, Artificial Sequence
  Description of Artificial Sequence: Synthetic oligonucleotide
ggcugaaugcgcugccugg

SEQ ID NO: 2277959 - RNA, 19 nt, Artificial Sequence
  Description of Artificial Sequence: Synthetic oligonucleotide
ucguccuuuuguccguguc

SEQ ID NO: 2277960 - RNA, 19 nt, Artificial Sequence
  Description of Artificial Sequence: Synthetic oligonucleotide
agggcacaauuuccagauc

SEQ ID NO: 2277961 - RNA, 19 nt, Artificial Sequence
  Description of Artificial Sequence: Synthetic oligonucleotide
ggcuaaugcacccgccucc

SEQ ID NO: 2277962 - RNA, 19 nt, Artificial Sequence
  Description of Artificial Sequence: Synthetic oligonucleotide
uuugaccgagcugcagccc

SEQ ID NO: 2277963 - RNA, 19 nt, Artificial Sequence
  Description of Artificial Sequence: Synthetic oligonucleotide
gguguagaucugcaagcug

SEQ ID NO: 2277964 - RNA, 19 nt, Artificial Sequence
  Description of Artificial Sequence: Synthetic oligonucleotide
uguucucgagguguagauc

SEQ ID NO: 2277965 - RNA, 19 nt, Artificial Sequence
  Description of Artificial Sequence: Synthetic oligonucleotide
ugggcccagaggaaucuuc

SEQ ID NO: 2277966 - RNA, 19 nt, Artificial Sequence
  Description of Artificial Sequence: Synthetic oligonucleotide
ucucaccuucaaacauucu

SEQ ID NO: 2277967 - RNA, 19 nt, Artificial Sequence
  Description of Artificial Sequence: Synthetic oligonucleotide
cgagguguagaucugcaag

SEQ ID NO: 2277968 - RNA, 19 nt, Artificial Sequence
  Description of Artificial Sequence: Synthetic oligonucleotide
cugccuggcauagaaugug

SEQ ID NO: 2277969 - RNA, 19 nt, Artificial Sequence
  Description of Artificial Sequence: Synthetic oligonucleotide
guccaaaugcuccaucacu

SEQ ID NO: 2277970 - RNA, 19 nt, Artificial Sequence
  Description of Artificial Sequence: Synthetic oligonucleotide
uuuccccacggugccagcc

SEQ ID NO: 2277971 - RNA, 19 nt, Artificial Sequence
  Description of Artificial Sequence: Synthetic oligonucleotide
cacagcucaagagcuuccc

SEQ ID NO: 2277972 - RNA, 19 nt, Artificial Sequence
  Description of Artificial Sequence: Synthetic oligonucleotide
gcauuauguuuagagagga

SEQ ID NO: 2277973 - RNA, 19 nt, Artificial Sequence
  Description of Artificial Sequence: Synthetic oligonucleotide
ccaaaugcuccaucacuag

SEQ ID NO: 2277974 - RNA, 19 nt, Artificial Sequence
  Description of Artificial Sequence: Synthetic oligonucleotide
agauuccgcauuauguuua

SEQ ID NO: 2277975 - RNA, 19 nt, Artificial Sequence
  Description of Artificial Sequence: Synthetic oligonucleotide
agugguucagauagugaaa

SEQ ID NO: 2277976 - RNA, 19 nt, Artificial Sequence
  Description of Artificial Sequence: Synthetic oligonucleotide
cuuggcggcaugacugcuc

SEQ ID NO: 2277977 - RNA, 19 nt, Artificial Sequence
  Description of Artificial Sequence: Synthetic oligonucleotide
uggggcugaaugcgcugcc

SEQ ID NO: 2277978 - RNA, 19 nt, Artificial Sequence
  Description of Artificial Sequence: Synthetic oligonucleotide
agaaugugacccaaucauu

SEQ ID NO: 2277979 - RNA, 19 nt, Artificial Sequence
  Description of Artificial Sequence: Synthetic oligonucleotide
gucaccacaucaaauccaa

SEQ ID NO: 2277980 - RNA, 19 nt, Artificial Sequence
  Description of Artificial Sequence: Synthetic oligonucleotide
gugaaagagcugauacaac

SEQ ID NO: 2277981 - RNA, 19 nt, Artificial Sequence
  Description of Artificial Sequence: Synthetic oligonucleotide
agaaggaagcuggaucaaa

SEQ ID NO: 2277982 - RNA, 19 nt, Artificial Sequence
  Description of Artificial Sequence: Synthetic oligonucleotide
gagauuccgcauuauguuu

SEQ ID NO: 2277983 - RNA, 19 nt, Artificial Sequence
  Description of Artificial Sequence: Synthetic oligonucleotide
cuaaugcacccgccucccg

SEQ ID NO: 2277984 - RNA, 19 nt, Artificial Sequence
  Description of Artificial Sequence: Synthetic oligonucleotide
ugcaagcguuucucaaauc

SEQ ID NO: 2277985 - RNA, 19 nt, Artificial Sequence
  Description of Artificial Sequence: Synthetic oligonucleotide
cuuguucucgagguguaga

SEQ ID NO: 2277986 - RNA, 19 nt, Artificial Sequence
  Description of Artificial Sequence: Synthetic oligonucleotide
gaguggccguagaaggaag

SEQ ID NO: 2277987 - RNA, 19 nt, Artificial Sequence
  Description of Artificial Sequence: Synthetic oligonucleotide
ucugccuguccacuuccuu

SEQ ID NO: 2277988 - RNA, 19 nt, Artificial Sequence
  Description of Artificial Sequence: Synthetic oligonucleotide
cgugaaguaaagagggcac

SEQ ID NO: 2277989 - RNA, 19 nt, Artificial Sequence
  Description of Artificial Sequence: Synthetic oligonucleotide
cuggggaagguauccacaa

SEQ ID NO: 2277990 - RNA, 19 nt, Artificial Sequence
  Description of Artificial Sequence: Synthetic oligonucleotide
agaccucuucucuaccaua

SEQ ID NO: 2277991 - RNA, 19 nt, Artificial Sequence
  Description of Artificial Sequence: Synthetic oligonucleotide
cucaccuucaaacauucuu

SEQ ID NO: 2277992 - RNA, 19 nt, Artificial Sequence
  Description of Artificial Sequence: Synthetic oligonucleotide
cucuggcccuggcuaaugc

SEQ ID NO: 2277993 - RNA, 19 nt, Artificial Sequence
  Description of Artificial Sequence: Synthetic oligonucleotide
cuugccaucucaccuucaa

SEQ ID NO: 2277994 - RNA, 19 nt, Artificial Sequence
  Description of Artificial Sequence: Synthetic oligonucleotide
caagcguuucucaaauccu

SEQ ID NO: 2277995 - RNA, 19 nt, Artificial Sequence
  Description of Artificial Sequence: Synthetic oligonucleotide
gggguuuuagggauuuuac

SEQ ID NO: 2277996 - RNA, 19 nt, Artificial Sequence
  Description of Artificial Sequence: Synthetic oligonucleotide
uagcuuugaccgagcugca

SEQ ID NO: 2277997 - RNA, 19 nt, Artificial Sequence
  Description of Artificial Sequence: Synthetic oligonucleotide
cugaguggccguagaagga

SEQ ID NO: 2277998 - RNA, 19 nt, Artificial Sequence
  Description of Artificial Sequence: Synthetic oligonucleotide
ucguaacucuggcccuggc

SEQ ID NO: 2277999 - RNA, 19 nt, Artificial Sequence
  Description of Artificial Sequence: Synthetic oligonucleotide
ugcucagauaccgcauguc

SEQ ID NO: 2278000 - RNA, 19 nt, Artificial Sequence
  Description of Artificial Sequence: Synthetic oligonucleotide
uuacuaugauaggcagagu

SEQ ID NO: 2278001 - RNA, 19 nt, Artificial Sequence
  Description of Artificial Sequence: Synthetic oligonucleotide
acccaaucauucugccagu

SEQ ID NO: 2278002 - RNA, 19 nt, Artificial Sequence
  Description of Artificial Sequence: Synthetic oligonucleotide
cucuguacccagauccaaa

SEQ ID NO: 2278003 - RNA, 19 nt, Artificial Sequence
  Description of Artificial Sequence: Synthetic oligonucleotide
uacuuucacugugucuguc

SEQ ID NO: 2278004 - RNA, 19 nt, Artificial Sequence
  Description of Artificial Sequence: Synthetic oligonucleotide
cucacgcuucagcagcguc

SEQ ID NO: 2278005 - RNA, 19 nt, Artificial Sequence
  Description of Artificial Sequence: Synthetic oligonucleotide
caccuucaaacauucuucu

SEQ ID NO: 2278006 - RNA, 19 nt, Artificial Sequence
  Description of Artificial Sequence: Synthetic oligonucleotide
cucccgaguggcccguagc

SEQ ID NO: 2278007 - RNA, 19 nt, Artificial Sequence
  Description of Artificial Sequence: Synthetic oligonucleotide
cucaagagcuucccggucu

SEQ ID NO: 2278008 - RNA, 19 nt, Artificial Sequence
  Description of Artificial Sequence: Synthetic oligonucleotide
caacugcagagcagaccac

SEQ ID NO: 2278009 - RNA, 19 nt, Artificial Sequence
  Description of Artificial Sequence: Synthetic oligonucleotide
caagcugggacccaagcuu

SEQ ID NO: 2278010 - RNA, 19 nt, Artificial Sequence
  Description of Artificial Sequence: Synthetic oligonucleotide
aggaaucuucugcuacguu

SEQ ID NO: 2278011 - RNA, 19 nt, Artificial Sequence
  Description of Artificial Sequence: Synthetic oligonucleotide
cacuuucacaaacacucgu

SEQ ID NO: 2278012 - RNA, 19 nt, Artificial Sequence
  Description of Artificial Sequence: Synthetic oligonucleotide
agauagugaaagagcugau

SEQ ID NO: 2278013 - RNA, 19 nt, Artificial Sequence
  Description of Artificial Sequence: Synthetic oligonucleotide
augccggcuauugccagcu

SEQ ID NO: 2278014 - RNA, 19 nt, Artificial Sequence
  Description of Artificial Sequence: Synthetic oligonucleotide
cguccuuuuguccgugucg

SEQ ID NO: 2278015 - RNA, 19 nt, Artificial Sequence
  Description of Artificial Sequence: Synthetic oligonucleotide
gaaguaaagagggcacaau

SEQ ID NO: 2278016 - RNA, 19 nt, Artificial Sequence
  Description of Artificial Sequence: Synthetic oligonucleotide
ggguuuuagggauuuuacu

SEQ ID NO: 2278017 - RNA, 19 nt, Artificial Sequence
  Description of Artificial Sequence: Synthetic oligonucleotide
gcacgcucccaccuccugg

SEQ ID NO: 2278018 - RNA, 19 nt, Artificial Sequence
  Description of Artificial Sequence: Synthetic oligonucleotide
cuccaagcuucuuguucuc

SEQ ID NO: 2278019 - RNA, 19 nt, Artificial Sequence
  Description of Artificial Sequence: Synthetic oligonucleotide
cagaaccuugaugggcuug

SEQ ID NO: 2278020 - RNA, 19 nt, Artificial Sequence
  Description of Artificial Sequence: Synthetic oligonucleotide
ccagaucauggaauagguc

SEQ ID NO: 2278021 - RNA, 19 nt, Artificial Sequence
  Description of Artificial Sequence: Synthetic oligonucleotide
agcacgcucccaccuccug

SEQ ID NO: 2278022 - RNA, 19 nt, Artificial Sequence
  Description of Artificial Sequence: Synthetic oligonucleotide
gacccucuguacccagauc

SEQ ID NO: 2278023 - RNA, 19 nt, Artificial Sequence
  Description of Artificial Sequence: Synthetic oligonucleotide
aggucuccgugaaguaaag

SEQ ID NO: 2278024 - RNA, 19 nt, Artificial Sequence
  Description of Artificial Sequence: Synthetic oligonucleotide
cugcaagcugggacccaag

SEQ ID NO: 2278025 - RNA, 19 nt, Artificial Sequence
  Description of Artificial Sequence: Synthetic oligonucleotide
gcucauauucugaguggcc

SEQ ID NO: 2278026 - RNA, 19 nt, Artificial Sequence
  Description of Artificial Sequence: Synthetic oligonucleotide
agaggacccucuguaccca

SEQ ID NO: 2278027 - RNA, 19 nt, Artificial Sequence
  Description of Artificial Sequence: Synthetic oligonucleotide
guucccuccccagaggucu

SEQ ID NO: 2278028 - RNA, 19 nt, Artificial Sequence
  Description of Artificial Sequence: Synthetic oligonucleotide
cuucccggucuccagaccu

SEQ ID NO: 2278029 - RNA, 19 nt, Artificial Sequence
  Description of Artificial Sequence: Synthetic oligonucleotide
uagcacgcucccaccuccu

SEQ ID NO: 2278030 - RNA, 19 nt, Artificial Sequence
  Description of Artificial Sequence: Synthetic oligonucleotide
cugaaugcgcugccuggca

SEQ ID NO: 2278031 - RNA, 19 nt, Artificial Sequence
  Description of Artificial Sequence: Synthetic oligonucleotide
gggcugaaugcgcugccug

SEQ ID NO: 2278032 - RNA, 19 nt, Artificial Sequence
  Description of Artificial Sequence: Synthetic oligonucleotide
gcuaaugcacccgccuccc

SEQ ID NO: 2278033 - RNA, 19 nt, Artificial Sequence
  Description of Artificial Sequence: Synthetic oligonucleotide
accgagcugcagcccagcu

SEQ ID NO: 2278034 - RNA, 19 nt, Artificial Sequence
  Description of Artificial Sequence: Synthetic oligonucleotide
ccaaaaugauuccaguggu

SEQ ID NO: 2278035 - RNA, 19 nt, Artificial Sequence
  Description of Artificial Sequence: Synthetic oligonucleotide
uauccaucuggggcugaau

SEQ ID NO: 2278036 - RNA, 19 nt, Artificial Sequence
  Description of Artificial Sequence: Synthetic oligonucleotide
acggugccagccuccuuga

SEQ ID NO: 2278037 - RNA, 19 nt, Artificial Sequence
  Description of Artificial Sequence: Synthetic oligonucleotide
gcuacguucccuccccaga

SEQ ID NO: 2278038 - RNA, 19 nt, Artificial Sequence
  Description of Artificial Sequence: Synthetic oligonucleotide
caucucaccuucaaacauu

SEQ ID NO: 2278039 - RNA, 19 nt, Artificial Sequence
  Description of Artificial Sequence: Synthetic oligonucleotide
gggacccaagcuuggcggc

SEQ ID NO: 2278040 - RNA, 19 nt, Artificial Sequence
  Description of Artificial Sequence: Synthetic oligonucleotide
uccccacggugccagccuc

SEQ ID NO: 2278041 - RNA, 19 nt, Artificial Sequence
  Description of Artificial Sequence: Synthetic oligonucleotide
caccuccuggggcauccag

SEQ ID NO: 2278042 - RNA, 19 nt, Artificial Sequence
  Description of Artificial Sequence: Synthetic oligonucleotide
uccuuuuguccgugucgua

SEQ ID NO: 2278043 - RNA, 19 nt, Artificial Sequence
  Description of Artificial Sequence: Synthetic oligonucleotide
guccuuuuguccgugucgu

SEQ ID NO: 2278044 - RNA, 19 nt, Artificial Sequence
  Description of Artificial Sequence: Synthetic oligonucleotide
uccugggguuuuagggauu

SEQ ID NO: 2278045 - RNA, 19 nt, Artificial Sequence
  Description of Artificial Sequence: Synthetic oligonucleotide
ucccggucuccagaccucu

SEQ ID NO: 2278046 - RNA, 19 nt, Artificial Sequence
  Description of Artificial Sequence: Synthetic oligonucleotide
auuccgcauuauguuuaga

SEQ ID NO: 2278047 - RNA, 19 nt, Artificial Sequence
  Description of Artificial Sequence: Synthetic oligonucleotide
ugucuucauaauggccauu

SEQ ID NO: 2278048 - RNA, 19 nt, Artificial Sequence
  Description of Artificial Sequence: Synthetic oligonucleotide
gccagucauuuaccugggg

SEQ ID NO: 2278049 - RNA, 19 nt, Artificial Sequence
  Description of Artificial Sequence: Synthetic oligonucleotide
gccauuaaacuugccaucu

SEQ ID NO: 2278050 - RNA, 19 nt, Artificial Sequence
  Description of Artificial Sequence: Synthetic oligonucleotide
guacuuucacugugucugu

SEQ ID NO: 2278051 - RNA, 19 nt, Artificial Sequence
  Description of Artificial Sequence: Synthetic oligonucleotide
ccuggcuaaugcacccgcc

SEQ ID NO: 2278052 - RNA, 19 nt, Artificial Sequence
  Description of Artificial Sequence: Synthetic oligonucleotide
cuggcuaaugcacccgccu

SEQ ID NO: 2278053 - RNA, 19 nt, Artificial Sequence
  Description of Artificial Sequence: Synthetic oligonucleotide
ggcccagaggaaucuucug

SEQ ID NO: 2278054 - RNA, 19 nt, Artificial Sequence
  Description of Artificial Sequence: Synthetic oligonucleotide
cugcaagcguuucucaaau

SEQ ID NO: 2278055 - RNA, 19 nt, Artificial Sequence
  Description of Artificial Sequence: Synthetic oligonucleotide
gcuauugccagcucauauu

SEQ ID NO: 2278056 - RNA, 19 nt, Artificial Sequence
  Description of Artificial Sequence: Synthetic oligonucleotide
ccaucacuagcacgcuccc

SEQ ID NO: 2278057 - RNA, 19 nt, Artificial Sequence
  Description of Artificial Sequence: Synthetic oligonucleotide
ggcuauugccagcucauau

SEQ ID NO: 2278058 - RNA, 19 nt, Artificial Sequence
  Description of Artificial Sequence: Synthetic oligonucleotide
gccggcuauugccagcuca

SEQ ID NO: 2278059 - RNA, 19 nt, Artificial Sequence
  Description of Artificial Sequence: Synthetic oligonucleotide
agagcagaccacagcucaa

SEQ ID NO: 2278060 - RNA, 19 nt, Artificial Sequence
  Description of Artificial Sequence: Synthetic oligonucleotide
gcccguagcuuugaccgag

SEQ ID NO: 2278061 - RNA, 19 nt, Artificial Sequence
  Description of Artificial Sequence: Synthetic oligonucleotide
ccaaucauucugccaguca

SEQ ID NO: 2278062 - RNA, 19 nt, Artificial Sequence
  Description of Artificial Sequence: Synthetic oligonucleotide
uggcggcaugacugcucag

SEQ ID NO: 2278063 - RNA, 19 nt, Artificial Sequence
  Description of Artificial Sequence: Synthetic oligonucleotide
gugucguaacucuggcccu

SEQ ID NO: 2278064 - RNA, 19 nt, Artificial Sequence
  Description of Artificial Sequence: Synthetic oligonucleotide
ccgugucguaacucuggcc

SEQ ID NO: 2278065 - RNA, 19 nt, Artificial Sequence
  Description of Artificial Sequence: Synthetic oligonucleotide
ggcggcaugacugcucaga

SEQ ID NO: 2278066 - RNA, 19 nt, Artificial Sequence
  Description of Artificial Sequence: Synthetic oligonucleotide
cugauacaacugcaagcgu

SEQ ID NO: 2278067 - RNA, 19 nt, Artificial Sequence
  Description of Artificial Sequence: Synthetic oligonucleotide
ccuggggaagguauccaca

SEQ ID NO: 2278068 - RNA, 19 nt, Artificial Sequence
  Description of Artificial Sequence: Synthetic oligonucleotide
cccuggcuaaugcacccgc

SEQ ID NO: 2278069 - RNA, 19 nt, Artificial Sequence
  Description of Artificial Sequence: Synthetic oligonucleotide
gcucaagagcuucccgguc

SEQ ID NO: 2278070 - RNA, 19 nt, Artificial Sequence
  Description of Artificial Sequence: Synthetic oligonucleotide
ugaugggcuuggguacuuu

SEQ ID NO: 2278071 - RNA, 19 nt, Artificial Sequence
  Description of Artificial Sequence: Synthetic oligonucleotide
ccuuuuguccgugucguaa

SEQ ID NO: 2278072 - RNA, 19 nt, Artificial Sequence
  Description of Artificial Sequence: Synthetic oligonucleotide
augcacccgccucccgagu

SEQ ID NO: 2278073 - RNA, 19 nt, Artificial Sequence
  Description of Artificial Sequence: Synthetic oligonucleotide
cugccuguccacuuccuuu

SEQ ID NO: 2278074 - RNA, 19 nt, Artificial Sequence
  Description of Artificial Sequence: Synthetic oligonucleotide
cuugaugggcuuggguacu

SEQ ID NO: 2278075 - RNA, 19 nt, Artificial Sequence
  Description of Artificial Sequence: Synthetic oligonucleotide
cugcucagauaccgcaugu

SEQ ID NO: 2278076 - RNA, 19 nt, Artificial Sequence
  Description of Artificial Sequence: Synthetic oligonucleotide
caucacuagcacgcuccca

SEQ ID NO: 2278077 - RNA, 19 nt, Artificial Sequence
  Description of Artificial Sequence: Synthetic oligonucleotide
ggguacuuucacugugucu

SEQ ID NO: 2278078 - RNA, 19 nt, Artificial Sequence
  Description of Artificial Sequence: Synthetic oligonucleotide
cacuagcacgcucccaccu

SEQ ID NO: 2278079 - RNA, 19 nt, Artificial Sequence
  Description of Artificial Sequence: Synthetic oligonucleotide
ggcagaguaaaaggagcua

SEQ ID NO: 2278080 - RNA, 19 nt, Artificial Sequence
  Description of Artificial Sequence: Synthetic oligonucleotide
cauuuaccuggggaaggua

SEQ ID NO: 2278081 - RNA, 19 nt, Artificial Sequence
  Description of Artificial Sequence: Synthetic oligonucleotide
cugccuuggaguucacuuu

SEQ ID NO: 2278082 - RNA, 19 nt, Artificial Sequence
  Description of Artificial Sequence: Synthetic oligonucleotide
aggacccucuguacccaga

SEQ ID NO: 2278083 - RNA, 19 nt, Artificial Sequence
  Description of Artificial Sequence: Synthetic oligonucleotide
gcuuggguacuuucacugu

SEQ ID NO: 2278084 - RNA, 19 nt, Artificial Sequence
  Description of Artificial Sequence: Synthetic oligonucleotide
gcaugacugcucagauacc

SEQ ID NO: 2278085 - RNA, 19 nt, Artificial Sequence
  Description of Artificial Sequence: Synthetic oligonucleotide
cuguacccagauccaaaau

SEQ ID NO: 2278086 - RNA, 19 nt, Artificial Sequence
  Description of Artificial Sequence: Synthetic oligonucleotide
ggucuccgugaaguaaaga

SEQ ID NO: 2278087 - RNA, 19 nt, Artificial Sequence
  Description of Artificial Sequence: Synthetic oligonucleotide
ugccggcuauugccagcuc

SEQ ID NO: 2278088 - RNA, 19 nt, Artificial Sequence
  Description of Artificial Sequence: Synthetic oligonucleotide
cccguagcuuugaccgagc

SEQ ID NO: 2278089 - RNA, 19 nt, Artificial Sequence
  Description of Artificial Sequence: Synthetic oligonucleotide
gcccuggcuaaugcacccg

SEQ ID NO: 2278090 - RNA, 19 nt, Artificial Sequence
  Description of Artificial Sequence: Synthetic oligonucleotide
gggaagguauccacaacau

SEQ ID NO: 2278091 - RNA, 19 nt, Artificial Sequence
  Description of Artificial Sequence: Synthetic oligonucleotide
cagauaccgcauguccaaa

SEQ ID NO: 2278092 - RNA, 19 nt, Artificial Sequence
  Description of Artificial Sequence: Synthetic oligonucleotide
caguucauuugcugagauu

SEQ ID NO: 2278093 - RNA, 19 nt, Artificial Sequence
  Description of Artificial Sequence: Synthetic oligonucleotide
cacucguccuuuuguccgu

SEQ ID NO: 2278094 - RNA, 19 nt, Artificial Sequence
  Description of Artificial Sequence: Synthetic oligonucleotide
cccaaucauucugccaguc

SEQ ID NO: 2278095 - RNA, 19 nt, Artificial Sequence
  Description of Artificial Sequence: Synthetic oligonucleotide
ccgagcugcagcccagcuc

SEQ ID NO: 2278096 - RNA, 19 nt, Artificial Sequence
  Description of Artificial Sequence: Synthetic oligonucleotide
ccaucucaccuucaaacau

SEQ ID NO: 2278097 - RNA, 19 nt, Artificial Sequence
  Description of Artificial Sequence: Synthetic oligonucleotide
gggcuuggguacuuucacu

SEQ ID NO: 2278098 - RNA, 19 nt, Artificial Sequence
  Description of Artificial Sequence: Synthetic oligonucleotide
cccgccucccgaguggccc

SEQ ID NO: 2278099 - RNA, 19 nt, Artificial Sequence
  Description of Artificial Sequence: Synthetic oligonucleotide
cccucuguacccagaucca

SEQ ID NO: 2278100 - RNA, 19 nt, Artificial Sequence
  Description of Artificial Sequence: Synthetic oligonucleotide
ggacccucuguacccagau

SEQ ID NO: 2278101 - RNA, 19 nt, Artificial Sequence
  Description of Artificial Sequence: Synthetic oligonucleotide
gcugccuggcauagaaugu

SEQ ID NO: 2278102 - RNA, 19 nt, Artificial Sequence
  Description of Artificial Sequence: Synthetic oligonucleotide
cgcucccaccuccuggggc

SEQ ID NO: 2278103 - RNA, 19 nt, Artificial Sequence
  Description of Artificial Sequence: Synthetic oligonucleotide
ggcccguagcuuugaccga

SEQ ID NO: 2278104 - RNA, 19 nt, Artificial Sequence
  Description of Artificial Sequence: Synthetic oligonucleotide
cucugccuguccacuuccu

SEQ ID NO: 2278105 - RNA, 19 nt, Artificial Sequence
  Description of Artificial Sequence: Synthetic oligonucleotide
gacccaagcuuggcggcau

SEQ ID NO: 2278106 - RNA, 19 nt, Artificial Sequence
  Description of Artificial Sequence: Synthetic oligonucleotide
ccucccgaguggcccguag

SEQ ID NO: 2278107 - RNA, 19 nt, Artificial Sequence
  Description of Artificial Sequence: Synthetic oligonucleotide
gaccacagcucaagagcuu

SEQ ID NO: 2278108 - RNA, 19 nt, Artificial Sequence
  Description of Artificial Sequence: Synthetic oligonucleotide
gggcccagaggaaucuucu

SEQ ID NO: 2278109 - RNA, 19 nt, Artificial Sequence
  Description of Artificial Sequence: Synthetic oligonucleotide
cguucccuccccagagguc

SEQ ID NO: 2278110 - RNA, 19 nt, Artificial Sequence
  Description of Artificial Sequence: Synthetic oligonucleotide
augcgcugccuggcauaga

SEQ ID NO: 2278111 - RNA, 19 nt, Artificial Sequence
  Description of Artificial Sequence: Synthetic oligonucleotide
ccucuguacccagauccaa

SEQ ID NO: 2278112 - RNA, 19 nt, Artificial Sequence
  Description of Artificial Sequence: Synthetic oligonucleotide
gcauagaaugugacccaau

SEQ ID NO: 2278113 - RNA, 19 nt, Artificial Sequence
  Description of Artificial Sequence: Synthetic oligonucleotide
cacuuccuuuccccacggu

SEQ ID NO: 2278114 - RNA, 19 nt, Artificial Sequence
  Description of Artificial Sequence: Synthetic oligonucleotide
ccggcuauugccagcucau

SEQ ID NO: 2278115 - RNA, 19 nt, Artificial Sequence
  Description of Artificial Sequence: Synthetic oligonucleotide
ccgaguggcccguagcuuu

SEQ ID NO: 2278116 - RNA, 19 nt, Artificial Sequence
  Description of Artificial Sequence: Synthetic oligonucleotide
ccccagaggucuccgugaa

SEQ ID NO: 2278117 - RNA, 19 nt, Artificial Sequence
  Description of Artificial Sequence: Synthetic oligonucleotide
ggggcugaaugcgcugccu

SEQ ID NO: 2278118 - RNA, 19 nt, Artificial Sequence
  Description of Artificial Sequence: Synthetic oligonucleotide
ccguagcuuugaccgagcu

SEQ ID NO: 2278119 - RNA, 19 nt, Artificial Sequence
  Description of Artificial Sequence: Synthetic oligonucleotide
gcuuggcggcaugacugcu

SEQ ID NO: 2278120 - RNA, 19 nt, Artificial Sequence
  Description of Artificial Sequence: Synthetic oligonucleotide
ccguagaaggaagcuggau

SEQ ID NO: 2278121 - RNA, 19 nt, Artificial Sequence
  Description of Artificial Sequence: Synthetic oligonucleotide
gcucacgcuucagcagcgu

SEQ ID NO: 2278122 - RNA, 19 nt, Artificial Sequence
  Description of Artificial Sequence: Synthetic oligonucleotide
ccagaaccuugaugggcuu

SEQ ID NO: 2278123 - RNA, 19 nt, Artificial Sequence
  Description of Artificial Sequence: Synthetic oligonucleotide
ccuccccagaggucuccgu

SEQ ID NO: 2278124 - RNA, 19 nt, Artificial Sequence
  Description of Artificial Sequence: Synthetic oligonucleotide
cccacggugccagccuccu

SEQ ID NO: 2278125 - RNA, 19 nt, Artificial Sequence
  Description of Artificial Sequence: Synthetic oligonucleotide
gcgcugccuggcauagaau

SEQ ID NO: 2278126 - RNA, 19 nt, Artificial Sequence
  Description of Artificial Sequence: Synthetic oligonucleotide
cccgaguggcccguagcuu

SEQ ID NO: 2278127 - RNA, 19 nt, Artificial Sequence
  Description of Artificial Sequence: Synthetic oligonucleotide
ccgcucugccuguccacuu

SEQ ID NO: 2278128 - RNA, 19 nt, Artificial Sequence
  Description of Artificial Sequence: Synthetic oligonucleotide
cccggucuccagaccucuu

SEQ ID NO: 2278129 - RNA, 19 nt, Artificial Sequence
  Description of Artificial Sequence: Synthetic oligonucleotide
gccucccgaguggcccgua

SEQ ID NO: 2278130 - RNA, 19 nt, Artificial Sequence
  Description of Artificial Sequence: Synthetic oligonucleotide
cgccucccgaguggcccgu

SEQ ID NO: 2278131 - RNA, 19 nt, Artificial Sequence
  Description of Artificial Sequence: Synthetic oligonucleotide
ucugcuuccaaguagaagg

SEQ ID NO: 2278132 - RNA, 19 nt, Artificial Sequence
  Description of Artificial Sequence: Synthetic oligonucleotide
aguauccuaacccaguucc

SEQ ID NO: 2278133 - RNA, 19 nt, Artificial Sequence
  Description of Artificial Sequence: Synthetic oligonucleotide
ugugguuugaauuuaugcg

SEQ ID NO: 2278134 - RNA, 19 nt, Artificial Sequence
  Description of Artificial Sequence: Synthetic oligonucleotide
auuguucugaugcugacgc

SEQ ID NO: 2278135 - RNA, 19 nt, Artificial Sequence
  Description of Artificial Sequence: Synthetic oligonucleotide
augaacaguauccuaaccc

SEQ ID NO: 2278136 - RNA, 19 nt, Artificial Sequence
  Description of Artificial Sequence: Synthetic oligonucleotide
gaugagacaacccaggccc

SEQ ID NO: 2278137 - RNA, 19 nt, Artificial Sequence
  Description of Artificial Sequence: Synthetic oligonucleotide
auuggguccaaacacauuc

SEQ ID NO: 2278138 - RNA, 19 nt, Artificial Sequence
  Description of Artificial Sequence: Synthetic oligonucleotide
aaagcauucuguuucuauc

SEQ ID NO: 2278139 - RNA, 19 nt, Artificial Sequence
  Description of Artificial Sequence: Synthetic oligonucleotide
ucuuccuuaggccacagag

SEQ ID NO: 2278140 - RNA, 19 nt, Artificial Sequence
  Description of Artificial Sequence: Synthetic oligonucleotide
ucuucggagaacuuggagg

SEQ ID NO: 2278141 - RNA, 19 nt, Artificial Sequence
  Description of Artificial Sequence: Synthetic oligonucleotide
uuaaaguucauguuccuga

SEQ ID NO: 2278142 - RNA, 19 nt, Artificial Sequence
  Description of Artificial Sequence: Synthetic oligonucleotide
aauagucagggcucaggcc

SEQ ID NO: 2278143 - RNA, 19 nt, Artificial Sequence
  Description of Artificial Sequence: Synthetic oligonucleotide
uccaccuuggacuucaagg

SEQ ID NO: 2278144 - RNA, 19 nt, Artificial Sequence
  Description of Artificial Sequence: Synthetic oligonucleotide
aaguucauguuccugaaga

SEQ ID NO: 2278145 - RNA, 19 nt, Artificial Sequence
  Description of Artificial Sequence: Synthetic oligonucleotide
ucauagaugagacaaccca

SEQ ID NO: 2278146 - RNA, 19 nt, Artificial Sequence
  Description of Artificial Sequence: Synthetic oligonucleotide
aagggucuaagaugguucc

SEQ ID NO: 2278147 - RNA, 19 nt, Artificial Sequence
  Description of Artificial Sequence: Synthetic oligonucleotide
uuugccaugggauugguac

SEQ ID NO: 2278148 - RNA, 19 nt, Artificial Sequence
  Description of Artificial Sequence: Synthetic oligonucleotide
uuaaccuucuccuugcggc

SEQ ID NO: 2278149 - RNA, 19 nt, Artificial Sequence
  Description of Artificial Sequence: Synthetic oligonucleotide
gugguuugaauuuaugcgg

SEQ ID NO: 2278150 - RNA, 19 nt, Artificial Sequence
  Description of Artificial Sequence: Synthetic oligonucleotide
guagaagggucuaagaugg

SEQ ID NO: 2278151 - RNA, 19 nt, Artificial Sequence
  Description of Artificial Sequence: Synthetic oligonucleotide
gaagucaucgucaguaugg

SEQ ID NO: 2278152 - RNA, 19 nt, Artificial Sequence
  Description of Artificial Sequence: Synthetic oligonucleotide
uacaacuggucuuagggag

SEQ ID NO: 2278153 - RNA, 19 nt, Artificial Sequence
  Description of Artificial Sequence: Synthetic oligonucleotide
uguuccugaagaaugggug

SEQ ID NO: 2278154 - RNA, 19 nt, Artificial Sequence
  Description of Artificial Sequence: Synthetic oligonucleotide
ucauguuccugaagaaugg

SEQ ID NO: 2278155 - RNA, 19 nt, Artificial Sequence
  Description of Artificial Sequence: Synthetic oligonucleotide
agaugagacaacccaggcc

SEQ ID NO: 2278156 - RNA, 19 nt, Artificial Sequence
  Description of Artificial Sequence: Synthetic oligonucleotide
cuuugcaguacacagcccg

SEQ ID NO: 2278157 - RNA, 19 nt, Artificial Sequence
  Description of Artificial Sequence: Synthetic oligonucleotide
ugaacaguauccuaaccca

SEQ ID NO: 2278158 - RNA, 19 nt, Artificial Sequence
  Description of Artificial Sequence: Synthetic oligonucleotide
aauugcucgauguccagca

SEQ ID NO: 2278159 - RNA, 19 nt, Artificial Sequence
  Description of Artificial Sequence: Synthetic oligonucleotide
guugacaccuuucacagug

SEQ ID NO: 2278160 - RNA, 19 nt, Artificial Sequence
  Description of Artificial Sequence: Synthetic oligonucleotide
gaugcugacgccugaagag

SEQ ID NO: 2278161 - RNA, 19 nt, Artificial Sequence
  Description of Artificial Sequence: Synthetic oligonucleotide
uguaagucuuccuuaggcc

SEQ ID NO: 2278162 - RNA, 19 nt, Artificial Sequence
  Description of Artificial Sequence: Synthetic oligonucleotide
agaacuuagaguagaaguc

SEQ ID NO: 2278163 - RNA, 19 nt, Artificial Sequence
  Description of Artificial Sequence: Synthetic oligonucleotide
uucaggucuggugagaggg

SEQ ID NO: 2278164 - RNA, 19 nt, Artificial Sequence
  Description of Artificial Sequence: Synthetic oligonucleotide
aagcauucuguuucuauca

SEQ ID NO: 2278165 - RNA, 19 nt, Artificial Sequence
  Description of Artificial Sequence: Synthetic oligonucleotide
ucugcuucgagucuuuggu

SEQ ID NO: 2278166 - RNA, 19 nt, Artificial Sequence
  Description of Artificial Sequence: Synthetic oligonucleotide
uuccaguggaguuugaacu

SEQ ID NO: 2278167 - RNA, 19 nt, Artificial Sequence
  Description of Artificial Sequence: Synthetic oligonucleotide
uuugaauuuaugcgguggu

SEQ ID NO: 2278168 - RNA, 19 nt, Artificial Sequence
  Description of Artificial Sequence: Synthetic oligonucleotide
uaugcggugguuacaacug

SEQ ID NO: 2278169 - RNA, 19 nt, Artificial Sequence
  Description of Artificial Sequence: Synthetic oligonucleotide
auagucagggcucaggcca

SEQ ID NO: 2278170 - RNA, 19 nt, Artificial Sequence
  Description of Artificial Sequence: Synthetic oligonucleotide
cacaguggagaauugcucg

SEQ ID NO: 2278171 - RNA, 19 nt, Artificial Sequence
  Description of Artificial Sequence: Synthetic oligonucleotide
gucaucgucaguauggucc

SEQ ID NO: 2278172 - RNA, 19 nt, Artificial Sequence
  Description of Artificial Sequence: Synthetic oligonucleotide
agguugacaccuuucacag

SEQ ID NO: 2278173 - RNA, 19 nt, Artificial Sequence
  Description of Artificial Sequence: Synthetic oligonucleotide
uguucaggacuucuggggc

SEQ ID NO: 2278174 - RNA, 19 nt, Artificial Sequence
  Description of Artificial Sequence: Synthetic oligonucleotide
uaccauuggguccaaacac

SEQ ID NO: 2278175 - RNA, 19 nt, Artificial Sequence
  Description of Artificial Sequence: Synthetic oligonucleotide
gagaacuuagaguagaagu

SEQ ID NO: 2278176 - RNA, 19 nt, Artificial Sequence
  Description of Artificial Sequence: Synthetic oligonucleotide
uuugaacugaugugguuug

SEQ ID NO: 2278177 - RNA, 19 nt, Artificial Sequence
  Description of Artificial Sequence: Synthetic oligonucleotide
uaagaugguuccaccuugg

SEQ ID NO: 2278178 - RNA, 19 nt, Artificial Sequence
  Description of Artificial Sequence: Synthetic oligonucleotide
guaugguccagguugacac

SEQ ID NO: 2278179 - RNA, 19 nt, Artificial Sequence
  Description of Artificial Sequence: Synthetic oligonucleotide
cuuggaggaguaaaccucc

SEQ ID NO: 2278180 - RNA, 19 nt, Artificial Sequence
  Description of Artificial Sequence: Synthetic oligonucleotide
aucaucucauagaugagac

SEQ ID NO: 2278181 - RNA, 19 nt, Artificial Sequence
  Description of Artificial Sequence: Synthetic oligonucleotide
uuaugcggugguuacaacu

SEQ ID NO: 2278182 - RNA, 19 nt, Artificial Sequence
  Description of Artificial Sequence: Synthetic oligonucleotide
ggaguuugaacugaugugg

SEQ ID NO: 2278183 - RNA, 19 nt, Artificial Sequence
  Description of Artificial Sequence: Synthetic oligonucleotide
gaauuuaugcggugguuac

SEQ ID NO: 2278184 - RNA, 19 nt, Artificial Sequence
  Description of Artificial Sequence: Synthetic oligonucleotide
guuugaauuuaugcggugg

SEQ ID NO: 2278185 - RNA, 19 nt, Artificial Sequence
  Description of Artificial Sequence: Synthetic oligonucleotide
cuuguuguugggaugaaca

SEQ ID NO: 2278186 - RNA, 19 nt, Artificial Sequence
  Description of Artificial Sequence: Synthetic oligonucleotide
ucucguuuugccaugggau

SEQ ID NO: 2278187 - RNA, 19 nt, Artificial Sequence
  Description of Artificial Sequence: Synthetic oligonucleotide
guuguucaggacuucuggg

SEQ ID NO: 2278188 - RNA, 19 nt, Artificial Sequence
  Description of Artificial Sequence: Synthetic oligonucleotide
ugaugcugacgccugaaga

SEQ ID NO: 2278189 - RNA, 19 nt, Artificial Sequence
  Description of Artificial Sequence: Synthetic oligonucleotide
cuuccuuaggccacagagg

SEQ ID NO: 2278190 - RNA, 19 nt, Artificial Sequence
  Description of Artificial Sequence: Synthetic oligonucleotide
uuacaacuggucuuaggga

SEQ ID NO: 2278191 - RNA, 19 nt, Artificial Sequence
  Description of Artificial Sequence: Synthetic oligonucleotide
ugguuugaauuuaugcggu

SEQ ID NO: 2278192 - RNA, 19 nt, Artificial Sequence
  Description of Artificial Sequence: Synthetic oligonucleotide
ugagaggguaccauugggu

SEQ ID NO: 2278193 - RNA, 19 nt, Artificial Sequence
  Description of Artificial Sequence: Synthetic oligonucleotide
cuuggaggcuuguuguugg

SEQ ID NO: 2278194 - RNA, 19 nt, Artificial Sequence
  Description of Artificial Sequence: Synthetic oligonucleotide
cagggcucaggccauaucg

SEQ ID NO: 2278195 - RNA, 19 nt, Artificial Sequence
  Description of Artificial Sequence: Synthetic oligonucleotide
gaggaguaaaccuccucag

SEQ ID NO: 2278196 - RNA, 19 nt, Artificial Sequence
  Description of Artificial Sequence: Synthetic oligonucleotide
uccagguugacaccuuuca

SEQ ID NO: 2278197 - RNA, 19 nt, Artificial Sequence
  Description of Artificial Sequence: Synthetic oligonucleotide
uguggagaacuuagaguag

SEQ ID NO: 2278198 - RNA, 19 nt, Artificial Sequence
  Description of Artificial Sequence: Synthetic oligonucleotide
cucgaaauggugacuggcc

SEQ ID NO: 2278199 - RNA, 19 nt, Artificial Sequence
  Description of Artificial Sequence: Synthetic oligonucleotide
agcuccuuaaagcauucug

SEQ ID NO: 2278200 - RNA, 19 nt, Artificial Sequence
  Description of Artificial Sequence: Synthetic oligonucleotide
ucgaaauggugacuggccu

SEQ ID NO: 2278201 - RNA, 19 nt, Artificial Sequence
  Description of Artificial Sequence: Synthetic oligonucleotide
guaagucuuccuuaggcca

SEQ ID NO: 2278202 - RNA, 19 nt, Artificial Sequence
  Description of Artificial Sequence: Synthetic oligonucleotide
acaccuuucacaguggaga

SEQ ID NO: 2278203 - RNA, 19 nt, Artificial Sequence
  Description of Artificial Sequence: Synthetic oligonucleotide
ucuaagaugguuccaccuu

SEQ ID NO: 2278204 - RNA, 19 nt, Artificial Sequence
  Description of Artificial Sequence: Synthetic oligonucleotide
gaacuuagaguagaaguca

SEQ ID NO: 2278205 - RNA, 19 nt, Artificial Sequence
  Description of Artificial Sequence: Synthetic oligonucleotide
aggcgcuuaaaguucaugu

SEQ ID NO: 2278206 - RNA, 19 nt, Artificial Sequence
  Description of Artificial Sequence: Synthetic oligonucleotide
gguuguucaggacuucugg

SEQ ID NO: 2278207 - RNA, 19 nt, Artificial Sequence
  Description of Artificial Sequence: Synthetic oligonucleotide
uggugagaggguaccauug

SEQ ID NO: 2278208 - RNA, 19 nt, Artificial Sequence
  Description of Artificial Sequence: Synthetic oligonucleotide
uccaguggaguuugaacug

SEQ ID NO: 2278209 - RNA, 19 nt, Artificial Sequence
  Description of Artificial Sequence: Synthetic oligonucleotide
cuuaaccuucuccuugcgg

SEQ ID NO: 2278210 - RNA, 19 nt, Artificial Sequence
  Description of Artificial Sequence: Synthetic oligonucleotide
ugaauuuaugcggugguua

SEQ ID NO: 2278211 - RNA, 19 nt, Artificial Sequence
  Description of Artificial Sequence: Synthetic oligonucleotide
ucagucuccagcacccggc

SEQ ID NO: 2278212 - RNA, 19 nt, Artificial Sequence
  Description of Artificial Sequence: Synthetic oligonucleotide
ucuguucaggucuggugag

SEQ ID NO: 2278213 - RNA, 19 nt, Artificial Sequence
  Description of Artificial Sequence: Synthetic oligonucleotide
aguguucucacgguguaag

SEQ ID NO: 2278214 - RNA, 19 nt, Artificial Sequence
  Description of Artificial Sequence: Synthetic oligonucleotide
ugccucuugaccucagcag

SEQ ID NO: 2278215 - RNA, 19 nt, Artificial Sequence
  Description of Artificial Sequence: Synthetic oligonucleotide
uaaaguucauguuccugaa

SEQ ID NO: 2278216 - RNA, 19 nt, Artificial Sequence
  Description of Artificial Sequence: Synthetic oligonucleotide
gauccaacauccccagccc

SEQ ID NO: 2278217 - RNA, 19 nt, Artificial Sequence
  Description of Artificial Sequence: Synthetic oligonucleotide
uggcuacccagccacagug

SEQ ID NO: 2278218 - RNA, 19 nt, Artificial Sequence
  Description of Artificial Sequence: Synthetic oligonucleotide
uuucacaguggagaauugc

SEQ ID NO: 2278219 - RNA, 19 nt, Artificial Sequence
  Description of Artificial Sequence: Synthetic oligonucleotide
uaacccaguucccagggaa

SEQ ID NO: 2278220 - RNA, 19 nt, Artificial Sequence
  Description of Artificial Sequence: Synthetic oligonucleotide
guuucuaucaucucguuuu

SEQ ID NO: 2278221 - RNA, 19 nt, Artificial Sequence
  Description of Artificial Sequence: Synthetic oligonucleotide
cuucggagaacuuggagga

SEQ ID NO: 2278222 - RNA, 19 nt, Artificial Sequence
  Description of Artificial Sequence: Synthetic oligonucleotide
gagaggguaccauuggguc

SEQ ID NO: 2278223 - RNA, 19 nt, Artificial Sequence
  Description of Artificial Sequence: Synthetic oligonucleotide
uggaauuguucugaugcug

SEQ ID NO: 2278224 - RNA, 19 nt, Artificial Sequence
  Description of Artificial Sequence: Synthetic oligonucleotide
ucuuggaauuguucugaug

SEQ ID NO: 2278225 - RNA, 19 nt, Artificial Sequence
  Description of Artificial Sequence: Synthetic oligonucleotide
aguugggugaacucuugga

SEQ ID NO: 2278226 - RNA, 19 nt, Artificial Sequence
  Description of Artificial Sequence: Synthetic oligonucleotide
gaguugggugaacucuugg

SEQ ID NO: 2278227 - RNA, 19 nt, Artificial Sequence
  Description of Artificial Sequence: Synthetic oligonucleotide
ucgcugguuguucaggacu

SEQ ID NO: 2278228 - RNA, 19 nt, Artificial Sequence
  Description of Artificial Sequence: Synthetic oligonucleotide
caucucauagaugagacaa

SEQ ID NO: 2278229 - RNA, 19 nt, Artificial Sequence
  Description of Artificial Sequence: Synthetic oligonucleotide
ucaucgucaguauggucca

SEQ ID NO: 2278230 - RNA, 19 nt, Artificial Sequence
  Description of Artificial Sequence: Synthetic oligonucleotide
cuuaaaguucauguuccug

SEQ ID NO: 2278231 - RNA, 19 nt, Artificial Sequence
  Description of Artificial Sequence: Synthetic oligonucleotide
uguuguugggaugaacagu

SEQ ID NO: 2278232 - RNA, 19 nt, Artificial Sequence
  Description of Artificial Sequence: Synthetic oligonucleotide
aguggaagcuccaucagcu

SEQ ID NO: 2278233 - RNA, 19 nt, Artificial Sequence
  Description of Artificial Sequence: Synthetic oligonucleotide
gaagggucuaagaugguuc

SEQ ID NO: 2278234 - RNA, 19 nt, Artificial Sequence
  Description of Artificial Sequence: Synthetic oligonucleotide
aacauccccagcccuccag

SEQ ID NO: 2278235 - RNA, 19 nt, Artificial Sequence
  Description of Artificial Sequence: Synthetic oligonucleotide
gaacaguauccuaacccag

SEQ ID NO: 2278236 - RNA, 19 nt, Artificial Sequence
  Description of Artificial Sequence: Synthetic oligonucleotide
uguuucuaucaucucguuu

SEQ ID NO: 2278237 - RNA, 19 nt, Artificial Sequence
  Description of Artificial Sequence: Synthetic oligonucleotide
aacaguauccuaacccagu

SEQ ID NO: 2278238 - RNA, 19 nt, Artificial Sequence
  Description of Artificial Sequence: Synthetic oligonucleotide
ucccgcuuaaccuucuccu

SEQ ID NO: 2278239 - RNA, 19 nt, Artificial Sequence
  Description of Artificial Sequence: Synthetic oligonucleotide
uugggugaacucuuggaau

SEQ ID NO: 2278240 - RNA, 19 nt, Artificial Sequence
  Description of Artificial Sequence: Synthetic oligonucleotide
uauccuaacccaguuccca

SEQ ID NO: 2278241 - RNA, 19 nt, Artificial Sequence
  Description of Artificial Sequence: Synthetic oligonucleotide
agcacaucuuugcaguaca

SEQ ID NO: 2278242 - RNA, 19 nt, Artificial Sequence
  Description of Artificial Sequence: Synthetic oligonucleotide
gaauuguucugaugcugac

SEQ ID NO: 2278243 - RNA, 19 nt, Artificial Sequence
  Description of Artificial Sequence: Synthetic oligonucleotide
uggagaauugcucgauguc

SEQ ID NO: 2278244 - RNA, 19 nt, Artificial Sequence
  Description of Artificial Sequence: Synthetic oligonucleotide
uaucgcugguuguucagga

SEQ ID NO: 2278245 - RNA, 19 nt, Artificial Sequence
  Description of Artificial Sequence: Synthetic oligonucleotide
ugcggccucgaaaugguga

SEQ ID NO: 2278246 - RNA, 19 nt, Artificial Sequence
  Description of Artificial Sequence: Synthetic oligonucleotide
aauuuaugcggugguuaca

SEQ ID NO: 2278247 - RNA, 19 nt, Artificial Sequence
  Description of Artificial Sequence: Synthetic oligonucleotide
ggaguaaaccuccucaguc

SEQ ID NO: 2278248 - RNA, 19 nt, Artificial Sequence
  Description of Artificial Sequence: Synthetic oligonucleotide
acuucaaggccagagcuga

SEQ ID NO: 2278249 - RNA, 19 nt, Artificial Sequence
  Description of Artificial Sequence: Synthetic oligonucleotide
cagguugacaccuuucaca

SEQ ID NO: 2278250 - RNA, 19 nt, Artificial Sequence
  Description of Artificial Sequence: Synthetic oligonucleotide
ggucuuagggaguugggug

SEQ ID NO: 2278251 - RNA, 19 nt, Artificial Sequence
  Description of Artificial Sequence: Synthetic oligonucleotide
auuuaugcggugguuacaa

SEQ ID NO: 2278252 - RNA, 19 nt, Artificial Sequence
  Description of Artificial Sequence: Synthetic oligonucleotide
uucugcuuccaaguagaag

SEQ ID NO: 2278253 - RNA, 19 nt, Artificial Sequence
  Description of Artificial Sequence: Synthetic oligonucleotide
ucuccuugcggccucgaaa

SEQ ID NO: 2278254 - RNA, 19 nt, Artificial Sequence
  Description of Artificial Sequence: Synthetic oligonucleotide
gagccuguggagaacuuag

SEQ ID NO: 2278255 - RNA, 19 nt, Artificial Sequence
  Description of Artificial Sequence: Synthetic oligonucleotide
aguggagaauugcucgaug

SEQ ID NO: 2278256 - RNA, 19 nt, Artificial Sequence
  Description of Artificial Sequence: Synthetic oligonucleotide
gaugugguuugaauuuaug

SEQ ID NO: 2278257 - RNA, 19 nt, Artificial Sequence
  Description of Artificial Sequence: Synthetic oligonucleotide
uguucucacgguguaaguc

SEQ ID NO: 2278258 - RNA, 19 nt, Artificial Sequence
  Description of Artificial Sequence: Synthetic oligonucleotide
caggccauaucgcugguug

SEQ ID NO: 2278259 - RNA, 19 nt, Artificial Sequence
  Description of Artificial Sequence: Synthetic oligonucleotide
auccuaacccaguucccag

SEQ ID NO: 2278260 - RNA, 19 nt, Artificial Sequence
  Description of Artificial Sequence: Synthetic oligonucleotide
auugcucgauguccagcac

SEQ ID NO: 2278261 - RNA, 19 nt, Artificial Sequence
  Description of Artificial Sequence: Synthetic oligonucleotide
uucgagucuuuggugagca

SEQ ID NO: 2278262 - RNA, 19 nt, Artificial Sequence
  Description of Artificial Sequence: Synthetic oligonucleotide
auaucgcugguuguucagg

SEQ ID NO: 2278263 - RNA, 19 nt, Artificial Sequence
  Description of Artificial Sequence: Synthetic oligonucleotide
uuagggaguugggugaacu

SEQ ID NO: 2278264 - RNA, 19 nt, Artificial Sequence
  Description of Artificial Sequence: Synthetic oligonucleotide
cuaucaucucguuuugcca

SEQ ID NO: 2278265 - RNA, 19 nt, Artificial Sequence
  Description of Artificial Sequence: Synthetic oligonucleotide
ucaucucguuuugccaugg

SEQ ID NO: 2278266 - RNA, 19 nt, Artificial Sequence
  Description of Artificial Sequence: Synthetic oligonucleotide
cauaucgcugguuguucag

SEQ ID NO: 2278267 - RNA, 19 nt, Artificial Sequence
  Description of Artificial Sequence: Synthetic oligonucleotide
guugggugaacucuuggaa

SEQ ID NO: 2278268 - RNA, 19 nt, Artificial Sequence
  Description of Artificial Sequence: Synthetic oligonucleotide
ugcucgauguccagcacau

SEQ ID NO: 2278269 - RNA, 19 nt, Artificial Sequence
  Description of Artificial Sequence: Synthetic oligonucleotide
ggaggaguaaaccuccuca

SEQ ID NO: 2278270 - RNA, 19 nt, Artificial Sequence
  Description of Artificial Sequence: Synthetic oligonucleotide
uggagaacuuagaguagaa

SEQ ID NO: 2278271 - RNA, 19 nt, Artificial Sequence
  Description of Artificial Sequence: Synthetic oligonucleotide
guuguugggaugaacagua

SEQ ID NO: 2278272 - RNA, 19 nt, Artificial Sequence
  Description of Artificial Sequence: Synthetic oligonucleotide
aacuuagaguagaagucau

SEQ ID NO: 2278273 - RNA, 19 nt, Artificial Sequence
  Description of Artificial Sequence: Synthetic oligonucleotide
aggaguaaaccuccucagu

SEQ ID NO: 2278274 - RNA, 19 nt, Artificial Sequence
  Description of Artificial Sequence: Synthetic oligonucleotide
caccucuucccgcuuaacc

SEQ ID NO: 2278275 - RNA, 19 nt, Artificial Sequence
  Description of Artificial Sequence: Synthetic oligonucleotide
uccuuaaagcauucuguuu

SEQ ID NO: 2278276 - RNA, 19 nt, Artificial Sequence
  Description of Artificial Sequence: Synthetic oligonucleotide
acaguggagaauugcucga

SEQ ID NO: 2278277 - RNA, 19 nt, Artificial Sequence
  Description of Artificial Sequence: Synthetic oligonucleotide
gccuucaaucaucucauag

SEQ ID NO: 2278278 - RNA, 19 nt, Artificial Sequence
  Description of Artificial Sequence: Synthetic oligonucleotide
aucucauagaugagacaac

SEQ ID NO: 2278279 - RNA, 19 nt, Artificial Sequence
  Description of Artificial Sequence: Synthetic oligonucleotide
augcggugguuacaacugg

SEQ ID NO: 2278280 - RNA, 19 nt, Artificial Sequence
  Description of Artificial Sequence: Synthetic oligonucleotide
ucuuugcaguacacagccc

SEQ ID NO: 2278281 - RNA, 19 nt, Artificial Sequence
  Description of Artificial Sequence: Synthetic oligonucleotide
acuuagaguagaagucauc

SEQ ID NO: 2278282 - RNA, 19 nt, Artificial Sequence
  Description of Artificial Sequence: Synthetic oligonucleotide
uugcaguacacagcccggg

SEQ ID NO: 2278283 - RNA, 19 nt, Artificial Sequence
  Description of Artificial Sequence: Synthetic oligonucleotide
gaggcuuguuguugggaug

SEQ ID NO: 2278284 - RNA, 19 nt, Artificial Sequence
  Description of Artificial Sequence: Synthetic oligonucleotide
caguggaagcuccaucagc

SEQ ID NO: 2278285 - RNA, 19 nt, Artificial Sequence
  Description of Artificial Sequence: Synthetic oligonucleotide
uguugcagauggacuuggc

SEQ ID NO: 2278286 - RNA, 19 nt, Artificial Sequence
  Description of Artificial Sequence: Synthetic oligonucleotide
gauugguacagagccugug

SEQ ID NO: 2278287 - RNA, 19 nt, Artificial Sequence
  Description of Artificial Sequence: Synthetic oligonucleotide
gucuuagggaguuggguga

SEQ ID NO: 2278288 - RNA, 19 nt, Artificial Sequence
  Description of Artificial Sequence: Synthetic oligonucleotide
cucuucggagaacuuggag

SEQ ID NO: 2278289 - RNA, 19 nt, Artificial Sequence
  Description of Artificial Sequence: Synthetic oligonucleotide
aucgucaguaugguccagg

SEQ ID NO: 2278290 - RNA, 19 nt, Artificial Sequence
  Description of Artificial Sequence: Synthetic oligonucleotide
gguuacaacuggucuuagg

SEQ ID NO: 2278291 - RNA, 19 nt, Artificial Sequence
  Description of Artificial Sequence: Synthetic oligonucleotide
acgaagggaggauccaaca

SEQ ID NO: 2278292 - RNA, 19 nt, Artificial Sequence
  Description of Artificial Sequence: Synthetic oligonucleotide
aucaucucguuuugccaug

SEQ ID NO: 2278293 - RNA, 19 nt, Artificial Sequence
  Description of Artificial Sequence: Synthetic oligonucleotide
uccaacauccccagcccuc

SEQ ID NO: 2278294 - RNA, 19 nt, Artificial Sequence
  Description of Artificial Sequence: Synthetic oligonucleotide
gaguaaaccuccucagucu

SEQ ID NO: 2278295 - RNA, 19 nt, Artificial Sequence
  Description of Artificial Sequence: Synthetic oligonucleotide
uuggaggcuuguuguuggg

SEQ ID NO: 2278296 - RNA, 19 nt, Artificial Sequence
  Description of Artificial Sequence: Synthetic oligonucleotide
ucugugaaacagcccuuuc

SEQ ID NO: 2278297 - RNA, 19 nt, Artificial Sequence
  Description of Artificial Sequence: Synthetic oligonucleotide
acaguauccuaacccaguu

SEQ ID NO: 2278298 - RNA, 19 nt, Artificial Sequence
  Description of Artificial Sequence: Synthetic oligonucleotide
ucgucaguaugguccaggu

SEQ ID NO: 2278299 - RNA, 19 nt, Artificial Sequence
  Description of Artificial Sequence: Synthetic oligonucleotide
ggaucgggaacgaagggag

SEQ ID NO: 2278300 - RNA, 19 nt, Artificial Sequence
  Description of Artificial Sequence: Synthetic oligonucleotide
cucacgguguaagucuucc

SEQ ID NO: 2278301 - RNA, 19 nt, Artificial Sequence
  Description of Artificial Sequence: Synthetic oligonucleotide
gaggcugauuucuguucag

SEQ ID NO: 2278302 - RNA, 19 nt, Artificial Sequence
  Description of Artificial Sequence: Synthetic oligonucleotide
auguugcagauggacuugg

SEQ ID NO: 2278303 - RNA, 19 nt, Artificial Sequence
  Description of Artificial Sequence: Synthetic oligonucleotide
guacacagcccggggaucg

SEQ ID NO: 2278304 - RNA, 19 nt, Artificial Sequence
  Description of Artificial Sequence: Synthetic oligonucleotide
cuccucagucuccagcacc

SEQ ID NO: 2278305 - RNA, 19 nt, Artificial Sequence
  Description of Artificial Sequence: Synthetic oligonucleotide
gguguaagucuuccuuagg

SEQ ID NO: 2278306 - RNA, 19 nt, Artificial Sequence
  Description of Artificial Sequence: Synthetic oligonucleotide
aauggugacuggccuucaa

SEQ ID NO: 2278307 - RNA, 19 nt, Artificial Sequence
  Description of Artificial Sequence: Synthetic oligonucleotide
gacuucaaggccagagcug

SEQ ID NO: 2278308 - RNA, 19 nt, Artificial Sequence
  Description of Artificial Sequence: Synthetic oligonucleotide
uucccagggaagcucuccu

SEQ ID NO: 2278309 - RNA, 19 nt, Artificial Sequence
  Description of Artificial Sequence: Synthetic oligonucleotide
cuggucuuagggaguuggg

SEQ ID NO: 2278310 - RNA, 19 nt, Artificial Sequence
  Description of Artificial Sequence: Synthetic oligonucleotide
ugcugacgccugaagaguc

SEQ ID NO: 2278311 - RNA, 19 nt, Artificial Sequence
  Description of Artificial Sequence: Synthetic oligonucleotide
agggcucaggccauaucgc

SEQ ID NO: 2278312 - RNA, 19 nt, Artificial Sequence
  Description of Artificial Sequence: Synthetic oligonucleotide
guucucacgguguaagucu

SEQ ID NO: 2278313 - RNA, 19 nt, Artificial Sequence
  Description of Artificial Sequence: Synthetic oligonucleotide
gaggguaccauugggucca

SEQ ID NO: 2278314 - RNA, 19 nt, Artificial Sequence
  Description of Artificial Sequence: Synthetic oligonucleotide
uuuaugcggugguuacaac

SEQ ID NO: 2278315 - RNA, 19 nt, Artificial Sequence
  Description of Artificial Sequence: Synthetic oligonucleotide
cgcuuaaaguucauguucc

SEQ ID NO: 2278316 - RNA, 19 nt, Artificial Sequence
  Description of Artificial Sequence: Synthetic oligonucleotide
aacccaguucccagggaag

SEQ ID NO: 2278317 - RNA, 19 nt, Artificial Sequence
  Description of Artificial Sequence: Synthetic oligonucleotide
ugggaugaacaguauccua

SEQ ID NO: 2278318 - RNA, 19 nt, Artificial Sequence
  Description of Artificial Sequence: Synthetic oligonucleotide
aguaugguccagguugaca

SEQ ID NO: 2278319 - RNA, 19 nt, Artificial Sequence
  Description of Artificial Sequence: Synthetic oligonucleotide
aguuugaacugaugugguu

SEQ ID NO: 2278320 - RNA, 19 nt, Artificial Sequence
  Description of Artificial Sequence: Synthetic oligonucleotide
caggccccaauagucaggg

SEQ ID NO: 2278321 - RNA, 19 nt, Artificial Sequence
  Description of Artificial Sequence: Synthetic oligonucleotide
gccuguggagaacuuagag

SEQ ID NO: 2278322 - RNA, 19 nt, Artificial Sequence
  Description of Artificial Sequence: Synthetic oligonucleotide
gagcugaaacugcugcuuc

SEQ ID NO: 2278323 - RNA, 19 nt, Artificial Sequence
  Description of Artificial Sequence: Synthetic oligonucleotide
cagcauguugcagauggac

SEQ ID NO: 2278324 - RNA, 19 nt, Artificial Sequence
  Description of Artificial Sequence: Synthetic oligonucleotide
gacgccugaagagucugug

SEQ ID NO: 2278325 - RNA, 19 nt, Artificial Sequence
  Description of Artificial Sequence: Synthetic oligonucleotide
uggcaacccagccucugcu

SEQ ID NO: 2278326 - RNA, 19 nt, Artificial Sequence
  Description of Artificial Sequence: Synthetic oligonucleotide
gaucgggaacgaagggagg

SEQ ID NO: 2278327 - RNA, 19 nt, Artificial Sequence
  Description of Artificial Sequence: Synthetic oligonucleotide
aucgggaacgaagggagga

SEQ ID NO: 2278328 - RNA, 19 nt, Artificial Sequence
  Description of Artificial Sequence: Synthetic oligonucleotide
uucaggacuucuggggcca

SEQ ID NO: 2278329 - RNA, 19 nt, Artificial Sequence
  Description of Artificial Sequence: Synthetic oligonucleotide
uucaaggccagagcugaaa

SEQ ID NO: 2278330 - RNA, 19 nt, Artificial Sequence
  Description of Artificial Sequence: Synthetic oligonucleotide
ggugacuggccuucaauca

SEQ ID NO: 2278331 - RNA, 19 nt, Artificial Sequence
  Description of Artificial Sequence: Synthetic oligonucleotide
cauguugcagauggacuug

SEQ ID NO: 2278332 - RNA, 19 nt, Artificial Sequence
  Description of Artificial Sequence: Synthetic oligonucleotide
auggugacuggccuucaau

SEQ ID NO: 2278333 - RNA, 19 nt, Artificial Sequence
  Description of Artificial Sequence: Synthetic oligonucleotide
uccggaggcugauuucugu

SEQ ID NO: 2278334 - RNA, 19 nt, Artificial Sequence
  Description of Artificial Sequence: Synthetic oligonucleotide
guggagaacuuagaguaga

SEQ ID NO: 2278335 - RNA, 19 nt, Artificial Sequence
  Description of Artificial Sequence: Synthetic oligonucleotide
ggucuaagaugguuccacc

SEQ ID NO: 2278336 - RNA, 19 nt, Artificial Sequence
  Description of Artificial Sequence: Synthetic oligonucleotide
gguuugaauuuaugcggug

SEQ ID NO: 2278337 - RNA, 19 nt, Artificial Sequence
  Description of Artificial Sequence: Synthetic oligonucleotide
augagacaacccaggcccc

SEQ ID NO: 2278338 - RNA, 19 nt, Artificial Sequence
  Description of Artificial Sequence: Synthetic oligonucleotide
uucucacgguguaagucuu

SEQ ID NO: 2278339 - RNA, 19 nt, Artificial Sequence
  Description of Artificial Sequence: Synthetic oligonucleotide
ggacuuggccucuucggag

SEQ ID NO: 2278340 - RNA, 19 nt, Artificial Sequence
  Description of Artificial Sequence: Synthetic oligonucleotide
accauuggguccaaacaca

SEQ ID NO: 2278341 - RNA, 19 nt, Artificial Sequence
  Description of Artificial Sequence: Synthetic oligonucleotide
uugaauuuaugcggugguu

SEQ ID NO: 2278342 - RNA, 19 nt, Artificial Sequence
  Description of Artificial Sequence: Synthetic oligonucleotide
uagggaguugggugaacuc

SEQ ID NO: 2278343 - RNA, 19 nt, Artificial Sequence
  Description of Artificial Sequence: Synthetic oligonucleotide
uagccacaguguucucacg

SEQ ID NO: 2278344 - RNA, 19 nt, Artificial Sequence
  Description of Artificial Sequence: Synthetic oligonucleotide
ucuggugagaggguaccau

SEQ ID NO: 2278345 - RNA, 19 nt, Artificial Sequence
  Description of Artificial Sequence: Synthetic oligonucleotide
guggagaauugcucgaugu

SEQ ID NO: 2278346 - RNA, 19 nt, Artificial Sequence
  Description of Artificial Sequence: Synthetic oligonucleotide
auccaacauccccagcccu

SEQ ID NO: 2278347 - RNA, 19 nt, Artificial Sequence
  Description of Artificial Sequence: Synthetic oligonucleotide
uuccggaggcugauuucug

SEQ ID NO: 2278348 - RNA, 19 nt, Artificial Sequence
  Description of Artificial Sequence: Synthetic oligonucleotide
agaagggucuaagaugguu

SEQ ID NO: 2278349 - RNA, 19 nt, Artificial Sequence
  Description of Artificial Sequence: Synthetic oligonucleotide
cuuccaaguagaagggucu

SEQ ID NO: 2278350 - RNA, 19 nt, Artificial Sequence
  Description of Artificial Sequence: Synthetic oligonucleotide
ggaauuguucugaugcuga

SEQ ID NO: 2278351 - RNA, 19 nt, Artificial Sequence
  Description of Artificial Sequence: Synthetic oligonucleotide
agagcugaaacugcugcuu

SEQ ID NO: 2278352 - RNA, 19 nt, Artificial Sequence
  Description of Artificial Sequence: Synthetic oligonucleotide
caguauccuaacccaguuc

SEQ ID NO: 2278353 - RNA, 19 nt, Artificial Sequence
  Description of Artificial Sequence: Synthetic oligonucleotide
ugcugcuuccaguggaguu

SEQ ID NO: 2278354 - RNA, 19 nt, Artificial Sequence
  Description of Artificial Sequence: Synthetic oligonucleotide
augguuccaccuuggacuu

SEQ ID NO: 2278355 - RNA, 19 nt, Artificial Sequence
  Description of Artificial Sequence: Synthetic oligonucleotide
guauccuaacccaguuccc

SEQ ID NO: 2278356 - RNA, 19 nt, Artificial Sequence
  Description of Artificial Sequence: Synthetic oligonucleotide
ugagacaacccaggcccca

SEQ ID NO: 2278357 - RNA, 19 nt, Artificial Sequence
  Description of Artificial Sequence: Synthetic oligonucleotide
ucccagggaagcucuccug

SEQ ID NO: 2278358 - RNA, 19 nt, Artificial Sequence
  Description of Artificial Sequence: Synthetic oligonucleotide
cuucgagucuuuggugagc

SEQ ID NO: 2278359 - RNA, 19 nt, Artificial Sequence
  Description of Artificial Sequence: Synthetic oligonucleotide
agguuccggaggcugauuu

SEQ ID NO: 2278360 - RNA, 19 nt, Artificial Sequence
  Description of Artificial Sequence: Synthetic oligonucleotide
ucacgguguaagucuuccu

SEQ ID NO: 2278361 - RNA, 19 nt, Artificial Sequence
  Description of Artificial Sequence: Synthetic oligonucleotide
caucucguuuugccauggg

SEQ ID NO: 2278362 - RNA, 19 nt, Artificial Sequence
  Description of Artificial Sequence: Synthetic oligonucleotide
uagaagggucuaagauggu

SEQ ID NO: 2278363 - RNA, 19 nt, Artificial Sequence
  Description of Artificial Sequence: Synthetic oligonucleotide
gggaugaacaguauccuaa

SEQ ID NO: 2278364 - RNA, 19 nt, Artificial Sequence
  Description of Artificial Sequence: Synthetic oligonucleotide
caucagcuacaaguucugc

SEQ ID NO: 2278365 - RNA, 19 nt, Artificial Sequence
  Description of Artificial Sequence: Synthetic oligonucleotide
aguggaguuugaacugaug

SEQ ID NO: 2278366 - RNA, 19 nt, Artificial Sequence
  Description of Artificial Sequence: Synthetic oligonucleotide
ucgagucuuuggugagcag

SEQ ID NO: 2278367 - RNA, 19 nt, Artificial Sequence
  Description of Artificial Sequence: Synthetic oligonucleotide
ccaaguagaagggucuaag

SEQ ID NO: 2278368 - RNA, 19 nt, Artificial Sequence
  Description of Artificial Sequence: Synthetic oligonucleotide
ucuucccgcuuaaccuucu

SEQ ID NO: 2278369 - RNA, 19 nt, Artificial Sequence
  Description of Artificial Sequence: Synthetic oligonucleotide
guuugaacugaugugguuu

SEQ ID NO: 2278370 - RNA, 19 nt, Artificial Sequence
  Description of Artificial Sequence: Synthetic oligonucleotide
augcugacgccugaagagu

SEQ ID NO: 2278371 - RNA, 19 nt, Artificial Sequence
  Description of Artificial Sequence: Synthetic oligonucleotide
ccuuaggccacagaggauc

SEQ ID NO: 2278372 - RNA, 19 nt, Artificial Sequence
  Description of Artificial Sequence: Synthetic oligonucleotide
acaacuggucuuagggagu

SEQ ID NO: 2278373 - RNA, 19 nt, Artificial Sequence
  Description of Artificial Sequence: Synthetic oligonucleotide
ggcgauccaccucuucccg

SEQ ID NO: 2278374 - RNA, 19 nt, Artificial Sequence
  Description of Artificial Sequence: Synthetic oligonucleotide
ucucacgguguaagucuuc

SEQ ID NO: 2278375 - RNA, 19 nt, Artificial Sequence
  Description of Artificial Sequence: Synthetic oligonucleotide
uggaggcuuguuguuggga

SEQ ID NO: 2278376 - RNA, 19 nt, Artificial Sequence
  Description of Artificial Sequence: Synthetic oligonucleotide
ugacgccugaagagucugu

SEQ ID NO: 2278377 - RNA, 19 nt, Artificial Sequence
  Description of Artificial Sequence: Synthetic oligonucleotide
gggaacgaagggaggaucc

SEQ ID NO: 2278378 - RNA, 19 nt, Artificial Sequence
  Description of Artificial Sequence: Synthetic oligonucleotide
ugguuacaacuggucuuag

SEQ ID NO: 2278379 - RNA, 19 nt, Artificial Sequence
  Description of Artificial Sequence: Synthetic oligonucleotide
uccuugcggccucgaaaug

SEQ ID NO: 2278380 - RNA, 19 nt, Artificial Sequence
  Description of Artificial Sequence: Synthetic oligonucleotide
ccucuugaccucagcagcc

SEQ ID NO: 2278381 - RNA, 19 nt, Artificial Sequence
  Description of Artificial Sequence: Synthetic oligonucleotide
cagcacaucuuugcaguac

SEQ ID NO: 2278382 - RNA, 19 nt, Artificial Sequence
  Description of Artificial Sequence: Synthetic oligonucleotide
ucagggcucaggccauauc

SEQ ID NO: 2278383 - RNA, 19 nt, Artificial Sequence
  Description of Artificial Sequence: Synthetic oligonucleotide
aggccauaucgcugguugu

SEQ ID NO: 2278384 - RNA, 19 nt, Artificial Sequence
  Description of Artificial Sequence: Synthetic oligonucleotide
uccuuaggccacagaggau

SEQ ID NO: 2278385 - RNA, 19 nt, Artificial Sequence
  Description of Artificial Sequence: Synthetic oligonucleotide
gggucuaagaugguuccac

SEQ ID NO: 2278386 - RNA, 19 nt, Artificial Sequence
  Description of Artificial Sequence: Synthetic oligonucleotide
ccaauagucagggcucagg

SEQ ID NO: 2278387 - RNA, 19 nt, Artificial Sequence
  Description of Artificial Sequence: Synthetic oligonucleotide
cugugaaacagcccuuucu

SEQ ID NO: 2278388 - RNA, 19 nt, Artificial Sequence
  Description of Artificial Sequence: Synthetic oligonucleotide
uuccaaguagaagggucua

SEQ ID NO: 2278389 - RNA, 19 nt, Artificial Sequence
  Description of Artificial Sequence: Synthetic oligonucleotide
ccuugcggccucgaaaugg

SEQ ID NO: 2278390 - RNA, 19 nt, Artificial Sequence
  Description of Artificial Sequence: Synthetic oligonucleotide
uugcggccucgaaauggug

SEQ ID NO: 2278391 - RNA, 19 nt, Artificial Sequence
  Description of Artificial Sequence: Synthetic oligonucleotide
aggccccaauagucagggc

SEQ ID NO: 2278392 - RNA, 19 nt, Artificial Sequence
  Description of Artificial Sequence: Synthetic oligonucleotide
gugguuacaacuggucuua

SEQ ID NO: 2278393 - RNA, 19 nt, Artificial Sequence
  Description of Artificial Sequence: Synthetic oligonucleotide
ggccucgaaauggugacug

SEQ ID NO: 2278394 - RNA, 19 nt, Artificial Sequence
  Description of Artificial Sequence: Synthetic oligonucleotide
gaguuugaacugauguggu

SEQ ID NO: 2278395 - RNA, 19 nt, Artificial Sequence
  Description of Artificial Sequence: Synthetic oligonucleotide
ggguccaaacacauucagc

SEQ ID NO: 2278396 - RNA, 19 nt, Artificial Sequence
  Description of Artificial Sequence: Synthetic oligonucleotide
cugacgccugaagagucug

SEQ ID NO: 2278397 - RNA, 19 nt, Artificial Sequence
  Description of Artificial Sequence: Synthetic oligonucleotide
ccggggaucgggaacgaag

SEQ ID NO: 2278398 - RNA, 19 nt, Artificial Sequence
  Description of Artificial Sequence: Synthetic oligonucleotide
caccuuucacaguggagaa

SEQ ID NO: 2278399 - RNA, 19 nt, Artificial Sequence
  Description of Artificial Sequence: Synthetic oligonucleotide
cuccuuaaagcauucuguu

SEQ ID NO: 2278400 - RNA, 19 nt, Artificial Sequence
  Description of Artificial Sequence: Synthetic oligonucleotide
ccggcgauccaccucuucc

SEQ ID NO: 2278401 - RNA, 19 nt, Artificial Sequence
  Description of Artificial Sequence: Synthetic oligonucleotide
cggggaucgggaacgaagg

SEQ ID NO: 2278402 - RNA, 19 nt, Artificial Sequence
  Description of Artificial Sequence: Synthetic oligonucleotide
ccaucagcuacaaguucug

SEQ ID NO: 2278403 - RNA, 19 nt, Artificial Sequence
  Description of Artificial Sequence: Synthetic oligonucleotide
ggccccaauagucagggcu

SEQ ID NO: 2278404 - RNA, 19 nt, Artificial Sequence
  Description of Artificial Sequence: Synthetic oligonucleotide
guucauguuccugaagaau

SEQ ID NO: 2278405 - RNA, 19 nt, Artificial Sequence
  Description of Artificial Sequence: Synthetic oligonucleotide
ucgggaacgaagggaggau

SEQ ID NO: 2278406 - RNA, 19 nt, Artificial Sequence
  Description of Artificial Sequence: Synthetic oligonucleotide
cgagucuuuggugagcagc

SEQ ID NO: 2278407 - RNA, 19 nt, Artificial Sequence
  Description of Artificial Sequence: Synthetic oligonucleotide
caggcgcuuaaaguucaug

SEQ ID NO: 2278408 - RNA, 19 nt, Artificial Sequence
  Description of Artificial Sequence: Synthetic oligonucleotide
gccucgaaauggugacugg

SEQ ID NO: 2278409 - RNA, 19 nt, Artificial Sequence
  Description of Artificial Sequence: Synthetic oligonucleotide
cuacaaguucugcuuccaa

SEQ ID NO: 2278410 - RNA, 19 nt, Artificial Sequence
  Description of Artificial Sequence: Synthetic oligonucleotide
cuuagggaguugggugaac

SEQ ID NO: 2278411 - RNA, 19 nt, Artificial Sequence
  Description of Artificial Sequence: Synthetic oligonucleotide
ccgcuuaaccuucuccuug

SEQ ID NO: 2278412 - RNA, 19 nt, Artificial Sequence
  Description of Artificial Sequence: Synthetic oligonucleotide
cgcuuaaccuucuccuugc

SEQ ID NO: 2278413 - RNA, 19 nt, Artificial Sequence
  Description of Artificial Sequence: Synthetic oligonucleotide
ggugguuacaacuggucuu

SEQ ID NO: 2278414 - RNA, 19 nt, Artificial Sequence
  Description of Artificial Sequence: Synthetic oligonucleotide
cuccuugcggccucgaaau

SEQ ID NO: 2278415 - RNA, 19 nt, Artificial Sequence
  Description of Artificial Sequence: Synthetic oligonucleotide
gcuacccagccacagugga

SEQ ID NO: 2278416 - RNA, 19 nt, Artificial Sequence
  Description of Artificial Sequence: Synthetic oligonucleotide
ggccucuucggagaacuug

SEQ ID NO: 2278417 - RNA, 19 nt, Artificial Sequence
  Description of Artificial Sequence: Synthetic oligonucleotide
gggaagcucuccuggcuac

SEQ ID NO: 2278418 - RNA, 19 nt, Artificial Sequence
  Description of Artificial Sequence: Synthetic oligonucleotide
ccagguugacaccuuucac

SEQ ID NO: 2278419 - RNA, 19 nt, Artificial Sequence
  Description of Artificial Sequence: Synthetic oligonucleotide
cgguguaagucuuccuuag

SEQ ID NO: 2278420 - RNA, 19 nt, Artificial Sequence
  Description of Artificial Sequence: Synthetic oligonucleotide
guuccggaggcugauuucu

SEQ ID NO: 2278421 - RNA, 19 nt, Artificial Sequence
  Description of Artificial Sequence: Synthetic oligonucleotide
agggucuaagaugguucca

SEQ ID NO: 2278422 - RNA, 19 nt, Artificial Sequence
  Description of Artificial Sequence: Synthetic oligonucleotide
gcaguacacagcccgggga

SEQ ID NO: 2278423 - RNA, 19 nt, Artificial Sequence
  Description of Artificial Sequence: Synthetic oligonucleotide
cuugcggccucgaaauggu

SEQ ID NO: 2278424 - RNA, 19 nt, Artificial Sequence
  Description of Artificial Sequence: Synthetic oligonucleotide
gcggccucgaaauggugac

SEQ ID NO: 2278425 - RNA, 19 nt, Artificial Sequence
  Description of Artificial Sequence: Synthetic oligonucleotide
cuaacccaguucccaggga

SEQ ID NO: 2278426 - RNA, 19 nt, Artificial Sequence
  Description of Artificial Sequence: Synthetic oligonucleotide
cuuaggccacagaggaucu

SEQ ID NO: 2278427 - RNA, 19 nt, Artificial Sequence
  Description of Artificial Sequence: Synthetic oligonucleotide
ugcuuccaguggaguuuga

SEQ ID NO: 2278428 - RNA, 19 nt, Artificial Sequence
  Description of Artificial Sequence: Synthetic oligonucleotide
cugaugugguuugaauuua

SEQ ID NO: 2278429 - RNA, 19 nt, Artificial Sequence
  Description of Artificial Sequence: Synthetic oligonucleotide
ggcuacccagccacagugg

SEQ ID NO: 2278430 - RNA, 19 nt, Artificial Sequence
  Description of Artificial Sequence: Synthetic oligonucleotide
ggaguugggugaacucuug

SEQ ID NO: 2278431 - RNA, 19 nt, Artificial Sequence
  Description of Artificial Sequence: Synthetic oligonucleotide
gcugaaacugcugcuucca

SEQ ID NO: 2278432 - RNA, 19 nt, Artificial Sequence
  Description of Artificial Sequence: Synthetic oligonucleotide
cucguuuugccaugggauu

SEQ ID NO: 2278433 - RNA, 19 nt, Artificial Sequence
  Description of Artificial Sequence: Synthetic oligonucleotide
accuuucacaguggagaau

SEQ ID NO: 2278434 - RNA, 19 nt, Artificial Sequence
  Description of Artificial Sequence: Synthetic oligonucleotide
gguuccggaggcugauuuc

SEQ ID NO: 2278435 - RNA, 19 nt, Artificial Sequence
  Description of Artificial Sequence: Synthetic oligonucleotide
cuucccgcuuaaccuucuc

SEQ ID NO: 2278436 - RNA, 19 nt, Artificial Sequence
  Description of Artificial Sequence: Synthetic oligonucleotide
ccuguggagaacuuagagu

SEQ ID NO: 2278437 - RNA, 19 nt, Artificial Sequence
  Description of Artificial Sequence: Synthetic oligonucleotide
cccaggccccaauagucag

SEQ ID NO: 2278438 - RNA, 19 nt, Artificial Sequence
  Description of Artificial Sequence: Synthetic oligonucleotide
cagcccuuucuuuggaggu

SEQ ID NO: 2278439 - RNA, 19 nt, Artificial Sequence
  Description of Artificial Sequence: Synthetic oligonucleotide
guggaagcuccaucagcua

SEQ ID NO: 2278440 - RNA, 19 nt, Artificial Sequence
  Description of Artificial Sequence: Synthetic oligonucleotide
agccuguggagaacuuaga

SEQ ID NO: 2278441 - RNA, 19 nt, Artificial Sequence
  Description of Artificial Sequence: Synthetic oligonucleotide
agucugugaaacagcccuu

SEQ ID NO: 2278442 - RNA, 19 nt, Artificial Sequence
  Description of Artificial Sequence: Synthetic oligonucleotide
ggaacgaagggaggaucca

SEQ ID NO: 2278443 - RNA, 19 nt, Artificial Sequence
  Description of Artificial Sequence: Synthetic oligonucleotide
gcgauccaccucuucccgc

SEQ ID NO: 2278444 - RNA, 19 nt, Artificial Sequence
  Description of Artificial Sequence: Synthetic oligonucleotide
ucaggccauaucgcugguu

SEQ ID NO: 2278445 - RNA, 19 nt, Artificial Sequence
  Description of Artificial Sequence: Synthetic oligonucleotide
guguucucacgguguaagu

SEQ ID NO: 2278446 - RNA, 19 nt, Artificial Sequence
  Description of Artificial Sequence: Synthetic oligonucleotide
ccauaucgcugguuguuca

SEQ ID NO: 2278447 - RNA, 19 nt, Artificial Sequence
  Description of Artificial Sequence: Synthetic oligonucleotide
gcuuaaaguucauguuccu

SEQ ID NO: 2278448 - RNA, 19 nt, Artificial Sequence
  Description of Artificial Sequence: Synthetic oligonucleotide
caucgucaguaugguccag

SEQ ID NO: 2278449 - RNA, 19 nt, Artificial Sequence
  Description of Artificial Sequence: Synthetic oligonucleotide
cacccggcgauccaccucu

SEQ ID NO: 2278450 - RNA, 19 nt, Artificial Sequence
  Description of Artificial Sequence: Synthetic oligonucleotide
caguacacagcccggggau

SEQ ID NO: 2278451 - RNA, 19 nt, Artificial Sequence
  Description of Artificial Sequence: Synthetic oligonucleotide
gccccaauagucagggcuc

SEQ ID NO: 2278452 - RNA, 19 nt, Artificial Sequence
  Description of Artificial Sequence: Synthetic oligonucleotide
ggcgcuuaaaguucauguu

SEQ ID NO: 2278453 - RNA, 19 nt, Artificial Sequence
  Description of Artificial Sequence: Synthetic oligonucleotide
gccauaucgcugguuguuc

SEQ ID NO: 2278454 - RNA, 19 nt, Artificial Sequence
  Description of Artificial Sequence: Synthetic oligonucleotide
cggcgauccaccucuuccc

SEQ ID NO: 2278455 - RNA, 19 nt, Artificial Sequence
  Description of Artificial Sequence: Synthetic oligonucleotide
gccccuuccuccuggcaac

SEQ ID NO: 2278456 - RNA, 19 nt, Artificial Sequence
  Description of Artificial Sequence: Synthetic oligonucleotide
gucuggugagaggguacca

SEQ ID NO: 2278457 - RNA, 19 nt, Artificial Sequence
  Description of Artificial Sequence: Synthetic oligonucleotide
ccuggcuacccagccacag

SEQ ID NO: 2278458 - RNA, 19 nt, Artificial Sequence
  Description of Artificial Sequence: Synthetic oligonucleotide
cuucaaggccagagcugaa

SEQ ID NO: 2278459 - RNA, 19 nt, Artificial Sequence
  Description of Artificial Sequence: Synthetic oligonucleotide
cuggugagaggguaccauu

SEQ ID NO: 2278460 - RNA, 19 nt, Artificial Sequence
  Description of Artificial Sequence: Synthetic oligonucleotide
gcggugguuacaacugguc

SEQ ID NO: 2278461 - RNA, 19 nt, Artificial Sequence
  Description of Artificial Sequence: Synthetic oligonucleotide
ccuccaggcgcuuaaaguu

SEQ ID NO: 2278462 - RNA, 19 nt, Artificial Sequence
  Description of Artificial Sequence: Synthetic oligonucleotide
gccauguagccacaguguu

SEQ ID NO: 2278463 - RNA, 19 nt, Artificial Sequence
  Description of Artificial Sequence: Synthetic oligonucleotide
ccaguggaguuugaacuga

SEQ ID NO: 2278464 - RNA, 19 nt, Artificial Sequence
  Description of Artificial Sequence: Synthetic oligonucleotide
ucaggacuucuggggccau

SEQ ID NO: 2278465 - RNA, 19 nt, Artificial Sequence
  Description of Artificial Sequence: Synthetic oligonucleotide
ggccauguagccacagugu

SEQ ID NO: 2278466 - RNA, 19 nt, Artificial Sequence
  Description of Artificial Sequence: Synthetic oligonucleotide
caguggaguuugaacugau

SEQ ID NO: 2278467 - RNA, 19 nt, Artificial Sequence
  Description of Artificial Sequence: Synthetic oligonucleotide
cuggcuacccagccacagu

SEQ ID NO: 2278468 - RNA, 19 nt, Artificial Sequence
  Description of Artificial Sequence: Synthetic oligonucleotide
gguugacaccuuucacagu

SEQ ID NO: 2278469 - RNA, 19 nt, Artificial Sequence
  Description of Artificial Sequence: Synthetic oligonucleotide
cuuggacuucaaggccaga

SEQ ID NO: 2278470 - RNA, 19 nt, Artificial Sequence
  Description of Artificial Sequence: Synthetic oligonucleotide
ccucuucggagaacuugga

SEQ ID NO: 2278471 - RNA, 19 nt, Artificial Sequence
  Description of Artificial Sequence: Synthetic oligonucleotide
caacuggucuuagggaguu

SEQ ID NO: 2278472 - RNA, 19 nt, Artificial Sequence
  Description of Artificial Sequence: Synthetic oligonucleotide
cccaauagucagggcucag

SEQ ID NO: 2278473 - RNA, 19 nt, Artificial Sequence
  Description of Artificial Sequence: Synthetic oligonucleotide
caguggagaauugcucgau

SEQ ID NO: 2278474 - RNA, 19 nt, Artificial Sequence
  Description of Artificial Sequence: Synthetic oligonucleotide
gcagcauguugcagaugga

SEQ ID NO: 2278475 - RNA, 19 nt, Artificial Sequence
  Description of Artificial Sequence: Synthetic oligonucleotide
agucagggcucaggccaua

SEQ ID NO: 2278476 - RNA, 19 nt, Artificial Sequence
  Description of Artificial Sequence: Synthetic oligonucleotide
gcacccggcgauccaccuc

SEQ ID NO: 2278477 - RNA, 19 nt, Artificial Sequence
  Description of Artificial Sequence: Synthetic oligonucleotide
ggauugguacagagccugu

SEQ ID NO: 2278478 - RNA, 19 nt, Artificial Sequence
  Description of Artificial Sequence: Synthetic oligonucleotide
ggccauaucgcugguuguu

SEQ ID NO: 2278479 - RNA, 19 nt, Artificial Sequence
  Description of Artificial Sequence: Synthetic oligonucleotide
gcugacgccugaagagucu

SEQ ID NO: 2278480 - RNA, 19 nt, Artificial Sequence
  Description of Artificial Sequence: Synthetic oligonucleotide
gucagggcucaggccauau

SEQ ID NO: 2278481 - RNA, 19 nt, Artificial Sequence
  Description of Artificial Sequence: Synthetic oligonucleotide
cucaggccauaucgcuggu

SEQ ID NO: 2278482 - RNA, 19 nt, Artificial Sequence
  Description of Artificial Sequence: Synthetic oligonucleotide
gcagauggacuuggccucu

SEQ ID NO: 2278483 - RNA, 19 nt, Artificial Sequence
  Description of Artificial Sequence: Synthetic oligonucleotide
cgauccaccucuucccgcu

SEQ ID NO: 2278484 - RNA, 19 nt, Artificial Sequence
  Description of Artificial Sequence: Synthetic oligonucleotide
ccccaauagucagggcuca

SEQ ID NO: 2278485 - RNA, 19 nt, Artificial Sequence
  Description of Artificial Sequence: Synthetic oligonucleotide
aggguaccauuggguccaa

SEQ ID NO: 2278486 - RNA, 19 nt, Artificial Sequence
  Description of Artificial Sequence: Synthetic oligonucleotide
cgaagggaggauccaacau

SEQ ID NO: 2278487 - RNA, 19 nt, Artificial Sequence
  Description of Artificial Sequence: Synthetic oligonucleotide
ggcuuguuguugggaugaa

SEQ ID NO: 2278488 - RNA, 19 nt, Artificial Sequence
  Description of Artificial Sequence: Synthetic oligonucleotide
cagagccuguggagaacuu

SEQ ID NO: 2278489 - RNA, 19 nt, Artificial Sequence
  Description of Artificial Sequence: Synthetic oligonucleotide
ccaccucuucccgcuuaac

SEQ ID NO: 2278490 - RNA, 19 nt, Artificial Sequence
  Description of Artificial Sequence: Synthetic oligonucleotide
gagguuccggaggcugauu

SEQ ID NO: 2278491 - RNA, 19 nt, Artificial Sequence
  Description of Artificial Sequence: Synthetic oligonucleotide
ccggaggcugauuucuguu

SEQ ID NO: 2278492 - RNA, 19 nt, Artificial Sequence
  Description of Artificial Sequence: Synthetic oligonucleotide
cccgcuuaaccuucuccuu

SEQ ID NO: 2278493 - RNA, 19 nt, Artificial Sequence
  Description of Artificial Sequence: Synthetic oligonucleotide
ggguaccauuggguccaaa

SEQ ID NO: 2278494 - RNA, 19 nt, Artificial Sequence
  Description of Artificial Sequence: Synthetic oligonucleotide
acccggcgauccaccucuu

SEQ ID NO: 2278495 - RNA, 19 nt, Artificial Sequence
  Description of Artificial Sequence: Synthetic oligonucleotide
ccaggcgcuuaaaguucau

SEQ ID NO: 2278496 - RNA, 19 nt, Artificial Sequence
  Description of Artificial Sequence: Synthetic oligonucleotide
cgucaguaugguccagguu

SEQ ID NO: 2278497 - RNA, 19 nt, Artificial Sequence
  Description of Artificial Sequence: Synthetic oligonucleotide
gcccggggaucgggaacga

SEQ ID NO: 2278498 - RNA, 19 nt, Artificial Sequence
  Description of Artificial Sequence: Synthetic oligonucleotide
cccggggaucgggaacgaa

SEQ ID NO: 2278499 - RNA, 19 nt, Artificial Sequence
  Description of Artificial Sequence: Synthetic oligonucleotide
cggccucgaaauggugacu

SEQ ID NO: 2278500 - RNA, 19 nt, Artificial Sequence
  Description of Artificial Sequence: Synthetic oligonucleotide
uguaauacaggggagaugg

SEQ ID NO: 2278501 - RNA, 19 nt, Artificial Sequence
  Description of Artificial Sequence: Synthetic oligonucleotide
gauaagugaagguuaaagg

SEQ ID NO: 2278502 - RNA, 19 nt, Artificial Sequence
  Description of Artificial Sequence: Synthetic oligonucleotide
uuuugaccaguuaagaggg

SEQ ID NO: 2278503 - RNA, 19 nt, Artificial Sequence
  Description of Artificial Sequence: Synthetic oligonucleotide
uuaaaggucaaaucagucg

SEQ ID NO: 2278504 - RNA, 19 nt, Artificial Sequence
  Description of Artificial Sequence: Synthetic oligonucleotide
aaagaggucaugguaaacc

SEQ ID NO: 2278505 - RNA, 19 nt, Artificial Sequence
  Description of Artificial Sequence: Synthetic oligonucleotide
aaaugucuaagucaucauc

SEQ ID NO: 2278506 - RNA, 19 nt, Artificial Sequence
  Description of Artificial Sequence: Synthetic oligonucleotide
uacagaguguaauacaggg

SEQ ID NO: 2278507 - RNA, 19 nt, Artificial Sequence
  Description of Artificial Sequence: Synthetic oligonucleotide
cauuuuaccacucacaguc

SEQ ID NO: 2278508 - RNA, 19 nt, Artificial Sequence
  Description of Artificial Sequence: Synthetic oligonucleotide
uuuaaagaggucaugguaa

SEQ ID NO: 2278509 - RNA, 19 nt, Artificial Sequence
  Description of Artificial Sequence: Synthetic oligonucleotide
auaagugaagguuaaaggu

SEQ ID NO: 2278510 - RNA, 19 nt, Artificial Sequence
  Description of Artificial Sequence: Synthetic oligonucleotide
uaaaggucaaaucagucgu

SEQ ID NO: 2278511 - RNA, 19 nt, Artificial Sequence
  Description of Artificial Sequence: Synthetic oligonucleotide
aagucugguaaguugcacg

SEQ ID NO: 2278512 - RNA, 19 nt, Artificial Sequence
  Description of Artificial Sequence: Synthetic oligonucleotide
gauuuugaccaguuaagag

SEQ ID NO: 2278513 - RNA, 19 nt, Artificial Sequence
  Description of Artificial Sequence: Synthetic oligonucleotide
aagucuggcccauuuuacc

SEQ ID NO: 2278514 - RNA, 19 nt, Artificial Sequence
  Description of Artificial Sequence: Synthetic oligonucleotide
uguagcucggaauggaggg

SEQ ID NO: 2278515 - RNA, 19 nt, Artificial Sequence
  Description of Artificial Sequence: Synthetic oligonucleotide
ugauaucagggccaaaacc

SEQ ID NO: 2278516 - RNA, 19 nt, Artificial Sequence
  Description of Artificial Sequence: Synthetic oligonucleotide
aauggagaaccaccaaguc

SEQ ID NO: 2278517 - RNA, 19 nt, Artificial Sequence
  Description of Artificial Sequence: Synthetic oligonucleotide
aauacaggggagauggaac

SEQ ID NO: 2278518 - RNA, 19 nt, Artificial Sequence
  Description of Artificial Sequence: Synthetic oligonucleotide
aaugucuaagucaucaucu

SEQ ID NO: 2278519 - RNA, 19 nt, Artificial Sequence
  Description of Artificial Sequence: Synthetic oligonucleotide
ucgaagaagcaccaagccg

SEQ ID NO: 2278520 - RNA, 19 nt, Artificial Sequence
  Description of Artificial Sequence: Synthetic oligonucleotide
uuaagagggucuuuaaaga

SEQ ID NO: 2278521 - RNA, 19 nt, Artificial Sequence
  Description of Artificial Sequence: Synthetic oligonucleotide
cucuguuugagcaagggug

SEQ ID NO: 2278522 - RNA, 19 nt, Artificial Sequence
  Description of Artificial Sequence: Synthetic oligonucleotide
uuugucuagucaaaugucu

SEQ ID NO: 2278523 - RNA, 19 nt, Artificial Sequence
  Description of Artificial Sequence: Synthetic oligonucleotide
aguugcacguuguuggggc

SEQ ID NO: 2278524 - RNA, 19 nt, Artificial Sequence
  Description of Artificial Sequence: Synthetic oligonucleotide
uaagugaagguuaaagguc

SEQ ID NO: 2278525 - RNA, 19 nt, Artificial Sequence
  Description of Artificial Sequence: Synthetic oligonucleotide
cacggaaucucgaagaagc

SEQ ID NO: 2278526 - RNA, 19 nt, Artificial Sequence
  Description of Artificial Sequence: Synthetic oligonucleotide
agaauggagaaccaccaag

SEQ ID NO: 2278527 - RNA, 19 nt, Artificial Sequence
  Description of Artificial Sequence: Synthetic oligonucleotide
uaccugaucuacuagggag

SEQ ID NO: 2278528 - RNA, 19 nt, Artificial Sequence
  Description of Artificial Sequence: Synthetic oligonucleotide
uucgauagaggauggaggc

SEQ ID NO: 2278529 - RNA, 19 nt, Artificial Sequence
  Description of Artificial Sequence: Synthetic oligonucleotide
uuucuuggauaagugaagg

SEQ ID NO: 2278530 - RNA, 19 nt, Artificial Sequence
  Description of Artificial Sequence: Synthetic oligonucleotide
cuucgauagaggauggagg

SEQ ID NO: 2278531 - RNA, 19 nt, Artificial Sequence
  Description of Artificial Sequence: Synthetic oligonucleotide
ucuguuugagcaagggugc

SEQ ID NO: 2278532 - RNA, 19 nt, Artificial Sequence
  Description of Artificial Sequence: Synthetic oligonucleotide
gaguccagcaucucggacg

SEQ ID NO: 2278533 - RNA, 19 nt, Artificial Sequence
  Description of Artificial Sequence: Synthetic oligonucleotide
ugaugagagccuuuaguag

SEQ ID NO: 2278534 - RNA, 19 nt, Artificial Sequence
  Description of Artificial Sequence: Synthetic oligonucleotide
ucucgaagaagcaccaagc

SEQ ID NO: 2278535 - RNA, 19 nt, Artificial Sequence
  Description of Artificial Sequence: Synthetic oligonucleotide
aaaaccuucgcgaaacucu

SEQ ID NO: 2278536 - RNA, 19 nt, Artificial Sequence
  Description of Artificial Sequence: Synthetic oligonucleotide
ugagcaagggugcucagug

SEQ ID NO: 2278537 - RNA, 19 nt, Artificial Sequence
  Description of Artificial Sequence: Synthetic oligonucleotide
gaacuggaaggguagagug

SEQ ID NO: 2278538 - RNA, 19 nt, Artificial Sequence
  Description of Artificial Sequence: Synthetic oligonucleotide
aagaggucaugguaaacca

SEQ ID NO: 2278539 - RNA, 19 nt, Artificial Sequence
  Description of Artificial Sequence: Synthetic oligonucleotide
agaagauguggcuaguugu

SEQ ID NO: 2278540 - RNA, 19 nt, Artificial Sequence
  Description of Artificial Sequence: Synthetic oligonucleotide
ucaagguuccuagaggucc

SEQ ID NO: 2278541 - RNA, 19 nt, Artificial Sequence
  Description of Artificial Sequence: Synthetic oligonucleotide
uagaagauguggcuaguug

SEQ ID NO: 2278542 - RNA, 19 nt, Artificial Sequence
  Description of Artificial Sequence: Synthetic oligonucleotide
aaggucaaaucagucgugg

SEQ ID NO: 2278543 - RNA, 19 nt, Artificial Sequence
  Description of Artificial Sequence: Synthetic oligonucleotide
ucucaagguuccuagaggu

SEQ ID NO: 2278544 - RNA, 19 nt, Artificial Sequence
  Description of Artificial Sequence: Synthetic oligonucleotide
cuucacucacuucacagcc

SEQ ID NO: 2278545 - RNA, 19 nt, Artificial Sequence
  Description of Artificial Sequence: Synthetic oligonucleotide
agucgugggauccaccugg

SEQ ID NO: 2278546 - RNA, 19 nt, Artificial Sequence
  Description of Artificial Sequence: Synthetic oligonucleotide
aguccagcaucucggacgc

SEQ ID NO: 2278547 - RNA, 19 nt, Artificial Sequence
  Description of Artificial Sequence: Synthetic oligonucleotide
cucuucaugcaguaggccc

SEQ ID NO: 2278548 - RNA, 19 nt, Artificial Sequence
  Description of Artificial Sequence: Synthetic oligonucleotide
gauguggcuaguugucugg

SEQ ID NO: 2278549 - RNA, 19 nt, Artificial Sequence
  Description of Artificial Sequence: Synthetic oligonucleotide
cuuucuuggauaagugaag

SEQ ID NO: 2278550 - RNA, 19 nt, Artificial Sequence
  Description of Artificial Sequence: Synthetic oligonucleotide
cuacuagggagucagcacc

SEQ ID NO: 2278551 - RNA, 19 nt, Artificial Sequence
  Description of Artificial Sequence: Synthetic oligonucleotide
ugguaaaccacacggcugu

SEQ ID NO: 2278552 - RNA, 19 nt, Artificial Sequence
  Description of Artificial Sequence: Synthetic oligonucleotide
acguaccugaucuacuagg

SEQ ID NO: 2278553 - RNA, 19 nt, Artificial Sequence
  Description of Artificial Sequence: Synthetic oligonucleotide
ugugugaggauccgggugu

SEQ ID NO: 2278554 - RNA, 19 nt, Artificial Sequence
  Description of Artificial Sequence: Synthetic oligonucleotide
aagugaagguuaaagguca

SEQ ID NO: 2278555 - RNA, 19 nt, Artificial Sequence
  Description of Artificial Sequence: Synthetic oligonucleotide
ucuagucaaaugucuaagu

SEQ ID NO: 2278556 - RNA, 19 nt, Artificial Sequence
  Description of Artificial Sequence: Synthetic oligonucleotide
gaaggguagagugaggcug

SEQ ID NO: 2278557 - RNA, 19 nt, Artificial Sequence
  Description of Artificial Sequence: Synthetic oligonucleotide
ucacagucaccucuguuug

SEQ ID NO: 2278558 - RNA, 19 nt, Artificial Sequence
  Description of Artificial Sequence: Synthetic oligonucleotide
ucucccauuugucuaguca

SEQ ID NO: 2278559 - RNA, 19 nt, Artificial Sequence
  Description of Artificial Sequence: Synthetic oligonucleotide
uuuuaccacucacagucac

SEQ ID NO: 2278560 - RNA, 19 nt, Artificial Sequence
  Description of Artificial Sequence: Synthetic oligonucleotide
cagaguguaauacagggga

SEQ ID NO: 2278561 - RNA, 19 nt, Artificial Sequence
  Description of Artificial Sequence: Synthetic oligonucleotide
acgaagugcagauuucuug

SEQ ID NO: 2278562 - RNA, 19 nt, Artificial Sequence
  Description of Artificial Sequence: Synthetic oligonucleotide
ugaagguuaaaggucaaau

SEQ ID NO: 2278563 - RNA, 19 nt, Artificial Sequence
  Description of Artificial Sequence: Synthetic oligonucleotide
uuuaccacucacagucacc

SEQ ID NO: 2278564 - RNA, 19 nt, Artificial Sequence
  Description of Artificial Sequence: Synthetic oligonucleotide
acaagguucucaagguucc

SEQ ID NO: 2278565 - RNA, 19 nt, Artificial Sequence
  Description of Artificial Sequence: Synthetic oligonucleotide
uugauaucagggccaaaac

SEQ ID NO: 2278566 - RNA, 19 nt, Artificial Sequence
  Description of Artificial Sequence: Synthetic oligonucleotide
auuugucuagucaaauguc

SEQ ID NO: 2278567 - RNA, 19 nt, Artificial Sequence
  Description of Artificial Sequence: Synthetic oligonucleotide
gauaucagggccaaaaccu

SEQ ID NO: 2278568 - RNA, 19 nt, Artificial Sequence
  Description of Artificial Sequence: Synthetic oligonucleotide
agagcaauggugacagggc

SEQ ID NO: 2278569 - RNA, 19 nt, Artificial Sequence
  Description of Artificial Sequence: Synthetic oligonucleotide
gagccuuuaguagacugcg

SEQ ID NO: 2278570 - RNA, 19 nt, Artificial Sequence
  Description of Artificial Sequence: Synthetic oligonucleotide
cucacggagauccacacuc

SEQ ID NO: 2278571 - RNA, 19 nt, Artificial Sequence
  Description of Artificial Sequence: Synthetic oligonucleotide
uucgcgaaacucuucuuca

SEQ ID NO: 2278572 - RNA, 19 nt, Artificial Sequence
  Description of Artificial Sequence: Synthetic oligonucleotide
ucuacuagggagucagcac

SEQ ID NO: 2278573 - RNA, 19 nt, Artificial Sequence
  Description of Artificial Sequence: Synthetic oligonucleotide
aggacguggaucugcuccc

SEQ ID NO: 2278574 - RNA, 19 nt, Artificial Sequence
  Description of Artificial Sequence: Synthetic oligonucleotide
agggccaaaaccuucgcga

SEQ ID NO: 2278575 - RNA, 19 nt, Artificial Sequence
  Description of Artificial Sequence: Synthetic oligonucleotide
ucuuggauaagugaagguu

SEQ ID NO: 2278576 - RNA, 19 nt, Artificial Sequence
  Description of Artificial Sequence: Synthetic oligonucleotide
ugcaguaggcccaggacac

SEQ ID NO: 2278577 - RNA, 19 nt, Artificial Sequence
  Description of Artificial Sequence: Synthetic oligonucleotide
uagggagucagcaccugag

SEQ ID NO: 2278578 - RNA, 19 nt, Artificial Sequence
  Description of Artificial Sequence: Synthetic oligonucleotide
uggaaggguagagugaggc

SEQ ID NO: 2278579 - RNA, 19 nt, Artificial Sequence
  Description of Artificial Sequence: Synthetic oligonucleotide
agucaccucuguuugagca

SEQ ID NO: 2278580 - RNA, 19 nt, Artificial Sequence
  Description of Artificial Sequence: Synthetic oligonucleotide
cacaagguucucaagguuc

SEQ ID NO: 2278581 - RNA, 19 nt, Artificial Sequence
  Description of Artificial Sequence: Synthetic oligonucleotide
ggauaagugaagguuaaag

SEQ ID NO: 2278582 - RNA, 19 nt, Artificial Sequence
  Description of Artificial Sequence: Synthetic oligonucleotide
ugguccacgucaucaaaag

SEQ ID NO: 2278583 - RNA, 19 nt, Artificial Sequence
  Description of Artificial Sequence: Synthetic oligonucleotide
caugaagcucuucaugcag

SEQ ID NO: 2278584 - RNA, 19 nt, Artificial Sequence
  Description of Artificial Sequence: Synthetic oligonucleotide
cucgaagaagcaccaagcc

SEQ ID NO: 2278585 - RNA, 19 nt, Artificial Sequence
  Description of Artificial Sequence: Synthetic oligonucleotide
ugaccaguuaagagggucu

SEQ ID NO: 2278586 - RNA, 19 nt, Artificial Sequence
  Description of Artificial Sequence: Synthetic oligonucleotide
agucugguaaguugcacgu

SEQ ID NO: 2278587 - RNA, 19 nt, Artificial Sequence
  Description of Artificial Sequence: Synthetic oligonucleotide
uuggauaagugaagguuaa

SEQ ID NO: 2278588 - RNA, 19 nt, Artificial Sequence
  Description of Artificial Sequence: Synthetic oligonucleotide
gaagaauggagaaccacca

SEQ ID NO: 2278589 - RNA, 19 nt, Artificial Sequence
  Description of Artificial Sequence: Synthetic oligonucleotide
ucuugaugagagccuuuag

SEQ ID NO: 2278590 - RNA, 19 nt, Artificial Sequence
  Description of Artificial Sequence: Synthetic oligonucleotide
cucagugcucccauggggc

SEQ ID NO: 2278591 - RNA, 19 nt, Artificial Sequence
  Description of Artificial Sequence: Synthetic oligonucleotide
agcugacagaauccagagc

SEQ ID NO: 2278592 - RNA, 19 nt, Artificial Sequence
  Description of Artificial Sequence: Synthetic oligonucleotide
auuccacggaaucucgaag

SEQ ID NO: 2278593 - RNA, 19 nt, Artificial Sequence
  Description of Artificial Sequence: Synthetic oligonucleotide
ugucuagucaaaugucuaa

SEQ ID NO: 2278594 - RNA, 19 nt, Artificial Sequence
  Description of Artificial Sequence: Synthetic oligonucleotide
gagcaauggugacagggcc

SEQ ID NO: 2278595 - RNA, 19 nt, Artificial Sequence
  Description of Artificial Sequence: Synthetic oligonucleotide
accacucacagucaccucu

SEQ ID NO: 2278596 - RNA, 19 nt, Artificial Sequence
  Description of Artificial Sequence: Synthetic oligonucleotide
uagacugcgccccucacau

SEQ ID NO: 2278597 - RNA, 19 nt, Artificial Sequence
  Description of Artificial Sequence: Synthetic oligonucleotide
aaucagucgugggauccac

SEQ ID NO: 2278598 - RNA, 19 nt, Artificial Sequence
  Description of Artificial Sequence: Synthetic oligonucleotide
uucuugguccacgucauca

SEQ ID NO: 2278599 - RNA, 19 nt, Artificial Sequence
  Description of Artificial Sequence: Synthetic oligonucleotide
uucaccagauuuugaccag

SEQ ID NO: 2278600 - RNA, 19 nt, Artificial Sequence
  Description of Artificial Sequence: Synthetic oligonucleotide
augucuaagucaucaucug

SEQ ID NO: 2278601 - RNA, 19 nt, Artificial Sequence
  Description of Artificial Sequence: Synthetic oligonucleotide
ggugacagggccaggaucg

SEQ ID NO: 2278602 - RNA, 19 nt, Artificial Sequence
  Description of Artificial Sequence: Synthetic oligonucleotide
uucauagaagauguggcua

SEQ ID NO: 2278603 - RNA, 19 nt, Artificial Sequence
  Description of Artificial Sequence: Synthetic oligonucleotide
agauuuugaccaguuaaga

SEQ ID NO: 2278604 - RNA, 19 nt, Artificial Sequence
  Description of Artificial Sequence: Synthetic oligonucleotide
aggauccggguguagcucg

SEQ ID NO: 2278605 - RNA, 19 nt, Artificial Sequence
  Description of Artificial Sequence: Synthetic oligonucleotide
uaauacaggggagauggaa

SEQ ID NO: 2278606 - RNA, 19 nt, Artificial Sequence
  Description of Artificial Sequence: Synthetic oligonucleotide
aggucaaaucagucguggg

SEQ ID NO: 2278607 - RNA, 19 nt, Artificial Sequence
  Description of Artificial Sequence: Synthetic oligonucleotide
aaguugcacguuguugggg

SEQ ID NO: 2278608 - RNA, 19 nt, Artificial Sequence
  Description of Artificial Sequence: Synthetic oligonucleotide
cauuugucuagucaaaugu

SEQ ID NO: 2278609 - RNA, 19 nt, Artificial Sequence
  Description of Artificial Sequence: Synthetic oligonucleotide
caaaucagucgugggaucc

SEQ ID NO: 2278610 - RNA, 19 nt, Artificial Sequence
  Description of Artificial Sequence: Synthetic oligonucleotide
ggaagaauggagaaccacc

SEQ ID NO: 2278611 - RNA, 19 nt, Artificial Sequence
  Description of Artificial Sequence: Synthetic oligonucleotide
ugcagauuucuugaugaga

SEQ ID NO: 2278612 - RNA, 19 nt, Artificial Sequence
  Description of Artificial Sequence: Synthetic oligonucleotide
cuuggauaagugaagguua

SEQ ID NO: 2278613 - RNA, 19 nt, Artificial Sequence
  Description of Artificial Sequence: Synthetic oligonucleotide
agaagcaccaagccgccga

SEQ ID NO: 2278614 - RNA, 19 nt, Artificial Sequence
  Description of Artificial Sequence: Synthetic oligonucleotide
uccacgucaucaaaagcau

SEQ ID NO: 2278615 - RNA, 19 nt, Artificial Sequence
  Description of Artificial Sequence: Synthetic oligonucleotide
gguucauagaagauguggc

SEQ ID NO: 2278616 - RNA, 19 nt, Artificial Sequence
  Description of Artificial Sequence: Synthetic oligonucleotide
uugucuagucaaaugucua

SEQ ID NO: 2278617 - RNA, 19 nt, Artificial Sequence
  Description of Artificial Sequence: Synthetic oligonucleotide
aagaauggagaaccaccaa

SEQ ID NO: 2278618 - RNA, 19 nt, Artificial Sequence
  Description of Artificial Sequence: Synthetic oligonucleotide
agcucuucaugcaguaggc

SEQ ID NO: 2278619 - RNA, 19 nt, Artificial Sequence
  Description of Artificial Sequence: Synthetic oligonucleotide
uucuuggauaagugaaggu

SEQ ID NO: 2278620 - RNA, 19 nt, Artificial Sequence
  Description of Artificial Sequence: Synthetic oligonucleotide
gucuagucaaaugucuaag

SEQ ID NO: 2278621 - RNA, 19 nt, Artificial Sequence
  Description of Artificial Sequence: Synthetic oligonucleotide
guccacgucaucaaaagca

SEQ ID NO: 2278622 - RNA, 19 nt, Artificial Sequence
  Description of Artificial Sequence: Synthetic oligonucleotide
guuaaaggucaaaucaguc

SEQ ID NO: 2278623 - RNA, 19 nt, Artificial Sequence
  Description of Artificial Sequence: Synthetic oligonucleotide
cacauuccacggaaucucg

SEQ ID NO: 2278624 - RNA, 19 nt, Artificial Sequence
  Description of Artificial Sequence: Synthetic oligonucleotide
acagaguguaauacagggg

SEQ ID NO: 2278625 - RNA, 19 nt, Artificial Sequence
  Description of Artificial Sequence: Synthetic oligonucleotide
agaauccagagcaauggug

SEQ ID NO: 2278626 - RNA, 19 nt, Artificial Sequence
  Description of Artificial Sequence: Synthetic oligonucleotide
guugauaucagggccaaaa

SEQ ID NO: 2278627 - RNA, 19 nt, Artificial Sequence
  Description of Artificial Sequence: Synthetic oligonucleotide
agucaggaagaauggagaa

SEQ ID NO: 2278628 - RNA, 19 nt, Artificial Sequence
  Description of Artificial Sequence: Synthetic oligonucleotide
ugaggauccggguguagcu

SEQ ID NO: 2278629 - RNA, 19 nt, Artificial Sequence
  Description of Artificial Sequence: Synthetic oligonucleotide
uuuaguagacugcgccccu

SEQ ID NO: 2278630 - RNA, 19 nt, Artificial Sequence
  Description of Artificial Sequence: Synthetic oligonucleotide
agaaccaccaagucuggua

SEQ ID NO: 2278631 - RNA, 19 nt, Artificial Sequence
  Description of Artificial Sequence: Synthetic oligonucleotide
gaaccaccaagucugguaa

SEQ ID NO: 2278632 - RNA, 19 nt, Artificial Sequence
  Description of Artificial Sequence: Synthetic oligonucleotide
cuucgcgaaacucuucuuc

SEQ ID NO: 2278633 - RNA, 19 nt, Artificial Sequence
  Description of Artificial Sequence: Synthetic oligonucleotide
gacugcgccccucacauuc

SEQ ID NO: 2278634 - RNA, 19 nt, Artificial Sequence
  Description of Artificial Sequence: Synthetic oligonucleotide
ucacauuccacggaaucuc

SEQ ID NO: 2278635 - RNA, 19 nt, Artificial Sequence
  Description of Artificial Sequence: Synthetic oligonucleotide
agagggucuuuaaagaggu

SEQ ID NO: 2278636 - RNA, 19 nt, Artificial Sequence
  Description of Artificial Sequence: Synthetic oligonucleotide
aaccaccaagucugguaag

SEQ ID NO: 2278637 - RNA, 19 nt, Artificial Sequence
  Description of Artificial Sequence: Synthetic oligonucleotide
aaaggucaaaucagucgug

SEQ ID NO: 2278638 - RNA, 19 nt, Artificial Sequence
  Description of Artificial Sequence: Synthetic oligonucleotide
aauggaggggaagcuucuc

SEQ ID NO: 2278639 - RNA, 19 nt, Artificial Sequence
  Description of Artificial Sequence: Synthetic oligonucleotide
gaagauguggcuaguuguc

SEQ ID NO: 2278640 - RNA, 19 nt, Artificial Sequence
  Description of Artificial Sequence: Synthetic oligonucleotide
accuucgcgaaacucuucu

SEQ ID NO: 2278641 - RNA, 19 nt, Artificial Sequence
  Description of Artificial Sequence: Synthetic oligonucleotide
guuggggccuucgauagag

SEQ ID NO: 2278642 - RNA, 19 nt, Artificial Sequence
  Description of Artificial Sequence: Synthetic oligonucleotide
cccauuuuaccacucacag

SEQ ID NO: 2278643 - RNA, 19 nt, Artificial Sequence
  Description of Artificial Sequence: Synthetic oligonucleotide
uacuagggagucagcaccu

SEQ ID NO: 2278644 - RNA, 19 nt, Artificial Sequence
  Description of Artificial Sequence: Synthetic oligonucleotide
agcgaguccagcaucucgg

SEQ ID NO: 2278645 - RNA, 19 nt, Artificial Sequence
  Description of Artificial Sequence: Synthetic oligonucleotide
cagagcugaacuggaaggg

SEQ ID NO: 2278646 - RNA, 19 nt, Artificial Sequence
  Description of Artificial Sequence: Synthetic oligonucleotide
ggcuguugauaucagggcc

SEQ ID NO: 2278647 - RNA, 19 nt, Artificial Sequence
  Description of Artificial Sequence: Synthetic oligonucleotide
aucuacuagggagucagca

SEQ ID NO: 2278648 - RNA, 19 nt, Artificial Sequence
  Description of Artificial Sequence: Synthetic oligonucleotide
ggagucagcaccugaggag

SEQ ID NO: 2278649 - RNA, 19 nt, Artificial Sequence
  Description of Artificial Sequence: Synthetic oligonucleotide
uucucacggagauccacac

SEQ ID NO: 2278650 - RNA, 19 nt, Artificial Sequence
  Description of Artificial Sequence: Synthetic oligonucleotide
gaggauggaggcugaaguc

SEQ ID NO: 2278651 - RNA, 19 nt, Artificial Sequence
  Description of Artificial Sequence: Synthetic oligonucleotide
uggaggggaagcuucucac

SEQ ID NO: 2278652 - RNA, 19 nt, Artificial Sequence
  Description of Artificial Sequence: Synthetic oligonucleotide
aguugucuggccuggucca

SEQ ID NO: 2278653 - RNA, 19 nt, Artificial Sequence
  Description of Artificial Sequence: Synthetic oligonucleotide
cucggaauggaggggaagc

SEQ ID NO: 2278654 - RNA, 19 nt, Artificial Sequence
  Description of Artificial Sequence: Synthetic oligonucleotide
aguagacugcgccccucac

SEQ ID NO: 2278655 - RNA, 19 nt, Artificial Sequence
  Description of Artificial Sequence: Synthetic oligonucleotide
caugcaguaggcccaggac

SEQ ID NO: 2278656 - RNA, 19 nt, Artificial Sequence
  Description of Artificial Sequence: Synthetic oligonucleotide
guguagcucggaauggagg

SEQ ID NO: 2278657 - RNA, 19 nt, Artificial Sequence
  Description of Artificial Sequence: Synthetic oligonucleotide
gccuuuaguagacugcgcc

SEQ ID NO: 2278658 - RNA, 19 nt, Artificial Sequence
  Description of Artificial Sequence: Synthetic oligonucleotide
uugaccaguuaagaggguc

SEQ ID NO: 2278659 - RNA, 19 nt, Artificial Sequence
  Description of Artificial Sequence: Synthetic oligonucleotide
uguggcuaguugucuggcc

SEQ ID NO: 2278660 - RNA, 19 nt, Artificial Sequence
  Description of Artificial Sequence: Synthetic oligonucleotide
acguggaucugcuccccac

SEQ ID NO: 2278661 - RNA, 19 nt, Artificial Sequence
  Description of Artificial Sequence: Synthetic oligonucleotide
ucugcuccccacgaagugc

SEQ ID NO: 2278662 - RNA, 19 nt, Artificial Sequence
  Description of Artificial Sequence: Synthetic oligonucleotide
gagugaggcugucucuugc

SEQ ID NO: 2278663 - RNA, 19 nt, Artificial Sequence
  Description of Artificial Sequence: Synthetic oligonucleotide
agggcaugcaggguuuuac

SEQ ID NO: 2278664 - RNA, 19 nt, Artificial Sequence
  Description of Artificial Sequence: Synthetic oligonucleotide
aguguaauacaggggagau

SEQ ID NO: 2278665 - RNA, 19 nt, Artificial Sequence
  Description of Artificial Sequence: Synthetic oligonucleotide
ucaaaucagucgugggauc

SEQ ID NO: 2278666 - RNA, 19 nt, Artificial Sequence
  Description of Artificial Sequence: Synthetic oligonucleotide
uagaggauggaggcugaag

SEQ ID NO: 2278667 - RNA, 19 nt, Artificial Sequence
  Description of Artificial Sequence: Synthetic oligonucleotide
aggauggaggcugaagucu

SEQ ID NO: 2278668 - RNA, 19 nt, Artificial Sequence
  Description of Artificial Sequence: Synthetic oligonucleotide
gguaaguugcacguuguug

SEQ ID NO: 2278669 - RNA, 19 nt, Artificial Sequence
  Description of Artificial Sequence: Synthetic oligonucleotide
gaguguaauacaggggaga

SEQ ID NO: 2278670 - RNA, 19 nt, Artificial Sequence
  Description of Artificial Sequence: Synthetic oligonucleotide
uaguagacugcgccccuca

SEQ ID NO: 2278671 - RNA, 19 nt, Artificial Sequence
  Description of Artificial Sequence: Synthetic oligonucleotide
aggaucgguccuucugcac

SEQ ID NO: 2278672 - RNA, 19 nt, Artificial Sequence
  Description of Artificial Sequence: Synthetic oligonucleotide
aaaucagucgugggaucca

SEQ ID NO: 2278673 - RNA, 19 nt, Artificial Sequence
  Description of Artificial Sequence: Synthetic oligonucleotide
aaacucuucuucacucacu

SEQ ID NO: 2278674 - RNA, 19 nt, Artificial Sequence
  Description of Artificial Sequence: Synthetic oligonucleotide
gaauggagaaccaccaagu

SEQ ID NO: 2278675 - RNA, 19 nt, Artificial Sequence
  Description of Artificial Sequence: Synthetic oligonucleotide
aacuggaaggguagaguga

SEQ ID NO: 2278676 - RNA, 19 nt, Artificial Sequence
  Description of Artificial Sequence: Synthetic oligonucleotide
auguggcuaguugucuggc

SEQ ID NO: 2278677 - RNA, 19 nt, Artificial Sequence
  Description of Artificial Sequence: Synthetic oligonucleotide
agaguguaauacaggggag

SEQ ID NO: 2278678 - RNA, 19 nt, Artificial Sequence
  Description of Artificial Sequence: Synthetic oligonucleotide
gauccaccuggguugugug

SEQ ID NO: 2278679 - RNA, 19 nt, Artificial Sequence
  Description of Artificial Sequence: Synthetic oligonucleotide
ggaucugcuccccacgaag

SEQ ID NO: 2278680 - RNA, 19 nt, Artificial Sequence
  Description of Artificial Sequence: Synthetic oligonucleotide
ggucaaaucagucguggga

SEQ ID NO: 2278681 - RNA, 19 nt, Artificial Sequence
  Description of Artificial Sequence: Synthetic oligonucleotide
ggucaugguaaaccacacg

SEQ ID NO: 2278682 - RNA, 19 nt, Artificial Sequence
  Description of Artificial Sequence: Synthetic oligonucleotide
ucacggagauccacacuca

SEQ ID NO: 2278683 - RNA, 19 nt, Artificial Sequence
  Description of Artificial Sequence: Synthetic oligonucleotide
guucauagaagauguggcu

SEQ ID NO: 2278684 - RNA, 19 nt, Artificial Sequence
  Description of Artificial Sequence: Synthetic oligonucleotide
agugaggcugucucuugcu

SEQ ID NO: 2278685 - RNA, 19 nt, Artificial Sequence
  Description of Artificial Sequence: Synthetic oligonucleotide
cacggcuguugauaucagg

SEQ ID NO: 2278686 - RNA, 19 nt, Artificial Sequence
  Description of Artificial Sequence: Synthetic oligonucleotide
cuugaugagagccuuuagu

SEQ ID NO: 2278687 - RNA, 19 nt, Artificial Sequence
  Description of Artificial Sequence: Synthetic oligonucleotide
uggugacagggccaggauc

SEQ ID NO: 2278688 - RNA, 19 nt, Artificial Sequence
  Description of Artificial Sequence: Synthetic oligonucleotide
guuguuggggccuucgaua

SEQ ID NO: 2278689 - RNA, 19 nt, Artificial Sequence
  Description of Artificial Sequence: Synthetic oligonucleotide
cucccauuugucuagucaa

SEQ ID NO: 2278690 - RNA, 19 nt, Artificial Sequence
  Description of Artificial Sequence: Synthetic oligonucleotide
ucagggccaaaaccuucgc

SEQ ID NO: 2278691 - RNA, 19 nt, Artificial Sequence
  Description of Artificial Sequence: Synthetic oligonucleotide
gcuucaccagauuuugacc

SEQ ID NO: 2278692 - RNA, 19 nt, Artificial Sequence
  Description of Artificial Sequence: Synthetic oligonucleotide
ucccauuugucuagucaaa

SEQ ID NO: 2278693 - RNA, 19 nt, Artificial Sequence
  Description of Artificial Sequence: Synthetic oligonucleotide
augguaaaccacacggcug

SEQ ID NO: 2278694 - RNA, 19 nt, Artificial Sequence
  Description of Artificial Sequence: Synthetic oligonucleotide
gaaucucgaagaagcacca

SEQ ID NO: 2278695 - RNA, 19 nt, Artificial Sequence
  Description of Artificial Sequence: Synthetic oligonucleotide
gaagaagcaccaagccgcc

SEQ ID NO: 2278696 - RNA, 19 nt, Artificial Sequence
  Description of Artificial Sequence: Synthetic oligonucleotide
uuugaccaguuaagagggu

SEQ ID NO: 2278697 - RNA, 19 nt, Artificial Sequence
  Description of Artificial Sequence: Synthetic oligonucleotide
cugaacuggaaggguagag

SEQ ID NO: 2278698 - RNA, 19 nt, Artificial Sequence
  Description of Artificial Sequence: Synthetic oligonucleotide
ugacagaauccagagcaau

SEQ ID NO: 2278699 - RNA, 19 nt, Artificial Sequence
  Description of Artificial Sequence: Synthetic oligonucleotide
cagggccaaaaccuucgcg

SEQ ID NO: 2278700 - RNA, 19 nt, Artificial Sequence
  Description of Artificial Sequence: Synthetic oligonucleotide
caagggugcucagugcucc

SEQ ID NO: 2278701 - RNA, 19 nt, Artificial Sequence
  Description of Artificial Sequence: Synthetic oligonucleotide
uuugagcaagggugcucag

SEQ ID NO: 2278702 - RNA, 19 nt, Artificial Sequence
  Description of Artificial Sequence: Synthetic oligonucleotide
acacguaccugaucuacua

SEQ ID NO: 2278703 - RNA, 19 nt, Artificial Sequence
  Description of Artificial Sequence: Synthetic oligonucleotide
aaggguagagugaggcugu

SEQ ID NO: 2278704 - RNA, 19 nt, Artificial Sequence
  Description of Artificial Sequence: Synthetic oligonucleotide
gagucagcaccugaggaga

SEQ ID NO: 2278705 - RNA, 19 nt, Artificial Sequence
  Description of Artificial Sequence: Synthetic oligonucleotide
caugguaaaccacacggcu

SEQ ID NO: 2278706 - RNA, 19 nt, Artificial Sequence
  Description of Artificial Sequence: Synthetic oligonucleotide
uggcuaguugucuggccug

SEQ ID NO: 2278707 - RNA, 19 nt, Artificial Sequence
  Description of Artificial Sequence: Synthetic oligonucleotide
caaaaccuucgcgaaacuc

SEQ ID NO: 2278708 - RNA, 19 nt, Artificial Sequence
  Description of Artificial Sequence: Synthetic oligonucleotide
gagacacuuggcuggcuca

SEQ ID NO: 2278709 - RNA, 19 nt, Artificial Sequence
  Description of Artificial Sequence: Synthetic oligonucleotide
ggaggggaagcuucucacg

SEQ ID NO: 2278710 - RNA, 19 nt, Artificial Sequence
  Description of Artificial Sequence: Synthetic oligonucleotide
ucucacggagauccacacu

SEQ ID NO: 2278711 - RNA, 19 nt, Artificial Sequence
  Description of Artificial Sequence: Synthetic oligonucleotide
aaaccuucgcgaaacucuu

SEQ ID NO: 2278712 - RNA, 19 nt, Artificial Sequence
  Description of Artificial Sequence: Synthetic oligonucleotide
cacguaccugaucuacuag

SEQ ID NO: 2278713 - RNA, 19 nt, Artificial Sequence
  Description of Artificial Sequence: Synthetic oligonucleotide
ucgcgaaacucuucuucac

SEQ ID NO: 2278714 - RNA, 19 nt, Artificial Sequence
  Description of Artificial Sequence: Synthetic oligonucleotide
cucuuucuuucuuggauaa

SEQ ID NO: 2278715 - RNA, 19 nt, Artificial Sequence
  Description of Artificial Sequence: Synthetic oligonucleotide
gagcaagggugcucagugc

SEQ ID NO: 2278716 - RNA, 19 nt, Artificial Sequence
  Description of Artificial Sequence: Synthetic oligonucleotide
cuucucacggagauccaca

SEQ ID NO: 2278717 - RNA, 19 nt, Artificial Sequence
  Description of Artificial Sequence: Synthetic oligonucleotide
cacacggcuguugauauca

SEQ ID NO: 2278718 - RNA, 19 nt, Artificial Sequence
  Description of Artificial Sequence: Synthetic oligonucleotide
uagcucggaauggagggga

SEQ ID NO: 2278719 - RNA, 19 nt, Artificial Sequence
  Description of Artificial Sequence: Synthetic oligonucleotide
uggcccauuuuaccacuca

SEQ ID NO: 2278720 - RNA, 19 nt, Artificial Sequence
  Description of Artificial Sequence: Synthetic oligonucleotide
caggacacguaccugaucu

SEQ ID NO: 2278721 - RNA, 19 nt, Artificial Sequence
  Description of Artificial Sequence: Synthetic oligonucleotide
cucaagguuccuagagguc

SEQ ID NO: 2278722 - RNA, 19 nt, Artificial Sequence
  Description of Artificial Sequence: Synthetic oligonucleotide
gguuuuacagaguguaaua

SEQ ID NO: 2278723 - RNA, 19 nt, Artificial Sequence
  Description of Artificial Sequence: Synthetic oligonucleotide
ccgccgacggccaacagcg

SEQ ID NO: 2278724 - RNA, 19 nt, Artificial Sequence
  Description of Artificial Sequence: Synthetic oligonucleotide
gucaucaaaagcaucuggu

SEQ ID NO: 2278725 - RNA, 19 nt, Artificial Sequence
  Description of Artificial Sequence: Synthetic oligonucleotide
ggggaagcuucucacggag

SEQ ID NO: 2278726 - RNA, 19 nt, Artificial Sequence
  Description of Artificial Sequence: Synthetic oligonucleotide
ccauuugucuagucaaaug

SEQ ID NO: 2278727 - RNA, 19 nt, Artificial Sequence
  Description of Artificial Sequence: Synthetic oligonucleotide
agagcugaacuggaagggu

SEQ ID NO: 2278728 - RNA, 19 nt, Artificial Sequence
  Description of Artificial Sequence: Synthetic oligonucleotide
gaagcaccaagccgccgac

SEQ ID NO: 2278729 - RNA, 19 nt, Artificial Sequence
  Description of Artificial Sequence: Synthetic oligonucleotide
ccagauuuugaccaguuaa

SEQ ID NO: 2278730 - RNA, 19 nt, Artificial Sequence
  Description of Artificial Sequence: Synthetic oligonucleotide
cuaguugucuggccugguc

SEQ ID NO: 2278731 - RNA, 19 nt, Artificial Sequence
  Description of Artificial Sequence: Synthetic oligonucleotide
guaaaccacacggcuguug

SEQ ID NO: 2278732 - RNA, 19 nt, Artificial Sequence
  Description of Artificial Sequence: Synthetic oligonucleotide
agccuuuaguagacugcgc

SEQ ID NO: 2278733 - RNA, 19 nt, Artificial Sequence
  Description of Artificial Sequence: Synthetic oligonucleotide
ucgauagaggauggaggcu

SEQ ID NO: 2278734 - RNA, 19 nt, Artificial Sequence
  Description of Artificial Sequence: Synthetic oligonucleotide
caccaagccgccgacggcc

SEQ ID NO: 2278735 - RNA, 19 nt, Artificial Sequence
  Description of Artificial Sequence: Synthetic oligonucleotide
ucaccagauuuugaccagu

SEQ ID NO: 2278736 - RNA, 19 nt, Artificial Sequence
  Description of Artificial Sequence: Synthetic oligonucleotide
uguuugagcaagggugcuc

SEQ ID NO: 2278737 - RNA, 19 nt, Artificial Sequence
  Description of Artificial Sequence: Synthetic oligonucleotide
ucggaauggaggggaagcu

SEQ ID NO: 2278738 - RNA, 19 nt, Artificial Sequence
  Description of Artificial Sequence: Synthetic oligonucleotide
accaccaagucugguaagu

SEQ ID NO: 2278739 - RNA, 19 nt, Artificial Sequence
  Description of Artificial Sequence: Synthetic oligonucleotide
gggccuucgauagaggaug

SEQ ID NO: 2278740 - RNA, 19 nt, Artificial Sequence
  Description of Artificial Sequence: Synthetic oligonucleotide
uugagcaagggugcucagu

SEQ ID NO: 2278741 - RNA, 19 nt, Artificial Sequence
  Description of Artificial Sequence: Synthetic oligonucleotide
acgucaucaaaagcaucug

SEQ ID NO: 2278742 - RNA, 19 nt, Artificial Sequence
  Description of Artificial Sequence: Synthetic oligonucleotide
cuggccugguccacggcgc

SEQ ID NO: 2278743 - RNA, 19 nt, Artificial Sequence
  Description of Artificial Sequence: Synthetic oligonucleotide
gaucgguccuucugcacaa

SEQ ID NO: 2278744 - RNA, 19 nt, Artificial Sequence
  Description of Artificial Sequence: Synthetic oligonucleotide
cauuccacggaaucucgaa

SEQ ID NO: 2278745 - RNA, 19 nt, Artificial Sequence
  Description of Artificial Sequence: Synthetic oligonucleotide
cugguucauagaagaugug

SEQ ID NO: 2278746 - RNA, 19 nt, Artificial Sequence
  Description of Artificial Sequence: Synthetic oligonucleotide
uccggguguagcucggaau

SEQ ID NO: 2278747 - RNA, 19 nt, Artificial Sequence
  Description of Artificial Sequence: Synthetic oligonucleotide
gacagggccaggaucgguc

SEQ ID NO: 2278748 - RNA, 19 nt, Artificial Sequence
  Description of Artificial Sequence: Synthetic oligonucleotide
caggguuuuacagagugua

SEQ ID NO: 2278749 - RNA, 19 nt, Artificial Sequence
  Description of Artificial Sequence: Synthetic oligonucleotide
uguuggggccuucgauaga

SEQ ID NO: 2278750 - RNA, 19 nt, Artificial Sequence
  Description of Artificial Sequence: Synthetic oligonucleotide
ccaggaucgguccuucugc

SEQ ID NO: 2278751 - RNA, 19 nt, Artificial Sequence
  Description of Artificial Sequence: Synthetic oligonucleotide
ggaucgguccuucugcaca

SEQ ID NO: 2278752 - RNA, 19 nt, Artificial Sequence
  Description of Artificial Sequence: Synthetic oligonucleotide
aggggaagcuucucacgga

SEQ ID NO: 2278753 - RNA, 19 nt, Artificial Sequence
  Description of Artificial Sequence: Synthetic oligonucleotide
guguaauacaggggagaug

SEQ ID NO: 2278754 - RNA, 19 nt, Artificial Sequence
  Description of Artificial Sequence: Synthetic oligonucleotide
guagacugcgccccucaca

SEQ ID NO: 2278755 - RNA, 19 nt, Artificial Sequence
  Description of Artificial Sequence: Synthetic oligonucleotide
acggagauccacacucaag

SEQ ID NO: 2278756 - RNA, 19 nt, Artificial Sequence
  Description of Artificial Sequence: Synthetic oligonucleotide
auuuuaccacucacaguca

SEQ ID NO: 2278757 - RNA, 19 nt, Artificial Sequence
  Description of Artificial Sequence: Synthetic oligonucleotide
uggaucugcuccccacgaa

SEQ ID NO: 2278758 - RNA, 19 nt, Artificial Sequence
  Description of Artificial Sequence: Synthetic oligonucleotide
caacagcgaguccagcauc

SEQ ID NO: 2278759 - RNA, 19 nt, Artificial Sequence
  Description of Artificial Sequence: Synthetic oligonucleotide
agcaauggugacagggcca

SEQ ID NO: 2278760 - RNA, 19 nt, Artificial Sequence
  Description of Artificial Sequence: Synthetic oligonucleotide
cucacagucaccucuguuu

SEQ ID NO: 2278761 - RNA, 19 nt, Artificial Sequence
  Description of Artificial Sequence: Synthetic oligonucleotide
aaucucgaagaagcaccaa

SEQ ID NO: 2278762 - RNA, 19 nt, Artificial Sequence
  Description of Artificial Sequence: Synthetic oligonucleotide
gauagaggauggaggcuga

SEQ ID NO: 2278763 - RNA, 19 nt, Artificial Sequence
  Description of Artificial Sequence: Synthetic oligonucleotide
agucagcaccugaggagac

SEQ ID NO: 2278764 - RNA, 19 nt, Artificial Sequence
  Description of Artificial Sequence: Synthetic oligonucleotide
cacggcgcagcagagcuug

SEQ ID NO: 2278765 - RNA, 19 nt, Artificial Sequence
  Description of Artificial Sequence: Synthetic oligonucleotide
gucaaaucagucgugggau

SEQ ID NO: 2278766 - RNA, 19 nt, Artificial Sequence
  Description of Artificial Sequence: Synthetic oligonucleotide
uggauaagugaagguuaaa

SEQ ID NO: 2278767 - RNA, 19 nt, Artificial Sequence
  Description of Artificial Sequence: Synthetic oligonucleotide
ggagauccacacucaaguc

SEQ ID NO: 2278768 - RNA, 19 nt, Artificial Sequence
  Description of Artificial Sequence: Synthetic oligonucleotide
caccucuguuugagcaagg

SEQ ID NO: 2278769 - RNA, 19 nt, Artificial Sequence
  Description of Artificial Sequence: Synthetic oligonucleotide
cacguuguuggggccuucg

SEQ ID NO: 2278770 - RNA, 19 nt, Artificial Sequence
  Description of Artificial Sequence: Synthetic oligonucleotide
gguguagcucggaauggag

SEQ ID NO: 2278771 - RNA, 19 nt, Artificial Sequence
  Description of Artificial Sequence: Synthetic oligonucleotide
acucacagucaccucuguu

SEQ ID NO: 2278772 - RNA, 19 nt, Artificial Sequence
  Description of Artificial Sequence: Synthetic oligonucleotide
auccaccuggguuguguga

SEQ ID NO: 2278773 - RNA, 19 nt, Artificial Sequence
  Description of Artificial Sequence: Synthetic oligonucleotide
guggcuaguugucuggccu

SEQ ID NO: 2278774 - RNA, 19 nt, Artificial Sequence
  Description of Artificial Sequence: Synthetic oligonucleotide
gaucuacuagggagucagc

SEQ ID NO: 2278775 - RNA, 19 nt, Artificial Sequence
  Description of Artificial Sequence: Synthetic oligonucleotide
agguuccuagagguccuuc

SEQ ID NO: 2278776 - RNA, 19 nt, Artificial Sequence
  Description of Artificial Sequence: Synthetic oligonucleotide
uuaguagacugcgccccuc

SEQ ID NO: 2278777 - RNA, 19 nt, Artificial Sequence
  Description of Artificial Sequence: Synthetic oligonucleotide
auaucagggccaaaaccuu

SEQ ID NO: 2278778 - RNA, 19 nt, Artificial Sequence
  Description of Artificial Sequence: Synthetic oligonucleotide
ggagacacuuggcuggcuc

SEQ ID NO: 2278779 - RNA, 19 nt, Artificial Sequence
  Description of Artificial Sequence: Synthetic oligonucleotide
uugcacguuguuggggccu

SEQ ID NO: 2278780 - RNA, 19 nt, Artificial Sequence
  Description of Artificial Sequence: Synthetic oligonucleotide
cauggggccgggaccauga

SEQ ID NO: 2278781 - RNA, 19 nt, Artificial Sequence
  Description of Artificial Sequence: Synthetic oligonucleotide
guggaucugcuccccacga

SEQ ID NO: 2278782 - RNA, 19 nt, Artificial Sequence
  Description of Artificial Sequence: Synthetic oligonucleotide
cuagggagucagcaccuga

SEQ ID NO: 2278783 - RNA, 19 nt, Artificial Sequence
  Description of Artificial Sequence: Synthetic oligonucleotide
gucaccucuguuugagcaa

SEQ ID NO: 2278784 - RNA, 19 nt, Artificial Sequence
  Description of Artificial Sequence: Synthetic oligonucleotide
gcuguugauaucagggcca

SEQ ID NO: 2278785 - RNA, 19 nt, Artificial Sequence
  Description of Artificial Sequence: Synthetic oligonucleotide
ggcccauuuuaccacucac

SEQ ID NO: 2278786 - RNA, 19 nt, Artificial Sequence
  Description of Artificial Sequence: Synthetic oligonucleotide
acguuguuggggccuucga

SEQ ID NO: 2278787 - RNA, 19 nt, Artificial Sequence
  Description of Artificial Sequence: Synthetic oligonucleotide
cgaagugcagauuucuuga

SEQ ID NO: 2278788 - RNA, 19 nt, Artificial Sequence
  Description of Artificial Sequence: Synthetic oligonucleotide
cugacagaauccagagcaa

SEQ ID NO: 2278789 - RNA, 19 nt, Artificial Sequence
  Description of Artificial Sequence: Synthetic oligonucleotide
ccucacauuccacggaauc

SEQ ID NO: 2278790 - RNA, 19 nt, Artificial Sequence
  Description of Artificial Sequence: Synthetic oligonucleotide
acggaaucucgaagaagca

SEQ ID NO: 2278791 - RNA, 19 nt, Artificial Sequence
  Description of Artificial Sequence: Synthetic oligonucleotide
guagagugaggcugucucu

SEQ ID NO: 2278792 - RNA, 19 nt, Artificial Sequence
  Description of Artificial Sequence: Synthetic oligonucleotide
acuagggagucagcaccug

SEQ ID NO: 2278793 - RNA, 19 nt, Artificial Sequence
  Description of Artificial Sequence: Synthetic oligonucleotide
cagugcucccauggggccg

SEQ ID NO: 2278794 - RNA, 19 nt, Artificial Sequence
  Description of Artificial Sequence: Synthetic oligonucleotide
guugugugaggauccgggu

SEQ ID NO: 2278795 - RNA, 19 nt, Artificial Sequence
  Description of Artificial Sequence: Synthetic oligonucleotide
ggagauggaacagcagcca

SEQ ID NO: 2278796 - RNA, 19 nt, Artificial Sequence
  Description of Artificial Sequence: Synthetic oligonucleotide
ucgugggauccaccugggu

SEQ ID NO: 2278797 - RNA, 19 nt, Artificial Sequence
  Description of Artificial Sequence: Synthetic oligonucleotide
acauuccacggaaucucga

SEQ ID NO: 2278798 - RNA, 19 nt, Artificial Sequence
  Description of Artificial Sequence: Synthetic oligonucleotide
cgauagaggauggaggcug

SEQ ID NO: 2278799 - RNA, 19 nt, Artificial Sequence
  Description of Artificial Sequence: Synthetic oligonucleotide
gucgugggauccaccuggg

SEQ ID NO: 2278800 - RNA, 19 nt, Artificial Sequence
  Description of Artificial Sequence: Synthetic oligonucleotide
cacucacuucacagcccag

SEQ ID NO: 2278801 - RNA, 19 nt, Artificial Sequence
  Description of Artificial Sequence: Synthetic oligonucleotide
ugcgccccucacauuccac

SEQ ID NO: 2278802 - RNA, 19 nt, Artificial Sequence
  Description of Artificial Sequence: Synthetic oligonucleotide
gccgacggccaacagcgag

SEQ ID NO: 2278803 - RNA, 19 nt, Artificial Sequence
  Description of Artificial Sequence: Synthetic oligonucleotide
gacguggaucugcucccca

SEQ ID NO: 2278804 - RNA, 19 nt, Artificial Sequence
  Description of Artificial Sequence: Synthetic oligonucleotide
gaucugcuccccacgaagu

SEQ ID NO: 2278805 - RNA, 19 nt, Artificial Sequence
  Description of Artificial Sequence: Synthetic oligonucleotide
uggccugguccacggcgca

SEQ ID NO: 2278806 - RNA, 19 nt, Artificial Sequence
  Description of Artificial Sequence: Synthetic oligonucleotide
aggacacguaccugaucua

SEQ ID NO: 2278807 - RNA, 19 nt, Artificial Sequence
  Description of Artificial Sequence: Synthetic oligonucleotide
auccggguguagcucggaa

SEQ ID NO: 2278808 - RNA, 19 nt, Artificial Sequence
  Description of Artificial Sequence: Synthetic oligonucleotide
gacacguaccugaucuacu

SEQ ID NO: 2278809 - RNA, 19 nt, Artificial Sequence
  Description of Artificial Sequence: Synthetic oligonucleotide
gugaagguuaaaggucaaa

SEQ ID NO: 2278810 - RNA, 19 nt, Artificial Sequence
  Description of Artificial Sequence: Synthetic oligonucleotide
gaauggaggggaagcuucu

SEQ ID NO: 2278811 - RNA, 19 nt, Artificial Sequence
  Description of Artificial Sequence: Synthetic oligonucleotide
cacagucaccucuguuuga

SEQ ID NO: 2278812 - RNA, 19 nt, Artificial Sequence
  Description of Artificial Sequence: Synthetic oligonucleotide
uguugauaucagggccaaa

SEQ ID NO: 2278813 - RNA, 19 nt, Artificial Sequence
  Description of Artificial Sequence: Synthetic oligonucleotide
gacggccaacagcgagucc

SEQ ID NO: 2278814 - RNA, 19 nt, Artificial Sequence
  Description of Artificial Sequence: Synthetic oligonucleotide
cagaauccagagcaauggu

SEQ ID NO: 2278815 - RNA, 19 nt, Artificial Sequence
  Description of Artificial Sequence: Synthetic oligonucleotide
gccgccgacggccaacagc

SEQ ID NO: 2278816 - RNA, 19 nt, Artificial Sequence
  Description of Artificial Sequence: Synthetic oligonucleotide
guaauacaggggagaugga

SEQ ID NO: 2278817 - RNA, 19 nt, Artificial Sequence
  Description of Artificial Sequence: Synthetic oligonucleotide
caagguuccuagagguccu

SEQ ID NO: 2278818 - RNA, 19 nt, Artificial Sequence
  Description of Artificial Sequence: Synthetic oligonucleotide
cacggagauccacacucaa

SEQ ID NO: 2278819 - RNA, 19 nt, Artificial Sequence
  Description of Artificial Sequence: Synthetic oligonucleotide
aagguuccuagagguccuu

SEQ ID NO: 2278820 - RNA, 19 nt, Artificial Sequence
  Description of Artificial Sequence: Synthetic oligonucleotide
ggccuucgauagaggaugg

SEQ ID NO: 2278821 - RNA, 19 nt, Artificial Sequence
  Description of Artificial Sequence: Synthetic oligonucleotide
gggccaaaaccuucgcgaa

SEQ ID NO: 2278822 - RNA, 19 nt, Artificial Sequence
  Description of Artificial Sequence: Synthetic oligonucleotide
ggguuuuacagaguguaau

SEQ ID NO: 2278823 - RNA, 19 nt, Artificial Sequence
  Description of Artificial Sequence: Synthetic oligonucleotide
acacggcuguugauaucag

SEQ ID NO: 2278824 - RNA, 19 nt, Artificial Sequence
  Description of Artificial Sequence: Synthetic oligonucleotide
cuguugauaucagggccaa

SEQ ID NO: 2278825 - RNA, 19 nt, Artificial Sequence
  Description of Artificial Sequence: Synthetic oligonucleotide
accaguuaagagggucuuu

SEQ ID NO: 2278826 - RNA, 19 nt, Artificial Sequence
  Description of Artificial Sequence: Synthetic oligonucleotide
caucugguucauagaagau

SEQ ID NO: 2278827 - RNA, 19 nt, Artificial Sequence
  Description of Artificial Sequence: Synthetic oligonucleotide
ccugaucuacuagggaguc

SEQ ID NO: 2278828 - RNA, 19 nt, Artificial Sequence
  Description of Artificial Sequence: Synthetic oligonucleotide
caagccgccgacggccaac

SEQ ID NO: 2278829 - RNA, 19 nt, Artificial Sequence
  Description of Artificial Sequence: Synthetic oligonucleotide
ggaaggguagagugaggcu

SEQ ID NO: 2278830 - RNA, 19 nt, Artificial Sequence
  Description of Artificial Sequence: Synthetic oligonucleotide
ccacgucaucaaaagcauc

SEQ ID NO: 2278831 - RNA, 19 nt, Artificial Sequence
  Description of Artificial Sequence: Synthetic oligonucleotide
ugcacguuguuggggccuu

SEQ ID NO: 2278832 - RNA, 19 nt, Artificial Sequence
  Description of Artificial Sequence: Synthetic oligonucleotide
cuccccacgaagugcagau

SEQ ID NO: 2278833 - RNA, 19 nt, Artificial Sequence
  Description of Artificial Sequence: Synthetic oligonucleotide
caccuggguugugugagga

SEQ ID NO: 2278834 - RNA, 19 nt, Artificial Sequence
  Description of Artificial Sequence: Synthetic oligonucleotide
ggauccggguguagcucgg

SEQ ID NO: 2278835 - RNA, 19 nt, Artificial Sequence
  Description of Artificial Sequence: Synthetic oligonucleotide
gcucggaauggaggggaag

SEQ ID NO: 2278836 - RNA, 19 nt, Artificial Sequence
  Description of Artificial Sequence: Synthetic oligonucleotide
ccaagucugguaaguugca

SEQ ID NO: 2278837 - RNA, 19 nt, Artificial Sequence
  Description of Artificial Sequence: Synthetic oligonucleotide
ccaccuggguugugugagg

SEQ ID NO: 2278838 - RNA, 19 nt, Artificial Sequence
  Description of Artificial Sequence: Synthetic oligonucleotide
gccgggaccaugaagcucu

SEQ ID NO: 2278839 - RNA, 19 nt, Artificial Sequence
  Description of Artificial Sequence: Synthetic oligonucleotide
cauagaagauguggcuagu

SEQ ID NO: 2278840 - RNA, 19 nt, Artificial Sequence
  Description of Artificial Sequence: Synthetic oligonucleotide
cggagauccacacucaagu

SEQ ID NO: 2278841 - RNA, 19 nt, Artificial Sequence
  Description of Artificial Sequence: Synthetic oligonucleotide
ggccaaaaccuucgcgaaa

SEQ ID NO: 2278842 - RNA, 19 nt, Artificial Sequence
  Description of Artificial Sequence: Synthetic oligonucleotide
cgccccucacauuccacgg

SEQ ID NO: 2278843 - RNA, 19 nt, Artificial Sequence
  Description of Artificial Sequence: Synthetic oligonucleotide
gauccggguguagcucgga

SEQ ID NO: 2278844 - RNA, 19 nt, Artificial Sequence
  Description of Artificial Sequence: Synthetic oligonucleotide
ucagggcaugcaggguuuu

SEQ ID NO: 2278845 - RNA, 19 nt, Artificial Sequence
  Description of Artificial Sequence: Synthetic oligonucleotide
cugguccacggcgcagcag

SEQ ID NO: 2278846 - RNA, 19 nt, Artificial Sequence
  Description of Artificial Sequence: Synthetic oligonucleotide
gcaccaagccgccgacggc

SEQ ID NO: 2278847 - RNA, 19 nt, Artificial Sequence
  Description of Artificial Sequence: Synthetic oligonucleotide
gcugaacuggaaggguaga

SEQ ID NO: 2278848 - RNA, 19 nt, Artificial Sequence
  Description of Artificial Sequence: Synthetic oligonucleotide
aguaggcccaggacacgua

SEQ ID NO: 2278849 - RNA, 19 nt, Artificial Sequence
  Description of Artificial Sequence: Synthetic oligonucleotide
ggacguggaucugcucccc

SEQ ID NO: 2278850 - RNA, 19 nt, Artificial Sequence
  Description of Artificial Sequence: Synthetic oligonucleotide
gcgaguccagcaucucgga

SEQ ID NO: 2278851 - RNA, 19 nt, Artificial Sequence
  Description of Artificial Sequence: Synthetic oligonucleotide
agccgccgacggccaacag

SEQ ID NO: 2278852 - RNA, 19 nt, Artificial Sequence
  Description of Artificial Sequence: Synthetic oligonucleotide
accaagccgccgacggcca

SEQ ID NO: 2278853 - RNA, 19 nt, Artificial Sequence
  Description of Artificial Sequence: Synthetic oligonucleotide
ccauuuuaccacucacagu

SEQ ID NO: 2278854 - RNA, 19 nt, Artificial Sequence
  Description of Artificial Sequence: Synthetic oligonucleotide
agacugcgccccucacauu

SEQ ID NO: 2278855 - RNA, 19 nt, Artificial Sequence
  Description of Artificial Sequence: Synthetic oligonucleotide
uccccacgaagugcagauu

SEQ ID NO: 2278856 - RNA, 19 nt, Artificial Sequence
  Description of Artificial Sequence: Synthetic oligonucleotide
cugcgccccucacauucca

SEQ ID NO: 2278857 - RNA, 19 nt, Artificial Sequence
  Description of Artificial Sequence: Synthetic oligonucleotide
agcucggaauggaggggaa

SEQ ID NO: 2278858 - RNA, 19 nt, Artificial Sequence
  Description of Artificial Sequence: Synthetic oligonucleotide
caguaggcccaggacacgu

SEQ ID NO: 2278859 - RNA, 19 nt, Artificial Sequence
  Description of Artificial Sequence: Synthetic oligonucleotide
ggauccaccuggguugugu

SEQ ID NO: 2278860 - RNA, 19 nt, Artificial Sequence
  Description of Artificial Sequence: Synthetic oligonucleotide
ccaggacacguaccugauc

SEQ ID NO: 2278861 - RNA, 19 nt, Artificial Sequence
  Description of Artificial Sequence: Synthetic oligonucleotide
aggcugaagucuggcccau

SEQ ID NO: 2278862 - RNA, 19 nt, Artificial Sequence
  Description of Artificial Sequence: Synthetic oligonucleotide
gcgcagcagagcuuguugu

SEQ ID NO: 2278863 - RNA, 19 nt, Artificial Sequence
  Description of Artificial Sequence: Synthetic oligonucleotide
cgaguccagcaucucggac

SEQ ID NO: 2278864 - RNA, 19 nt, Artificial Sequence
  Description of Artificial Sequence: Synthetic oligonucleotide
ggcugucucuugcuucucu

SEQ ID NO: 2278865 - RNA, 19 nt, Artificial Sequence
  Description of Artificial Sequence: Synthetic oligonucleotide
cacucaagucaggaagaau

SEQ ID NO: 2278866 - RNA, 19 nt, Artificial Sequence
  Description of Artificial Sequence: Synthetic oligonucleotide
ccucuguuugagcaagggu

SEQ ID NO: 2278867 - RNA, 19 nt, Artificial Sequence
  Description of Artificial Sequence: Synthetic oligonucleotide
ccccucacauuccacggaa

SEQ ID NO: 2278868 - RNA, 19 nt, Artificial Sequence
  Description of Artificial Sequence: Synthetic oligonucleotide
ggcccaggacacguaccug

SEQ ID NO: 2278869 - RNA, 19 nt, Artificial Sequence
  Description of Artificial Sequence: Synthetic oligonucleotide
ccacacggcuguugauauc

SEQ ID NO: 2278870 - RNA, 19 nt, Artificial Sequence
  Description of Artificial Sequence: Synthetic oligonucleotide
caagguucucaagguuccu

SEQ ID NO: 2278871 - RNA, 19 nt, Artificial Sequence
  Description of Artificial Sequence: Synthetic oligonucleotide
ggccaacagcgaguccagc

SEQ ID NO: 2278872 - RNA, 19 nt, Artificial Sequence
  Description of Artificial Sequence: Synthetic oligonucleotide
ccaggacguggaucugcuc

SEQ ID NO: 2278873 - RNA, 19 nt, Artificial Sequence
  Description of Artificial Sequence: Synthetic oligonucleotide
ggccugguccacggcgcag

SEQ ID NO: 2278874 - RNA, 19 nt, Artificial Sequence
  Description of Artificial Sequence: Synthetic oligonucleotide
ccccacgaagugcagauuu

SEQ ID NO: 2278875 - RNA, 19 nt, Artificial Sequence
  Description of Artificial Sequence: Synthetic oligonucleotide
gccuucgauagaggaugga

SEQ ID NO: 2278876 - RNA, 19 nt, Artificial Sequence
  Description of Artificial Sequence: Synthetic oligonucleotide
gucugguaaguugcacguu

SEQ ID NO: 2278877 - RNA, 19 nt, Artificial Sequence
  Description of Artificial Sequence: Synthetic oligonucleotide
ggggccuucgauagaggau

SEQ ID NO: 2278878 - RNA, 19 nt, Artificial Sequence
  Description of Artificial Sequence: Synthetic oligonucleotide
cagggcaugcaggguuuua

SEQ ID NO: 2278879 - RNA, 19 nt, Artificial Sequence
  Description of Artificial Sequence: Synthetic oligonucleotide
cgacggccaacagcgaguc

SEQ ID NO: 2278880 - RNA, 19 nt, Artificial Sequence
  Description of Artificial Sequence: Synthetic oligonucleotide
cccauuugucuagucaaau

SEQ ID NO: 2278881 - RNA, 19 nt, Artificial Sequence
  Description of Artificial Sequence: Synthetic oligonucleotide
cgcgaaacucuucuucacu

SEQ ID NO: 2278882 - RNA, 19 nt, Artificial Sequence
  Description of Artificial Sequence: Synthetic oligonucleotide
ccgacggccaacagcgagu

SEQ ID NO: 2278883 - RNA, 19 nt, Artificial Sequence
  Description of Artificial Sequence: Synthetic oligonucleotide
cccaggacguggaucugcu

SEQ ID NO: 2278884 - RNA, 19 nt, Artificial Sequence
  Description of Artificial Sequence: Synthetic oligonucleotide
ggguagagugaggcugucu

SEQ ID NO: 2278885 - RNA, 19 nt, Artificial Sequence
  Description of Artificial Sequence: Synthetic oligonucleotide
gggccgggaccaugaagcu

SEQ ID NO: 2278886 - RNA, 19 nt, Artificial Sequence
  Description of Artificial Sequence: Synthetic oligonucleotide
gggccaggaucgguccuuc

SEQ ID NO: 2278887 - RNA, 19 nt, Artificial Sequence
  Description of Artificial Sequence: Synthetic oligonucleotide
ccauggggccgggaccaug

SEQ ID NO: 2278888 - RNA, 19 nt, Artificial Sequence
  Description of Artificial Sequence: Synthetic oligonucleotide
gggauccaccuggguugug

SEQ ID NO: 2278889 - RNA, 19 nt, Artificial Sequence
  Description of Artificial Sequence: Synthetic oligonucleotide
gcuaguugucuggccuggu

SEQ ID NO: 2278890 - RNA, 19 nt, Artificial Sequence
  Description of Artificial Sequence: Synthetic oligonucleotide
gguaaaccacacggcuguu

SEQ ID NO: 2278891 - RNA, 19 nt, Artificial Sequence
  Description of Artificial Sequence: Synthetic oligonucleotide
ggccaggaucgguccuucu

SEQ ID NO: 2278892 - RNA, 19 nt, Artificial Sequence
  Description of Artificial Sequence: Synthetic oligonucleotide
ccuucgcgaaacucuucuu

SEQ ID NO: 2278893 - RNA, 19 nt, Artificial Sequence
  Description of Artificial Sequence: Synthetic oligonucleotide
cccucacauuccacggaau

SEQ ID NO: 2278894 - RNA, 19 nt, Artificial Sequence
  Description of Artificial Sequence: Synthetic oligonucleotide
ccaagccgccgacggccaa

SEQ ID NO: 2278895 - RNA, 19 nt, Artificial Sequence
  Description of Artificial Sequence: Synthetic oligonucleotide
cgggaccaugaagcucuuc

SEQ ID NO: 2278896 - RNA, 19 nt, Artificial Sequence
  Description of Artificial Sequence: Synthetic oligonucleotide
cgccgacggccaacagcga

SEQ ID NO: 2278897 - RNA, 19 nt, Artificial Sequence
  Description of Artificial Sequence: Synthetic oligonucleotide
ccgggaccaugaagcucuu

SEQ ID NO: 2278898 - RNA, 19 nt, Artificial Sequence
  Description of Artificial Sequence: Synthetic oligonucleotide
aaacacacggcccagagag

SEQ ID NO: 2278899 - RNA, 19 nt, Artificial Sequence
  Description of Artificial Sequence: Synthetic oligonucleotide
aagucuagcacacguaggc

SEQ ID NO: 2278900 - RNA, 19 nt, Artificial Sequence
  Description of Artificial Sequence: Synthetic oligonucleotide
accacuggcaaacacacgg

SEQ ID NO: 2278901 - RNA, 19 nt, Artificial Sequence
  Description of Artificial Sequence: Synthetic oligonucleotide
cugucuauagccucgaagc

SEQ ID NO: 2278902 - RNA, 19 nt, Artificial Sequence
  Description of Artificial Sequence: Synthetic oligonucleotide
auagaagugcaauacucgg

SEQ ID NO: 2278903 - RNA, 19 nt, Artificial Sequence
  Description of Artificial Sequence: Synthetic oligonucleotide
cauagaagugcaauacucg

SEQ ID NO: 2278904 - RNA, 19 nt, Artificial Sequence
  Description of Artificial Sequence: Synthetic oligonucleotide
uuaacugaaggacacggcu

SEQ ID NO: 2278905 - RNA, 19 nt, Artificial Sequence
  Description of Artificial Sequence: Synthetic oligonucleotide
auacucgggagucacagcg

SEQ ID NO: 2278906 - RNA, 19 nt, Artificial Sequence
  Description of Artificial Sequence: Synthetic oligonucleotide
acacaguccagagacaugc

SEQ ID NO: 2278907 - RNA, 19 nt, Artificial Sequence
  Description of Artificial Sequence: Synthetic oligonucleotide
ugucagcugagucagaggu

SEQ ID NO: 2278908 - RNA, 19 nt, Artificial Sequence
  Description of Artificial Sequence: Synthetic oligonucleotide
aauuccaucucuucccacu

SEQ ID NO: 2278909 - RNA, 19 nt, Artificial Sequence
  Description of Artificial Sequence: Synthetic oligonucleotide
uagaagugcaauacucggg

SEQ ID NO: 2278910 - RNA, 19 nt, Artificial Sequence
  Description of Artificial Sequence: Synthetic oligonucleotide
aauacucgggagucacagc

SEQ ID NO: 2278911 - RNA, 19 nt, Artificial Sequence
  Description of Artificial Sequence: Synthetic oligonucleotide
uguggauggacauugccca

SEQ ID NO: 2278912 - RNA, 19 nt, Artificial Sequence
  Description of Artificial Sequence: Synthetic oligonucleotide
acagugacaaguucuucac

SEQ ID NO: 2278913 - RNA, 19 nt, Artificial Sequence
  Description of Artificial Sequence: Synthetic oligonucleotide
ugaguuugucuccucauca

SEQ ID NO: 2278914 - RNA, 19 nt, Artificial Sequence
  Description of Artificial Sequence: Synthetic oligonucleotide
cuucaucugaacaucugcc

SEQ ID NO: 2278915 - RNA, 19 nt, Artificial Sequence
  Description of Artificial Sequence: Synthetic oligonucleotide
acacguaggcccuggaggc

SEQ ID NO: 2278916 - RNA, 19 nt, Artificial Sequence
  Description of Artificial Sequence: Synthetic oligonucleotide
agaagugcaauacucggga

SEQ ID NO: 2278917 - RNA, 19 nt, Artificial Sequence
  Description of Artificial Sequence: Synthetic oligonucleotide
ugaaggucggaucugccug

SEQ ID NO: 2278918 - RNA, 19 nt, Artificial Sequence
  Description of Artificial Sequence: Synthetic oligonucleotide
agcagagagaugaaggucg

SEQ ID NO: 2278919 - RNA, 19 nt, Artificial Sequence
  Description of Artificial Sequence: Synthetic oligonucleotide
uuuaacugaaggacacggc

SEQ ID NO: 2278920 - RNA, 19 nt, Artificial Sequence
  Description of Artificial Sequence: Synthetic oligonucleotide
aaucgagggugcugggagc

SEQ ID NO: 2278921 - RNA, 19 nt, Artificial Sequence
  Description of Artificial Sequence: Synthetic oligonucleotide
caaagucuagcacacguag

SEQ ID NO: 2278922 - RNA, 19 nt, Artificial Sequence
  Description of Artificial Sequence: Synthetic oligonucleotide
ugacucaaacccaacuacc

SEQ ID NO: 2278923 - RNA, 19 nt, Artificial Sequence
  Description of Artificial Sequence: Synthetic oligonucleotide
ucaucugaacaucugccca

SEQ ID NO: 2278924 - RNA, 19 nt, Artificial Sequence
  Description of Artificial Sequence: Synthetic oligonucleotide
uucaucugaacaucugccc

SEQ ID NO: 2278925 - RNA, 19 nt, Artificial Sequence
  Description of Artificial Sequence: Synthetic oligonucleotide
agcuaugcaccucaccugg

SEQ ID NO: 2278926 - RNA, 19 nt, Artificial Sequence
  Description of Artificial Sequence: Synthetic oligonucleotide
acugucuauagccucgaag

SEQ ID NO: 2278927 - RNA, 19 nt, Artificial Sequence
  Description of Artificial Sequence: Synthetic oligonucleotide
ucuauagccucgaagcuau

SEQ ID NO: 2278928 - RNA, 19 nt, Artificial Sequence
  Description of Artificial Sequence: Synthetic oligonucleotide
acucaaacccaacuaccac

SEQ ID NO: 2278929 - RNA, 19 nt, Artificial Sequence
  Description of Artificial Sequence: Synthetic oligonucleotide
gaaucgagggugcugggag

SEQ ID NO: 2278930 - RNA, 19 nt, Artificial Sequence
  Description of Artificial Sequence: Synthetic oligonucleotide
aagugcaauacucgggagu

SEQ ID NO: 2278931 - RNA, 19 nt, Artificial Sequence
  Description of Artificial Sequence: Synthetic oligonucleotide
ggccacaucguccugaugg

SEQ ID NO: 2278932 - RNA, 19 nt, Artificial Sequence
  Description of Artificial Sequence: Synthetic oligonucleotide
ugaacaucugcccaaccuc

SEQ ID NO: 2278933 - RNA, 19 nt, Artificial Sequence
  Description of Artificial Sequence: Synthetic oligonucleotide
acaucguccugaugggugc

SEQ ID NO: 2278934 - RNA, 19 nt, Artificial Sequence
  Description of Artificial Sequence: Synthetic oligonucleotide
agugcaauacucgggaguc

SEQ ID NO: 2278935 - RNA, 19 nt, Artificial Sequence
  Description of Artificial Sequence: Synthetic oligonucleotide
aaccucacagcuugcagca

SEQ ID NO: 2278936 - RNA, 19 nt, Artificial Sequence
  Description of Artificial Sequence: Synthetic oligonucleotide
aaucguacuuggggaagcc

SEQ ID NO: 2278937 - RNA, 19 nt, Artificial Sequence
  Description of Artificial Sequence: Synthetic oligonucleotide
ucaucuugggacuccagac

SEQ ID NO: 2278938 - RNA, 19 nt, Artificial Sequence
  Description of Artificial Sequence: Synthetic oligonucleotide
ugcccaaccucacagcuug

SEQ ID NO: 2278939 - RNA, 19 nt, Artificial Sequence
  Description of Artificial Sequence: Synthetic oligonucleotide
aaagucuagcacacguagg

SEQ ID NO: 2278940 - RNA, 19 nt, Artificial Sequence
  Description of Artificial Sequence: Synthetic oligonucleotide
aacugaaggacacggcuaa

SEQ ID NO: 2278941 - RNA, 19 nt, Artificial Sequence
  Description of Artificial Sequence: Synthetic oligonucleotide
ugagccccaagcuuuaacu

SEQ ID NO: 2278942 - RNA, 19 nt, Artificial Sequence
  Description of Artificial Sequence: Synthetic oligonucleotide
gagucagagguuugggucc

SEQ ID NO: 2278943 - RNA, 19 nt, Artificial Sequence
  Description of Artificial Sequence: Synthetic oligonucleotide
agcuuuaacugaaggacac

SEQ ID NO: 2278944 - RNA, 19 nt, Artificial Sequence
  Description of Artificial Sequence: Synthetic oligonucleotide
uucugacucaaacccaacu

SEQ ID NO: 2278945 - RNA, 19 nt, Artificial Sequence
  Description of Artificial Sequence: Synthetic oligonucleotide
cugacucaaacccaacuac

SEQ ID NO: 2278946 - RNA, 19 nt, Artificial Sequence
  Description of Artificial Sequence: Synthetic oligonucleotide
aagcuaugcaccucaccug

SEQ ID NO: 2278947 - RNA, 19 nt, Artificial Sequence
  Description of Artificial Sequence: Synthetic oligonucleotide
ucugucagcugagucagag

SEQ ID NO: 2278948 - RNA, 19 nt, Artificial Sequence
  Description of Artificial Sequence: Synthetic oligonucleotide
aucuugggacuccagacug

SEQ ID NO: 2278949 - RNA, 19 nt, Artificial Sequence
  Description of Artificial Sequence: Synthetic oligonucleotide
aggaacucggccccagucg

SEQ ID NO: 2278950 - RNA, 19 nt, Artificial Sequence
  Description of Artificial Sequence: Synthetic oligonucleotide
gucacagcgaaccaccgug

SEQ ID NO: 2278951 - RNA, 19 nt, Artificial Sequence
  Description of Artificial Sequence: Synthetic oligonucleotide
ugucuauagccucgaagcu

SEQ ID NO: 2278952 - RNA, 19 nt, Artificial Sequence
  Description of Artificial Sequence: Synthetic oligonucleotide
ucgggagucacagcgaacc

SEQ ID NO: 2278953 - RNA, 19 nt, Artificial Sequence
  Description of Artificial Sequence: Synthetic oligonucleotide
gucacgggcacacacuucc

SEQ ID NO: 2278954 - RNA, 19 nt, Artificial Sequence
  Description of Artificial Sequence: Synthetic oligonucleotide
ucugcccaaccucacagcu

SEQ ID NO: 2278955 - RNA, 19 nt, Artificial Sequence
  Description of Artificial Sequence: Synthetic oligonucleotide
gagguuuggguccauguuc

SEQ ID NO: 2278956 - RNA, 19 nt, Artificial Sequence
  Description of Artificial Sequence: Synthetic oligonucleotide
uccagaucugaguuugucu

SEQ ID NO: 2278957 - RNA, 19 nt, Artificial Sequence
  Description of Artificial Sequence: Synthetic oligonucleotide
auagccucgaagcuaugca

SEQ ID NO: 2278958 - RNA, 19 nt, Artificial Sequence
  Description of Artificial Sequence: Synthetic oligonucleotide
augcaccucaccuggcagc

SEQ ID NO: 2278959 - RNA, 19 nt, Artificial Sequence
  Description of Artificial Sequence: Synthetic oligonucleotide
ucagggucacugucuauag

SEQ ID NO: 2278960 - RNA, 19 nt, Artificial Sequence
  Description of Artificial Sequence: Synthetic oligonucleotide
gucuagcacacguaggccc

SEQ ID NO: 2278961 - RNA, 19 nt, Artificial Sequence
  Description of Artificial Sequence: Synthetic oligonucleotide
aacucggccccagucgacc

SEQ ID NO: 2278962 - RNA, 19 nt, Artificial Sequence
  Description of Artificial Sequence: Synthetic oligonucleotide
uggcuuuuguggauggaca

SEQ ID NO: 2278963 - RNA, 19 nt, Artificial Sequence
  Description of Artificial Sequence: Synthetic oligonucleotide
uauagccucgaagcuaugc

SEQ ID NO: 2278964 - RNA, 19 nt, Artificial Sequence
  Description of Artificial Sequence: Synthetic oligonucleotide
agagaucuccacacagucc

SEQ ID NO: 2278965 - RNA, 19 nt, Artificial Sequence
  Description of Artificial Sequence: Synthetic oligonucleotide
cagagagaucuccacacag

SEQ ID NO: 2278966 - RNA, 19 nt, Artificial Sequence
  Description of Artificial Sequence: Synthetic oligonucleotide
acuaccacuccccgggcuc

SEQ ID NO: 2278967 - RNA, 19 nt, Artificial Sequence
  Description of Artificial Sequence: Synthetic oligonucleotide
caugaccugagccccaagc

SEQ ID NO: 2278968 - RNA, 19 nt, Artificial Sequence
  Description of Artificial Sequence: Synthetic oligonucleotide
aucaucuugggacuccaga

SEQ ID NO: 2278969 - RNA, 19 nt, Artificial Sequence
  Description of Artificial Sequence: Synthetic oligonucleotide
uguggcccugagcuggugg

SEQ ID NO: 2278970 - RNA, 19 nt, Artificial Sequence
  Description of Artificial Sequence: Synthetic oligonucleotide
agucuagcacacguaggcc

SEQ ID NO: 2278971 - RNA, 19 nt, Artificial Sequence
  Description of Artificial Sequence: Synthetic oligonucleotide
uucacuaggccccgagaca

SEQ ID NO: 2278972 - RNA, 19 nt, Artificial Sequence
  Description of Artificial Sequence: Synthetic oligonucleotide
agucucguggcuacaauuc

SEQ ID NO: 2278973 - RNA, 19 nt, Artificial Sequence
  Description of Artificial Sequence: Synthetic oligonucleotide
gcuaacaggacacugggca

SEQ ID NO: 2278974 - RNA, 19 nt, Artificial Sequence
  Description of Artificial Sequence: Synthetic oligonucleotide
ugacaccacacaggaaucg

SEQ ID NO: 2278975 - RNA, 19 nt, Artificial Sequence
  Description of Artificial Sequence: Synthetic oligonucleotide
uggcauagaagugcaauac

SEQ ID NO: 2278976 - RNA, 19 nt, Artificial Sequence
  Description of Artificial Sequence: Synthetic oligonucleotide
gaagugcaauacucgggag

SEQ ID NO: 2278977 - RNA, 19 nt, Artificial Sequence
  Description of Artificial Sequence: Synthetic oligonucleotide
caauacucgggagucacag

SEQ ID NO: 2278978 - RNA, 19 nt, Artificial Sequence
  Description of Artificial Sequence: Synthetic oligonucleotide
ucuagcacacguaggcccu

SEQ ID NO: 2278979 - RNA, 19 nt, Artificial Sequence
  Description of Artificial Sequence: Synthetic oligonucleotide
ucaaagucuagcacacgua

SEQ ID NO: 2278980 - RNA, 19 nt, Artificial Sequence
  Description of Artificial Sequence: Synthetic oligonucleotide
uguaccguccagcggucag

SEQ ID NO: 2278981 - RNA, 19 nt, Artificial Sequence
  Description of Artificial Sequence: Synthetic oligonucleotide
caucugcccaaccucacag

SEQ ID NO: 2278982 - RNA, 19 nt, Artificial Sequence
  Description of Artificial Sequence: Synthetic oligonucleotide
cauaggcuugaccacuggc

SEQ ID NO: 2278983 - RNA, 19 nt, Artificial Sequence
  Description of Artificial Sequence: Synthetic oligonucleotide
agccucgaagcuaugcacc

SEQ ID NO: 2278984 - RNA, 19 nt, Artificial Sequence
  Description of Artificial Sequence: Synthetic oligonucleotide
ugaugggugcagagucucg

SEQ ID NO: 2278985 - RNA, 19 nt, Artificial Sequence
  Description of Artificial Sequence: Synthetic oligonucleotide
gucacugucuauagccucg

SEQ ID NO: 2278986 - RNA, 19 nt, Artificial Sequence
  Description of Artificial Sequence: Synthetic oligonucleotide
augaccugagccccaagcu

SEQ ID NO: 2278987 - RNA, 19 nt, Artificial Sequence
  Description of Artificial Sequence: Synthetic oligonucleotide
ccaacuaccacuccccggg

SEQ ID NO: 2278988 - RNA, 19 nt, Artificial Sequence
  Description of Artificial Sequence: Synthetic oligonucleotide
cacuuuaugggcagcugug

SEQ ID NO: 2278989 - RNA, 19 nt, Artificial Sequence
  Description of Artificial Sequence: Synthetic oligonucleotide
augaaggucggaucugccu

SEQ ID NO: 2278990 - RNA, 19 nt, Artificial Sequence
  Description of Artificial Sequence: Synthetic oligonucleotide
cagaucugaguuugucucc

SEQ ID NO: 2278991 - RNA, 19 nt, Artificial Sequence
  Description of Artificial Sequence: Synthetic oligonucleotide
uggauggacauugcccagg

SEQ ID NO: 2278992 - RNA, 19 nt, Artificial Sequence
  Description of Artificial Sequence: Synthetic oligonucleotide
aucgagggugcugggagcc

SEQ ID NO: 2278993 - RNA, 19 nt, Artificial Sequence
  Description of Artificial Sequence: Synthetic oligonucleotide
gacacggcuaacaggacac

SEQ ID NO: 2278994 - RNA, 19 nt, Artificial Sequence
  Description of Artificial Sequence: Synthetic oligonucleotide
cacaucguccugaugggug

SEQ ID NO: 2278995 - RNA, 19 nt, Artificial Sequence
  Description of Artificial Sequence: Synthetic oligonucleotide
caccacacaggaaucguac

SEQ ID NO: 2278996 - RNA, 19 nt, Artificial Sequence
  Description of Artificial Sequence: Synthetic oligonucleotide
gagccccaagcuuuaacug

SEQ ID NO: 2278997 - RNA, 19 nt, Artificial Sequence
  Description of Artificial Sequence: Synthetic oligonucleotide
ugcaauacucgggagucac

SEQ ID NO: 2278998 - RNA, 19 nt, Artificial Sequence
  Description of Artificial Sequence: Synthetic oligonucleotide
ggccacauaggcuugacca

SEQ ID NO: 2278999 - RNA, 19 nt, Artificial Sequence
  Description of Artificial Sequence: Synthetic oligonucleotide
acuguaggaaguccccaca

SEQ ID NO: 2279000 - RNA, 19 nt, Artificial Sequence
  Description of Artificial Sequence: Synthetic oligonucleotide
ucugaguuugucuccucau

SEQ ID NO: 2279001 - RNA, 19 nt, Artificial Sequence
  Description of Artificial Sequence: Synthetic oligonucleotide
gacucaaacccaacuacca

SEQ ID NO: 2279002 - RNA, 19 nt, Artificial Sequence
  Description of Artificial Sequence: Synthetic oligonucleotide
uaggccccgagacagugac

SEQ ID NO: 2279003 - RNA, 19 nt, Artificial Sequence
  Description of Artificial Sequence: Synthetic oligonucleotide
gaaucguacuuggggaagc

SEQ ID NO: 2279004 - RNA, 19 nt, Artificial Sequence
  Description of Artificial Sequence: Synthetic oligonucleotide
auaggcuugaccacuggca

SEQ ID NO: 2279005 - RNA, 19 nt, Artificial Sequence
  Description of Artificial Sequence: Synthetic oligonucleotide
cacuggcaaacacacggcc

SEQ ID NO: 2279006 - RNA, 19 nt, Artificial Sequence
  Description of Artificial Sequence: Synthetic oligonucleotide
agccccaagcuuuaacuga

SEQ ID NO: 2279007 - RNA, 19 nt, Artificial Sequence
  Description of Artificial Sequence: Synthetic oligonucleotide
uagccucgaagcuaugcac

SEQ ID NO: 2279008 - RNA, 19 nt, Artificial Sequence
  Description of Artificial Sequence: Synthetic oligonucleotide
cuucccacuuuaugggcag

SEQ ID NO: 2279009 - RNA, 19 nt, Artificial Sequence
  Description of Artificial Sequence: Synthetic oligonucleotide
aucguacuuggggaagccc

SEQ ID NO: 2279010 - RNA, 19 nt, Artificial Sequence
  Description of Artificial Sequence: Synthetic oligonucleotide
caggaaucguacuugggga

SEQ ID NO: 2279011 - RNA, 19 nt, Artificial Sequence
  Description of Artificial Sequence: Synthetic oligonucleotide
guggcuacaauuccaucuc

SEQ ID NO: 2279012 - RNA, 19 nt, Artificial Sequence
  Description of Artificial Sequence: Synthetic oligonucleotide
cacaggaaucguacuuggg

SEQ ID NO: 2279013 - RNA, 19 nt, Artificial Sequence
  Description of Artificial Sequence: Synthetic oligonucleotide
aacuaccacuccccgggcu

SEQ ID NO: 2279014 - RNA, 19 nt, Artificial Sequence
  Description of Artificial Sequence: Synthetic oligonucleotide
acggcuaacaggacacugg

SEQ ID NO: 2279015 - RNA, 19 nt, Artificial Sequence
  Description of Artificial Sequence: Synthetic oligonucleotide
uccgggcuagcucaggguc

SEQ ID NO: 2279016 - RNA, 19 nt, Artificial Sequence
  Description of Artificial Sequence: Synthetic oligonucleotide
cagucgaccuguaccgucc

SEQ ID NO: 2279017 - RNA, 19 nt, Artificial Sequence
  Description of Artificial Sequence: Synthetic oligonucleotide
ugccggcugaggaacucgg

SEQ ID NO: 2279018 - RNA, 19 nt, Artificial Sequence
  Description of Artificial Sequence: Synthetic oligonucleotide
gucucguggcuacaauucc

SEQ ID NO: 2279019 - RNA, 19 nt, Artificial Sequence
  Description of Artificial Sequence: Synthetic oligonucleotide
caccagcaugaccugagcc

SEQ ID NO: 2279020 - RNA, 19 nt, Artificial Sequence
  Description of Artificial Sequence: Synthetic oligonucleotide
gaacaucugcccaaccuca

SEQ ID NO: 2279021 - RNA, 19 nt, Artificial Sequence
  Description of Artificial Sequence: Synthetic oligonucleotide
aggaaucguacuuggggaa

SEQ ID NO: 2279022 - RNA, 19 nt, Artificial Sequence
  Description of Artificial Sequence: Synthetic oligonucleotide
gagcuggugggucacuuca

SEQ ID NO: 2279023 - RNA, 19 nt, Artificial Sequence
  Description of Artificial Sequence: Synthetic oligonucleotide
ucgaccuguaccguccagc

SEQ ID NO: 2279024 - RNA, 19 nt, Artificial Sequence
  Description of Artificial Sequence: Synthetic oligonucleotide
uccagacugaggccccugc

SEQ ID NO: 2279025 - RNA, 19 nt, Artificial Sequence
  Description of Artificial Sequence: Synthetic oligonucleotide
ccagaucugaguuugucuc

SEQ ID NO: 2279026 - RNA, 19 nt, Artificial Sequence
  Description of Artificial Sequence: Synthetic oligonucleotide
cuugggacuccagacugag

SEQ ID NO: 2279027 - RNA, 19 nt, Artificial Sequence
  Description of Artificial Sequence: Synthetic oligonucleotide
acccaacuaccacuccccg

SEQ ID NO: 2279028 - RNA, 19 nt, Artificial Sequence
  Description of Artificial Sequence: Synthetic oligonucleotide
gucacuucaucugaacauc

SEQ ID NO: 2279029 - RNA, 19 nt, Artificial Sequence
  Description of Artificial Sequence: Synthetic oligonucleotide
cuggcuuuuguggauggac

SEQ ID NO: 2279030 - RNA, 19 nt, Artificial Sequence
  Description of Artificial Sequence: Synthetic oligonucleotide
gugcggaugaccucaguga

SEQ ID NO: 2279031 - RNA, 19 nt, Artificial Sequence
  Description of Artificial Sequence: Synthetic oligonucleotide
uggcuacaauuccaucucu

SEQ ID NO: 2279032 - RNA, 19 nt, Artificial Sequence
  Description of Artificial Sequence: Synthetic oligonucleotide
agaucugaguuugucuccu

SEQ ID NO: 2279033 - RNA, 19 nt, Artificial Sequence
  Description of Artificial Sequence: Synthetic oligonucleotide
acacggcccagagagaucu

SEQ ID NO: 2279034 - RNA, 19 nt, Artificial Sequence
  Description of Artificial Sequence: Synthetic oligonucleotide
cucgaagcuaugcaccuca

SEQ ID NO: 2279035 - RNA, 19 nt, Artificial Sequence
  Description of Artificial Sequence: Synthetic oligonucleotide
cacauaggcuugaccacug

SEQ ID NO: 2279036 - RNA, 19 nt, Artificial Sequence
  Description of Artificial Sequence: Synthetic oligonucleotide
accacacaggaaucguacu

SEQ ID NO: 2279037 - RNA, 19 nt, Artificial Sequence
  Description of Artificial Sequence: Synthetic oligonucleotide
gaccuguaccguccagcgg

SEQ ID NO: 2279038 - RNA, 19 nt, Artificial Sequence
  Description of Artificial Sequence: Synthetic oligonucleotide
ugggucacuucaucugaac

SEQ ID NO: 2279039 - RNA, 19 nt, Artificial Sequence
  Description of Artificial Sequence: Synthetic oligonucleotide
agacagugacaaguucuuc

SEQ ID NO: 2279040 - RNA, 19 nt, Artificial Sequence
  Description of Artificial Sequence: Synthetic oligonucleotide
gcuacaauuccaucucuuc

SEQ ID NO: 2279041 - RNA, 19 nt, Artificial Sequence
  Description of Artificial Sequence: Synthetic oligonucleotide
gucggaucugccugucucc

SEQ ID NO: 2279042 - RNA, 19 nt, Artificial Sequence
  Description of Artificial Sequence: Synthetic oligonucleotide
gaggaacucggccccaguc

SEQ ID NO: 2279043 - RNA, 19 nt, Artificial Sequence
  Description of Artificial Sequence: Synthetic oligonucleotide
gcauagaagugcaauacuc

SEQ ID NO: 2279044 - RNA, 19 nt, Artificial Sequence
  Description of Artificial Sequence: Synthetic oligonucleotide
ucagugcggaugaccucag

SEQ ID NO: 2279045 - RNA, 19 nt, Artificial Sequence
  Description of Artificial Sequence: Synthetic oligonucleotide
gaucugccugucuccacac

SEQ ID NO: 2279046 - RNA, 19 nt, Artificial Sequence
  Description of Artificial Sequence: Synthetic oligonucleotide
cucaaacccaacuaccacu

SEQ ID NO: 2279047 - RNA, 19 nt, Artificial Sequence
  Description of Artificial Sequence: Synthetic oligonucleotide
gagucacagcgaaccaccg

SEQ ID NO: 2279048 - RNA, 19 nt, Artificial Sequence
  Description of Artificial Sequence: Synthetic oligonucleotide
gagaugaaggucggaucug

SEQ ID NO: 2279049 - RNA, 19 nt, Artificial Sequence
  Description of Artificial Sequence: Synthetic oligonucleotide
ggagucacagcgaaccacc

SEQ ID NO: 2279050 - RNA, 19 nt, Artificial Sequence
  Description of Artificial Sequence: Synthetic oligonucleotide
acaucugcccaaccucaca

SEQ ID NO: 2279051 - RNA, 19 nt, Artificial Sequence
  Description of Artificial Sequence: Synthetic oligonucleotide
ggcaacuguaggaaguccc

SEQ ID NO: 2279052 - RNA, 19 nt, Artificial Sequence
  Description of Artificial Sequence: Synthetic oligonucleotide
gucagugcggaugaccuca

SEQ ID NO: 2279053 - RNA, 19 nt, Artificial Sequence
  Description of Artificial Sequence: Synthetic oligonucleotide
acucgggagucacagcgaa

SEQ ID NO: 2279054 - RNA, 19 nt, Artificial Sequence
  Description of Artificial Sequence: Synthetic oligonucleotide
ccaagcuuuaacugaagga

SEQ ID NO: 2279055 - RNA, 19 nt, Artificial Sequence
  Description of Artificial Sequence: Synthetic oligonucleotide
acugaaggacacggcuaac

SEQ ID NO: 2279056 - RNA, 19 nt, Artificial Sequence
  Description of Artificial Sequence: Synthetic oligonucleotide
agcagaaucgagggugcug

SEQ ID NO: 2279057 - RNA, 19 nt, Artificial Sequence
  Description of Artificial Sequence: Synthetic oligonucleotide
acuaggccccgagacagug

SEQ ID NO: 2279058 - RNA, 19 nt, Artificial Sequence
  Description of Artificial Sequence: Synthetic oligonucleotide
uggcaacuguaggaagucc

SEQ ID NO: 2279059 - RNA, 19 nt, Artificial Sequence
  Description of Artificial Sequence: Synthetic oligonucleotide
caucugaacaucugcccaa

SEQ ID NO: 2279060 - RNA, 19 nt, Artificial Sequence
  Description of Artificial Sequence: Synthetic oligonucleotide
ugcaccucaccuggcagcu

SEQ ID NO: 2279061 - RNA, 19 nt, Artificial Sequence
  Description of Artificial Sequence: Synthetic oligonucleotide
ggauggacauugcccaggc

SEQ ID NO: 2279062 - RNA, 19 nt, Artificial Sequence
  Description of Artificial Sequence: Synthetic oligonucleotide
caucaucuugggacuccag

SEQ ID NO: 2279063 - RNA, 19 nt, Artificial Sequence
  Description of Artificial Sequence: Synthetic oligonucleotide
ucgaagcuaugcaccucac

SEQ ID NO: 2279064 - RNA, 19 nt, Artificial Sequence
  Description of Artificial Sequence: Synthetic oligonucleotide
ggaaucguacuuggggaag

SEQ ID NO: 2279065 - RNA, 19 nt, Artificial Sequence
  Description of Artificial Sequence: Synthetic oligonucleotide
ccguccagcggucagugcg

SEQ ID NO: 2279066 - RNA, 19 nt, Artificial Sequence
  Description of Artificial Sequence: Synthetic oligonucleotide
agaaucgagggugcuggga

SEQ ID NO: 2279067 - RNA, 19 nt, Artificial Sequence
  Description of Artificial Sequence: Synthetic oligonucleotide
cagaaucgagggugcuggg

SEQ ID NO: 2279068 - RNA, 19 nt, Artificial Sequence
  Description of Artificial Sequence: Synthetic oligonucleotide
ccccagucgaccuguaccg

SEQ ID NO: 2279069 - RNA, 19 nt, Artificial Sequence
  Description of Artificial Sequence: Synthetic oligonucleotide
cagggucacugucuauagc

SEQ ID NO: 2279070 - RNA, 19 nt, Artificial Sequence
  Description of Artificial Sequence: Synthetic oligonucleotide
cuaugcaccucaccuggca

SEQ ID NO: 2279071 - RNA, 19 nt, Artificial Sequence
  Description of Artificial Sequence: Synthetic oligonucleotide
gcuuuaacugaaggacacg

SEQ ID NO: 2279072 - RNA, 19 nt, Artificial Sequence
  Description of Artificial Sequence: Synthetic oligonucleotide
ccgggcuccauucacuagg

SEQ ID NO: 2279073 - RNA, 19 nt, Artificial Sequence
  Description of Artificial Sequence: Synthetic oligonucleotide
ucuuggccuggaagcagaa

SEQ ID NO: 2279074 - RNA, 19 nt, Artificial Sequence
  Description of Artificial Sequence: Synthetic oligonucleotide
cugagccccaagcuuuaac

SEQ ID NO: 2279075 - RNA, 19 nt, Artificial Sequence
  Description of Artificial Sequence: Synthetic oligonucleotide
ucggaucugccugucucca

SEQ ID NO: 2279076 - RNA, 19 nt, Artificial Sequence
  Description of Artificial Sequence: Synthetic oligonucleotide
gccacaucguccugauggg

SEQ ID NO: 2279077 - RNA, 19 nt, Artificial Sequence
  Description of Artificial Sequence: Synthetic oligonucleotide
ucacugucuauagccucga

SEQ ID NO: 2279078 - RNA, 19 nt, Artificial Sequence
  Description of Artificial Sequence: Synthetic oligonucleotide
ggugggucacuucaucuga

SEQ ID NO: 2279079 - RNA, 19 nt, Artificial Sequence
  Description of Artificial Sequence: Synthetic oligonucleotide
gguccgggcuagcucaggg

SEQ ID NO: 2279080 - RNA, 19 nt, Artificial Sequence
  Description of Artificial Sequence: Synthetic oligonucleotide
accguccagcggucagugc

SEQ ID NO: 2279081 - RNA, 19 nt, Artificial Sequence
  Description of Artificial Sequence: Synthetic oligonucleotide
caggguccgggcuagcuca

SEQ ID NO: 2279082 - RNA, 19 nt, Artificial Sequence
  Description of Artificial Sequence: Synthetic oligonucleotide
acauugcccaggccagcug

SEQ ID NO: 2279083 - RNA, 19 nt, Artificial Sequence
  Description of Artificial Sequence: Synthetic oligonucleotide
gccccagucgaccuguacc

SEQ ID NO: 2279084 - RNA, 19 nt, Artificial Sequence
  Description of Artificial Sequence: Synthetic oligonucleotide
agagucacgggcacacacu

SEQ ID NO: 2279085 - RNA, 19 nt, Artificial Sequence
  Description of Artificial Sequence: Synthetic oligonucleotide
uagcacacguaggcccugg

SEQ ID NO: 2279086 - RNA, 19 nt, Artificial Sequence
  Description of Artificial Sequence: Synthetic oligonucleotide
aaccaccguggggucaaag

SEQ ID NO: 2279087 - RNA, 19 nt, Artificial Sequence
  Description of Artificial Sequence: Synthetic oligonucleotide
uaccguccagcggucagug

SEQ ID NO: 2279088 - RNA, 19 nt, Artificial Sequence
  Description of Artificial Sequence: Synthetic oligonucleotide
ggcuugaccacuggcaaac

SEQ ID NO: 2279089 - RNA, 19 nt, Artificial Sequence
  Description of Artificial Sequence: Synthetic oligonucleotide
ggucggaucugccugucuc

SEQ ID NO: 2279090 - RNA, 19 nt, Artificial Sequence
  Description of Artificial Sequence: Synthetic oligonucleotide
ggugagggccacaucgucc

SEQ ID NO: 2279091 - RNA, 19 nt, Artificial Sequence
  Description of Artificial Sequence: Synthetic oligonucleotide
aagcagaaucgagggugcu

SEQ ID NO: 2279092 - RNA, 19 nt, Artificial Sequence
  Description of Artificial Sequence: Synthetic oligonucleotide
ggcugaggaacucggcccc

SEQ ID NO: 2279093 - RNA, 19 nt, Artificial Sequence
  Description of Artificial Sequence: Synthetic oligonucleotide
ucacgggcacacacuuccu

SEQ ID NO: 2279094 - RNA, 19 nt, Artificial Sequence
  Description of Artificial Sequence: Synthetic oligonucleotide
uccccgggcuccauucacu

SEQ ID NO: 2279095 - RNA, 19 nt, Artificial Sequence
  Description of Artificial Sequence: Synthetic oligonucleotide
ggucacuucaucugaacau

SEQ ID NO: 2279096 - RNA, 19 nt, Artificial Sequence
  Description of Artificial Sequence: Synthetic oligonucleotide
agcccucucccuucugacu

SEQ ID NO: 2279097 - RNA, 19 nt, Artificial Sequence
  Description of Artificial Sequence: Synthetic oligonucleotide
gucuauagccucgaagcua

SEQ ID NO: 2279098 - RNA, 19 nt, Artificial Sequence
  Description of Artificial Sequence: Synthetic oligonucleotide
ggacacggcuaacaggaca

SEQ ID NO: 2279099 - RNA, 19 nt, Artificial Sequence
  Description of Artificial Sequence: Synthetic oligonucleotide
gaguuugucuccucaucau

SEQ ID NO: 2279100 - RNA, 19 nt, Artificial Sequence
  Description of Artificial Sequence: Synthetic oligonucleotide
uggcaaacacacggcccag

SEQ ID NO: 2279101 - RNA, 19 nt, Artificial Sequence
  Description of Artificial Sequence: Synthetic oligonucleotide
gacuccagacugaggcccc

SEQ ID NO: 2279102 - RNA, 19 nt, Artificial Sequence
  Description of Artificial Sequence: Synthetic oligonucleotide
ucguggcuacaauuccauc

SEQ ID NO: 2279103 - RNA, 19 nt, Artificial Sequence
  Description of Artificial Sequence: Synthetic oligonucleotide
cauucacuaggccccgaga

SEQ ID NO: 2279104 - RNA, 19 nt, Artificial Sequence
  Description of Artificial Sequence: Synthetic oligonucleotide
ggaacucggccccagucga

SEQ ID NO: 2279105 - RNA, 19 nt, Artificial Sequence
  Description of Artificial Sequence: Synthetic oligonucleotide
caguccagagacaugcccu

SEQ ID NO: 2279106 - RNA, 19 nt, Artificial Sequence
  Description of Artificial Sequence: Synthetic oligonucleotide
guccagagacaugcccugg

SEQ ID NO: 2279107 - RNA, 19 nt, Artificial Sequence
  Description of Artificial Sequence: Synthetic oligonucleotide
aggguggcauagaagugca

SEQ ID NO: 2279108 - RNA, 19 nt, Artificial Sequence
  Description of Artificial Sequence: Synthetic oligonucleotide
agucagagguuugggucca

SEQ ID NO: 2279109 - RNA, 19 nt, Artificial Sequence
  Description of Artificial Sequence: Synthetic oligonucleotide
cacaccucagucagcucca

SEQ ID NO: 2279110 - RNA, 19 nt, Artificial Sequence
  Description of Artificial Sequence: Synthetic oligonucleotide
gccacauaggcuugaccac

SEQ ID NO: 2279111 - RNA, 19 nt, Artificial Sequence
  Description of Artificial Sequence: Synthetic oligonucleotide
agucgaccuguaccgucca

SEQ ID NO: 2279112 - RNA, 19 nt, Artificial Sequence
  Description of Artificial Sequence: Synthetic oligonucleotide
caacuaccacuccccgggc

SEQ ID NO: 2279113 - RNA, 19 nt, Artificial Sequence
  Description of Artificial Sequence: Synthetic oligonucleotide
cacuccccgggcuccauuc

SEQ ID NO: 2279114 - RNA, 19 nt, Artificial Sequence
  Description of Artificial Sequence: Synthetic oligonucleotide
cuccauucacuaggccccg

SEQ ID NO: 2279115 - RNA, 19 nt, Artificial Sequence
  Description of Artificial Sequence: Synthetic oligonucleotide
aggcuugaccacuggcaaa

SEQ ID NO: 2279116 - RNA, 19 nt, Artificial Sequence
  Description of Artificial Sequence: Synthetic oligonucleotide
ccaaccucacagcuugcag

SEQ ID NO: 2279117 - RNA, 19 nt, Artificial Sequence
  Description of Artificial Sequence: Synthetic oligonucleotide
gccgcuucucauuggugag

SEQ ID NO: 2279118 - RNA, 19 nt, Artificial Sequence
  Description of Artificial Sequence: Synthetic oligonucleotide
gaugggugcagagucucgu

SEQ ID NO: 2279119 - RNA, 19 nt, Artificial Sequence
  Description of Artificial Sequence: Synthetic oligonucleotide
gagucucguggcuacaauu

SEQ ID NO: 2279120 - RNA, 19 nt, Artificial Sequence
  Description of Artificial Sequence: Synthetic oligonucleotide
agucacgggcacacacuuc

SEQ ID NO: 2279121 - RNA, 19 nt, Artificial Sequence
  Description of Artificial Sequence: Synthetic oligonucleotide
cuaccacuccccgggcucc

SEQ ID NO: 2279122 - RNA, 19 nt, Artificial Sequence
  Description of Artificial Sequence: Synthetic oligonucleotide
cgaccuguaccguccagcg

SEQ ID NO: 2279123 - RNA, 19 nt, Artificial Sequence
  Description of Artificial Sequence: Synthetic oligonucleotide
gcacacguaggcccuggag

SEQ ID NO: 2279124 - RNA, 19 nt, Artificial Sequence
  Description of Artificial Sequence: Synthetic oligonucleotide
cuugcagcagagagaugaa

SEQ ID NO: 2279125 - RNA, 19 nt, Artificial Sequence
  Description of Artificial Sequence: Synthetic oligonucleotide
caucuugggacuccagacu

SEQ ID NO: 2279126 - RNA, 19 nt, Artificial Sequence
  Description of Artificial Sequence: Synthetic oligonucleotide
ccggcugaggaacucggcc

SEQ ID NO: 2279127 - RNA, 19 nt, Artificial Sequence
  Description of Artificial Sequence: Synthetic oligonucleotide
cucgggagucacagcgaac

SEQ ID NO: 2279128 - RNA, 19 nt, Artificial Sequence
  Description of Artificial Sequence: Synthetic oligonucleotide
cugccggcugaggaacucg

SEQ ID NO: 2279129 - RNA, 19 nt, Artificial Sequence
  Description of Artificial Sequence: Synthetic oligonucleotide
cugagucagagguuugggu

SEQ ID NO: 2279130 - RNA, 19 nt, Artificial Sequence
  Description of Artificial Sequence: Synthetic oligonucleotide
uaugggcagcuguggcccu

SEQ ID NO: 2279131 - RNA, 19 nt, Artificial Sequence
  Description of Artificial Sequence: Synthetic oligonucleotide
acucggccccagucgaccu

SEQ ID NO: 2279132 - RNA, 19 nt, Artificial Sequence
  Description of Artificial Sequence: Synthetic oligonucleotide
ucguccugaugggugcaga

SEQ ID NO: 2279133 - RNA, 19 nt, Artificial Sequence
  Description of Artificial Sequence: Synthetic oligonucleotide
ccaccguggggucaaaguc

SEQ ID NO: 2279134 - RNA, 19 nt, Artificial Sequence
  Description of Artificial Sequence: Synthetic oligonucleotide
agacaugcccuggcuuuug

SEQ ID NO: 2279135 - RNA, 19 nt, Artificial Sequence
  Description of Artificial Sequence: Synthetic oligonucleotide
cuauagccucgaagcuaug

SEQ ID NO: 2279136 - RNA, 19 nt, Artificial Sequence
  Description of Artificial Sequence: Synthetic oligonucleotide
cggcuaacaggacacuggg

SEQ ID NO: 2279137 - RNA, 19 nt, Artificial Sequence
  Description of Artificial Sequence: Synthetic oligonucleotide
cugcugccggcugaggaac

SEQ ID NO: 2279138 - RNA, 19 nt, Artificial Sequence
  Description of Artificial Sequence: Synthetic oligonucleotide
gucgaccuguaccguccag

SEQ ID NO: 2279139 - RNA, 19 nt, Artificial Sequence
  Description of Artificial Sequence: Synthetic oligonucleotide
gacaccacacaggaaucgu

SEQ ID NO: 2279140 - RNA, 19 nt, Artificial Sequence
  Description of Artificial Sequence: Synthetic oligonucleotide
gagucacgggcacacacuu

SEQ ID NO: 2279141 - RNA, 19 nt, Artificial Sequence
  Description of Artificial Sequence: Synthetic oligonucleotide
cuaacaggacacugggcau

SEQ ID NO: 2279142 - RNA, 19 nt, Artificial Sequence
  Description of Artificial Sequence: Synthetic oligonucleotide
cuccccgggcuccauucac

SEQ ID NO: 2279143 - RNA, 19 nt, Artificial Sequence
  Description of Artificial Sequence: Synthetic oligonucleotide
gacauugcccaggccagcu

SEQ ID NO: 2279144 - RNA, 19 nt, Artificial Sequence
  Description of Artificial Sequence: Synthetic oligonucleotide
aggucggaucugccugucu

SEQ ID NO: 2279145 - RNA, 19 nt, Artificial Sequence
  Description of Artificial Sequence: Synthetic oligonucleotide
cagcgaaccaccguggggu

SEQ ID NO: 2279146 - RNA, 19 nt, Artificial Sequence
  Description of Artificial Sequence: Synthetic oligonucleotide
cagcuugcagcagagagau

SEQ ID NO: 2279147 - RNA, 19 nt, Artificial Sequence
  Description of Artificial Sequence: Synthetic oligonucleotide
cauugcccaggccagcugu

SEQ ID NO: 2279148 - RNA, 19 nt, Artificial Sequence
  Description of Artificial Sequence: Synthetic oligonucleotide
cacacggcccagagagauc

SEQ ID NO: 2279149 - RNA, 19 nt, Artificial Sequence
  Description of Artificial Sequence: Synthetic oligonucleotide
ccagcggucagugcggaug

SEQ ID NO: 2279150 - RNA, 19 nt, Artificial Sequence
  Description of Artificial Sequence: Synthetic oligonucleotide
cucguggcuacaauuccau

SEQ ID NO: 2279151 - RNA, 19 nt, Artificial Sequence
  Description of Artificial Sequence: Synthetic oligonucleotide
agagggccacauaggcuug

SEQ ID NO: 2279152 - RNA, 19 nt, Artificial Sequence
  Description of Artificial Sequence: Synthetic oligonucleotide
uccauucacuaggccccga

SEQ ID NO: 2279153 - RNA, 19 nt, Artificial Sequence
  Description of Artificial Sequence: Synthetic oligonucleotide
gaacucggccccagucgac

SEQ ID NO: 2279154 - RNA, 19 nt, Artificial Sequence
  Description of Artificial Sequence: Synthetic oligonucleotide
gguggcauagaagugcaau

SEQ ID NO: 2279155 - RNA, 19 nt, Artificial Sequence
  Description of Artificial Sequence: Synthetic oligonucleotide
ggcuaacaggacacugggc

SEQ ID NO: 2279156 - RNA, 19 nt, Artificial Sequence
  Description of Artificial Sequence: Synthetic oligonucleotide
cuaggccccgagacaguga

SEQ ID NO: 2279157 - RNA, 19 nt, Artificial Sequence
  Description of Artificial Sequence: Synthetic oligonucleotide
cgaagcuaugcaccucacc

SEQ ID NO: 2279158 - RNA, 19 nt, Artificial Sequence
  Description of Artificial Sequence: Synthetic oligonucleotide
ggccccgagacagugacaa

SEQ ID NO: 2279159 - RNA, 19 nt, Artificial Sequence
  Description of Artificial Sequence: Synthetic oligonucleotide
guaggcccuggaggcuucg

SEQ ID NO: 2279160 - RNA, 19 nt, Artificial Sequence
  Description of Artificial Sequence: Synthetic oligonucleotide
cguggcuacaauuccaucu

SEQ ID NO: 2279161 - RNA, 19 nt, Artificial Sequence
  Description of Artificial Sequence: Synthetic oligonucleotide
ccagucgaccuguaccguc

SEQ ID NO: 2279162 - RNA, 19 nt, Artificial Sequence
  Description of Artificial Sequence: Synthetic oligonucleotide
agcggucagugcggaugac

SEQ ID NO: 2279163 - RNA, 19 nt, Artificial Sequence
  Description of Artificial Sequence: Synthetic oligonucleotide
agcaugaccugagccccaa

SEQ ID NO: 2279164 - RNA, 19 nt, Artificial Sequence
  Description of Artificial Sequence: Synthetic oligonucleotide
acacggcuaacaggacacu

SEQ ID NO: 2279165 - RNA, 19 nt, Artificial Sequence
  Description of Artificial Sequence: Synthetic oligonucleotide
ggguccauguucuccagau

SEQ ID NO: 2279166 - RNA, 19 nt, Artificial Sequence
  Description of Artificial Sequence: Synthetic oligonucleotide
gcggucagugcggaugacc

SEQ ID NO: 2279167 - RNA, 19 nt, Artificial Sequence
  Description of Artificial Sequence: Synthetic oligonucleotide
gcuucucauuggugagggc

SEQ ID NO: 2279168 - RNA, 19 nt, Artificial Sequence
  Description of Artificial Sequence: Synthetic oligonucleotide
acguaggcccuggaggcuu

SEQ ID NO: 2279169 - RNA, 19 nt, Artificial Sequence
  Description of Artificial Sequence: Synthetic oligonucleotide
uggcccugagcuggugggu

SEQ ID NO: 2279170 - RNA, 19 nt, Artificial Sequence
  Description of Artificial Sequence: Synthetic oligonucleotide
cugccgcaggguggcauag

SEQ ID NO: 2279171 - RNA, 19 nt, Artificial Sequence
  Description of Artificial Sequence: Synthetic oligonucleotide
gugcaauacucgggaguca

SEQ ID NO: 2279172 - RNA, 19 nt, Artificial Sequence
  Description of Artificial Sequence: Synthetic oligonucleotide
ggaggcuucgggcccggga

SEQ ID NO: 2279173 - RNA, 19 nt, Artificial Sequence
  Description of Artificial Sequence: Synthetic oligonucleotide
ucgagggugcugggagccu

SEQ ID NO: 2279174 - RNA, 19 nt, Artificial Sequence
  Description of Artificial Sequence: Synthetic oligonucleotide
gugggucacuucaucugaa

SEQ ID NO: 2279175 - RNA, 19 nt, Artificial Sequence
  Description of Artificial Sequence: Synthetic oligonucleotide
uccagcggucagugcggau

SEQ ID NO: 2279176 - RNA, 19 nt, Artificial Sequence
  Description of Artificial Sequence: Synthetic oligonucleotide
ccccaagcuuuaacugaag

SEQ ID NO: 2279177 - RNA, 19 nt, Artificial Sequence
  Description of Artificial Sequence: Synthetic oligonucleotide
ggacauugcccaggccagc

SEQ ID NO: 2279178 - RNA, 19 nt, Artificial Sequence
  Description of Artificial Sequence: Synthetic oligonucleotide
ggaugaccucagugacacc

SEQ ID NO: 2279179 - RNA, 19 nt, Artificial Sequence
  Description of Artificial Sequence: Synthetic oligonucleotide
gcuaugcaccucaccuggc

SEQ ID NO: 2279180 - RNA, 19 nt, Artificial Sequence
  Description of Artificial Sequence: Synthetic oligonucleotide
cccuucugacucaaaccca

SEQ ID NO: 2279181 - RNA, 19 nt, Artificial Sequence
  Description of Artificial Sequence: Synthetic oligonucleotide
uggaggcuucgggcccggg

SEQ ID NO: 2279182 - RNA, 19 nt, Artificial Sequence
  Description of Artificial Sequence: Synthetic oligonucleotide
ugccgcaggguggcauaga

SEQ ID NO: 2279183 - RNA, 19 nt, Artificial Sequence
  Description of Artificial Sequence: Synthetic oligonucleotide
cgggcuccauucacuaggc

SEQ ID NO: 2279184 - RNA, 19 nt, Artificial Sequence
  Description of Artificial Sequence: Synthetic oligonucleotide
gccgcaggguggcauagaa

SEQ ID NO: 2279185 - RNA, 19 nt, Artificial Sequence
  Description of Artificial Sequence: Synthetic oligonucleotide
cagcaugaccugagcccca

SEQ ID NO: 2279186 - RNA, 19 nt, Artificial Sequence
  Description of Artificial Sequence: Synthetic oligonucleotide
cagugacaccacacaggaa

SEQ ID NO: 2279187 - RNA, 19 nt, Artificial Sequence
  Description of Artificial Sequence: Synthetic oligonucleotide
agcuggugggucacuucau

SEQ ID NO: 2279188 - RNA, 19 nt, Artificial Sequence
  Description of Artificial Sequence: Synthetic oligonucleotide
gccucgaagcuaugcaccu

SEQ ID NO: 2279189 - RNA, 19 nt, Artificial Sequence
  Description of Artificial Sequence: Synthetic oligonucleotide
ccacuuuaugggcagcugu

SEQ ID NO: 2279190 - RNA, 19 nt, Artificial Sequence
  Description of Artificial Sequence: Synthetic oligonucleotide
caucguccugaugggugca

SEQ ID NO: 2279191 - RNA, 19 nt, Artificial Sequence
  Description of Artificial Sequence: Synthetic oligonucleotide
cagagacaugcccuggcuu

SEQ ID NO: 2279192 - RNA, 19 nt, Artificial Sequence
  Description of Artificial Sequence: Synthetic oligonucleotide
gccccaagcuuuaacugaa

SEQ ID NO: 2279193 - RNA, 19 nt, Artificial Sequence
  Description of Artificial Sequence: Synthetic oligonucleotide
ggccuggaagcagaaucga

SEQ ID NO: 2279194 - RNA, 19 nt, Artificial Sequence
  Description of Artificial Sequence: Synthetic oligonucleotide
cccacuuuaugggcagcug

SEQ ID NO: 2279195 - RNA, 19 nt, Artificial Sequence
  Description of Artificial Sequence: Synthetic oligonucleotide
aggguccgggcuagcucag

SEQ ID NO: 2279196 - RNA, 19 nt, Artificial Sequence
  Description of Artificial Sequence: Synthetic oligonucleotide
guccgggcuagcucagggu

SEQ ID NO: 2279197 - RNA, 19 nt, Artificial Sequence
  Description of Artificial Sequence: Synthetic oligonucleotide
aggccccugcccugccgca

SEQ ID NO: 2279198 - RNA, 19 nt, Artificial Sequence
  Description of Artificial Sequence: Synthetic oligonucleotide
gcaauacucgggagucaca

SEQ ID NO: 2279199 - RNA, 19 nt, Artificial Sequence
  Description of Artificial Sequence: Synthetic oligonucleotide
cacugucuauagccucgaa

SEQ ID NO: 2279200 - RNA, 19 nt, Artificial Sequence
  Description of Artificial Sequence: Synthetic oligonucleotide
gagacaugcccuggcuuuu

SEQ ID NO: 2279201 - RNA, 19 nt, Artificial Sequence
  Description of Artificial Sequence: Synthetic oligonucleotide
guaccguccagcggucagu

SEQ ID NO: 2279202 - RNA, 19 nt, Artificial Sequence
  Description of Artificial Sequence: Synthetic oligonucleotide
agcuugcagcagagagaug

SEQ ID NO: 2279203 - RNA, 19 nt, Artificial Sequence
  Description of Artificial Sequence: Synthetic oligonucleotide
ggccccagucgaccuguac

SEQ ID NO: 2279204 - RNA, 19 nt, Artificial Sequence
  Description of Artificial Sequence: Synthetic oligonucleotide
ggcccugagcugguggguc

SEQ ID NO: 2279205 - RNA, 19 nt, Artificial Sequence
  Description of Artificial Sequence: Synthetic oligonucleotide
ggccagcuguaggggaagc

SEQ ID NO: 2279206 - RNA, 19 nt, Artificial Sequence
  Description of Artificial Sequence: Synthetic oligonucleotide
guccagcggucagugcgga

SEQ ID NO: 2279207 - RNA, 19 nt, Artificial Sequence
  Description of Artificial Sequence: Synthetic oligonucleotide
ggguccgggcuagcucagg

SEQ ID NO: 2279208 - RNA, 19 nt, Artificial Sequence
  Description of Artificial Sequence: Synthetic oligonucleotide
ccgggcuagcucaggguca

SEQ ID NO: 2279209 - RNA, 19 nt, Artificial Sequence
  Description of Artificial Sequence: Synthetic oligonucleotide
ggcuacaauuccaucucuu

SEQ ID NO: 2279210 - RNA, 19 nt, Artificial Sequence
  Description of Artificial Sequence: Synthetic oligonucleotide
gccggcugaggaacucggc

SEQ ID NO: 2279211 - RNA, 19 nt, Artificial Sequence
  Description of Artificial Sequence: Synthetic oligonucleotide
gucagcugagucagagguu

SEQ ID NO: 2279212 - RNA, 19 nt, Artificial Sequence
  Description of Artificial Sequence: Synthetic oligonucleotide
ccacacaggaaucguacuu

SEQ ID NO: 2279213 - RNA, 19 nt, Artificial Sequence
  Description of Artificial Sequence: Synthetic oligonucleotide
ccacauaggcuugaccacu

SEQ ID NO: 2279214 - RNA, 19 nt, Artificial Sequence
  Description of Artificial Sequence: Synthetic oligonucleotide
cccaaccucacagcuugca

SEQ ID NO: 2279215 - RNA, 19 nt, Artificial Sequence
  Description of Artificial Sequence: Synthetic oligonucleotide
ccucgaagcuaugcaccuc

SEQ ID NO: 2279216 - RNA, 19 nt, Artificial Sequence
  Description of Artificial Sequence: Synthetic oligonucleotide
cugcccaaccucacagcuu

SEQ ID NO: 2279217 - RNA, 19 nt, Artificial Sequence
  Description of Artificial Sequence: Synthetic oligonucleotide
ccagagacaugcccuggcu

SEQ ID NO: 2279218 - RNA, 19 nt, Artificial Sequence
  Description of Artificial Sequence: Synthetic oligonucleotide
ccguggggucaaagucuag

SEQ ID NO: 2279219 - RNA, 19 nt, Artificial Sequence
  Description of Artificial Sequence: Synthetic oligonucleotide
gcugccggcugaggaacuc

SEQ ID NO: 2279220 - RNA, 19 nt, Artificial Sequence
  Description of Artificial Sequence: Synthetic oligonucleotide
aggccccgagacagugaca

SEQ ID NO: 2279221 - RNA, 19 nt, Artificial Sequence
  Description of Artificial Sequence: Synthetic oligonucleotide
gcuuuuguggauggacauu

SEQ ID NO: 2279222 - RNA, 19 nt, Artificial Sequence
  Description of Artificial Sequence: Synthetic oligonucleotide
cacuaggccccgagacagu

SEQ ID NO: 2279223 - RNA, 19 nt, Artificial Sequence
  Description of Artificial Sequence: Synthetic oligonucleotide
cuuggccuggaagcagaau

SEQ ID NO: 2279224 - RNA, 19 nt, Artificial Sequence
  Description of Artificial Sequence: Synthetic oligonucleotide
gaaccaccguggggucaaa

SEQ ID NO: 2279225 - RNA, 19 nt, Artificial Sequence
  Description of Artificial Sequence: Synthetic oligonucleotide
cccgagacagugacaaguu

SEQ ID NO: 2279226 - RNA, 19 nt, Artificial Sequence
  Description of Artificial Sequence: Synthetic oligonucleotide
cgggcuagcucagggucac

SEQ ID NO: 2279227 - RNA, 19 nt, Artificial Sequence
  Description of Artificial Sequence: Synthetic oligonucleotide
cacguaggcccuggaggcu

SEQ ID NO: 2279228 - RNA, 19 nt, Artificial Sequence
  Description of Artificial Sequence: Synthetic oligonucleotide
cguaggcccuggaggcuuc

SEQ ID NO: 2279229 - RNA, 19 nt, Artificial Sequence
  Description of Artificial Sequence: Synthetic oligonucleotide
ccuggcuuuuguggaugga

SEQ ID NO: 2279230 - RNA, 19 nt, Artificial Sequence
  Description of Artificial Sequence: Synthetic oligonucleotide
cagugcggaugaccucagu

SEQ ID NO: 2279231 - RNA, 19 nt, Artificial Sequence
  Description of Artificial Sequence: Synthetic oligonucleotide
ccugccgcaggguggcaua

SEQ ID NO: 2279232 - RNA, 19 nt, Artificial Sequence
  Description of Artificial Sequence: Synthetic oligonucleotide
ccccgggcuccauucacua

SEQ ID NO: 2279233 - RNA, 19 nt, Artificial Sequence
  Description of Artificial Sequence: Synthetic oligonucleotide
cgggagucacagcgaacca

SEQ ID NO: 2279234 - RNA, 19 nt, Artificial Sequence
  Description of Artificial Sequence: Synthetic oligonucleotide
gucagagguuuggguccau

SEQ ID NO: 2279235 - RNA, 19 nt, Artificial Sequence
  Description of Artificial Sequence: Synthetic oligonucleotide
ccacaucguccugaugggu

SEQ ID NO: 2279236 - RNA, 19 nt, Artificial Sequence
  Description of Artificial Sequence: Synthetic oligonucleotide
cccgggagagggccacaua

SEQ ID NO: 2279237 - RNA, 19 nt, Artificial Sequence
  Description of Artificial Sequence: Synthetic oligonucleotide
cccagucgaccuguaccgu

SEQ ID NO: 2279238 - RNA, 19 nt, Artificial Sequence
  Description of Artificial Sequence: Synthetic oligonucleotide
gggcuagcucagggucacu

SEQ ID NO: 2279239 - RNA, 19 nt, Artificial Sequence
  Description of Artificial Sequence: Synthetic oligonucleotide
ccacuccccgggcuccauu

SEQ ID NO: 2279240 - RNA, 19 nt, Artificial Sequence
  Description of Artificial Sequence: Synthetic oligonucleotide
aauaaaguuaauuuaaugg

SEQ ID NO: 2279241 - RNA, 19 nt, Artificial Sequence
  Description of Artificial Sequence: Synthetic oligonucleotide
cuuuaaagcaacaugcugg

SEQ ID NO: 2279242 - RNA, 19 nt, Artificial Sequence
  Description of Artificial Sequence: Synthetic oligonucleotide
aauuuaauggaaaacagga

SEQ ID NO: 2279243 - RNA, 19 nt, Artificial Sequence
  Description of Artificial Sequence: Synthetic oligonucleotide
accauuacgucccagauuc

SEQ ID NO: 2279244 - RNA, 19 nt, Artificial Sequence
  Description of Artificial Sequence: Synthetic oligonucleotide
agcacgucuacuuuaaagc

SEQ ID NO: 2279245 - RNA, 19 nt, Artificial Sequence
  Description of Artificial Sequence: Synthetic oligonucleotide
uaugcuuuagaaauaaagu

SEQ ID NO: 2279246 - RNA, 19 nt, Artificial Sequence
  Description of Artificial Sequence: Synthetic oligonucleotide
cacacaaucacuauguccc

SEQ ID NO: 2279247 - RNA, 19 nt, Artificial Sequence
  Description of Artificial Sequence: Synthetic oligonucleotide
ucuacuuuaaagcaacaug

SEQ ID NO: 2279248 - RNA, 19 nt, Artificial Sequence
  Description of Artificial Sequence: Synthetic oligonucleotide
uuuaauggaaaacaggaau

SEQ ID NO: 2279249 - RNA, 19 nt, Artificial Sequence
  Description of Artificial Sequence: Synthetic oligonucleotide
acauacauaaccuugacau

SEQ ID NO: 2279250 - RNA, 19 nt, Artificial Sequence
  Description of Artificial Sequence: Synthetic oligonucleotide
ugcuuuauugcucuugacg

SEQ ID NO: 2279251 - RNA, 19 nt, Artificial Sequence
  Description of Artificial Sequence: Synthetic oligonucleotide
aauaugugcaccaaaccac

SEQ ID NO: 2279252 - RNA, 19 nt, Artificial Sequence
  Description of Artificial Sequence: Synthetic oligonucleotide
auaagaaagugcuuguggg

SEQ ID NO: 2279253 - RNA, 19 nt, Artificial Sequence
  Description of Artificial Sequence: Synthetic oligonucleotide
uuuaaagcaacaugcuggg

SEQ ID NO: 2279254 - RNA, 19 nt, Artificial Sequence
  Description of Artificial Sequence: Synthetic oligonucleotide
ugacguucccgucagaugg

SEQ ID NO: 2279255 - RNA, 19 nt, Artificial Sequence
  Description of Artificial Sequence: Synthetic oligonucleotide
agcuaagcauaucacauac

SEQ ID NO: 2279256 - RNA, 19 nt, Artificial Sequence
  Description of Artificial Sequence: Synthetic oligonucleotide
uaggccauaagaaagugcu

SEQ ID NO: 2279257 - RNA, 19 nt, Artificial Sequence
  Description of Artificial Sequence: Synthetic oligonucleotide
aguuaauuuaauggaaaac

SEQ ID NO: 2279258 - RNA, 19 nt, Artificial Sequence
  Description of Artificial Sequence: Synthetic oligonucleotide
ugcaugaacacacucgagc

SEQ ID NO: 2279259 - RNA, 19 nt, Artificial Sequence
  Description of Artificial Sequence: Synthetic oligonucleotide
cauaagaaagugcuugugg

SEQ ID NO: 2279260 - RNA, 19 nt, Artificial Sequence
  Description of Artificial Sequence: Synthetic oligonucleotide
uugacgguaaaucaaaaua

SEQ ID NO: 2279261 - RNA, 19 nt, Artificial Sequence
  Description of Artificial Sequence: Synthetic oligonucleotide
uuuaauugcuuuauugcuc

SEQ ID NO: 2279262 - RNA, 19 nt, Artificial Sequence
  Description of Artificial Sequence: Synthetic oligonucleotide
gaauaugugcaccaaacca

SEQ ID NO: 2279263 - RNA, 19 nt, Artificial Sequence
  Description of Artificial Sequence: Synthetic oligonucleotide
uugcauuaaauggagacag

SEQ ID NO: 2279264 - RNA, 19 nt, Artificial Sequence
  Description of Artificial Sequence: Synthetic oligonucleotide
cauugcauuaaauggagac

SEQ ID NO: 2279265 - RNA, 19 nt, Artificial Sequence
  Description of Artificial Sequence: Synthetic oligonucleotide
uuaauugcuuuauugcucu

SEQ ID NO: 2279266 - RNA, 19 nt, Artificial Sequence
  Description of Artificial Sequence: Synthetic oligonucleotide
uuaauggaaaacaggaaua

SEQ ID NO: 2279267 - RNA, 19 nt, Artificial Sequence
  Description of Artificial Sequence: Synthetic oligonucleotide
acuggugauuggcaaaacc

SEQ ID NO: 2279268 - RNA, 19 nt, Artificial Sequence
  Description of Artificial Sequence: Synthetic oligonucleotide
agacuuuuaggccauaaga

SEQ ID NO: 2279269 - RNA, 19 nt, Artificial Sequence
  Description of Artificial Sequence: Synthetic oligonucleotide
gcuuuauugcucuugacgg

SEQ ID NO: 2279270 - RNA, 19 nt, Artificial Sequence
  Description of Artificial Sequence: Synthetic oligonucleotide
ugugcaugaacacacucga

SEQ ID NO: 2279271 - RNA, 19 nt, Artificial Sequence
  Description of Artificial Sequence: Synthetic oligonucleotide
acgguaaaucaaaauaugc

SEQ ID NO: 2279272 - RNA, 19 nt, Artificial Sequence
  Description of Artificial Sequence: Synthetic oligonucleotide
aucacuaugucccaugccu

SEQ ID NO: 2279273 - RNA, 19 nt, Artificial Sequence
  Description of Artificial Sequence: Synthetic oligonucleotide
uuuggcaugaccugcuuug

SEQ ID NO: 2279274 - RNA, 19 nt, Artificial Sequence
  Description of Artificial Sequence: Synthetic oligonucleotide
ugugcaccaaaccacacac

SEQ ID NO: 2279275 - RNA, 19 nt, Artificial Sequence
  Description of Artificial Sequence: Synthetic oligonucleotide
uuuuaggccauaagaaagu

SEQ ID NO: 2279276 - RNA, 19 nt, Artificial Sequence
  Description of Artificial Sequence: Synthetic oligonucleotide
acuuuaaagcaacaugcug

SEQ ID NO: 2279277 - RNA, 19 nt, Artificial Sequence
  Description of Artificial Sequence: Synthetic oligonucleotide
acugugaccauuacguccc

SEQ ID NO: 2279278 - RNA, 19 nt, Artificial Sequence
  Description of Artificial Sequence: Synthetic oligonucleotide
augcuuuagaaauaaaguu

SEQ ID NO: 2279279 - RNA, 19 nt, Artificial Sequence
  Description of Artificial Sequence: Synthetic oligonucleotide
aaaggugacguucccguca

SEQ ID NO: 2279280 - RNA, 19 nt, Artificial Sequence
  Description of Artificial Sequence: Synthetic oligonucleotide
uaaaucaaaauaugcuuua

SEQ ID NO: 2279281 - RNA, 19 nt, Artificial Sequence
  Description of Artificial Sequence: Synthetic oligonucleotide
uuggugugcaugaacacac

SEQ ID NO: 2279282 - RNA, 19 nt, Artificial Sequence
  Description of Artificial Sequence: Synthetic oligonucleotide
aggaauaugugcaccaaac

SEQ ID NO: 2279283 - RNA, 19 nt, Artificial Sequence
  Description of Artificial Sequence: Synthetic oligonucleotide
gagcacgucuacuuuaaag

SEQ ID NO: 2279284 - RNA, 19 nt, Artificial Sequence
  Description of Artificial Sequence: Synthetic oligonucleotide
uggcuagagagucagggga

SEQ ID NO: 2279285 - RNA, 19 nt, Artificial Sequence
  Description of Artificial Sequence: Synthetic oligonucleotide
uuaggccauaagaaagugc

SEQ ID NO: 2279286 - RNA, 19 nt, Artificial Sequence
  Description of Artificial Sequence: Synthetic oligonucleotide
ugauuggcaaaaccaggcc

SEQ ID NO: 2279287 - RNA, 19 nt, Artificial Sequence
  Description of Artificial Sequence: Synthetic oligonucleotide
uuacgucccagauuccagg

SEQ ID NO: 2279288 - RNA, 19 nt, Artificial Sequence
  Description of Artificial Sequence: Synthetic oligonucleotide
augaacacacucgagcacg

SEQ ID NO: 2279289 - RNA, 19 nt, Artificial Sequence
  Description of Artificial Sequence: Synthetic oligonucleotide
uugugggcaaggcaguucc

SEQ ID NO: 2279290 - RNA, 19 nt, Artificial Sequence
  Description of Artificial Sequence: Synthetic oligonucleotide
caggcuaucagaaggugag

SEQ ID NO: 2279291 - RNA, 19 nt, Artificial Sequence
  Description of Artificial Sequence: Synthetic oligonucleotide
gcauaucacauacauaacc

SEQ ID NO: 2279292 - RNA, 19 nt, Artificial Sequence
  Description of Artificial Sequence: Synthetic oligonucleotide
ugcucuugacgguaaauca

SEQ ID NO: 2279293 - RNA, 19 nt, Artificial Sequence
  Description of Artificial Sequence: Synthetic oligonucleotide
acaagucccaguucugcgg

SEQ ID NO: 2279294 - RNA, 19 nt, Artificial Sequence
  Description of Artificial Sequence: Synthetic oligonucleotide
cacugugaccauuacgucc

SEQ ID NO: 2279295 - RNA, 19 nt, Artificial Sequence
  Description of Artificial Sequence: Synthetic oligonucleotide
aaggcaguuccucgguggg

SEQ ID NO: 2279296 - RNA, 19 nt, Artificial Sequence
  Description of Artificial Sequence: Synthetic oligonucleotide
caaaccacacacugcauug

SEQ ID NO: 2279297 - RNA, 19 nt, Artificial Sequence
  Description of Artificial Sequence: Synthetic oligonucleotide
acuccacgcucuuugcugc

SEQ ID NO: 2279298 - RNA, 19 nt, Artificial Sequence
  Description of Artificial Sequence: Synthetic oligonucleotide
aaauggagacagcacucca

SEQ ID NO: 2279299 - RNA, 19 nt, Artificial Sequence
  Description of Artificial Sequence: Synthetic oligonucleotide
gacgguaaaucaaaauaug

SEQ ID NO: 2279300 - RNA, 19 nt, Artificial Sequence
  Description of Artificial Sequence: Synthetic oligonucleotide
aaggugacguucccgucag

SEQ ID NO: 2279301 - RNA, 19 nt, Artificial Sequence
  Description of Artificial Sequence: Synthetic oligonucleotide
uucccagcgggguucaggg

SEQ ID NO: 2279302 - RNA, 19 nt, Artificial Sequence
  Description of Artificial Sequence: Synthetic oligonucleotide
caagcuggcagcucuuucc

SEQ ID NO: 2279303 - RNA, 19 nt, Artificial Sequence
  Description of Artificial Sequence: Synthetic oligonucleotide
aggaggcauggcuagagag

SEQ ID NO: 2279304 - RNA, 19 nt, Artificial Sequence
  Description of Artificial Sequence: Synthetic oligonucleotide
gagaggagagcucccaccc

SEQ ID NO: 2279305 - RNA, 19 nt, Artificial Sequence
  Description of Artificial Sequence: Synthetic oligonucleotide
uuuggugugcaugaacaca

SEQ ID NO: 2279306 - RNA, 19 nt, Artificial Sequence
  Description of Artificial Sequence: Synthetic oligonucleotide
guuaggcucucacagcaag

SEQ ID NO: 2279307 - RNA, 19 nt, Artificial Sequence
  Description of Artificial Sequence: Synthetic oligonucleotide
auggcuagagagucagggg

SEQ ID NO: 2279308 - RNA, 19 nt, Artificial Sequence
  Description of Artificial Sequence: Synthetic oligonucleotide
acgucuacuuuaaagcaac

SEQ ID NO: 2279309 - RNA, 19 nt, Artificial Sequence
  Description of Artificial Sequence: Synthetic oligonucleotide
acaaucacuaugucccaug

SEQ ID NO: 2279310 - RNA, 19 nt, Artificial Sequence
  Description of Artificial Sequence: Synthetic oligonucleotide
auugcauuaaauggagaca

SEQ ID NO: 2279311 - RNA, 19 nt, Artificial Sequence
  Description of Artificial Sequence: Synthetic oligonucleotide
uuuaggccauaagaaagug

SEQ ID NO: 2279312 - RNA, 19 nt, Artificial Sequence
  Description of Artificial Sequence: Synthetic oligonucleotide
ugagaggagagcucccacc

SEQ ID NO: 2279313 - RNA, 19 nt, Artificial Sequence
  Description of Artificial Sequence: Synthetic oligonucleotide
cuaucagaaggugagagga

SEQ ID NO: 2279314 - RNA, 19 nt, Artificial Sequence
  Description of Artificial Sequence: Synthetic oligonucleotide
caaggcaguuccucggugg

SEQ ID NO: 2279315 - RNA, 19 nt, Artificial Sequence
  Description of Artificial Sequence: Synthetic oligonucleotide
ucugcgacuccuuuggcau

SEQ ID NO: 2279316 - RNA, 19 nt, Artificial Sequence
  Description of Artificial Sequence: Synthetic oligonucleotide
ucacauacauaaccuugac

SEQ ID NO: 2279317 - RNA, 19 nt, Artificial Sequence
  Description of Artificial Sequence: Synthetic oligonucleotide
acuaugucccaugccuucc

SEQ ID NO: 2279318 - RNA, 19 nt, Artificial Sequence
  Description of Artificial Sequence: Synthetic oligonucleotide
ugcauuaaauggagacagc

SEQ ID NO: 2279319 - RNA, 19 nt, Artificial Sequence
  Description of Artificial Sequence: Synthetic oligonucleotide
gugauuggcaaaaccaggc

SEQ ID NO: 2279320 - RNA, 19 nt, Artificial Sequence
  Description of Artificial Sequence: Synthetic oligonucleotide
uuugucccaccucccacag

SEQ ID NO: 2279321 - RNA, 19 nt, Artificial Sequence
  Description of Artificial Sequence: Synthetic oligonucleotide
caaucacuaugucccaugc

SEQ ID NO: 2279322 - RNA, 19 nt, Artificial Sequence
  Description of Artificial Sequence: Synthetic oligonucleotide
cacaagucccaguucugcg

SEQ ID NO: 2279323 - RNA, 19 nt, Artificial Sequence
  Description of Artificial Sequence: Synthetic oligonucleotide
auuccaggccccucagugg

SEQ ID NO: 2279324 - RNA, 19 nt, Artificial Sequence
  Description of Artificial Sequence: Synthetic oligonucleotide
ggaauaugugcaccaaacc

SEQ ID NO: 2279325 - RNA, 19 nt, Artificial Sequence
  Description of Artificial Sequence: Synthetic oligonucleotide
auaucacauacauaaccuu

SEQ ID NO: 2279326 - RNA, 19 nt, Artificial Sequence
  Description of Artificial Sequence: Synthetic oligonucleotide
uuuauugcucuugacggua

SEQ ID NO: 2279327 - RNA, 19 nt, Artificial Sequence
  Description of Artificial Sequence: Synthetic oligonucleotide
cuucacugggcagacacag

SEQ ID NO: 2279328 - RNA, 19 nt, Artificial Sequence
  Description of Artificial Sequence: Synthetic oligonucleotide
uaggcucucacagcaagcc

SEQ ID NO: 2279329 - RNA, 19 nt, Artificial Sequence
  Description of Artificial Sequence: Synthetic oligonucleotide
aagcuaagcauaucacaua

SEQ ID NO: 2279330 - RNA, 19 nt, Artificial Sequence
  Description of Artificial Sequence: Synthetic oligonucleotide
ugaggagaaugugagccug

SEQ ID NO: 2279331 - RNA, 19 nt, Artificial Sequence
  Description of Artificial Sequence: Synthetic oligonucleotide
agugcuugugggcaaggca

SEQ ID NO: 2279332 - RNA, 19 nt, Artificial Sequence
  Description of Artificial Sequence: Synthetic oligonucleotide
ugaccauuacgucccagau

SEQ ID NO: 2279333 - RNA, 19 nt, Artificial Sequence
  Description of Artificial Sequence: Synthetic oligonucleotide
uuaaagcaacaugcugggg

SEQ ID NO: 2279334 - RNA, 19 nt, Artificial Sequence
  Description of Artificial Sequence: Synthetic oligonucleotide
uagagagucaggggaaggc

SEQ ID NO: 2279335 - RNA, 19 nt, Artificial Sequence
  Description of Artificial Sequence: Synthetic oligonucleotide
ucuugacgguaaaucaaaa

SEQ ID NO: 2279336 - RNA, 19 nt, Artificial Sequence
  Description of Artificial Sequence: Synthetic oligonucleotide
agugccaggacuccacgcu

SEQ ID NO: 2279337 - RNA, 19 nt, Artificial Sequence
  Description of Artificial Sequence: Synthetic oligonucleotide
aggacuccacgcucuuugc

SEQ ID NO: 2279338 - RNA, 19 nt, Artificial Sequence
  Description of Artificial Sequence: Synthetic oligonucleotide
cagacuuuuaggccauaag

SEQ ID NO: 2279339 - RNA, 19 nt, Artificial Sequence
  Description of Artificial Sequence: Synthetic oligonucleotide
gcagcuuugucccaccucc

SEQ ID NO: 2279340 - RNA, 19 nt, Artificial Sequence
  Description of Artificial Sequence: Synthetic oligonucleotide
cuuuggugugcaugaacac

SEQ ID NO: 2279341 - RNA, 19 nt, Artificial Sequence
  Description of Artificial Sequence: Synthetic oligonucleotide
ucucacagcaagccugcac

SEQ ID NO: 2279342 - RNA, 19 nt, Artificial Sequence
  Description of Artificial Sequence: Synthetic oligonucleotide
acgucccagauuccaggcc

SEQ ID NO: 2279343 - RNA, 19 nt, Artificial Sequence
  Description of Artificial Sequence: Synthetic oligonucleotide
guguuaggcucucacagca

SEQ ID NO: 2279344 - RNA, 19 nt, Artificial Sequence
  Description of Artificial Sequence: Synthetic oligonucleotide
cuaagcauaucacauacau

SEQ ID NO: 2279345 - RNA, 19 nt, Artificial Sequence
  Description of Artificial Sequence: Synthetic oligonucleotide
cucacagcaagccugcaca

SEQ ID NO: 2279346 - RNA, 19 nt, Artificial Sequence
  Description of Artificial Sequence: Synthetic oligonucleotide
gcuaucagaaggugagagg

SEQ ID NO: 2279347 - RNA, 19 nt, Artificial Sequence
  Description of Artificial Sequence: Synthetic oligonucleotide
gagagcucccaccccagcc

SEQ ID NO: 2279348 - RNA, 19 nt, Artificial Sequence
  Description of Artificial Sequence: Synthetic oligonucleotide
auuuaauggaaaacaggaa

SEQ ID NO: 2279349 - RNA, 19 nt, Artificial Sequence
  Description of Artificial Sequence: Synthetic oligonucleotide
uggagacagcacuccaugc

SEQ ID NO: 2279350 - RNA, 19 nt, Artificial Sequence
  Description of Artificial Sequence: Synthetic oligonucleotide
cuguaagcccugcugcucc

SEQ ID NO: 2279351 - RNA, 19 nt, Artificial Sequence
  Description of Artificial Sequence: Synthetic oligonucleotide
ggugauuggcaaaaccagg

SEQ ID NO: 2279352 - RNA, 19 nt, Artificial Sequence
  Description of Artificial Sequence: Synthetic oligonucleotide
uacgucccagauuccaggc

SEQ ID NO: 2279353 - RNA, 19 nt, Artificial Sequence
  Description of Artificial Sequence: Synthetic oligonucleotide
agucaggggaaggccaagc

SEQ ID NO: 2279354 - RNA, 19 nt, Artificial Sequence
  Description of Artificial Sequence: Synthetic oligonucleotide
gugagccuggcucuguaag

SEQ ID NO: 2279355 - RNA, 19 nt, Artificial Sequence
  Description of Artificial Sequence: Synthetic oligonucleotide
gguaaaucaaaauaugcuu

SEQ ID NO: 2279356 - RNA, 19 nt, Artificial Sequence
  Description of Artificial Sequence: Synthetic oligonucleotide
caugaacacacucgagcac

SEQ ID NO: 2279357 - RNA, 19 nt, Artificial Sequence
  Description of Artificial Sequence: Synthetic oligonucleotide
gcacacaaucacuaugucc

SEQ ID NO: 2279358 - RNA, 19 nt, Artificial Sequence
  Description of Artificial Sequence: Synthetic oligonucleotide
uuccguguuaggcucucac

SEQ ID NO: 2279359 - RNA, 19 nt, Artificial Sequence
  Description of Artificial Sequence: Synthetic oligonucleotide
aaaccaggccggcggcacg

SEQ ID NO: 2279360 - RNA, 19 nt, Artificial Sequence
  Description of Artificial Sequence: Synthetic oligonucleotide
uuauugcucuugacgguaa

SEQ ID NO: 2279361 - RNA, 19 nt, Artificial Sequence
  Description of Artificial Sequence: Synthetic oligonucleotide
augugcaccaaaccacaca

SEQ ID NO: 2279362 - RNA, 19 nt, Artificial Sequence
  Description of Artificial Sequence: Synthetic oligonucleotide
agccuggcucuguaagccc

SEQ ID NO: 2279363 - RNA, 19 nt, Artificial Sequence
  Description of Artificial Sequence: Synthetic oligonucleotide
ugggcagacacaggcaagc

SEQ ID NO: 2279364 - RNA, 19 nt, Artificial Sequence
  Description of Artificial Sequence: Synthetic oligonucleotide
uuucccagcgggguucagg

SEQ ID NO: 2279365 - RNA, 19 nt, Artificial Sequence
  Description of Artificial Sequence: Synthetic oligonucleotide
ugaacacacucgagcacgu

SEQ ID NO: 2279366 - RNA, 19 nt, Artificial Sequence
  Description of Artificial Sequence: Synthetic oligonucleotide
uccguguuaggcucucaca

SEQ ID NO: 2279367 - RNA, 19 nt, Artificial Sequence
  Description of Artificial Sequence: Synthetic oligonucleotide
ggccauaagaaagugcuug

SEQ ID NO: 2279368 - RNA, 19 nt, Artificial Sequence
  Description of Artificial Sequence: Synthetic oligonucleotide
gagguucuggccuggguca

SEQ ID NO: 2279369 - RNA, 19 nt, Artificial Sequence
  Description of Artificial Sequence: Synthetic oligonucleotide
ucuucacugggcagacaca

SEQ ID NO: 2279370 - RNA, 19 nt, Artificial Sequence
  Description of Artificial Sequence: Synthetic oligonucleotide
auuacgucccagauuccag

SEQ ID NO: 2279371 - RNA, 19 nt, Artificial Sequence
  Description of Artificial Sequence: Synthetic oligonucleotide
auaugugcaccaaaccaca

SEQ ID NO: 2279372 - RNA, 19 nt, Artificial Sequence
  Description of Artificial Sequence: Synthetic oligonucleotide
caagcuaagcauaucacau

SEQ ID NO: 2279373 - RNA, 19 nt, Artificial Sequence
  Description of Artificial Sequence: Synthetic oligonucleotide
cuagagagucaggggaagg

SEQ ID NO: 2279374 - RNA, 19 nt, Artificial Sequence
  Description of Artificial Sequence: Synthetic oligonucleotide
uguggcguaggugggcucc

SEQ ID NO: 2279375 - RNA, 19 nt, Artificial Sequence
  Description of Artificial Sequence: Synthetic oligonucleotide
agcaagccugcacagccca

SEQ ID NO: 2279376 - RNA, 19 nt, Artificial Sequence
  Description of Artificial Sequence: Synthetic oligonucleotide
gaggagaaugugagccugg

SEQ ID NO: 2279377 - RNA, 19 nt, Artificial Sequence
  Description of Artificial Sequence: Synthetic oligonucleotide
gugaccauuacgucccaga

SEQ ID NO: 2279378 - RNA, 19 nt, Artificial Sequence
  Description of Artificial Sequence: Synthetic oligonucleotide
cgugaggagaaugugagcc

SEQ ID NO: 2279379 - RNA, 19 nt, Artificial Sequence
  Description of Artificial Sequence: Synthetic oligonucleotide
cucuugacgguaaaucaaa

SEQ ID NO: 2279380 - RNA, 19 nt, Artificial Sequence
  Description of Artificial Sequence: Synthetic oligonucleotide
ucacuaugucccaugccuu

SEQ ID NO: 2279381 - RNA, 19 nt, Artificial Sequence
  Description of Artificial Sequence: Synthetic oligonucleotide
caggggaaggccaagcuaa

SEQ ID NO: 2279382 - RNA, 19 nt, Artificial Sequence
  Description of Artificial Sequence: Synthetic oligonucleotide
ugucagcguccacugguga

SEQ ID NO: 2279383 - RNA, 19 nt, Artificial Sequence
  Description of Artificial Sequence: Synthetic oligonucleotide
cuaugucccaugccuuccc

SEQ ID NO: 2279384 - RNA, 19 nt, Artificial Sequence
  Description of Artificial Sequence: Synthetic oligonucleotide
agaaagugcuugugggcaa

SEQ ID NO: 2279385 - RNA, 19 nt, Artificial Sequence
  Description of Artificial Sequence: Synthetic oligonucleotide
uauugcucuugacgguaaa

SEQ ID NO: 2279386 - RNA, 19 nt, Artificial Sequence
  Description of Artificial Sequence: Synthetic oligonucleotide
uguuaggcucucacagcaa

SEQ ID NO: 2279387 - RNA, 19 nt, Artificial Sequence
  Description of Artificial Sequence: Synthetic oligonucleotide
ucacugugaccauuacguc

SEQ ID NO: 2279388 - RNA, 19 nt, Artificial Sequence
  Description of Artificial Sequence: Synthetic oligonucleotide
cacuaugucccaugccuuc

SEQ ID NO: 2279389 - RNA, 19 nt, Artificial Sequence
  Description of Artificial Sequence: Synthetic oligonucleotide
ggaacaggcaugcucuuca

SEQ ID NO: 2279390 - RNA, 19 nt, Artificial Sequence
  Description of Artificial Sequence: Synthetic oligonucleotide
uugcuuuauugcucuugac

SEQ ID NO: 2279391 - RNA, 19 nt, Artificial Sequence
  Description of Artificial Sequence: Synthetic oligonucleotide
ggccaagcuaagcauauca

SEQ ID NO: 2279392 - RNA, 19 nt, Artificial Sequence
  Description of Artificial Sequence: Synthetic oligonucleotide
ccguguuaggcucucacag

SEQ ID NO: 2279393 - RNA, 19 nt, Artificial Sequence
  Description of Artificial Sequence: Synthetic oligonucleotide
gugacguucccgucagaug

SEQ ID NO: 2279394 - RNA, 19 nt, Artificial Sequence
  Description of Artificial Sequence: Synthetic oligonucleotide
ugccuucccucacugugac

SEQ ID NO: 2279395 - RNA, 19 nt, Artificial Sequence
  Description of Artificial Sequence: Synthetic oligonucleotide
ucggugggagguucuggcc

SEQ ID NO: 2279396 - RNA, 19 nt, Artificial Sequence
  Description of Artificial Sequence: Synthetic oligonucleotide
ugcagcuuugucccaccuc

SEQ ID NO: 2279397 - RNA, 19 nt, Artificial Sequence
  Description of Artificial Sequence: Synthetic oligonucleotide
cacauccuccgcacugagg

SEQ ID NO: 2279398 - RNA, 19 nt, Artificial Sequence
  Description of Artificial Sequence: Synthetic oligonucleotide
agcuuugucccaccuccca

SEQ ID NO: 2279399 - RNA, 19 nt, Artificial Sequence
  Description of Artificial Sequence: Synthetic oligonucleotide
cuuugucccaccucccaca

SEQ ID NO: 2279400 - RNA, 19 nt, Artificial Sequence
  Description of Artificial Sequence: Synthetic oligonucleotide
aaugugagccuggcucugu

SEQ ID NO: 2279401 - RNA, 19 nt, Artificial Sequence
  Description of Artificial Sequence: Synthetic oligonucleotide
gucucaggaaggccuccgg

SEQ ID NO: 2279402 - RNA, 19 nt, Artificial Sequence
  Description of Artificial Sequence: Synthetic oligonucleotide
ugcgacuccuuuggcauga

SEQ ID NO: 2279403 - RNA, 19 nt, Artificial Sequence
  Description of Artificial Sequence: Synthetic oligonucleotide
uguguggcguaggugggcu

SEQ ID NO: 2279404 - RNA, 19 nt, Artificial Sequence
  Description of Artificial Sequence: Synthetic oligonucleotide
ucucagccuuccguguuag

SEQ ID NO: 2279405 - RNA, 19 nt, Artificial Sequence
  Description of Artificial Sequence: Synthetic oligonucleotide
ucuguaagcccugcugcuc

SEQ ID NO: 2279406 - RNA, 19 nt, Artificial Sequence
  Description of Artificial Sequence: Synthetic oligonucleotide
cacgucuacuuuaaagcaa

SEQ ID NO: 2279407 - RNA, 19 nt, Artificial Sequence
  Description of Artificial Sequence: Synthetic oligonucleotide
gagagucaggggaaggcca

SEQ ID NO: 2279408 - RNA, 19 nt, Artificial Sequence
  Description of Artificial Sequence: Synthetic oligonucleotide
ugccgguuguccacucuca

SEQ ID NO: 2279409 - RNA, 19 nt, Artificial Sequence
  Description of Artificial Sequence: Synthetic oligonucleotide
cgguuguccacucucagcc

SEQ ID NO: 2279410 - RNA, 19 nt, Artificial Sequence
  Description of Artificial Sequence: Synthetic oligonucleotide
gaucugcgacuccuuuggc

SEQ ID NO: 2279411 - RNA, 19 nt, Artificial Sequence
  Description of Artificial Sequence: Synthetic oligonucleotide
ugcggugaagaggaggcau

SEQ ID NO: 2279412 - RNA, 19 nt, Artificial Sequence
  Description of Artificial Sequence: Synthetic oligonucleotide
gcacgucuacuuuaaagca

SEQ ID NO: 2279413 - RNA, 19 nt, Artificial Sequence
  Description of Artificial Sequence: Synthetic oligonucleotide
accugcuuuggugugcaug

SEQ ID NO: 2279414 - RNA, 19 nt, Artificial Sequence
  Description of Artificial Sequence: Synthetic oligonucleotide
cauuacgucccagauucca

SEQ ID NO: 2279415 - RNA, 19 nt, Artificial Sequence
  Description of Artificial Sequence: Synthetic oligonucleotide
cugucagcguccacuggug

SEQ ID NO: 2279416 - RNA, 19 nt, Artificial Sequence
  Description of Artificial Sequence: Synthetic oligonucleotide
ugugagccuggcucuguaa

SEQ ID NO: 2279417 - RNA, 19 nt, Artificial Sequence
  Description of Artificial Sequence: Synthetic oligonucleotide
cgaucugcgacuccuuugg

SEQ ID NO: 2279418 - RNA, 19 nt, Artificial Sequence
  Description of Artificial Sequence: Synthetic oligonucleotide
ccucacugugaccauuacg

SEQ ID NO: 2279419 - RNA, 19 nt, Artificial Sequence
  Description of Artificial Sequence: Synthetic oligonucleotide
cacaggccucacauccucc

SEQ ID NO: 2279420 - RNA, 19 nt, Artificial Sequence
  Description of Artificial Sequence: Synthetic oligonucleotide
ucccaugccuucccucacu

SEQ ID NO: 2279421 - RNA, 19 nt, Artificial Sequence
  Description of Artificial Sequence: Synthetic oligonucleotide
cagcucuuucccagcgggg

SEQ ID NO: 2279422 - RNA, 19 nt, Artificial Sequence
  Description of Artificial Sequence: Synthetic oligonucleotide
cuugacgguaaaucaaaau

SEQ ID NO: 2279423 - RNA, 19 nt, Artificial Sequence
  Description of Artificial Sequence: Synthetic oligonucleotide
uccgaucugcgacuccuuu

SEQ ID NO: 2279424 - RNA, 19 nt, Artificial Sequence
  Description of Artificial Sequence: Synthetic oligonucleotide
ggcucucacagcaagccug

SEQ ID NO: 2279425 - RNA, 19 nt, Artificial Sequence
  Description of Artificial Sequence: Synthetic oligonucleotide
acagacuuuuaggccauaa

SEQ ID NO: 2279426 - RNA, 19 nt, Artificial Sequence
  Description of Artificial Sequence: Synthetic oligonucleotide
cuuuauugcucuugacggu

SEQ ID NO: 2279427 - RNA, 19 nt, Artificial Sequence
  Description of Artificial Sequence: Synthetic oligonucleotide
ucagcguccacuggugauu

SEQ ID NO: 2279428 - RNA, 19 nt, Artificial Sequence
  Description of Artificial Sequence: Synthetic oligonucleotide
guucccgucagauggcugu

SEQ ID NO: 2279429 - RNA, 19 nt, Artificial Sequence
  Description of Artificial Sequence: Synthetic oligonucleotide
agccugcacagcccacagg

SEQ ID NO: 2279430 - RNA, 19 nt, Artificial Sequence
  Description of Artificial Sequence: Synthetic oligonucleotide
cagauuccaggccccucag

SEQ ID NO: 2279431 - RNA, 19 nt, Artificial Sequence
  Description of Artificial Sequence: Synthetic oligonucleotide
ugugggcaaggcaguuccu

SEQ ID NO: 2279432 - RNA, 19 nt, Artificial Sequence
  Description of Artificial Sequence: Synthetic oligonucleotide
agauuccaggccccucagu

SEQ ID NO: 2279433 - RNA, 19 nt, Artificial Sequence
  Description of Artificial Sequence: Synthetic oligonucleotide
aggccuccggaacaggcau

SEQ ID NO: 2279434 - RNA, 19 nt, Artificial Sequence
  Description of Artificial Sequence: Synthetic oligonucleotide
acucgagcacgucuacuuu

SEQ ID NO: 2279435 - RNA, 19 nt, Artificial Sequence
  Description of Artificial Sequence: Synthetic oligonucleotide
cacugaggcuggacagggg

SEQ ID NO: 2279436 - RNA, 19 nt, Artificial Sequence
  Description of Artificial Sequence: Synthetic oligonucleotide
acaggaauaugugcaccaa

SEQ ID NO: 2279437 - RNA, 19 nt, Artificial Sequence
  Description of Artificial Sequence: Synthetic oligonucleotide
ucccagcgggguucagggg

SEQ ID NO: 2279438 - RNA, 19 nt, Artificial Sequence
  Description of Artificial Sequence: Synthetic oligonucleotide
cagcuuugucccaccuccc

SEQ ID NO: 2279439 - RNA, 19 nt, Artificial Sequence
  Description of Artificial Sequence: Synthetic oligonucleotide
ccugcuuuggugugcauga

SEQ ID NO: 2279440 - RNA, 19 nt, Artificial Sequence
  Description of Artificial Sequence: Synthetic oligonucleotide
ugcugcagcuuugucccac

SEQ ID NO: 2279441 - RNA, 19 nt, Artificial Sequence
  Description of Artificial Sequence: Synthetic oligonucleotide
cucuggcuccccacaaguc

SEQ ID NO: 2279442 - RNA, 19 nt, Artificial Sequence
  Description of Artificial Sequence: Synthetic oligonucleotide
ccagccuccgaucugcgac

SEQ ID NO: 2279443 - RNA, 19 nt, Artificial Sequence
  Description of Artificial Sequence: Synthetic oligonucleotide
gacguucccgucagauggc

SEQ ID NO: 2279444 - RNA, 19 nt, Artificial Sequence
  Description of Artificial Sequence: Synthetic oligonucleotide
cuugugggcaaggcaguuc

SEQ ID NO: 2279445 - RNA, 19 nt, Artificial Sequence
  Description of Artificial Sequence: Synthetic oligonucleotide
ggucccaggcuaucagaag

SEQ ID NO: 2279446 - RNA, 19 nt, Artificial Sequence
  Description of Artificial Sequence: Synthetic oligonucleotide
uugucccaccucccacagc

SEQ ID NO: 2279447 - RNA, 19 nt, Artificial Sequence
  Description of Artificial Sequence: Synthetic oligonucleotide
cugccgguuguccacucuc

SEQ ID NO: 2279448 - RNA, 19 nt, Artificial Sequence
  Description of Artificial Sequence: Synthetic oligonucleotide
caggaauaugugcaccaaa

SEQ ID NO: 2279449 - RNA, 19 nt, Artificial Sequence
  Description of Artificial Sequence: Synthetic oligonucleotide
cacacucgagcacgucuac

SEQ ID NO: 2279450 - RNA, 19 nt, Artificial Sequence
  Description of Artificial Sequence: Synthetic oligonucleotide
aaccaggccggcggcacgu

SEQ ID NO: 2279451 - RNA, 19 nt, Artificial Sequence
  Description of Artificial Sequence: Synthetic oligonucleotide
cacacacugcauugcauua

SEQ ID NO: 2279452 - RNA, 19 nt, Artificial Sequence
  Description of Artificial Sequence: Synthetic oligonucleotide
aggccggcggcacgugagg

SEQ ID NO: 2279453 - RNA, 19 nt, Artificial Sequence
  Description of Artificial Sequence: Synthetic oligonucleotide
ucuuucccagcgggguuca

SEQ ID NO: 2279454 - RNA, 19 nt, Artificial Sequence
  Description of Artificial Sequence: Synthetic oligonucleotide
agcguccacuggugauugg

SEQ ID NO: 2279455 - RNA, 19 nt, Artificial Sequence
  Description of Artificial Sequence: Synthetic oligonucleotide
cccagcgggguucaggggc

SEQ ID NO: 2279456 - RNA, 19 nt, Artificial Sequence
  Description of Artificial Sequence: Synthetic oligonucleotide
uggguccugugugcucugg

SEQ ID NO: 2279457 - RNA, 19 nt, Artificial Sequence
  Description of Artificial Sequence: Synthetic oligonucleotide
cucgagcacgucuacuuua

SEQ ID NO: 2279458 - RNA, 19 nt, Artificial Sequence
  Description of Artificial Sequence: Synthetic oligonucleotide
uuccucggugggagguucu

SEQ ID NO: 2279459 - RNA, 19 nt, Artificial Sequence
  Description of Artificial Sequence: Synthetic oligonucleotide
ucccaccccagccuccgau

SEQ ID NO: 2279460 - RNA, 19 nt, Artificial Sequence
  Description of Artificial Sequence: Synthetic oligonucleotide
aggccaagcuaagcauauc

SEQ ID NO: 2279461 - RNA, 19 nt, Artificial Sequence
  Description of Artificial Sequence: Synthetic oligonucleotide
gcuuugucccaccucccac

SEQ ID NO: 2279462 - RNA, 19 nt, Artificial Sequence
  Description of Artificial Sequence: Synthetic oligonucleotide
gugaggagaaugugagccu

SEQ ID NO: 2279463 - RNA, 19 nt, Artificial Sequence
  Description of Artificial Sequence: Synthetic oligonucleotide
ccauaagaaagugcuugug

SEQ ID NO: 2279464 - RNA, 19 nt, Artificial Sequence
  Description of Artificial Sequence: Synthetic oligonucleotide
cguguuaggcucucacagc

SEQ ID NO: 2279465 - RNA, 19 nt, Artificial Sequence
  Description of Artificial Sequence: Synthetic oligonucleotide
ggucucaggaaggccuccg

SEQ ID NO: 2279466 - RNA, 19 nt, Artificial Sequence
  Description of Artificial Sequence: Synthetic oligonucleotide
gccaagcuaagcauaucac

SEQ ID NO: 2279467 - RNA, 19 nt, Artificial Sequence
  Description of Artificial Sequence: Synthetic oligonucleotide
augccuucccucacuguga

SEQ ID NO: 2279468 - RNA, 19 nt, Artificial Sequence
  Description of Artificial Sequence: Synthetic oligonucleotide
cugcgacuccuuuggcaug

SEQ ID NO: 2279469 - RNA, 19 nt, Artificial Sequence
  Description of Artificial Sequence: Synthetic oligonucleotide
ggcacgugaggagaaugug

SEQ ID NO: 2279470 - RNA, 19 nt, Artificial Sequence
  Description of Artificial Sequence: Synthetic oligonucleotide
gagcucccaccccagccuc

SEQ ID NO: 2279471 - RNA, 19 nt, Artificial Sequence
  Description of Artificial Sequence: Synthetic oligonucleotide
gugggcaaggcaguuccuc

SEQ ID NO: 2279472 - RNA, 19 nt, Artificial Sequence
  Description of Artificial Sequence: Synthetic oligonucleotide
gugccaggacuccacgcuc

SEQ ID NO: 2279473 - RNA, 19 nt, Artificial Sequence
  Description of Artificial Sequence: Synthetic oligonucleotide
agagucaggggaaggccaa

SEQ ID NO: 2279474 - RNA, 19 nt, Artificial Sequence
  Description of Artificial Sequence: Synthetic oligonucleotide
ccccucaguggccacacag

SEQ ID NO: 2279475 - RNA, 19 nt, Artificial Sequence
  Description of Artificial Sequence: Synthetic oligonucleotide
cgguaaaucaaaauaugcu

SEQ ID NO: 2279476 - RNA, 19 nt, Artificial Sequence
  Description of Artificial Sequence: Synthetic oligonucleotide
acacucgagcacgucuacu

SEQ ID NO: 2279477 - RNA, 19 nt, Artificial Sequence
  Description of Artificial Sequence: Synthetic oligonucleotide
gcaccaaaccacacacugc

SEQ ID NO: 2279478 - RNA, 19 nt, Artificial Sequence
  Description of Artificial Sequence: Synthetic oligonucleotide
gaccauuacgucccagauu

SEQ ID NO: 2279479 - RNA, 19 nt, Artificial Sequence
  Description of Artificial Sequence: Synthetic oligonucleotide
aggggaaggccaagcuaag

SEQ ID NO: 2279480 - RNA, 19 nt, Artificial Sequence
  Description of Artificial Sequence: Synthetic oligonucleotide
uccucggugggagguucug

SEQ ID NO: 2279481 - RNA, 19 nt, Artificial Sequence
  Description of Artificial Sequence: Synthetic oligonucleotide
agguucuggccugggucag

SEQ ID NO: 2279482 - RNA, 19 nt, Artificial Sequence
  Description of Artificial Sequence: Synthetic oligonucleotide
gcacuccaugcacacaauc

SEQ ID NO: 2279483 - RNA, 19 nt, Artificial Sequence
  Description of Artificial Sequence: Synthetic oligonucleotide
cagcguccacuggugauug

SEQ ID NO: 2279484 - RNA, 19 nt, Artificial Sequence
  Description of Artificial Sequence: Synthetic oligonucleotide
ccgguuguccacucucagc

SEQ ID NO: 2279485 - RNA, 19 nt, Artificial Sequence
  Description of Artificial Sequence: Synthetic oligonucleotide
ggugaagaggaggcauggc

SEQ ID NO: 2279486 - RNA, 19 nt, Artificial Sequence
  Description of Artificial Sequence: Synthetic oligonucleotide
gcaaggcaguuccucggug

SEQ ID NO: 2279487 - RNA, 19 nt, Artificial Sequence
  Description of Artificial Sequence: Synthetic oligonucleotide
gucaggggaaggccaagcu

SEQ ID NO: 2279488 - RNA, 19 nt, Artificial Sequence
  Description of Artificial Sequence: Synthetic oligonucleotide
agccuccgaucugcgacuc

SEQ ID NO: 2279489 - RNA, 19 nt, Artificial Sequence
  Description of Artificial Sequence: Synthetic oligonucleotide
caggcaagcuggcagcucu

SEQ ID NO: 2279490 - RNA, 19 nt, Artificial Sequence
  Description of Artificial Sequence: Synthetic oligonucleotide
ucccgucagauggcuguca

SEQ ID NO: 2279491 - RNA, 19 nt, Artificial Sequence
  Description of Artificial Sequence: Synthetic oligonucleotide
aggcuaucagaaggugaga

SEQ ID NO: 2279492 - RNA, 19 nt, Artificial Sequence
  Description of Artificial Sequence: Synthetic oligonucleotide
ggaaggccaagcuaagcau

SEQ ID NO: 2279493 - RNA, 19 nt, Artificial Sequence
  Description of Artificial Sequence: Synthetic oligonucleotide
cugcacagcccacaggccu

SEQ ID NO: 2279494 - RNA, 19 nt, Artificial Sequence
  Description of Artificial Sequence: Synthetic oligonucleotide
gcucuugacgguaaaucaa

SEQ ID NO: 2279495 - RNA, 19 nt, Artificial Sequence
  Description of Artificial Sequence: Synthetic oligonucleotide
ccaggcuaucagaagguga

SEQ ID NO: 2279496 - RNA, 19 nt, Artificial Sequence
  Description of Artificial Sequence: Synthetic oligonucleotide
aggagagcucccaccccag

SEQ ID NO: 2279497 - RNA, 19 nt, Artificial Sequence
  Description of Artificial Sequence: Synthetic oligonucleotide
guuguccacucucagccuu

SEQ ID NO: 2279498 - RNA, 19 nt, Artificial Sequence
  Description of Artificial Sequence: Synthetic oligonucleotide
cagccuuccguguuaggcu

SEQ ID NO: 2279499 - RNA, 19 nt, Artificial Sequence
  Description of Artificial Sequence: Synthetic oligonucleotide
gccgguuguccacucucag

SEQ ID NO: 2279500 - RNA, 19 nt, Artificial Sequence
  Description of Artificial Sequence: Synthetic oligonucleotide
gcguccacuggugauuggc

SEQ ID NO: 2279501 - RNA, 19 nt, Artificial Sequence
  Description of Artificial Sequence: Synthetic oligonucleotide
caagucccaguucugcggu

SEQ ID NO: 2279502 - RNA, 19 nt, Artificial Sequence
  Description of Artificial Sequence: Synthetic oligonucleotide
gcacgugaggagaauguga

SEQ ID NO: 2279503 - RNA, 19 nt, Artificial Sequence
  Description of Artificial Sequence: Synthetic oligonucleotide
ccgaucugcgacuccuuug

SEQ ID NO: 2279504 - RNA, 19 nt, Artificial Sequence
  Description of Artificial Sequence: Synthetic oligonucleotide
ccgcacugaggcuggacag

SEQ ID NO: 2279505 - RNA, 19 nt, Artificial Sequence
  Description of Artificial Sequence: Synthetic oligonucleotide
gccauaagaaagugcuugu

SEQ ID NO: 2279506 - RNA, 19 nt, Artificial Sequence
  Description of Artificial Sequence: Synthetic oligonucleotide
guuccucggugggagguuc

SEQ ID NO: 2279507 - RNA, 19 nt, Artificial Sequence
  Description of Artificial Sequence: Synthetic oligonucleotide
cacuggugauuggcaaaac

SEQ ID NO: 2279508 - RNA, 19 nt, Artificial Sequence
  Description of Artificial Sequence: Synthetic oligonucleotide
gugggagguucuggccugg

SEQ ID NO: 2279509 - RNA, 19 nt, Artificial Sequence
  Description of Artificial Sequence: Synthetic oligonucleotide
acguucccgucagauggcu

SEQ ID NO: 2279510 - RNA, 19 nt, Artificial Sequence
  Description of Artificial Sequence: Synthetic oligonucleotide
ucccagauuccaggccccu

SEQ ID NO: 2279511 - RNA, 19 nt, Artificial Sequence
  Description of Artificial Sequence: Synthetic oligonucleotide
gcuaagcauaucacauaca

SEQ ID NO: 2279512 - RNA, 19 nt, Artificial Sequence
  Description of Artificial Sequence: Synthetic oligonucleotide
ccagauuccaggccccuca

SEQ ID NO: 2279513 - RNA, 19 nt, Artificial Sequence
  Description of Artificial Sequence: Synthetic oligonucleotide
uucccgucagauggcuguc

SEQ ID NO: 2279514 - RNA, 19 nt, Artificial Sequence
  Description of Artificial Sequence: Synthetic oligonucleotide
ggguccugugugcucuggc

SEQ ID NO: 2279515 - RNA, 19 nt, Artificial Sequence
  Description of Artificial Sequence: Synthetic oligonucleotide
ggggaaggccaagcuaagc

SEQ ID NO: 2279516 - RNA, 19 nt, Artificial Sequence
  Description of Artificial Sequence: Synthetic oligonucleotide
gccuccggaacaggcaugc

SEQ ID NO: 2279517 - RNA, 19 nt, Artificial Sequence
  Description of Artificial Sequence: Synthetic oligonucleotide
ggcaugcucuucacugggc

SEQ ID NO: 2279518 - RNA, 19 nt, Artificial Sequence
  Description of Artificial Sequence: Synthetic oligonucleotide
gucagcguccacuggugau

SEQ ID NO: 2279519 - RNA, 19 nt, Artificial Sequence
  Description of Artificial Sequence: Synthetic oligonucleotide
gcggugaagaggaggcaug

SEQ ID NO: 2279520 - RNA, 19 nt, Artificial Sequence
  Description of Artificial Sequence: Synthetic oligonucleotide
ccauuacgucccagauucc

SEQ ID NO: 2279521 - RNA, 19 nt, Artificial Sequence
  Description of Artificial Sequence: Synthetic oligonucleotide
uccugccgguuguccacuc

SEQ ID NO: 2279522 - RNA, 19 nt, Artificial Sequence
  Description of Artificial Sequence: Synthetic oligonucleotide
aggcaguuccucgguggga

SEQ ID NO: 2279523 - RNA, 19 nt, Artificial Sequence
  Description of Artificial Sequence: Synthetic oligonucleotide
gcauugcauuaaauggaga

SEQ ID NO: 2279524 - RNA, 19 nt, Artificial Sequence
  Description of Artificial Sequence: Synthetic oligonucleotide
cucucagccuuccguguua

SEQ ID NO: 2279525 - RNA, 19 nt, Artificial Sequence
  Description of Artificial Sequence: Synthetic oligonucleotide
ggcuagagagucaggggaa

SEQ ID NO: 2279526 - RNA, 19 nt, Artificial Sequence
  Description of Artificial Sequence: Synthetic oligonucleotide
ccgucagauggcugucagc

SEQ ID NO: 2279527 - RNA, 19 nt, Artificial Sequence
  Description of Artificial Sequence: Synthetic oligonucleotide
ggcguaggugggcucccug

SEQ ID NO: 2279528 - RNA, 19 nt, Artificial Sequence
  Description of Artificial Sequence: Synthetic oligonucleotide
aguuccucggugggagguu

SEQ ID NO: 2279529 - RNA, 19 nt, Artificial Sequence
  Description of Artificial Sequence: Synthetic oligonucleotide
guucugcggugaagaggag

SEQ ID NO: 2279530 - RNA, 19 nt, Artificial Sequence
  Description of Artificial Sequence: Synthetic oligonucleotide
ggaggcauggcuagagagu

SEQ ID NO: 2279531 - RNA, 19 nt, Artificial Sequence
  Description of Artificial Sequence: Synthetic oligonucleotide
ccacgcucuuugcugcagc

SEQ ID NO: 2279532 - RNA, 19 nt, Artificial Sequence
  Description of Artificial Sequence: Synthetic oligonucleotide
aggccauaagaaagugcuu

SEQ ID NO: 2279533 - RNA, 19 nt, Artificial Sequence
  Description of Artificial Sequence: Synthetic oligonucleotide
aggcauggcuagagaguca

SEQ ID NO: 2279534 - RNA, 19 nt, Artificial Sequence
  Description of Artificial Sequence: Synthetic oligonucleotide
cacgcucuuugcugcagcu

SEQ ID NO: 2279535 - RNA, 19 nt, Artificial Sequence
  Description of Artificial Sequence: Synthetic oligonucleotide
gcggcacgugaggagaaug

SEQ ID NO: 2279536 - RNA, 19 nt, Artificial Sequence
  Description of Artificial Sequence: Synthetic oligonucleotide
ggagaaugugagccuggcu

SEQ ID NO: 2279537 - RNA, 19 nt, Artificial Sequence
  Description of Artificial Sequence: Synthetic oligonucleotide
guggcguaggugggcuccc

SEQ ID NO: 2279538 - RNA, 19 nt, Artificial Sequence
  Description of Artificial Sequence: Synthetic oligonucleotide
gcucccaccccagccuccg

SEQ ID NO: 2279539 - RNA, 19 nt, Artificial Sequence
  Description of Artificial Sequence: Synthetic oligonucleotide
ggugacguucccgucagau

SEQ ID NO: 2279540 - RNA, 19 nt, Artificial Sequence
  Description of Artificial Sequence: Synthetic oligonucleotide
gcucuggcuccccacaagu

SEQ ID NO: 2279541 - RNA, 19 nt, Artificial Sequence
  Description of Artificial Sequence: Synthetic oligonucleotide
gggucccaggcuaucagaa

SEQ ID NO: 2279542 - RNA, 19 nt, Artificial Sequence
  Description of Artificial Sequence: Synthetic oligonucleotide
cuccgcacugaggcuggac

SEQ ID NO: 2279543 - RNA, 19 nt, Artificial Sequence
  Description of Artificial Sequence: Synthetic oligonucleotide
acgcucuuugcugcagcuu

SEQ ID NO: 2279544 - RNA, 19 nt, Artificial Sequence
  Description of Artificial Sequence: Synthetic oligonucleotide
agcgggguucaggggccag

SEQ ID NO: 2279545 - RNA, 19 nt, Artificial Sequence
  Description of Artificial Sequence: Synthetic oligonucleotide
caggggucccaggcuauca

SEQ ID NO: 2279546 - RNA, 19 nt, Artificial Sequence
  Description of Artificial Sequence: Synthetic oligonucleotide
gucccaguucugcggugaa

SEQ ID NO: 2279547 - RNA, 19 nt, Artificial Sequence
  Description of Artificial Sequence: Synthetic oligonucleotide
uggcguaggugggcucccu

SEQ ID NO: 2279548 - RNA, 19 nt, Artificial Sequence
  Description of Artificial Sequence: Synthetic oligonucleotide
ggcaaggcaguuccucggu

SEQ ID NO: 2279549 - RNA, 19 nt, Artificial Sequence
  Description of Artificial Sequence: Synthetic oligonucleotide
gguuguccacucucagccu

SEQ ID NO: 2279550 - RNA, 19 nt, Artificial Sequence
  Description of Artificial Sequence: Synthetic oligonucleotide
cuuucccagcgggguucag

SEQ ID NO: 2279551 - RNA, 19 nt, Artificial Sequence
  Description of Artificial Sequence: Synthetic oligonucleotide
cugugaccauuacguccca

SEQ ID NO: 2279552 - RNA, 19 nt, Artificial Sequence
  Description of Artificial Sequence: Synthetic oligonucleotide
gcgggguucaggggccagg

SEQ ID NO: 2279553 - RNA, 19 nt, Artificial Sequence
  Description of Artificial Sequence: Synthetic oligonucleotide
gggucucaggaaggccucc

SEQ ID NO: 2279554 - RNA, 19 nt, Artificial Sequence
  Description of Artificial Sequence: Synthetic oligonucleotide
gcagguguguggcguaggu

SEQ ID NO: 2279555 - RNA, 19 nt, Artificial Sequence
  Description of Artificial Sequence: Synthetic oligonucleotide
cacaaucacuaugucccau

SEQ ID NO: 2279556 - RNA, 19 nt, Artificial Sequence
  Description of Artificial Sequence: Synthetic oligonucleotide
cagccuccgaucugcgacu

SEQ ID NO: 2279557 - RNA, 19 nt, Artificial Sequence
  Description of Artificial Sequence: Synthetic oligonucleotide
cauccuccgcacugaggcu

SEQ ID NO: 2279558 - RNA, 19 nt, Artificial Sequence
  Description of Artificial Sequence: Synthetic oligonucleotide
gcuggguccugugugcucu

SEQ ID NO: 2279559 - RNA, 19 nt, Artificial Sequence
  Description of Artificial Sequence: Synthetic oligonucleotide
gccuucccucacugugacc

SEQ ID NO: 2279560 - RNA, 19 nt, Artificial Sequence
  Description of Artificial Sequence: Synthetic oligonucleotide
cccucacugugaccauuac

SEQ ID NO: 2279561 - RNA, 19 nt, Artificial Sequence
  Description of Artificial Sequence: Synthetic oligonucleotide
gugcaccaaaccacacacu

SEQ ID NO: 2279562 - RNA, 19 nt, Artificial Sequence
  Description of Artificial Sequence: Synthetic oligonucleotide
cgucuacuuuaaagcaaca

SEQ ID NO: 2279563 - RNA, 19 nt, Artificial Sequence
  Description of Artificial Sequence: Synthetic oligonucleotide
cccaccccagccuccgauc

SEQ ID NO: 2279564 - RNA, 19 nt, Artificial Sequence
  Description of Artificial Sequence: Synthetic oligonucleotide
cucucacagcaagccugca

SEQ ID NO: 2279565 - RNA, 19 nt, Artificial Sequence
  Description of Artificial Sequence: Synthetic oligonucleotide
accaggccggcggcacgug

SEQ ID NO: 2279566 - RNA, 19 nt, Artificial Sequence
  Description of Artificial Sequence: Synthetic oligonucleotide
ggccuccggaacaggcaug

SEQ ID NO: 2279567 - RNA, 19 nt, Artificial Sequence
  Description of Artificial Sequence: Synthetic oligonucleotide
gcaagccugcacagcccac

SEQ ID NO: 2279568 - RNA, 19 nt, Artificial Sequence
  Description of Artificial Sequence: Synthetic oligonucleotide
cccagauuccaggccccuc

SEQ ID NO: 2279569 - RNA, 19 nt, Artificial Sequence
  Description of Artificial Sequence: Synthetic oligonucleotide
ccuccgaucugcgacuccu

SEQ ID NO: 2279570 - RNA, 19 nt, Artificial Sequence
  Description of Artificial Sequence: Synthetic oligonucleotide
cacagacuuuuaggccaua

SEQ ID NO: 2279571 - RNA, 19 nt, Artificial Sequence
  Description of Artificial Sequence: Synthetic oligonucleotide
gaccugcuuuggugugcau

SEQ ID NO: 2279572 - RNA, 19 nt, Artificial Sequence
  Description of Artificial Sequence: Synthetic oligonucleotide
gcucuuucccagcgggguu

SEQ ID NO: 2279573 - RNA, 19 nt, Artificial Sequence
  Description of Artificial Sequence: Synthetic oligonucleotide
gggcagacacaggcaagcu

SEQ ID NO: 2279574 - RNA, 19 nt, Artificial Sequence
  Description of Artificial Sequence: Synthetic oligonucleotide
cuccgaucugcgacuccuu

SEQ ID NO: 2279575 - RNA, 19 nt, Artificial Sequence
  Description of Artificial Sequence: Synthetic oligonucleotide
ggccggcggcacgugagga

SEQ ID NO: 2279576 - RNA, 19 nt, Artificial Sequence
  Description of Artificial Sequence: Synthetic oligonucleotide
cccagccuccgaucugcga

SEQ ID NO: 2279577 - RNA, 19 nt, Artificial Sequence
  Description of Artificial Sequence: Synthetic oligonucleotide
gccucacauccuccgcacu

SEQ ID NO: 2279578 - RNA, 19 nt, Artificial Sequence
  Description of Artificial Sequence: Synthetic oligonucleotide
cuccugccgguuguccacu

SEQ ID NO: 2279579 - RNA, 19 nt, Artificial Sequence
  Description of Artificial Sequence: Synthetic oligonucleotide
gggcucccuggccuggccu

SEQ ID NO: 2279580 - RNA, 19 nt, Artificial Sequence
  Description of Artificial Sequence: Synthetic oligonucleotide
ccaccccagccuccgaucu

SEQ ID NO: 2279581 - RNA, 19 nt, Artificial Sequence
  Description of Artificial Sequence: Synthetic oligonucleotide
cggcacgugaggagaaugu

SEQ ID NO: 2279582 - RNA, 19 nt, Artificial Sequence
  Description of Artificial Sequence: Synthetic oligonucleotide
gcgacuccuuuggcaugac

SEQ ID NO: 2279583 - RNA, 19 nt, Artificial Sequence
  Description of Artificial Sequence: Synthetic oligonucleotide
cgagcacgucuacuuuaaa

SEQ ID NO: 2279584 - RNA, 19 nt, Artificial Sequence
  Description of Artificial Sequence: Synthetic oligonucleotide
ccugccgguuguccacucu

SEQ ID NO: 2279585 - RNA, 19 nt, Artificial Sequence
  Description of Artificial Sequence: Synthetic oligonucleotide
gccuuccguguuaggcucu

SEQ ID NO: 2279586 - RNA, 19 nt, Artificial Sequence
  Description of Artificial Sequence: Synthetic oligonucleotide
ggcggcacgugaggagaau

SEQ ID NO: 2279587 - RNA, 19 nt, Artificial Sequence
  Description of Artificial Sequence: Synthetic oligonucleotide
ccggaacaggcaugcucuu

SEQ ID NO: 2279588 - RNA, 19 nt, Artificial Sequence
  Description of Artificial Sequence: Synthetic oligonucleotide
cggcggcacgugaggagaa

SEQ ID NO: 2279589 - RNA, 19 nt, Artificial Sequence
  Description of Artificial Sequence: Synthetic oligonucleotide
ccuccgcacugaggcugga

SEQ ID NO: 2279590 - RNA, 19 nt, Artificial Sequence
  Description of Artificial Sequence: Synthetic oligonucleotide
aaugagacaagcuuggucu

SEQ ID NO: 2279591 - RNA, 19 nt, Artificial Sequence
  Description of Artificial Sequence: Synthetic oligonucleotide
uuuacauaagcuauucaag

SEQ ID NO: 2279592 - RNA, 19 nt, Artificial Sequence
  Description of Artificial Sequence: Synthetic oligonucleotide
ucaaagauaucaaagcuga

SEQ ID NO: 2279593 - RNA, 19 nt, Artificial Sequence
  Description of Artificial Sequence: Synthetic oligonucleotide
aaaagguuaaaguuauuca

SEQ ID NO: 2279594 - RNA, 19 nt, Artificial Sequence
  Description of Artificial Sequence: Synthetic oligonucleotide
gauaucaaagcugaaaacc

SEQ ID NO: 2279595 - RNA, 19 nt, Artificial Sequence
  Description of Artificial Sequence: Synthetic oligonucleotide
aaguuauucaaagauauca

SEQ ID NO: 2279596 - RNA, 19 nt, Artificial Sequence
  Description of Artificial Sequence: Synthetic oligonucleotide
caaaugguugcuaagacag

SEQ ID NO: 2279597 - RNA, 19 nt, Artificial Sequence
  Description of Artificial Sequence: Synthetic oligonucleotide
aaauauuguucccaaacgu

SEQ ID NO: 2279598 - RNA, 19 nt, Artificial Sequence
  Description of Artificial Sequence: Synthetic oligonucleotide
aaagguuaaaguuauucaa

SEQ ID NO: 2279599 - RNA, 19 nt, Artificial Sequence
  Description of Artificial Sequence: Synthetic oligonucleotide
gauacaaagcaacaaugag

SEQ ID NO: 2279600 - RNA, 19 nt, Artificial Sequence
  Description of Artificial Sequence: Synthetic oligonucleotide
cuugggauguuacaaaugg

SEQ ID NO: 2279601 - RNA, 19 nt, Artificial Sequence
  Description of Artificial Sequence: Synthetic oligonucleotide
uagaaaugagacaagcuug

SEQ ID NO: 2279602 - RNA, 19 nt, Artificial Sequence
  Description of Artificial Sequence: Synthetic oligonucleotide
aaugagauggcacuuuaga

SEQ ID NO: 2279603 - RNA, 19 nt, Artificial Sequence
  Description of Artificial Sequence: Synthetic oligonucleotide
ugagcaguuaggaaugggg

SEQ ID NO: 2279604 - RNA, 19 nt, Artificial Sequence
  Description of Artificial Sequence: Synthetic oligonucleotide
uuaggaaugggguagaaau

SEQ ID NO: 2279605 - RNA, 19 nt, Artificial Sequence
  Description of Artificial Sequence: Synthetic oligonucleotide
aaaaccuucacagcccggc

SEQ ID NO: 2279606 - RNA, 19 nt, Artificial Sequence
  Description of Artificial Sequence: Synthetic oligonucleotide
uguacauaucacaagugug

SEQ ID NO: 2279607 - RNA, 19 nt, Artificial Sequence
  Description of Artificial Sequence: Synthetic oligonucleotide
auucaaagauaucaaagcu

SEQ ID NO: 2279608 - RNA, 19 nt, Artificial Sequence
  Description of Artificial Sequence: Synthetic oligonucleotide
ugguugcuaagacagaaag

SEQ ID NO: 2279609 - RNA, 19 nt, Artificial Sequence
  Description of Artificial Sequence: Synthetic oligonucleotide
cuaaggggcaacauggucc

SEQ ID NO: 2279610 - RNA, 19 nt, Artificial Sequence
  Description of Artificial Sequence: Synthetic oligonucleotide
agguuaaaguuauucaaag

SEQ ID NO: 2279611 - RNA, 19 nt, Artificial Sequence
  Description of Artificial Sequence: Synthetic oligonucleotide
aauauuguucccaaacgug

SEQ ID NO: 2279612 - RNA, 19 nt, Artificial Sequence
  Description of Artificial Sequence: Synthetic oligonucleotide
ugugugagcaguuaggaau

SEQ ID NO: 2279613 - RNA, 19 nt, Artificial Sequence
  Description of Artificial Sequence: Synthetic oligonucleotide
uaagacagaaaguaaucac

SEQ ID NO: 2279614 - RNA, 19 nt, Artificial Sequence
  Description of Artificial Sequence: Synthetic oligonucleotide
gaugagaugacuuccaugu

SEQ ID NO: 2279615 - RNA, 19 nt, Artificial Sequence
  Description of Artificial Sequence: Synthetic oligonucleotide
ucuuauuuggucacaucug

SEQ ID NO: 2279616 - RNA, 19 nt, Artificial Sequence
  Description of Artificial Sequence: Synthetic oligonucleotide
cauguggcuaaaucaaugg

SEQ ID NO: 2279617 - RNA, 19 nt, Artificial Sequence
  Description of Artificial Sequence: Synthetic oligonucleotide
aaagauaucaaagcugaaa

SEQ ID NO: 2279618 - RNA, 19 nt, Artificial Sequence
  Description of Artificial Sequence: Synthetic oligonucleotide
gagauggcacuuuagagac

SEQ ID NO: 2279619 - RNA, 19 nt, Artificial Sequence
  Description of Artificial Sequence: Synthetic oligonucleotide
gaaaguaaucacaauguac

SEQ ID NO: 2279620 - RNA, 19 nt, Artificial Sequence
  Description of Artificial Sequence: Synthetic oligonucleotide
aaaugugcugcuccaagcu

SEQ ID NO: 2279621 - RNA, 19 nt, Artificial Sequence
  Description of Artificial Sequence: Synthetic oligonucleotide
uguuccucuauggagacag

SEQ ID NO: 2279622 - RNA, 19 nt, Artificial Sequence
  Description of Artificial Sequence: Synthetic oligonucleotide
auucccuuaaauauuguuc

SEQ ID NO: 2279623 - RNA, 19 nt, Artificial Sequence
  Description of Artificial Sequence: Synthetic oligonucleotide
acuuccauguggcuaaauc

SEQ ID NO: 2279624 - RNA, 19 nt, Artificial Sequence
  Description of Artificial Sequence: Synthetic oligonucleotide
uuggcuaggacuuggugag

SEQ ID NO: 2279625 - RNA, 19 nt, Artificial Sequence
  Description of Artificial Sequence: Synthetic oligonucleotide
cugauacaaagcaacaaug

SEQ ID NO: 2279626 - RNA, 19 nt, Artificial Sequence
  Description of Artificial Sequence: Synthetic oligonucleotide
ucacaauguacauaucaca

SEQ ID NO: 2279627 - RNA, 19 nt, Artificial Sequence
  Description of Artificial Sequence: Synthetic oligonucleotide
cuauucaagauuucuccag

SEQ ID NO: 2279628 - RNA, 19 nt, Artificial Sequence
  Description of Artificial Sequence: Synthetic oligonucleotide
guuaaaguuauucaaagau

SEQ ID NO: 2279629 - RNA, 19 nt, Artificial Sequence
  Description of Artificial Sequence: Synthetic oligonucleotide
augagauggcacuuuagag

SEQ ID NO: 2279630 - RNA, 19 nt, Artificial Sequence
  Description of Artificial Sequence: Synthetic oligonucleotide
uucccaaacgugcucagcc

SEQ ID NO: 2279631 - RNA, 19 nt, Artificial Sequence
  Description of Artificial Sequence: Synthetic oligonucleotide
auguacauaucacaagugu

SEQ ID NO: 2279632 - RNA, 19 nt, Artificial Sequence
  Description of Artificial Sequence: Synthetic oligonucleotide
uguccuuaggcugaaaugu

SEQ ID NO: 2279633 - RNA, 19 nt, Artificial Sequence
  Description of Artificial Sequence: Synthetic oligonucleotide
acacgcuugccuaacaugc

SEQ ID NO: 2279634 - RNA, 19 nt, Artificial Sequence
  Description of Artificial Sequence: Synthetic oligonucleotide
ugggguagaaaugagacaa

SEQ ID NO: 2279635 - RNA, 19 nt, Artificial Sequence
  Description of Artificial Sequence: Synthetic oligonucleotide
agaaaugagacaagcuugg

SEQ ID NO: 2279636 - RNA, 19 nt, Artificial Sequence
  Description of Artificial Sequence: Synthetic oligonucleotide
agauuucuccagcacuggc

SEQ ID NO: 2279637 - RNA, 19 nt, Artificial Sequence
  Description of Artificial Sequence: Synthetic oligonucleotide
uacaaaugguugcuaagac

SEQ ID NO: 2279638 - RNA, 19 nt, Artificial Sequence
  Description of Artificial Sequence: Synthetic oligonucleotide
ugacacaguuuuaugaaaa

SEQ ID NO: 2279639 - RNA, 19 nt, Artificial Sequence
  Description of Artificial Sequence: Synthetic oligonucleotide
uuaggcugaaaugugcugc

SEQ ID NO: 2279640 - RNA, 19 nt, Artificial Sequence
  Description of Artificial Sequence: Synthetic oligonucleotide
gaaaugugcugcuccaagc

SEQ ID NO: 2279641 - RNA, 19 nt, Artificial Sequence
  Description of Artificial Sequence: Synthetic oligonucleotide
uaagcuauucaagauuucu

SEQ ID NO: 2279642 - RNA, 19 nt, Artificial Sequence
  Description of Artificial Sequence: Synthetic oligonucleotide
aacacgcuugccuaacaug

SEQ ID NO: 2279643 - RNA, 19 nt, Artificial Sequence
  Description of Artificial Sequence: Synthetic oligonucleotide
gaauccguuguuuggcuag

SEQ ID NO: 2279644 - RNA, 19 nt, Artificial Sequence
  Description of Artificial Sequence: Synthetic oligonucleotide
cuggcugauacaaagcaac

SEQ ID NO: 2279645 - RNA, 19 nt, Artificial Sequence
  Description of Artificial Sequence: Synthetic oligonucleotide
aauguacauaucacaagug

SEQ ID NO: 2279646 - RNA, 19 nt, Artificial Sequence
  Description of Artificial Sequence: Synthetic oligonucleotide
ugggauguuacaaaugguu

SEQ ID NO: 2279647 - RNA, 19 nt, Artificial Sequence
  Description of Artificial Sequence: Synthetic oligonucleotide
uggcuaacuuccuagaauc

SEQ ID NO: 2279648 - RNA, 19 nt, Artificial Sequence
  Description of Artificial Sequence: Synthetic oligonucleotide
acaaaugguugcuaagaca

SEQ ID NO: 2279649 - RNA, 19 nt, Artificial Sequence
  Description of Artificial Sequence: Synthetic oligonucleotide
uacauaagcuauucaagau

SEQ ID NO: 2279650 - RNA, 19 nt, Artificial Sequence
  Description of Artificial Sequence: Synthetic oligonucleotide
ugcauugugcucacauucc

SEQ ID NO: 2279651 - RNA, 19 nt, Artificial Sequence
  Description of Artificial Sequence: Synthetic oligonucleotide
uguggaagugcuugggaug

SEQ ID NO: 2279652 - RNA, 19 nt, Artificial Sequence
  Description of Artificial Sequence: Synthetic oligonucleotide
cuaaaucaauggcacaaac

SEQ ID NO: 2279653 - RNA, 19 nt, Artificial Sequence
  Description of Artificial Sequence: Synthetic oligonucleotide
acuuccuagaauccguugu

SEQ ID NO: 2279654 - RNA, 19 nt, Artificial Sequence
  Description of Artificial Sequence: Synthetic oligonucleotide
auaucaaagcugaaaaccu

SEQ ID NO: 2279655 - RNA, 19 nt, Artificial Sequence
  Description of Artificial Sequence: Synthetic oligonucleotide
uaggaaugggguagaaaug

SEQ ID NO: 2279656 - RNA, 19 nt, Artificial Sequence
  Description of Artificial Sequence: Synthetic oligonucleotide
acauaagcuauucaagauu

SEQ ID NO: 2279657 - RNA, 19 nt, Artificial Sequence
  Description of Artificial Sequence: Synthetic oligonucleotide
agccccuccagcuggaaac

SEQ ID NO: 2279658 - RNA, 19 nt, Artificial Sequence
  Description of Artificial Sequence: Synthetic oligonucleotide
acaagcuuggucucgggcu

SEQ ID NO: 2279659 - RNA, 19 nt, Artificial Sequence
  Description of Artificial Sequence: Synthetic oligonucleotide
ccuaacaugcacauggccc

SEQ ID NO: 2279660 - RNA, 19 nt, Artificial Sequence
  Description of Artificial Sequence: Synthetic oligonucleotide
aagguuaaaguuauucaaa

SEQ ID NO: 2279661 - RNA, 19 nt, Artificial Sequence
  Description of Artificial Sequence: Synthetic oligonucleotide
aacaugguccacuguguga

SEQ ID NO: 2279662 - RNA, 19 nt, Artificial Sequence
  Description of Artificial Sequence: Synthetic oligonucleotide
ggauguuacaaaugguugc

SEQ ID NO: 2279663 - RNA, 19 nt, Artificial Sequence
  Description of Artificial Sequence: Synthetic oligonucleotide
ucaccgucuuauuugguca

SEQ ID NO: 2279664 - RNA, 19 nt, Artificial Sequence
  Description of Artificial Sequence: Synthetic oligonucleotide
aaacucugggaagaggcug

SEQ ID NO: 2279665 - RNA, 19 nt, Artificial Sequence
  Description of Artificial Sequence: Synthetic oligonucleotide
acagcaguguccuuaggcu

SEQ ID NO: 2279666 - RNA, 19 nt, Artificial Sequence
  Description of Artificial Sequence: Synthetic oligonucleotide
uuggcuaacuuccuagaau

SEQ ID NO: 2279667 - RNA, 19 nt, Artificial Sequence
  Description of Artificial Sequence: Synthetic oligonucleotide
uccuagaauccguuguuug

SEQ ID NO: 2279668 - RNA, 19 nt, Artificial Sequence
  Description of Artificial Sequence: Synthetic oligonucleotide
cuagaauccguuguuuggc

SEQ ID NO: 2279669 - RNA, 19 nt, Artificial Sequence
  Description of Artificial Sequence: Synthetic oligonucleotide
aaacgugcucagccccucc

SEQ ID NO: 2279670 - RNA, 19 nt, Artificial Sequence
  Description of Artificial Sequence: Synthetic oligonucleotide
aacuuccuagaauccguug

SEQ ID NO: 2279671 - RNA, 19 nt, Artificial Sequence
  Description of Artificial Sequence: Synthetic oligonucleotide
cauaucacaagugugcuga

SEQ ID NO: 2279672 - RNA, 19 nt, Artificial Sequence
  Description of Artificial Sequence: Synthetic oligonucleotide
ucucagacggcucaccguc

SEQ ID NO: 2279673 - RNA, 19 nt, Artificial Sequence
  Description of Artificial Sequence: Synthetic oligonucleotide
cuuauuuggucacaucuga

SEQ ID NO: 2279674 - RNA, 19 nt, Artificial Sequence
  Description of Artificial Sequence: Synthetic oligonucleotide
uuuuggcuaacuuccuaga

SEQ ID NO: 2279675 - RNA, 19 nt, Artificial Sequence
  Description of Artificial Sequence: Synthetic oligonucleotide
cacacaguaacacgcuugc

SEQ ID NO: 2279676 - RNA, 19 nt, Artificial Sequence
  Description of Artificial Sequence: Synthetic oligonucleotide
acaugguccacugugugag

SEQ ID NO: 2279677 - RNA, 19 nt, Artificial Sequence
  Description of Artificial Sequence: Synthetic oligonucleotide
ucccucaguuucaagguca

SEQ ID NO: 2279678 - RNA, 19 nt, Artificial Sequence
  Description of Artificial Sequence: Synthetic oligonucleotide
aaaggggacggaugagaug

SEQ ID NO: 2279679 - RNA, 19 nt, Artificial Sequence
  Description of Artificial Sequence: Synthetic oligonucleotide
aggaaugggguagaaauga

SEQ ID NO: 2279680 - RNA, 19 nt, Artificial Sequence
  Description of Artificial Sequence: Synthetic oligonucleotide
cugucagcgaggcaggccc

SEQ ID NO: 2279681 - RNA, 19 nt, Artificial Sequence
  Description of Artificial Sequence: Synthetic oligonucleotide
uuagagacagcagcuucag

SEQ ID NO: 2279682 - RNA, 19 nt, Artificial Sequence
  Description of Artificial Sequence: Synthetic oligonucleotide
ucacauucccuuaaauauu

SEQ ID NO: 2279683 - RNA, 19 nt, Artificial Sequence
  Description of Artificial Sequence: Synthetic oligonucleotide
uacauaucacaagugugcu

SEQ ID NO: 2279684 - RNA, 19 nt, Artificial Sequence
  Description of Artificial Sequence: Synthetic oligonucleotide
acgcuugccuaacaugcac

SEQ ID NO: 2279685 - RNA, 19 nt, Artificial Sequence
  Description of Artificial Sequence: Synthetic oligonucleotide
caagcuguggaagugcuug

SEQ ID NO: 2279686 - RNA, 19 nt, Artificial Sequence
  Description of Artificial Sequence: Synthetic oligonucleotide
gcacuuuagagacagcagc

SEQ ID NO: 2279687 - RNA, 19 nt, Artificial Sequence
  Description of Artificial Sequence: Synthetic oligonucleotide
ugagacaagcuuggucucg

SEQ ID NO: 2279688 - RNA, 19 nt, Artificial Sequence
  Description of Artificial Sequence: Synthetic oligonucleotide
guagaaaugagacaagcuu

SEQ ID NO: 2279689 - RNA, 19 nt, Artificial Sequence
  Description of Artificial Sequence: Synthetic oligonucleotide
aguguccuuaggcugaaau

SEQ ID NO: 2279690 - RNA, 19 nt, Artificial Sequence
  Description of Artificial Sequence: Synthetic oligonucleotide
aguaacacgcuugccuaac

SEQ ID NO: 2279691 - RNA, 19 nt, Artificial Sequence
  Description of Artificial Sequence: Synthetic oligonucleotide
ucuauggagacagcagugu

SEQ ID NO: 2279692 - RNA, 19 nt, Artificial Sequence
  Description of Artificial Sequence: Synthetic oligonucleotide
augagacaagcuuggucuc

SEQ ID NO: 2279693 - RNA, 19 nt, Artificial Sequence
  Description of Artificial Sequence: Synthetic oligonucleotide
ucccuuaaauauuguuccc

SEQ ID NO: 2279694 - RNA, 19 nt, Artificial Sequence
  Description of Artificial Sequence: Synthetic oligonucleotide
gacggaugagaugacuucc

SEQ ID NO: 2279695 - RNA, 19 nt, Artificial Sequence
  Description of Artificial Sequence: Synthetic oligonucleotide
ggcaacaugguccacugug

SEQ ID NO: 2279696 - RNA, 19 nt, Artificial Sequence
  Description of Artificial Sequence: Synthetic oligonucleotide
cuuggucucgggcugggcc

SEQ ID NO: 2279697 - RNA, 19 nt, Artificial Sequence
  Description of Artificial Sequence: Synthetic oligonucleotide
uaguuuacauaagcuauuc

SEQ ID NO: 2279698 - RNA, 19 nt, Artificial Sequence
  Description of Artificial Sequence: Synthetic oligonucleotide
uccuguguuccucuaugga

SEQ ID NO: 2279699 - RNA, 19 nt, Artificial Sequence
  Description of Artificial Sequence: Synthetic oligonucleotide
aagugcuugggauguuaca

SEQ ID NO: 2279700 - RNA, 19 nt, Artificial Sequence
  Description of Artificial Sequence: Synthetic oligonucleotide
acaguaacacgcuugccua

SEQ ID NO: 2279701 - RNA, 19 nt, Artificial Sequence
  Description of Artificial Sequence: Synthetic oligonucleotide
uggcugauacaaagcaaca

SEQ ID NO: 2279702 - RNA, 19 nt, Artificial Sequence
  Description of Artificial Sequence: Synthetic oligonucleotide
aauccguuguuuggcuagg

SEQ ID NO: 2279703 - RNA, 19 nt, Artificial Sequence
  Description of Artificial Sequence: Synthetic oligonucleotide
guggcuaaaucaauggcac

SEQ ID NO: 2279704 - RNA, 19 nt, Artificial Sequence
  Description of Artificial Sequence: Synthetic oligonucleotide
cuuaggcugaaaugugcug

SEQ ID NO: 2279705 - RNA, 19 nt, Artificial Sequence
  Description of Artificial Sequence: Synthetic oligonucleotide
acauaucacaagugugcug

SEQ ID NO: 2279706 - RNA, 19 nt, Artificial Sequence
  Description of Artificial Sequence: Synthetic oligonucleotide
cucaccgucuuauuugguc

SEQ ID NO: 2279707 - RNA, 19 nt, Artificial Sequence
  Description of Artificial Sequence: Synthetic oligonucleotide
aaagaucaucccucaguuu

SEQ ID NO: 2279708 - RNA, 19 nt, Artificial Sequence
  Description of Artificial Sequence: Synthetic oligonucleotide
agacacugcauugugcuca

SEQ ID NO: 2279709 - RNA, 19 nt, Artificial Sequence
  Description of Artificial Sequence: Synthetic oligonucleotide
agugcuugggauguuacaa

SEQ ID NO: 2279710 - RNA, 19 nt, Artificial Sequence
  Description of Artificial Sequence: Synthetic oligonucleotide
ugcuugggauguuacaaau

SEQ ID NO: 2279711 - RNA, 19 nt, Artificial Sequence
  Description of Artificial Sequence: Synthetic oligonucleotide
agcuucaggaaaggggacg

SEQ ID NO: 2279712 - RNA, 19 nt, Artificial Sequence
  Description of Artificial Sequence: Synthetic oligonucleotide
ccuagaauccguuguuugg

SEQ ID NO: 2279713 - RNA, 19 nt, Artificial Sequence
  Description of Artificial Sequence: Synthetic oligonucleotide
caaagcugaaaaccuucac

SEQ ID NO: 2279714 - RNA, 19 nt, Artificial Sequence
  Description of Artificial Sequence: Synthetic oligonucleotide
gcuaacuuccuagaauccg

SEQ ID NO: 2279715 - RNA, 19 nt, Artificial Sequence
  Description of Artificial Sequence: Synthetic oligonucleotide
uagaauccguuguuuggcu

SEQ ID NO: 2279716 - RNA, 19 nt, Artificial Sequence
  Description of Artificial Sequence: Synthetic oligonucleotide
uaucacaagugugcugaag

SEQ ID NO: 2279717 - RNA, 19 nt, Artificial Sequence
  Description of Artificial Sequence: Synthetic oligonucleotide
cuguguuccucuauggaga

SEQ ID NO: 2279718 - RNA, 19 nt, Artificial Sequence
  Description of Artificial Sequence: Synthetic oligonucleotide
uccaagcuguggaagugcu

SEQ ID NO: 2279719 - RNA, 19 nt, Artificial Sequence
  Description of Artificial Sequence: Synthetic oligonucleotide
gguuaaaguuauucaaaga

SEQ ID NO: 2279720 - RNA, 19 nt, Artificial Sequence
  Description of Artificial Sequence: Synthetic oligonucleotide
uaacacgcuugccuaacau

SEQ ID NO: 2279721 - RNA, 19 nt, Artificial Sequence
  Description of Artificial Sequence: Synthetic oligonucleotide
ugugagcaguuaggaaugg

SEQ ID NO: 2279722 - RNA, 19 nt, Artificial Sequence
  Description of Artificial Sequence: Synthetic oligonucleotide
guccuguguuccucuaugg

SEQ ID NO: 2279723 - RNA, 19 nt, Artificial Sequence
  Description of Artificial Sequence: Synthetic oligonucleotide
aguaaucacaauguacaua

SEQ ID NO: 2279724 - RNA, 19 nt, Artificial Sequence
  Description of Artificial Sequence: Synthetic oligonucleotide
agguuucccacaggggagc

SEQ ID NO: 2279725 - RNA, 19 nt, Artificial Sequence
  Description of Artificial Sequence: Synthetic oligonucleotide
cauaagcuauucaagauuu

SEQ ID NO: 2279726 - RNA, 19 nt, Artificial Sequence
  Description of Artificial Sequence: Synthetic oligonucleotide
gaaugggguagaaaugaga

SEQ ID NO: 2279727 - RNA, 19 nt, Artificial Sequence
  Description of Artificial Sequence: Synthetic oligonucleotide
ucccaaacgugcucagccc

SEQ ID NO: 2279728 - RNA, 19 nt, Artificial Sequence
  Description of Artificial Sequence: Synthetic oligonucleotide
uaggcugaaaugugcugcu

SEQ ID NO: 2279729 - RNA, 19 nt, Artificial Sequence
  Description of Artificial Sequence: Synthetic oligonucleotide
uccguuguuuggcuaggac

SEQ ID NO: 2279730 - RNA, 19 nt, Artificial Sequence
  Description of Artificial Sequence: Synthetic oligonucleotide
aaucaauggcacaaacaua

SEQ ID NO: 2279731 - RNA, 19 nt, Artificial Sequence
  Description of Artificial Sequence: Synthetic oligonucleotide
gauguuacaaaugguugcu

SEQ ID NO: 2279732 - RNA, 19 nt, Artificial Sequence
  Description of Artificial Sequence: Synthetic oligonucleotide
guuuggcuaggacuuggug

SEQ ID NO: 2279733 - RNA, 19 nt, Artificial Sequence
  Description of Artificial Sequence: Synthetic oligonucleotide
gaugacuuccauguggcua

SEQ ID NO: 2279734 - RNA, 19 nt, Artificial Sequence
  Description of Artificial Sequence: Synthetic oligonucleotide
auaagcuauucaagauuuc

SEQ ID NO: 2279735 - RNA, 19 nt, Artificial Sequence
  Description of Artificial Sequence: Synthetic oligonucleotide
gcaguuaggaaugggguag

SEQ ID NO: 2279736 - RNA, 19 nt, Artificial Sequence
  Description of Artificial Sequence: Synthetic oligonucleotide
aacgugcucagccccucca

SEQ ID NO: 2279737 - RNA, 19 nt, Artificial Sequence
  Description of Artificial Sequence: Synthetic oligonucleotide
uuggucucgggcugggcca

SEQ ID NO: 2279738 - RNA, 19 nt, Artificial Sequence
  Description of Artificial Sequence: Synthetic oligonucleotide
gggauguuacaaaugguug

SEQ ID NO: 2279739 - RNA, 19 nt, Artificial Sequence
  Description of Artificial Sequence: Synthetic oligonucleotide
augagaugacuuccaugug

SEQ ID NO: 2279740 - RNA, 19 nt, Artificial Sequence
  Description of Artificial Sequence: Synthetic oligonucleotide
aggcccaguccuguguucc

SEQ ID NO: 2279741 - RNA, 19 nt, Artificial Sequence
  Description of Artificial Sequence: Synthetic oligonucleotide
gugugagcaguuaggaaug

SEQ ID NO: 2279742 - RNA, 19 nt, Artificial Sequence
  Description of Artificial Sequence: Synthetic oligonucleotide
uaacuuccuagaauccguu

SEQ ID NO: 2279743 - RNA, 19 nt, Artificial Sequence
  Description of Artificial Sequence: Synthetic oligonucleotide
uggcuaaaucaauggcaca

SEQ ID NO: 2279744 - RNA, 19 nt, Artificial Sequence
  Description of Artificial Sequence: Synthetic oligonucleotide
cuaacaugcacauggcccu

SEQ ID NO: 2279745 - RNA, 19 nt, Artificial Sequence
  Description of Artificial Sequence: Synthetic oligonucleotide
acaaagcaacaaugagaug

SEQ ID NO: 2279746 - RNA, 19 nt, Artificial Sequence
  Description of Artificial Sequence: Synthetic oligonucleotide
ggcucaccgucuuauuugg

SEQ ID NO: 2279747 - RNA, 19 nt, Artificial Sequence
  Description of Artificial Sequence: Synthetic oligonucleotide
ggaugagaugacuuccaug

SEQ ID NO: 2279748 - RNA, 19 nt, Artificial Sequence
  Description of Artificial Sequence: Synthetic oligonucleotide
ggcugacacaguuuuauga

SEQ ID NO: 2279749 - RNA, 19 nt, Artificial Sequence
  Description of Artificial Sequence: Synthetic oligonucleotide
cagcaguguccuuaggcug

SEQ ID NO: 2279750 - RNA, 19 nt, Artificial Sequence
  Description of Artificial Sequence: Synthetic oligonucleotide
aguuucaaggucagcuuca

SEQ ID NO: 2279751 - RNA, 19 nt, Artificial Sequence
  Description of Artificial Sequence: Synthetic oligonucleotide
ggguagaaaugagacaagc

SEQ ID NO: 2279752 - RNA, 19 nt, Artificial Sequence
  Description of Artificial Sequence: Synthetic oligonucleotide
ugguccacugugugagcag

SEQ ID NO: 2279753 - RNA, 19 nt, Artificial Sequence
  Description of Artificial Sequence: Synthetic oligonucleotide
gcuauucaagauuucucca

SEQ ID NO: 2279754 - RNA, 19 nt, Artificial Sequence
  Description of Artificial Sequence: Synthetic oligonucleotide
cuaacuuccuagaauccgu

SEQ ID NO: 2279755 - RNA, 19 nt, Artificial Sequence
  Description of Artificial Sequence: Synthetic oligonucleotide
agcccggcagaguauuuug

SEQ ID NO: 2279756 - RNA, 19 nt, Artificial Sequence
  Description of Artificial Sequence: Synthetic oligonucleotide
agcuguggaagugcuuggg

SEQ ID NO: 2279757 - RNA, 19 nt, Artificial Sequence
  Description of Artificial Sequence: Synthetic oligonucleotide
aagcaacaaugagauggca

SEQ ID NO: 2279758 - RNA, 19 nt, Artificial Sequence
  Description of Artificial Sequence: Synthetic oligonucleotide
aggcugacacaguuuuaug

SEQ ID NO: 2279759 - RNA, 19 nt, Artificial Sequence
  Description of Artificial Sequence: Synthetic oligonucleotide
cacaggggagccugccugg

SEQ ID NO: 2279760 - RNA, 19 nt, Artificial Sequence
  Description of Artificial Sequence: Synthetic oligonucleotide
gcugacacaguuuuaugaa

SEQ ID NO: 2279761 - RNA, 19 nt, Artificial Sequence
  Description of Artificial Sequence: Synthetic oligonucleotide
ggcugggccacacaguaac

SEQ ID NO: 2279762 - RNA, 19 nt, Artificial Sequence
  Description of Artificial Sequence: Synthetic oligonucleotide
gcauugugcucacauuccc

SEQ ID NO: 2279763 - RNA, 19 nt, Artificial Sequence
  Description of Artificial Sequence: Synthetic oligonucleotide
cugacacaguuuuaugaaa

SEQ ID NO: 2279764 - RNA, 19 nt, Artificial Sequence
  Description of Artificial Sequence: Synthetic oligonucleotide
gaggagaacugagguuucc

SEQ ID NO: 2279765 - RNA, 19 nt, Artificial Sequence
  Description of Artificial Sequence: Synthetic oligonucleotide
caccgucuuauuuggucac

SEQ ID NO: 2279766 - RNA, 19 nt, Artificial Sequence
  Description of Artificial Sequence: Synthetic oligonucleotide
agaauccguuguuuggcua

SEQ ID NO: 2279767 - RNA, 19 nt, Artificial Sequence
  Description of Artificial Sequence: Synthetic oligonucleotide
aaagcagccuucaguuaaa

SEQ ID NO: 2279768 - RNA, 19 nt, Artificial Sequence
  Description of Artificial Sequence: Synthetic oligonucleotide
cacuuuagagacagcagcu

SEQ ID NO: 2279769 - RNA, 19 nt, Artificial Sequence
  Description of Artificial Sequence: Synthetic oligonucleotide
ggggcuaaggggcaacaug

SEQ ID NO: 2279770 - RNA, 19 nt, Artificial Sequence
  Description of Artificial Sequence: Synthetic oligonucleotide
ggcuaaaucaauggcacaa

SEQ ID NO: 2279771 - RNA, 19 nt, Artificial Sequence
  Description of Artificial Sequence: Synthetic oligonucleotide
agcaguguccuuaggcuga

SEQ ID NO: 2279772 - RNA, 19 nt, Artificial Sequence
  Description of Artificial Sequence: Synthetic oligonucleotide
augguccacugugugagca

SEQ ID NO: 2279773 - RNA, 19 nt, Artificial Sequence
  Description of Artificial Sequence: Synthetic oligonucleotide
guccuuaggcugaaaugug

SEQ ID NO: 2279774 - RNA, 19 nt, Artificial Sequence
  Description of Artificial Sequence: Synthetic oligonucleotide
gcucacauucccuuaaaua

SEQ ID NO: 2279775 - RNA, 19 nt, Artificial Sequence
  Description of Artificial Sequence: Synthetic oligonucleotide
agaucaucccucaguuuca

SEQ ID NO: 2279776 - RNA, 19 nt, Artificial Sequence
  Description of Artificial Sequence: Synthetic oligonucleotide
acgugcucagccccuccag

SEQ ID NO: 2279777 - RNA, 19 nt, Artificial Sequence
  Description of Artificial Sequence: Synthetic oligonucleotide
uugugcucacauucccuua

SEQ ID NO: 2279778 - RNA, 19 nt, Artificial Sequence
  Description of Artificial Sequence: Synthetic oligonucleotide
guaacacgcuugccuaaca

SEQ ID NO: 2279779 - RNA, 19 nt, Artificial Sequence
  Description of Artificial Sequence: Synthetic oligonucleotide
gugaggagaacugagguuu

SEQ ID NO: 2279780 - RNA, 19 nt, Artificial Sequence
  Description of Artificial Sequence: Synthetic oligonucleotide
ccacacaguaacacgcuug

SEQ ID NO: 2279781 - RNA, 19 nt, Artificial Sequence
  Description of Artificial Sequence: Synthetic oligonucleotide
caugguccacugugugagc

SEQ ID NO: 2279782 - RNA, 19 nt, Artificial Sequence
  Description of Artificial Sequence: Synthetic oligonucleotide
ggaaugggguagaaaugag

SEQ ID NO: 2279783 - RNA, 19 nt, Artificial Sequence
  Description of Artificial Sequence: Synthetic oligonucleotide
uuccuagaauccguuguuu

SEQ ID NO: 2279784 - RNA, 19 nt, Artificial Sequence
  Description of Artificial Sequence: Synthetic oligonucleotide
gccuaacaugcacauggcc

SEQ ID NO: 2279785 - RNA, 19 nt, Artificial Sequence
  Description of Artificial Sequence: Synthetic oligonucleotide
gggccacacaguaacacgc

SEQ ID NO: 2279786 - RNA, 19 nt, Artificial Sequence
  Description of Artificial Sequence: Synthetic oligonucleotide
ucagacggcucaccgucuu

SEQ ID NO: 2279787 - RNA, 19 nt, Artificial Sequence
  Description of Artificial Sequence: Synthetic oligonucleotide
ggacggaugagaugacuuc

SEQ ID NO: 2279788 - RNA, 19 nt, Artificial Sequence
  Description of Artificial Sequence: Synthetic oligonucleotide
auaucacaagugugcugaa

SEQ ID NO: 2279789 - RNA, 19 nt, Artificial Sequence
  Description of Artificial Sequence: Synthetic oligonucleotide
cuugccuaacaugcacaug

SEQ ID NO: 2279790 - RNA, 19 nt, Artificial Sequence
  Description of Artificial Sequence: Synthetic oligonucleotide
guuaggaaugggguagaaa

SEQ ID NO: 2279791 - RNA, 19 nt, Artificial Sequence
  Description of Artificial Sequence: Synthetic oligonucleotide
uggccucaggcggagucag

SEQ ID NO: 2279792 - RNA, 19 nt, Artificial Sequence
  Description of Artificial Sequence: Synthetic oligonucleotide
caucccucaguuucaaggu

SEQ ID NO: 2279793 - RNA, 19 nt, Artificial Sequence
  Description of Artificial Sequence: Synthetic oligonucleotide
ugucagcgaggcaggccca

SEQ ID NO: 2279794 - RNA, 19 nt, Artificial Sequence
  Description of Artificial Sequence: Synthetic oligonucleotide
gcuaaggggcaacaugguc

SEQ ID NO: 2279795 - RNA, 19 nt, Artificial Sequence
  Description of Artificial Sequence: Synthetic oligonucleotide
ccuuaaauauuguucccaa

SEQ ID NO: 2279796 - RNA, 19 nt, Artificial Sequence
  Description of Artificial Sequence: Synthetic oligonucleotide
cugcuccaagcuguggaag

SEQ ID NO: 2279797 - RNA, 19 nt, Artificial Sequence
  Description of Artificial Sequence: Synthetic oligonucleotide
cccaaacgugcucagcccc

SEQ ID NO: 2279798 - RNA, 19 nt, Artificial Sequence
  Description of Artificial Sequence: Synthetic oligonucleotide
ggcuaacuuccuagaaucc

SEQ ID NO: 2279799 - RNA, 19 nt, Artificial Sequence
  Description of Artificial Sequence: Synthetic oligonucleotide
gaaaggggacggaugagau

SEQ ID NO: 2279800 - RNA, 19 nt, Artificial Sequence
  Description of Artificial Sequence: Synthetic oligonucleotide
cauucccuuaaauauuguu

SEQ ID NO: 2279801 - RNA, 19 nt, Artificial Sequence
  Description of Artificial Sequence: Synthetic oligonucleotide
gguagaaaugagacaagcu

SEQ ID NO: 2279802 - RNA, 19 nt, Artificial Sequence
  Description of Artificial Sequence: Synthetic oligonucleotide
cauugugcucacauucccu

SEQ ID NO: 2279803 - RNA, 19 nt, Artificial Sequence
  Description of Artificial Sequence: Synthetic oligonucleotide
ucacagcccggcagaguau

SEQ ID NO: 2279804 - RNA, 19 nt, Artificial Sequence
  Description of Artificial Sequence: Synthetic oligonucleotide
gcacaaacauaauuuuccu

SEQ ID NO: 2279805 - RNA, 19 nt, Artificial Sequence
  Description of Artificial Sequence: Synthetic oligonucleotide
agacggcucaccgucuuau

SEQ ID NO: 2279806 - RNA, 19 nt, Artificial Sequence
  Description of Artificial Sequence: Synthetic oligonucleotide
acauucccuuaaauauugu

SEQ ID NO: 2279807 - RNA, 19 nt, Artificial Sequence
  Description of Artificial Sequence: Synthetic oligonucleotide
cacaaacauaauuuuccuu

SEQ ID NO: 2279808 - RNA, 19 nt, Artificial Sequence
  Description of Artificial Sequence: Synthetic oligonucleotide
gaucaucccucaguuucaa

SEQ ID NO: 2279809 - RNA, 19 nt, Artificial Sequence
  Description of Artificial Sequence: Synthetic oligonucleotide
aguuaggaaugggguagaa

SEQ ID NO: 2279810 - RNA, 19 nt, Artificial Sequence
  Description of Artificial Sequence: Synthetic oligonucleotide
cacgcuugccuaacaugca

SEQ ID NO: 2279811 - RNA, 19 nt, Artificial Sequence
  Description of Artificial Sequence: Synthetic oligonucleotide
ggggaaagcagccuucagu

SEQ ID NO: 2279812 - RNA, 19 nt, Artificial Sequence
  Description of Artificial Sequence: Synthetic oligonucleotide
cuguggaagugcuugggau

SEQ ID NO: 2279813 - RNA, 19 nt, Artificial Sequence
  Description of Artificial Sequence: Synthetic oligonucleotide
ggagacagcaguguccuua

SEQ ID NO: 2279814 - RNA, 19 nt, Artificial Sequence
  Description of Artificial Sequence: Synthetic oligonucleotide
gcuguggaagugcuuggga

SEQ ID NO: 2279815 - RNA, 19 nt, Artificial Sequence
  Description of Artificial Sequence: Synthetic oligonucleotide
ggcugauacaaagcaacaa

SEQ ID NO: 2279816 - RNA, 19 nt, Artificial Sequence
  Description of Artificial Sequence: Synthetic oligonucleotide
accgucuuauuuggucaca

SEQ ID NO: 2279817 - RNA, 19 nt, Artificial Sequence
  Description of Artificial Sequence: Synthetic oligonucleotide
agcuuggucucgggcuggg

SEQ ID NO: 2279818 - RNA, 19 nt, Artificial Sequence
  Description of Artificial Sequence: Synthetic oligonucleotide
gugucucagacggcucacc

SEQ ID NO: 2279819 - RNA, 19 nt, Artificial Sequence
  Description of Artificial Sequence: Synthetic oligonucleotide
caguaacacgcuugccuaa

SEQ ID NO: 2279820 - RNA, 19 nt, Artificial Sequence
  Description of Artificial Sequence: Synthetic oligonucleotide
cagcgaggcaggcccaguc

SEQ ID NO: 2279821 - RNA, 19 nt, Artificial Sequence
  Description of Artificial Sequence: Synthetic oligonucleotide
gggugucucagacggcuca

SEQ ID NO: 2279822 - RNA, 19 nt, Artificial Sequence
  Description of Artificial Sequence: Synthetic oligonucleotide
caaacgugcucagccccuc

SEQ ID NO: 2279823 - RNA, 19 nt, Artificial Sequence
  Description of Artificial Sequence: Synthetic oligonucleotide
cccuuaaauauuguuccca

SEQ ID NO: 2279824 - RNA, 19 nt, Artificial Sequence
  Description of Artificial Sequence: Synthetic oligonucleotide
gcuaaaucaauggcacaaa

SEQ ID NO: 2279825 - RNA, 19 nt, Artificial Sequence
  Description of Artificial Sequence: Synthetic oligonucleotide
cuuccuagaauccguuguu

SEQ ID NO: 2279826 - RNA, 19 nt, Artificial Sequence
  Description of Artificial Sequence: Synthetic oligonucleotide
gucagcgaggcaggcccag

SEQ ID NO: 2279827 - RNA, 19 nt, Artificial Sequence
  Description of Artificial Sequence: Synthetic oligonucleotide
auccguuguuuggcuagga

SEQ ID NO: 2279828 - RNA, 19 nt, Artificial Sequence
  Description of Artificial Sequence: Synthetic oligonucleotide
gucucagacggcucaccgu

SEQ ID NO: 2279829 - RNA, 19 nt, Artificial Sequence
  Description of Artificial Sequence: Synthetic oligonucleotide
agauggcacuuuagagaca

SEQ ID NO: 2279830 - RNA, 19 nt, Artificial Sequence
  Description of Artificial Sequence: Synthetic oligonucleotide
ggaaagcagccuucaguua

SEQ ID NO: 2279831 - RNA, 19 nt, Artificial Sequence
  Description of Artificial Sequence: Synthetic oligonucleotide
gcuggccucaggcggaguc

SEQ ID NO: 2279832 - RNA, 19 nt, Artificial Sequence
  Description of Artificial Sequence: Synthetic oligonucleotide
gguugcuaagacagaaagu

SEQ ID NO: 2279833 - RNA, 19 nt, Artificial Sequence
  Description of Artificial Sequence: Synthetic oligonucleotide
cugaaaugugcugcuccaa

SEQ ID NO: 2279834 - RNA, 19 nt, Artificial Sequence
  Description of Artificial Sequence: Synthetic oligonucleotide
cggcucaccgucuuauuug

SEQ ID NO: 2279835 - RNA, 19 nt, Artificial Sequence
  Description of Artificial Sequence: Synthetic oligonucleotide
gugcucacauucccuuaaa

SEQ ID NO: 2279836 - RNA, 19 nt, Artificial Sequence
  Description of Artificial Sequence: Synthetic oligonucleotide
caguuaggaaugggguaga

SEQ ID NO: 2279837 - RNA, 19 nt, Artificial Sequence
  Description of Artificial Sequence: Synthetic oligonucleotide
uggucucgggcugggccac

SEQ ID NO: 2279838 - RNA, 19 nt, Artificial Sequence
  Description of Artificial Sequence: Synthetic oligonucleotide
ccguuguuuggcuaggacu

SEQ ID NO: 2279839 - RNA, 19 nt, Artificial Sequence
  Description of Artificial Sequence: Synthetic oligonucleotide
gggucagagggaggagcgg

SEQ ID NO: 2279840 - RNA, 19 nt, Artificial Sequence
  Description of Artificial Sequence: Synthetic oligonucleotide
ccucuauggagacagcagu

SEQ ID NO: 2279841 - RNA, 19 nt, Artificial Sequence
  Description of Artificial Sequence: Synthetic oligonucleotide
gcugucagcgaggcaggcc

SEQ ID NO: 2279842 - RNA, 19 nt, Artificial Sequence
  Description of Artificial Sequence: Synthetic oligonucleotide
ugacuuccauguggcuaaa

SEQ ID NO: 2279843 - RNA, 19 nt, Artificial Sequence
  Description of Artificial Sequence: Synthetic oligonucleotide
ggugucucagacggcucac

SEQ ID NO: 2279844 - RNA, 19 nt, Artificial Sequence
  Description of Artificial Sequence: Synthetic oligonucleotide
cuucaggaaaggggacgga

SEQ ID NO: 2279845 - RNA, 19 nt, Artificial Sequence
  Description of Artificial Sequence: Synthetic oligonucleotide
cucugcuggcugucagcga

SEQ ID NO: 2279846 - RNA, 19 nt, Artificial Sequence
  Description of Artificial Sequence: Synthetic oligonucleotide
caagugugcugaagacacu

SEQ ID NO: 2279847 - RNA, 19 nt, Artificial Sequence
  Description of Artificial Sequence: Synthetic oligonucleotide
agaggcugacacaguuuua

SEQ ID NO: 2279848 - RNA, 19 nt, Artificial Sequence
  Description of Artificial Sequence: Synthetic oligonucleotide
cgucuuauuuggucacauc

SEQ ID NO: 2279849 - RNA, 19 nt, Artificial Sequence
  Description of Artificial Sequence: Synthetic oligonucleotide
agccugccugggcucugcu

SEQ ID NO: 2279850 - RNA, 19 nt, Artificial Sequence
  Description of Artificial Sequence: Synthetic oligonucleotide
cacauggcccugggaggug

SEQ ID NO: 2279851 - RNA, 19 nt, Artificial Sequence
  Description of Artificial Sequence: Synthetic oligonucleotide
gcaacaugguccacugugu

SEQ ID NO: 2279852 - RNA, 19 nt, Artificial Sequence
  Description of Artificial Sequence: Synthetic oligonucleotide
cucagacggcucaccgucu

SEQ ID NO: 2279853 - RNA, 19 nt, Artificial Sequence
  Description of Artificial Sequence: Synthetic oligonucleotide
ccucaguuucaaggucagc

SEQ ID NO: 2279854 - RNA, 19 nt, Artificial Sequence
  Description of Artificial Sequence: Synthetic oligonucleotide
gggacggaugagaugacuu

SEQ ID NO: 2279855 - RNA, 19 nt, Artificial Sequence
  Description of Artificial Sequence: Synthetic oligonucleotide
gcgaggcaggcccaguccu

SEQ ID NO: 2279856 - RNA, 19 nt, Artificial Sequence
  Description of Artificial Sequence: Synthetic oligonucleotide
cagacggcucaccgucuua

SEQ ID NO: 2279857 - RNA, 19 nt, Artificial Sequence
  Description of Artificial Sequence: Synthetic oligonucleotide
guuucccacaggggagccu

SEQ ID NO: 2279858 - RNA, 19 nt, Artificial Sequence
  Description of Artificial Sequence: Synthetic oligonucleotide
acagcccggcagaguauuu

SEQ ID NO: 2279859 - RNA, 19 nt, Artificial Sequence
  Description of Artificial Sequence: Synthetic oligonucleotide
caguccuguguuccucuau

SEQ ID NO: 2279860 - RNA, 19 nt, Artificial Sequence
  Description of Artificial Sequence: Synthetic oligonucleotide
ccaaacgugcucagccccu

SEQ ID NO: 2279861 - RNA, 19 nt, Artificial Sequence
  Description of Artificial Sequence: Synthetic oligonucleotide
ggcuaaggggcaacauggu

SEQ ID NO: 2279862 - RNA, 19 nt, Artificial Sequence
  Description of Artificial Sequence: Synthetic oligonucleotide
ccggcagaguauuuuguuu

SEQ ID NO: 2279863 - RNA, 19 nt, Artificial Sequence
  Description of Artificial Sequence: Synthetic oligonucleotide
ggggacggaugagaugacu

SEQ ID NO: 2279864 - RNA, 19 nt, Artificial Sequence
  Description of Artificial Sequence: Synthetic oligonucleotide
gcccaguccuguguuccuc

SEQ ID NO: 2279865 - RNA, 19 nt, Artificial Sequence
  Description of Artificial Sequence: Synthetic oligonucleotide
cacagcccggcagaguauu

SEQ ID NO: 2279866 - RNA, 19 nt, Artificial Sequence
  Description of Artificial Sequence: Synthetic oligonucleotide
gcaguguccuuaggcugaa

SEQ ID NO: 2279867 - RNA, 19 nt, Artificial Sequence
  Description of Artificial Sequence: Synthetic oligonucleotide
ggcccaguccuguguuccu

SEQ ID NO: 2279868 - RNA, 19 nt, Artificial Sequence
  Description of Artificial Sequence: Synthetic oligonucleotide
cccggcagaguauuuuguu

SEQ ID NO: 2279869 - RNA, 19 nt, Artificial Sequence
  Description of Artificial Sequence: Synthetic oligonucleotide
gggcaacaugguccacugu

SEQ ID NO: 2279870 - RNA, 19 nt, Artificial Sequence
  Description of Artificial Sequence: Synthetic oligonucleotide
cagcccggcagaguauuuu

SEQ ID NO: 2279871 - RNA, 19 nt, Artificial Sequence
  Description of Artificial Sequence: Synthetic oligonucleotide
gcccggcagaguauuuugu

SEQ ID NO: 2279872 - RNA, 19 nt, Artificial Sequence
  Description of Artificial Sequence: Synthetic oligonucleotide
caguguccuuaggcugaaa

SEQ ID NO: 2279873 - RNA, 19 nt, Artificial Sequence
  Description of Artificial Sequence: Synthetic oligonucleotide
ccucaggcggagucagggu

SEQ ID NO: 2279874 - RNA, 19 nt, Artificial Sequence
  Description of Artificial Sequence: Synthetic oligonucleotide
ccgucuuauuuggucacau

SEQ ID NO: 2279875 - RNA, 19 nt, Artificial Sequence
  Description of Artificial Sequence: Synthetic oligonucleotide
gcucaccgucuuauuuggu

SEQ ID NO: 2279876 - RNA, 19 nt, Artificial Sequence
  Description of Artificial Sequence: Synthetic oligonucleotide
ccaagcuguggaagugcuu

SEQ ID NO: 2279877 - RNA, 19 nt, Artificial Sequence
  Description of Artificial Sequence: Synthetic oligonucleotide
ggucucgggcugggccaca

SEQ ID NO: 2279878 - RNA, 19 nt, Artificial Sequence
  Description of Artificial Sequence: Synthetic oligonucleotide
auaaaggugaccuuguucc

SEQ ID NO: 2279879 - RNA, 19 nt, Artificial Sequence
  Description of Artificial Sequence: Synthetic oligonucleotide
aacuuauaaccauacuugg

SEQ ID NO: 2279880 - RNA, 19 nt, Artificial Sequence
  Description of Artificial Sequence: Synthetic oligonucleotide
aacauugugucaucuuuac

SEQ ID NO: 2279881 - RNA, 19 nt, Artificial Sequence
  Description of Artificial Sequence: Synthetic oligonucleotide
uccacaaugcacuugagga

SEQ ID NO: 2279882 - RNA, 19 nt, Artificial Sequence
  Description of Artificial Sequence: Synthetic oligonucleotide
caacuuauaaccauacuug

SEQ ID NO: 2279883 - RNA, 19 nt, Artificial Sequence
  Description of Artificial Sequence: Synthetic oligonucleotide
aggauuuccacucuuuuag

SEQ ID NO: 2279884 - RNA, 19 nt, Artificial Sequence
  Description of Artificial Sequence: Synthetic oligonucleotide
auuuccacucuuuuaggcg

SEQ ID NO: 2279885 - RNA, 19 nt, Artificial Sequence
  Description of Artificial Sequence: Synthetic oligonucleotide
gcagacacaacuuauaacc

SEQ ID NO: 2279886 - RNA, 19 nt, Artificial Sequence
  Description of Artificial Sequence: Synthetic oligonucleotide
acaacuuauaaccauacuu

SEQ ID NO: 2279887 - RNA, 19 nt, Artificial Sequence
  Description of Artificial Sequence: Synthetic oligonucleotide
cucaugaucacgaugaaca

SEQ ID NO: 2279888 - RNA, 19 nt, Artificial Sequence
  Description of Artificial Sequence: Synthetic oligonucleotide
augaucacgaugaacaggg

SEQ ID NO: 2279889 - RNA, 19 nt, Artificial Sequence
  Description of Artificial Sequence: Synthetic oligonucleotide
gaaggugccaucaaaggag

SEQ ID NO: 2279890 - RNA, 19 nt, Artificial Sequence
  Description of Artificial Sequence: Synthetic oligonucleotide
aucaauggcgugcucacgg

SEQ ID NO: 2279891 - RNA, 19 nt, Artificial Sequence
  Description of Artificial Sequence: Synthetic oligonucleotide
ucauacucuccucucauga

SEQ ID NO: 2279892 - RNA, 19 nt, Artificial Sequence
  Description of Artificial Sequence: Synthetic oligonucleotide
gauuuccacucuuuuaggc

SEQ ID NO: 2279893 - RNA, 19 nt, Artificial Sequence
  Description of Artificial Sequence: Synthetic oligonucleotide
uacuuggcuguguagaaag

SEQ ID NO: 2279894 - RNA, 19 nt, Artificial Sequence
  Description of Artificial Sequence: Synthetic oligonucleotide
agugccaugggcguggagc

SEQ ID NO: 2279895 - RNA, 19 nt, Artificial Sequence
  Description of Artificial Sequence: Synthetic oligonucleotide
uuuccacucuuuuaggcgc

SEQ ID NO: 2279896 - RNA, 19 nt, Artificial Sequence
  Description of Artificial Sequence: Synthetic oligonucleotide
uuuacguaggcgugcuugg

SEQ ID NO: 2279897 - RNA, 19 nt, Artificial Sequence
  Description of Artificial Sequence: Synthetic oligonucleotide
acuuauaaccauacuuggc

SEQ ID NO: 2279898 - RNA, 19 nt, Artificial Sequence
  Description of Artificial Sequence: Synthetic oligonucleotide
auacucuccucucaugauc

SEQ ID NO: 2279899 - RNA, 19 nt, Artificial Sequence
  Description of Artificial Sequence: Synthetic oligonucleotide
uacaaccgcagacacaacu

SEQ ID NO: 2279900 - RNA, 19 nt, Artificial Sequence
  Description of Artificial Sequence: Synthetic oligonucleotide
ucaucuuuacguaggcgug

SEQ ID NO: 2279901 - RNA, 19 nt, Artificial Sequence
  Description of Artificial Sequence: Synthetic oligonucleotide
acauuggugaucuuccaca

SEQ ID NO: 2279902 - RNA, 19 nt, Artificial Sequence
  Description of Artificial Sequence: Synthetic oligonucleotide
auugacucgugacaccguc

SEQ ID NO: 2279903 - RNA, 19 nt, Artificial Sequence
  Description of Artificial Sequence: Synthetic oligonucleotide
aacacucgcagcuucuccu

SEQ ID NO: 2279904 - RNA, 19 nt, Artificial Sequence
  Description of Artificial Sequence: Synthetic oligonucleotide
uauaaccauacuuggcugu

SEQ ID NO: 2279905 - RNA, 19 nt, Artificial Sequence
  Description of Artificial Sequence: Synthetic oligonucleotide
acacauugacucgugacac

SEQ ID NO: 2279906 - RNA, 19 nt, Artificial Sequence
  Description of Artificial Sequence: Synthetic oligonucleotide
ucuuccacaggaaggugcc

SEQ ID NO: 2279907 - RNA, 19 nt, Artificial Sequence
  Description of Artificial Sequence: Synthetic oligonucleotide
agcagcauaaaggugaccu

SEQ ID NO: 2279908 - RNA, 19 nt, Artificial Sequence
  Description of Artificial Sequence: Synthetic oligonucleotide
guagcagucuaccuccagg

SEQ ID NO: 2279909 - RNA, 19 nt, Artificial Sequence
  Description of Artificial Sequence: Synthetic oligonucleotide
acauugacucgugacaccg

SEQ ID NO: 2279910 - RNA, 19 nt, Artificial Sequence
  Description of Artificial Sequence: Synthetic oligonucleotide
ucaugaucacgaugaacag

SEQ ID NO: 2279911 - RNA, 19 nt, Artificial Sequence
  Description of Artificial Sequence: Synthetic oligonucleotide
uuuuaggcgccccagcauc

SEQ ID NO: 2279912 - RNA, 19 nt, Artificial Sequence
  Description of Artificial Sequence: Synthetic oligonucleotide
aggagagcaucauacucuc

SEQ ID NO: 2279913 - RNA, 19 nt, Artificial Sequence
  Description of Artificial Sequence: Synthetic oligonucleotide
cuuauaaccauacuuggcu

SEQ ID NO: 2279914 - RNA, 19 nt, Artificial Sequence
  Description of Artificial Sequence: Synthetic oligonucleotide
cauugugucaucuuuacgu

SEQ ID NO: 2279915 - RNA, 19 nt, Artificial Sequence
  Description of Artificial Sequence: Synthetic oligonucleotide
caacaauguucucaaacac

SEQ ID NO: 2279916 - RNA, 19 nt, Artificial Sequence
  Description of Artificial Sequence: Synthetic oligonucleotide
ugaucuuccacaggaaggu

SEQ ID NO: 2279917 - RNA, 19 nt, Artificial Sequence
  Description of Artificial Sequence: Synthetic oligonucleotide
ccugaaggcaucaauggcg

SEQ ID NO: 2279918 - RNA, 19 nt, Artificial Sequence
  Description of Artificial Sequence: Synthetic oligonucleotide
acauugugucaucuuuacg

SEQ ID NO: 2279919 - RNA, 19 nt, Artificial Sequence
  Description of Artificial Sequence: Synthetic oligonucleotide
cauaaaggugaccuuguuc

SEQ ID NO: 2279920 - RNA, 19 nt, Artificial Sequence
  Description of Artificial Sequence: Synthetic oligonucleotide
gacaggugggucuucuugc

SEQ ID NO: 2279921 - RNA, 19 nt, Artificial Sequence
  Description of Artificial Sequence: Synthetic oligonucleotide
ugacucgugacaccgucug

SEQ ID NO: 2279922 - RNA, 19 nt, Artificial Sequence
  Description of Artificial Sequence: Synthetic oligonucleotide
aaggauuuccacucuuuua

SEQ ID NO: 2279923 - RNA, 19 nt, Artificial Sequence
  Description of Artificial Sequence: Synthetic oligonucleotide
aaaggaggccuccuccaug

SEQ ID NO: 2279924 - RNA, 19 nt, Artificial Sequence
  Description of Artificial Sequence: Synthetic oligonucleotide
ucagguacaaccgcagaca

SEQ ID NO: 2279925 - RNA, 19 nt, Artificial Sequence
  Description of Artificial Sequence: Synthetic oligonucleotide
acacaacuuauaaccauac

SEQ ID NO: 2279926 - RNA, 19 nt, Artificial Sequence
  Description of Artificial Sequence: Synthetic oligonucleotide
uugaggaacauugugucau

SEQ ID NO: 2279927 - RNA, 19 nt, Artificial Sequence
  Description of Artificial Sequence: Synthetic oligonucleotide
acucccuaagcacuggugu

SEQ ID NO: 2279928 - RNA, 19 nt, Artificial Sequence
  Description of Artificial Sequence: Synthetic oligonucleotide
ucaggaugagcucucgguc

SEQ ID NO: 2279929 - RNA, 19 nt, Artificial Sequence
  Description of Artificial Sequence: Synthetic oligonucleotide
ucacgaugaacagggacag

SEQ ID NO: 2279930 - RNA, 19 nt, Artificial Sequence
  Description of Artificial Sequence: Synthetic oligonucleotide
caugaucacgaugaacagg

SEQ ID NO: 2279931 - RNA, 19 nt, Artificial Sequence
  Description of Artificial Sequence: Synthetic oligonucleotide
aggcaggagagcaucauac

SEQ ID NO: 2279932 - RNA, 19 nt, Artificial Sequence
  Description of Artificial Sequence: Synthetic oligonucleotide
cauuggugaucuuccacag

SEQ ID NO: 2279933 - RNA, 19 nt, Artificial Sequence
  Description of Artificial Sequence: Synthetic oligonucleotide
cauucagguacaaccgcag

SEQ ID NO: 2279934 - RNA, 19 nt, Artificial Sequence
  Description of Artificial Sequence: Synthetic oligonucleotide
aaggugaccuuguuccgga

SEQ ID NO: 2279935 - RNA, 19 nt, Artificial Sequence
  Description of Artificial Sequence: Synthetic oligonucleotide
gacauuggugaucuuccac

SEQ ID NO: 2279936 - RNA, 19 nt, Artificial Sequence
  Description of Artificial Sequence: Synthetic oligonucleotide
cuuuacguaggcgugcuug

SEQ ID NO: 2279937 - RNA, 19 nt, Artificial Sequence
  Description of Artificial Sequence: Synthetic oligonucleotide
aucacgaugaacagggaca

SEQ ID NO: 2279938 - RNA, 19 nt, Artificial Sequence
  Description of Artificial Sequence: Synthetic oligonucleotide
uaggugagaggccugggaa

SEQ ID NO: 2279939 - RNA, 19 nt, Artificial Sequence
  Description of Artificial Sequence: Synthetic oligonucleotide
acauuggucucacucugug

SEQ ID NO: 2279940 - RNA, 19 nt, Artificial Sequence
  Description of Artificial Sequence: Synthetic oligonucleotide
cacaaugcacuugaggaac

SEQ ID NO: 2279941 - RNA, 19 nt, Artificial Sequence
  Description of Artificial Sequence: Synthetic oligonucleotide
ugcacuugaggaacauugu

SEQ ID NO: 2279942 - RNA, 19 nt, Artificial Sequence
  Description of Artificial Sequence: Synthetic oligonucleotide
aauggcgugcucacgguug

SEQ ID NO: 2279943 - RNA, 19 nt, Artificial Sequence
  Description of Artificial Sequence: Synthetic oligonucleotide
agacacaacuuauaaccau

SEQ ID NO: 2279944 - RNA, 19 nt, Artificial Sequence
  Description of Artificial Sequence: Synthetic oligonucleotide
gugaccuuguuccggaaug

SEQ ID NO: 2279945 - RNA, 19 nt, Artificial Sequence
  Description of Artificial Sequence: Synthetic oligonucleotide
cauuggucucacucugugg

SEQ ID NO: 2279946 - RNA, 19 nt, Artificial Sequence
  Description of Artificial Sequence: Synthetic oligonucleotide
gucaucuuuacguaggcgu

SEQ ID NO: 2279947 - RNA, 19 nt, Artificial Sequence
  Description of Artificial Sequence: Synthetic oligonucleotide
cagucuaccuccagguccc

SEQ ID NO: 2279948 - RNA, 19 nt, Artificial Sequence
  Description of Artificial Sequence: Synthetic oligonucleotide
auugugucaucuuuacgua

SEQ ID NO: 2279949 - RNA, 19 nt, Artificial Sequence
  Description of Artificial Sequence: Synthetic oligonucleotide
ugaccuuguuccggaaugg

SEQ ID NO: 2279950 - RNA, 19 nt, Artificial Sequence
  Description of Artificial Sequence: Synthetic oligonucleotide
aucagguguaggugagagg

SEQ ID NO: 2279951 - RNA, 19 nt, Artificial Sequence
  Description of Artificial Sequence: Synthetic oligonucleotide
uuuaggcgccccagcauca

SEQ ID NO: 2279952 - RNA, 19 nt, Artificial Sequence
  Description of Artificial Sequence: Synthetic oligonucleotide
aaccauacuuggcugugua

SEQ ID NO: 2279953 - RNA, 19 nt, Artificial Sequence
  Description of Artificial Sequence: Synthetic oligonucleotide
aggugagaggccugggaag

SEQ ID NO: 2279954 - RNA, 19 nt, Artificial Sequence
  Description of Artificial Sequence: Synthetic oligonucleotide
caucagguguaggugagag

SEQ ID NO: 2279955 - RNA, 19 nt, Artificial Sequence
  Description of Artificial Sequence: Synthetic oligonucleotide
cacacauugacucgugaca

SEQ ID NO: 2279956 - RNA, 19 nt, Artificial Sequence
  Description of Artificial Sequence: Synthetic oligonucleotide
gcagucuaccuccaggucc

SEQ ID NO: 2279957 - RNA, 19 nt, Artificial Sequence
  Description of Artificial Sequence: Synthetic oligonucleotide
ugcucaagcuugcccagga

SEQ ID NO: 2279958 - RNA, 19 nt, Artificial Sequence
  Description of Artificial Sequence: Synthetic oligonucleotide
gaauggccaaggcaggaga

SEQ ID NO: 2279959 - RNA, 19 nt, Artificial Sequence
  Description of Artificial Sequence: Synthetic oligonucleotide
accauacuuggcuguguag

SEQ ID NO: 2279960 - RNA, 19 nt, Artificial Sequence
  Description of Artificial Sequence: Synthetic oligonucleotide
aggugggucuucuugccug

SEQ ID NO: 2279961 - RNA, 19 nt, Artificial Sequence
  Description of Artificial Sequence: Synthetic oligonucleotide
uuguugaggacagcaacaa

SEQ ID NO: 2279962 - RNA, 19 nt, Artificial Sequence
  Description of Artificial Sequence: Synthetic oligonucleotide
cagcauaaaggugaccuug

SEQ ID NO: 2279963 - RNA, 19 nt, Artificial Sequence
  Description of Artificial Sequence: Synthetic oligonucleotide
ucucaugaucacgaugaac

SEQ ID NO: 2279964 - RNA, 19 nt, Artificial Sequence
  Description of Artificial Sequence: Synthetic oligonucleotide
agcagucuaccuccagguc

SEQ ID NO: 2279965 - RNA, 19 nt, Artificial Sequence
  Description of Artificial Sequence: Synthetic oligonucleotide
auaaccauacuuggcugug

SEQ ID NO: 2279966 - RNA, 19 nt, Artificial Sequence
  Description of Artificial Sequence: Synthetic oligonucleotide
cauccuggcucucacagca

SEQ ID NO: 2279967 - RNA, 19 nt, Artificial Sequence
  Description of Artificial Sequence: Synthetic oligonucleotide
uacguaggcgugcuugggu

SEQ ID NO: 2279968 - RNA, 19 nt, Artificial Sequence
  Description of Artificial Sequence: Synthetic oligonucleotide
acguaggcgugcuugggug

SEQ ID NO: 2279969 - RNA, 19 nt, Artificial Sequence
  Description of Artificial Sequence: Synthetic oligonucleotide
cucugguggauggaggcgg

SEQ ID NO: 2279970 - RNA, 19 nt, Artificial Sequence
  Description of Artificial Sequence: Synthetic oligonucleotide
acaccgucuggugacauug

SEQ ID NO: 2279971 - RNA, 19 nt, Artificial Sequence
  Description of Artificial Sequence: Synthetic oligonucleotide
cuuucaggaggugccacag

SEQ ID NO: 2279972 - RNA, 19 nt, Artificial Sequence
  Description of Artificial Sequence: Synthetic oligonucleotide
ucgugacaccgucugguga

SEQ ID NO: 2279973 - RNA, 19 nt, Artificial Sequence
  Description of Artificial Sequence: Synthetic oligonucleotide
uuacguaggcgugcuuggg

SEQ ID NO: 2279974 - RNA, 19 nt, Artificial Sequence
  Description of Artificial Sequence: Synthetic oligonucleotide
acaggaaggugccaucaaa

SEQ ID NO: 2279975 - RNA, 19 nt, Artificial Sequence
  Description of Artificial Sequence: Synthetic oligonucleotide
cacauugacucgugacacc

SEQ ID NO: 2279976 - RNA, 19 nt, Artificial Sequence
  Description of Artificial Sequence: Synthetic oligonucleotide
cuucuugccugagccaucc

SEQ ID NO: 2279977 - RNA, 19 nt, Artificial Sequence
  Description of Artificial Sequence: Synthetic oligonucleotide
ucuggugacauuggugauc

SEQ ID NO: 2279978 - RNA, 19 nt, Artificial Sequence
  Description of Artificial Sequence: Synthetic oligonucleotide
uugacucgugacaccgucu

SEQ ID NO: 2279979 - RNA, 19 nt, Artificial Sequence
  Description of Artificial Sequence: Synthetic oligonucleotide
caucuuuacguaggcgugc

SEQ ID NO: 2279980 - RNA, 19 nt, Artificial Sequence
  Description of Artificial Sequence: Synthetic oligonucleotide
cagguacaaccgcagacac

SEQ ID NO: 2279981 - RNA, 19 nt, Artificial Sequence
  Description of Artificial Sequence: Synthetic oligonucleotide
ggcucucacagcaaggugc

SEQ ID NO: 2279982 - RNA, 19 nt, Artificial Sequence
  Description of Artificial Sequence: Synthetic oligonucleotide
gacucgugacaccgucugg

SEQ ID NO: 2279983 - RNA, 19 nt, Artificial Sequence
  Description of Artificial Sequence: Synthetic oligonucleotide
uguccacaaugcacuugag

SEQ ID NO: 2279984 - RNA, 19 nt, Artificial Sequence
  Description of Artificial Sequence: Synthetic oligonucleotide
cucuuuuaggcgccccagc

SEQ ID NO: 2279985 - RNA, 19 nt, Artificial Sequence
  Description of Artificial Sequence: Synthetic oligonucleotide
aggugggacgccucuaccu

SEQ ID NO: 2279986 - RNA, 19 nt, Artificial Sequence
  Description of Artificial Sequence: Synthetic oligonucleotide
ggucaagcagcauaaaggu

SEQ ID NO: 2279987 - RNA, 19 nt, Artificial Sequence
  Description of Artificial Sequence: Synthetic oligonucleotide
cugcaacucugacagguuc

SEQ ID NO: 2279988 - RNA, 19 nt, Artificial Sequence
  Description of Artificial Sequence: Synthetic oligonucleotide
acucgugacaccgucuggu

SEQ ID NO: 2279989 - RNA, 19 nt, Artificial Sequence
  Description of Artificial Sequence: Synthetic oligonucleotide
ugaggaacauugugucauc

SEQ ID NO: 2279990 - RNA, 19 nt, Artificial Sequence
  Description of Artificial Sequence: Synthetic oligonucleotide
acucuuuuaggcgccccag

SEQ ID NO: 2279991 - RNA, 19 nt, Artificial Sequence
  Description of Artificial Sequence: Synthetic oligonucleotide
gugccaugggcguggagcc

SEQ ID NO: 2279992 - RNA, 19 nt, Artificial Sequence
  Description of Artificial Sequence: Synthetic oligonucleotide
aggaggccgagcucagguc

SEQ ID NO: 2279993 - RNA, 19 nt, Artificial Sequence
  Description of Artificial Sequence: Synthetic oligonucleotide
cacuugaggaacauugugu

SEQ ID NO: 2279994 - RNA, 19 nt, Artificial Sequence
  Description of Artificial Sequence: Synthetic oligonucleotide
cuccaugagucgcaggcuc

SEQ ID NO: 2279995 - RNA, 19 nt, Artificial Sequence
  Description of Artificial Sequence: Synthetic oligonucleotide
gagucgcaggcucugcuca

SEQ ID NO: 2279996 - RNA, 19 nt, Artificial Sequence
  Description of Artificial Sequence: Synthetic oligonucleotide
guagaaagcuggagagaag

SEQ ID NO: 2279997 - RNA, 19 nt, Artificial Sequence
  Description of Artificial Sequence: Synthetic oligonucleotide
ugagucgcaggcucugcuc

SEQ ID NO: 2279998 - RNA, 19 nt, Artificial Sequence
  Description of Artificial Sequence: Synthetic oligonucleotide
ugaucacgaugaacaggga

SEQ ID NO: 2279999 - RNA, 19 nt, Artificial Sequence
  Description of Artificial Sequence: Synthetic oligonucleotide
gucaagcagcauaaaggug

SEQ ID NO: 2280000 - RNA, 19 nt, Artificial Sequence
  Description of Artificial Sequence: Synthetic oligonucleotide
gaacauugugucaucuuua

SEQ ID NO: 2280001 - RNA, 19 nt, Artificial Sequence
  Description of Artificial Sequence: Synthetic oligonucleotide
ccccauucagguacaaccg

SEQ ID NO: 2280002 - RNA, 19 nt, Artificial Sequence
  Description of Artificial Sequence: Synthetic oligonucleotide
augagucgcaggcucugcu

SEQ ID NO: 2280003 - RNA, 19 nt, Artificial Sequence
  Description of Artificial Sequence: Synthetic oligonucleotide
uaggcgccccagcaucagg

SEQ ID NO: 2280004 - RNA, 19 nt, Artificial Sequence
  Description of Artificial Sequence: Synthetic oligonucleotide
ucgcaggcucugcucaagc

SEQ ID NO: 2280005 - RNA, 19 nt, Artificial Sequence
  Description of Artificial Sequence: Synthetic oligonucleotide
cucccuaagcacugguguc

SEQ ID NO: 2280006 - RNA, 19 nt, Artificial Sequence
  Description of Artificial Sequence: Synthetic oligonucleotide
ucucuuucaggaggugcca

SEQ ID NO: 2280007 - RNA, 19 nt, Artificial Sequence
  Description of Artificial Sequence: Synthetic oligonucleotide
ugguggauggaggcgggcc

SEQ ID NO: 2280008 - RNA, 19 nt, Artificial Sequence
  Description of Artificial Sequence: Synthetic oligonucleotide
agcauaaaggugaccuugu

SEQ ID NO: 2280009 - RNA, 19 nt, Artificial Sequence
  Description of Artificial Sequence: Synthetic oligonucleotide
gcaggagagcaucauacuc

SEQ ID NO: 2280010 - RNA, 19 nt, Artificial Sequence
  Description of Artificial Sequence: Synthetic oligonucleotide
aggaacauugugucaucuu

SEQ ID NO: 2280011 - RNA, 19 nt, Artificial Sequence
  Description of Artificial Sequence: Synthetic oligonucleotide
ucacgguuguucuggucaa

SEQ ID NO: 2280012 - RNA, 19 nt, Artificial Sequence
  Description of Artificial Sequence: Synthetic oligonucleotide
caggagagcaucauacucu

SEQ ID NO: 2280013 - RNA, 19 nt, Artificial Sequence
  Description of Artificial Sequence: Synthetic oligonucleotide
auguucucaaacacucgca

SEQ ID NO: 2280014 - RNA, 19 nt, Artificial Sequence
  Description of Artificial Sequence: Synthetic oligonucleotide
ccgguagcagucuaccucc

SEQ ID NO: 2280015 - RNA, 19 nt, Artificial Sequence
  Description of Artificial Sequence: Synthetic oligonucleotide
guaggugagaggccuggga

SEQ ID NO: 2280016 - RNA, 19 nt, Artificial Sequence
  Description of Artificial Sequence: Synthetic oligonucleotide
ugccacacauugacucgug

SEQ ID NO: 2280017 - RNA, 19 nt, Artificial Sequence
  Description of Artificial Sequence: Synthetic oligonucleotide
cagguguaggugagaggcc

SEQ ID NO: 2280018 - RNA, 19 nt, Artificial Sequence
  Description of Artificial Sequence: Synthetic oligonucleotide
aaccgcagacacaacuuau

SEQ ID NO: 2280019 - RNA, 19 nt, Artificial Sequence
  Description of Artificial Sequence: Synthetic oligonucleotide
agcaucagguguaggugag

SEQ ID NO: 2280020 - RNA, 19 nt, Artificial Sequence
  Description of Artificial Sequence: Synthetic oligonucleotide
gagaagaggcuggcugucc

SEQ ID NO: 2280021 - RNA, 19 nt, Artificial Sequence
  Description of Artificial Sequence: Synthetic oligonucleotide
cuugcccaggaccugaucu

SEQ ID NO: 2280022 - RNA, 19 nt, Artificial Sequence
  Description of Artificial Sequence: Synthetic oligonucleotide
gaugagcucucgguccagc

SEQ ID NO: 2280023 - RNA, 19 nt, Artificial Sequence
  Description of Artificial Sequence: Synthetic oligonucleotide
ugcuuccacagcugccuga

SEQ ID NO: 2280024 - RNA, 19 nt, Artificial Sequence
  Description of Artificial Sequence: Synthetic oligonucleotide
cucgugacaccgucuggug

SEQ ID NO: 2280025 - RNA, 19 nt, Artificial Sequence
  Description of Artificial Sequence: Synthetic oligonucleotide
accgucuggugacauuggu

SEQ ID NO: 2280026 - RNA, 19 nt, Artificial Sequence
  Description of Artificial Sequence: Synthetic oligonucleotide
ccugccacacauugacucg

SEQ ID NO: 2280027 - RNA, 19 nt, Artificial Sequence
  Description of Artificial Sequence: Synthetic oligonucleotide
aucuuuacguaggcgugcu

SEQ ID NO: 2280028 - RNA, 19 nt, Artificial Sequence
  Description of Artificial Sequence: Synthetic oligonucleotide
ugcccgguagcagucuacc

SEQ ID NO: 2280029 - RNA, 19 nt, Artificial Sequence
  Description of Artificial Sequence: Synthetic oligonucleotide
cuaagcacugguguccaca

SEQ ID NO: 2280030 - RNA, 19 nt, Artificial Sequence
  Description of Artificial Sequence: Synthetic oligonucleotide
gagcaucauacucuccucu

SEQ ID NO: 2280031 - RNA, 19 nt, Artificial Sequence
  Description of Artificial Sequence: Synthetic oligonucleotide
uaaccauacuuggcugugu

SEQ ID NO: 2280032 - RNA, 19 nt, Artificial Sequence
  Description of Artificial Sequence: Synthetic oligonucleotide
uccacaggaaggugccauc

SEQ ID NO: 2280033 - RNA, 19 nt, Artificial Sequence
  Description of Artificial Sequence: Synthetic oligonucleotide
gugggacgccucuaccucc

SEQ ID NO: 2280034 - RNA, 19 nt, Artificial Sequence
  Description of Artificial Sequence: Synthetic oligonucleotide
caucaauggcgugcucacg

SEQ ID NO: 2280035 - RNA, 19 nt, Artificial Sequence
  Description of Artificial Sequence: Synthetic oligonucleotide
ccacacauugacucgugac

SEQ ID NO: 2280036 - RNA, 19 nt, Artificial Sequence
  Description of Artificial Sequence: Synthetic oligonucleotide
agccacuggccacauuggu

SEQ ID NO: 2280037 - RNA, 19 nt, Artificial Sequence
  Description of Artificial Sequence: Synthetic oligonucleotide
gccugaaggcaucaauggc

SEQ ID NO: 2280038 - RNA, 19 nt, Artificial Sequence
  Description of Artificial Sequence: Synthetic oligonucleotide
gggcguggagcccagguug

SEQ ID NO: 2280039 - RNA, 19 nt, Artificial Sequence
  Description of Artificial Sequence: Synthetic oligonucleotide
cugaaggcaucaauggcgu

SEQ ID NO: 2280040 - RNA, 19 nt, Artificial Sequence
  Description of Artificial Sequence: Synthetic oligonucleotide
caccgucuggugacauugg

SEQ ID NO: 2280041 - RNA, 19 nt, Artificial Sequence
  Description of Artificial Sequence: Synthetic oligonucleotide
gacgccucuaccuccuugu

SEQ ID NO: 2280042 - RNA, 19 nt, Artificial Sequence
  Description of Artificial Sequence: Synthetic oligonucleotide
auggcgugcucacgguugu

SEQ ID NO: 2280043 - RNA, 19 nt, Artificial Sequence
  Description of Artificial Sequence: Synthetic oligonucleotide
uuaggcgccccagcaucag

SEQ ID NO: 2280044 - RNA, 19 nt, Artificial Sequence
  Description of Artificial Sequence: Synthetic oligonucleotide
acaaccgcagacacaacuu

SEQ ID NO: 2280045 - RNA, 19 nt, Artificial Sequence
  Description of Artificial Sequence: Synthetic oligonucleotide
auacuuggcuguguagaaa

SEQ ID NO: 2280046 - RNA, 19 nt, Artificial Sequence
  Description of Artificial Sequence: Synthetic oligonucleotide
ggaacauugugucaucuuu

SEQ ID NO: 2280047 - RNA, 19 nt, Artificial Sequence
  Description of Artificial Sequence: Synthetic oligonucleotide
ugccaggugggacgccucu

SEQ ID NO: 2280048 - RNA, 19 nt, Artificial Sequence
  Description of Artificial Sequence: Synthetic oligonucleotide
agugccaggugggacgccu

SEQ ID NO: 2280049 - RNA, 19 nt, Artificial Sequence
  Description of Artificial Sequence: Synthetic oligonucleotide
ggaauggccaaggcaggag

SEQ ID NO: 2280050 - RNA, 19 nt, Artificial Sequence
  Description of Artificial Sequence: Synthetic oligonucleotide
cuuguuccggaauggccaa

SEQ ID NO: 2280051 - RNA, 19 nt, Artificial Sequence
  Description of Artificial Sequence: Synthetic oligonucleotide
ggaggccgagcucagguca

SEQ ID NO: 2280052 - RNA, 19 nt, Artificial Sequence
  Description of Artificial Sequence: Synthetic oligonucleotide
cccauucagguacaaccgc

SEQ ID NO: 2280053 - RNA, 19 nt, Artificial Sequence
  Description of Artificial Sequence: Synthetic oligonucleotide
caugagucgcaggcucugc

SEQ ID NO: 2280054 - RNA, 19 nt, Artificial Sequence
  Description of Artificial Sequence: Synthetic oligonucleotide
gcaucauacucuccucuca

SEQ ID NO: 2280055 - RNA, 19 nt, Artificial Sequence
  Description of Artificial Sequence: Synthetic oligonucleotide
cuaccuccuuguugaggac

SEQ ID NO: 2280056 - RNA, 19 nt, Artificial Sequence
  Description of Artificial Sequence: Synthetic oligonucleotide
gaggcuggcuguccugcca

SEQ ID NO: 2280057 - RNA, 19 nt, Artificial Sequence
  Description of Artificial Sequence: Synthetic oligonucleotide
gaggccgagcucaggucag

SEQ ID NO: 2280058 - RNA, 19 nt, Artificial Sequence
  Description of Artificial Sequence: Synthetic oligonucleotide
gaagaagagugggcagcca

SEQ ID NO: 2280059 - RNA, 19 nt, Artificial Sequence
  Description of Artificial Sequence: Synthetic oligonucleotide
cugcaacuccaccacccuc

SEQ ID NO: 2280060 - RNA, 19 nt, Artificial Sequence
  Description of Artificial Sequence: Synthetic oligonucleotide
ucuuuacguaggcgugcuu

SEQ ID NO: 2280061 - RNA, 19 nt, Artificial Sequence
  Description of Artificial Sequence: Synthetic oligonucleotide
caagcucaggaugagcucu

SEQ ID NO: 2280062 - RNA, 19 nt, Artificial Sequence
  Description of Artificial Sequence: Synthetic oligonucleotide
cuggugacauuggugaucu

SEQ ID NO: 2280063 - RNA, 19 nt, Artificial Sequence
  Description of Artificial Sequence: Synthetic oligonucleotide
gaggaacauugugucaucu

SEQ ID NO: 2280064 - RNA, 19 nt, Artificial Sequence
  Description of Artificial Sequence: Synthetic oligonucleotide
gcucucacagcaaggugcc

SEQ ID NO: 2280065 - RNA, 19 nt, Artificial Sequence
  Description of Artificial Sequence: Synthetic oligonucleotide
cgugacaccgucuggugac

SEQ ID NO: 2280066 - RNA, 19 nt, Artificial Sequence
  Description of Artificial Sequence: Synthetic oligonucleotide
cugcucaagcuugcccagg

SEQ ID NO: 2280067 - RNA, 19 nt, Artificial Sequence
  Description of Artificial Sequence: Synthetic oligonucleotide
cacgaugaacagggacagg

SEQ ID NO: 2280068 - RNA, 19 nt, Artificial Sequence
  Description of Artificial Sequence: Synthetic oligonucleotide
caaggugcccgguagcagu

SEQ ID NO: 2280069 - RNA, 19 nt, Artificial Sequence
  Description of Artificial Sequence: Synthetic oligonucleotide
ccauucagguacaaccgca

SEQ ID NO: 2280070 - RNA, 19 nt, Artificial Sequence
  Description of Artificial Sequence: Synthetic oligonucleotide
aggcgugcuugggugacug

SEQ ID NO: 2280071 - RNA, 19 nt, Artificial Sequence
  Description of Artificial Sequence: Synthetic oligonucleotide
caacucugacagguuccgc

SEQ ID NO: 2280072 - RNA, 19 nt, Artificial Sequence
  Description of Artificial Sequence: Synthetic oligonucleotide
cccgguagcagucuaccuc

SEQ ID NO: 2280073 - RNA, 19 nt, Artificial Sequence
  Description of Artificial Sequence: Synthetic oligonucleotide
acuggccacauuggucuca

SEQ ID NO: 2280074 - RNA, 19 nt, Artificial Sequence
  Description of Artificial Sequence: Synthetic oligonucleotide
cgcagacacaacuuauaac

SEQ ID NO: 2280075 - RNA, 19 nt, Artificial Sequence
  Description of Artificial Sequence: Synthetic oligonucleotide
guaggcgugcuugggugac

SEQ ID NO: 2280076 - RNA, 19 nt, Artificial Sequence
  Description of Artificial Sequence: Synthetic oligonucleotide
gguggauggaggcgggcca

SEQ ID NO: 2280077 - RNA, 19 nt, Artificial Sequence
  Description of Artificial Sequence: Synthetic oligonucleotide
gguguccacaaugcacuug

SEQ ID NO: 2280078 - RNA, 19 nt, Artificial Sequence
  Description of Artificial Sequence: Synthetic oligonucleotide
ccgucuggugacauuggug

SEQ ID NO: 2280079 - RNA, 19 nt, Artificial Sequence
  Description of Artificial Sequence: Synthetic oligonucleotide
gcgggccagugccaggugg

SEQ ID NO: 2280080 - RNA, 19 nt, Artificial Sequence
  Description of Artificial Sequence: Synthetic oligonucleotide
caucauacucuccucucau

SEQ ID NO: 2280081 - RNA, 19 nt, Artificial Sequence
  Description of Artificial Sequence: Synthetic oligonucleotide
agucgcaggcucugcucaa

SEQ ID NO: 2280082 - RNA, 19 nt, Artificial Sequence
  Description of Artificial Sequence: Synthetic oligonucleotide
agguacaaccgcagacaca

SEQ ID NO: 2280083 - RNA, 19 nt, Artificial Sequence
  Description of Artificial Sequence: Synthetic oligonucleotide
aggucaggccugaaggcau

SEQ ID NO: 2280084 - RNA, 19 nt, Artificial Sequence
  Description of Artificial Sequence: Synthetic oligonucleotide
ggucucacucuguggccgc

SEQ ID NO: 2280085 - RNA, 19 nt, Artificial Sequence
  Description of Artificial Sequence: Synthetic oligonucleotide
gcucugguggauggaggcg

SEQ ID NO: 2280086 - RNA, 19 nt, Artificial Sequence
  Description of Artificial Sequence: Synthetic oligonucleotide
ccggaauggccaaggcagg

SEQ ID NO: 2280087 - RNA, 19 nt, Artificial Sequence
  Description of Artificial Sequence: Synthetic oligonucleotide
guuggagccuggcaaggau

SEQ ID NO: 2280088 - RNA, 19 nt, Artificial Sequence
  Description of Artificial Sequence: Synthetic oligonucleotide
aggcgccccagcaucaggu

SEQ ID NO: 2280089 - RNA, 19 nt, Artificial Sequence
  Description of Artificial Sequence: Synthetic oligonucleotide
gugagaggccugggaagug

SEQ ID NO: 2280090 - RNA, 19 nt, Artificial Sequence
  Description of Artificial Sequence: Synthetic oligonucleotide
cacgguuguucuggucaag

SEQ ID NO: 2280091 - RNA, 19 nt, Artificial Sequence
  Description of Artificial Sequence: Synthetic oligonucleotide
ggacgccucuaccuccuug

SEQ ID NO: 2280092 - RNA, 19 nt, Artificial Sequence
  Description of Artificial Sequence: Synthetic oligonucleotide
ugacaccgucuggugacau

SEQ ID NO: 2280093 - RNA, 19 nt, Artificial Sequence
  Description of Artificial Sequence: Synthetic oligonucleotide
ugccaugggcguggagccc

SEQ ID NO: 2280094 - RNA, 19 nt, Artificial Sequence
  Description of Artificial Sequence: Synthetic oligonucleotide
cgaugaacagggacaggug

SEQ ID NO: 2280095 - RNA, 19 nt, Artificial Sequence
  Description of Artificial Sequence: Synthetic oligonucleotide
ggugggucuucuugccuga

SEQ ID NO: 2280096 - RNA, 19 nt, Artificial Sequence
  Description of Artificial Sequence: Synthetic oligonucleotide
aggaggugccacagggccu

SEQ ID NO: 2280097 - RNA, 19 nt, Artificial Sequence
  Description of Artificial Sequence: Synthetic oligonucleotide
agccauccccauucaggua

SEQ ID NO: 2280098 - RNA, 19 nt, Artificial Sequence
  Description of Artificial Sequence: Synthetic oligonucleotide
ccacaaugcacuugaggaa

SEQ ID NO: 2280099 - RNA, 19 nt, Artificial Sequence
  Description of Artificial Sequence: Synthetic oligonucleotide
cuuuuaggcgccccagcau

SEQ ID NO: 2280100 - RNA, 19 nt, Artificial Sequence
  Description of Artificial Sequence: Synthetic oligonucleotide
cuggcucucacagcaaggu

SEQ ID NO: 2280101 - RNA, 19 nt, Artificial Sequence
  Description of Artificial Sequence: Synthetic oligonucleotide
guuccgcuccagugccaug

SEQ ID NO: 2280102 - RNA, 19 nt, Artificial Sequence
  Description of Artificial Sequence: Synthetic oligonucleotide
cacuggccacauuggucuc

SEQ ID NO: 2280103 - RNA, 19 nt, Artificial Sequence
  Description of Artificial Sequence: Synthetic oligonucleotide
gguguaggugagaggccug

SEQ ID NO: 2280104 - RNA, 19 nt, Artificial Sequence
  Description of Artificial Sequence: Synthetic oligonucleotide
cacauuggucucacucugu

SEQ ID NO: 2280105 - RNA, 19 nt, Artificial Sequence
  Description of Artificial Sequence: Synthetic oligonucleotide
gugggucuucuugccugag

SEQ ID NO: 2280106 - RNA, 19 nt, Artificial Sequence
  Description of Artificial Sequence: Synthetic oligonucleotide
ccagguccccaguugcuuc

SEQ ID NO: 2280107 - RNA, 19 nt, Artificial Sequence
  Description of Artificial Sequence: Synthetic oligonucleotide
ggaaggaggccgagcucag

SEQ ID NO: 2280108 - RNA, 19 nt, Artificial Sequence
  Description of Artificial Sequence: Synthetic oligonucleotide
ggcuguguagaaagcugga

SEQ ID NO: 2280109 - RNA, 19 nt, Artificial Sequence
  Description of Artificial Sequence: Synthetic oligonucleotide
uaggcgugcuugggugacu

SEQ ID NO: 2280110 - RNA, 19 nt, Artificial Sequence
  Description of Artificial Sequence: Synthetic oligonucleotide
cuccagugccaugggcgug

SEQ ID NO: 2280111 - RNA, 19 nt, Artificial Sequence
  Description of Artificial Sequence: Synthetic oligonucleotide
cuguggccgcuggaaggag

SEQ ID NO: 2280112 - RNA, 19 nt, Artificial Sequence
  Description of Artificial Sequence: Synthetic oligonucleotide
ccgcagacacaacuuauaa

SEQ ID NO: 2280113 - RNA, 19 nt, Artificial Sequence
  Description of Artificial Sequence: Synthetic oligonucleotide
cauugacucgugacaccgu

SEQ ID NO: 2280114 - RNA, 19 nt, Artificial Sequence
  Description of Artificial Sequence: Synthetic oligonucleotide
ggcgugcucacgguuguuc

SEQ ID NO: 2280115 - RNA, 19 nt, Artificial Sequence
  Description of Artificial Sequence: Synthetic oligonucleotide
ggcgccccagcaucaggug

SEQ ID NO: 2280116 - RNA, 19 nt, Artificial Sequence
  Description of Artificial Sequence: Synthetic oligonucleotide
acgccucuaccuccuuguu

SEQ ID NO: 2280117 - RNA, 19 nt, Artificial Sequence
  Description of Artificial Sequence: Synthetic oligonucleotide
gcgugcuugggugacugca

SEQ ID NO: 2280118 - RNA, 19 nt, Artificial Sequence
  Description of Artificial Sequence: Synthetic oligonucleotide
guacaaccgcagacacaac

SEQ ID NO: 2280119 - RNA, 19 nt, Artificial Sequence
  Description of Artificial Sequence: Synthetic oligonucleotide
caugggcguggagcccagg

SEQ ID NO: 2280120 - RNA, 19 nt, Artificial Sequence
  Description of Artificial Sequence: Synthetic oligonucleotide
caccacccucugcuccaag

SEQ ID NO: 2280121 - RNA, 19 nt, Artificial Sequence
  Description of Artificial Sequence: Synthetic oligonucleotide
gccuguucauccuggcucu

SEQ ID NO: 2280122 - RNA, 19 nt, Artificial Sequence
  Description of Artificial Sequence: Synthetic oligonucleotide
ccccaguugcuuccacagc

SEQ ID NO: 2280123 - RNA, 19 nt, Artificial Sequence
  Description of Artificial Sequence: Synthetic oligonucleotide
gggucugcugcaacuccac

SEQ ID NO: 2280124 - RNA, 19 nt, Artificial Sequence
  Description of Artificial Sequence: Synthetic oligonucleotide
caaaggaggccuccuccau

SEQ ID NO: 2280125 - RNA, 19 nt, Artificial Sequence
  Description of Artificial Sequence: Synthetic oligonucleotide
gugcccgguagcagucuac

SEQ ID NO: 2280126 - RNA, 19 nt, Artificial Sequence
  Description of Artificial Sequence: Synthetic oligonucleotide
ggaugagcucucgguccag

SEQ ID NO: 2280127 - RNA, 19 nt, Artificial Sequence
  Description of Artificial Sequence: Synthetic oligonucleotide
ccaugagucgcaggcucug

SEQ ID NO: 2280128 - RNA, 19 nt, Artificial Sequence
  Description of Artificial Sequence: Synthetic oligonucleotide
aggugcccgguagcagucu

SEQ ID NO: 2280129 - RNA, 19 nt, Artificial Sequence
  Description of Artificial Sequence: Synthetic oligonucleotide
cagugccaugggcguggag

SEQ ID NO: 2280130 - RNA, 19 nt, Artificial Sequence
  Description of Artificial Sequence: Synthetic oligonucleotide
cugccacacauugacucgu

SEQ ID NO: 2280131 - RNA, 19 nt, Artificial Sequence
  Description of Artificial Sequence: Synthetic oligonucleotide
ggcgugcuugggugacugc

SEQ ID NO: 2280132 - RNA, 19 nt, Artificial Sequence
  Description of Artificial Sequence: Synthetic oligonucleotide
ggccgagcucaggucaggc

SEQ ID NO: 2280133 - RNA, 19 nt, Artificial Sequence
  Description of Artificial Sequence: Synthetic oligonucleotide
gcuccagugccaugggcgu

SEQ ID NO: 2280134 - RNA, 19 nt, Artificial Sequence
  Description of Artificial Sequence: Synthetic oligonucleotide
ccgagcucaggucaggccu

SEQ ID NO: 2280135 - RNA, 19 nt, Artificial Sequence
  Description of Artificial Sequence: Synthetic oligonucleotide
ccuaagcacugguguccac

SEQ ID NO: 2280136 - RNA, 19 nt, Artificial Sequence
  Description of Artificial Sequence: Synthetic oligonucleotide
ggacagcaacaauguucuc

SEQ ID NO: 2280137 - RNA, 19 nt, Artificial Sequence
  Description of Artificial Sequence: Synthetic oligonucleotide
cccacucccuaagcacugg

SEQ ID NO: 2280138 - RNA, 19 nt, Artificial Sequence
  Description of Artificial Sequence: Synthetic oligonucleotide
gccacagggccuguucauc

SEQ ID NO: 2280139 - RNA, 19 nt, Artificial Sequence
  Description of Artificial Sequence: Synthetic oligonucleotide
ggccagggucugcugcaac

SEQ ID NO: 2280140 - RNA, 19 nt, Artificial Sequence
  Description of Artificial Sequence: Synthetic oligonucleotide
uggugacauuggugaucuu

SEQ ID NO: 2280141 - RNA, 19 nt, Artificial Sequence
  Description of Artificial Sequence: Synthetic oligonucleotide
cugagccaacugcuucucu

SEQ ID NO: 2280142 - RNA, 19 nt, Artificial Sequence
  Description of Artificial Sequence: Synthetic oligonucleotide
caaggcaggagagcaucau

SEQ ID NO: 2280143 - RNA, 19 nt, Artificial Sequence
  Description of Artificial Sequence: Synthetic oligonucleotide
caauggcgugcucacgguu

SEQ ID NO: 2280144 - RNA, 19 nt, Artificial Sequence
  Description of Artificial Sequence: Synthetic oligonucleotide
agguuccgcuccagugcca

SEQ ID NO: 2280145 - RNA, 19 nt, Artificial Sequence
  Description of Artificial Sequence: Synthetic oligonucleotide
ggugcccgguagcagucua

SEQ ID NO: 2280146 - RNA, 19 nt, Artificial Sequence
  Description of Artificial Sequence: Synthetic oligonucleotide
gcaaggauuuccacucuuu

SEQ ID NO: 2280147 - RNA, 19 nt, Artificial Sequence
  Description of Artificial Sequence: Synthetic oligonucleotide
gugccaggugggacgccuc

SEQ ID NO: 2280148 - RNA, 19 nt, Artificial Sequence
  Description of Artificial Sequence: Synthetic oligonucleotide
cguaggcgugcuuggguga

SEQ ID NO: 2280149 - RNA, 19 nt, Artificial Sequence
  Description of Artificial Sequence: Synthetic oligonucleotide
gccgcuggaaggaggccga

SEQ ID NO: 2280150 - RNA, 19 nt, Artificial Sequence
  Description of Artificial Sequence: Synthetic oligonucleotide
cccuaagcacuggugucca

SEQ ID NO: 2280151 - RNA, 19 nt, Artificial Sequence
  Description of Artificial Sequence: Synthetic oligonucleotide
ggcgggccagugccaggug

SEQ ID NO: 2280152 - RNA, 19 nt, Artificial Sequence
  Description of Artificial Sequence: Synthetic oligonucleotide
uggcgugcucacgguuguu

SEQ ID NO: 2280153 - RNA, 19 nt, Artificial Sequence
  Description of Artificial Sequence: Synthetic oligonucleotide
gguuccgcuccagugccau

SEQ ID NO: 2280154 - RNA, 19 nt, Artificial Sequence
  Description of Artificial Sequence: Synthetic oligonucleotide
gcgccccagcaucaggugu

SEQ ID NO: 2280155 - RNA, 19 nt, Artificial Sequence
  Description of Artificial Sequence: Synthetic oligonucleotide
cgcuggaaggaggccgagc

SEQ ID NO: 2280156 - RNA, 19 nt, Artificial Sequence
  Description of Artificial Sequence: Synthetic oligonucleotide
ccccagcaucagguguagg

SEQ ID NO: 2280157 - RNA, 19 nt, Artificial Sequence
  Description of Artificial Sequence: Synthetic oligonucleotide
gcccgguagcagucuaccu

SEQ ID NO: 2280158 - RNA, 19 nt, Artificial Sequence
  Description of Artificial Sequence: Synthetic oligonucleotide
cggaauggccaaggcagga

SEQ ID NO: 2280159 - RNA, 19 nt, Artificial Sequence
  Description of Artificial Sequence: Synthetic oligonucleotide
cgccccagcaucaggugua

SEQ ID NO: 2280160 - RNA, 19 nt, Artificial Sequence
  Description of Artificial Sequence: Synthetic oligonucleotide
ccacucccuaagcacuggu

SEQ ID NO: 2280161 - RNA, 19 nt, Artificial Sequence
  Description of Artificial Sequence: Synthetic oligonucleotide
ggagcccagguuggagccu

SEQ ID NO: 2280162 - RNA, 19 nt, Artificial Sequence
  Description of Artificial Sequence: Synthetic oligonucleotide
cgguagcagucuaccucca

SEQ ID NO: 2280163 - RNA, 19 nt, Artificial Sequence
  Description of Artificial Sequence: Synthetic oligonucleotide
gggacgccucuaccuccuu

SEQ ID NO: 2280164 - RNA, 19 nt, Artificial Sequence
  Description of Artificial Sequence: Synthetic oligonucleotide
aaugagaucaauaacuccc

SEQ ID NO: 2280165 - RNA, 19 nt, Artificial Sequence
  Description of Artificial Sequence: Synthetic oligonucleotide
aaaauagacacacacagga

SEQ ID NO: 2280166 - RNA, 19 nt, Artificial Sequence
  Description of Artificial Sequence: Synthetic oligonucleotide
aaaagauaaaccgucaaac

SEQ ID NO: 2280167 - RNA, 19 nt, Artificial Sequence
  Description of Artificial Sequence: Synthetic oligonucleotide
acaaggaaaagauaaaccg

SEQ ID NO: 2280168 - RNA, 19 nt, Artificial Sequence
  Description of Artificial Sequence: Synthetic oligonucleotide
aaagcaaauaaccaaugag

SEQ ID NO: 2280169 - RNA, 19 nt, Artificial Sequence
  Description of Artificial Sequence: Synthetic oligonucleotide
gagaaguuaggucagaggg

SEQ ID NO: 2280170 - RNA, 19 nt, Artificial Sequence
  Description of Artificial Sequence: Synthetic oligonucleotide
aaggagaacgcuuuccacc

SEQ ID NO: 2280171 - RNA, 19 nt, Artificial Sequence
  Description of Artificial Sequence: Synthetic oligonucleotide
agagggaacagucaugggc

SEQ ID NO: 2280172 - RNA, 19 nt, Artificial Sequence
  Description of Artificial Sequence: Synthetic oligonucleotide
aucaauaacucccgcaacc

SEQ ID NO: 2280173 - RNA, 19 nt, Artificial Sequence
  Description of Artificial Sequence: Synthetic oligonucleotide
aaaccgucaaacucuggcc

SEQ ID NO: 2280174 - RNA, 19 nt, Artificial Sequence
  Description of Artificial Sequence: Synthetic oligonucleotide
aacgcuuuccaccucuccc

SEQ ID NO: 2280175 - RNA, 19 nt, Artificial Sequence
  Description of Artificial Sequence: Synthetic oligonucleotide
aaccgucaaacucuggccc

SEQ ID NO: 2280176 - RNA, 19 nt, Artificial Sequence
  Description of Artificial Sequence: Synthetic oligonucleotide
aaagauaaaccgucaaacu

SEQ ID NO: 2280177 - RNA, 19 nt, Artificial Sequence
  Description of Artificial Sequence: Synthetic oligonucleotide
caaauaaccaaugagauca

SEQ ID NO: 2280178 - RNA, 19 nt, Artificial Sequence
  Description of Artificial Sequence: Synthetic oligonucleotide
ugcauauccuggcagaggg

SEQ ID NO: 2280179 - RNA, 19 nt, Artificial Sequence
  Description of Artificial Sequence: Synthetic oligonucleotide
aauagacacacacaggaaa

SEQ ID NO: 2280180 - RNA, 19 nt, Artificial Sequence
  Description of Artificial Sequence: Synthetic oligonucleotide
gaaagucuaaaccacgggc

SEQ ID NO: 2280181 - RNA, 19 nt, Artificial Sequence
  Description of Artificial Sequence: Synthetic oligonucleotide
uaaaccgucaaacucuggc

SEQ ID NO: 2280182 - RNA, 19 nt, Artificial Sequence
  Description of Artificial Sequence: Synthetic oligonucleotide
uguccugagaaccaacagg

SEQ ID NO: 2280183 - RNA, 19 nt, Artificial Sequence
  Description of Artificial Sequence: Synthetic oligonucleotide
uaaaccacgggcaggagag

SEQ ID NO: 2280184 - RNA, 19 nt, Artificial Sequence
  Description of Artificial Sequence: Synthetic oligonucleotide
ucacacuuuacacacaccu

SEQ ID NO: 2280185 - RNA, 19 nt, Artificial Sequence
  Description of Artificial Sequence: Synthetic oligonucleotide
ugauaucucuuccucaaag

SEQ ID NO: 2280186 - RNA, 19 nt, Artificial Sequence
  Description of Artificial Sequence: Synthetic oligonucleotide
aaagggauggagaaguuag

SEQ ID NO: 2280187 - RNA, 19 nt, Artificial Sequence
  Description of Artificial Sequence: Synthetic oligonucleotide
gaucucuucagagaggagg

SEQ ID NO: 2280188 - RNA, 19 nt, Artificial Sequence
  Description of Artificial Sequence: Synthetic oligonucleotide
cauggaaggaaggagaacg

SEQ ID NO: 2280189 - RNA, 19 nt, Artificial Sequence
  Description of Artificial Sequence: Synthetic oligonucleotide
uaaccaaugagaucaauaa

SEQ ID NO: 2280190 - RNA, 19 nt, Artificial Sequence
  Description of Artificial Sequence: Synthetic oligonucleotide
aagcaaauaaccaaugaga

SEQ ID NO: 2280191 - RNA, 19 nt, Artificial Sequence
  Description of Artificial Sequence: Synthetic oligonucleotide
agaggaucucuucagagag

SEQ ID NO: 2280192 - RNA, 19 nt, Artificial Sequence
  Description of Artificial Sequence: Synthetic oligonucleotide
cuucuuuagcaguugaacc

SEQ ID NO: 2280193 - RNA, 19 nt, Artificial Sequence
  Description of Artificial Sequence: Synthetic oligonucleotide
agaaacaaggaaaagauaa

SEQ ID NO: 2280194 - RNA, 19 nt, Artificial Sequence
  Description of Artificial Sequence: Synthetic oligonucleotide
acaggaaacaaaguucccc

SEQ ID NO: 2280195 - RNA, 19 nt, Artificial Sequence
  Description of Artificial Sequence: Synthetic oligonucleotide
uucuuuagcaguugaaccu

SEQ ID NO: 2280196 - RNA, 19 nt, Artificial Sequence
  Description of Artificial Sequence: Synthetic oligonucleotide
uuggguaagccauuggcag

SEQ ID NO: 2280197 - RNA, 19 nt, Artificial Sequence
  Description of Artificial Sequence: Synthetic oligonucleotide
aagucuaaaccacgggcag

SEQ ID NO: 2280198 - RNA, 19 nt, Artificial Sequence
  Description of Artificial Sequence: Synthetic oligonucleotide
ugagcucuuucccuggagg

SEQ ID NO: 2280199 - RNA, 19 nt, Artificial Sequence
  Description of Artificial Sequence: Synthetic oligonucleotide
agaaagucuaaaccacggg

SEQ ID NO: 2280200 - RNA, 19 nt, Artificial Sequence
  Description of Artificial Sequence: Synthetic oligonucleotide
accaaugagaucaauaacu

SEQ ID NO: 2280201 - RNA, 19 nt, Artificial Sequence
  Description of Artificial Sequence: Synthetic oligonucleotide
uuuacacacaccuuugcau

SEQ ID NO: 2280202 - RNA, 19 nt, Artificial Sequence
  Description of Artificial Sequence: Synthetic oligonucleotide
aaagucuaaaccacgggca

SEQ ID NO: 2280203 - RNA, 19 nt, Artificial Sequence
  Description of Artificial Sequence: Synthetic oligonucleotide
ugauccaggcucaaguucu

SEQ ID NO: 2280204 - RNA, 19 nt, Artificial Sequence
  Description of Artificial Sequence: Synthetic oligonucleotide
gagaaagucuaaaccacgg

SEQ ID NO: 2280205 - RNA, 19 nt, Artificial Sequence
  Description of Artificial Sequence: Synthetic oligonucleotide
uaaguuuccacagcacggg

SEQ ID NO: 2280206 - RNA, 19 nt, Artificial Sequence
  Description of Artificial Sequence: Synthetic oligonucleotide
ucgugaaaccaucucagga

SEQ ID NO: 2280207 - RNA, 19 nt, Artificial Sequence
  Description of Artificial Sequence: Synthetic oligonucleotide
ugagagucagcgaugcagc

SEQ ID NO: 2280208 - RNA, 19 nt, Artificial Sequence
  Description of Artificial Sequence: Synthetic oligonucleotide
ucagacaggcauaugucca

SEQ ID NO: 2280209 - RNA, 19 nt, Artificial Sequence
  Description of Artificial Sequence: Synthetic oligonucleotide
agaucaauaacucccgcaa

SEQ ID NO: 2280210 - RNA, 19 nt, Artificial Sequence
  Description of Artificial Sequence: Synthetic oligonucleotide
gaaagcaaauaaccaauga

SEQ ID NO: 2280211 - RNA, 19 nt, Artificial Sequence
  Description of Artificial Sequence: Synthetic oligonucleotide
gugacuuccaugccgaagc

SEQ ID NO: 2280212 - RNA, 19 nt, Artificial Sequence
  Description of Artificial Sequence: Synthetic oligonucleotide
gugaaaccaucucaggagg

SEQ ID NO: 2280213 - RNA, 19 nt, Artificial Sequence
  Description of Artificial Sequence: Synthetic oligonucleotide
gaaaagauaaaccgucaaa

SEQ ID NO: 2280214 - RNA, 19 nt, Artificial Sequence
  Description of Artificial Sequence: Synthetic oligonucleotide
ucccuggaggcccucaugg

SEQ ID NO: 2280215 - RNA, 19 nt, Artificial Sequence
  Description of Artificial Sequence: Synthetic oligonucleotide
aguuaggucagagggugcc

SEQ ID NO: 2280216 - RNA, 19 nt, Artificial Sequence
  Description of Artificial Sequence: Synthetic oligonucleotide
agauaaaccgucaaacucu

SEQ ID NO: 2280217 - RNA, 19 nt, Artificial Sequence
  Description of Artificial Sequence: Synthetic oligonucleotide
cuggagaaagucuaaacca

SEQ ID NO: 2280218 - RNA, 19 nt, Artificial Sequence
  Description of Artificial Sequence: Synthetic oligonucleotide
ugaaaagugggcuguggac

SEQ ID NO: 2280219 - RNA, 19 nt, Artificial Sequence
  Description of Artificial Sequence: Synthetic oligonucleotide
caguugaaccugcauaucc

SEQ ID NO: 2280220 - RNA, 19 nt, Artificial Sequence
  Description of Artificial Sequence: Synthetic oligonucleotide
gauuuagggaagaggcugg

SEQ ID NO: 2280221 - RNA, 19 nt, Artificial Sequence
  Description of Artificial Sequence: Synthetic oligonucleotide
cugagaaccaacagggcac

SEQ ID NO: 2280222 - RNA, 19 nt, Artificial Sequence
  Description of Artificial Sequence: Synthetic oligonucleotide
gagucagcgaugcagcagc

SEQ ID NO: 2280223 - RNA, 19 nt, Artificial Sequence
  Description of Artificial Sequence: Synthetic oligonucleotide
ucagcgaugcagcagcacu

SEQ ID NO: 2280224 - RNA, 19 nt, Artificial Sequence
  Description of Artificial Sequence: Synthetic oligonucleotide
ucaauaacucccgcaaccc

SEQ ID NO: 2280225 - RNA, 19 nt, Artificial Sequence
  Description of Artificial Sequence: Synthetic oligonucleotide
gaagaguagaagggguugg

SEQ ID NO: 2280226 - RNA, 19 nt, Artificial Sequence
  Description of Artificial Sequence: Synthetic oligonucleotide
ggauggagaaguuagguca

SEQ ID NO: 2280227 - RNA, 19 nt, Artificial Sequence
  Description of Artificial Sequence: Synthetic oligonucleotide
aggcauauguccaguaccc

SEQ ID NO: 2280228 - RNA, 19 nt, Artificial Sequence
  Description of Artificial Sequence: Synthetic oligonucleotide
cuggguacauggaaggaag

SEQ ID NO: 2280229 - RNA, 19 nt, Artificial Sequence
  Description of Artificial Sequence: Synthetic oligonucleotide
gaaccugagcgagagaagc

SEQ ID NO: 2280230 - RNA, 19 nt, Artificial Sequence
  Description of Artificial Sequence: Synthetic oligonucleotide
agcacucacacuuuacaca

SEQ ID NO: 2280231 - RNA, 19 nt, Artificial Sequence
  Description of Artificial Sequence: Synthetic oligonucleotide
agagagacggugaaaagug

SEQ ID NO: 2280232 - RNA, 19 nt, Artificial Sequence
  Description of Artificial Sequence: Synthetic oligonucleotide
cacucauucuaaaacaaga

SEQ ID NO: 2280233 - RNA, 19 nt, Artificial Sequence
  Description of Artificial Sequence: Synthetic oligonucleotide
uuguccugagaaccaacag

SEQ ID NO: 2280234 - RNA, 19 nt, Artificial Sequence
  Description of Artificial Sequence: Synthetic oligonucleotide
aguagaagggguuggguaa

SEQ ID NO: 2280235 - RNA, 19 nt, Artificial Sequence
  Description of Artificial Sequence: Synthetic oligonucleotide
aguucugauaucucuuccu

SEQ ID NO: 2280236 - RNA, 19 nt, Artificial Sequence
  Description of Artificial Sequence: Synthetic oligonucleotide
acacuuuacacacaccuuu

SEQ ID NO: 2280237 - RNA, 19 nt, Artificial Sequence
  Description of Artificial Sequence: Synthetic oligonucleotide
uggccugaaagcaaauaac

SEQ ID NO: 2280238 - RNA, 19 nt, Artificial Sequence
  Description of Artificial Sequence: Synthetic oligonucleotide
caggcauauguccaguacc

SEQ ID NO: 2280239 - RNA, 19 nt, Artificial Sequence
  Description of Artificial Sequence: Synthetic oligonucleotide
ugaagaguagaagggguug

SEQ ID NO: 2280240 - RNA, 19 nt, Artificial Sequence
  Description of Artificial Sequence: Synthetic oligonucleotide
cagucgucgauccagugag

SEQ ID NO: 2280241 - RNA, 19 nt, Artificial Sequence
  Description of Artificial Sequence: Synthetic oligonucleotide
aagaguagaagggguuggg

SEQ ID NO: 2280242 - RNA, 19 nt, Artificial Sequence
  Description of Artificial Sequence: Synthetic oligonucleotide
caaacucuggcccuccacc

SEQ ID NO: 2280243 - RNA, 19 nt, Artificial Sequence
  Description of Artificial Sequence: Synthetic oligonucleotide
uacauggaaggaaggagaa

SEQ ID NO: 2280244 - RNA, 19 nt, Artificial Sequence
  Description of Artificial Sequence: Synthetic oligonucleotide
uagcauguggcacaggauu

SEQ ID NO: 2280245 - RNA, 19 nt, Artificial Sequence
  Description of Artificial Sequence: Synthetic oligonucleotide
acucccgcaacccugguca

SEQ ID NO: 2280246 - RNA, 19 nt, Artificial Sequence
  Description of Artificial Sequence: Synthetic oligonucleotide
ugagaucaauaacucccgc

SEQ ID NO: 2280247 - RNA, 19 nt, Artificial Sequence
  Description of Artificial Sequence: Synthetic oligonucleotide
acagucaugggcccuuguc

SEQ ID NO: 2280248 - RNA, 19 nt, Artificial Sequence
  Description of Artificial Sequence: Synthetic oligonucleotide
gaaaagugggcuguggaca

SEQ ID NO: 2280249 - RNA, 19 nt, Artificial Sequence
  Description of Artificial Sequence: Synthetic oligonucleotide
gcuuaagaguuccaucucg

SEQ ID NO: 2280250 - RNA, 19 nt, Artificial Sequence
  Description of Artificial Sequence: Synthetic oligonucleotide
uagcaguugaaccugcaua

SEQ ID NO: 2280251 - RNA, 19 nt, Artificial Sequence
  Description of Artificial Sequence: Synthetic oligonucleotide
auggccugaaagcaaauaa

SEQ ID NO: 2280252 - RNA, 19 nt, Artificial Sequence
  Description of Artificial Sequence: Synthetic oligonucleotide
aaccaucucaggaggugcc

SEQ ID NO: 2280253 - RNA, 19 nt, Artificial Sequence
  Description of Artificial Sequence: Synthetic oligonucleotide
uggguacauggaaggaagg

SEQ ID NO: 2280254 - RNA, 19 nt, Artificial Sequence
  Description of Artificial Sequence: Synthetic oligonucleotide
gagaucaauaacucccgca

SEQ ID NO: 2280255 - RNA, 19 nt, Artificial Sequence
  Description of Artificial Sequence: Synthetic oligonucleotide
agcaaauaaccaaugagau

SEQ ID NO: 2280256 - RNA, 19 nt, Artificial Sequence
  Description of Artificial Sequence: Synthetic oligonucleotide
gauaaaccgucaaacucug

SEQ ID NO: 2280257 - RNA, 19 nt, Artificial Sequence
  Description of Artificial Sequence: Synthetic oligonucleotide
aggcagagaacguggacag

SEQ ID NO: 2280258 - RNA, 19 nt, Artificial Sequence
  Description of Artificial Sequence: Synthetic oligonucleotide
uguccaguacccagaaaac

SEQ ID NO: 2280259 - RNA, 19 nt, Artificial Sequence
  Description of Artificial Sequence: Synthetic oligonucleotide
agggccaccuagcaugugg

SEQ ID NO: 2280260 - RNA, 19 nt, Artificial Sequence
  Description of Artificial Sequence: Synthetic oligonucleotide
agcuuaagaguuccaucuc

SEQ ID NO: 2280261 - RNA, 19 nt, Artificial Sequence
  Description of Artificial Sequence: Synthetic oligonucleotide
aacguggacaggccuggag

SEQ ID NO: 2280262 - RNA, 19 nt, Artificial Sequence
  Description of Artificial Sequence: Synthetic oligonucleotide
gagcccagaggcaauaaag

SEQ ID NO: 2280263 - RNA, 19 nt, Artificial Sequence
  Description of Artificial Sequence: Synthetic oligonucleotide
augagaucaauaacucccg

SEQ ID NO: 2280264 - RNA, 19 nt, Artificial Sequence
  Description of Artificial Sequence: Synthetic oligonucleotide
gauggagaaguuaggucag

SEQ ID NO: 2280265 - RNA, 19 nt, Artificial Sequence
  Description of Artificial Sequence: Synthetic oligonucleotide
aggagaacgcuuuccaccu

SEQ ID NO: 2280266 - RNA, 19 nt, Artificial Sequence
  Description of Artificial Sequence: Synthetic oligonucleotide
agagacggugaaaaguggg

SEQ ID NO: 2280267 - RNA, 19 nt, Artificial Sequence
  Description of Artificial Sequence: Synthetic oligonucleotide
gacggugaaaagugggcug

SEQ ID NO: 2280268 - RNA, 19 nt, Artificial Sequence
  Description of Artificial Sequence: Synthetic oligonucleotide
ugagaaccaacagggcacg

SEQ ID NO: 2280269 - RNA, 19 nt, Artificial Sequence
  Description of Artificial Sequence: Synthetic oligonucleotide
caccuuugcaugugcaugc

SEQ ID NO: 2280270 - RNA, 19 nt, Artificial Sequence
  Description of Artificial Sequence: Synthetic oligonucleotide
gaucaauaacucccgcaac

SEQ ID NO: 2280271 - RNA, 19 nt, Artificial Sequence
  Description of Artificial Sequence: Synthetic oligonucleotide
agagagagacggugaaaag

SEQ ID NO: 2280272 - RNA, 19 nt, Artificial Sequence
  Description of Artificial Sequence: Synthetic oligonucleotide
ucauggggcagugacuucc

SEQ ID NO: 2280273 - RNA, 19 nt, Artificial Sequence
  Description of Artificial Sequence: Synthetic oligonucleotide
aaugaggggagggauguaa

SEQ ID NO: 2280274 - RNA, 19 nt, Artificial Sequence
  Description of Artificial Sequence: Synthetic oligonucleotide
ggagaaguuaggucagagg

SEQ ID NO: 2280275 - RNA, 19 nt, Artificial Sequence
  Description of Artificial Sequence: Synthetic oligonucleotide
gaaggagaacgcuuuccac

SEQ ID NO: 2280276 - RNA, 19 nt, Artificial Sequence
  Description of Artificial Sequence: Synthetic oligonucleotide
cagccugugauccaggcuc

SEQ ID NO: 2280277 - RNA, 19 nt, Artificial Sequence
  Description of Artificial Sequence: Synthetic oligonucleotide
ucagagggugccaccaaga

SEQ ID NO: 2280278 - RNA, 19 nt, Artificial Sequence
  Description of Artificial Sequence: Synthetic oligonucleotide
ugaaaccaucucaggaggu

SEQ ID NO: 2280279 - RNA, 19 nt, Artificial Sequence
  Description of Artificial Sequence: Synthetic oligonucleotide
gguuggguaagccauuggc

SEQ ID NO: 2280280 - RNA, 19 nt, Artificial Sequence
  Description of Artificial Sequence: Synthetic oligonucleotide
gaaccaacagggcacgguc

SEQ ID NO: 2280281 - RNA, 19 nt, Artificial Sequence
  Description of Artificial Sequence: Synthetic oligonucleotide
agucaugggcccuuguccu

SEQ ID NO: 2280282 - RNA, 19 nt, Artificial Sequence
  Description of Artificial Sequence: Synthetic oligonucleotide
aacucccgcaacccugguc

SEQ ID NO: 2280283 - RNA, 19 nt, Artificial Sequence
  Description of Artificial Sequence: Synthetic oligonucleotide
uuagcaguugaaccugcau

SEQ ID NO: 2280284 - RNA, 19 nt, Artificial Sequence
  Description of Artificial Sequence: Synthetic oligonucleotide
gaaaccaucucaggaggug

SEQ ID NO: 2280285 - RNA, 19 nt, Artificial Sequence
  Description of Artificial Sequence: Synthetic oligonucleotide
uuuagggaagaggcugggg

SEQ ID NO: 2280286 - RNA, 19 nt, Artificial Sequence
  Description of Artificial Sequence: Synthetic oligonucleotide
agcccagaggcaauaaagg

SEQ ID NO: 2280287 - RNA, 19 nt, Artificial Sequence
  Description of Artificial Sequence: Synthetic oligonucleotide
cuuaagaguuccaucucga

SEQ ID NO: 2280288 - RNA, 19 nt, Artificial Sequence
  Description of Artificial Sequence: Synthetic oligonucleotide
uuugcaugugcaugccaga

SEQ ID NO: 2280289 - RNA, 19 nt, Artificial Sequence
  Description of Artificial Sequence: Synthetic oligonucleotide
gguacauggaaggaaggag

SEQ ID NO: 2280290 - RNA, 19 nt, Artificial Sequence
  Description of Artificial Sequence: Synthetic oligonucleotide
gucgugaaaccaucucagg

SEQ ID NO: 2280291 - RNA, 19 nt, Artificial Sequence
  Description of Artificial Sequence: Synthetic oligonucleotide
uuaagaguuccaucucgau

SEQ ID NO: 2280292 - RNA, 19 nt, Artificial Sequence
  Description of Artificial Sequence: Synthetic oligonucleotide
uggguaagccauuggcagc

SEQ ID NO: 2280293 - RNA, 19 nt, Artificial Sequence
  Description of Artificial Sequence: Synthetic oligonucleotide
cacagcacggggcauuugc

SEQ ID NO: 2280294 - RNA, 19 nt, Artificial Sequence
  Description of Artificial Sequence: Synthetic oligonucleotide
aggaucucuucagagagga

SEQ ID NO: 2280295 - RNA, 19 nt, Artificial Sequence
  Description of Artificial Sequence: Synthetic oligonucleotide
aggaggugcccagagagag

SEQ ID NO: 2280296 - RNA, 19 nt, Artificial Sequence
  Description of Artificial Sequence: Synthetic oligonucleotide
uccaugccgaagcuggcga

SEQ ID NO: 2280297 - RNA, 19 nt, Artificial Sequence
  Description of Artificial Sequence: Synthetic oligonucleotide
aaccaacagggcacggucg

SEQ ID NO: 2280298 - RNA, 19 nt, Artificial Sequence
  Description of Artificial Sequence: Synthetic oligonucleotide
ggagaaagucuaaaccacg

SEQ ID NO: 2280299 - RNA, 19 nt, Artificial Sequence
  Description of Artificial Sequence: Synthetic oligonucleotide
gcagagggaacagucaugg

SEQ ID NO: 2280300 - RNA, 19 nt, Artificial Sequence
  Description of Artificial Sequence: Synthetic oligonucleotide
guuccaucucgauccagcc

SEQ ID NO: 2280301 - RNA, 19 nt, Artificial Sequence
  Description of Artificial Sequence: Synthetic oligonucleotide
agagaacguggacaggccu

SEQ ID NO: 2280302 - RNA, 19 nt, Artificial Sequence
  Description of Artificial Sequence: Synthetic oligonucleotide
auaaccaaugagaucaaua

SEQ ID NO: 2280303 - RNA, 19 nt, Artificial Sequence
  Description of Artificial Sequence: Synthetic oligonucleotide
gagagacggugaaaagugg

SEQ ID NO: 2280304 - RNA, 19 nt, Artificial Sequence
  Description of Artificial Sequence: Synthetic oligonucleotide
cuggaggcccucauggggc

SEQ ID NO: 2280305 - RNA, 19 nt, Artificial Sequence
  Description of Artificial Sequence: Synthetic oligonucleotide
cagcacucacacuuuacac

SEQ ID NO: 2280306 - RNA, 19 nt, Artificial Sequence
  Description of Artificial Sequence: Synthetic oligonucleotide
acggucgugaaaccaucuc

SEQ ID NO: 2280307 - RNA, 19 nt, Artificial Sequence
  Description of Artificial Sequence: Synthetic oligonucleotide
aggcaauaaagggauggag

SEQ ID NO: 2280308 - RNA, 19 nt, Artificial Sequence
  Description of Artificial Sequence: Synthetic oligonucleotide
aagggguuggguaagccau

SEQ ID NO: 2280309 - RNA, 19 nt, Artificial Sequence
  Description of Artificial Sequence: Synthetic oligonucleotide
agaacguggacaggccugg

SEQ ID NO: 2280310 - RNA, 19 nt, Artificial Sequence
  Description of Artificial Sequence: Synthetic oligonucleotide
auaacucccgcaacccugg

SEQ ID NO: 2280311 - RNA, 19 nt, Artificial Sequence
  Description of Artificial Sequence: Synthetic oligonucleotide
aauaaccaaugagaucaau

SEQ ID NO: 2280312 - RNA, 19 nt, Artificial Sequence
  Description of Artificial Sequence: Synthetic oligonucleotide
ggugcccagagagagacgg

SEQ ID NO: 2280313 - RNA, 19 nt, Artificial Sequence
  Description of Artificial Sequence: Synthetic oligonucleotide
guacauggaaggaaggaga

SEQ ID NO: 2280314 - RNA, 19 nt, Artificial Sequence
  Description of Artificial Sequence: Synthetic oligonucleotide
gagggugccaccaagaaau

SEQ ID NO: 2280315 - RNA, 19 nt, Artificial Sequence
  Description of Artificial Sequence: Synthetic oligonucleotide
cuuguccugagaaccaaca

SEQ ID NO: 2280316 - RNA, 19 nt, Artificial Sequence
  Description of Artificial Sequence: Synthetic oligonucleotide
ugugauccaggcucaaguu

SEQ ID NO: 2280317 - RNA, 19 nt, Artificial Sequence
  Description of Artificial Sequence: Synthetic oligonucleotide
gaggugcccagagagagac

SEQ ID NO: 2280318 - RNA, 19 nt, Artificial Sequence
  Description of Artificial Sequence: Synthetic oligonucleotide
ggccugaaagcaaauaacc

SEQ ID NO: 2280319 - RNA, 19 nt, Artificial Sequence
  Description of Artificial Sequence: Synthetic oligonucleotide
ugaggggagggauguaagu

SEQ ID NO: 2280320 - RNA, 19 nt, Artificial Sequence
  Description of Artificial Sequence: Synthetic oligonucleotide
gaguagaagggguugggua

SEQ ID NO: 2280321 - RNA, 19 nt, Artificial Sequence
  Description of Artificial Sequence: Synthetic oligonucleotide
agcgagagaagcugagagu

SEQ ID NO: 2280322 - RNA, 19 nt, Artificial Sequence
  Description of Artificial Sequence: Synthetic oligonucleotide
agucuaaaccacgggcagg

SEQ ID NO: 2280323 - RNA, 19 nt, Artificial Sequence
  Description of Artificial Sequence: Synthetic oligonucleotide
acguggacaggccuggaga

SEQ ID NO: 2280324 - RNA, 19 nt, Artificial Sequence
  Description of Artificial Sequence: Synthetic oligonucleotide
acauggaaggaaggagaac

SEQ ID NO: 2280325 - RNA, 19 nt, Artificial Sequence
  Description of Artificial Sequence: Synthetic oligonucleotide
ccaaugagaucaauaacuc

SEQ ID NO: 2280326 - RNA, 19 nt, Artificial Sequence
  Description of Artificial Sequence: Synthetic oligonucleotide
gugaaaagugggcugugga

SEQ ID NO: 2280327 - RNA, 19 nt, Artificial Sequence
  Description of Artificial Sequence: Synthetic oligonucleotide
ugcaugccagagcccagag

SEQ ID NO: 2280328 - RNA, 19 nt, Artificial Sequence
  Description of Artificial Sequence: Synthetic oligonucleotide
uggggcagugacuuccaug

SEQ ID NO: 2280329 - RNA, 19 nt, Artificial Sequence
  Description of Artificial Sequence: Synthetic oligonucleotide
gagaaugaggggagggaug

SEQ ID NO: 2280330 - RNA, 19 nt, Artificial Sequence
  Description of Artificial Sequence: Synthetic oligonucleotide
cgugaaaccaucucaggag

SEQ ID NO: 2280331 - RNA, 19 nt, Artificial Sequence
  Description of Artificial Sequence: Synthetic oligonucleotide
aauggccugaaagcaaaua

SEQ ID NO: 2280332 - RNA, 19 nt, Artificial Sequence
  Description of Artificial Sequence: Synthetic oligonucleotide
gagaacguggacaggccug

SEQ ID NO: 2280333 - RNA, 19 nt, Artificial Sequence
  Description of Artificial Sequence: Synthetic oligonucleotide
cagggcacggucgugaaac

SEQ ID NO: 2280334 - RNA, 19 nt, Artificial Sequence
  Description of Artificial Sequence: Synthetic oligonucleotide
agggauggagaaguuaggu

SEQ ID NO: 2280335 - RNA, 19 nt, Artificial Sequence
  Description of Artificial Sequence: Synthetic oligonucleotide
gaacgcuuuccaccucucc

SEQ ID NO: 2280336 - RNA, 19 nt, Artificial Sequence
  Description of Artificial Sequence: Synthetic oligonucleotide
cagagaacguggacaggcc

SEQ ID NO: 2280337 - RNA, 19 nt, Artificial Sequence
  Description of Artificial Sequence: Synthetic oligonucleotide
guuggguaagccauuggca

SEQ ID NO: 2280338 - RNA, 19 nt, Artificial Sequence
  Description of Artificial Sequence: Synthetic oligonucleotide
cugaaagcaaauaaccaau

SEQ ID NO: 2280339 - RNA, 19 nt, Artificial Sequence
  Description of Artificial Sequence: Synthetic oligonucleotide
ugcccagagagagacggug

SEQ ID NO: 2280340 - RNA, 19 nt, Artificial Sequence
  Description of Artificial Sequence: Synthetic oligonucleotide
acgcuuuccaccucuccca

SEQ ID NO: 2280341 - RNA, 19 nt, Artificial Sequence
  Description of Artificial Sequence: Synthetic oligonucleotide
agauggucugaagaguaga

SEQ ID NO: 2280342 - RNA, 19 nt, Artificial Sequence
  Description of Artificial Sequence: Synthetic oligonucleotide
uuaggucagagggugccac

SEQ ID NO: 2280343 - RNA, 19 nt, Artificial Sequence
  Description of Artificial Sequence: Synthetic oligonucleotide
accacaggcagagaacgug

SEQ ID NO: 2280344 - RNA, 19 nt, Artificial Sequence
  Description of Artificial Sequence: Synthetic oligonucleotide
agacggugaaaagugggcu

SEQ ID NO: 2280345 - RNA, 19 nt, Artificial Sequence
  Description of Artificial Sequence: Synthetic oligonucleotide
agagaaugaggggagggau

SEQ ID NO: 2280346 - RNA, 19 nt, Artificial Sequence
  Description of Artificial Sequence: Synthetic oligonucleotide
agaagcugagagucagcga

SEQ ID NO: 2280347 - RNA, 19 nt, Artificial Sequence
  Description of Artificial Sequence: Synthetic oligonucleotide
accaucucaggaggugccc

SEQ ID NO: 2280348 - RNA, 19 nt, Artificial Sequence
  Description of Artificial Sequence: Synthetic oligonucleotide
augugcaugccagagccca

SEQ ID NO: 2280349 - RNA, 19 nt, Artificial Sequence
  Description of Artificial Sequence: Synthetic oligonucleotide
cugagcgagagaagcugag

SEQ ID NO: 2280350 - RNA, 19 nt, Artificial Sequence
  Description of Artificial Sequence: Synthetic oligonucleotide
gcaaauaaccaaugagauc

SEQ ID NO: 2280351 - RNA, 19 nt, Artificial Sequence
  Description of Artificial Sequence: Synthetic oligonucleotide
aggaaaagauaaaccguca

SEQ ID NO: 2280352 - RNA, 19 nt, Artificial Sequence
  Description of Artificial Sequence: Synthetic oligonucleotide
gaaccugcauauccuggca

SEQ ID NO: 2280353 - RNA, 19 nt, Artificial Sequence
  Description of Artificial Sequence: Synthetic oligonucleotide
ggcaauaaagggauggaga

SEQ ID NO: 2280354 - RNA, 19 nt, Artificial Sequence
  Description of Artificial Sequence: Synthetic oligonucleotide
gcagagaacguggacaggc

SEQ ID NO: 2280355 - RNA, 19 nt, Artificial Sequence
  Description of Artificial Sequence: Synthetic oligonucleotide
gagagagacggugaaaagu

SEQ ID NO: 2280356 - RNA, 19 nt, Artificial Sequence
  Description of Artificial Sequence: Synthetic oligonucleotide
ggagagaaugaggggaggg

SEQ ID NO: 2280357 - RNA, 19 nt, Artificial Sequence
  Description of Artificial Sequence: Synthetic oligonucleotide
agggcacggucgugaaacc

SEQ ID NO: 2280358 - RNA, 19 nt, Artificial Sequence
  Description of Artificial Sequence: Synthetic oligonucleotide
accaacagggcacggucgu

SEQ ID NO: 2280359 - RNA, 19 nt, Artificial Sequence
  Description of Artificial Sequence: Synthetic oligonucleotide
cuaaaccacgggcaggaga

SEQ ID NO: 2280360 - RNA, 19 nt, Artificial Sequence
  Description of Artificial Sequence: Synthetic oligonucleotide
ggcgagcaggcagagaugg

SEQ ID NO: 2280361 - RNA, 19 nt, Artificial Sequence
  Description of Artificial Sequence: Synthetic oligonucleotide
ggggcauuugcagucgucg

SEQ ID NO: 2280362 - RNA, 19 nt, Artificial Sequence
  Description of Artificial Sequence: Synthetic oligonucleotide
guagaagggguuggguaag

SEQ ID NO: 2280363 - RNA, 19 nt, Artificial Sequence
  Description of Artificial Sequence: Synthetic oligonucleotide
ggaaaagauaaaccgucaa

SEQ ID NO: 2280364 - RNA, 19 nt, Artificial Sequence
  Description of Artificial Sequence: Synthetic oligonucleotide
agagauggucugaagagua

SEQ ID NO: 2280365 - RNA, 19 nt, Artificial Sequence
  Description of Artificial Sequence: Synthetic oligonucleotide
uccaggcucaaguucugau

SEQ ID NO: 2280366 - RNA, 19 nt, Artificial Sequence
  Description of Artificial Sequence: Synthetic oligonucleotide
cagaaccugagcgagagaa

SEQ ID NO: 2280367 - RNA, 19 nt, Artificial Sequence
  Description of Artificial Sequence: Synthetic oligonucleotide
ggagcuuaagaguuccauc

SEQ ID NO: 2280368 - RNA, 19 nt, Artificial Sequence
  Description of Artificial Sequence: Synthetic oligonucleotide
gagagaaugaggggaggga

SEQ ID NO: 2280369 - RNA, 19 nt, Artificial Sequence
  Description of Artificial Sequence: Synthetic oligonucleotide
cagugagcucuuucccugg

SEQ ID NO: 2280370 - RNA, 19 nt, Artificial Sequence
  Description of Artificial Sequence: Synthetic oligonucleotide
gucuaaaccacgggcagga

SEQ ID NO: 2280371 - RNA, 19 nt, Artificial Sequence
  Description of Artificial Sequence: Synthetic oligonucleotide
accgucaaacucuggcccu

SEQ ID NO: 2280372 - RNA, 19 nt, Artificial Sequence
  Description of Artificial Sequence: Synthetic oligonucleotide
gccauuggcagcccagagg

SEQ ID NO: 2280373 - RNA, 19 nt, Artificial Sequence
  Description of Artificial Sequence: Synthetic oligonucleotide
auauccuggcagagggaac

SEQ ID NO: 2280374 - RNA, 19 nt, Artificial Sequence
  Description of Artificial Sequence: Synthetic oligonucleotide
agaaccaacagggcacggu

SEQ ID NO: 2280375 - RNA, 19 nt, Artificial Sequence
  Description of Artificial Sequence: Synthetic oligonucleotide
gaggcaauaaagggaugga

SEQ ID NO: 2280376 - RNA, 19 nt, Artificial Sequence
  Description of Artificial Sequence: Synthetic oligonucleotide
agaguagaagggguugggu

SEQ ID NO: 2280377 - RNA, 19 nt, Artificial Sequence
  Description of Artificial Sequence: Synthetic oligonucleotide
ccuucuuuagcaguugaac

SEQ ID NO: 2280378 - RNA, 19 nt, Artificial Sequence
  Description of Artificial Sequence: Synthetic oligonucleotide
aaccugagcgagagaagcu

SEQ ID NO: 2280379 - RNA, 19 nt, Artificial Sequence
  Description of Artificial Sequence: Synthetic oligonucleotide
uugcagucgucgauccagu

SEQ ID NO: 2280380 - RNA, 19 nt, Artificial Sequence
  Description of Artificial Sequence: Synthetic oligonucleotide
aagugggcuguggacagau

SEQ ID NO: 2280381 - RNA, 19 nt, Artificial Sequence
  Description of Artificial Sequence: Synthetic oligonucleotide
cugcauauccuggcagagg

SEQ ID NO: 2280382 - RNA, 19 nt, Artificial Sequence
  Description of Artificial Sequence: Synthetic oligonucleotide
gugccaccaagaaauggcc

SEQ ID NO: 2280383 - RNA, 19 nt, Artificial Sequence
  Description of Artificial Sequence: Synthetic oligonucleotide
aggagcuuaagaguuccau

SEQ ID NO: 2280384 - RNA, 19 nt, Artificial Sequence
  Description of Artificial Sequence: Synthetic oligonucleotide
ugcagucgucgauccagug

SEQ ID NO: 2280385 - RNA, 19 nt, Artificial Sequence
  Description of Artificial Sequence: Synthetic oligonucleotide
acggugaaaagugggcugu

SEQ ID NO: 2280386 - RNA, 19 nt, Artificial Sequence
  Description of Artificial Sequence: Synthetic oligonucleotide
aggauuuagggaagaggcu

SEQ ID NO: 2280387 - RNA, 19 nt, Artificial Sequence
  Description of Artificial Sequence: Synthetic oligonucleotide
gagagucagcgaugcagca

SEQ ID NO: 2280388 - RNA, 19 nt, Artificial Sequence
  Description of Artificial Sequence: Synthetic oligonucleotide
cuuccaugccgaagcuggc

SEQ ID NO: 2280389 - RNA, 19 nt, Artificial Sequence
  Description of Artificial Sequence: Synthetic oligonucleotide
cauauccuggcagagggaa

SEQ ID NO: 2280390 - RNA, 19 nt, Artificial Sequence
  Description of Artificial Sequence: Synthetic oligonucleotide
gggauggagaaguuagguc

SEQ ID NO: 2280391 - RNA, 19 nt, Artificial Sequence
  Description of Artificial Sequence: Synthetic oligonucleotide
cagagggaacagucauggg

SEQ ID NO: 2280392 - RNA, 19 nt, Artificial Sequence
  Description of Artificial Sequence: Synthetic oligonucleotide
gugagcucuuucccuggag

SEQ ID NO: 2280393 - RNA, 19 nt, Artificial Sequence
  Description of Artificial Sequence: Synthetic oligonucleotide
auaaaccgucaaacucugg

SEQ ID NO: 2280394 - RNA, 19 nt, Artificial Sequence
  Description of Artificial Sequence: Synthetic oligonucleotide
ucuaaaccacgggcaggag

SEQ ID NO: 2280395 - RNA, 19 nt, Artificial Sequence
  Description of Artificial Sequence: Synthetic oligonucleotide
ggguaagccauuggcagcc

SEQ ID NO: 2280396 - RNA, 19 nt, Artificial Sequence
  Description of Artificial Sequence: Synthetic oligonucleotide
cagcgaugcagcagcacuc

SEQ ID NO: 2280397 - RNA, 19 nt, Artificial Sequence
  Description of Artificial Sequence: Synthetic oligonucleotide
accaagaaauggccugaaa

SEQ ID NO: 2280398 - RNA, 19 nt, Artificial Sequence
  Description of Artificial Sequence: Synthetic oligonucleotide
ccugagaaccaacagggca

SEQ ID NO: 2280399 - RNA, 19 nt, Artificial Sequence
  Description of Artificial Sequence: Synthetic oligonucleotide
caugccgaagcuggcgagc

SEQ ID NO: 2280400 - RNA, 19 nt, Artificial Sequence
  Description of Artificial Sequence: Synthetic oligonucleotide
ccuggaggcccucaugggg

SEQ ID NO: 2280401 - RNA, 19 nt, Artificial Sequence
  Description of Artificial Sequence: Synthetic oligonucleotide
uggcgagcaggcagagaug

SEQ ID NO: 2280402 - RNA, 19 nt, Artificial Sequence
  Description of Artificial Sequence: Synthetic oligonucleotide
gagaaccaacagggcacgg

SEQ ID NO: 2280403 - RNA, 19 nt, Artificial Sequence
  Description of Artificial Sequence: Synthetic oligonucleotide
ucgucgauccagugagcuc

SEQ ID NO: 2280404 - RNA, 19 nt, Artificial Sequence
  Description of Artificial Sequence: Synthetic oligonucleotide
cugugauccaggcucaagu

SEQ ID NO: 2280405 - RNA, 19 nt, Artificial Sequence
  Description of Artificial Sequence: Synthetic oligonucleotide
aagcuggcgagcaggcaga

SEQ ID NO: 2280406 - RNA, 19 nt, Artificial Sequence
  Description of Artificial Sequence: Synthetic oligonucleotide
cuggcgagcaggcagagau

SEQ ID NO: 2280407 - RNA, 19 nt, Artificial Sequence
  Description of Artificial Sequence: Synthetic oligonucleotide
agucgucgauccagugagc

SEQ ID NO: 2280408 - RNA, 19 nt, Artificial Sequence
  Description of Artificial Sequence: Synthetic oligonucleotide
aggucagagggugccacca

SEQ ID NO: 2280409 - RNA, 19 nt, Artificial Sequence
  Description of Artificial Sequence: Synthetic oligonucleotide
agaacgcuuuccaccucuc

SEQ ID NO: 2280410 - RNA, 19 nt, Artificial Sequence
  Description of Artificial Sequence: Synthetic oligonucleotide
agcgaugcagcagcacuca

SEQ ID NO: 2280411 - RNA, 19 nt, Artificial Sequence
  Description of Artificial Sequence: Synthetic oligonucleotide
gauccaggcucaaguucug

SEQ ID NO: 2280412 - RNA, 19 nt, Artificial Sequence
  Description of Artificial Sequence: Synthetic oligonucleotide
gacaggcauauguccagua

SEQ ID NO: 2280413 - RNA, 19 nt, Artificial Sequence
  Description of Artificial Sequence: Synthetic oligonucleotide
gucaugggcccuuguccug

SEQ ID NO: 2280414 - RNA, 19 nt, Artificial Sequence
  Description of Artificial Sequence: Synthetic oligonucleotide
guaagccauuggcagccca

SEQ ID NO: 2280415 - RNA, 19 nt, Artificial Sequence
  Description of Artificial Sequence: Synthetic oligonucleotide
gccugaaagcaaauaacca

SEQ ID NO: 2280416 - RNA, 19 nt, Artificial Sequence
  Description of Artificial Sequence: Synthetic oligonucleotide
caggcucaaguucugauau

SEQ ID NO: 2280417 - RNA, 19 nt, Artificial Sequence
  Description of Artificial Sequence: Synthetic oligonucleotide
agacaggcauauguccagu

SEQ ID NO: 2280418 - RNA, 19 nt, Artificial Sequence
  Description of Artificial Sequence: Synthetic oligonucleotide
gccgaagcuggcgagcagg

SEQ ID NO: 2280419 - RNA, 19 nt, Artificial Sequence
  Description of Artificial Sequence: Synthetic oligonucleotide
gggugccaccaagaaaugg

SEQ ID NO: 2280420 - RNA, 19 nt, Artificial Sequence
  Description of Artificial Sequence: Synthetic oligonucleotide
cacggggcauuugcagucg

SEQ ID NO: 2280421 - RNA, 19 nt, Artificial Sequence
  Description of Artificial Sequence: Synthetic oligonucleotide
ggguuggguaagccauugg

SEQ ID NO: 2280422 - RNA, 19 nt, Artificial Sequence
  Description of Artificial Sequence: Synthetic oligonucleotide
gcagucgucgauccaguga

SEQ ID NO: 2280423 - RNA, 19 nt, Artificial Sequence
  Description of Artificial Sequence: Synthetic oligonucleotide
gaacagucaugggcccuug

SEQ ID NO: 2280424 - RNA, 19 nt, Artificial Sequence
  Description of Artificial Sequence: Synthetic oligonucleotide
aaaccacgggcaggagaga

SEQ ID NO: 2280425 - RNA, 19 nt, Artificial Sequence
  Description of Artificial Sequence: Synthetic oligonucleotide
acacaccuuugcaugugca

SEQ ID NO: 2280426 - RNA, 19 nt, Artificial Sequence
  Description of Artificial Sequence: Synthetic oligonucleotide
cccagaaccugagcgagag

SEQ ID NO: 2280427 - RNA, 19 nt, Artificial Sequence
  Description of Artificial Sequence: Synthetic oligonucleotide
augccgaagcuggcgagca

SEQ ID NO: 2280428 - RNA, 19 nt, Artificial Sequence
  Description of Artificial Sequence: Synthetic oligonucleotide
ggguacauggaaggaagga

SEQ ID NO: 2280429 - RNA, 19 nt, Artificial Sequence
  Description of Artificial Sequence: Synthetic oligonucleotide
accuucuuuagcaguugaa

SEQ ID NO: 2280430 - RNA, 19 nt, Artificial Sequence
  Description of Artificial Sequence: Synthetic oligonucleotide
gcaacccuggucauuaaaa

SEQ ID NO: 2280431 - RNA, 19 nt, Artificial Sequence
  Description of Artificial Sequence: Synthetic oligonucleotide
caccuagcauguggcacag

SEQ ID NO: 2280432 - RNA, 19 nt, Artificial Sequence
  Description of Artificial Sequence: Synthetic oligonucleotide
uaacucccgcaacccuggu

SEQ ID NO: 2280433 - RNA, 19 nt, Artificial Sequence
  Description of Artificial Sequence: Synthetic oligonucleotide
guuaggucagagggugcca

SEQ ID NO: 2280434 - RNA, 19 nt, Artificial Sequence
  Description of Artificial Sequence: Synthetic oligonucleotide
cugaagaguagaagggguu

SEQ ID NO: 2280435 - RNA, 19 nt, Artificial Sequence
  Description of Artificial Sequence: Synthetic oligonucleotide
ccugcauauccuggcagag

SEQ ID NO: 2280436 - RNA, 19 nt, Artificial Sequence
  Description of Artificial Sequence: Synthetic oligonucleotide
ggggagggauguaaguuuc

SEQ ID NO: 2280437 - RNA, 19 nt, Artificial Sequence
  Description of Artificial Sequence: Synthetic oligonucleotide
gcacggggcauuugcaguc

SEQ ID NO: 2280438 - RNA, 19 nt, Artificial Sequence
  Description of Artificial Sequence: Synthetic oligonucleotide
gucgucgauccagugagcu

SEQ ID NO: 2280439 - RNA, 19 nt, Artificial Sequence
  Description of Artificial Sequence: Synthetic oligonucleotide
gccaccuagcauguggcac

SEQ ID NO: 2280440 - RNA, 19 nt, Artificial Sequence
  Description of Artificial Sequence: Synthetic oligonucleotide
acggggcauuugcagucgu

SEQ ID NO: 2280441 - RNA, 19 nt, Artificial Sequence
  Description of Artificial Sequence: Synthetic oligonucleotide
gggcauuugcagucgucga

SEQ ID NO: 2280442 - RNA, 19 nt, Artificial Sequence
  Description of Artificial Sequence: Synthetic oligonucleotide
ccaguacccagaaaacaaa

SEQ ID NO: 2280443 - RNA, 19 nt, Artificial Sequence
  Description of Artificial Sequence: Synthetic oligonucleotide
gucagcgaugcagcagcac

SEQ ID NO: 2280444 - RNA, 19 nt, Artificial Sequence
  Description of Artificial Sequence: Synthetic oligonucleotide
cucuggguacauggaagga

SEQ ID NO: 2280445 - RNA, 19 nt, Artificial Sequence
  Description of Artificial Sequence: Synthetic oligonucleotide
cacacuuuacacacaccuu

SEQ ID NO: 2280446 - RNA, 19 nt, Artificial Sequence
  Description of Artificial Sequence: Synthetic oligonucleotide
cagagauggucugaagagu

SEQ ID NO: 2280447 - RNA, 19 nt, Artificial Sequence
  Description of Artificial Sequence: Synthetic oligonucleotide
caggagcuuaagaguucca

SEQ ID NO: 2280448 - RNA, 19 nt, Artificial Sequence
  Description of Artificial Sequence: Synthetic oligonucleotide
cacaccuuugcaugugcau

SEQ ID NO: 2280449 - RNA, 19 nt, Artificial Sequence
  Description of Artificial Sequence: Synthetic oligonucleotide
gggagggauguaaguuucc

SEQ ID NO: 2280450 - RNA, 19 nt, Artificial Sequence
  Description of Artificial Sequence: Synthetic oligonucleotide
ccaugccgaagcuggcgag

SEQ ID NO: 2280451 - RNA, 19 nt, Artificial Sequence
  Description of Artificial Sequence: Synthetic oligonucleotide
ccugagcgagagaagcuga

SEQ ID NO: 2280452 - RNA, 19 nt, Artificial Sequence
  Description of Artificial Sequence: Synthetic oligonucleotide
agucagcgaugcagcagca

SEQ ID NO: 2280453 - RNA, 19 nt, Artificial Sequence
  Description of Artificial Sequence: Synthetic oligonucleotide
augccagagcccagaggca

SEQ ID NO: 2280454 - RNA, 19 nt, Artificial Sequence
  Description of Artificial Sequence: Synthetic oligonucleotide
ggcauauguccaguaccca

SEQ ID NO: 2280455 - RNA, 19 nt, Artificial Sequence
  Description of Artificial Sequence: Synthetic oligonucleotide
aggugcccagagagagacg

SEQ ID NO: 2280456 - RNA, 19 nt, Artificial Sequence
  Description of Artificial Sequence: Synthetic oligonucleotide
agugggcuguggacagaug

SEQ ID NO: 2280457 - RNA, 19 nt, Artificial Sequence
  Description of Artificial Sequence: Synthetic oligonucleotide
cacggucgugaaaccaucu

SEQ ID NO: 2280458 - RNA, 19 nt, Artificial Sequence
  Description of Artificial Sequence: Synthetic oligonucleotide
cggucgugaaaccaucuca

SEQ ID NO: 2280459 - RNA, 19 nt, Artificial Sequence
  Description of Artificial Sequence: Synthetic oligonucleotide
ccugugauccaggcucaag

SEQ ID NO: 2280460 - RNA, 19 nt, Artificial Sequence
  Description of Artificial Sequence: Synthetic oligonucleotide
accacgggcaggagagaau

SEQ ID NO: 2280461 - RNA, 19 nt, Artificial Sequence
  Description of Artificial Sequence: Synthetic oligonucleotide
gaacguggacaggccugga

SEQ ID NO: 2280462 - RNA, 19 nt, Artificial Sequence
  Description of Artificial Sequence: Synthetic oligonucleotide
aggcccucauggggcagug

SEQ ID NO: 2280463 - RNA, 19 nt, Artificial Sequence
  Description of Artificial Sequence: Synthetic oligonucleotide
ggccaccuagcauguggca

SEQ ID NO: 2280464 - RNA, 19 nt, Artificial Sequence
  Description of Artificial Sequence: Synthetic oligonucleotide
gcccuccaccuucuuuagc

SEQ ID NO: 2280465 - RNA, 19 nt, Artificial Sequence
  Description of Artificial Sequence: Synthetic oligonucleotide
gcggcccaggagcuuaaga

SEQ ID NO: 2280466 - RNA, 19 nt, Artificial Sequence
  Description of Artificial Sequence: Synthetic oligonucleotide
gcgaugcagcagcacucac

SEQ ID NO: 2280467 - RNA, 19 nt, Artificial Sequence
  Description of Artificial Sequence: Synthetic oligonucleotide
gcaggcagagauggucuga

SEQ ID NO: 2280468 - RNA, 19 nt, Artificial Sequence
  Description of Artificial Sequence: Synthetic oligonucleotide
ucgauccagugagcucuuu

SEQ ID NO: 2280469 - RNA, 19 nt, Artificial Sequence
  Description of Artificial Sequence: Synthetic oligonucleotide
gcacggucgugaaaccauc

SEQ ID NO: 2280470 - RNA, 19 nt, Artificial Sequence
  Description of Artificial Sequence: Synthetic oligonucleotide
cgcuuuccaccucucccag

SEQ ID NO: 2280471 - RNA, 19 nt, Artificial Sequence
  Description of Artificial Sequence: Synthetic oligonucleotide
ucccgcaacccuggucauu

SEQ ID NO: 2280472 - RNA, 19 nt, Artificial Sequence
  Description of Artificial Sequence: Synthetic oligonucleotide
gggcacggucgugaaacca

SEQ ID NO: 2280473 - RNA, 19 nt, Artificial Sequence
  Description of Artificial Sequence: Synthetic oligonucleotide
cagugacuuccaugccgaa

SEQ ID NO: 2280474 - RNA, 19 nt, Artificial Sequence
  Description of Artificial Sequence: Synthetic oligonucleotide
gcauauccuggcagaggga

SEQ ID NO: 2280475 - RNA, 19 nt, Artificial Sequence
  Description of Artificial Sequence: Synthetic oligonucleotide
uggcagcccagaggaucuc

SEQ ID NO: 2280476 - RNA, 19 nt, Artificial Sequence
  Description of Artificial Sequence: Synthetic oligonucleotide
ggaggugcccagagagaga

SEQ ID NO: 2280477 - RNA, 19 nt, Artificial Sequence
  Description of Artificial Sequence: Synthetic oligonucleotide
gcccuuguccugagaacca

SEQ ID NO: 2280478 - RNA, 19 nt, Artificial Sequence
  Description of Artificial Sequence: Synthetic oligonucleotide
cgucgauccagugagcucu

SEQ ID NO: 2280479 - RNA, 19 nt, Artificial Sequence
  Description of Artificial Sequence: Synthetic oligonucleotide
ggcacggucgugaaaccau

SEQ ID NO: 2280480 - RNA, 19 nt, Artificial Sequence
  Description of Artificial Sequence: Synthetic oligonucleotide
cgucaaacucuggcccucc

SEQ ID NO: 2280481 - RNA, 19 nt, Artificial Sequence
  Description of Artificial Sequence: Synthetic oligonucleotide
gcccaggagcuuaagaguu

SEQ ID NO: 2280482 - RNA, 19 nt, Artificial Sequence
  Description of Artificial Sequence: Synthetic oligonucleotide
ccaacagggcacggucgug

SEQ ID NO: 2280483 - RNA, 19 nt, Artificial Sequence
  Description of Artificial Sequence: Synthetic oligonucleotide
agaggcggcccaggagcuu

SEQ ID NO: 2280484 - RNA, 19 nt, Artificial Sequence
  Description of Artificial Sequence: Synthetic oligonucleotide
ggaacagucaugggcccuu

SEQ ID NO: 2280485 - RNA, 19 nt, Artificial Sequence
  Description of Artificial Sequence: Synthetic oligonucleotide
ccgucaaacucuggcccuc

SEQ ID NO: 2280486 - RNA, 19 nt, Artificial Sequence
  Description of Artificial Sequence: Synthetic oligonucleotide
cagggccaccuagcaugug

SEQ ID NO: 2280487 - RNA, 19 nt, Artificial Sequence
  Description of Artificial Sequence: Synthetic oligonucleotide
cccgcaacccuggucauua

SEQ ID NO: 2280488 - RNA, 19 nt, Artificial Sequence
  Description of Artificial Sequence: Synthetic oligonucleotide
cggggcauuugcagucguc

SEQ ID NO: 2280489 - RNA, 19 nt, Artificial Sequence
  Description of Artificial Sequence: Synthetic oligonucleotide
ggcggcccaggagcuuaag

SEQ ID NO: 2280490 - RNA, 19 nt, Artificial Sequence
  Description of Artificial Sequence: Synthetic oligonucleotide
ggacaggccuggagaaagu

SEQ ID NO: 2280491 - RNA, 19 nt, Artificial Sequence
  Description of Artificial Sequence: Synthetic oligonucleotide
cgcaacccuggucauuaaa

SEQ ID NO: 2280492 - RNA, 19 nt, Artificial Sequence
  Description of Artificial Sequence: Synthetic oligonucleotide
gcuggcgagcaggcagaga

SEQ ID NO: 2280493 - RNA, 19 nt, Artificial Sequence
  Description of Artificial Sequence: Synthetic oligonucleotide
aggcggcccaggagcuuaa

SEQ ID NO: 2280494 - RNA, 19 nt, Artificial Sequence
  Description of Artificial Sequence: Synthetic oligonucleotide
cucccgcaacccuggucau

SEQ ID NO: 2280495 - RNA, 19 nt, Artificial Sequence
  Description of Artificial Sequence: Synthetic oligonucleotide
gucgauccagugagcucuu

SEQ ID NO: 2280496 - RNA, 19 nt, Artificial Sequence
  Description of Artificial Sequence: Synthetic oligonucleotide
ccacagcacggggcauuug

SEQ ID NO: 2280497 - RNA, 19 nt, Artificial Sequence
  Description of Artificial Sequence: Synthetic oligonucleotide
ggcccucauggggcaguga

SEQ ID NO: 2280498 - RNA, 19 nt, Artificial Sequence
  Description of Artificial Sequence: Synthetic oligonucleotide
gccugugauccaggcucaa

SEQ ID NO: 2280499 - RNA, 19 nt, Artificial Sequence
  Description of Artificial Sequence: Synthetic oligonucleotide
ccgcaacccuggucauuaa

SEQ ID NO: 2280500 - RNA, 19 nt, Artificial Sequence
  Description of Artificial Sequence: Synthetic oligonucleotide
aaggcuuugcuucacaggc

SEQ ID NO: 2280501 - RNA, 19 nt, Artificial Sequence
  Description of Artificial Sequence: Synthetic oligonucleotide
gaguuaaaaggccagaucc

SEQ ID NO: 2280502 - RNA, 19 nt, Artificial Sequence
  Description of Artificial Sequence: Synthetic oligonucleotide
aacacguugaauuucuaag

SEQ ID NO: 2280503 - RNA, 19 nt, Artificial Sequence
  Description of Artificial Sequence: Synthetic oligonucleotide
uuuaucuuuacuucugugc

SEQ ID NO: 2280504 - RNA, 19 nt, Artificial Sequence
  Description of Artificial Sequence: Synthetic oligonucleotide
gacacuagcaugcacaacc

SEQ ID NO: 2280505 - RNA, 19 nt, Artificial Sequence
  Description of Artificial Sequence: Synthetic oligonucleotide
agaggaagaguuaaaaggc

SEQ ID NO: 2280506 - RNA, 19 nt, Artificial Sequence
  Description of Artificial Sequence: Synthetic oligonucleotide
agggagacagccuagagag

SEQ ID NO: 2280507 - RNA, 19 nt, Artificial Sequence
  Description of Artificial Sequence: Synthetic oligonucleotide
uuaucuuuacuucugugcu

SEQ ID NO: 2280508 - RNA, 19 nt, Artificial Sequence
  Description of Artificial Sequence: Synthetic oligonucleotide
cauguuugguuucagaccc

SEQ ID NO: 2280509 - RNA, 19 nt, Artificial Sequence
  Description of Artificial Sequence: Synthetic oligonucleotide
ugggguaacauaaaggggu

SEQ ID NO: 2280510 - RNA, 19 nt, Artificial Sequence
  Description of Artificial Sequence: Synthetic oligonucleotide
accuaugaaggccucaggc

SEQ ID NO: 2280511 - RNA, 19 nt, Artificial Sequence
  Description of Artificial Sequence: Synthetic oligonucleotide
ggugggguaacauaaaggg

SEQ ID NO: 2280512 - RNA, 19 nt, Artificial Sequence
  Description of Artificial Sequence: Synthetic oligonucleotide
ucuaagaaccacuugaauu

SEQ ID NO: 2280513 - RNA, 19 nt, Artificial Sequence
  Description of Artificial Sequence: Synthetic oligonucleotide
acaggaaaaccuaugaagg

SEQ ID NO: 2280514 - RNA, 19 nt, Artificial Sequence
  Description of Artificial Sequence: Synthetic oligonucleotide
uuuacuucugugcuaggug

SEQ ID NO: 2280515 - RNA, 19 nt, Artificial Sequence
  Description of Artificial Sequence: Synthetic oligonucleotide
aaaggccagauccacaacu

SEQ ID NO: 2280516 - RNA, 19 nt, Artificial Sequence
  Description of Artificial Sequence: Synthetic oligonucleotide
ugcacauucacgcgcaugc

SEQ ID NO: 2280517 - RNA, 19 nt, Artificial Sequence
  Description of Artificial Sequence: Synthetic oligonucleotide
acuagcaugcacaaccucc

SEQ ID NO: 2280518 - RNA, 19 nt, Artificial Sequence
  Description of Artificial Sequence: Synthetic oligonucleotide
aaggcuagguuccuacuuc

SEQ ID NO: 2280519 - RNA, 19 nt, Artificial Sequence
  Description of Artificial Sequence: Synthetic oligonucleotide
uuaggaguggugcacauuc

SEQ ID NO: 2280520 - RNA, 19 nt, Artificial Sequence
  Description of Artificial Sequence: Synthetic oligonucleotide
aauuucuaagaaccacuug

SEQ ID NO: 2280521 - RNA, 19 nt, Artificial Sequence
  Description of Artificial Sequence: Synthetic oligonucleotide
caaguaacuggcuuguccc

SEQ ID NO: 2280522 - RNA, 19 nt, Artificial Sequence
  Description of Artificial Sequence: Synthetic oligonucleotide
ugcauuguuucucugauuu

SEQ ID NO: 2280523 - RNA, 19 nt, Artificial Sequence
  Description of Artificial Sequence: Synthetic oligonucleotide
agaguuaaaaggccagauc

SEQ ID NO: 2280524 - RNA, 19 nt, Artificial Sequence
  Description of Artificial Sequence: Synthetic oligonucleotide
cagaaaggagcuaaguagc

SEQ ID NO: 2280525 - RNA, 19 nt, Artificial Sequence
  Description of Artificial Sequence: Synthetic oligonucleotide
cuucuuaugggcaggacac

SEQ ID NO: 2280526 - RNA, 19 nt, Artificial Sequence
  Description of Artificial Sequence: Synthetic oligonucleotide
uccacaacucugcugcugg

SEQ ID NO: 2280527 - RNA, 19 nt, Artificial Sequence
  Description of Artificial Sequence: Synthetic oligonucleotide
cuagguuccuacuuccugg

SEQ ID NO: 2280528 - RNA, 19 nt, Artificial Sequence
  Description of Artificial Sequence: Synthetic oligonucleotide
ugcacacccaaguaacugg

SEQ ID NO: 2280529 - RNA, 19 nt, Artificial Sequence
  Description of Artificial Sequence: Synthetic oligonucleotide
ucacaggcuagauucuugg

SEQ ID NO: 2280530 - RNA, 19 nt, Artificial Sequence
  Description of Artificial Sequence: Synthetic oligonucleotide
acucaugauacccugcucu

SEQ ID NO: 2280531 - RNA, 19 nt, Artificial Sequence
  Description of Artificial Sequence: Synthetic oligonucleotide
accugggacagccugaguc

SEQ ID NO: 2280532 - RNA, 19 nt, Artificial Sequence
  Description of Artificial Sequence: Synthetic oligonucleotide
caugauacccugcucuugg

SEQ ID NO: 2280533 - RNA, 19 nt, Artificial Sequence
  Description of Artificial Sequence: Synthetic oligonucleotide
acacaguauggcugcagcc

SEQ ID NO: 2280534 - RNA, 19 nt, Artificial Sequence
  Description of Artificial Sequence: Synthetic oligonucleotide
uucuccaaaccacaggaaa

SEQ ID NO: 2280535 - RNA, 19 nt, Artificial Sequence
  Description of Artificial Sequence: Synthetic oligonucleotide
cguugaauuucuaagaacc

SEQ ID NO: 2280536 - RNA, 19 nt, Artificial Sequence
  Description of Artificial Sequence: Synthetic oligonucleotide
aaggccucaggcuaaccug

SEQ ID NO: 2280537 - RNA, 19 nt, Artificial Sequence
  Description of Artificial Sequence: Synthetic oligonucleotide
aaaccuaugaaggccucag

SEQ ID NO: 2280538 - RNA, 19 nt, Artificial Sequence
  Description of Artificial Sequence: Synthetic oligonucleotide
uagacagggguuuccagcc

SEQ ID NO: 2280539 - RNA, 19 nt, Artificial Sequence
  Description of Artificial Sequence: Synthetic oligonucleotide
uguugcauuguuucucuga

SEQ ID NO: 2280540 - RNA, 19 nt, Artificial Sequence
  Description of Artificial Sequence: Synthetic oligonucleotide
uggggaaaggcuagguucc

SEQ ID NO: 2280541 - RNA, 19 nt, Artificial Sequence
  Description of Artificial Sequence: Synthetic oligonucleotide
aaggcgggcagcccucugc

SEQ ID NO: 2280542 - RNA, 19 nt, Artificial Sequence
  Description of Artificial Sequence: Synthetic oligonucleotide
acacguugaauuucuaaga

SEQ ID NO: 2280543 - RNA, 19 nt, Artificial Sequence
  Description of Artificial Sequence: Synthetic oligonucleotide
caggcuagauucuuggcag

SEQ ID NO: 2280544 - RNA, 19 nt, Artificial Sequence
  Description of Artificial Sequence: Synthetic oligonucleotide
agaaaggagcuaaguagcc

SEQ ID NO: 2280545 - RNA, 19 nt, Artificial Sequence
  Description of Artificial Sequence: Synthetic oligonucleotide
cuagcaugcacaaccuccc

SEQ ID NO: 2280546 - RNA, 19 nt, Artificial Sequence
  Description of Artificial Sequence: Synthetic oligonucleotide
aggggcacacccuagagga

SEQ ID NO: 2280547 - RNA, 19 nt, Artificial Sequence
  Description of Artificial Sequence: Synthetic oligonucleotide
caggaaaaccuaugaaggc

SEQ ID NO: 2280548 - RNA, 19 nt, Artificial Sequence
  Description of Artificial Sequence: Synthetic oligonucleotide
uagauucuuggcagguuag

SEQ ID NO: 2280549 - RNA, 19 nt, Artificial Sequence
  Description of Artificial Sequence: Synthetic oligonucleotide
uggacugcuucuccaaacc

SEQ ID NO: 2280550 - RNA, 19 nt, Artificial Sequence
  Description of Artificial Sequence: Synthetic oligonucleotide
aucuuuacuucugugcuag

SEQ ID NO: 2280551 - RNA, 19 nt, Artificial Sequence
  Description of Artificial Sequence: Synthetic oligonucleotide
guagacagggguuuccagc

SEQ ID NO: 2280552 - RNA, 19 nt, Artificial Sequence
  Description of Artificial Sequence: Synthetic oligonucleotide
gguuaggagcaucaggagg

SEQ ID NO: 2280553 - RNA, 19 nt, Artificial Sequence
  Description of Artificial Sequence: Synthetic oligonucleotide
aaccuaugaaggccucagg

SEQ ID NO: 2280554 - RNA, 19 nt, Artificial Sequence
  Description of Artificial Sequence: Synthetic oligonucleotide
ucuuaugggcaggacacag

SEQ ID NO: 2280555 - RNA, 19 nt, Artificial Sequence
  Description of Artificial Sequence: Synthetic oligonucleotide
cagguuaggagcaucagga

SEQ ID NO: 2280556 - RNA, 19 nt, Artificial Sequence
  Description of Artificial Sequence: Synthetic oligonucleotide
accacaggaaaaccuauga

SEQ ID NO: 2280557 - RNA, 19 nt, Artificial Sequence
  Description of Artificial Sequence: Synthetic oligonucleotide
aaaggcuagguuccuacuu

SEQ ID NO: 2280558 - RNA, 19 nt, Artificial Sequence
  Description of Artificial Sequence: Synthetic oligonucleotide
uaggggcacacccuagagg

SEQ ID NO: 2280559 - RNA, 19 nt, Artificial Sequence
  Description of Artificial Sequence: Synthetic oligonucleotide
auggugggguaacauaaag

SEQ ID NO: 2280560 - RNA, 19 nt, Artificial Sequence
  Description of Artificial Sequence: Synthetic oligonucleotide
aagaguuaaaaggccagau

SEQ ID NO: 2280561 - RNA, 19 nt, Artificial Sequence
  Description of Artificial Sequence: Synthetic oligonucleotide
caguccugggcauaggggc

SEQ ID NO: 2280562 - RNA, 19 nt, Artificial Sequence
  Description of Artificial Sequence: Synthetic oligonucleotide
gauacccugcucuuggcuc

SEQ ID NO: 2280563 - RNA, 19 nt, Artificial Sequence
  Description of Artificial Sequence: Synthetic oligonucleotide
uucuaagaaccacuugaau

SEQ ID NO: 2280564 - RNA, 19 nt, Artificial Sequence
  Description of Artificial Sequence: Synthetic oligonucleotide
aggcuaaccugggacagcc

SEQ ID NO: 2280565 - RNA, 19 nt, Artificial Sequence
  Description of Artificial Sequence: Synthetic oligonucleotide
acauucacgcgcaugcacg

SEQ ID NO: 2280566 - RNA, 19 nt, Artificial Sequence
  Description of Artificial Sequence: Synthetic oligonucleotide
ucuagggcugaguccaagc

SEQ ID NO: 2280567 - RNA, 19 nt, Artificial Sequence
  Description of Artificial Sequence: Synthetic oligonucleotide
cuaaguagccaggagagca

SEQ ID NO: 2280568 - RNA, 19 nt, Artificial Sequence
  Description of Artificial Sequence: Synthetic oligonucleotide
gguuucagaccccagggcc

SEQ ID NO: 2280569 - RNA, 19 nt, Artificial Sequence
  Description of Artificial Sequence: Synthetic oligonucleotide
aaguaacuggcuuguccca

SEQ ID NO: 2280570 - RNA, 19 nt, Artificial Sequence
  Description of Artificial Sequence: Synthetic oligonucleotide
guuaaaaggccagauccac

SEQ ID NO: 2280571 - RNA, 19 nt, Artificial Sequence
  Description of Artificial Sequence: Synthetic oligonucleotide
cuagggcugaguccaagcc

SEQ ID NO: 2280572 - RNA, 19 nt, Artificial Sequence
  Description of Artificial Sequence: Synthetic oligonucleotide
augauacccugcucuuggc

SEQ ID NO: 2280573 - RNA, 19 nt, Artificial Sequence
  Description of Artificial Sequence: Synthetic oligonucleotide
cugaguccaagccugcccc

SEQ ID NO: 2280574 - RNA, 19 nt, Artificial Sequence
  Description of Artificial Sequence: Synthetic oligonucleotide
ggcauguuugguuucagac

SEQ ID NO: 2280575 - RNA, 19 nt, Artificial Sequence
  Description of Artificial Sequence: Synthetic oligonucleotide
gugguagggaccuugcuuc

SEQ ID NO: 2280576 - RNA, 19 nt, Artificial Sequence
  Description of Artificial Sequence: Synthetic oligonucleotide
acaacucugcugcuggcug

SEQ ID NO: 2280577 - RNA, 19 nt, Artificial Sequence
  Description of Artificial Sequence: Synthetic oligonucleotide
ugucuaacacguugaauuu

SEQ ID NO: 2280578 - RNA, 19 nt, Artificial Sequence
  Description of Artificial Sequence: Synthetic oligonucleotide
guaacauaaaggggucagg

SEQ ID NO: 2280579 - RNA, 19 nt, Artificial Sequence
  Description of Artificial Sequence: Synthetic oligonucleotide
cuaagaaccacuugaauuu

SEQ ID NO: 2280580 - RNA, 19 nt, Artificial Sequence
  Description of Artificial Sequence: Synthetic oligonucleotide
auaggggcacacccuagag

SEQ ID NO: 2280581 - RNA, 19 nt, Artificial Sequence
  Description of Artificial Sequence: Synthetic oligonucleotide
ugauacccugcucuuggcu

SEQ ID NO: 2280582 - RNA, 19 nt, Artificial Sequence
  Description of Artificial Sequence: Synthetic oligonucleotide
agacaagggcacaaguggg

SEQ ID NO: 2280583 - RNA, 19 nt, Artificial Sequence
  Description of Artificial Sequence: Synthetic oligonucleotide
uagggcugaguccaagccu

SEQ ID NO: 2280584 - RNA, 19 nt, Artificial Sequence
  Description of Artificial Sequence: Synthetic oligonucleotide
aaaaccuaugaaggccuca

SEQ ID NO: 2280585 - RNA, 19 nt, Artificial Sequence
  Description of Artificial Sequence: Synthetic oligonucleotide
agugguagggaccuugcuu

SEQ ID NO: 2280586 - RNA, 19 nt, Artificial Sequence
  Description of Artificial Sequence: Synthetic oligonucleotide
agccccuuuccuuaggagu

SEQ ID NO: 2280587 - RNA, 19 nt, Artificial Sequence
  Description of Artificial Sequence: Synthetic oligonucleotide
gugggguaacauaaagggg

SEQ ID NO: 2280588 - RNA, 19 nt, Artificial Sequence
  Description of Artificial Sequence: Synthetic oligonucleotide
guggcuugccugcacaccc

SEQ ID NO: 2280589 - RNA, 19 nt, Artificial Sequence
  Description of Artificial Sequence: Synthetic oligonucleotide
ggagacagccuagagaggc

SEQ ID NO: 2280590 - RNA, 19 nt, Artificial Sequence
  Description of Artificial Sequence: Synthetic oligonucleotide
cauucacgcgcaugcacgc

SEQ ID NO: 2280591 - RNA, 19 nt, Artificial Sequence
  Description of Artificial Sequence: Synthetic oligonucleotide
uacuucugugcuaggugga

SEQ ID NO: 2280592 - RNA, 19 nt, Artificial Sequence
  Description of Artificial Sequence: Synthetic oligonucleotide
ugugcuagguggaggcacu

SEQ ID NO: 2280593 - RNA, 19 nt, Artificial Sequence
  Description of Artificial Sequence: Synthetic oligonucleotide
aguuaaaaggccagaucca

SEQ ID NO: 2280594 - RNA, 19 nt, Artificial Sequence
  Description of Artificial Sequence: Synthetic oligonucleotide
gauucuuggcagguuagga

SEQ ID NO: 2280595 - RNA, 19 nt, Artificial Sequence
  Description of Artificial Sequence: Synthetic oligonucleotide
aguccaagccugccccagc

SEQ ID NO: 2280596 - RNA, 19 nt, Artificial Sequence
  Description of Artificial Sequence: Synthetic oligonucleotide
ucuuuacuucugugcuagg

SEQ ID NO: 2280597 - RNA, 19 nt, Artificial Sequence
  Description of Artificial Sequence: Synthetic oligonucleotide
aggaagaguuaaaaggcca

SEQ ID NO: 2280598 - RNA, 19 nt, Artificial Sequence
  Description of Artificial Sequence: Synthetic oligonucleotide
aggagcaucaggaggcagg

SEQ ID NO: 2280599 - RNA, 19 nt, Artificial Sequence
  Description of Artificial Sequence: Synthetic oligonucleotide
gacaagggcacaagugggc

SEQ ID NO: 2280600 - RNA, 19 nt, Artificial Sequence
  Description of Artificial Sequence: Synthetic oligonucleotide
uucacgcgcaugcacgcac

SEQ ID NO: 2280601 - RNA, 19 nt, Artificial Sequence
  Description of Artificial Sequence: Synthetic oligonucleotide
aaccacaggaaaaccuaug

SEQ ID NO: 2280602 - RNA, 19 nt, Artificial Sequence
  Description of Artificial Sequence: Synthetic oligonucleotide
uaucuuuacuucugugcua

SEQ ID NO: 2280603 - RNA, 19 nt, Artificial Sequence
  Description of Artificial Sequence: Synthetic oligonucleotide
guaacuggcuugucccaag

SEQ ID NO: 2280604 - RNA, 19 nt, Artificial Sequence
  Description of Artificial Sequence: Synthetic oligonucleotide
gaaaggagcuaaguagcca

SEQ ID NO: 2280605 - RNA, 19 nt, Artificial Sequence
  Description of Artificial Sequence: Synthetic oligonucleotide
uagguuccuacuuccugga

SEQ ID NO: 2280606 - RNA, 19 nt, Artificial Sequence
  Description of Artificial Sequence: Synthetic oligonucleotide
ggaagaguuaaaaggccag

SEQ ID NO: 2280607 - RNA, 19 nt, Artificial Sequence
  Description of Artificial Sequence: Synthetic oligonucleotide
cacauucacgcgcaugcac

SEQ ID NO: 2280608 - RNA, 19 nt, Artificial Sequence
  Description of Artificial Sequence: Synthetic oligonucleotide
ucaugauacccugcucuug

SEQ ID NO: 2280609 - RNA, 19 nt, Artificial Sequence
  Description of Artificial Sequence: Synthetic oligonucleotide
aagggcacaagugggcagu

SEQ ID NO: 2280610 - RNA, 19 nt, Artificial Sequence
  Description of Artificial Sequence: Synthetic oligonucleotide
cuggacugcuucuccaaac

SEQ ID NO: 2280611 - RNA, 19 nt, Artificial Sequence
  Description of Artificial Sequence: Synthetic oligonucleotide
uccucuucuuaugggcagg

SEQ ID NO: 2280612 - RNA, 19 nt, Artificial Sequence
  Description of Artificial Sequence: Synthetic oligonucleotide
caggacucaugauacccug

SEQ ID NO: 2280613 - RNA, 19 nt, Artificial Sequence
  Description of Artificial Sequence: Synthetic oligonucleotide
caacucugcugcuggcugg

SEQ ID NO: 2280614 - RNA, 19 nt, Artificial Sequence
  Description of Artificial Sequence: Synthetic oligonucleotide
ugggagguggagcccagac

SEQ ID NO: 2280615 - RNA, 19 nt, Artificial Sequence
  Description of Artificial Sequence: Synthetic oligonucleotide
cuaugaaggccucaggcua

SEQ ID NO: 2280616 - RNA, 19 nt, Artificial Sequence
  Description of Artificial Sequence: Synthetic oligonucleotide
gugucuagggcugagucca

SEQ ID NO: 2280617 - RNA, 19 nt, Artificial Sequence
  Description of Artificial Sequence: Synthetic oligonucleotide
acaagugggcaguggcuug

SEQ ID NO: 2280618 - RNA, 19 nt, Artificial Sequence
  Description of Artificial Sequence: Synthetic oligonucleotide
agcugccuaggcauggugg

SEQ ID NO: 2280619 - RNA, 19 nt, Artificial Sequence
  Description of Artificial Sequence: Synthetic oligonucleotide
uuugcuucacaggcuagau

SEQ ID NO: 2280620 - RNA, 19 nt, Artificial Sequence
  Description of Artificial Sequence: Synthetic oligonucleotide
guuucagaccccagggccc

SEQ ID NO: 2280621 - RNA, 19 nt, Artificial Sequence
  Description of Artificial Sequence: Synthetic oligonucleotide
uaggaguggugcacauuca

SEQ ID NO: 2280622 - RNA, 19 nt, Artificial Sequence
  Description of Artificial Sequence: Synthetic oligonucleotide
cagauccacaacucugcug

SEQ ID NO: 2280623 - RNA, 19 nt, Artificial Sequence
  Description of Artificial Sequence: Synthetic oligonucleotide
cacaggcuagauucuuggc

SEQ ID NO: 2280624 - RNA, 19 nt, Artificial Sequence
  Description of Artificial Sequence: Synthetic oligonucleotide
uagcaugcacaaccucccc

SEQ ID NO: 2280625 - RNA, 19 nt, Artificial Sequence
  Description of Artificial Sequence: Synthetic oligonucleotide
cuugcuucccaggagacaa

SEQ ID NO: 2280626 - RNA, 19 nt, Artificial Sequence
  Description of Artificial Sequence: Synthetic oligonucleotide
cuucugugcuagguggagg

SEQ ID NO: 2280627 - RNA, 19 nt, Artificial Sequence
  Description of Artificial Sequence: Synthetic oligonucleotide
agacccagaaaggagcuaa

SEQ ID NO: 2280628 - RNA, 19 nt, Artificial Sequence
  Description of Artificial Sequence: Synthetic oligonucleotide
ucuuggcuccucuucuuau

SEQ ID NO: 2280629 - RNA, 19 nt, Artificial Sequence
  Description of Artificial Sequence: Synthetic oligonucleotide
ggugucuagggcugagucc

SEQ ID NO: 2280630 - RNA, 19 nt, Artificial Sequence
  Description of Artificial Sequence: Synthetic oligonucleotide
gcugccuaggcaugguggg

SEQ ID NO: 2280631 - RNA, 19 nt, Artificial Sequence
  Description of Artificial Sequence: Synthetic oligonucleotide
gcuaaccugggacagccug

SEQ ID NO: 2280632 - RNA, 19 nt, Artificial Sequence
  Description of Artificial Sequence: Synthetic oligonucleotide
uuccuuaggaguggugcac

SEQ ID NO: 2280633 - RNA, 19 nt, Artificial Sequence
  Description of Artificial Sequence: Synthetic oligonucleotide
agcaagugggcagaggcau

SEQ ID NO: 2280634 - RNA, 19 nt, Artificial Sequence
  Description of Artificial Sequence: Synthetic oligonucleotide
ggaguggugcacauucacg

SEQ ID NO: 2280635 - RNA, 19 nt, Artificial Sequence
  Description of Artificial Sequence: Synthetic oligonucleotide
ugguagggaccuugcuucc

SEQ ID NO: 2280636 - RNA, 19 nt, Artificial Sequence
  Description of Artificial Sequence: Synthetic oligonucleotide
acaagggcacaagugggca

SEQ ID NO: 2280637 - RNA, 19 nt, Artificial Sequence
  Description of Artificial Sequence: Synthetic oligonucleotide
cacacccgacacuagcaug

SEQ ID NO: 2280638 - RNA, 19 nt, Artificial Sequence
  Description of Artificial Sequence: Synthetic oligonucleotide
acaguauggcugcagccuu

SEQ ID NO: 2280639 - RNA, 19 nt, Artificial Sequence
  Description of Artificial Sequence: Synthetic oligonucleotide
gccuguaacacaguauggc

SEQ ID NO: 2280640 - RNA, 19 nt, Artificial Sequence
  Description of Artificial Sequence: Synthetic oligonucleotide
uccuuaggaguggugcaca

SEQ ID NO: 2280641 - RNA, 19 nt, Artificial Sequence
  Description of Artificial Sequence: Synthetic oligonucleotide
uugcuucccaggagacaag

SEQ ID NO: 2280642 - RNA, 19 nt, Artificial Sequence
  Description of Artificial Sequence: Synthetic oligonucleotide
gcuagguuccuacuuccug

SEQ ID NO: 2280643 - RNA, 19 nt, Artificial Sequence
  Description of Artificial Sequence: Synthetic oligonucleotide
guugcauuguuucucugau

SEQ ID NO: 2280644 - RNA, 19 nt, Artificial Sequence
  Description of Artificial Sequence: Synthetic oligonucleotide
agacagccuagagaggcug

SEQ ID NO: 2280645 - RNA, 19 nt, Artificial Sequence
  Description of Artificial Sequence: Synthetic oligonucleotide
guccaagccugccccagcc

SEQ ID NO: 2280646 - RNA, 19 nt, Artificial Sequence
  Description of Artificial Sequence: Synthetic oligonucleotide
aggcauguuugguuucaga

SEQ ID NO: 2280647 - RNA, 19 nt, Artificial Sequence
  Description of Artificial Sequence: Synthetic oligonucleotide
caugcacgcacacacccga

SEQ ID NO: 2280648 - RNA, 19 nt, Artificial Sequence
  Description of Artificial Sequence: Synthetic oligonucleotide
acccgacacuagcaugcac

SEQ ID NO: 2280649 - RNA, 19 nt, Artificial Sequence
  Description of Artificial Sequence: Synthetic oligonucleotide
cuuguugcauuguuucucu

SEQ ID NO: 2280650 - RNA, 19 nt, Artificial Sequence
  Description of Artificial Sequence: Synthetic oligonucleotide
agugggcagaggcauguuu

SEQ ID NO: 2280651 - RNA, 19 nt, Artificial Sequence
  Description of Artificial Sequence: Synthetic oligonucleotide
cacacccuagaggagcccc

SEQ ID NO: 2280652 - RNA, 19 nt, Artificial Sequence
  Description of Artificial Sequence: Synthetic oligonucleotide
uugcuucacaggcuagauu

SEQ ID NO: 2280653 - RNA, 19 nt, Artificial Sequence
  Description of Artificial Sequence: Synthetic oligonucleotide
cacacacccgacacuagca

SEQ ID NO: 2280654 - RNA, 19 nt, Artificial Sequence
  Description of Artificial Sequence: Synthetic oligonucleotide
ugccuaggcaugguggggu

SEQ ID NO: 2280655 - RNA, 19 nt, Artificial Sequence
  Description of Artificial Sequence: Synthetic oligonucleotide
uucuuaugggcaggacaca

SEQ ID NO: 2280656 - RNA, 19 nt, Artificial Sequence
  Description of Artificial Sequence: Synthetic oligonucleotide
augaaggccucaggcuaac

SEQ ID NO: 2280657 - RNA, 19 nt, Artificial Sequence
  Description of Artificial Sequence: Synthetic oligonucleotide
ccugggacagccugagucc

SEQ ID NO: 2280658 - RNA, 19 nt, Artificial Sequence
  Description of Artificial Sequence: Synthetic oligonucleotide
guagggaccuugcuuccca

SEQ ID NO: 2280659 - RNA, 19 nt, Artificial Sequence
  Description of Artificial Sequence: Synthetic oligonucleotide
acccuacccuggcagagga

SEQ ID NO: 2280660 - RNA, 19 nt, Artificial Sequence
  Description of Artificial Sequence: Synthetic oligonucleotide
cuaggcauggugggguaac

SEQ ID NO: 2280661 - RNA, 19 nt, Artificial Sequence
  Description of Artificial Sequence: Synthetic oligonucleotide
accuugcuucccaggagac

SEQ ID NO: 2280662 - RNA, 19 nt, Artificial Sequence
  Description of Artificial Sequence: Synthetic oligonucleotide
aguaacuggcuugucccaa

SEQ ID NO: 2280663 - RNA, 19 nt, Artificial Sequence
  Description of Artificial Sequence: Synthetic oligonucleotide
gagcugccuaggcauggug

SEQ ID NO: 2280664 - RNA, 19 nt, Artificial Sequence
  Description of Artificial Sequence: Synthetic oligonucleotide
gaaaggcuagguuccuacu

SEQ ID NO: 2280665 - RNA, 19 nt, Artificial Sequence
  Description of Artificial Sequence: Synthetic oligonucleotide
acacccuacccuggcagag

SEQ ID NO: 2280666 - RNA, 19 nt, Artificial Sequence
  Description of Artificial Sequence: Synthetic oligonucleotide
cauaggggcacacccuaga

SEQ ID NO: 2280667 - RNA, 19 nt, Artificial Sequence
  Description of Artificial Sequence: Synthetic oligonucleotide
cuuugcuucacaggcuaga

SEQ ID NO: 2280668 - RNA, 19 nt, Artificial Sequence
  Description of Artificial Sequence: Synthetic oligonucleotide
uugucccaaggcuuugcuu

SEQ ID NO: 2280669 - RNA, 19 nt, Artificial Sequence
  Description of Artificial Sequence: Synthetic oligonucleotide
caguauggcugcagccuug

SEQ ID NO: 2280670 - RNA, 19 nt, Artificial Sequence
  Description of Artificial Sequence: Synthetic oligonucleotide
cugggacagccugaguccc

SEQ ID NO: 2280671 - RNA, 19 nt, Artificial Sequence
  Description of Artificial Sequence: Synthetic oligonucleotide
guaugucccugauggcuca

SEQ ID NO: 2280672 - RNA, 19 nt, Artificial Sequence
  Description of Artificial Sequence: Synthetic oligonucleotide
agggcccagagcugccuag

SEQ ID NO: 2280673 - RNA, 19 nt, Artificial Sequence
  Description of Artificial Sequence: Synthetic oligonucleotide
acagccuagagaggcugug

SEQ ID NO: 2280674 - RNA, 19 nt, Artificial Sequence
  Description of Artificial Sequence: Synthetic oligonucleotide
uugcauuguuucucugauu

SEQ ID NO: 2280675 - RNA, 19 nt, Artificial Sequence
  Description of Artificial Sequence: Synthetic oligonucleotide
ugagucccuggccccuccc

SEQ ID NO: 2280676 - RNA, 19 nt, Artificial Sequence
  Description of Artificial Sequence: Synthetic oligonucleotide
auccacaacucugcugcug

SEQ ID NO: 2280677 - RNA, 19 nt, Artificial Sequence
  Description of Artificial Sequence: Synthetic oligonucleotide
gggcaggacacagugggag

SEQ ID NO: 2280678 - RNA, 19 nt, Artificial Sequence
  Description of Artificial Sequence: Synthetic oligonucleotide
agacagggguuuccagcca

SEQ ID NO: 2280679 - RNA, 19 nt, Artificial Sequence
  Description of Artificial Sequence: Synthetic oligonucleotide
gguaugucccugauggcuc

SEQ ID NO: 2280680 - RNA, 19 nt, Artificial Sequence
  Description of Artificial Sequence: Synthetic oligonucleotide
cacuagcaugcacaaccuc

SEQ ID NO: 2280681 - RNA, 19 nt, Artificial Sequence
  Description of Artificial Sequence: Synthetic oligonucleotide
uaugucccugauggcucag

SEQ ID NO: 2280682 - RNA, 19 nt, Artificial Sequence
  Description of Artificial Sequence: Synthetic oligonucleotide
ggaccuugcuucccaggag

SEQ ID NO: 2280683 - RNA, 19 nt, Artificial Sequence
  Description of Artificial Sequence: Synthetic oligonucleotide
gguuccuacuuccuggacu

SEQ ID NO: 2280684 - RNA, 19 nt, Artificial Sequence
  Description of Artificial Sequence: Synthetic oligonucleotide
gggugucuagggcugaguc

SEQ ID NO: 2280685 - RNA, 19 nt, Artificial Sequence
  Description of Artificial Sequence: Synthetic oligonucleotide
cuuuacuucugugcuaggu

SEQ ID NO: 2280686 - RNA, 19 nt, Artificial Sequence
  Description of Artificial Sequence: Synthetic oligonucleotide
uggcaguagacagggguuu

SEQ ID NO: 2280687 - RNA, 19 nt, Artificial Sequence
  Description of Artificial Sequence: Synthetic oligonucleotide
uuggcagguuaggagcauc

SEQ ID NO: 2280688 - RNA, 19 nt, Artificial Sequence
  Description of Artificial Sequence: Synthetic oligonucleotide
ugaaggccucaggcuaacc

SEQ ID NO: 2280689 - RNA, 19 nt, Artificial Sequence
  Description of Artificial Sequence: Synthetic oligonucleotide
uaggcauggugggguaaca

SEQ ID NO: 2280690 - RNA, 19 nt, Artificial Sequence
  Description of Artificial Sequence: Synthetic oligonucleotide
ugggacagccugagucccu

SEQ ID NO: 2280691 - RNA, 19 nt, Artificial Sequence
  Description of Artificial Sequence: Synthetic oligonucleotide
cauggugggguaacauaaa

SEQ ID NO: 2280692 - RNA, 19 nt, Artificial Sequence
  Description of Artificial Sequence: Synthetic oligonucleotide
aaccugggacagccugagu

SEQ ID NO: 2280693 - RNA, 19 nt, Artificial Sequence
  Description of Artificial Sequence: Synthetic oligonucleotide
cccgacacuagcaugcaca

SEQ ID NO: 2280694 - RNA, 19 nt, Artificial Sequence
  Description of Artificial Sequence: Synthetic oligonucleotide
ggcagaggaagaguuaaaa

SEQ ID NO: 2280695 - RNA, 19 nt, Artificial Sequence
  Description of Artificial Sequence: Synthetic oligonucleotide
gccccuuuccuuaggagug

SEQ ID NO: 2280696 - RNA, 19 nt, Artificial Sequence
  Description of Artificial Sequence: Synthetic oligonucleotide
gucuagggcugaguccaag

SEQ ID NO: 2280697 - RNA, 19 nt, Artificial Sequence
  Description of Artificial Sequence: Synthetic oligonucleotide
ggcuuugcuucacaggcua

SEQ ID NO: 2280698 - RNA, 19 nt, Artificial Sequence
  Description of Artificial Sequence: Synthetic oligonucleotide
cacaguauggcugcagccu

SEQ ID NO: 2280699 - RNA, 19 nt, Artificial Sequence
  Description of Artificial Sequence: Synthetic oligonucleotide
gccugcacacccaaguaac

SEQ ID NO: 2280700 - RNA, 19 nt, Artificial Sequence
  Description of Artificial Sequence: Synthetic oligonucleotide
cucuucuuaugggcaggac

SEQ ID NO: 2280701 - RNA, 19 nt, Artificial Sequence
  Description of Artificial Sequence: Synthetic oligonucleotide
caagccuguaacacaguau

SEQ ID NO: 2280702 - RNA, 19 nt, Artificial Sequence
  Description of Artificial Sequence: Synthetic oligonucleotide
ccacacccuacccuggcag

SEQ ID NO: 2280703 - RNA, 19 nt, Artificial Sequence
  Description of Artificial Sequence: Synthetic oligonucleotide
ggacucaugauacccugcu

SEQ ID NO: 2280704 - RNA, 19 nt, Artificial Sequence
  Description of Artificial Sequence: Synthetic oligonucleotide
cugcagccccuuuccuuag

SEQ ID NO: 2280705 - RNA, 19 nt, Artificial Sequence
  Description of Artificial Sequence: Synthetic oligonucleotide
uuccuacuuccuggacugc

SEQ ID NO: 2280706 - RNA, 19 nt, Artificial Sequence
  Description of Artificial Sequence: Synthetic oligonucleotide
cuaacacguugaauuucua

SEQ ID NO: 2280707 - RNA, 19 nt, Artificial Sequence
  Description of Artificial Sequence: Synthetic oligonucleotide
ggagugguagggaccuugc

SEQ ID NO: 2280708 - RNA, 19 nt, Artificial Sequence
  Description of Artificial Sequence: Synthetic oligonucleotide
auucacgcgcaugcacgca

SEQ ID NO: 2280709 - RNA, 19 nt, Artificial Sequence
  Description of Artificial Sequence: Synthetic oligonucleotide
gcaguagacagggguuucc

SEQ ID NO: 2280710 - RNA, 19 nt, Artificial Sequence
  Description of Artificial Sequence: Synthetic oligonucleotide
caguagacagggguuucca

SEQ ID NO: 2280711 - RNA, 19 nt, Artificial Sequence
  Description of Artificial Sequence: Synthetic oligonucleotide
gggguaacauaaagggguc

SEQ ID NO: 2280712 - RNA, 19 nt, Artificial Sequence
  Description of Artificial Sequence: Synthetic oligonucleotide
cuagguggaggcacugccu

SEQ ID NO: 2280713 - RNA, 19 nt, Artificial Sequence
  Description of Artificial Sequence: Synthetic oligonucleotide
ggcagguuaggagcaucag

SEQ ID NO: 2280714 - RNA, 19 nt, Artificial Sequence
  Description of Artificial Sequence: Synthetic oligonucleotide
cacacccuacccuggcaga

SEQ ID NO: 2280715 - RNA, 19 nt, Artificial Sequence
  Description of Artificial Sequence: Synthetic oligonucleotide
guaacacaguauggcugca

SEQ ID NO: 2280716 - RNA, 19 nt, Artificial Sequence
  Description of Artificial Sequence: Synthetic oligonucleotide
aggcuuugcuucacaggcu

SEQ ID NO: 2280717 - RNA, 19 nt, Artificial Sequence
  Description of Artificial Sequence: Synthetic oligonucleotide
gggguaugucccugauggc

SEQ ID NO: 2280718 - RNA, 19 nt, Artificial Sequence
  Description of Artificial Sequence: Synthetic oligonucleotide
gguagggaccuugcuuccc

SEQ ID NO: 2280719 - RNA, 19 nt, Artificial Sequence
  Description of Artificial Sequence: Synthetic oligonucleotide
ggcauaggggcacacccua

SEQ ID NO: 2280720 - RNA, 19 nt, Artificial Sequence
  Description of Artificial Sequence: Synthetic oligonucleotide
ggcacugccuuggcagggg

SEQ ID NO: 2280721 - RNA, 19 nt, Artificial Sequence
  Description of Artificial Sequence: Synthetic oligonucleotide
cugggugucuagggcugag

SEQ ID NO: 2280722 - RNA, 19 nt, Artificial Sequence
  Description of Artificial Sequence: Synthetic oligonucleotide
ggguaugucccugauggcu

SEQ ID NO: 2280723 - RNA, 19 nt, Artificial Sequence
  Description of Artificial Sequence: Synthetic oligonucleotide
ggacagccugagucccugg

SEQ ID NO: 2280724 - RNA, 19 nt, Artificial Sequence
  Description of Artificial Sequence: Synthetic oligonucleotide
agggcacaagugggcagug

SEQ ID NO: 2280725 - RNA, 19 nt, Artificial Sequence
  Description of Artificial Sequence: Synthetic oligonucleotide
cagccccaagccuguaaca

SEQ ID NO: 2280726 - RNA, 19 nt, Artificial Sequence
  Description of Artificial Sequence: Synthetic oligonucleotide
ggguaacauaaagggguca

SEQ ID NO: 2280727 - RNA, 19 nt, Artificial Sequence
  Description of Artificial Sequence: Synthetic oligonucleotide
uucagaccccagggcccag

SEQ ID NO: 2280728 - RNA, 19 nt, Artificial Sequence
  Description of Artificial Sequence: Synthetic oligonucleotide
gcaaggcagggaaggcggg

SEQ ID NO: 2280729 - RNA, 19 nt, Artificial Sequence
  Description of Artificial Sequence: Synthetic oligonucleotide
gcuugucccaaggcuuugc

SEQ ID NO: 2280730 - RNA, 19 nt, Artificial Sequence
  Description of Artificial Sequence: Synthetic oligonucleotide
caagugggcagaggcaugu

SEQ ID NO: 2280731 - RNA, 19 nt, Artificial Sequence
  Description of Artificial Sequence: Synthetic oligonucleotide
gccccaagccuguaacaca

SEQ ID NO: 2280732 - RNA, 19 nt, Artificial Sequence
  Description of Artificial Sequence: Synthetic oligonucleotide
gggacagccugagucccug

SEQ ID NO: 2280733 - RNA, 19 nt, Artificial Sequence
  Description of Artificial Sequence: Synthetic oligonucleotide
cagugggagguggagccca

SEQ ID NO: 2280734 - RNA, 19 nt, Artificial Sequence
  Description of Artificial Sequence: Synthetic oligonucleotide
aagugggcagaggcauguu

SEQ ID NO: 2280735 - RNA, 19 nt, Artificial Sequence
  Description of Artificial Sequence: Synthetic oligonucleotide
gagguggagcccagaccca

SEQ ID NO: 2280736 - RNA, 19 nt, Artificial Sequence
  Description of Artificial Sequence: Synthetic oligonucleotide
gcauaggggcacacccuag

SEQ ID NO: 2280737 - RNA, 19 nt, Artificial Sequence
  Description of Artificial Sequence: Synthetic oligonucleotide
gggcacaagugggcagugg

SEQ ID NO: 2280738 - RNA, 19 nt, Artificial Sequence
  Description of Artificial Sequence: Synthetic oligonucleotide
gacagccuagagaggcugu

SEQ ID NO: 2280739 - RNA, 19 nt, Artificial Sequence
  Description of Artificial Sequence: Synthetic oligonucleotide
gcuggagugguagggaccu

SEQ ID NO: 2280740 - RNA, 19 nt, Artificial Sequence
  Description of Artificial Sequence: Synthetic oligonucleotide
acgcgcaugcacgcacaca

SEQ ID NO: 2280741 - RNA, 19 nt, Artificial Sequence
  Description of Artificial Sequence: Synthetic oligonucleotide
gcugugaguggggcuggag

SEQ ID NO: 2280742 - RNA, 19 nt, Artificial Sequence
  Description of Artificial Sequence: Synthetic oligonucleotide
ggcaguagacagggguuuc

SEQ ID NO: 2280743 - RNA, 19 nt, Artificial Sequence
  Description of Artificial Sequence: Synthetic oligonucleotide
cacaacucugcugcuggcu

SEQ ID NO: 2280744 - RNA, 19 nt, Artificial Sequence
  Description of Artificial Sequence: Synthetic oligonucleotide
cacaagugggcaguggcuu

SEQ ID NO: 2280745 - RNA, 19 nt, Artificial Sequence
  Description of Artificial Sequence: Synthetic oligonucleotide
ccgacacuagcaugcacaa

SEQ ID NO: 2280746 - RNA, 19 nt, Artificial Sequence
  Description of Artificial Sequence: Synthetic oligonucleotide
ggugcuuguugcauuguuu

SEQ ID NO: 2280747 - RNA, 19 nt, Artificial Sequence
  Description of Artificial Sequence: Synthetic oligonucleotide
ggcuagauucuuggcaggu

SEQ ID NO: 2280748 - RNA, 19 nt, Artificial Sequence
  Description of Artificial Sequence: Synthetic oligonucleotide
gccuagagaggcugugagu

SEQ ID NO: 2280749 - RNA, 19 nt, Artificial Sequence
  Description of Artificial Sequence: Synthetic oligonucleotide
gcacauucacgcgcaugca

SEQ ID NO: 2280750 - RNA, 19 nt, Artificial Sequence
  Description of Artificial Sequence: Synthetic oligonucleotide
cacccgacacuagcaugca

SEQ ID NO: 2280751 - RNA, 19 nt, Artificial Sequence
  Description of Artificial Sequence: Synthetic oligonucleotide
cccugauggcucaguccug

SEQ ID NO: 2280752 - RNA, 19 nt, Artificial Sequence
  Description of Artificial Sequence: Synthetic oligonucleotide
cuuaggaguggugcacauu

SEQ ID NO: 2280753 - RNA, 19 nt, Artificial Sequence
  Description of Artificial Sequence: Synthetic oligonucleotide
gggcugaguccaagccugc

SEQ ID NO: 2280754 - RNA, 19 nt, Artificial Sequence
  Description of Artificial Sequence: Synthetic oligonucleotide
cgcacacacccgacacuag

SEQ ID NO: 2280755 - RNA, 19 nt, Artificial Sequence
  Description of Artificial Sequence: Synthetic oligonucleotide
gcuucacaggcuagauucu

SEQ ID NO: 2280756 - RNA, 19 nt, Artificial Sequence
  Description of Artificial Sequence: Synthetic oligonucleotide
gggugcuuguugcauuguu

SEQ ID NO: 2280757 - RNA, 19 nt, Artificial Sequence
  Description of Artificial Sequence: Synthetic oligonucleotide
gggaaaggcuagguuccua

SEQ ID NO: 2280758 - RNA, 19 nt, Artificial Sequence
  Description of Artificial Sequence: Synthetic oligonucleotide
ggcuagguuccuacuuccu

SEQ ID NO: 2280759 - RNA, 19 nt, Artificial Sequence
  Description of Artificial Sequence: Synthetic oligonucleotide
cccuggcagaggaagaguu

SEQ ID NO: 2280760 - RNA, 19 nt, Artificial Sequence
  Description of Artificial Sequence: Synthetic oligonucleotide
gcuagauucuuggcagguu

SEQ ID NO: 2280761 - RNA, 19 nt, Artificial Sequence
  Description of Artificial Sequence: Synthetic oligonucleotide
gaguggggcuggaguggua

SEQ ID NO: 2280762 - RNA, 19 nt, Artificial Sequence
  Description of Artificial Sequence: Synthetic oligonucleotide
cccacacccuacccuggca

SEQ ID NO: 2280763 - RNA, 19 nt, Artificial Sequence
  Description of Artificial Sequence: Synthetic oligonucleotide
cgacacuagcaugcacaac

SEQ ID NO: 2280764 - RNA, 19 nt, Artificial Sequence
  Description of Artificial Sequence: Synthetic oligonucleotide
ccuuaggaguggugcacau

SEQ ID NO: 2280765 - RNA, 19 nt, Artificial Sequence
  Description of Artificial Sequence: Synthetic oligonucleotide
gucccuggccccuccccuu

SEQ ID NO: 2280766 - RNA, 19 nt, Artificial Sequence
  Description of Artificial Sequence: Synthetic oligonucleotide
ggggaaaggcuagguuccu

SEQ ID NO: 2280767 - RNA, 19 nt, Artificial Sequence
  Description of Artificial Sequence: Synthetic oligonucleotide
ccuaggcauggugggguaa

SEQ ID NO: 2280768 - RNA, 19 nt, Artificial Sequence
  Description of Artificial Sequence: Synthetic oligonucleotide
ccugggugucuagggcuga

SEQ ID NO: 2280769 - RNA, 19 nt, Artificial Sequence
  Description of Artificial Sequence: Synthetic oligonucleotide
ggggugcuuguugcauugu

SEQ ID NO: 2280770 - RNA, 19 nt, Artificial Sequence
  Description of Artificial Sequence: Synthetic oligonucleotide
ggcuaaccugggacagccu

SEQ ID NO: 2280771 - RNA, 19 nt, Artificial Sequence
  Description of Artificial Sequence: Synthetic oligonucleotide
cccuacccuggcagaggaa

SEQ ID NO: 2280772 - RNA, 19 nt, Artificial Sequence
  Description of Artificial Sequence: Synthetic oligonucleotide
ccucugcagccccuuuccu

SEQ ID NO: 2280773 - RNA, 19 nt, Artificial Sequence
  Description of Artificial Sequence: Synthetic oligonucleotide
cccuuuccuuaggaguggu

SEQ ID NO: 2280774 - RNA, 19 nt, Artificial Sequence
  Description of Artificial Sequence: Synthetic oligonucleotide
cuggagugguagggaccuu

SEQ ID NO: 2280775 - RNA, 19 nt, Artificial Sequence
  Description of Artificial Sequence: Synthetic oligonucleotide
aaagcaucaguacagagcc

SEQ ID NO: 2280776 - RNA, 19 nt, Artificial Sequence
  Description of Artificial Sequence: Synthetic oligonucleotide
aaaacagucuauuagacuc

SEQ ID NO: 2280777 - RNA, 19 nt, Artificial Sequence
  Description of Artificial Sequence: Synthetic oligonucleotide
aaaauuacgacucaucuag

SEQ ID NO: 2280778 - RNA, 19 nt, Artificial Sequence
  Description of Artificial Sequence: Synthetic oligonucleotide
aauucuagaaauuagaaaa

SEQ ID NO: 2280779 - RNA, 19 nt, Artificial Sequence
  Description of Artificial Sequence: Synthetic oligonucleotide
uuauauaucaagauugccc

SEQ ID NO: 2280780 - RNA, 19 nt, Artificial Sequence
  Description of Artificial Sequence: Synthetic oligonucleotide
uucauaauacgacagugcg

SEQ ID NO: 2280781 - RNA, 19 nt, Artificial Sequence
  Description of Artificial Sequence: Synthetic oligonucleotide
aaauuguacugcuugagug

SEQ ID NO: 2280782 - RNA, 19 nt, Artificial Sequence
  Description of Artificial Sequence: Synthetic oligonucleotide
aauacgacagugcggauuc

SEQ ID NO: 2280783 - RNA, 19 nt, Artificial Sequence
  Description of Artificial Sequence: Synthetic oligonucleotide
uaguaugucagacuuagag

SEQ ID NO: 2280784 - RNA, 19 nt, Artificial Sequence
  Description of Artificial Sequence: Synthetic oligonucleotide
gauuacauagaguacuggg

SEQ ID NO: 2280785 - RNA, 19 nt, Artificial Sequence
  Description of Artificial Sequence: Synthetic oligonucleotide
uauuaguugcuuuacauca

SEQ ID NO: 2280786 - RNA, 19 nt, Artificial Sequence
  Description of Artificial Sequence: Synthetic oligonucleotide
aauuacgacucaucuagac

SEQ ID NO: 2280787 - RNA, 19 nt, Artificial Sequence
  Description of Artificial Sequence: Synthetic oligonucleotide
ugaugcauaguuuugaacu

SEQ ID NO: 2280788 - RNA, 19 nt, Artificial Sequence
  Description of Artificial Sequence: Synthetic oligonucleotide
uauauaucaagauugcccu

SEQ ID NO: 2280789 - RNA, 19 nt, Artificial Sequence
  Description of Artificial Sequence: Synthetic oligonucleotide
aauauuaguugcuuuacau

SEQ ID NO: 2280790 - RNA, 19 nt, Artificial Sequence
  Description of Artificial Sequence: Synthetic oligonucleotide
agaacugccaugcucagac

SEQ ID NO: 2280791 - RNA, 19 nt, Artificial Sequence
  Description of Artificial Sequence: Synthetic oligonucleotide
aguaauauaggaugauagg

SEQ ID NO: 2280792 - RNA, 19 nt, Artificial Sequence
  Description of Artificial Sequence: Synthetic oligonucleotide
gacuuauauaucaagauug

SEQ ID NO: 2280793 - RNA, 19 nt, Artificial Sequence
  Description of Artificial Sequence: Synthetic oligonucleotide
uuuauucuuaauuauugac

SEQ ID NO: 2280794 - RNA, 19 nt, Artificial Sequence
  Description of Artificial Sequence: Synthetic oligonucleotide
agucuauuagacucaauac

SEQ ID NO: 2280795 - RNA, 19 nt, Artificial Sequence
  Description of Artificial Sequence: Synthetic oligonucleotide
uugucuguuacuuuaguag

SEQ ID NO: 2280796 - RNA, 19 nt, Artificial Sequence
  Description of Artificial Sequence: Synthetic oligonucleotide
aauauuaguaugucagacu

SEQ ID NO: 2280797 - RNA, 19 nt, Artificial Sequence
  Description of Artificial Sequence: Synthetic oligonucleotide
aaguaauauaggaugauag

SEQ ID NO: 2280798 - RNA, 19 nt, Artificial Sequence
  Description of Artificial Sequence: Synthetic oligonucleotide
ucaacuuuuccaccgagag

SEQ ID NO: 2280799 - RNA, 19 nt, Artificial Sequence
  Description of Artificial Sequence: Synthetic oligonucleotide
uuucacuugacacauggca

SEQ ID NO: 2280800 - RNA, 19 nt, Artificial Sequence
  Description of Artificial Sequence: Synthetic oligonucleotide
uaguguaaauauuaguugc

SEQ ID NO: 2280801 - RNA, 19 nt, Artificial Sequence
  Description of Artificial Sequence: Synthetic oligonucleotide
ucuauuagacucaauacau

SEQ ID NO: 2280802 - RNA, 19 nt, Artificial Sequence
  Description of Artificial Sequence: Synthetic oligonucleotide
cugucauugauguugagag

SEQ ID NO: 2280803 - RNA, 19 nt, Artificial Sequence
  Description of Artificial Sequence: Synthetic oligonucleotide
uuagacucaauacauuaca

SEQ ID NO: 2280804 - RNA, 19 nt, Artificial Sequence
  Description of Artificial Sequence: Synthetic oligonucleotide
aauaaauuguacugcuuga

SEQ ID NO: 2280805 - RNA, 19 nt, Artificial Sequence
  Description of Artificial Sequence: Synthetic oligonucleotide
auaguguaaauauuaguug

SEQ ID NO: 2280806 - RNA, 19 nt, Artificial Sequence
  Description of Artificial Sequence: Synthetic oligonucleotide
uucauaauuuacaacuaca

SEQ ID NO: 2280807 - RNA, 19 nt, Artificial Sequence
  Description of Artificial Sequence: Synthetic oligonucleotide
auauuaguugcuuuacauc

SEQ ID NO: 2280808 - RNA, 19 nt, Artificial Sequence
  Description of Artificial Sequence: Synthetic oligonucleotide
gugaauauuaguaugucag

SEQ ID NO: 2280809 - RNA, 19 nt, Artificial Sequence
  Description of Artificial Sequence: Synthetic oligonucleotide
aauucaaggaucuuucaua

SEQ ID NO: 2280810 - RNA, 19 nt, Artificial Sequence
  Description of Artificial Sequence: Synthetic oligonucleotide
aucagaaaguaauauagga

SEQ ID NO: 2280811 - RNA, 19 nt, Artificial Sequence
  Description of Artificial Sequence: Synthetic oligonucleotide
uuacgacucaucuagacgu

SEQ ID NO: 2280812 - RNA, 19 nt, Artificial Sequence
  Description of Artificial Sequence: Synthetic oligonucleotide
uguguggugagcauaaggu

SEQ ID NO: 2280813 - RNA, 19 nt, Artificial Sequence
  Description of Artificial Sequence: Synthetic oligonucleotide
auuacgacucaucuagacg

SEQ ID NO: 2280814 - RNA, 19 nt, Artificial Sequence
  Description of Artificial Sequence: Synthetic oligonucleotide
cauaaggugaaccaacggc

SEQ ID NO: 2280815 - RNA, 19 nt, Artificial Sequence
  Description of Artificial Sequence: Synthetic oligonucleotide
cuuacugccaaaacaaaac

SEQ ID NO: 2280816 - RNA, 19 nt, Artificial Sequence
  Description of Artificial Sequence: Synthetic oligonucleotide
gucaacucuauacagacug

SEQ ID NO: 2280817 - RNA, 19 nt, Artificial Sequence
  Description of Artificial Sequence: Synthetic oligonucleotide
aauuguacugcuugaguga

SEQ ID NO: 2280818 - RNA, 19 nt, Artificial Sequence
  Description of Artificial Sequence: Synthetic oligonucleotide
ugucuuacugccaaaacaa

SEQ ID NO: 2280819 - RNA, 19 nt, Artificial Sequence
  Description of Artificial Sequence: Synthetic oligonucleotide
auuaguaugucagacuuag

SEQ ID NO: 2280820 - RNA, 19 nt, Artificial Sequence
  Description of Artificial Sequence: Synthetic oligonucleotide
ugagugaauauuaguaugu

SEQ ID NO: 2280821 - RNA, 19 nt, Artificial Sequence
  Description of Artificial Sequence: Synthetic oligonucleotide
uaauauaggaugauaggau

SEQ ID NO: 2280822 - RNA, 19 nt, Artificial Sequence
  Description of Artificial Sequence: Synthetic oligonucleotide
ucauaauacgacagugcgg

SEQ ID NO: 2280823 - RNA, 19 nt, Artificial Sequence
  Description of Artificial Sequence: Synthetic oligonucleotide
gagguugucaacucuauac

SEQ ID NO: 2280824 - RNA, 19 nt, Artificial Sequence
  Description of Artificial Sequence: Synthetic oligonucleotide
uugagugaauauuaguaug

SEQ ID NO: 2280825 - RNA, 19 nt, Artificial Sequence
  Description of Artificial Sequence: Synthetic oligonucleotide
uguggugagcauaagguga

SEQ ID NO: 2280826 - RNA, 19 nt, Artificial Sequence
  Description of Artificial Sequence: Synthetic oligonucleotide
ucaaggaucuuucauaauu

SEQ ID NO: 2280827 - RNA, 19 nt, Artificial Sequence
  Description of Artificial Sequence: Synthetic oligonucleotide
ucagaaaguaauauaggau

SEQ ID NO: 2280828 - RNA, 19 nt, Artificial Sequence
  Description of Artificial Sequence: Synthetic oligonucleotide
caaagcaucaguacagagc

SEQ ID NO: 2280829 - RNA, 19 nt, Artificial Sequence
  Description of Artificial Sequence: Synthetic oligonucleotide
auggguagugucuuacugc

SEQ ID NO: 2280830 - RNA, 19 nt, Artificial Sequence
  Description of Artificial Sequence: Synthetic oligonucleotide
gacaaaacagucuauuaga

SEQ ID NO: 2280831 - RNA, 19 nt, Artificial Sequence
  Description of Artificial Sequence: Synthetic oligonucleotide
aaauauuaguugcuuuaca

SEQ ID NO: 2280832 - RNA, 19 nt, Artificial Sequence
  Description of Artificial Sequence: Synthetic oligonucleotide
guuacuuuaguaguuguag

SEQ ID NO: 2280833 - RNA, 19 nt, Artificial Sequence
  Description of Artificial Sequence: Synthetic oligonucleotide
uauuagacucaauacauua

SEQ ID NO: 2280834 - RNA, 19 nt, Artificial Sequence
  Description of Artificial Sequence: Synthetic oligonucleotide
agagccugcauccaugagg

SEQ ID NO: 2280835 - RNA, 19 nt, Artificial Sequence
  Description of Artificial Sequence: Synthetic oligonucleotide
aaauucaaggaucuuucau

SEQ ID NO: 2280836 - RNA, 19 nt, Artificial Sequence
  Description of Artificial Sequence: Synthetic oligonucleotide
uaugguucugucauugaug

SEQ ID NO: 2280837 - RNA, 19 nt, Artificial Sequence
  Description of Artificial Sequence: Synthetic oligonucleotide
auucauaauacgacagugc

SEQ ID NO: 2280838 - RNA, 19 nt, Artificial Sequence
  Description of Artificial Sequence: Synthetic oligonucleotide
acuuauauaucaagauugc

SEQ ID NO: 2280839 - RNA, 19 nt, Artificial Sequence
  Description of Artificial Sequence: Synthetic oligonucleotide
auauuaguaugucagacuu

SEQ ID NO: 2280840 - RNA, 19 nt, Artificial Sequence
  Description of Artificial Sequence: Synthetic oligonucleotide
ugagguaugguucugucau

SEQ ID NO: 2280841 - RNA, 19 nt, Artificial Sequence
  Description of Artificial Sequence: Synthetic oligonucleotide
auaugcaagacuaaaauaa

SEQ ID NO: 2280842 - RNA, 19 nt, Artificial Sequence
  Description of Artificial Sequence: Synthetic oligonucleotide
ugcucagacuuauauauca

SEQ ID NO: 2280843 - RNA, 19 nt, Artificial Sequence
  Description of Artificial Sequence: Synthetic oligonucleotide
ugcaagacuaaaauaaauu

SEQ ID NO: 2280844 - RNA, 19 nt, Artificial Sequence
  Description of Artificial Sequence: Synthetic oligonucleotide
ucuuaauuauugacaaaac

SEQ ID NO: 2280845 - RNA, 19 nt, Artificial Sequence
  Description of Artificial Sequence: Synthetic oligonucleotide
uauaggaugauaggauggg

SEQ ID NO: 2280846 - RNA, 19 nt, Artificial Sequence
  Description of Artificial Sequence: Synthetic oligonucleotide
caucagaaaguaauauagg

SEQ ID NO: 2280847 - RNA, 19 nt, Artificial Sequence
  Description of Artificial Sequence: Synthetic oligonucleotide
ucuucuaccaaguucugaa

SEQ ID NO: 2280848 - RNA, 19 nt, Artificial Sequence
  Description of Artificial Sequence: Synthetic oligonucleotide
uaaauuguacugcuugagu

SEQ ID NO: 2280849 - RNA, 19 nt, Artificial Sequence
  Description of Artificial Sequence: Synthetic oligonucleotide
uuuacaucagaaaguaaua

SEQ ID NO: 2280850 - RNA, 19 nt, Artificial Sequence
  Description of Artificial Sequence: Synthetic oligonucleotide
uccucccucgauuacauag

SEQ ID NO: 2280851 - RNA, 19 nt, Artificial Sequence
  Description of Artificial Sequence: Synthetic oligonucleotide
augaggaaagcuccauccc

SEQ ID NO: 2280852 - RNA, 19 nt, Artificial Sequence
  Description of Artificial Sequence: Synthetic oligonucleotide
aggaggaauucauaauacg

SEQ ID NO: 2280853 - RNA, 19 nt, Artificial Sequence
  Description of Artificial Sequence: Synthetic oligonucleotide
aguaugucagacuuagaga

SEQ ID NO: 2280854 - RNA, 19 nt, Artificial Sequence
  Description of Artificial Sequence: Synthetic oligonucleotide
uuucaucggacucuccucc

SEQ ID NO: 2280855 - RNA, 19 nt, Artificial Sequence
  Description of Artificial Sequence: Synthetic oligonucleotide
uauaugcaagacuaaaaua

SEQ ID NO: 2280856 - RNA, 19 nt, Artificial Sequence
  Description of Artificial Sequence: Synthetic oligonucleotide
cuagacgugcauuuguccc

SEQ ID NO: 2280857 - RNA, 19 nt, Artificial Sequence
  Description of Artificial Sequence: Synthetic oligonucleotide
uuuuaugguagaacugcca

SEQ ID NO: 2280858 - RNA, 19 nt, Artificial Sequence
  Description of Artificial Sequence: Synthetic oligonucleotide
ugaauauuaguaugucaga

SEQ ID NO: 2280859 - RNA, 19 nt, Artificial Sequence
  Description of Artificial Sequence: Synthetic oligonucleotide
uauaucaagauugcccuug

SEQ ID NO: 2280860 - RNA, 19 nt, Artificial Sequence
  Description of Artificial Sequence: Synthetic oligonucleotide
aggaugauaggauggguag

SEQ ID NO: 2280861 - RNA, 19 nt, Artificial Sequence
  Description of Artificial Sequence: Synthetic oligonucleotide
aaauauggcauaguguaaa

SEQ ID NO: 2280862 - RNA, 19 nt, Artificial Sequence
  Description of Artificial Sequence: Synthetic oligonucleotide
cauaguuuugaacucccag

SEQ ID NO: 2280863 - RNA, 19 nt, Artificial Sequence
  Description of Artificial Sequence: Synthetic oligonucleotide
auuccguucugucuucuac

SEQ ID NO: 2280864 - RNA, 19 nt, Artificial Sequence
  Description of Artificial Sequence: Synthetic oligonucleotide
agugaauauuaguauguca

SEQ ID NO: 2280865 - RNA, 19 nt, Artificial Sequence
  Description of Artificial Sequence: Synthetic oligonucleotide
ucuaccaaguucugaagga

SEQ ID NO: 2280866 - RNA, 19 nt, Artificial Sequence
  Description of Artificial Sequence: Synthetic oligonucleotide
acaaaacagucuauuagac

SEQ ID NO: 2280867 - RNA, 19 nt, Artificial Sequence
  Description of Artificial Sequence: Synthetic oligonucleotide
guaauauaggaugauagga

SEQ ID NO: 2280868 - RNA, 19 nt, Artificial Sequence
  Description of Artificial Sequence: Synthetic oligonucleotide
ucaacucuauacagacugg

SEQ ID NO: 2280869 - RNA, 19 nt, Artificial Sequence
  Description of Artificial Sequence: Synthetic oligonucleotide
ugucuguuacuuuaguagu

SEQ ID NO: 2280870 - RNA, 19 nt, Artificial Sequence
  Description of Artificial Sequence: Synthetic oligonucleotide
auauaggaugauaggaugg

SEQ ID NO: 2280871 - RNA, 19 nt, Artificial Sequence
  Description of Artificial Sequence: Synthetic oligonucleotide
gucuauuagacucaauaca

SEQ ID NO: 2280872 - RNA, 19 nt, Artificial Sequence
  Description of Artificial Sequence: Synthetic oligonucleotide
auuagacucaauacauuac

SEQ ID NO: 2280873 - RNA, 19 nt, Artificial Sequence
  Description of Artificial Sequence: Synthetic oligonucleotide
agaugaaagcuacuguucu

SEQ ID NO: 2280874 - RNA, 19 nt, Artificial Sequence
  Description of Artificial Sequence: Synthetic oligonucleotide
aacuuggcugagaaaauuc

SEQ ID NO: 2280875 - RNA, 19 nt, Artificial Sequence
  Description of Artificial Sequence: Synthetic oligonucleotide
augguucugucauugaugu

SEQ ID NO: 2280876 - RNA, 19 nt, Artificial Sequence
  Description of Artificial Sequence: Synthetic oligonucleotide
ugcuguaugugcaggagga

SEQ ID NO: 2280877 - RNA, 19 nt, Artificial Sequence
  Description of Artificial Sequence: Synthetic oligonucleotide
agugucuuacugccaaaac

SEQ ID NO: 2280878 - RNA, 19 nt, Artificial Sequence
  Description of Artificial Sequence: Synthetic oligonucleotide
uaaauauuaguugcuuuac

SEQ ID NO: 2280879 - RNA, 19 nt, Artificial Sequence
  Description of Artificial Sequence: Synthetic oligonucleotide
uuacuuuaguaguuguaga

SEQ ID NO: 2280880 - RNA, 19 nt, Artificial Sequence
  Description of Artificial Sequence: Synthetic oligonucleotide
acuuuaguaguuguagauc

SEQ ID NO: 2280881 - RNA, 19 nt, Artificial Sequence
  Description of Artificial Sequence: Synthetic oligonucleotide
uucacuugacacauggcaa

SEQ ID NO: 2280882 - RNA, 19 nt, Artificial Sequence
  Description of Artificial Sequence: Synthetic oligonucleotide
uggguagugucuuacugcc

SEQ ID NO: 2280883 - RNA, 19 nt, Artificial Sequence
  Description of Artificial Sequence: Synthetic oligonucleotide
cauaauacgacagugcgga

SEQ ID NO: 2280884 - RNA, 19 nt, Artificial Sequence
  Description of Artificial Sequence: Synthetic oligonucleotide
gaucuuucauaauuuacaa

SEQ ID NO: 2280885 - RNA, 19 nt, Artificial Sequence
  Description of Artificial Sequence: Synthetic oligonucleotide
uguucuggcagauucuggu

SEQ ID NO: 2280886 - RNA, 19 nt, Artificial Sequence
  Description of Artificial Sequence: Synthetic oligonucleotide
gaggaauucauaauacgac

SEQ ID NO: 2280887 - RNA, 19 nt, Artificial Sequence
  Description of Artificial Sequence: Synthetic oligonucleotide
gaucuguagaaaauucaag

SEQ ID NO: 2280888 - RNA, 19 nt, Artificial Sequence
  Description of Artificial Sequence: Synthetic oligonucleotide
auucaaggaucuuucauaa

SEQ ID NO: 2280889 - RNA, 19 nt, Artificial Sequence
  Description of Artificial Sequence: Synthetic oligonucleotide
uggcauaguguaaauauua

SEQ ID NO: 2280890 - RNA, 19 nt, Artificial Sequence
  Description of Artificial Sequence: Synthetic oligonucleotide
cucagacuuauauaucaag

SEQ ID NO: 2280891 - RNA, 19 nt, Artificial Sequence
  Description of Artificial Sequence: Synthetic oligonucleotide
ucgauuacauagaguacug

SEQ ID NO: 2280892 - RNA, 19 nt, Artificial Sequence
  Description of Artificial Sequence: Synthetic oligonucleotide
ugagaaaauucugugcaca

SEQ ID NO: 2280893 - RNA, 19 nt, Artificial Sequence
  Description of Artificial Sequence: Synthetic oligonucleotide
ucuauacagacugggaugu

SEQ ID NO: 2280894 - RNA, 19 nt, Artificial Sequence
  Description of Artificial Sequence: Synthetic oligonucleotide
uguaaauauuaguugcuuu

SEQ ID NO: 2280895 - RNA, 19 nt, Artificial Sequence
  Description of Artificial Sequence: Synthetic oligonucleotide
uacuuuaguaguuguagau

SEQ ID NO: 2280896 - RNA, 19 nt, Artificial Sequence
  Description of Artificial Sequence: Synthetic oligonucleotide
aaauucugugcacaauuuu

SEQ ID NO: 2280897 - RNA, 19 nt, Artificial Sequence
  Description of Artificial Sequence: Synthetic oligonucleotide
gaugauaggauggguagug

SEQ ID NO: 2280898 - RNA, 19 nt, Artificial Sequence
  Description of Artificial Sequence: Synthetic oligonucleotide
ugcauaguuuugaacuccc

SEQ ID NO: 2280899 - RNA, 19 nt, Artificial Sequence
  Description of Artificial Sequence: Synthetic oligonucleotide
guaaauauuaguugcuuua

SEQ ID NO: 2280900 - RNA, 19 nt, Artificial Sequence
  Description of Artificial Sequence: Synthetic oligonucleotide
uuuaguaguuguagaucug

SEQ ID NO: 2280901 - RNA, 19 nt, Artificial Sequence
  Description of Artificial Sequence: Synthetic oligonucleotide
cucuauacagacugggaug

SEQ ID NO: 2280902 - RNA, 19 nt, Artificial Sequence
  Description of Artificial Sequence: Synthetic oligonucleotide
cagacuuagagaaacauua

SEQ ID NO: 2280903 - RNA, 19 nt, Artificial Sequence
  Description of Artificial Sequence: Synthetic oligonucleotide
guuuugaacucccagaacu

SEQ ID NO: 2280904 - RNA, 19 nt, Artificial Sequence
  Description of Artificial Sequence: Synthetic oligonucleotide
ucuagacgugcauuugucc

SEQ ID NO: 2280905 - RNA, 19 nt, Artificial Sequence
  Description of Artificial Sequence: Synthetic oligonucleotide
agacuuauauaucaagauu

SEQ ID NO: 2280906 - RNA, 19 nt, Artificial Sequence
  Description of Artificial Sequence: Synthetic oligonucleotide
uacaucagaaaguaauaua

SEQ ID NO: 2280907 - RNA, 19 nt, Artificial Sequence
  Description of Artificial Sequence: Synthetic oligonucleotide
acucuauacagacugggau

SEQ ID NO: 2280908 - RNA, 19 nt, Artificial Sequence
  Description of Artificial Sequence: Synthetic oligonucleotide
aauauggcauaguguaaau

SEQ ID NO: 2280909 - RNA, 19 nt, Artificial Sequence
  Description of Artificial Sequence: Synthetic oligonucleotide
augcauaguuuugaacucc

SEQ ID NO: 2280910 - RNA, 19 nt, Artificial Sequence
  Description of Artificial Sequence: Synthetic oligonucleotide
aaaguaauauaggaugaua

SEQ ID NO: 2280911 - RNA, 19 nt, Artificial Sequence
  Description of Artificial Sequence: Synthetic oligonucleotide
cuaagccaugagaugaaag

SEQ ID NO: 2280912 - RNA, 19 nt, Artificial Sequence
  Description of Artificial Sequence: Synthetic oligonucleotide
ucugucauugauguugaga

SEQ ID NO: 2280913 - RNA, 19 nt, Artificial Sequence
  Description of Artificial Sequence: Synthetic oligonucleotide
uuaugguagaacugccaug

SEQ ID NO: 2280914 - RNA, 19 nt, Artificial Sequence
  Description of Artificial Sequence: Synthetic oligonucleotide
uuaguaguuguagaucugu

SEQ ID NO: 2280915 - RNA, 19 nt, Artificial Sequence
  Description of Artificial Sequence: Synthetic oligonucleotide
aggaucuuucauaauuuac

SEQ ID NO: 2280916 - RNA, 19 nt, Artificial Sequence
  Description of Artificial Sequence: Synthetic oligonucleotide
caguacagagccugcaucc

SEQ ID NO: 2280917 - RNA, 19 nt, Artificial Sequence
  Description of Artificial Sequence: Synthetic oligonucleotide
aaaauggccucuguucucu

SEQ ID NO: 2280918 - RNA, 19 nt, Artificial Sequence
  Description of Artificial Sequence: Synthetic oligonucleotide
uucacuugcugcuguaugu

SEQ ID NO: 2280919 - RNA, 19 nt, Artificial Sequence
  Description of Artificial Sequence: Synthetic oligonucleotide
cauaguguaaauauuaguu

SEQ ID NO: 2280920 - RNA, 19 nt, Artificial Sequence
  Description of Artificial Sequence: Synthetic oligonucleotide
guguaucaaguucuggaag

SEQ ID NO: 2280921 - RNA, 19 nt, Artificial Sequence
  Description of Artificial Sequence: Synthetic oligonucleotide
agaaaguaauauaggauga

SEQ ID NO: 2280922 - RNA, 19 nt, Artificial Sequence
  Description of Artificial Sequence: Synthetic oligonucleotide
aggaaagcuccaucccugc

SEQ ID NO: 2280923 - RNA, 19 nt, Artificial Sequence
  Description of Artificial Sequence: Synthetic oligonucleotide
cuacuguucuggcagauuc

SEQ ID NO: 2280924 - RNA, 19 nt, Artificial Sequence
  Description of Artificial Sequence: Synthetic oligonucleotide
auuacauagaguacuggga

SEQ ID NO: 2280925 - RNA, 19 nt, Artificial Sequence
  Description of Artificial Sequence: Synthetic oligonucleotide
uuguagaucuguagaaaau

SEQ ID NO: 2280926 - RNA, 19 nt, Artificial Sequence
  Description of Artificial Sequence: Synthetic oligonucleotide
uguaugugcaggaggaauu

SEQ ID NO: 2280927 - RNA, 19 nt, Artificial Sequence
  Description of Artificial Sequence: Synthetic oligonucleotide
uugacaaaacagucuauua

SEQ ID NO: 2280928 - RNA, 19 nt, Artificial Sequence
  Description of Artificial Sequence: Synthetic oligonucleotide
uucucuaagccaugagaug

SEQ ID NO: 2280929 - RNA, 19 nt, Artificial Sequence
  Description of Artificial Sequence: Synthetic oligonucleotide
uguagaucuguagaaaauu

SEQ ID NO: 2280930 - RNA, 19 nt, Artificial Sequence
  Description of Artificial Sequence: Synthetic oligonucleotide
ucagacuuagagaaacauu

SEQ ID NO: 2280931 - RNA, 19 nt, Artificial Sequence
  Description of Artificial Sequence: Synthetic oligonucleotide
aaggcugcuuucaucggac

SEQ ID NO: 2280932 - RNA, 19 nt, Artificial Sequence
  Description of Artificial Sequence: Synthetic oligonucleotide
cugcucaacuuuuccaccg

SEQ ID NO: 2280933 - RNA, 19 nt, Artificial Sequence
  Description of Artificial Sequence: Synthetic oligonucleotide
cuuuaguaguuguagaucu

SEQ ID NO: 2280934 - RNA, 19 nt, Artificial Sequence
  Description of Artificial Sequence: Synthetic oligonucleotide
aaggaucuuucauaauuua

SEQ ID NO: 2280935 - RNA, 19 nt, Artificial Sequence
  Description of Artificial Sequence: Synthetic oligonucleotide
ucaguacagagccugcauc

SEQ ID NO: 2280936 - RNA, 19 nt, Artificial Sequence
  Description of Artificial Sequence: Synthetic oligonucleotide
uggcugagaaaauucugug

SEQ ID NO: 2280937 - RNA, 19 nt, Artificial Sequence
  Description of Artificial Sequence: Synthetic oligonucleotide
guuguagaucuguagaaaa

SEQ ID NO: 2280938 - RNA, 19 nt, Artificial Sequence
  Description of Artificial Sequence: Synthetic oligonucleotide
ugcuuuacaucagaaagua

SEQ ID NO: 2280939 - RNA, 19 nt, Artificial Sequence
  Description of Artificial Sequence: Synthetic oligonucleotide
ggaauucauaauacgacag

SEQ ID NO: 2280940 - RNA, 19 nt, Artificial Sequence
  Description of Artificial Sequence: Synthetic oligonucleotide
caagacuaaaauaaauugu

SEQ ID NO: 2280941 - RNA, 19 nt, Artificial Sequence
  Description of Artificial Sequence: Synthetic oligonucleotide
ugagagguugucaacucua

SEQ ID NO: 2280942 - RNA, 19 nt, Artificial Sequence
  Description of Artificial Sequence: Synthetic oligonucleotide
uuccguucugucuucuacc

SEQ ID NO: 2280943 - RNA, 19 nt, Artificial Sequence
  Description of Artificial Sequence: Synthetic oligonucleotide
gguugucaacucuauacag

SEQ ID NO: 2280944 - RNA, 19 nt, Artificial Sequence
  Description of Artificial Sequence: Synthetic oligonucleotide
uauacagacugggaugugu

SEQ ID NO: 2280945 - RNA, 19 nt, Artificial Sequence
  Description of Artificial Sequence: Synthetic oligonucleotide
ugcuugagugaauauuagu

SEQ ID NO: 2280946 - RNA, 19 nt, Artificial Sequence
  Description of Artificial Sequence: Synthetic oligonucleotide
ucacuugacacauggcaaa

SEQ ID NO: 2280947 - RNA, 19 nt, Artificial Sequence
  Description of Artificial Sequence: Synthetic oligonucleotide
ugaaagcuacuguucuggc

SEQ ID NO: 2280948 - RNA, 19 nt, Artificial Sequence
  Description of Artificial Sequence: Synthetic oligonucleotide
aacugccaugcucagacuu

SEQ ID NO: 2280949 - RNA, 19 nt, Artificial Sequence
  Description of Artificial Sequence: Synthetic oligonucleotide
caacucuauacagacuggg

SEQ ID NO: 2280950 - RNA, 19 nt, Artificial Sequence
  Description of Artificial Sequence: Synthetic oligonucleotide
agcauaaggugaaccaacg

SEQ ID NO: 2280951 - RNA, 19 nt, Artificial Sequence
  Description of Artificial Sequence: Synthetic oligonucleotide
ugauaggauggguaguguc

SEQ ID NO: 2280952 - RNA, 19 nt, Artificial Sequence
  Description of Artificial Sequence: Synthetic oligonucleotide
ugucauugauguugagagc

SEQ ID NO: 2280953 - RNA, 19 nt, Artificial Sequence
  Description of Artificial Sequence: Synthetic oligonucleotide
agcaucaguacagagccug

SEQ ID NO: 2280954 - RNA, 19 nt, Artificial Sequence
  Description of Artificial Sequence: Synthetic oligonucleotide
ugguagaacugccaugcuc

SEQ ID NO: 2280955 - RNA, 19 nt, Artificial Sequence
  Description of Artificial Sequence: Synthetic oligonucleotide
uggaaggucugucaucauc

SEQ ID NO: 2280956 - RNA, 19 nt, Artificial Sequence
  Description of Artificial Sequence: Synthetic oligonucleotide
agacucaauacauuacauu

SEQ ID NO: 2280957 - RNA, 19 nt, Artificial Sequence
  Description of Artificial Sequence: Synthetic oligonucleotide
gaaagcuacuguucuggca

SEQ ID NO: 2280958 - RNA, 19 nt, Artificial Sequence
  Description of Artificial Sequence: Synthetic oligonucleotide
ugaaggaaggcugcuuuca

SEQ ID NO: 2280959 - RNA, 19 nt, Artificial Sequence
  Description of Artificial Sequence: Synthetic oligonucleotide
aguguaaauauuaguugcu

SEQ ID NO: 2280960 - RNA, 19 nt, Artificial Sequence
  Description of Artificial Sequence: Synthetic oligonucleotide
cuucuaccaaguucugaag

SEQ ID NO: 2280961 - RNA, 19 nt, Artificial Sequence
  Description of Artificial Sequence: Synthetic oligonucleotide
guagaucuguagaaaauuc

SEQ ID NO: 2280962 - RNA, 19 nt, Artificial Sequence
  Description of Artificial Sequence: Synthetic oligonucleotide
ucccucaucugagagguug

SEQ ID NO: 2280963 - RNA, 19 nt, Artificial Sequence
  Description of Artificial Sequence: Synthetic oligonucleotide
uauugacaaaacagucuau

SEQ ID NO: 2280964 - RNA, 19 nt, Artificial Sequence
  Description of Artificial Sequence: Synthetic oligonucleotide
uccguucugucuucuacca

SEQ ID NO: 2280965 - RNA, 19 nt, Artificial Sequence
  Description of Artificial Sequence: Synthetic oligonucleotide
cagucuauuagacucaaua

SEQ ID NO: 2280966 - RNA, 19 nt, Artificial Sequence
  Description of Artificial Sequence: Synthetic oligonucleotide
uacgacagugcggauuccg

SEQ ID NO: 2280967 - RNA, 19 nt, Artificial Sequence
  Description of Artificial Sequence: Synthetic oligonucleotide
gagaugaaagcuacuguuc

SEQ ID NO: 2280968 - RNA, 19 nt, Artificial Sequence
  Description of Artificial Sequence: Synthetic oligonucleotide
cugagaaaauucugugcac

SEQ ID NO: 2280969 - RNA, 19 nt, Artificial Sequence
  Description of Artificial Sequence: Synthetic oligonucleotide
uauuaguaugucagacuua

SEQ ID NO: 2280970 - RNA, 19 nt, Artificial Sequence
  Description of Artificial Sequence: Synthetic oligonucleotide
uccaccgagagcugaagaa

SEQ ID NO: 2280971 - RNA, 19 nt, Artificial Sequence
  Description of Artificial Sequence: Synthetic oligonucleotide
gacagugcggauuccguuc

SEQ ID NO: 2280972 - RNA, 19 nt, Artificial Sequence
  Description of Artificial Sequence: Synthetic oligonucleotide
ugagcauaaggugaaccaa

SEQ ID NO: 2280973 - RNA, 19 nt, Artificial Sequence
  Description of Artificial Sequence: Synthetic oligonucleotide
ggaucuuucauaauuuaca

SEQ ID NO: 2280974 - RNA, 19 nt, Artificial Sequence
  Description of Artificial Sequence: Synthetic oligonucleotide
guguggugagcauaaggug

SEQ ID NO: 2280975 - RNA, 19 nt, Artificial Sequence
  Description of Artificial Sequence: Synthetic oligonucleotide
aacucuauacagacuggga

SEQ ID NO: 2280976 - RNA, 19 nt, Artificial Sequence
  Description of Artificial Sequence: Synthetic oligonucleotide
agcucccucaucugagagg

SEQ ID NO: 2280977 - RNA, 19 nt, Artificial Sequence
  Description of Artificial Sequence: Synthetic oligonucleotide
cuuucaucggacucuccuc

SEQ ID NO: 2280978 - RNA, 19 nt, Artificial Sequence
  Description of Artificial Sequence: Synthetic oligonucleotide
guugagagcucccucaucu

SEQ ID NO: 2280979 - RNA, 19 nt, Artificial Sequence
  Description of Artificial Sequence: Synthetic oligonucleotide
cugcuguaugugcaggagg

SEQ ID NO: 2280980 - RNA, 19 nt, Artificial Sequence
  Description of Artificial Sequence: Synthetic oligonucleotide
uguggaauugaugcauagu

SEQ ID NO: 2280981 - RNA, 19 nt, Artificial Sequence
  Description of Artificial Sequence: Synthetic oligonucleotide
gagcauaaggugaaccaac

SEQ ID NO: 2280982 - RNA, 19 nt, Artificial Sequence
  Description of Artificial Sequence: Synthetic oligonucleotide
ugcaggaggaauucauaau

SEQ ID NO: 2280983 - RNA, 19 nt, Artificial Sequence
  Description of Artificial Sequence: Synthetic oligonucleotide
acgacucaucuagacgugc

SEQ ID NO: 2280984 - RNA, 19 nt, Artificial Sequence
  Description of Artificial Sequence: Synthetic oligonucleotide
aaucacuuguucacuugcu

SEQ ID NO: 2280985 - RNA, 19 nt, Artificial Sequence
  Description of Artificial Sequence: Synthetic oligonucleotide
uuuuccaccgagagcugaa

SEQ ID NO: 2280986 - RNA, 19 nt, Artificial Sequence
  Description of Artificial Sequence: Synthetic oligonucleotide
ugcggauuccguucugucu

SEQ ID NO: 2280987 - RNA, 19 nt, Artificial Sequence
  Description of Artificial Sequence: Synthetic oligonucleotide
ggaggaauucauaauacga

SEQ ID NO: 2280988 - RNA, 19 nt, Artificial Sequence
  Description of Artificial Sequence: Synthetic oligonucleotide
aucuagacgugcauuuguc

SEQ ID NO: 2280989 - RNA, 19 nt, Artificial Sequence
  Description of Artificial Sequence: Synthetic oligonucleotide
uacgacucaucuagacgug

SEQ ID NO: 2280990 - RNA, 19 nt, Artificial Sequence
  Description of Artificial Sequence: Synthetic oligonucleotide
gucauugauguugagagcu

SEQ ID NO: 2280991 - RNA, 19 nt, Artificial Sequence
  Description of Artificial Sequence: Synthetic oligonucleotide
auaucaagauugcccuugu

SEQ ID NO: 2280992 - RNA, 19 nt, Artificial Sequence
  Description of Artificial Sequence: Synthetic oligonucleotide
caccgagagcugaagaaug

SEQ ID NO: 2280993 - RNA, 19 nt, Artificial Sequence
  Description of Artificial Sequence: Synthetic oligonucleotide
ggcugagaaaauucugugc

SEQ ID NO: 2280994 - RNA, 19 nt, Artificial Sequence
  Description of Artificial Sequence: Synthetic oligonucleotide
gguagaacugccaugcuca

SEQ ID NO: 2280995 - RNA, 19 nt, Artificial Sequence
  Description of Artificial Sequence: Synthetic oligonucleotide
uuaguaugucagacuuaga

SEQ ID NO: 2280996 - RNA, 19 nt, Artificial Sequence
  Description of Artificial Sequence: Synthetic oligonucleotide
uacuguucuggcagauucu

SEQ ID NO: 2280997 - RNA, 19 nt, Artificial Sequence
  Description of Artificial Sequence: Synthetic oligonucleotide
agguaugguucugucauug

SEQ ID NO: 2280998 - RNA, 19 nt, Artificial Sequence
  Description of Artificial Sequence: Synthetic oligonucleotide
guugucaacucuauacaga

SEQ ID NO: 2280999 - RNA, 19 nt, Artificial Sequence
  Description of Artificial Sequence: Synthetic oligonucleotide
guagaaaauucaaggaucu

SEQ ID NO: 2281000 - RNA, 19 nt, Artificial Sequence
  Description of Artificial Sequence: Synthetic oligonucleotide
gagugaauauuaguauguc

SEQ ID NO: 2281001 - RNA, 19 nt, Artificial Sequence
  Description of Artificial Sequence: Synthetic oligonucleotide
aguuguagaucuguagaaa

SEQ ID NO: 2281002 - RNA, 19 nt, Artificial Sequence
  Description of Artificial Sequence: Synthetic oligonucleotide
uaguaguuguagaucugua

SEQ ID NO: 2281003 - RNA, 19 nt, Artificial Sequence
  Description of Artificial Sequence: Synthetic oligonucleotide
guggaauugaugcauaguu

SEQ ID NO: 2281004 - RNA, 19 nt, Artificial Sequence
  Description of Artificial Sequence: Synthetic oligonucleotide
cuugagugaauauuaguau

SEQ ID NO: 2281005 - RNA, 19 nt, Artificial Sequence
  Description of Artificial Sequence: Synthetic oligonucleotide
ugcucaacuuuuccaccga

SEQ ID NO: 2281006 - RNA, 19 nt, Artificial Sequence
  Description of Artificial Sequence: Synthetic oligonucleotide
uaauacgacagugcggauu

SEQ ID NO: 2281007 - RNA, 19 nt, Artificial Sequence
  Description of Artificial Sequence: Synthetic oligonucleotide
gagccugcauccaugagga

SEQ ID NO: 2281008 - RNA, 19 nt, Artificial Sequence
  Description of Artificial Sequence: Synthetic oligonucleotide
aacagucuauuagacucaa

SEQ ID NO: 2281009 - RNA, 19 nt, Artificial Sequence
  Description of Artificial Sequence: Synthetic oligonucleotide
uacugcuugagugaauauu

SEQ ID NO: 2281010 - RNA, 19 nt, Artificial Sequence
  Description of Artificial Sequence: Synthetic oligonucleotide
aaauuacgacucaucuaga

SEQ ID NO: 2281011 - RNA, 19 nt, Artificial Sequence
  Description of Artificial Sequence: Synthetic oligonucleotide
uucaucggacucuccuccc

SEQ ID NO: 2281012 - RNA, 19 nt, Artificial Sequence
  Description of Artificial Sequence: Synthetic oligonucleotide
gauaggauggguagugucu

SEQ ID NO: 2281013 - RNA, 19 nt, Artificial Sequence
  Description of Artificial Sequence: Synthetic oligonucleotide
uggccucuguucucuaagc

SEQ ID NO: 2281014 - RNA, 19 nt, Artificial Sequence
  Description of Artificial Sequence: Synthetic oligonucleotide
cucccucgauuacauagag

SEQ ID NO: 2281015 - RNA, 19 nt, Artificial Sequence
  Description of Artificial Sequence: Synthetic oligonucleotide
auuguacugcuugagugaa

SEQ ID NO: 2281016 - RNA, 19 nt, Artificial Sequence
  Description of Artificial Sequence: Synthetic oligonucleotide
ucuccucccucgauuacau

SEQ ID NO: 2281017 - RNA, 19 nt, Artificial Sequence
  Description of Artificial Sequence: Synthetic oligonucleotide
acagacugggauguguggu

SEQ ID NO: 2281018 - RNA, 19 nt, Artificial Sequence
  Description of Artificial Sequence: Synthetic oligonucleotide
accgagagcugaagaaugg

SEQ ID NO: 2281019 - RNA, 19 nt, Artificial Sequence
  Description of Artificial Sequence: Synthetic oligonucleotide
aagcuacuguucuggcaga

SEQ ID NO: 2281020 - RNA, 19 nt, Artificial Sequence
  Description of Artificial Sequence: Synthetic oligonucleotide
aagauugcccuugucuguu

SEQ ID NO: 2281021 - RNA, 19 nt, Artificial Sequence
  Description of Artificial Sequence: Synthetic oligonucleotide
ucaucggacucuccucccu

SEQ ID NO: 2281022 - RNA, 19 nt, Artificial Sequence
  Description of Artificial Sequence: Synthetic oligonucleotide
acagugcggauuccguucu

SEQ ID NO: 2281023 - RNA, 19 nt, Artificial Sequence
  Description of Artificial Sequence: Synthetic oligonucleotide
cucgauuacauagaguacu

SEQ ID NO: 2281024 - RNA, 19 nt, Artificial Sequence
  Description of Artificial Sequence: Synthetic oligonucleotide
gacuuagagaaacauuauu

SEQ ID NO: 2281025 - RNA, 19 nt, Artificial Sequence
  Description of Artificial Sequence: Synthetic oligonucleotide
uagugucuuacugccaaaa

SEQ ID NO: 2281026 - RNA, 19 nt, Artificial Sequence
  Description of Artificial Sequence: Synthetic oligonucleotide
gguguaucaaguucuggaa

SEQ ID NO: 2281027 - RNA, 19 nt, Artificial Sequence
  Description of Artificial Sequence: Synthetic oligonucleotide
gugcaggaggaauucauaa

SEQ ID NO: 2281028 - RNA, 19 nt, Artificial Sequence
  Description of Artificial Sequence: Synthetic oligonucleotide
uaucaagauugcccuuguc

SEQ ID NO: 2281029 - RNA, 19 nt, Artificial Sequence
  Description of Artificial Sequence: Synthetic oligonucleotide
cccucgauuacauagagua

SEQ ID NO: 2281030 - RNA, 19 nt, Artificial Sequence
  Description of Artificial Sequence: Synthetic oligonucleotide
auauaucaagauugcccuu

SEQ ID NO: 2281031 - RNA, 19 nt, Artificial Sequence
  Description of Artificial Sequence: Synthetic oligonucleotide
auaggaugauaggaugggu

SEQ ID NO: 2281032 - RNA, 19 nt, Artificial Sequence
  Description of Artificial Sequence: Synthetic oligonucleotide
cagacuuauauaucaagau

SEQ ID NO: 2281033 - RNA, 19 nt, Artificial Sequence
  Description of Artificial Sequence: Synthetic oligonucleotide
caaaacagucuauuagacu

SEQ ID NO: 2281034 - RNA, 19 nt, Artificial Sequence
  Description of Artificial Sequence: Synthetic oligonucleotide
gcuugagugaauauuagua

SEQ ID NO: 2281035 - RNA, 19 nt, Artificial Sequence
  Description of Artificial Sequence: Synthetic oligonucleotide
cucaacuuuuccaccgaga

SEQ ID NO: 2281036 - RNA, 19 nt, Artificial Sequence
  Description of Artificial Sequence: Synthetic oligonucleotide
ucccucgauuacauagagu

SEQ ID NO: 2281037 - RNA, 19 nt, Artificial Sequence
  Description of Artificial Sequence: Synthetic oligonucleotide
cugguguaucaaguucugg

SEQ ID NO: 2281038 - RNA, 19 nt, Artificial Sequence
  Description of Artificial Sequence: Synthetic oligonucleotide
cuguucucuaagccaugag

SEQ ID NO: 2281039 - RNA, 19 nt, Artificial Sequence
  Description of Artificial Sequence: Synthetic oligonucleotide
gauucugguguaucaaguu

SEQ ID NO: 2281040 - RNA, 19 nt, Artificial Sequence
  Description of Artificial Sequence: Synthetic oligonucleotide
caucuguggaauugaugca

SEQ ID NO: 2281041 - RNA, 19 nt, Artificial Sequence
  Description of Artificial Sequence: Synthetic oligonucleotide
guaugugcaggaggaauuc

SEQ ID NO: 2281042 - RNA, 19 nt, Artificial Sequence
  Description of Artificial Sequence: Synthetic oligonucleotide
cugagguaugguucuguca

SEQ ID NO: 2281043 - RNA, 19 nt, Artificial Sequence
  Description of Artificial Sequence: Synthetic oligonucleotide
gaaaguaauauaggaugau

SEQ ID NO: 2281044 - RNA, 19 nt, Artificial Sequence
  Description of Artificial Sequence: Synthetic oligonucleotide
gauguguggugagcauaag

SEQ ID NO: 2281045 - RNA, 19 nt, Artificial Sequence
  Description of Artificial Sequence: Synthetic oligonucleotide
cgagagcugaagaaugggg

SEQ ID NO: 2281046 - RNA, 19 nt, Artificial Sequence
  Description of Artificial Sequence: Synthetic oligonucleotide
auauggcauaguguaaaua

SEQ ID NO: 2281047 - RNA, 19 nt, Artificial Sequence
  Description of Artificial Sequence: Synthetic oligonucleotide
aguacagagccugcaucca

SEQ ID NO: 2281048 - RNA, 19 nt, Artificial Sequence
  Description of Artificial Sequence: Synthetic oligonucleotide
agagguugucaacucuaua

SEQ ID NO: 2281049 - RNA, 19 nt, Artificial Sequence
  Description of Artificial Sequence: Synthetic oligonucleotide
uguucacuugcugcuguau

SEQ ID NO: 2281050 - RNA, 19 nt, Artificial Sequence
  Description of Artificial Sequence: Synthetic oligonucleotide
ggcagauucugguguauca

SEQ ID NO: 2281051 - RNA, 19 nt, Artificial Sequence
  Description of Artificial Sequence: Synthetic oligonucleotide
ggaaggcugcuuucaucgg

SEQ ID NO: 2281052 - RNA, 19 nt, Artificial Sequence
  Description of Artificial Sequence: Synthetic oligonucleotide
augauaggauggguagugu

SEQ ID NO: 2281053 - RNA, 19 nt, Artificial Sequence
  Description of Artificial Sequence: Synthetic oligonucleotide
ugcuuucaucggacucucc

SEQ ID NO: 2281054 - RNA, 19 nt, Artificial Sequence
  Description of Artificial Sequence: Synthetic oligonucleotide
guaugguucugucauugau

SEQ ID NO: 2281055 - RNA, 19 nt, Artificial Sequence
  Description of Artificial Sequence: Synthetic oligonucleotide
cucuguucucuaagccaug

SEQ ID NO: 2281056 - RNA, 19 nt, Artificial Sequence
  Description of Artificial Sequence: Synthetic oligonucleotide
auacgacagugcggauucc

SEQ ID NO: 2281057 - RNA, 19 nt, Artificial Sequence
  Description of Artificial Sequence: Synthetic oligonucleotide
caucccugcucaacuuuuc

SEQ ID NO: 2281058 - RNA, 19 nt, Artificial Sequence
  Description of Artificial Sequence: Synthetic oligonucleotide
gccaugagaugaaagcuac

SEQ ID NO: 2281059 - RNA, 19 nt, Artificial Sequence
  Description of Artificial Sequence: Synthetic oligonucleotide
agugcggauuccguucugu

SEQ ID NO: 2281060 - RNA, 19 nt, Artificial Sequence
  Description of Artificial Sequence: Synthetic oligonucleotide
aggugaaccaacggcuggu

SEQ ID NO: 2281061 - RNA, 19 nt, Artificial Sequence
  Description of Artificial Sequence: Synthetic oligonucleotide
gcauaguguaaauauuagu

SEQ ID NO: 2281062 - RNA, 19 nt, Artificial Sequence
  Description of Artificial Sequence: Synthetic oligonucleotide
agccaugagaugaaagcua

SEQ ID NO: 2281063 - RNA, 19 nt, Artificial Sequence
  Description of Artificial Sequence: Synthetic oligonucleotide
auaauacgacagugcggau

SEQ ID NO: 2281064 - RNA, 19 nt, Artificial Sequence
  Description of Artificial Sequence: Synthetic oligonucleotide
uuguucacuugcugcugua

SEQ ID NO: 2281065 - RNA, 19 nt, Artificial Sequence
  Description of Artificial Sequence: Synthetic oligonucleotide
ccaaguucugaaggaaggc

SEQ ID NO: 2281066 - RNA, 19 nt, Artificial Sequence
  Description of Artificial Sequence: Synthetic oligonucleotide
caucggacucuccucccuc

SEQ ID NO: 2281067 - RNA, 19 nt, Artificial Sequence
  Description of Artificial Sequence: Synthetic oligonucleotide
uggcagauucugguguauc

SEQ ID NO: 2281068 - RNA, 19 nt, Artificial Sequence
  Description of Artificial Sequence: Synthetic oligonucleotide
ccucgauuacauagaguac

SEQ ID NO: 2281069 - RNA, 19 nt, Artificial Sequence
  Description of Artificial Sequence: Synthetic oligonucleotide
cuauuagacucaauacauu

SEQ ID NO: 2281070 - RNA, 19 nt, Artificial Sequence
  Description of Artificial Sequence: Synthetic oligonucleotide
uaggauggguagugucuua

SEQ ID NO: 2281071 - RNA, 19 nt, Artificial Sequence
  Description of Artificial Sequence: Synthetic oligonucleotide
cuguuacuuuaguaguugu

SEQ ID NO: 2281072 - RNA, 19 nt, Artificial Sequence
  Description of Artificial Sequence: Synthetic oligonucleotide
gguaugguucugucauuga

SEQ ID NO: 2281073 - RNA, 19 nt, Artificial Sequence
  Description of Artificial Sequence: Synthetic oligonucleotide
gauuccguucugucuucua

SEQ ID NO: 2281074 - RNA, 19 nt, Artificial Sequence
  Description of Artificial Sequence: Synthetic oligonucleotide
cuauacagacugggaugug

SEQ ID NO: 2281075 - RNA, 19 nt, Artificial Sequence
  Description of Artificial Sequence: Synthetic oligonucleotide
cagagccugcauccaugag

SEQ ID NO: 2281076 - RNA, 19 nt, Artificial Sequence
  Description of Artificial Sequence: Synthetic oligonucleotide
gugcggauuccguucuguc

SEQ ID NO: 2281077 - RNA, 19 nt, Artificial Sequence
  Description of Artificial Sequence: Synthetic oligonucleotide
ugcccuugucuguuacuuu

SEQ ID NO: 2281078 - RNA, 19 nt, Artificial Sequence
  Description of Artificial Sequence: Synthetic oligonucleotide
cugcuuucaucggacucuc

SEQ ID NO: 2281079 - RNA, 19 nt, Artificial Sequence
  Description of Artificial Sequence: Synthetic oligonucleotide
acgacagugcggauuccgu

SEQ ID NO: 2281080 - RNA, 19 nt, Artificial Sequence
  Description of Artificial Sequence: Synthetic oligonucleotide
guguaaauauuaguugcuu

SEQ ID NO: 2281081 - RNA, 19 nt, Artificial Sequence
  Description of Artificial Sequence: Synthetic oligonucleotide
cccuugucuguuacuuuag

SEQ ID NO: 2281082 - RNA, 19 nt, Artificial Sequence
  Description of Artificial Sequence: Synthetic oligonucleotide
acugccaugcucagacuua

SEQ ID NO: 2281083 - RNA, 19 nt, Artificial Sequence
  Description of Artificial Sequence: Synthetic oligonucleotide
ggauguguggugagcauaa

SEQ ID NO: 2281084 - RNA, 19 nt, Artificial Sequence
  Description of Artificial Sequence: Synthetic oligonucleotide
ccaacccaaagcaucagua

SEQ ID NO: 2281085 - RNA, 19 nt, Artificial Sequence
  Description of Artificial Sequence: Synthetic oligonucleotide
ccgagagcugaagaauggg

SEQ ID NO: 2281086 - RNA, 19 nt, Artificial Sequence
  Description of Artificial Sequence: Synthetic oligonucleotide
cugcauccaugaggaaagc

SEQ ID NO: 2281087 - RNA, 19 nt, Artificial Sequence
  Description of Artificial Sequence: Synthetic oligonucleotide
agauugcccuugucuguua

SEQ ID NO: 2281088 - RNA, 19 nt, Artificial Sequence
  Description of Artificial Sequence: Synthetic oligonucleotide
cgauuacauagaguacugg

SEQ ID NO: 2281089 - RNA, 19 nt, Artificial Sequence
  Description of Artificial Sequence: Synthetic oligonucleotide
ugguucugucauugauguu

SEQ ID NO: 2281090 - RNA, 19 nt, Artificial Sequence
  Description of Artificial Sequence: Synthetic oligonucleotide
gccugcauccaugaggaaa

SEQ ID NO: 2281091 - RNA, 19 nt, Artificial Sequence
  Description of Artificial Sequence: Synthetic oligonucleotide
cuguaugugcaggaggaau

SEQ ID NO: 2281092 - RNA, 19 nt, Artificial Sequence
  Description of Artificial Sequence: Synthetic oligonucleotide
caucaucuguggaauugau

SEQ ID NO: 2281093 - RNA, 19 nt, Artificial Sequence
  Description of Artificial Sequence: Synthetic oligonucleotide
cccagaacuuggcugagaa

SEQ ID NO: 2281094 - RNA, 19 nt, Artificial Sequence
  Description of Artificial Sequence: Synthetic oligonucleotide
gaacugccaugcucagacu

SEQ ID NO: 2281095 - RNA, 19 nt, Artificial Sequence
  Description of Artificial Sequence: Synthetic oligonucleotide
acagucuauuagacucaau

SEQ ID NO: 2281096 - RNA, 19 nt, Artificial Sequence
  Description of Artificial Sequence: Synthetic oligonucleotide
ccucccucgauuacauaga

SEQ ID NO: 2281097 - RNA, 19 nt, Artificial Sequence
  Description of Artificial Sequence: Synthetic oligonucleotide
guacugcuugagugaauau

SEQ ID NO: 2281098 - RNA, 19 nt, Artificial Sequence
  Description of Artificial Sequence: Synthetic oligonucleotide
ccaugcucagacuuauaua

SEQ ID NO: 2281099 - RNA, 19 nt, Artificial Sequence
  Description of Artificial Sequence: Synthetic oligonucleotide
cagugcggauuccguucug

SEQ ID NO: 2281100 - RNA, 19 nt, Artificial Sequence
  Description of Artificial Sequence: Synthetic oligonucleotide
gagguaugguucugucauu

SEQ ID NO: 2281101 - RNA, 19 nt, Artificial Sequence
  Description of Artificial Sequence: Synthetic oligonucleotide
gcauaguuuugaacuccca

SEQ ID NO: 2281102 - RNA, 19 nt, Artificial Sequence
  Description of Artificial Sequence: Synthetic oligonucleotide
gcggauuccguucugucuu

SEQ ID NO: 2281103 - RNA, 19 nt, Artificial Sequence
  Description of Artificial Sequence: Synthetic oligonucleotide
ggauggguagugucuuacu

SEQ ID NO: 2281104 - RNA, 19 nt, Artificial Sequence
  Description of Artificial Sequence: Synthetic oligonucleotide
ccucuguucucuaagccau

SEQ ID NO: 2281105 - RNA, 19 nt, Artificial Sequence
  Description of Artificial Sequence: Synthetic oligonucleotide
ggaugauaggauggguagu

SEQ ID NO: 2281106 - RNA, 19 nt, Artificial Sequence
  Description of Artificial Sequence: Synthetic oligonucleotide
ggaaagcuccaucccugcu

SEQ ID NO: 2281107 - RNA, 19 nt, Artificial Sequence
  Description of Artificial Sequence: Synthetic oligonucleotide
gugaaccaacggcugguuu

SEQ ID NO: 2281108 - RNA, 19 nt, Artificial Sequence
  Description of Artificial Sequence: Synthetic oligonucleotide
cccaaagcaucaguacaga

SEQ ID NO: 2281109 - RNA, 19 nt, Artificial Sequence
  Description of Artificial Sequence: Synthetic oligonucleotide
ccagaacuuggcugagaaa

SEQ ID NO: 2281110 - RNA, 19 nt, Artificial Sequence
  Description of Artificial Sequence: Synthetic oligonucleotide
gcuguaugugcaggaggaa

SEQ ID NO: 2281111 - RNA, 19 nt, Artificial Sequence
  Description of Artificial Sequence: Synthetic oligonucleotide
ggacucuccucccucgauu

SEQ ID NO: 2281112 - RNA, 19 nt, Artificial Sequence
  Description of Artificial Sequence: Synthetic oligonucleotide
cugccaugcucagacuuau

SEQ ID NO: 2281113 - RNA, 19 nt, Artificial Sequence
  Description of Artificial Sequence: Synthetic oligonucleotide
cuccaucccugcucaacuu

SEQ ID NO: 2281114 - RNA, 19 nt, Artificial Sequence
  Description of Artificial Sequence: Synthetic oligonucleotide
ccuugucuguuacuuuagu

SEQ ID NO: 2281115 - RNA, 19 nt, Artificial Sequence
  Description of Artificial Sequence: Synthetic oligonucleotide
gggcugagguaugguucug

SEQ ID NO: 2281116 - RNA, 19 nt, Artificial Sequence
  Description of Artificial Sequence: Synthetic oligonucleotide
cggauuccguucugucuuc

SEQ ID NO: 2281117 - RNA, 19 nt, Artificial Sequence
  Description of Artificial Sequence: Synthetic oligonucleotide
cuccucccucgauuacaua

SEQ ID NO: 2281118 - RNA, 19 nt, Artificial Sequence
  Description of Artificial Sequence: Synthetic oligonucleotide
ccaugagaugaaagcuacu

SEQ ID NO: 2281119 - RNA, 19 nt, Artificial Sequence
  Description of Artificial Sequence: Synthetic oligonucleotide
ggauuccguucugucuucu

SEQ ID NO: 2281120 - RNA, 19 nt, Artificial Sequence
  Description of Artificial Sequence: Synthetic oligonucleotide
ccguucugucuucuaccaa

SEQ ID NO: 2281121 - RNA, 19 nt, Artificial Sequence
  Description of Artificial Sequence: Synthetic oligonucleotide
ccaucccugcucaacuuuu

SEQ ID NO: 2281122 - RNA, 19 nt, Artificial Sequence
  Description of Artificial Sequence: Synthetic oligonucleotide
ggugaaccaacggcugguu

SEQ ID NO: 2281123 - RNA, 19 nt, Artificial Sequence
  Description of Artificial Sequence: Synthetic oligonucleotide
ccaccgagagcugaagaau

SEQ ID NO: 2281124 - RNA, 19 nt, Artificial Sequence
  Description of Artificial Sequence: Synthetic oligonucleotide
gcuacuguucuggcagauu

SEQ ID NO: 2281125 - RNA, 19 nt, Artificial Sequence
  Description of Artificial Sequence: Synthetic oligonucleotide
cgacagugcggauuccguu

SEQ ID NO: 2281126 - RNA, 19 nt, Artificial Sequence
  Description of Artificial Sequence: Synthetic oligonucleotide
cucccucaucugagagguu

SEQ ID NO: 2281127 - RNA, 19 nt, Artificial Sequence
  Description of Artificial Sequence: Synthetic oligonucleotide
cggacucuccucccucgau

SEQ ID NO: 2281128 - RNA, 19 nt, Artificial Sequence
  Description of Artificial Sequence: Synthetic oligonucleotide
aaagacuuaaggcuguggg

SEQ ID NO: 2281129 - RNA, 19 nt, Artificial Sequence
  Description of Artificial Sequence: Synthetic oligonucleotide
aaggcugugggguauaucg

SEQ ID NO: 2281130 - RNA, 19 nt, Artificial Sequence
  Description of Artificial Sequence: Synthetic oligonucleotide
aauggcaacuuauuuguag

SEQ ID NO: 2281131 - RNA, 19 nt, Artificial Sequence
  Description of Artificial Sequence: Synthetic oligonucleotide
aacgauuuuggcugugacc

SEQ ID NO: 2281132 - RNA, 19 nt, Artificial Sequence
  Description of Artificial Sequence: Synthetic oligonucleotide
uguguaaggacacaugacu

SEQ ID NO: 2281133 - RNA, 19 nt, Artificial Sequence
  Description of Artificial Sequence: Synthetic oligonucleotide
ucugagaaucucaucaaag

SEQ ID NO: 2281134 - RNA, 19 nt, Artificial Sequence
  Description of Artificial Sequence: Synthetic oligonucleotide
uugaagaaggcacagagua

SEQ ID NO: 2281135 - RNA, 19 nt, Artificial Sequence
  Description of Artificial Sequence: Synthetic oligonucleotide
uauuuguaggcucaucacc

SEQ ID NO: 2281136 - RNA, 19 nt, Artificial Sequence
  Description of Artificial Sequence: Synthetic oligonucleotide
agaaucucaucaaaguucc

SEQ ID NO: 2281137 - RNA, 19 nt, Artificial Sequence
  Description of Artificial Sequence: Synthetic oligonucleotide
uccuacaaagacuuaaggc

SEQ ID NO: 2281138 - RNA, 19 nt, Artificial Sequence
  Description of Artificial Sequence: Synthetic oligonucleotide
aagacuuaaggcugugggg

SEQ ID NO: 2281139 - RNA, 19 nt, Artificial Sequence
  Description of Artificial Sequence: Synthetic oligonucleotide
cuuaauuacucugagaauc

SEQ ID NO: 2281140 - RNA, 19 nt, Artificial Sequence
  Description of Artificial Sequence: Synthetic oligonucleotide
agcaaucaacuuuacauuc

SEQ ID NO: 2281141 - RNA, 19 nt, Artificial Sequence
  Description of Artificial Sequence: Synthetic oligonucleotide
aagagaaugccccaugagu

SEQ ID NO: 2281142 - RNA, 19 nt, Artificial Sequence
  Description of Artificial Sequence: Synthetic oligonucleotide
ucaucaaaguuccugccag

SEQ ID NO: 2281143 - RNA, 19 nt, Artificial Sequence
  Description of Artificial Sequence: Synthetic oligonucleotide
gaccuaacgauuuuggcug

SEQ ID NO: 2281144 - RNA, 19 nt, Artificial Sequence
  Description of Artificial Sequence: Synthetic oligonucleotide
agaguaaagaaucccaaga

SEQ ID NO: 2281145 - RNA, 19 nt, Artificial Sequence
  Description of Artificial Sequence: Synthetic oligonucleotide
aucaacuuuacauuccucu

SEQ ID NO: 2281146 - RNA, 19 nt, Artificial Sequence
  Description of Artificial Sequence: Synthetic oligonucleotide
ucgaugaucggaaauggca

SEQ ID NO: 2281147 - RNA, 19 nt, Artificial Sequence
  Description of Artificial Sequence: Synthetic oligonucleotide
aaagagaaugccccaugag

SEQ ID NO: 2281148 - RNA, 19 nt, Artificial Sequence
  Description of Artificial Sequence: Synthetic oligonucleotide
uuaauuacucugagaaucu

SEQ ID NO: 2281149 - RNA, 19 nt, Artificial Sequence
  Description of Artificial Sequence: Synthetic oligonucleotide
aaaagagaaugccccauga

SEQ ID NO: 2281150 - RNA, 19 nt, Artificial Sequence
  Description of Artificial Sequence: Synthetic oligonucleotide
aacuaggaggcgcaagccg

SEQ ID NO: 2281151 - RNA, 19 nt, Artificial Sequence
  Description of Artificial Sequence: Synthetic oligonucleotide
auggcaacuuauuuguagg

SEQ ID NO: 2281152 - RNA, 19 nt, Artificial Sequence
  Description of Artificial Sequence: Synthetic oligonucleotide
aaucucaucaaaguuccug

SEQ ID NO: 2281153 - RNA, 19 nt, Artificial Sequence
  Description of Artificial Sequence: Synthetic oligonucleotide
gacgcggguaacuaggagg

SEQ ID NO: 2281154 - RNA, 19 nt, Artificial Sequence
  Description of Artificial Sequence: Synthetic oligonucleotide
ucuauagaaagagcaauca

SEQ ID NO: 2281155 - RNA, 19 nt, Artificial Sequence
  Description of Artificial Sequence: Synthetic oligonucleotide
augacugucagcuggcauc

SEQ ID NO: 2281156 - RNA, 19 nt, Artificial Sequence
  Description of Artificial Sequence: Synthetic oligonucleotide
uucuauggaacuguguaag

SEQ ID NO: 2281157 - RNA, 19 nt, Artificial Sequence
  Description of Artificial Sequence: Synthetic oligonucleotide
gacgcuaucacccuccuuc

SEQ ID NO: 2281158 - RNA, 19 nt, Artificial Sequence
  Description of Artificial Sequence: Synthetic oligonucleotide
ucuggcgccagcuuugccg

SEQ ID NO: 2281159 - RNA, 19 nt, Artificial Sequence
  Description of Artificial Sequence: Synthetic oligonucleotide
acuguguaaggacacauga

SEQ ID NO: 2281160 - RNA, 19 nt, Artificial Sequence
  Description of Artificial Sequence: Synthetic oligonucleotide
cuacaaagacuuaaggcug

SEQ ID NO: 2281161 - RNA, 19 nt, Artificial Sequence
  Description of Artificial Sequence: Synthetic oligonucleotide
uauggaacuguguaaggac

SEQ ID NO: 2281162 - RNA, 19 nt, Artificial Sequence
  Description of Artificial Sequence: Synthetic oligonucleotide
uuuaaugagccagagguau

SEQ ID NO: 2281163 - RNA, 19 nt, Artificial Sequence
  Description of Artificial Sequence: Synthetic oligonucleotide
auagaaagagcaaucaacu

SEQ ID NO: 2281164 - RNA, 19 nt, Artificial Sequence
  Description of Artificial Sequence: Synthetic oligonucleotide
uauagugaccuaacgauuu

SEQ ID NO: 2281165 - RNA, 19 nt, Artificial Sequence
  Description of Artificial Sequence: Synthetic oligonucleotide
ucuuggcaaacucuggcgc

SEQ ID NO: 2281166 - RNA, 19 nt, Artificial Sequence
  Description of Artificial Sequence: Synthetic oligonucleotide
gagacuuaauuacucugag

SEQ ID NO: 2281167 - RNA, 19 nt, Artificial Sequence
  Description of Artificial Sequence: Synthetic oligonucleotide
acugucuauagaaagagca

SEQ ID NO: 2281168 - RNA, 19 nt, Artificial Sequence
  Description of Artificial Sequence: Synthetic oligonucleotide
ugggguaaagucccguggg

SEQ ID NO: 2281169 - RNA, 19 nt, Artificial Sequence
  Description of Artificial Sequence: Synthetic oligonucleotide
agagaaugccccaugaguc

SEQ ID NO: 2281170 - RNA, 19 nt, Artificial Sequence
  Description of Artificial Sequence: Synthetic oligonucleotide
cagaaggauggcaaggucc

SEQ ID NO: 2281171 - RNA, 19 nt, Artificial Sequence
  Description of Artificial Sequence: Synthetic oligonucleotide
gagagacuuaauuacucug

SEQ ID NO: 2281172 - RNA, 19 nt, Artificial Sequence
  Description of Artificial Sequence: Synthetic oligonucleotide
ucuauggaacuguguaagg

SEQ ID NO: 2281173 - RNA, 19 nt, Artificial Sequence
  Description of Artificial Sequence: Synthetic oligonucleotide
guaaaggauagacagcuuc

SEQ ID NO: 2281174 - RNA, 19 nt, Artificial Sequence
  Description of Artificial Sequence: Synthetic oligonucleotide
acgauuuuggcugugacca

SEQ ID NO: 2281175 - RNA, 19 nt, Artificial Sequence
  Description of Artificial Sequence: Synthetic oligonucleotide
ugagaaucucaucaaaguu

SEQ ID NO: 2281176 - RNA, 19 nt, Artificial Sequence
  Description of Artificial Sequence: Synthetic oligonucleotide
ggugguauuggccucaaag

SEQ ID NO: 2281177 - RNA, 19 nt, Artificial Sequence
  Description of Artificial Sequence: Synthetic oligonucleotide
guaacuaggaggcgcaagc

SEQ ID NO: 2281178 - RNA, 19 nt, Artificial Sequence
  Description of Artificial Sequence: Synthetic oligonucleotide
gagguauagugaccuaacg

SEQ ID NO: 2281179 - RNA, 19 nt, Artificial Sequence
  Description of Artificial Sequence: Synthetic oligonucleotide
uguaaggacacaugacugu

SEQ ID NO: 2281180 - RNA, 19 nt, Artificial Sequence
  Description of Artificial Sequence: Synthetic oligonucleotide
ucccaagaaaguuuuggug

SEQ ID NO: 2281181 - RNA, 19 nt, Artificial Sequence
  Description of Artificial Sequence: Synthetic oligonucleotide
ucaucgaugaucggaaaug

SEQ ID NO: 2281182 - RNA, 19 nt, Artificial Sequence
  Description of Artificial Sequence: Synthetic oligonucleotide
cauuuccauuuaaugagcc

SEQ ID NO: 2281183 - RNA, 19 nt, Artificial Sequence
  Description of Artificial Sequence: Synthetic oligonucleotide
agccccaacuccuacaaag

SEQ ID NO: 2281184 - RNA, 19 nt, Artificial Sequence
  Description of Artificial Sequence: Synthetic oligonucleotide
agguauagugaccuaacga

SEQ ID NO: 2281185 - RNA, 19 nt, Artificial Sequence
  Description of Artificial Sequence: Synthetic oligonucleotide
ugcuggauccaacaugccc

SEQ ID NO: 2281186 - RNA, 19 nt, Artificial Sequence
  Description of Artificial Sequence: Synthetic oligonucleotide
guauuggccucaaaguugg

SEQ ID NO: 2281187 - RNA, 19 nt, Artificial Sequence
  Description of Artificial Sequence: Synthetic oligonucleotide
uccucaacacugucuauag

SEQ ID NO: 2281188 - RNA, 19 nt, Artificial Sequence
  Description of Artificial Sequence: Synthetic oligonucleotide
gaccaugacgcuaucaccc

SEQ ID NO: 2281189 - RNA, 19 nt, Artificial Sequence
  Description of Artificial Sequence: Synthetic oligonucleotide
aauuacucugagaaucuca

SEQ ID NO: 2281190 - RNA, 19 nt, Artificial Sequence
  Description of Artificial Sequence: Synthetic oligonucleotide
aagagcaaucaacuuuaca

SEQ ID NO: 2281191 - RNA, 19 nt, Artificial Sequence
  Description of Artificial Sequence: Synthetic oligonucleotide
aucggagguaucucuugcc

SEQ ID NO: 2281192 - RNA, 19 nt, Artificial Sequence
  Description of Artificial Sequence: Synthetic oligonucleotide
aacacugucuauagaaaga

SEQ ID NO: 2281193 - RNA, 19 nt, Artificial Sequence
  Description of Artificial Sequence: Synthetic oligonucleotide
cucaacacugucuauagaa

SEQ ID NO: 2281194 - RNA, 19 nt, Artificial Sequence
  Description of Artificial Sequence: Synthetic oligonucleotide
cauugcagcgagcagcugc

SEQ ID NO: 2281195 - RNA, 19 nt, Artificial Sequence
  Description of Artificial Sequence: Synthetic oligonucleotide
acuaggaggcgcaagccgc

SEQ ID NO: 2281196 - RNA, 19 nt, Artificial Sequence
  Description of Artificial Sequence: Synthetic oligonucleotide
aggcacagaguaaagaauc

SEQ ID NO: 2281197 - RNA, 19 nt, Artificial Sequence
  Description of Artificial Sequence: Synthetic oligonucleotide
uugucaucgaugaucggaa

SEQ ID NO: 2281198 - RNA, 19 nt, Artificial Sequence
  Description of Artificial Sequence: Synthetic oligonucleotide
cccaagaaaguuuuggugc

SEQ ID NO: 2281199 - RNA, 19 nt, Artificial Sequence
  Description of Artificial Sequence: Synthetic oligonucleotide
uuucuauggaacuguguaa

SEQ ID NO: 2281200 - RNA, 19 nt, Artificial Sequence
  Description of Artificial Sequence: Synthetic oligonucleotide
cuccuacaaagacuuaagg

SEQ ID NO: 2281201 - RNA, 19 nt, Artificial Sequence
  Description of Artificial Sequence: Synthetic oligonucleotide
uaucggagguaucucuugc

SEQ ID NO: 2281202 - RNA, 19 nt, Artificial Sequence
  Description of Artificial Sequence: Synthetic oligonucleotide
uuuggcugugaccacacua

SEQ ID NO: 2281203 - RNA, 19 nt, Artificial Sequence
  Description of Artificial Sequence: Synthetic oligonucleotide
ugugggguauaucggaggu

SEQ ID NO: 2281204 - RNA, 19 nt, Artificial Sequence
  Description of Artificial Sequence: Synthetic oligonucleotide
ugucuauagaaagagcaau

SEQ ID NO: 2281205 - RNA, 19 nt, Artificial Sequence
  Description of Artificial Sequence: Synthetic oligonucleotide
uacaaagacuuaaggcugu

SEQ ID NO: 2281206 - RNA, 19 nt, Artificial Sequence
  Description of Artificial Sequence: Synthetic oligonucleotide
cagaguaaagaaucccaag

SEQ ID NO: 2281207 - RNA, 19 nt, Artificial Sequence
  Description of Artificial Sequence: Synthetic oligonucleotide
aacuccuacaaagacuuaa

SEQ ID NO: 2281208 - RNA, 19 nt, Artificial Sequence
  Description of Artificial Sequence: Synthetic oligonucleotide
auuuguaggcucaucacca

SEQ ID NO: 2281209 - RNA, 19 nt, Artificial Sequence
  Description of Artificial Sequence: Synthetic oligonucleotide
ucucuugccagacgggaga

SEQ ID NO: 2281210 - RNA, 19 nt, Artificial Sequence
  Description of Artificial Sequence: Synthetic oligonucleotide
agugaccuaacgauuuugg

SEQ ID NO: 2281211 - RNA, 19 nt, Artificial Sequence
  Description of Artificial Sequence: Synthetic oligonucleotide
uuccauuuaaugagccaga

SEQ ID NO: 2281212 - RNA, 19 nt, Artificial Sequence
  Description of Artificial Sequence: Synthetic oligonucleotide
uccauuuaaugagccagag

SEQ ID NO: 2281213 - RNA, 19 nt, Artificial Sequence
  Description of Artificial Sequence: Synthetic oligonucleotide
guaagcauugauguccuug

SEQ ID NO: 2281214 - RNA, 19 nt, Artificial Sequence
  Description of Artificial Sequence: Synthetic oligonucleotide
agcuucaguuucuugucag

SEQ ID NO: 2281215 - RNA, 19 nt, Artificial Sequence
  Description of Artificial Sequence: Synthetic oligonucleotide
agacuuaaggcuguggggu

SEQ ID NO: 2281216 - RNA, 19 nt, Artificial Sequence
  Description of Artificial Sequence: Synthetic oligonucleotide
agggacagaaugcuguuga

SEQ ID NO: 2281217 - RNA, 19 nt, Artificial Sequence
  Description of Artificial Sequence: Synthetic oligonucleotide
accacacuaggauauuucu

SEQ ID NO: 2281218 - RNA, 19 nt, Artificial Sequence
  Description of Artificial Sequence: Synthetic oligonucleotide
agacgggagaucuuuggug

SEQ ID NO: 2281219 - RNA, 19 nt, Artificial Sequence
  Description of Artificial Sequence: Synthetic oligonucleotide
auggcaaggucccuguucu

SEQ ID NO: 2281220 - RNA, 19 nt, Artificial Sequence
  Description of Artificial Sequence: Synthetic oligonucleotide
ccggguaaaggauagacag

SEQ ID NO: 2281221 - RNA, 19 nt, Artificial Sequence
  Description of Artificial Sequence: Synthetic oligonucleotide
gacgggagaucuuugguga

SEQ ID NO: 2281222 - RNA, 19 nt, Artificial Sequence
  Description of Artificial Sequence: Synthetic oligonucleotide
gugccauuuccauuuaaug

SEQ ID NO: 2281223 - RNA, 19 nt, Artificial Sequence
  Description of Artificial Sequence: Synthetic oligonucleotide
uggcaacuuauuuguaggc

SEQ ID NO: 2281224 - RNA, 19 nt, Artificial Sequence
  Description of Artificial Sequence: Synthetic oligonucleotide
gaaaucguggaagcggaug

SEQ ID NO: 2281225 - RNA, 19 nt, Artificial Sequence
  Description of Artificial Sequence: Synthetic oligonucleotide
uaaggacacaugacuguca

SEQ ID NO: 2281226 - RNA, 19 nt, Artificial Sequence
  Description of Artificial Sequence: Synthetic oligonucleotide
uccucuuggcaaacucugg

SEQ ID NO: 2281227 - RNA, 19 nt, Artificial Sequence
  Description of Artificial Sequence: Synthetic oligonucleotide
ucggagguaucucuugcca

SEQ ID NO: 2281228 - RNA, 19 nt, Artificial Sequence
  Description of Artificial Sequence: Synthetic oligonucleotide
guucuugucaucgaugauc

SEQ ID NO: 2281229 - RNA, 19 nt, Artificial Sequence
  Description of Artificial Sequence: Synthetic oligonucleotide
uccauugcagcgagcagcu

SEQ ID NO: 2281230 - RNA, 19 nt, Artificial Sequence
  Description of Artificial Sequence: Synthetic oligonucleotide
aaucguggaagcggaugcg

SEQ ID NO: 2281231 - RNA, 19 nt, Artificial Sequence
  Description of Artificial Sequence: Synthetic oligonucleotide
uaacgauuuuggcugugac

SEQ ID NO: 2281232 - RNA, 19 nt, Artificial Sequence
  Description of Artificial Sequence: Synthetic oligonucleotide
aucccaagaaaguuuuggu

SEQ ID NO: 2281233 - RNA, 19 nt, Artificial Sequence
  Description of Artificial Sequence: Synthetic oligonucleotide
aguuccugccagugguggc

SEQ ID NO: 2281234 - RNA, 19 nt, Artificial Sequence
  Description of Artificial Sequence: Synthetic oligonucleotide
aaugccccaugagucuccc

SEQ ID NO: 2281235 - RNA, 19 nt, Artificial Sequence
  Description of Artificial Sequence: Synthetic oligonucleotide
uauaucggagguaucucuu

SEQ ID NO: 2281236 - RNA, 19 nt, Artificial Sequence
  Description of Artificial Sequence: Synthetic oligonucleotide
cacagaguaaagaauccca

SEQ ID NO: 2281237 - RNA, 19 nt, Artificial Sequence
  Description of Artificial Sequence: Synthetic oligonucleotide
uuccagucaacugggguag

SEQ ID NO: 2281238 - RNA, 19 nt, Artificial Sequence
  Description of Artificial Sequence: Synthetic oligonucleotide
acuuaauuacucugagaau

SEQ ID NO: 2281239 - RNA, 19 nt, Artificial Sequence
  Description of Artificial Sequence: Synthetic oligonucleotide
auaucggagguaucucuug

SEQ ID NO: 2281240 - RNA, 19 nt, Artificial Sequence
  Description of Artificial Sequence: Synthetic oligonucleotide
acgcggguaacuaggaggc

SEQ ID NO: 2281241 - RNA, 19 nt, Artificial Sequence
  Description of Artificial Sequence: Synthetic oligonucleotide
agagacuuaauuacucuga

SEQ ID NO: 2281242 - RNA, 19 nt, Artificial Sequence
  Description of Artificial Sequence: Synthetic oligonucleotide
ugguccucaacacugucua

SEQ ID NO: 2281243 - RNA, 19 nt, Artificial Sequence
  Description of Artificial Sequence: Synthetic oligonucleotide
gauauuucuauggaacugu

SEQ ID NO: 2281244 - RNA, 19 nt, Artificial Sequence
  Description of Artificial Sequence: Synthetic oligonucleotide
agcuggagagacuuaauua

SEQ ID NO: 2281245 - RNA, 19 nt, Artificial Sequence
  Description of Artificial Sequence: Synthetic oligonucleotide
agacuuaauuacucugaga

SEQ ID NO: 2281246 - RNA, 19 nt, Artificial Sequence
  Description of Artificial Sequence: Synthetic oligonucleotide
uaaguccccgagaagcagu

SEQ ID NO: 2281247 - RNA, 19 nt, Artificial Sequence
  Description of Artificial Sequence: Synthetic oligonucleotide
aaacucuggcgccagcuuu

SEQ ID NO: 2281248 - RNA, 19 nt, Artificial Sequence
  Description of Artificial Sequence: Synthetic oligonucleotide
aucgaugaucggaaauggc

SEQ ID NO: 2281249 - RNA, 19 nt, Artificial Sequence
  Description of Artificial Sequence: Synthetic oligonucleotide
cuguguaaggacacaugac

SEQ ID NO: 2281250 - RNA, 19 nt, Artificial Sequence
  Description of Artificial Sequence: Synthetic oligonucleotide
ccuccuuccagucaacugg

SEQ ID NO: 2281251 - RNA, 19 nt, Artificial Sequence
  Description of Artificial Sequence: Synthetic oligonucleotide
acacuaggauauuucuaug

SEQ ID NO: 2281252 - RNA, 19 nt, Artificial Sequence
  Description of Artificial Sequence: Synthetic oligonucleotide
uaucucuugccagacggga

SEQ ID NO: 2281253 - RNA, 19 nt, Artificial Sequence
  Description of Artificial Sequence: Synthetic oligonucleotide
gauggugggaaggaccaug

SEQ ID NO: 2281254 - RNA, 19 nt, Artificial Sequence
  Description of Artificial Sequence: Synthetic oligonucleotide
gugaccuaacgauuuuggc

SEQ ID NO: 2281255 - RNA, 19 nt, Artificial Sequence
  Description of Artificial Sequence: Synthetic oligonucleotide
ugggguauaucggagguau

SEQ ID NO: 2281256 - RNA, 19 nt, Artificial Sequence
  Description of Artificial Sequence: Synthetic oligonucleotide
acagaaugcuguugaagaa

SEQ ID NO: 2281257 - RNA, 19 nt, Artificial Sequence
  Description of Artificial Sequence: Synthetic oligonucleotide
ucggaaauggcaacuuauu

SEQ ID NO: 2281258 - RNA, 19 nt, Artificial Sequence
  Description of Artificial Sequence: Synthetic oligonucleotide
cugugggguauaucggagg

SEQ ID NO: 2281259 - RNA, 19 nt, Artificial Sequence
  Description of Artificial Sequence: Synthetic oligonucleotide
cacugucuauagaaagagc

SEQ ID NO: 2281260 - RNA, 19 nt, Artificial Sequence
  Description of Artificial Sequence: Synthetic oligonucleotide
auugauguccuugcuccag

SEQ ID NO: 2281261 - RNA, 19 nt, Artificial Sequence
  Description of Artificial Sequence: Synthetic oligonucleotide
auuacucugagaaucucau

SEQ ID NO: 2281262 - RNA, 19 nt, Artificial Sequence
  Description of Artificial Sequence: Synthetic oligonucleotide
ggaaaaguuguuuggcuuc

SEQ ID NO: 2281263 - RNA, 19 nt, Artificial Sequence
  Description of Artificial Sequence: Synthetic oligonucleotide
ugacugucagcuggcaucc

SEQ ID NO: 2281264 - RNA, 19 nt, Artificial Sequence
  Description of Artificial Sequence: Synthetic oligonucleotide
ugccgcucugccaagcucu

SEQ ID NO: 2281265 - RNA, 19 nt, Artificial Sequence
  Description of Artificial Sequence: Synthetic oligonucleotide
ucuucagggauggugggaa

SEQ ID NO: 2281266 - RNA, 19 nt, Artificial Sequence
  Description of Artificial Sequence: Synthetic oligonucleotide
aagcauugauguccuugcu

SEQ ID NO: 2281267 - RNA, 19 nt, Artificial Sequence
  Description of Artificial Sequence: Synthetic oligonucleotide
guccauugcagcgagcagc

SEQ ID NO: 2281268 - RNA, 19 nt, Artificial Sequence
  Description of Artificial Sequence: Synthetic oligonucleotide
agcuuugccgcucugccaa

SEQ ID NO: 2281269 - RNA, 19 nt, Artificial Sequence
  Description of Artificial Sequence: Synthetic oligonucleotide
ggcuaaguccccgagaagc

SEQ ID NO: 2281270 - RNA, 19 nt, Artificial Sequence
  Description of Artificial Sequence: Synthetic oligonucleotide
gguauuggccucaaaguug

SEQ ID NO: 2281271 - RNA, 19 nt, Artificial Sequence
  Description of Artificial Sequence: Synthetic oligonucleotide
uuaaugagccagagguaua

SEQ ID NO: 2281272 - RNA, 19 nt, Artificial Sequence
  Description of Artificial Sequence: Synthetic oligonucleotide
aagaaaguuuuggugccau

SEQ ID NO: 2281273 - RNA, 19 nt, Artificial Sequence
  Description of Artificial Sequence: Synthetic oligonucleotide
gguauagugaccuaacgau

SEQ ID NO: 2281274 - RNA, 19 nt, Artificial Sequence
  Description of Artificial Sequence: Synthetic oligonucleotide
acuuauuuguaggcucauc

SEQ ID NO: 2281275 - RNA, 19 nt, Artificial Sequence
  Description of Artificial Sequence: Synthetic oligonucleotide
ccuacaaagacuuaaggcu

SEQ ID NO: 2281276 - RNA, 19 nt, Artificial Sequence
  Description of Artificial Sequence: Synthetic oligonucleotide
acuccuacaaagacuuaag

SEQ ID NO: 2281277 - RNA, 19 nt, Artificial Sequence
  Description of Artificial Sequence: Synthetic oligonucleotide
ggugggaaaagagaaugcc

SEQ ID NO: 2281278 - RNA, 19 nt, Artificial Sequence
  Description of Artificial Sequence: Synthetic oligonucleotide
agaaugccccaugagucuc

SEQ ID NO: 2281279 - RNA, 19 nt, Artificial Sequence
  Description of Artificial Sequence: Synthetic oligonucleotide
uaacuaggaggcgcaagcc

SEQ ID NO: 2281280 - RNA, 19 nt, Artificial Sequence
  Description of Artificial Sequence: Synthetic oligonucleotide
ccaagaaaguuuuggugcc

SEQ ID NO: 2281281 - RNA, 19 nt, Artificial Sequence
  Description of Artificial Sequence: Synthetic oligonucleotide
caaagacuuaaggcugugg

SEQ ID NO: 2281282 - RNA, 19 nt, Artificial Sequence
  Description of Artificial Sequence: Synthetic oligonucleotide
gucuauagaaagagcaauc

SEQ ID NO: 2281283 - RNA, 19 nt, Artificial Sequence
  Description of Artificial Sequence: Synthetic oligonucleotide
agcgagcagcugcagcccc

SEQ ID NO: 2281284 - RNA, 19 nt, Artificial Sequence
  Description of Artificial Sequence: Synthetic oligonucleotide
gcaacuuauuuguaggcuc

SEQ ID NO: 2281285 - RNA, 19 nt, Artificial Sequence
  Description of Artificial Sequence: Synthetic oligonucleotide
ugacgcggguaacuaggag

SEQ ID NO: 2281286 - RNA, 19 nt, Artificial Sequence
  Description of Artificial Sequence: Synthetic oligonucleotide
guaaagucccguggguggg

SEQ ID NO: 2281287 - RNA, 19 nt, Artificial Sequence
  Description of Artificial Sequence: Synthetic oligonucleotide
uagugaccuaacgauuuug

SEQ ID NO: 2281288 - RNA, 19 nt, Artificial Sequence
  Description of Artificial Sequence: Synthetic oligonucleotide
agugguggccggguaaagg

SEQ ID NO: 2281289 - RNA, 19 nt, Artificial Sequence
  Description of Artificial Sequence: Synthetic oligonucleotide
caguccuccgggcauggcg

SEQ ID NO: 2281290 - RNA, 19 nt, Artificial Sequence
  Description of Artificial Sequence: Synthetic oligonucleotide
ggauauuucuauggaacug

SEQ ID NO: 2281291 - RNA, 19 nt, Artificial Sequence
  Description of Artificial Sequence: Synthetic oligonucleotide
agguaucucuugccagacg

SEQ ID NO: 2281292 - RNA, 19 nt, Artificial Sequence
  Description of Artificial Sequence: Synthetic oligonucleotide
aggcucaucaccauuguaa

SEQ ID NO: 2281293 - RNA, 19 nt, Artificial Sequence
  Description of Artificial Sequence: Synthetic oligonucleotide
uuugccgcucugccaagcu

SEQ ID NO: 2281294 - RNA, 19 nt, Artificial Sequence
  Description of Artificial Sequence: Synthetic oligonucleotide
ucuugucaucgaugaucgg

SEQ ID NO: 2281295 - RNA, 19 nt, Artificial Sequence
  Description of Artificial Sequence: Synthetic oligonucleotide
cuauggaacuguguaagga

SEQ ID NO: 2281296 - RNA, 19 nt, Artificial Sequence
  Description of Artificial Sequence: Synthetic oligonucleotide
agaaucccaagaaaguuuu

SEQ ID NO: 2281297 - RNA, 19 nt, Artificial Sequence
  Description of Artificial Sequence: Synthetic oligonucleotide
agguccauugcagcgagca

SEQ ID NO: 2281298 - RNA, 19 nt, Artificial Sequence
  Description of Artificial Sequence: Synthetic oligonucleotide
auggaacuguguaaggaca

SEQ ID NO: 2281299 - RNA, 19 nt, Artificial Sequence
  Description of Artificial Sequence: Synthetic oligonucleotide
uuuguaggcucaucaccau

SEQ ID NO: 2281300 - RNA, 19 nt, Artificial Sequence
  Description of Artificial Sequence: Synthetic oligonucleotide
aguuuuggugccauuucca

SEQ ID NO: 2281301 - RNA, 19 nt, Artificial Sequence
  Description of Artificial Sequence: Synthetic oligonucleotide
guaaggacacaugacuguc

SEQ ID NO: 2281302 - RNA, 19 nt, Artificial Sequence
  Description of Artificial Sequence: Synthetic oligonucleotide
ggugacgcggguaacuagg

SEQ ID NO: 2281303 - RNA, 19 nt, Artificial Sequence
  Description of Artificial Sequence: Synthetic oligonucleotide
cacacuaggauauuucuau

SEQ ID NO: 2281304 - RNA, 19 nt, Artificial Sequence
  Description of Artificial Sequence: Synthetic oligonucleotide
augaucggaaauggcaacu

SEQ ID NO: 2281305 - RNA, 19 nt, Artificial Sequence
  Description of Artificial Sequence: Synthetic oligonucleotide
uauuggccucaaaguuggg

SEQ ID NO: 2281306 - RNA, 19 nt, Artificial Sequence
  Description of Artificial Sequence: Synthetic oligonucleotide
aggcaagaugguccucaac

SEQ ID NO: 2281307 - RNA, 19 nt, Artificial Sequence
  Description of Artificial Sequence: Synthetic oligonucleotide
uuacucugagaaucucauc

SEQ ID NO: 2281308 - RNA, 19 nt, Artificial Sequence
  Description of Artificial Sequence: Synthetic oligonucleotide
acagaguaaagaaucccaa

SEQ ID NO: 2281309 - RNA, 19 nt, Artificial Sequence
  Description of Artificial Sequence: Synthetic oligonucleotide
gaaugcuguugaagaaggc

SEQ ID NO: 2281310 - RNA, 19 nt, Artificial Sequence
  Description of Artificial Sequence: Synthetic oligonucleotide
gugguauuggccucaaagu

SEQ ID NO: 2281311 - RNA, 19 nt, Artificial Sequence
  Description of Artificial Sequence: Synthetic oligonucleotide
uguggugcacacuggggua

SEQ ID NO: 2281312 - RNA, 19 nt, Artificial Sequence
  Description of Artificial Sequence: Synthetic oligonucleotide
ccauuuccauuuaaugagc

SEQ ID NO: 2281313 - RNA, 19 nt, Artificial Sequence
  Description of Artificial Sequence: Synthetic oligonucleotide
aguccuccgggcauggcgg

SEQ ID NO: 2281314 - RNA, 19 nt, Artificial Sequence
  Description of Artificial Sequence: Synthetic oligonucleotide
cuggcgccagcuuugccgc

SEQ ID NO: 2281315 - RNA, 19 nt, Artificial Sequence
  Description of Artificial Sequence: Synthetic oligonucleotide
guaucucuugccagacggg

SEQ ID NO: 2281316 - RNA, 19 nt, Artificial Sequence
  Description of Artificial Sequence: Synthetic oligonucleotide
aaugagccagagguauagu

SEQ ID NO: 2281317 - RNA, 19 nt, Artificial Sequence
  Description of Artificial Sequence: Synthetic oligonucleotide
aggaaaucguggaagcgga

SEQ ID NO: 2281318 - RNA, 19 nt, Artificial Sequence
  Description of Artificial Sequence: Synthetic oligonucleotide
aucggaaauggcaacuuau

SEQ ID NO: 2281319 - RNA, 19 nt, Artificial Sequence
  Description of Artificial Sequence: Synthetic oligonucleotide
gaugguccucaacacuguc

SEQ ID NO: 2281320 - RNA, 19 nt, Artificial Sequence
  Description of Artificial Sequence: Synthetic oligonucleotide
guauaucggagguaucucu

SEQ ID NO: 2281321 - RNA, 19 nt, Artificial Sequence
  Description of Artificial Sequence: Synthetic oligonucleotide
accaugacgcuaucacccu

SEQ ID NO: 2281322 - RNA, 19 nt, Artificial Sequence
  Description of Artificial Sequence: Synthetic oligonucleotide
gucucccaggaaaucgugg

SEQ ID NO: 2281323 - RNA, 19 nt, Artificial Sequence
  Description of Artificial Sequence: Synthetic oligonucleotide
aaggaccaugacgcuauca

SEQ ID NO: 2281324 - RNA, 19 nt, Artificial Sequence
  Description of Artificial Sequence: Synthetic oligonucleotide
gacuccuuuagggaaaagu

SEQ ID NO: 2281325 - RNA, 19 nt, Artificial Sequence
  Description of Artificial Sequence: Synthetic oligonucleotide
gcaaucaacuuuacauucc

SEQ ID NO: 2281326 - RNA, 19 nt, Artificial Sequence
  Description of Artificial Sequence: Synthetic oligonucleotide
auagugaccuaacgauuuu

SEQ ID NO: 2281327 - RNA, 19 nt, Artificial Sequence
  Description of Artificial Sequence: Synthetic oligonucleotide
ggacagaaugcuguugaag

SEQ ID NO: 2281328 - RNA, 19 nt, Artificial Sequence
  Description of Artificial Sequence: Synthetic oligonucleotide
ggaccaugacgcuaucacc

SEQ ID NO: 2281329 - RNA, 19 nt, Artificial Sequence
  Description of Artificial Sequence: Synthetic oligonucleotide
ucagcuggagagacuuaau

SEQ ID NO: 2281330 - RNA, 19 nt, Artificial Sequence
  Description of Artificial Sequence: Synthetic oligonucleotide
ccauuuaaugagccagagg

SEQ ID NO: 2281331 - RNA, 19 nt, Artificial Sequence
  Description of Artificial Sequence: Synthetic oligonucleotide
gcaagaugguccucaacac

SEQ ID NO: 2281332 - RNA, 19 nt, Artificial Sequence
  Description of Artificial Sequence: Synthetic oligonucleotide
gaagacuccuuuagggaaa

SEQ ID NO: 2281333 - RNA, 19 nt, Artificial Sequence
  Description of Artificial Sequence: Synthetic oligonucleotide
gagaaugccccaugagucu

SEQ ID NO: 2281334 - RNA, 19 nt, Artificial Sequence
  Description of Artificial Sequence: Synthetic oligonucleotide
ggcauccucagguccauug

SEQ ID NO: 2281335 - RNA, 19 nt, Artificial Sequence
  Description of Artificial Sequence: Synthetic oligonucleotide
gucagcuggcauccucagg

SEQ ID NO: 2281336 - RNA, 19 nt, Artificial Sequence
  Description of Artificial Sequence: Synthetic oligonucleotide
aacugggguagcaacuuuu

SEQ ID NO: 2281337 - RNA, 19 nt, Artificial Sequence
  Description of Artificial Sequence: Synthetic oligonucleotide
ugucaucgaugaucggaaa

SEQ ID NO: 2281338 - RNA, 19 nt, Artificial Sequence
  Description of Artificial Sequence: Synthetic oligonucleotide
gaucggaaauggcaacuua

SEQ ID NO: 2281339 - RNA, 19 nt, Artificial Sequence
  Description of Artificial Sequence: Synthetic oligonucleotide
auugcagcgagcagcugca

SEQ ID NO: 2281340 - RNA, 19 nt, Artificial Sequence
  Description of Artificial Sequence: Synthetic oligonucleotide
aagacuccuuuagggaaaa

SEQ ID NO: 2281341 - RNA, 19 nt, Artificial Sequence
  Description of Artificial Sequence: Synthetic oligonucleotide
gaaucccaagaaaguuuug

SEQ ID NO: 2281342 - RNA, 19 nt, Artificial Sequence
  Description of Artificial Sequence: Synthetic oligonucleotide
uaucacccuccuuccaguc

SEQ ID NO: 2281343 - RNA, 19 nt, Artificial Sequence
  Description of Artificial Sequence: Synthetic oligonucleotide
gauggugguauuggccuca

SEQ ID NO: 2281344 - RNA, 19 nt, Artificial Sequence
  Description of Artificial Sequence: Synthetic oligonucleotide
ggagguaucucuugccaga

SEQ ID NO: 2281345 - RNA, 19 nt, Artificial Sequence
  Description of Artificial Sequence: Synthetic oligonucleotide
caaucaacuuuacauuccu

SEQ ID NO: 2281346 - RNA, 19 nt, Artificial Sequence
  Description of Artificial Sequence: Synthetic oligonucleotide
ugaucggaaauggcaacuu

SEQ ID NO: 2281347 - RNA, 19 nt, Artificial Sequence
  Description of Artificial Sequence: Synthetic oligonucleotide
gcuccaggcaagauggucc

SEQ ID NO: 2281348 - RNA, 19 nt, Artificial Sequence
  Description of Artificial Sequence: Synthetic oligonucleotide
ccagacgggagaucuuugg

SEQ ID NO: 2281349 - RNA, 19 nt, Artificial Sequence
  Description of Artificial Sequence: Synthetic oligonucleotide
uuccugccagugguggccg

SEQ ID NO: 2281350 - RNA, 19 nt, Artificial Sequence
  Description of Artificial Sequence: Synthetic oligonucleotide
gguaacuaggaggcgcaag

SEQ ID NO: 2281351 - RNA, 19 nt, Artificial Sequence
  Description of Artificial Sequence: Synthetic oligonucleotide
acucuggcgccagcuuugc

SEQ ID NO: 2281352 - RNA, 19 nt, Artificial Sequence
  Description of Artificial Sequence: Synthetic oligonucleotide
gcacagaguaaagaauccc

SEQ ID NO: 2281353 - RNA, 19 nt, Artificial Sequence
  Description of Artificial Sequence: Synthetic oligonucleotide
accuaacgauuuuggcugu

SEQ ID NO: 2281354 - RNA, 19 nt, Artificial Sequence
  Description of Artificial Sequence: Synthetic oligonucleotide
guggccggguaaaggauag

SEQ ID NO: 2281355 - RNA, 19 nt, Artificial Sequence
  Description of Artificial Sequence: Synthetic oligonucleotide
cucugagaaucucaucaaa

SEQ ID NO: 2281356 - RNA, 19 nt, Artificial Sequence
  Description of Artificial Sequence: Synthetic oligonucleotide
ugguggccggguaaaggau

SEQ ID NO: 2281357 - RNA, 19 nt, Artificial Sequence
  Description of Artificial Sequence: Synthetic oligonucleotide
aguccccgagaagcagucc

SEQ ID NO: 2281358 - RNA, 19 nt, Artificial Sequence
  Description of Artificial Sequence: Synthetic oligonucleotide
uggugccauuuccauuuaa

SEQ ID NO: 2281359 - RNA, 19 nt, Artificial Sequence
  Description of Artificial Sequence: Synthetic oligonucleotide
uggugggaaggaccaugac

SEQ ID NO: 2281360 - RNA, 19 nt, Artificial Sequence
  Description of Artificial Sequence: Synthetic oligonucleotide
aagcaguccuccgggcaug

SEQ ID NO: 2281361 - RNA, 19 nt, Artificial Sequence
  Description of Artificial Sequence: Synthetic oligonucleotide
gacuuaaggcuguggggua

SEQ ID NO: 2281362 - RNA, 19 nt, Artificial Sequence
  Description of Artificial Sequence: Synthetic oligonucleotide
ccuugcuccaggcaagaug

SEQ ID NO: 2281363 - RNA, 19 nt, Artificial Sequence
  Description of Artificial Sequence: Synthetic oligonucleotide
ugcccuuaucauccuucuc

SEQ ID NO: 2281364 - RNA, 19 nt, Artificial Sequence
  Description of Artificial Sequence: Synthetic oligonucleotide
cuaacgauuuuggcuguga

SEQ ID NO: 2281365 - RNA, 19 nt, Artificial Sequence
  Description of Artificial Sequence: Synthetic oligonucleotide
ggggcuaaguccccgagaa

SEQ ID NO: 2281366 - RNA, 19 nt, Artificial Sequence
  Description of Artificial Sequence: Synthetic oligonucleotide
uccccgagaagcaguccuc

SEQ ID NO: 2281367 - RNA, 19 nt, Artificial Sequence
  Description of Artificial Sequence: Synthetic oligonucleotide
ccgagaagcaguccuccgg

SEQ ID NO: 2281368 - RNA, 19 nt, Artificial Sequence
  Description of Artificial Sequence: Synthetic oligonucleotide
guuuuggugccauuuccau

SEQ ID NO: 2281369 - RNA, 19 nt, Artificial Sequence
  Description of Artificial Sequence: Synthetic oligonucleotide
uugccgcucugccaagcuc

SEQ ID NO: 2281370 - RNA, 19 nt, Artificial Sequence
  Description of Artificial Sequence: Synthetic oligonucleotide
cuugccagacgggagaucu

SEQ ID NO: 2281371 - RNA, 19 nt, Artificial Sequence
  Description of Artificial Sequence: Synthetic oligonucleotide
auggugggaaggaccauga

SEQ ID NO: 2281372 - RNA, 19 nt, Artificial Sequence
  Description of Artificial Sequence: Synthetic oligonucleotide
ggagagacuuaauuacucu

SEQ ID NO: 2281373 - RNA, 19 nt, Artificial Sequence
  Description of Artificial Sequence: Synthetic oligonucleotide
acuuaaggcugugggguau

SEQ ID NO: 2281374 - RNA, 19 nt, Artificial Sequence
  Description of Artificial Sequence: Synthetic oligonucleotide
augacgcuaucacccuccu

SEQ ID NO: 2281375 - RNA, 19 nt, Artificial Sequence
  Description of Artificial Sequence: Synthetic oligonucleotide
aaagucccgugggugggaa

SEQ ID NO: 2281376 - RNA, 19 nt, Artificial Sequence
  Description of Artificial Sequence: Synthetic oligonucleotide
gguauaucggagguaucuc

SEQ ID NO: 2281377 - RNA, 19 nt, Artificial Sequence
  Description of Artificial Sequence: Synthetic oligonucleotide
acaugcccagaaggauggc

SEQ ID NO: 2281378 - RNA, 19 nt, Artificial Sequence
  Description of Artificial Sequence: Synthetic oligonucleotide
agucccgugggugggaaaa

SEQ ID NO: 2281379 - RNA, 19 nt, Artificial Sequence
  Description of Artificial Sequence: Synthetic oligonucleotide
cagagguauagugaccuaa

SEQ ID NO: 2281380 - RNA, 19 nt, Artificial Sequence
  Description of Artificial Sequence: Synthetic oligonucleotide
cauugauguccuugcucca

SEQ ID NO: 2281381 - RNA, 19 nt, Artificial Sequence
  Description of Artificial Sequence: Synthetic oligonucleotide
ggagaucuuuggugaagac

SEQ ID NO: 2281382 - RNA, 19 nt, Artificial Sequence
  Description of Artificial Sequence: Synthetic oligonucleotide
aucauccuucucugcugga

SEQ ID NO: 2281383 - RNA, 19 nt, Artificial Sequence
  Description of Artificial Sequence: Synthetic oligonucleotide
gaacuguguaaggacacau

SEQ ID NO: 2281384 - RNA, 19 nt, Artificial Sequence
  Description of Artificial Sequence: Synthetic oligonucleotide
gaagcaguccuccgggcau

SEQ ID NO: 2281385 - RNA, 19 nt, Artificial Sequence
  Description of Artificial Sequence: Synthetic oligonucleotide
ugccagacgggagaucuuu

SEQ ID NO: 2281386 - RNA, 19 nt, Artificial Sequence
  Description of Artificial Sequence: Synthetic oligonucleotide
ccuuaucauccuucucugc

SEQ ID NO: 2281387 - RNA, 19 nt, Artificial Sequence
  Description of Artificial Sequence: Synthetic oligonucleotide
cuuugccgcucugccaagc

SEQ ID NO: 2281388 - RNA, 19 nt, Artificial Sequence
  Description of Artificial Sequence: Synthetic oligonucleotide
agucucccaggaaaucgug

SEQ ID NO: 2281389 - RNA, 19 nt, Artificial Sequence
  Description of Artificial Sequence: Synthetic oligonucleotide
ugccaagcucuguggugca

SEQ ID NO: 2281390 - RNA, 19 nt, Artificial Sequence
  Description of Artificial Sequence: Synthetic oligonucleotide
ggcugugggguauaucgga

SEQ ID NO: 2281391 - RNA, 19 nt, Artificial Sequence
  Description of Artificial Sequence: Synthetic oligonucleotide
uuaaggcugugggguauau

SEQ ID NO: 2281392 - RNA, 19 nt, Artificial Sequence
  Description of Artificial Sequence: Synthetic oligonucleotide
cugcuggauccaacaugcc

SEQ ID NO: 2281393 - RNA, 19 nt, Artificial Sequence
  Description of Artificial Sequence: Synthetic oligonucleotide
agaugguccucaacacugu

SEQ ID NO: 2281394 - RNA, 19 nt, Artificial Sequence
  Description of Artificial Sequence: Synthetic oligonucleotide
cuguggugcacacuggggu

SEQ ID NO: 2281395 - RNA, 19 nt, Artificial Sequence
  Description of Artificial Sequence: Synthetic oligonucleotide
gggugggaaaagagaaugc

SEQ ID NO: 2281396 - RNA, 19 nt, Artificial Sequence
  Description of Artificial Sequence: Synthetic oligonucleotide
gcugugaccacacuaggau

SEQ ID NO: 2281397 - RNA, 19 nt, Artificial Sequence
  Description of Artificial Sequence: Synthetic oligonucleotide
cuaggaggcgcaagccgca

SEQ ID NO: 2281398 - RNA, 19 nt, Artificial Sequence
  Description of Artificial Sequence: Synthetic oligonucleotide
ccaggaaaucguggaagcg

SEQ ID NO: 2281399 - RNA, 19 nt, Artificial Sequence
  Description of Artificial Sequence: Synthetic oligonucleotide
ugaacaccacacgggccgu

SEQ ID NO: 2281400 - RNA, 19 nt, Artificial Sequence
  Description of Artificial Sequence: Synthetic oligonucleotide
guccucaacacugucuaua

SEQ ID NO: 2281401 - RNA, 19 nt, Artificial Sequence
  Description of Artificial Sequence: Synthetic oligonucleotide
ggccggguaaaggauagac

SEQ ID NO: 2281402 - RNA, 19 nt, Artificial Sequence
  Description of Artificial Sequence: Synthetic oligonucleotide
cugugaccacacuaggaua

SEQ ID NO: 2281403 - RNA, 19 nt, Artificial Sequence
  Description of Artificial Sequence: Synthetic oligonucleotide
gcggguaacuaggaggcgc

SEQ ID NO: 2281404 - RNA, 19 nt, Artificial Sequence
  Description of Artificial Sequence: Synthetic oligonucleotide
uguaagcauugauguccuu

SEQ ID NO: 2281405 - RNA, 19 nt, Artificial Sequence
  Description of Artificial Sequence: Synthetic oligonucleotide
acgggagaucuuuggugaa

SEQ ID NO: 2281406 - RNA, 19 nt, Artificial Sequence
  Description of Artificial Sequence: Synthetic oligonucleotide
agcaguccuccgggcaugg

SEQ ID NO: 2281407 - RNA, 19 nt, Artificial Sequence
  Description of Artificial Sequence: Synthetic oligonucleotide
gcccagaaggauggcaagg

SEQ ID NO: 2281408 - RNA, 19 nt, Artificial Sequence
  Description of Artificial Sequence: Synthetic oligonucleotide
agcggaugcggccgauggu

SEQ ID NO: 2281409 - RNA, 19 nt, Artificial Sequence
  Description of Artificial Sequence: Synthetic oligonucleotide
gccgauggugguauuggcc

SEQ ID NO: 2281410 - RNA, 19 nt, Artificial Sequence
  Description of Artificial Sequence: Synthetic oligonucleotide
uccugccagugguggccgg

SEQ ID NO: 2281411 - RNA, 19 nt, Artificial Sequence
  Description of Artificial Sequence: Synthetic oligonucleotide
ggguauaucggagguaucu

SEQ ID NO: 2281412 - RNA, 19 nt, Artificial Sequence
  Description of Artificial Sequence: Synthetic oligonucleotide
gaaggaccaugacgcuauc

SEQ ID NO: 2281413 - RNA, 19 nt, Artificial Sequence
  Description of Artificial Sequence: Synthetic oligonucleotide
guauagugaccuaacgauu

SEQ ID NO: 2281414 - RNA, 19 nt, Artificial Sequence
  Description of Artificial Sequence: Synthetic oligonucleotide
ggccgucacaggcaugccc

SEQ ID NO: 2281415 - RNA, 19 nt, Artificial Sequence
  Description of Artificial Sequence: Synthetic oligonucleotide
guccccgagaagcaguccu

SEQ ID NO: 2281416 - RNA, 19 nt, Artificial Sequence
  Description of Artificial Sequence: Synthetic oligonucleotide
uccuccgggcauggcggcg

SEQ ID NO: 2281417 - RNA, 19 nt, Artificial Sequence
  Description of Artificial Sequence: Synthetic oligonucleotide
aagucccgugggugggaaa

SEQ ID NO: 2281418 - RNA, 19 nt, Artificial Sequence
  Description of Artificial Sequence: Synthetic oligonucleotide
cccgugggugggaaaagag

SEQ ID NO: 2281419 - RNA, 19 nt, Artificial Sequence
  Description of Artificial Sequence: Synthetic oligonucleotide
gcggaugcggccgauggug

SEQ ID NO: 2281420 - RNA, 19 nt, Artificial Sequence
  Description of Artificial Sequence: Synthetic oligonucleotide
cuaucacccuccuuccagu

SEQ ID NO: 2281421 - RNA, 19 nt, Artificial Sequence
  Description of Artificial Sequence: Synthetic oligonucleotide
gagucucccaggaaaucgu

SEQ ID NO: 2281422 - RNA, 19 nt, Artificial Sequence
  Description of Artificial Sequence: Synthetic oligonucleotide
cggguaaaggauagacagc

SEQ ID NO: 2281423 - RNA, 19 nt, Artificial Sequence
  Description of Artificial Sequence: Synthetic oligonucleotide
acacugggguaaagucccg

SEQ ID NO: 2281424 - RNA, 19 nt, Artificial Sequence
  Description of Artificial Sequence: Synthetic oligonucleotide
agacuccuuuagggaaaag

SEQ ID NO: 2281425 - RNA, 19 nt, Artificial Sequence
  Description of Artificial Sequence: Synthetic oligonucleotide
cagcuggcauccucagguc

SEQ ID NO: 2281426 - RNA, 19 nt, Artificial Sequence
  Description of Artificial Sequence: Synthetic oligonucleotide
ugacgcuaucacccuccuu

SEQ ID NO: 2281427 - RNA, 19 nt, Artificial Sequence
  Description of Artificial Sequence: Synthetic oligonucleotide
ggaacuguguaaggacaca

SEQ ID NO: 2281428 - RNA, 19 nt, Artificial Sequence
  Description of Artificial Sequence: Synthetic oligonucleotide
ggcaacuuauuuguaggcu

SEQ ID NO: 2281429 - RNA, 19 nt, Artificial Sequence
  Description of Artificial Sequence: Synthetic oligonucleotide
gcuaaguccccgagaagca

SEQ ID NO: 2281430 - RNA, 19 nt, Artificial Sequence
  Description of Artificial Sequence: Synthetic oligonucleotide
uggugguauuggccucaaa

SEQ ID NO: 2281431 - RNA, 19 nt, Artificial Sequence
  Description of Artificial Sequence: Synthetic oligonucleotide
ccagaaggauggcaagguc

SEQ ID NO: 2281432 - RNA, 19 nt, Artificial Sequence
  Description of Artificial Sequence: Synthetic oligonucleotide
uugcagcgagcagcugcag

SEQ ID NO: 2281433 - RNA, 19 nt, Artificial Sequence
  Description of Artificial Sequence: Synthetic oligonucleotide
cccgagaagcaguccuccg

SEQ ID NO: 2281434 - RNA, 19 nt, Artificial Sequence
  Description of Artificial Sequence: Synthetic oligonucleotide
cggagguaucucuugccag

SEQ ID NO: 2281435 - RNA, 19 nt, Artificial Sequence
  Description of Artificial Sequence: Synthetic oligonucleotide
cagcuuugccgcucugcca

SEQ ID NO: 2281436 - RNA, 19 nt, Artificial Sequence
  Description of Artificial Sequence: Synthetic oligonucleotide
uugccagacgggagaucuu

SEQ ID NO: 2281437 - RNA, 19 nt, Artificial Sequence
  Description of Artificial Sequence: Synthetic oligonucleotide
caucaaaguuccugccagu

SEQ ID NO: 2281438 - RNA, 19 nt, Artificial Sequence
  Description of Artificial Sequence: Synthetic oligonucleotide
gaugcggccgaugguggua

SEQ ID NO: 2281439 - RNA, 19 nt, Artificial Sequence
  Description of Artificial Sequence: Synthetic oligonucleotide
caccauuguaagcauugau

SEQ ID NO: 2281440 - RNA, 19 nt, Artificial Sequence
  Description of Artificial Sequence: Synthetic oligonucleotide
cucuggcgccagcuuugcc

SEQ ID NO: 2281441 - RNA, 19 nt, Artificial Sequence
  Description of Artificial Sequence: Synthetic oligonucleotide
cucuucagggaugguggga

SEQ ID NO: 2281442 - RNA, 19 nt, Artificial Sequence
  Description of Artificial Sequence: Synthetic oligonucleotide
gggcuaaguccccgagaag

SEQ ID NO: 2281443 - RNA, 19 nt, Artificial Sequence
  Description of Artificial Sequence: Synthetic oligonucleotide
cagacgggagaucuuuggu

SEQ ID NO: 2281444 - RNA, 19 nt, Artificial Sequence
  Description of Artificial Sequence: Synthetic oligonucleotide
gugacgcggguaacuagga

SEQ ID NO: 2281445 - RNA, 19 nt, Artificial Sequence
  Description of Artificial Sequence: Synthetic oligonucleotide
ggcugugaccacacuagga

SEQ ID NO: 2281446 - RNA, 19 nt, Artificial Sequence
  Description of Artificial Sequence: Synthetic oligonucleotide
gucccgugggugggaaaag

SEQ ID NO: 2281447 - RNA, 19 nt, Artificial Sequence
  Description of Artificial Sequence: Synthetic oligonucleotide
acacgggccgucacaggca

SEQ ID NO: 2281448 - RNA, 19 nt, Artificial Sequence
  Description of Artificial Sequence: Synthetic oligonucleotide
guggugcacacugggguaa

SEQ ID NO: 2281449 - RNA, 19 nt, Artificial Sequence
  Description of Artificial Sequence: Synthetic oligonucleotide
cagcuggagagacuuaauu

SEQ ID NO: 2281450 - RNA, 19 nt, Artificial Sequence
  Description of Artificial Sequence: Synthetic oligonucleotide
cagucaacugggguagcaa

SEQ ID NO: 2281451 - RNA, 19 nt, Artificial Sequence
  Description of Artificial Sequence: Synthetic oligonucleotide
ccgauggugguauuggccu

SEQ ID NO: 2281452 - RNA, 19 nt, Artificial Sequence
  Description of Artificial Sequence: Synthetic oligonucleotide
ggugccauuuccauuuaau

SEQ ID NO: 2281453 - RNA, 19 nt, Artificial Sequence
  Description of Artificial Sequence: Synthetic oligonucleotide
uccuugcuccaggcaagau

SEQ ID NO: 2281454 - RNA, 19 nt, Artificial Sequence
  Description of Artificial Sequence: Synthetic oligonucleotide
cucugccaagcucuguggu

SEQ ID NO: 2281455 - RNA, 19 nt, Artificial Sequence
  Description of Artificial Sequence: Synthetic oligonucleotide
caugacugucagcuggcau

SEQ ID NO: 2281456 - RNA, 19 nt, Artificial Sequence
  Description of Artificial Sequence: Synthetic oligonucleotide
gccggguaaaggauagaca

SEQ ID NO: 2281457 - RNA, 19 nt, Artificial Sequence
  Description of Artificial Sequence: Synthetic oligonucleotide
ggugcacacugggguaaag

SEQ ID NO: 2281458 - RNA, 19 nt, Artificial Sequence
  Description of Artificial Sequence: Synthetic oligonucleotide
augcggccgauggugguau

SEQ ID NO: 2281459 - RNA, 19 nt, Artificial Sequence
  Description of Artificial Sequence: Synthetic oligonucleotide
gaacaccacacgggccguc

SEQ ID NO: 2281460 - RNA, 19 nt, Artificial Sequence
  Description of Artificial Sequence: Synthetic oligonucleotide
ccgugggugggaaaagaga

SEQ ID NO: 2281461 - RNA, 19 nt, Artificial Sequence
  Description of Artificial Sequence: Synthetic oligonucleotide
gaaucucaucaaaguuccu

SEQ ID NO: 2281462 - RNA, 19 nt, Artificial Sequence
  Description of Artificial Sequence: Synthetic oligonucleotide
cacccuccuuccagucaac

SEQ ID NO: 2281463 - RNA, 19 nt, Artificial Sequence
  Description of Artificial Sequence: Synthetic oligonucleotide
ggcaaacucuggcgccagc

SEQ ID NO: 2281464 - RNA, 19 nt, Artificial Sequence
  Description of Artificial Sequence: Synthetic oligonucleotide
uggccggguaaaggauaga

SEQ ID NO: 2281465 - RNA, 19 nt, Artificial Sequence
  Description of Artificial Sequence: Synthetic oligonucleotide
uccgggcauggcggcggcg

SEQ ID NO: 2281466 - RNA, 19 nt, Artificial Sequence
  Description of Artificial Sequence: Synthetic oligonucleotide
gugcacacugggguaaagu

SEQ ID NO: 2281467 - RNA, 19 nt, Artificial Sequence
  Description of Artificial Sequence: Synthetic oligonucleotide
ccacacuaggauauuucua

SEQ ID NO: 2281468 - RNA, 19 nt, Artificial Sequence
  Description of Artificial Sequence: Synthetic oligonucleotide
cuuaaggcugugggguaua

SEQ ID NO: 2281469 - RNA, 19 nt, Artificial Sequence
  Description of Artificial Sequence: Synthetic oligonucleotide
uggcaaggucccuguucuu

SEQ ID NO: 2281470 - RNA, 19 nt, Artificial Sequence
  Description of Artificial Sequence: Synthetic oligonucleotide
gcuuugccgcucugccaag

SEQ ID NO: 2281471 - RNA, 19 nt, Artificial Sequence
  Description of Artificial Sequence: Synthetic oligonucleotide
augccccaugagucuccca

SEQ ID NO: 2281472 - RNA, 19 nt, Artificial Sequence
  Description of Artificial Sequence: Synthetic oligonucleotide
caucaccauuguaagcauu

SEQ ID NO: 2281473 - RNA, 19 nt, Artificial Sequence
  Description of Artificial Sequence: Synthetic oligonucleotide
cgggccgucacaggcaugc

SEQ ID NO: 2281474 - RNA, 19 nt, Artificial Sequence
  Description of Artificial Sequence: Synthetic oligonucleotide
ccccgagaagcaguccucc

SEQ ID NO: 2281475 - RNA, 19 nt, Artificial Sequence
  Description of Artificial Sequence: Synthetic oligonucleotide
gggaaggaccaugacgcua

SEQ ID NO: 2281476 - RNA, 19 nt, Artificial Sequence
  Description of Artificial Sequence: Synthetic oligonucleotide
caacuccuacaaagacuua

SEQ ID NO: 2281477 - RNA, 19 nt, Artificial Sequence
  Description of Artificial Sequence: Synthetic oligonucleotide
gcaaacucuggcgccagcu

SEQ ID NO: 2281478 - RNA, 19 nt, Artificial Sequence
  Description of Artificial Sequence: Synthetic oligonucleotide
ccuaacgauuuuggcugug

SEQ ID NO: 2281479 - RNA, 19 nt, Artificial Sequence
  Description of Artificial Sequence: Synthetic oligonucleotide
gugggguauaucggaggua

SEQ ID NO: 2281480 - RNA, 19 nt, Artificial Sequence
  Description of Artificial Sequence: Synthetic oligonucleotide
caaacucuggcgccagcuu

SEQ ID NO: 2281481 - RNA, 19 nt, Artificial Sequence
  Description of Artificial Sequence: Synthetic oligonucleotide
gccagacgggagaucuuug

SEQ ID NO: 2281482 - RNA, 19 nt, Artificial Sequence
  Description of Artificial Sequence: Synthetic oligonucleotide
gcggcggugacgcggguaa

SEQ ID NO: 2281483 - RNA, 19 nt, Artificial Sequence
  Description of Artificial Sequence: Synthetic oligonucleotide
uggcgccagcuuugccgcu

SEQ ID NO: 2281484 - RNA, 19 nt, Artificial Sequence
  Description of Artificial Sequence: Synthetic oligonucleotide
cgauuuuggcugugaccac

SEQ ID NO: 2281485 - RNA, 19 nt, Artificial Sequence
  Description of Artificial Sequence: Synthetic oligonucleotide
gcggccgauggugguauug

SEQ ID NO: 2281486 - RNA, 19 nt, Artificial Sequence
  Description of Artificial Sequence: Synthetic oligonucleotide
gccagugguggccggguaa

SEQ ID NO: 2281487 - RNA, 19 nt, Artificial Sequence
  Description of Artificial Sequence: Synthetic oligonucleotide
ccacacgggccgucacagg

SEQ ID NO: 2281488 - RNA, 19 nt, Artificial Sequence
  Description of Artificial Sequence: Synthetic oligonucleotide
gccgucacaggcaugcccu

SEQ ID NO: 2281489 - RNA, 19 nt, Artificial Sequence
  Description of Artificial Sequence: Synthetic oligonucleotide
ccucaacacugucuauaga

SEQ ID NO: 2281490 - RNA, 19 nt, Artificial Sequence
  Description of Artificial Sequence: Synthetic oligonucleotide
ccuccgggcauggcggcgg

SEQ ID NO: 2281491 - RNA, 19 nt, Artificial Sequence
  Description of Artificial Sequence: Synthetic oligonucleotide
cggugacgcggguaacuag

SEQ ID NO: 2281492 - RNA, 19 nt, Artificial Sequence
  Description of Artificial Sequence: Synthetic oligonucleotide
cggguaacuaggaggcgca

SEQ ID NO: 2281493 - RNA, 19 nt, Artificial Sequence
  Description of Artificial Sequence: Synthetic oligonucleotide
gggguauaucggagguauc

SEQ ID NO: 2281494 - RNA, 19 nt, Artificial Sequence
  Description of Artificial Sequence: Synthetic oligonucleotide
caacugggguagcaacuuu

SEQ ID NO: 2281495 - RNA, 19 nt, Artificial Sequence
  Description of Artificial Sequence: Synthetic oligonucleotide
cacugggguaaagucccgu

SEQ ID NO: 2281496 - RNA, 19 nt, Artificial Sequence
  Description of Artificial Sequence: Synthetic oligonucleotide
ugcggccgauggugguauu

SEQ ID NO: 2281497 - RNA, 19 nt, Artificial Sequence
  Description of Artificial Sequence: Synthetic oligonucleotide
uggcauccucagguccauu

SEQ ID NO: 2281498 - RNA, 19 nt, Artificial Sequence
  Description of Artificial Sequence: Synthetic oligonucleotide
gguaaaggauagacagcuu

SEQ ID NO: 2281499 - RNA, 19 nt, Artificial Sequence
  Description of Artificial Sequence: Synthetic oligonucleotide
cacgggccgucacaggcau

SEQ ID NO: 2281500 - RNA, 19 nt, Artificial Sequence
  Description of Artificial Sequence: Synthetic oligonucleotide
cggaaauggcaacuuauuu

SEQ ID NO: 2281501 - RNA, 19 nt, Artificial Sequence
  Description of Artificial Sequence: Synthetic oligonucleotide
cucuugccagacgggagau

SEQ ID NO: 2281502 - RNA, 19 nt, Artificial Sequence
  Description of Artificial Sequence: Synthetic oligonucleotide
gccaagcucuguggugcac

SEQ ID NO: 2281503 - RNA, 19 nt, Artificial Sequence
  Description of Artificial Sequence: Synthetic oligonucleotide
ggguaacuaggaggcgcaa

SEQ ID NO: 2281504 - RNA, 19 nt, Artificial Sequence
  Description of Artificial Sequence: Synthetic oligonucleotide
gcggugacgcggguaacua

SEQ ID NO: 2281505 - RNA, 19 nt, Artificial Sequence
  Description of Artificial Sequence: Synthetic oligonucleotide
ggaaaucguggaagcggau

SEQ ID NO: 2281506 - RNA, 19 nt, Artificial Sequence
  Description of Artificial Sequence: Synthetic oligonucleotide
gacugucagcuggcauccu

SEQ ID NO: 2281507 - RNA, 19 nt, Artificial Sequence
  Description of Artificial Sequence: Synthetic oligonucleotide
acgggccgucacaggcaug

SEQ ID NO: 2281508 - RNA, 19 nt, Artificial Sequence
  Description of Artificial Sequence: Synthetic oligonucleotide
cgcggguaacuaggaggcg

SEQ ID NO: 2281509 - RNA, 19 nt, Artificial Sequence
  Description of Artificial Sequence: Synthetic oligonucleotide
cccuguucuugucaucgau

SEQ ID NO: 2281510 - RNA, 19 nt, Artificial Sequence
  Description of Artificial Sequence: Synthetic oligonucleotide
gggccgucacaggcaugcc

SEQ ID NO: 2281511 - RNA, 19 nt, Artificial Sequence
  Description of Artificial Sequence: Synthetic oligonucleotide
cuggcauccucagguccau

SEQ ID NO: 2281512 - RNA, 19 nt, Artificial Sequence
  Description of Artificial Sequence: Synthetic oligonucleotide
gcaugcccuuaucauccuu

SEQ ID NO: 2281513 - RNA, 19 nt, Artificial Sequence
  Description of Artificial Sequence: Synthetic oligonucleotide
cgcuaucacccuccuucca

SEQ ID NO: 2281514 - RNA, 19 nt, Artificial Sequence
  Description of Artificial Sequence: Synthetic oligonucleotide
cggcggugacgcggguaac

SEQ ID NO: 2281515 - RNA, 19 nt, Artificial Sequence
  Description of Artificial Sequence: Synthetic oligonucleotide
ccgucacaggcaugcccuu

SEQ ID NO: 2281516 - RNA, 19 nt, Artificial Sequence
  Description of Artificial Sequence: Synthetic oligonucleotide
aaaacuguuuauuucacac

SEQ ID NO: 2281517 - RNA, 19 nt, Artificial Sequence
  Description of Artificial Sequence: Synthetic oligonucleotide
gaugaguuggucuuuaugc

SEQ ID NO: 2281518 - RNA, 19 nt, Artificial Sequence
  Description of Artificial Sequence: Synthetic oligonucleotide
aaggaaaucgcuguucugc

SEQ ID NO: 2281519 - RNA, 19 nt, Artificial Sequence
  Description of Artificial Sequence: Synthetic oligonucleotide
aauggaggcauugaggugg

SEQ ID NO: 2281520 - RNA, 19 nt, Artificial Sequence
  Description of Artificial Sequence: Synthetic oligonucleotide
uuagcuguaaaccauacuu

SEQ ID NO: 2281521 - RNA, 19 nt, Artificial Sequence
  Description of Artificial Sequence: Synthetic oligonucleotide
ucaacaugcgccauucugg

SEQ ID NO: 2281522 - RNA, 19 nt, Artificial Sequence
  Description of Artificial Sequence: Synthetic oligonucleotide
aaacuuuuccuuccgauga

SEQ ID NO: 2281523 - RNA, 19 nt, Artificial Sequence
  Description of Artificial Sequence: Synthetic oligonucleotide
aaaucgcuguucugcaucc

SEQ ID NO: 2281524 - RNA, 19 nt, Artificial Sequence
  Description of Artificial Sequence: Synthetic oligonucleotide
aaaacuuuuccuuccgaug

SEQ ID NO: 2281525 - RNA, 19 nt, Artificial Sequence
  Description of Artificial Sequence: Synthetic oligonucleotide
aauuucagccaagaggagg

SEQ ID NO: 2281526 - RNA, 19 nt, Artificial Sequence
  Description of Artificial Sequence: Synthetic oligonucleotide
uggaaagcagcccugcugg

SEQ ID NO: 2281527 - RNA, 19 nt, Artificial Sequence
  Description of Artificial Sequence: Synthetic oligonucleotide
aguagcagcuccugaaacc

SEQ ID NO: 2281528 - RNA, 19 nt, Artificial Sequence
  Description of Artificial Sequence: Synthetic oligonucleotide
ucugguaccagaagcuugg

SEQ ID NO: 2281529 - RNA, 19 nt, Artificial Sequence
  Description of Artificial Sequence: Synthetic oligonucleotide
aauacaaggggacucuggu

SEQ ID NO: 2281530 - RNA, 19 nt, Artificial Sequence
  Description of Artificial Sequence: Synthetic oligonucleotide
ucuguguagauucuggccu

SEQ ID NO: 2281531 - RNA, 19 nt, Artificial Sequence
  Description of Artificial Sequence: Synthetic oligonucleotide
uuuugcaucaagcucugca

SEQ ID NO: 2281532 - RNA, 19 nt, Artificial Sequence
  Description of Artificial Sequence: Synthetic oligonucleotide
gaaguugcuauugacggcg

SEQ ID NO: 2281533 - RNA, 19 nt, Artificial Sequence
  Description of Artificial Sequence: Synthetic oligonucleotide
uacaaggggacucugguca

SEQ ID NO: 2281534 - RNA, 19 nt, Artificial Sequence
  Description of Artificial Sequence: Synthetic oligonucleotide
ucaggguugauccgcaggg

SEQ ID NO: 2281535 - RNA, 19 nt, Artificial Sequence
  Description of Artificial Sequence: Synthetic oligonucleotide
uuucacacuuagaagacac

SEQ ID NO: 2281536 - RNA, 19 nt, Artificial Sequence
  Description of Artificial Sequence: Synthetic oligonucleotide
auauucugcugugagaugg

SEQ ID NO: 2281537 - RNA, 19 nt, Artificial Sequence
  Description of Artificial Sequence: Synthetic oligonucleotide
caagacaccgacaggaggg

SEQ ID NO: 2281538 - RNA, 19 nt, Artificial Sequence
  Description of Artificial Sequence: Synthetic oligonucleotide
caucauaggcaguacagcc

SEQ ID NO: 2281539 - RNA, 19 nt, Artificial Sequence
  Description of Artificial Sequence: Synthetic oligonucleotide
uccucagucacguccaccg

SEQ ID NO: 2281540 - RNA, 19 nt, Artificial Sequence
  Description of Artificial Sequence: Synthetic oligonucleotide
uucaacaugcgccauucug

SEQ ID NO: 2281541 - RNA, 19 nt, Artificial Sequence
  Description of Artificial Sequence: Synthetic oligonucleotide
uggauuuagcuguaaacca

SEQ ID NO: 2281542 - RNA, 19 nt, Artificial Sequence
  Description of Artificial Sequence: Synthetic oligonucleotide
ucuggaaauacaaggggac

SEQ ID NO: 2281543 - RNA, 19 nt, Artificial Sequence
  Description of Artificial Sequence: Synthetic oligonucleotide
ucaagacaccgacaggagg

SEQ ID NO: 2281544 - RNA, 19 nt, Artificial Sequence
  Description of Artificial Sequence: Synthetic oligonucleotide
aaacuguuuauuucacacu

SEQ ID NO: 2281545 - RNA, 19 nt, Artificial Sequence
  Description of Artificial Sequence: Synthetic oligonucleotide
agaaguugcuauugacggc

SEQ ID NO: 2281546 - RNA, 19 nt, Artificial Sequence
  Description of Artificial Sequence: Synthetic oligonucleotide
aagacaccaacaucaucuc

SEQ ID NO: 2281547 - RNA, 19 nt, Artificial Sequence
  Description of Artificial Sequence: Synthetic oligonucleotide
cauacuuguccucaaggcc

SEQ ID NO: 2281548 - RNA, 19 nt, Artificial Sequence
  Description of Artificial Sequence: Synthetic oligonucleotide
ugcauccucagguagaagu

SEQ ID NO: 2281549 - RNA, 19 nt, Artificial Sequence
  Description of Artificial Sequence: Synthetic oligonucleotide
agaaccucccaucaccagg

SEQ ID NO: 2281550 - RNA, 19 nt, Artificial Sequence
  Description of Artificial Sequence: Synthetic oligonucleotide
uuggaguccgccauggccc

SEQ ID NO: 2281551 - RNA, 19 nt, Artificial Sequence
  Description of Artificial Sequence: Synthetic oligonucleotide
ugaguuggucuuuaugcag

SEQ ID NO: 2281552 - RNA, 19 nt, Artificial Sequence
  Description of Artificial Sequence: Synthetic oligonucleotide
aaaggucgguacuucaaca

SEQ ID NO: 2281553 - RNA, 19 nt, Artificial Sequence
  Description of Artificial Sequence: Synthetic oligonucleotide
aaagguucagguggggccg

SEQ ID NO: 2281554 - RNA, 19 nt, Artificial Sequence
  Description of Artificial Sequence: Synthetic oligonucleotide
acucucuccuauuuccagc

SEQ ID NO: 2281555 - RNA, 19 nt, Artificial Sequence
  Description of Artificial Sequence: Synthetic oligonucleotide
gguacaguugcugagaacc

SEQ ID NO: 2281556 - RNA, 19 nt, Artificial Sequence
  Description of Artificial Sequence: Synthetic oligonucleotide
ucuccugugauggaaagca

SEQ ID NO: 2281557 - RNA, 19 nt, Artificial Sequence
  Description of Artificial Sequence: Synthetic oligonucleotide
gaccacuaacucucgaagg

SEQ ID NO: 2281558 - RNA, 19 nt, Artificial Sequence
  Description of Artificial Sequence: Synthetic oligonucleotide
aggucaggggcuuccaacc

SEQ ID NO: 2281559 - RNA, 19 nt, Artificial Sequence
  Description of Artificial Sequence: Synthetic oligonucleotide
agaacuggaaaacuguuua

SEQ ID NO: 2281560 - RNA, 19 nt, Artificial Sequence
  Description of Artificial Sequence: Synthetic oligonucleotide
cuggucaagacaccgacag

SEQ ID NO: 2281561 - RNA, 19 nt, Artificial Sequence
  Description of Artificial Sequence: Synthetic oligonucleotide
uguaaaccauacuuguccu

SEQ ID NO: 2281562 - RNA, 19 nt, Artificial Sequence
  Description of Artificial Sequence: Synthetic oligonucleotide
caaagguucagguggggcc

SEQ ID NO: 2281563 - RNA, 19 nt, Artificial Sequence
  Description of Artificial Sequence: Synthetic oligonucleotide
ucacacuuagaagacacca

SEQ ID NO: 2281564 - RNA, 19 nt, Artificial Sequence
  Description of Artificial Sequence: Synthetic oligonucleotide
acaucauaggcaguacagc

SEQ ID NO: 2281565 - RNA, 19 nt, Artificial Sequence
  Description of Artificial Sequence: Synthetic oligonucleotide
uugacggcgacaucauagg

SEQ ID NO: 2281566 - RNA, 19 nt, Artificial Sequence
  Description of Artificial Sequence: Synthetic oligonucleotide
uggucuuuaugcagaaccc

SEQ ID NO: 2281567 - RNA, 19 nt, Artificial Sequence
  Description of Artificial Sequence: Synthetic oligonucleotide
ucagucacguccaccgggg

SEQ ID NO: 2281568 - RNA, 19 nt, Artificial Sequence
  Description of Artificial Sequence: Synthetic oligonucleotide
aacucucgaaggaaaucgc

SEQ ID NO: 2281569 - RNA, 19 nt, Artificial Sequence
  Description of Artificial Sequence: Synthetic oligonucleotide
uccugugauggaaagcagc

SEQ ID NO: 2281570 - RNA, 19 nt, Artificial Sequence
  Description of Artificial Sequence: Synthetic oligonucleotide
agacaccaacaucaucucc

SEQ ID NO: 2281571 - RNA, 19 nt, Artificial Sequence
  Description of Artificial Sequence: Synthetic oligonucleotide
auugacggcgacaucauag

SEQ ID NO: 2281572 - RNA, 19 nt, Artificial Sequence
  Description of Artificial Sequence: Synthetic oligonucleotide
guagauucuggccugucug

SEQ ID NO: 2281573 - RNA, 19 nt, Artificial Sequence
  Description of Artificial Sequence: Synthetic oligonucleotide
acggcgacaucauaggcag

SEQ ID NO: 2281574 - RNA, 19 nt, Artificial Sequence
  Description of Artificial Sequence: Synthetic oligonucleotide
cucucuccuauuuccagcg

SEQ ID NO: 2281575 - RNA, 19 nt, Artificial Sequence
  Description of Artificial Sequence: Synthetic oligonucleotide
ggggaggucaauuucagcc

SEQ ID NO: 2281576 - RNA, 19 nt, Artificial Sequence
  Description of Artificial Sequence: Synthetic oligonucleotide
cugagaaccucccaucacc

SEQ ID NO: 2281577 - RNA, 19 nt, Artificial Sequence
  Description of Artificial Sequence: Synthetic oligonucleotide
uuagcucugguaccagaag

SEQ ID NO: 2281578 - RNA, 19 nt, Artificial Sequence
  Description of Artificial Sequence: Synthetic oligonucleotide
aucauaggcaguacagccc

SEQ ID NO: 2281579 - RNA, 19 nt, Artificial Sequence
  Description of Artificial Sequence: Synthetic oligonucleotide
ucuccuauuuccagcguca

SEQ ID NO: 2281580 - RNA, 19 nt, Artificial Sequence
  Description of Artificial Sequence: Synthetic oligonucleotide
gugacucucuccuauuucc

SEQ ID NO: 2281581 - RNA, 19 nt, Artificial Sequence
  Description of Artificial Sequence: Synthetic oligonucleotide
uuuagcuguaaaccauacu

SEQ ID NO: 2281582 - RNA, 19 nt, Artificial Sequence
  Description of Artificial Sequence: Synthetic oligonucleotide
uuuaugcagaacccaggcu

SEQ ID NO: 2281583 - RNA, 19 nt, Artificial Sequence
  Description of Artificial Sequence: Synthetic oligonucleotide
aaccgcaccgucucaucac

SEQ ID NO: 2281584 - RNA, 19 nt, Artificial Sequence
  Description of Artificial Sequence: Synthetic oligonucleotide
acggauauucugcugugag

SEQ ID NO: 2281585 - RNA, 19 nt, Artificial Sequence
  Description of Artificial Sequence: Synthetic oligonucleotide
guagcagcuccugaaaccg

SEQ ID NO: 2281586 - RNA, 19 nt, Artificial Sequence
  Description of Artificial Sequence: Synthetic oligonucleotide
gaaaucgcuguucugcauc

SEQ ID NO: 2281587 - RNA, 19 nt, Artificial Sequence
  Description of Artificial Sequence: Synthetic oligonucleotide
cucauggggauucggaagc

SEQ ID NO: 2281588 - RNA, 19 nt, Artificial Sequence
  Description of Artificial Sequence: Synthetic oligonucleotide
gaaaggucgguacuucaac

SEQ ID NO: 2281589 - RNA, 19 nt, Artificial Sequence
  Description of Artificial Sequence: Synthetic oligonucleotide
uguagauucuggccugucu

SEQ ID NO: 2281590 - RNA, 19 nt, Artificial Sequence
  Description of Artificial Sequence: Synthetic oligonucleotide
accacuaacucucgaagga

SEQ ID NO: 2281591 - RNA, 19 nt, Artificial Sequence
  Description of Artificial Sequence: Synthetic oligonucleotide
ugagaaccucccaucacca

SEQ ID NO: 2281592 - RNA, 19 nt, Artificial Sequence
  Description of Artificial Sequence: Synthetic oligonucleotide
agcuccugaaaccgcaccg

SEQ ID NO: 2281593 - RNA, 19 nt, Artificial Sequence
  Description of Artificial Sequence: Synthetic oligonucleotide
uccagcgucaguccuugag

SEQ ID NO: 2281594 - RNA, 19 nt, Artificial Sequence
  Description of Artificial Sequence: Synthetic oligonucleotide
acuucaacaugcgccauuc

SEQ ID NO: 2281595 - RNA, 19 nt, Artificial Sequence
  Description of Artificial Sequence: Synthetic oligonucleotide
caucugaagcaguucgucc

SEQ ID NO: 2281596 - RNA, 19 nt, Artificial Sequence
  Description of Artificial Sequence: Synthetic oligonucleotide
aaggucgguacuucaacau

SEQ ID NO: 2281597 - RNA, 19 nt, Artificial Sequence
  Description of Artificial Sequence: Synthetic oligonucleotide
augaguuggucuuuaugca

SEQ ID NO: 2281598 - RNA, 19 nt, Artificial Sequence
  Description of Artificial Sequence: Synthetic oligonucleotide
uugcaucaagcucugcaug

SEQ ID NO: 2281599 - RNA, 19 nt, Artificial Sequence
  Description of Artificial Sequence: Synthetic oligonucleotide
aggcaguacagcccuggcc

SEQ ID NO: 2281600 - RNA, 19 nt, Artificial Sequence
  Description of Artificial Sequence: Synthetic oligonucleotide
auuuagcuguaaaccauac

SEQ ID NO: 2281601 - RNA, 19 nt, Artificial Sequence
  Description of Artificial Sequence: Synthetic oligonucleotide
auacaaggggacucugguc

SEQ ID NO: 2281602 - RNA, 19 nt, Artificial Sequence
  Description of Artificial Sequence: Synthetic oligonucleotide
accgucucaucacccaucg

SEQ ID NO: 2281603 - RNA, 19 nt, Artificial Sequence
  Description of Artificial Sequence: Synthetic oligonucleotide
aaaccgcaccgucucauca

SEQ ID NO: 2281604 - RNA, 19 nt, Artificial Sequence
  Description of Artificial Sequence: Synthetic oligonucleotide
uucacacuuagaagacacc

SEQ ID NO: 2281605 - RNA, 19 nt, Artificial Sequence
  Description of Artificial Sequence: Synthetic oligonucleotide
auggaaagcagcccugcug

SEQ ID NO: 2281606 - RNA, 19 nt, Artificial Sequence
  Description of Artificial Sequence: Synthetic oligonucleotide
ugcugagaaccucccauca

SEQ ID NO: 2281607 - RNA, 19 nt, Artificial Sequence
  Description of Artificial Sequence: Synthetic oligonucleotide
uggccuuuugcaucaagcu

SEQ ID NO: 2281608 - RNA, 19 nt, Artificial Sequence
  Description of Artificial Sequence: Synthetic oligonucleotide
cucucgaaggaaaucgcug

SEQ ID NO: 2281609 - RNA, 19 nt, Artificial Sequence
  Description of Artificial Sequence: Synthetic oligonucleotide
aucaccaggugacucucuc

SEQ ID NO: 2281610 - RNA, 19 nt, Artificial Sequence
  Description of Artificial Sequence: Synthetic oligonucleotide
gaguggcagacguugauga

SEQ ID NO: 2281611 - RNA, 19 nt, Artificial Sequence
  Description of Artificial Sequence: Synthetic oligonucleotide
gauucggaagccagcuugg

SEQ ID NO: 2281612 - RNA, 19 nt, Artificial Sequence
  Description of Artificial Sequence: Synthetic oligonucleotide
uggaaauacaaggggacuc

SEQ ID NO: 2281613 - RNA, 19 nt, Artificial Sequence
  Description of Artificial Sequence: Synthetic oligonucleotide
auccucagguagaaguugc

SEQ ID NO: 2281614 - RNA, 19 nt, Artificial Sequence
  Description of Artificial Sequence: Synthetic oligonucleotide
uggcagacguugaugaaaa

SEQ ID NO: 2281615 - RNA, 19 nt, Artificial Sequence
  Description of Artificial Sequence: Synthetic oligonucleotide
aggggcuuccaaccaaagg

SEQ ID NO: 2281616 - RNA, 19 nt, Artificial Sequence
  Description of Artificial Sequence: Synthetic oligonucleotide
accgcaccgucucaucacc

SEQ ID NO: 2281617 - RNA, 19 nt, Artificial Sequence
  Description of Artificial Sequence: Synthetic oligonucleotide
uccgcaggggaauggaggc

SEQ ID NO: 2281618 - RNA, 19 nt, Artificial Sequence
  Description of Artificial Sequence: Synthetic oligonucleotide
aucgcuguucugcauccuc

SEQ ID NO: 2281619 - RNA, 19 nt, Artificial Sequence
  Description of Artificial Sequence: Synthetic oligonucleotide
cucagucacguccaccggg

SEQ ID NO: 2281620 - RNA, 19 nt, Artificial Sequence
  Description of Artificial Sequence: Synthetic oligonucleotide
uucuggauuuagcuguaaa

SEQ ID NO: 2281621 - RNA, 19 nt, Artificial Sequence
  Description of Artificial Sequence: Synthetic oligonucleotide
aagacaccgacaggagggg

SEQ ID NO: 2281622 - RNA, 19 nt, Artificial Sequence
  Description of Artificial Sequence: Synthetic oligonucleotide
ggauucggaagccagcuug

SEQ ID NO: 2281623 - RNA, 19 nt, Artificial Sequence
  Description of Artificial Sequence: Synthetic oligonucleotide
ucacccaucgacucugcgu

SEQ ID NO: 2281624 - RNA, 19 nt, Artificial Sequence
  Description of Artificial Sequence: Synthetic oligonucleotide
acaugcgccauucuggauu

SEQ ID NO: 2281625 - RNA, 19 nt, Artificial Sequence
  Description of Artificial Sequence: Synthetic oligonucleotide
gaaggaaaucgcuguucug

SEQ ID NO: 2281626 - RNA, 19 nt, Artificial Sequence
  Description of Artificial Sequence: Synthetic oligonucleotide
aguugcuauugacggcgac

SEQ ID NO: 2281627 - RNA, 19 nt, Artificial Sequence
  Description of Artificial Sequence: Synthetic oligonucleotide
uucuggacccugcaggguc

SEQ ID NO: 2281628 - RNA, 19 nt, Artificial Sequence
  Description of Artificial Sequence: Synthetic oligonucleotide
gaacggauauucugcugug

SEQ ID NO: 2281629 - RNA, 19 nt, Artificial Sequence
  Description of Artificial Sequence: Synthetic oligonucleotide
gcuggaucuguguagauuc

SEQ ID NO: 2281630 - RNA, 19 nt, Artificial Sequence
  Description of Artificial Sequence: Synthetic oligonucleotide
ucuggucaagacaccgaca

SEQ ID NO: 2281631 - RNA, 19 nt, Artificial Sequence
  Description of Artificial Sequence: Synthetic oligonucleotide
guucugcauccucagguag

SEQ ID NO: 2281632 - RNA, 19 nt, Artificial Sequence
  Description of Artificial Sequence: Synthetic oligonucleotide
gaggcauugaggugguaca

SEQ ID NO: 2281633 - RNA, 19 nt, Artificial Sequence
  Description of Artificial Sequence: Synthetic oligonucleotide
gguacuucaacaugcgcca

SEQ ID NO: 2281634 - RNA, 19 nt, Artificial Sequence
  Description of Artificial Sequence: Synthetic oligonucleotide
uauucugcugugagaugga

SEQ ID NO: 2281635 - RNA, 19 nt, Artificial Sequence
  Description of Artificial Sequence: Synthetic oligonucleotide
ucgguacuucaacaugcgc

SEQ ID NO: 2281636 - RNA, 19 nt, Artificial Sequence
  Description of Artificial Sequence: Synthetic oligonucleotide
aggaaaucgcuguucugca

SEQ ID NO: 2281637 - RNA, 19 nt, Artificial Sequence
  Description of Artificial Sequence: Synthetic oligonucleotide
aguugcuuucuccugugau

SEQ ID NO: 2281638 - RNA, 19 nt, Artificial Sequence
  Description of Artificial Sequence: Synthetic oligonucleotide
ugacggcgacaucauaggc

SEQ ID NO: 2281639 - RNA, 19 nt, Artificial Sequence
  Description of Artificial Sequence: Synthetic oligonucleotide
gaaaacuuuuccuuccgau

SEQ ID NO: 2281640 - RNA, 19 nt, Artificial Sequence
  Description of Artificial Sequence: Synthetic oligonucleotide
aggucgguacuucaacaug

SEQ ID NO: 2281641 - RNA, 19 nt, Artificial Sequence
  Description of Artificial Sequence: Synthetic oligonucleotide
aggugguacaguugcugag

SEQ ID NO: 2281642 - RNA, 19 nt, Artificial Sequence
  Description of Artificial Sequence: Synthetic oligonucleotide
gaggucaggggcuuccaac

SEQ ID NO: 2281643 - RNA, 19 nt, Artificial Sequence
  Description of Artificial Sequence: Synthetic oligonucleotide
cucucccaggcucaugggg

SEQ ID NO: 2281644 - RNA, 19 nt, Artificial Sequence
  Description of Artificial Sequence: Synthetic oligonucleotide
cacccaucgacucugcguc

SEQ ID NO: 2281645 - RNA, 19 nt, Artificial Sequence
  Description of Artificial Sequence: Synthetic oligonucleotide
ccauacuuguccucaaggc

SEQ ID NO: 2281646 - RNA, 19 nt, Artificial Sequence
  Description of Artificial Sequence: Synthetic oligonucleotide
uguucugcauccucaggua

SEQ ID NO: 2281647 - RNA, 19 nt, Artificial Sequence
  Description of Artificial Sequence: Synthetic oligonucleotide
uugcuauugacggcgacau

SEQ ID NO: 2281648 - RNA, 19 nt, Artificial Sequence
  Description of Artificial Sequence: Synthetic oligonucleotide
agcuccauccagccugggg

SEQ ID NO: 2281649 - RNA, 19 nt, Artificial Sequence
  Description of Artificial Sequence: Synthetic oligonucleotide
gucgcuuagcucugguacc

SEQ ID NO: 2281650 - RNA, 19 nt, Artificial Sequence
  Description of Artificial Sequence: Synthetic oligonucleotide
ucuggacccugcagggucc

SEQ ID NO: 2281651 - RNA, 19 nt, Artificial Sequence
  Description of Artificial Sequence: Synthetic oligonucleotide
ucugucugggcuugcugga

SEQ ID NO: 2281652 - RNA, 19 nt, Artificial Sequence
  Description of Artificial Sequence: Synthetic oligonucleotide
gcuauugacggcgacauca

SEQ ID NO: 2281653 - RNA, 19 nt, Artificial Sequence
  Description of Artificial Sequence: Synthetic oligonucleotide
agccaagaggaggucaggg

SEQ ID NO: 2281654 - RNA, 19 nt, Artificial Sequence
  Description of Artificial Sequence: Synthetic oligonucleotide
cuuccaaccaaagguucag

SEQ ID NO: 2281655 - RNA, 19 nt, Artificial Sequence
  Description of Artificial Sequence: Synthetic oligonucleotide
ggaauggaggcauugaggu

SEQ ID NO: 2281656 - RNA, 19 nt, Artificial Sequence
  Description of Artificial Sequence: Synthetic oligonucleotide
aguucguccucagucacgu

SEQ ID NO: 2281657 - RNA, 19 nt, Artificial Sequence
  Description of Artificial Sequence: Synthetic oligonucleotide
uuuccagcgucaguccuug

SEQ ID NO: 2281658 - RNA, 19 nt, Artificial Sequence
  Description of Artificial Sequence: Synthetic oligonucleotide
aggaaaggucgguacuuca

SEQ ID NO: 2281659 - RNA, 19 nt, Artificial Sequence
  Description of Artificial Sequence: Synthetic oligonucleotide
ggucaagacaccgacagga

SEQ ID NO: 2281660 - RNA, 19 nt, Artificial Sequence
  Description of Artificial Sequence: Synthetic oligonucleotide
agauggagcccaggaaagg

SEQ ID NO: 2281661 - RNA, 19 nt, Artificial Sequence
  Description of Artificial Sequence: Synthetic oligonucleotide
aggguugauccgcagggga

SEQ ID NO: 2281662 - RNA, 19 nt, Artificial Sequence
  Description of Artificial Sequence: Synthetic oligonucleotide
gagaaccucccaucaccag

SEQ ID NO: 2281663 - RNA, 19 nt, Artificial Sequence
  Description of Artificial Sequence: Synthetic oligonucleotide
caucaguugcuuucuccug

SEQ ID NO: 2281664 - RNA, 19 nt, Artificial Sequence
  Description of Artificial Sequence: Synthetic oligonucleotide
gggaauggaggcauugagg

SEQ ID NO: 2281665 - RNA, 19 nt, Artificial Sequence
  Description of Artificial Sequence: Synthetic oligonucleotide
cuaacucucgaaggaaauc

SEQ ID NO: 2281666 - RNA, 19 nt, Artificial Sequence
  Description of Artificial Sequence: Synthetic oligonucleotide
auuucacacuuagaagaca

SEQ ID NO: 2281667 - RNA, 19 nt, Artificial Sequence
  Description of Artificial Sequence: Synthetic oligonucleotide
aggggacucuggucaagac

SEQ ID NO: 2281668 - RNA, 19 nt, Artificial Sequence
  Description of Artificial Sequence: Synthetic oligonucleotide
cuguguagauucuggccug

SEQ ID NO: 2281669 - RNA, 19 nt, Artificial Sequence
  Description of Artificial Sequence: Synthetic oligonucleotide
cuggggaggucaauuucag

SEQ ID NO: 2281670 - RNA, 19 nt, Artificial Sequence
  Description of Artificial Sequence: Synthetic oligonucleotide
uugauccgcaggggaaugg

SEQ ID NO: 2281671 - RNA, 19 nt, Artificial Sequence
  Description of Artificial Sequence: Synthetic oligonucleotide
gaguuggucuuuaugcaga

SEQ ID NO: 2281672 - RNA, 19 nt, Artificial Sequence
  Description of Artificial Sequence: Synthetic oligonucleotide
ucgacucugcgucgcuuag

SEQ ID NO: 2281673 - RNA, 19 nt, Artificial Sequence
  Description of Artificial Sequence: Synthetic oligonucleotide
ucugcgucgcuuagcucug

SEQ ID NO: 2281674 - RNA, 19 nt, Artificial Sequence
  Description of Artificial Sequence: Synthetic oligonucleotide
ggucgguacuucaacaugc

SEQ ID NO: 2281675 - RNA, 19 nt, Artificial Sequence
  Description of Artificial Sequence: Synthetic oligonucleotide
ucaggggcuuccaaccaaa

SEQ ID NO: 2281676 - RNA, 19 nt, Artificial Sequence
  Description of Artificial Sequence: Synthetic oligonucleotide
cuuagcucugguaccagaa

SEQ ID NO: 2281677 - RNA, 19 nt, Artificial Sequence
  Description of Artificial Sequence: Synthetic oligonucleotide
aacggauauucugcuguga

SEQ ID NO: 2281678 - RNA, 19 nt, Artificial Sequence
  Description of Artificial Sequence: Synthetic oligonucleotide
cucuccuauuuccagcguc

SEQ ID NO: 2281679 - RNA, 19 nt, Artificial Sequence
  Description of Artificial Sequence: Synthetic oligonucleotide
gacggcgacaucauaggca

SEQ ID NO: 2281680 - RNA, 19 nt, Artificial Sequence
  Description of Artificial Sequence: Synthetic oligonucleotide
cagguagaaguugcuauug

SEQ ID NO: 2281681 - RNA, 19 nt, Artificial Sequence
  Description of Artificial Sequence: Synthetic oligonucleotide
uugcugagaaccucccauc

SEQ ID NO: 2281682 - RNA, 19 nt, Artificial Sequence
  Description of Artificial Sequence: Synthetic oligonucleotide
uccuauuuccagcgucagu

SEQ ID NO: 2281683 - RNA, 19 nt, Artificial Sequence
  Description of Artificial Sequence: Synthetic oligonucleotide
ggucaauuucagccaagag

SEQ ID NO: 2281684 - RNA, 19 nt, Artificial Sequence
  Description of Artificial Sequence: Synthetic oligonucleotide
caguagcagcuccugaaac

SEQ ID NO: 2281685 - RNA, 19 nt, Artificial Sequence
  Description of Artificial Sequence: Synthetic oligonucleotide
ucgaaggaaaucgcuguuc

SEQ ID NO: 2281686 - RNA, 19 nt, Artificial Sequence
  Description of Artificial Sequence: Synthetic oligonucleotide
agaguggcagacguugaug

SEQ ID NO: 2281687 - RNA, 19 nt, Artificial Sequence
  Description of Artificial Sequence: Synthetic oligonucleotide
gucgguacuucaacaugcg

SEQ ID NO: 2281688 - RNA, 19 nt, Artificial Sequence
  Description of Artificial Sequence: Synthetic oligonucleotide
cucugcauguggcucuccc

SEQ ID NO: 2281689 - RNA, 19 nt, Artificial Sequence
  Description of Artificial Sequence: Synthetic oligonucleotide
ggggaauggaggcauugag

SEQ ID NO: 2281690 - RNA, 19 nt, Artificial Sequence
  Description of Artificial Sequence: Synthetic oligonucleotide
ucugcauccucagguagaa

SEQ ID NO: 2281691 - RNA, 19 nt, Artificial Sequence
  Description of Artificial Sequence: Synthetic oligonucleotide
gccauucuggauuuagcug

SEQ ID NO: 2281692 - RNA, 19 nt, Artificial Sequence
  Description of Artificial Sequence: Synthetic oligonucleotide
aguuggucuuuaugcagaa

SEQ ID NO: 2281693 - RNA, 19 nt, Artificial Sequence
  Description of Artificial Sequence: Synthetic oligonucleotide
agcgucaguccuugagcuc

SEQ ID NO: 2281694 - RNA, 19 nt, Artificial Sequence
  Description of Artificial Sequence: Synthetic oligonucleotide
uaggcaguacagcccuggc

SEQ ID NO: 2281695 - RNA, 19 nt, Artificial Sequence
  Description of Artificial Sequence: Synthetic oligonucleotide
aggggcauggacaccauca

SEQ ID NO: 2281696 - RNA, 19 nt, Artificial Sequence
  Description of Artificial Sequence: Synthetic oligonucleotide
aggucaauuucagccaaga

SEQ ID NO: 2281697 - RNA, 19 nt, Artificial Sequence
  Description of Artificial Sequence: Synthetic oligonucleotide
guugcuauugacggcgaca

SEQ ID NO: 2281698 - RNA, 19 nt, Artificial Sequence
  Description of Artificial Sequence: Synthetic oligonucleotide
uggggaggucaauuucagc

SEQ ID NO: 2281699 - RNA, 19 nt, Artificial Sequence
  Description of Artificial Sequence: Synthetic oligonucleotide
cucugcgucgcuuagcucu

SEQ ID NO: 2281700 - RNA, 19 nt, Artificial Sequence
  Description of Artificial Sequence: Synthetic oligonucleotide
uacuucaacaugcgccauu

SEQ ID NO: 2281701 - RNA, 19 nt, Artificial Sequence
  Description of Artificial Sequence: Synthetic oligonucleotide
uucagguggggccguucug

SEQ ID NO: 2281702 - RNA, 19 nt, Artificial Sequence
  Description of Artificial Sequence: Synthetic oligonucleotide
cagacguugaugaaaacuu

SEQ ID NO: 2281703 - RNA, 19 nt, Artificial Sequence
  Description of Artificial Sequence: Synthetic oligonucleotide
gagggcgcugccgggaacg

SEQ ID NO: 2281704 - RNA, 19 nt, Artificial Sequence
  Description of Artificial Sequence: Synthetic oligonucleotide
uugaggugguacaguugcu

SEQ ID NO: 2281705 - RNA, 19 nt, Artificial Sequence
  Description of Artificial Sequence: Synthetic oligonucleotide
caguugcugagaaccuccc

SEQ ID NO: 2281706 - RNA, 19 nt, Artificial Sequence
  Description of Artificial Sequence: Synthetic oligonucleotide
cuccauccagccuggggag

SEQ ID NO: 2281707 - RNA, 19 nt, Artificial Sequence
  Description of Artificial Sequence: Synthetic oligonucleotide
auucugcugugagauggag

SEQ ID NO: 2281708 - RNA, 19 nt, Artificial Sequence
  Description of Artificial Sequence: Synthetic oligonucleotide
gucaagacaccgacaggag

SEQ ID NO: 2281709 - RNA, 19 nt, Artificial Sequence
  Description of Artificial Sequence: Synthetic oligonucleotide
caacaugcgccauucugga

SEQ ID NO: 2281710 - RNA, 19 nt, Artificial Sequence
  Description of Artificial Sequence: Synthetic oligonucleotide
aacaugcgccauucuggau

SEQ ID NO: 2281711 - RNA, 19 nt, Artificial Sequence
  Description of Artificial Sequence: Synthetic oligonucleotide
guugcugagaaccucccau

SEQ ID NO: 2281712 - RNA, 19 nt, Artificial Sequence
  Description of Artificial Sequence: Synthetic oligonucleotide
ccgggaacggauauucugc

SEQ ID NO: 2281713 - RNA, 19 nt, Artificial Sequence
  Description of Artificial Sequence: Synthetic oligonucleotide
ugauccgcaggggaaugga

SEQ ID NO: 2281714 - RNA, 19 nt, Artificial Sequence
  Description of Artificial Sequence: Synthetic oligonucleotide
ggaacggauauucugcugu

SEQ ID NO: 2281715 - RNA, 19 nt, Artificial Sequence
  Description of Artificial Sequence: Synthetic oligonucleotide
agcucugguaccagaagcu

SEQ ID NO: 2281716 - RNA, 19 nt, Artificial Sequence
  Description of Artificial Sequence: Synthetic oligonucleotide
ugaaaccgcaccgucucau

SEQ ID NO: 2281717 - RNA, 19 nt, Artificial Sequence
  Description of Artificial Sequence: Synthetic oligonucleotide
gaaaccgcaccgucucauc

SEQ ID NO: 2281718 - RNA, 19 nt, Artificial Sequence
  Description of Artificial Sequence: Synthetic oligonucleotide
ucgcuuagcucugguacca

SEQ ID NO: 2281719 - RNA, 19 nt, Artificial Sequence
  Description of Artificial Sequence: Synthetic oligonucleotide
agacaccgacaggaggggc

SEQ ID NO: 2281720 - RNA, 19 nt, Artificial Sequence
  Description of Artificial Sequence: Synthetic oligonucleotide
uauugacggcgacaucaua

SEQ ID NO: 2281721 - RNA, 19 nt, Artificial Sequence
  Description of Artificial Sequence: Synthetic oligonucleotide
gauccgcaggggaauggag

SEQ ID NO: 2281722 - RNA, 19 nt, Artificial Sequence
  Description of Artificial Sequence: Synthetic oligonucleotide
cgucucaucacccaucgac

SEQ ID NO: 2281723 - RNA, 19 nt, Artificial Sequence
  Description of Artificial Sequence: Synthetic oligonucleotide
gggagaguggcagacguug

SEQ ID NO: 2281724 - RNA, 19 nt, Artificial Sequence
  Description of Artificial Sequence: Synthetic oligonucleotide
ugguacaguugcugagaac

SEQ ID NO: 2281725 - RNA, 19 nt, Artificial Sequence
  Description of Artificial Sequence: Synthetic oligonucleotide
cacuaacucucgaaggaaa

SEQ ID NO: 2281726 - RNA, 19 nt, Artificial Sequence
  Description of Artificial Sequence: Synthetic oligonucleotide
ucucuccuauuuccagcgu

SEQ ID NO: 2281727 - RNA, 19 nt, Artificial Sequence
  Description of Artificial Sequence: Synthetic oligonucleotide
gagggagaguggcagacgu

SEQ ID NO: 2281728 - RNA, 19 nt, Artificial Sequence
  Description of Artificial Sequence: Synthetic oligonucleotide
acucucgaaggaaaucgcu

SEQ ID NO: 2281729 - RNA, 19 nt, Artificial Sequence
  Description of Artificial Sequence: Synthetic oligonucleotide
accucccaucaccagguga

SEQ ID NO: 2281730 - RNA, 19 nt, Artificial Sequence
  Description of Artificial Sequence: Synthetic oligonucleotide
cuguucugcauccucaggu

SEQ ID NO: 2281731 - RNA, 19 nt, Artificial Sequence
  Description of Artificial Sequence: Synthetic oligonucleotide
agguggggccguucuggac

SEQ ID NO: 2281732 - RNA, 19 nt, Artificial Sequence
  Description of Artificial Sequence: Synthetic oligonucleotide
ccguucuggacccugcagg

SEQ ID NO: 2281733 - RNA, 19 nt, Artificial Sequence
  Description of Artificial Sequence: Synthetic oligonucleotide
cucagguagaaguugcuau

SEQ ID NO: 2281734 - RNA, 19 nt, Artificial Sequence
  Description of Artificial Sequence: Synthetic oligonucleotide
uguguagauucuggccugu

SEQ ID NO: 2281735 - RNA, 19 nt, Artificial Sequence
  Description of Artificial Sequence: Synthetic oligonucleotide
ggccuuuugcaucaagcuc

SEQ ID NO: 2281736 - RNA, 19 nt, Artificial Sequence
  Description of Artificial Sequence: Synthetic oligonucleotide
acccaucgacucugcgucg

SEQ ID NO: 2281737 - RNA, 19 nt, Artificial Sequence
  Description of Artificial Sequence: Synthetic oligonucleotide
aaccucccaucaccaggug

SEQ ID NO: 2281738 - RNA, 19 nt, Artificial Sequence
  Description of Artificial Sequence: Synthetic oligonucleotide
gaacuggaaaacuguuuau

SEQ ID NO: 2281739 - RNA, 19 nt, Artificial Sequence
  Description of Artificial Sequence: Synthetic oligonucleotide
gcauggacaccaucaguug

SEQ ID NO: 2281740 - RNA, 19 nt, Artificial Sequence
  Description of Artificial Sequence: Synthetic oligonucleotide
gauucuggccugucugucu

SEQ ID NO: 2281741 - RNA, 19 nt, Artificial Sequence
  Description of Artificial Sequence: Synthetic oligonucleotide
gggaggucaauuucagcca

SEQ ID NO: 2281742 - RNA, 19 nt, Artificial Sequence
  Description of Artificial Sequence: Synthetic oligonucleotide
gccgggaacggauauucug

SEQ ID NO: 2281743 - RNA, 19 nt, Artificial Sequence
  Description of Artificial Sequence: Synthetic oligonucleotide
cugccgggaacggauauuc

SEQ ID NO: 2281744 - RNA, 19 nt, Artificial Sequence
  Description of Artificial Sequence: Synthetic oligonucleotide
uuccuuccgaugaguuggu

SEQ ID NO: 2281745 - RNA, 19 nt, Artificial Sequence
  Description of Artificial Sequence: Synthetic oligonucleotide
aggugacucucuccuauuu

SEQ ID NO: 2281746 - RNA, 19 nt, Artificial Sequence
  Description of Artificial Sequence: Synthetic oligonucleotide
ccagcgucaguccuugagc

SEQ ID NO: 2281747 - RNA, 19 nt, Artificial Sequence
  Description of Artificial Sequence: Synthetic oligonucleotide
ccuugagcuccauccagcc

SEQ ID NO: 2281748 - RNA, 19 nt, Artificial Sequence
  Description of Artificial Sequence: Synthetic oligonucleotide
gugauggaaagcagcccug

SEQ ID NO: 2281749 - RNA, 19 nt, Artificial Sequence
  Description of Artificial Sequence: Synthetic oligonucleotide
aucgacucugcgucgcuua

SEQ ID NO: 2281750 - RNA, 19 nt, Artificial Sequence
  Description of Artificial Sequence: Synthetic oligonucleotide
ggugacucucuccuauuuc

SEQ ID NO: 2281751 - RNA, 19 nt, Artificial Sequence
  Description of Artificial Sequence: Synthetic oligonucleotide
gcgucaguccuugagcucc

SEQ ID NO: 2281752 - RNA, 19 nt, Artificial Sequence
  Description of Artificial Sequence: Synthetic oligonucleotide
ccugaaaccgcaccgucuc

SEQ ID NO: 2281753 - RNA, 19 nt, Artificial Sequence
  Description of Artificial Sequence: Synthetic oligonucleotide
ugcuuucuccugugaugga

SEQ ID NO: 2281754 - RNA, 19 nt, Artificial Sequence
  Description of Artificial Sequence: Synthetic oligonucleotide
cuccugaaaccgcaccguc

SEQ ID NO: 2281755 - RNA, 19 nt, Artificial Sequence
  Description of Artificial Sequence: Synthetic oligonucleotide
acaaggggacucuggucaa

SEQ ID NO: 2281756 - RNA, 19 nt, Artificial Sequence
  Description of Artificial Sequence: Synthetic oligonucleotide
ugcgucgcuuagcucuggu

SEQ ID NO: 2281757 - RNA, 19 nt, Artificial Sequence
  Description of Artificial Sequence: Synthetic oligonucleotide
cuccuauuuccagcgucag

SEQ ID NO: 2281758 - RNA, 19 nt, Artificial Sequence
  Description of Artificial Sequence: Synthetic oligonucleotide
gauggaaagcagcccugcu

SEQ ID NO: 2281759 - RNA, 19 nt, Artificial Sequence
  Description of Artificial Sequence: Synthetic oligonucleotide
cgucgcuuagcucugguac

SEQ ID NO: 2281760 - RNA, 19 nt, Artificial Sequence
  Description of Artificial Sequence: Synthetic oligonucleotide
aaucgcuguucugcauccu

SEQ ID NO: 2281761 - RNA, 19 nt, Artificial Sequence
  Description of Artificial Sequence: Synthetic oligonucleotide
aaguugcuauugacggcga

SEQ ID NO: 2281762 - RNA, 19 nt, Artificial Sequence
  Description of Artificial Sequence: Synthetic oligonucleotide
caggggcuuccaaccaaag

SEQ ID NO: 2281763 - RNA, 19 nt, Artificial Sequence
  Description of Artificial Sequence: Synthetic oligonucleotide
gaugggagggagaguggca

SEQ ID NO: 2281764 - RNA, 19 nt, Artificial Sequence
  Description of Artificial Sequence: Synthetic oligonucleotide
ugccgggaacggauauucu

SEQ ID NO: 2281765 - RNA, 19 nt, Artificial Sequence
  Description of Artificial Sequence: Synthetic oligonucleotide
aagccagcuugguccuccu

SEQ ID NO: 2281766 - RNA, 19 nt, Artificial Sequence
  Description of Artificial Sequence: Synthetic oligonucleotide
uggaguccgccauggcccu

SEQ ID NO: 2281767 - RNA, 19 nt, Artificial Sequence
  Description of Artificial Sequence: Synthetic oligonucleotide
caggguugauccgcagggg

SEQ ID NO: 2281768 - RNA, 19 nt, Artificial Sequence
  Description of Artificial Sequence: Synthetic oligonucleotide
gcaauggugaccacuaacu

SEQ ID NO: 2281769 - RNA, 19 nt, Artificial Sequence
  Description of Artificial Sequence: Synthetic oligonucleotide
caccgucucaucacccauc

SEQ ID NO: 2281770 - RNA, 19 nt, Artificial Sequence
  Description of Artificial Sequence: Synthetic oligonucleotide
ggggacucuggucaagaca

SEQ ID NO: 2281771 - RNA, 19 nt, Artificial Sequence
  Description of Artificial Sequence: Synthetic oligonucleotide
ugcuauugacggcgacauc

SEQ ID NO: 2281772 - RNA, 19 nt, Artificial Sequence
  Description of Artificial Sequence: Synthetic oligonucleotide
guggggccguucuggaccc

SEQ ID NO: 2281773 - RNA, 19 nt, Artificial Sequence
  Description of Artificial Sequence: Synthetic oligonucleotide
gacguugaugaaaacuuuu

SEQ ID NO: 2281774 - RNA, 19 nt, Artificial Sequence
  Description of Artificial Sequence: Synthetic oligonucleotide
agacguugaugaaaacuuu

SEQ ID NO: 2281775 - RNA, 19 nt, Artificial Sequence
  Description of Artificial Sequence: Synthetic oligonucleotide
gggaacggauauucugcug

SEQ ID NO: 2281776 - RNA, 19 nt, Artificial Sequence
  Description of Artificial Sequence: Synthetic oligonucleotide
uccgaugaguuggucuuua

SEQ ID NO: 2281777 - RNA, 19 nt, Artificial Sequence
  Description of Artificial Sequence: Synthetic oligonucleotide
cuuccgaugaguuggucuu

SEQ ID NO: 2281778 - RNA, 19 nt, Artificial Sequence
  Description of Artificial Sequence: Synthetic oligonucleotide
caggggaauggaggcauug

SEQ ID NO: 2281779 - RNA, 19 nt, Artificial Sequence
  Description of Artificial Sequence: Synthetic oligonucleotide
cuggauccgagggcgcugc

SEQ ID NO: 2281780 - RNA, 19 nt, Artificial Sequence
  Description of Artificial Sequence: Synthetic oligonucleotide
ccaaagguucagguggggc

SEQ ID NO: 2281781 - RNA, 19 nt, Artificial Sequence
  Description of Artificial Sequence: Synthetic oligonucleotide
cugugagauggagcccagg

SEQ ID NO: 2281782 - RNA, 19 nt, Artificial Sequence
  Description of Artificial Sequence: Synthetic oligonucleotide
auccgagggcgcugccggg

SEQ ID NO: 2281783 - RNA, 19 nt, Artificial Sequence
  Description of Artificial Sequence: Synthetic oligonucleotide
cuuuugcaucaagcucugc

SEQ ID NO: 2281784 - RNA, 19 nt, Artificial Sequence
  Description of Artificial Sequence: Synthetic oligonucleotide
cuggccugucugucugggc

SEQ ID NO: 2281785 - RNA, 19 nt, Artificial Sequence
  Description of Artificial Sequence: Synthetic oligonucleotide
gcagacguugaugaaaacu

SEQ ID NO: 2281786 - RNA, 19 nt, Artificial Sequence
  Description of Artificial Sequence: Synthetic oligonucleotide
auucggaagccagcuuggu

SEQ ID NO: 2281787 - RNA, 19 nt, Artificial Sequence
  Description of Artificial Sequence: Synthetic oligonucleotide
aggcucauggggauucgga

SEQ ID NO: 2281788 - RNA, 19 nt, Artificial Sequence
  Description of Artificial Sequence: Synthetic oligonucleotide
aagguucagguggggccgu

SEQ ID NO: 2281789 - RNA, 19 nt, Artificial Sequence
  Description of Artificial Sequence: Synthetic oligonucleotide
aggcccucccuggcaaugg

SEQ ID NO: 2281790 - RNA, 19 nt, Artificial Sequence
  Description of Artificial Sequence: Synthetic oligonucleotide
caucuccacaucuggaaau

SEQ ID NO: 2281791 - RNA, 19 nt, Artificial Sequence
  Description of Artificial Sequence: Synthetic oligonucleotide
cauucuggauuuagcugua

SEQ ID NO: 2281792 - RNA, 19 nt, Artificial Sequence
  Description of Artificial Sequence: Synthetic oligonucleotide
ggaaagcagcccugcuggc

SEQ ID NO: 2281793 - RNA, 19 nt, Artificial Sequence
  Description of Artificial Sequence: Synthetic oligonucleotide
auuuccagcgucaguccuu

SEQ ID NO: 2281794 - RNA, 19 nt, Artificial Sequence
  Description of Artificial Sequence: Synthetic oligonucleotide
ccuuuugcaucaagcucug

SEQ ID NO: 2281795 - RNA, 19 nt, Artificial Sequence
  Description of Artificial Sequence: Synthetic oligonucleotide
gucucaucacccaucgacu

SEQ ID NO: 2281796 - RNA, 19 nt, Artificial Sequence
  Description of Artificial Sequence: Synthetic oligonucleotide
ggagggagaguggcagacg

SEQ ID NO: 2281797 - RNA, 19 nt, Artificial Sequence
  Description of Artificial Sequence: Synthetic oligonucleotide
ggcucauggggauucggaa

SEQ ID NO: 2281798 - RNA, 19 nt, Artificial Sequence
  Description of Artificial Sequence: Synthetic oligonucleotide
caaggggacucuggucaag

SEQ ID NO: 2281799 - RNA, 19 nt, Artificial Sequence
  Description of Artificial Sequence: Synthetic oligonucleotide
cuccuggauccgagggcgc

SEQ ID NO: 2281800 - RNA, 19 nt, Artificial Sequence
  Description of Artificial Sequence: Synthetic oligonucleotide
cgaugaguuggucuuuaug

SEQ ID NO: 2281801 - RNA, 19 nt, Artificial Sequence
  Description of Artificial Sequence: Synthetic oligonucleotide
ggauccgagggcgcugccg

SEQ ID NO: 2281802 - RNA, 19 nt, Artificial Sequence
  Description of Artificial Sequence: Synthetic oligonucleotide
uggauccgagggcgcugcc

SEQ ID NO: 2281803 - RNA, 19 nt, Artificial Sequence
  Description of Artificial Sequence: Synthetic oligonucleotide
guucagguggggccguucu

SEQ ID NO: 2281804 - RNA, 19 nt, Artificial Sequence
  Description of Artificial Sequence: Synthetic oligonucleotide
ggcgacaucauaggcagua

SEQ ID NO: 2281805 - RNA, 19 nt, Artificial Sequence
  Description of Artificial Sequence: Synthetic oligonucleotide
ggaaaggucgguacuucaa

SEQ ID NO: 2281806 - RNA, 19 nt, Artificial Sequence
  Description of Artificial Sequence: Synthetic oligonucleotide
gcccaggaaaggucgguac

SEQ ID NO: 2281807 - RNA, 19 nt, Artificial Sequence
  Description of Artificial Sequence: Synthetic oligonucleotide
ggauuuagcuguaaaccau

SEQ ID NO: 2281808 - RNA, 19 nt, Artificial Sequence
  Description of Artificial Sequence: Synthetic oligonucleotide
gccguucuggacccugcag

SEQ ID NO: 2281809 - RNA, 19 nt, Artificial Sequence
  Description of Artificial Sequence: Synthetic oligonucleotide
gcaguagcagcuccugaaa

SEQ ID NO: 2281810 - RNA, 19 nt, Artificial Sequence
  Description of Artificial Sequence: Synthetic oligonucleotide
cucaucacccaucgacucu

SEQ ID NO: 2281811 - RNA, 19 nt, Artificial Sequence
  Description of Artificial Sequence: Synthetic oligonucleotide
ggcauggacaccaucaguu

SEQ ID NO: 2281812 - RNA, 19 nt, Artificial Sequence
  Description of Artificial Sequence: Synthetic oligonucleotide
gcuuagcucugguaccaga

SEQ ID NO: 2281813 - RNA, 19 nt, Artificial Sequence
  Description of Artificial Sequence: Synthetic oligonucleotide
cuauugacggcgacaucau

SEQ ID NO: 2281814 - RNA, 19 nt, Artificial Sequence
  Description of Artificial Sequence: Synthetic oligonucleotide
cauggggauucggaagcca

SEQ ID NO: 2281815 - RNA, 19 nt, Artificial Sequence
  Description of Artificial Sequence: Synthetic oligonucleotide
ggucaggggcuuccaacca

SEQ ID NO: 2281816 - RNA, 19 nt, Artificial Sequence
  Description of Artificial Sequence: Synthetic oligonucleotide
gcucucccaggcucauggg

SEQ ID NO: 2281817 - RNA, 19 nt, Artificial Sequence
  Description of Artificial Sequence: Synthetic oligonucleotide
cugaaaccgcaccgucuca

SEQ ID NO: 2281818 - RNA, 19 nt, Artificial Sequence
  Description of Artificial Sequence: Synthetic oligonucleotide
uuccgaugaguuggucuuu

SEQ ID NO: 2281819 - RNA, 19 nt, Artificial Sequence
  Description of Artificial Sequence: Synthetic oligonucleotide
caguugcuuucuccuguga

SEQ ID NO: 2281820 - RNA, 19 nt, Artificial Sequence
  Description of Artificial Sequence: Synthetic oligonucleotide
gccuggggaggucaauuuc

SEQ ID NO: 2281821 - RNA, 19 nt, Artificial Sequence
  Description of Artificial Sequence: Synthetic oligonucleotide
cugcauccucagguagaag

SEQ ID NO: 2281822 - RNA, 19 nt, Artificial Sequence
  Description of Artificial Sequence: Synthetic oligonucleotide
ggcagacguugaugaaaac

SEQ ID NO: 2281823 - RNA, 19 nt, Artificial Sequence
  Description of Artificial Sequence: Synthetic oligonucleotide
agggcgcugccgggaacgg

SEQ ID NO: 2281824 - RNA, 19 nt, Artificial Sequence
  Description of Artificial Sequence: Synthetic oligonucleotide
cccucccuggcaaugguga

SEQ ID NO: 2281825 - RNA, 19 nt, Artificial Sequence
  Description of Artificial Sequence: Synthetic oligonucleotide
ggggcuggaucuguguaga

SEQ ID NO: 2281826 - RNA, 19 nt, Artificial Sequence
  Description of Artificial Sequence: Synthetic oligonucleotide
uuccagcgucaguccuuga

SEQ ID NO: 2281827 - RNA, 19 nt, Artificial Sequence
  Description of Artificial Sequence: Synthetic oligonucleotide
caugcgccauucuggauuu

SEQ ID NO: 2281828 - RNA, 19 nt, Artificial Sequence
  Description of Artificial Sequence: Synthetic oligonucleotide
ccuuccgaugaguuggucu

SEQ ID NO: 2281829 - RNA, 19 nt, Artificial Sequence
  Description of Artificial Sequence: Synthetic oligonucleotide
ccucaaggcccucccuggc

SEQ ID NO: 2281830 - RNA, 19 nt, Artificial Sequence
  Description of Artificial Sequence: Synthetic oligonucleotide
cugcgucgcuuagcucugg

SEQ ID NO: 2281831 - RNA, 19 nt, Artificial Sequence
  Description of Artificial Sequence: Synthetic oligonucleotide
cccaucgacucugcgucgc

SEQ ID NO: 2281832 - RNA, 19 nt, Artificial Sequence
  Description of Artificial Sequence: Synthetic oligonucleotide
uggcucucccaggcucaug

SEQ ID NO: 2281833 - RNA, 19 nt, Artificial Sequence
  Description of Artificial Sequence: Synthetic oligonucleotide
ggguugauccgcaggggaa

SEQ ID NO: 2281834 - RNA, 19 nt, Artificial Sequence
  Description of Artificial Sequence: Synthetic oligonucleotide
cucgaaggaaaucgcuguu

SEQ ID NO: 2281835 - RNA, 19 nt, Artificial Sequence
  Description of Artificial Sequence: Synthetic oligonucleotide
gcgacaucauaggcaguac

SEQ ID NO: 2281836 - RNA, 19 nt, Artificial Sequence
  Description of Artificial Sequence: Synthetic oligonucleotide
cgacaucauaggcaguaca

SEQ ID NO: 2281837 - RNA, 19 nt, Artificial Sequence
  Description of Artificial Sequence: Synthetic oligonucleotide
ggaaaucgcuguucugcau

SEQ ID NO: 2281838 - RNA, 19 nt, Artificial Sequence
  Description of Artificial Sequence: Synthetic oligonucleotide
gcugugagauggagcccag

SEQ ID NO: 2281839 - RNA, 19 nt, Artificial Sequence
  Description of Artificial Sequence: Synthetic oligonucleotide
cuucaacaugcgccauucu

SEQ ID NO: 2281840 - RNA, 19 nt, Artificial Sequence
  Description of Artificial Sequence: Synthetic oligonucleotide
ccaucaccaggugacucuc

SEQ ID NO: 2281841 - RNA, 19 nt, Artificial Sequence
  Description of Artificial Sequence: Synthetic oligonucleotide
ccgcaccgucucaucaccc

SEQ ID NO: 2281842 - RNA, 19 nt, Artificial Sequence
  Description of Artificial Sequence: Synthetic oligonucleotide
cgaaggaaaucgcuguucu

SEQ ID NO: 2281843 - RNA, 19 nt, Artificial Sequence
  Description of Artificial Sequence: Synthetic oligonucleotide
cugguaccagaagcuugga

SEQ ID NO: 2281844 - RNA, 19 nt, Artificial Sequence
  Description of Artificial Sequence: Synthetic oligonucleotide
agggagaguggcagacguu

SEQ ID NO: 2281845 - RNA, 19 nt, Artificial Sequence
  Description of Artificial Sequence: Synthetic oligonucleotide
ccacuaacucucgaaggaa

SEQ ID NO: 2281846 - RNA, 19 nt, Artificial Sequence
  Description of Artificial Sequence: Synthetic oligonucleotide
gccugucugucugggcuug

SEQ ID NO: 2281847 - RNA, 19 nt, Artificial Sequence
  Description of Artificial Sequence: Synthetic oligonucleotide
gguugauccgcaggggaau

SEQ ID NO: 2281848 - RNA, 19 nt, Artificial Sequence
  Description of Artificial Sequence: Synthetic oligonucleotide
ggccguucuggacccugca

SEQ ID NO: 2281849 - RNA, 19 nt, Artificial Sequence
  Description of Artificial Sequence: Synthetic oligonucleotide
cagcccuggccuuuugcau

SEQ ID NO: 2281850 - RNA, 19 nt, Artificial Sequence
  Description of Artificial Sequence: Synthetic oligonucleotide
ccaggcucauggggauucg

SEQ ID NO: 2281851 - RNA, 19 nt, Artificial Sequence
  Description of Artificial Sequence: Synthetic oligonucleotide
ggggccguucuggacccug

SEQ ID NO: 2281852 - RNA, 19 nt, Artificial Sequence
  Description of Artificial Sequence: Synthetic oligonucleotide
gggccguucuggacccugc

SEQ ID NO: 2281853 - RNA, 19 nt, Artificial Sequence
  Description of Artificial Sequence: Synthetic oligonucleotide
guacuucaacaugcgccau

SEQ ID NO: 2281854 - RNA, 19 nt, Artificial Sequence
  Description of Artificial Sequence: Synthetic oligonucleotide
gcuccugaaaccgcaccgu

SEQ ID NO: 2281855 - RNA, 19 nt, Artificial Sequence
  Description of Artificial Sequence: Synthetic oligonucleotide
gcccucccuggcaauggug

SEQ ID NO: 2281856 - RNA, 19 nt, Artificial Sequence
  Description of Artificial Sequence: Synthetic oligonucleotide
ccucagguagaaguugcua

SEQ ID NO: 2281857 - RNA, 19 nt, Artificial Sequence
  Description of Artificial Sequence: Synthetic oligonucleotide
gcauccucagguagaaguu

SEQ ID NO: 2281858 - RNA, 19 nt, Artificial Sequence
  Description of Artificial Sequence: Synthetic oligonucleotide
caggugacucucuccuauu

SEQ ID NO: 2281859 - RNA, 19 nt, Artificial Sequence
  Description of Artificial Sequence: Synthetic oligonucleotide
caccgacaggaggggcaug

SEQ ID NO: 2281860 - RNA, 19 nt, Artificial Sequence
  Description of Artificial Sequence: Synthetic oligonucleotide
gcgucgcuuagcucuggua

SEQ ID NO: 2281861 - RNA, 19 nt, Artificial Sequence
  Description of Artificial Sequence: Synthetic oligonucleotide
gcaccgucucaucacccau

SEQ ID NO: 2281862 - RNA, 19 nt, Artificial Sequence
  Description of Artificial Sequence: Synthetic oligonucleotide
ggcgcugccgggaacggau

SEQ ID NO: 2281863 - RNA, 19 nt, Artificial Sequence
  Description of Artificial Sequence: Synthetic oligonucleotide
cgacucugcgucgcuuagc

SEQ ID NO: 2281864 - RNA, 19 nt, Artificial Sequence
  Description of Artificial Sequence: Synthetic oligonucleotide
cucccaucaccaggugacu

SEQ ID NO: 2281865 - RNA, 19 nt, Artificial Sequence
  Description of Artificial Sequence: Synthetic oligonucleotide
gcucugcauguggcucucc

SEQ ID NO: 2281866 - RNA, 19 nt, Artificial Sequence
  Description of Artificial Sequence: Synthetic oligonucleotide
gggauucggaagccagcuu

SEQ ID NO: 2281867 - RNA, 19 nt, Artificial Sequence
  Description of Artificial Sequence: Synthetic oligonucleotide
ggccugucugucugggcuu

SEQ ID NO: 2281868 - RNA, 19 nt, Artificial Sequence
  Description of Artificial Sequence: Synthetic oligonucleotide
augcgccauucuggauuua

SEQ ID NO: 2281869 - RNA, 19 nt, Artificial Sequence
  Description of Artificial Sequence: Synthetic oligonucleotide
caguacagcccuggccuuu

SEQ ID NO: 2281870 - RNA, 19 nt, Artificial Sequence
  Description of Artificial Sequence: Synthetic oligonucleotide
ggcccucccuggcaauggu

SEQ ID NO: 2281871 - RNA, 19 nt, Artificial Sequence
  Description of Artificial Sequence: Synthetic oligonucleotide
cgucaguccuugagcucca

SEQ ID NO: 2281872 - RNA, 19 nt, Artificial Sequence
  Description of Artificial Sequence: Synthetic oligonucleotide
ugcuggccucaggguugau

SEQ ID NO: 2281873 - RNA, 19 nt, Artificial Sequence
  Description of Artificial Sequence: Synthetic oligonucleotide
gggcuggaucuguguagau

SEQ ID NO: 2281874 - RNA, 19 nt, Artificial Sequence
  Description of Artificial Sequence: Synthetic oligonucleotide
cccuggcaauggugaccac

SEQ ID NO: 2281875 - RNA, 19 nt, Artificial Sequence
  Description of Artificial Sequence: Synthetic oligonucleotide
ccgucucaucacccaucga

SEQ ID NO: 2281876 - RNA, 19 nt, Artificial Sequence
  Description of Artificial Sequence: Synthetic oligonucleotide
ccgcaggggaauggaggca

SEQ ID NO: 2281877 - RNA, 19 nt, Artificial Sequence
  Description of Artificial Sequence: Synthetic oligonucleotide
gggcgcugccgggaacgga

SEQ ID NO: 2281878 - RNA, 19 nt, Artificial Sequence
  Description of Artificial Sequence: Synthetic oligonucleotide
ccgaugaguuggucuuuau

SEQ ID NO: 2281879 - RNA, 19 nt, Artificial Sequence
  Description of Artificial Sequence: Synthetic oligonucleotide
ccgacaggaggggcaugga

SEQ ID NO: 2281880 - RNA, 19 nt, Artificial Sequence
  Description of Artificial Sequence: Synthetic oligonucleotide
gcugccgggaacggauauu

SEQ ID NO: 2281881 - RNA, 19 nt, Artificial Sequence
  Description of Artificial Sequence: Synthetic oligonucleotide
ccaucgacucugcgucgcu

SEQ ID NO: 2281882 - RNA, 19 nt, Artificial Sequence
  Description of Artificial Sequence: Synthetic oligonucleotide
gcgcugccgggaacggaua

SEQ ID NO: 2281883 - RNA, 19 nt, Artificial Sequence
  Description of Artificial Sequence: Synthetic oligonucleotide
cgcugccgggaacggauau

SEQ ID NO: 2281884 - RNA, 19 nt, Artificial Sequence
  Description of Artificial Sequence: Synthetic oligonucleotide
cggcgacaucauaggcagu

SEQ ID NO: 2281885 - RNA, 19 nt, Artificial Sequence
  Description of Artificial Sequence: Synthetic oligonucleotide
aaucaaugcagauaaucgc

SEQ ID NO: 2281886 - RNA, 19 nt, Artificial Sequence
  Description of Artificial Sequence: Synthetic oligonucleotide
uggauauguacacagaucc

SEQ ID NO: 2281887 - RNA, 19 nt, Artificial Sequence
  Description of Artificial Sequence: Synthetic oligonucleotide
aaaucgauuaacaagucuc

SEQ ID NO: 2281888 - RNA, 19 nt, Artificial Sequence
  Description of Artificial Sequence: Synthetic oligonucleotide
aaaucaaugcagauaaucg

SEQ ID NO: 2281889 - RNA, 19 nt, Artificial Sequence
  Description of Artificial Sequence: Synthetic oligonucleotide
acuggugucagguacacac

SEQ ID NO: 2281890 - RNA, 19 nt, Artificial Sequence
  Description of Artificial Sequence: Synthetic oligonucleotide
ucgaauuguguaaagauca

SEQ ID NO: 2281891 - RNA, 19 nt, Artificial Sequence
  Description of Artificial Sequence: Synthetic oligonucleotide
cauuaugcucuauauaucg

SEQ ID NO: 2281892 - RNA, 19 nt, Artificial Sequence
  Description of Artificial Sequence: Synthetic oligonucleotide
gucaguacagucaauaucg

SEQ ID NO: 2281893 - RNA, 19 nt, Artificial Sequence
  Description of Artificial Sequence: Synthetic oligonucleotide
ugcauuaugcucuauauau

SEQ ID NO: 2281894 - RNA, 19 nt, Artificial Sequence
  Description of Artificial Sequence: Synthetic oligonucleotide
aggaauugguuccaugucc

SEQ ID NO: 2281895 - RNA, 19 nt, Artificial Sequence
  Description of Artificial Sequence: Synthetic oligonucleotide
ugaucuaugccaccgauga

SEQ ID NO: 2281896 - RNA, 19 nt, Artificial Sequence
  Description of Artificial Sequence: Synthetic oligonucleotide
guaaagaucaguuggauaa

SEQ ID NO: 2281897 - RNA, 19 nt, Artificial Sequence
  Description of Artificial Sequence: Synthetic oligonucleotide
uucugguggaucaacauug

SEQ ID NO: 2281898 - RNA, 19 nt, Artificial Sequence
  Description of Artificial Sequence: Synthetic oligonucleotide
aaaaucgauuaacaagucu

SEQ ID NO: 2281899 - RNA, 19 nt, Artificial Sequence
  Description of Artificial Sequence: Synthetic oligonucleotide
gaaucugacgauuugggac

SEQ ID NO: 2281900 - RNA, 19 nt, Artificial Sequence
  Description of Artificial Sequence: Synthetic oligonucleotide
aguauuaucccaccuaaca

SEQ ID NO: 2281901 - RNA, 19 nt, Artificial Sequence
  Description of Artificial Sequence: Synthetic oligonucleotide
aaucugacgauuugggacu

SEQ ID NO: 2281902 - RNA, 19 nt, Artificial Sequence
  Description of Artificial Sequence: Synthetic oligonucleotide
aucaaugcagauaaucgcc

SEQ ID NO: 2281903 - RNA, 19 nt, Artificial Sequence
  Description of Artificial Sequence: Synthetic oligonucleotide
auaaucgccuguaaaaucg

SEQ ID NO: 2281904 - RNA, 19 nt, Artificial Sequence
  Description of Artificial Sequence: Synthetic oligonucleotide
cuauaucaagguuuaaaag

SEQ ID NO: 2281905 - RNA, 19 nt, Artificial Sequence
  Description of Artificial Sequence: Synthetic oligonucleotide
ugguggaucaacauuguca

SEQ ID NO: 2281906 - RNA, 19 nt, Artificial Sequence
  Description of Artificial Sequence: Synthetic oligonucleotide
aaagcugaucuaugccacc

SEQ ID NO: 2281907 - RNA, 19 nt, Artificial Sequence
  Description of Artificial Sequence: Synthetic oligonucleotide
uuuggauauguacacagau

SEQ ID NO: 2281908 - RNA, 19 nt, Artificial Sequence
  Description of Artificial Sequence: Synthetic oligonucleotide
aauguucuugcauuaugcu

SEQ ID NO: 2281909 - RNA, 19 nt, Artificial Sequence
  Description of Artificial Sequence: Synthetic oligonucleotide
aaaagcugaucuaugccac

SEQ ID NO: 2281910 - RNA, 19 nt, Artificial Sequence
  Description of Artificial Sequence: Synthetic oligonucleotide
ucaauaucggauucaguug

SEQ ID NO: 2281911 - RNA, 19 nt, Artificial Sequence
  Description of Artificial Sequence: Synthetic oligonucleotide
aaucucacuaucuggggca

SEQ ID NO: 2281912 - RNA, 19 nt, Artificial Sequence
  Description of Artificial Sequence: Synthetic oligonucleotide
aagaucaguuggauaagcc

SEQ ID NO: 2281913 - RNA, 19 nt, Artificial Sequence
  Description of Artificial Sequence: Synthetic oligonucleotide
uucgcaacccauaauucag

SEQ ID NO: 2281914 - RNA, 19 nt, Artificial Sequence
  Description of Artificial Sequence: Synthetic oligonucleotide
ucugcugacaccugcauac

SEQ ID NO: 2281915 - RNA, 19 nt, Artificial Sequence
  Description of Artificial Sequence: Synthetic oligonucleotide
caauaucggauucaguugc

SEQ ID NO: 2281916 - RNA, 19 nt, Artificial Sequence
  Description of Artificial Sequence: Synthetic oligonucleotide
uaucggacuucccaaauca

SEQ ID NO: 2281917 - RNA, 19 nt, Artificial Sequence
  Description of Artificial Sequence: Synthetic oligonucleotide
uguguaaagaucaguugga

SEQ ID NO: 2281918 - RNA, 19 nt, Artificial Sequence
  Description of Artificial Sequence: Synthetic oligonucleotide
uuucagguucguuaaaugu

SEQ ID NO: 2281919 - RNA, 19 nt, Artificial Sequence
  Description of Artificial Sequence: Synthetic oligonucleotide
guauuaucccaccuaacag

SEQ ID NO: 2281920 - RNA, 19 nt, Artificial Sequence
  Description of Artificial Sequence: Synthetic oligonucleotide
uugcaauuacacuuucagg

SEQ ID NO: 2281921 - RNA, 19 nt, Artificial Sequence
  Description of Artificial Sequence: Synthetic oligonucleotide
ucaggaauugguuccaugu

SEQ ID NO: 2281922 - RNA, 19 nt, Artificial Sequence
  Description of Artificial Sequence: Synthetic oligonucleotide
uggaucaacauugucagga

SEQ ID NO: 2281923 - RNA, 19 nt, Artificial Sequence
  Description of Artificial Sequence: Synthetic oligonucleotide
uauauaucggacuucccaa

SEQ ID NO: 2281924 - RNA, 19 nt, Artificial Sequence
  Description of Artificial Sequence: Synthetic oligonucleotide
auuguguaaagaucaguug

SEQ ID NO: 2281925 - RNA, 19 nt, Artificial Sequence
  Description of Artificial Sequence: Synthetic oligonucleotide
aauuguguaaagaucaguu

SEQ ID NO: 2281926 - RNA, 19 nt, Artificial Sequence
  Description of Artificial Sequence: Synthetic oligonucleotide
ucaguauuaucccaccuaa

SEQ ID NO: 2281927 - RNA, 19 nt, Artificial Sequence
  Description of Artificial Sequence: Synthetic oligonucleotide
uaaucucacuaucuggggc

SEQ ID NO: 2281928 - RNA, 19 nt, Artificial Sequence
  Description of Artificial Sequence: Synthetic oligonucleotide
caguauuuuggauauguac

SEQ ID NO: 2281929 - RNA, 19 nt, Artificial Sequence
  Description of Artificial Sequence: Synthetic oligonucleotide
acaagucucauucgaauug

SEQ ID NO: 2281930 - RNA, 19 nt, Artificial Sequence
  Description of Artificial Sequence: Synthetic oligonucleotide
auucgaauuguguaaagau

SEQ ID NO: 2281931 - RNA, 19 nt, Artificial Sequence
  Description of Artificial Sequence: Synthetic oligonucleotide
caaggucuaacucaggaug

SEQ ID NO: 2281932 - RNA, 19 nt, Artificial Sequence
  Description of Artificial Sequence: Synthetic oligonucleotide
acaagcuaaucucacuauc

SEQ ID NO: 2281933 - RNA, 19 nt, Artificial Sequence
  Description of Artificial Sequence: Synthetic oligonucleotide
ucuaugccaccgaugaugc

SEQ ID NO: 2281934 - RNA, 19 nt, Artificial Sequence
  Description of Artificial Sequence: Synthetic oligonucleotide
aacauugucaggaauuggu

SEQ ID NO: 2281935 - RNA, 19 nt, Artificial Sequence
  Description of Artificial Sequence: Synthetic oligonucleotide
uacacuuucagguucguua

SEQ ID NO: 2281936 - RNA, 19 nt, Artificial Sequence
  Description of Artificial Sequence: Synthetic oligonucleotide
accgaugaugcguucacac

SEQ ID NO: 2281937 - RNA, 19 nt, Artificial Sequence
  Description of Artificial Sequence: Synthetic oligonucleotide
ucaggaugcacucuccucu

SEQ ID NO: 2281938 - RNA, 19 nt, Artificial Sequence
  Description of Artificial Sequence: Synthetic oligonucleotide
aguuauucucugugguagc

SEQ ID NO: 2281939 - RNA, 19 nt, Artificial Sequence
  Description of Artificial Sequence: Synthetic oligonucleotide
auuucucuagcucaucuga

SEQ ID NO: 2281940 - RNA, 19 nt, Artificial Sequence
  Description of Artificial Sequence: Synthetic oligonucleotide
aaugcagauaaucgccugu

SEQ ID NO: 2281941 - RNA, 19 nt, Artificial Sequence
  Description of Artificial Sequence: Synthetic oligonucleotide
guucguuaaauguucuugc

SEQ ID NO: 2281942 - RNA, 19 nt, Artificial Sequence
  Description of Artificial Sequence: Synthetic oligonucleotide
uguugaaaggggcuuuccc

SEQ ID NO: 2281943 - RNA, 19 nt, Artificial Sequence
  Description of Artificial Sequence: Synthetic oligonucleotide
guaaaaucgauuaacaagu

SEQ ID NO: 2281944 - RNA, 19 nt, Artificial Sequence
  Description of Artificial Sequence: Synthetic oligonucleotide
uggauguaaagguuuuacc

SEQ ID NO: 2281945 - RNA, 19 nt, Artificial Sequence
  Description of Artificial Sequence: Synthetic oligonucleotide
uaugcucuauauaucggac

SEQ ID NO: 2281946 - RNA, 19 nt, Artificial Sequence
  Description of Artificial Sequence: Synthetic oligonucleotide
gguggaucaacauugucag

SEQ ID NO: 2281947 - RNA, 19 nt, Artificial Sequence
  Description of Artificial Sequence: Synthetic oligonucleotide
ugucaguacagucaauauc

SEQ ID NO: 2281948 - RNA, 19 nt, Artificial Sequence
  Description of Artificial Sequence: Synthetic oligonucleotide
ucagguucguuaaauguuc

SEQ ID NO: 2281949 - RNA, 19 nt, Artificial Sequence
  Description of Artificial Sequence: Synthetic oligonucleotide
agaucaguuggauaagcca

SEQ ID NO: 2281950 - RNA, 19 nt, Artificial Sequence
  Description of Artificial Sequence: Synthetic oligonucleotide
uuaacaagucucauucgaa

SEQ ID NO: 2281951 - RNA, 19 nt, Artificial Sequence
  Description of Artificial Sequence: Synthetic oligonucleotide
aggucuugcaauuacacuu

SEQ ID NO: 2281952 - RNA, 19 nt, Artificial Sequence
  Description of Artificial Sequence: Synthetic oligonucleotide
gauaaucgccuguaaaauc

SEQ ID NO: 2281953 - RNA, 19 nt, Artificial Sequence
  Description of Artificial Sequence: Synthetic oligonucleotide
ucucuagcucaucugaagu

SEQ ID NO: 2281954 - RNA, 19 nt, Artificial Sequence
  Description of Artificial Sequence: Synthetic oligonucleotide
gaucaguuggauaagccac

SEQ ID NO: 2281955 - RNA, 19 nt, Artificial Sequence
  Description of Artificial Sequence: Synthetic oligonucleotide
acggacucagaagacaagc

SEQ ID NO: 2281956 - RNA, 19 nt, Artificial Sequence
  Description of Artificial Sequence: Synthetic oligonucleotide
ucaguacagucaauaucgg

SEQ ID NO: 2281957 - RNA, 19 nt, Artificial Sequence
  Description of Artificial Sequence: Synthetic oligonucleotide
ucaaugcagauaaucgccu

SEQ ID NO: 2281958 - RNA, 19 nt, Artificial Sequence
  Description of Artificial Sequence: Synthetic oligonucleotide
ucaacauugucaggaauug

SEQ ID NO: 2281959 - RNA, 19 nt, Artificial Sequence
  Description of Artificial Sequence: Synthetic oligonucleotide
aacaagucucauucgaauu

SEQ ID NO: 2281960 - RNA, 19 nt, Artificial Sequence
  Description of Artificial Sequence: Synthetic oligonucleotide
ucucauucgaauuguguaa

SEQ ID NO: 2281961 - RNA, 19 nt, Artificial Sequence
  Description of Artificial Sequence: Synthetic oligonucleotide
cauccugugguuuguagag

SEQ ID NO: 2281962 - RNA, 19 nt, Artificial Sequence
  Description of Artificial Sequence: Synthetic oligonucleotide
uaucaagguuuaaaagcug

SEQ ID NO: 2281963 - RNA, 19 nt, Artificial Sequence
  Description of Artificial Sequence: Synthetic oligonucleotide
aagacaagcuaaucucacu

SEQ ID NO: 2281964 - RNA, 19 nt, Artificial Sequence
  Description of Artificial Sequence: Synthetic oligonucleotide
gaaaugacugucgggauac

SEQ ID NO: 2281965 - RNA, 19 nt, Artificial Sequence
  Description of Artificial Sequence: Synthetic oligonucleotide
cuauauaucggacuuccca

SEQ ID NO: 2281966 - RNA, 19 nt, Artificial Sequence
  Description of Artificial Sequence: Synthetic oligonucleotide
auaucggacuucccaaauc

SEQ ID NO: 2281967 - RNA, 19 nt, Artificial Sequence
  Description of Artificial Sequence: Synthetic oligonucleotide
aguacagucaauaucggau

SEQ ID NO: 2281968 - RNA, 19 nt, Artificial Sequence
  Description of Artificial Sequence: Synthetic oligonucleotide
aaucgauuaacaagucuca

SEQ ID NO: 2281969 - RNA, 19 nt, Artificial Sequence
  Description of Artificial Sequence: Synthetic oligonucleotide
uuggauauguacacagauc

SEQ ID NO: 2281970 - RNA, 19 nt, Artificial Sequence
  Description of Artificial Sequence: Synthetic oligonucleotide
uucagguucguuaaauguu

SEQ ID NO: 2281971 - RNA, 19 nt, Artificial Sequence
  Description of Artificial Sequence: Synthetic oligonucleotide
ugcugcuauaucaagguuu

SEQ ID NO: 2281972 - RNA, 19 nt, Artificial Sequence
  Description of Artificial Sequence: Synthetic oligonucleotide
ucgccuguaaaaucgauua

SEQ ID NO: 2281973 - RNA, 19 nt, Artificial Sequence
  Description of Artificial Sequence: Synthetic oligonucleotide
gauucaguugcugauccug

SEQ ID NO: 2281974 - RNA, 19 nt, Artificial Sequence
  Description of Artificial Sequence: Synthetic oligonucleotide
ugcucuauauaucggacuu

SEQ ID NO: 2281975 - RNA, 19 nt, Artificial Sequence
  Description of Artificial Sequence: Synthetic oligonucleotide
ugaaucugacgauuuggga

SEQ ID NO: 2281976 - RNA, 19 nt, Artificial Sequence
  Description of Artificial Sequence: Synthetic oligonucleotide
guuuuaccuuuucuuaacc

SEQ ID NO: 2281977 - RNA, 19 nt, Artificial Sequence
  Description of Artificial Sequence: Synthetic oligonucleotide
ucuaacucaggaugcacuc

SEQ ID NO: 2281978 - RNA, 19 nt, Artificial Sequence
  Description of Artificial Sequence: Synthetic oligonucleotide
uaaaaucgauuaacaaguc

SEQ ID NO: 2281979 - RNA, 19 nt, Artificial Sequence
  Description of Artificial Sequence: Synthetic oligonucleotide
aucuaugccaccgaugaug

SEQ ID NO: 2281980 - RNA, 19 nt, Artificial Sequence
  Description of Artificial Sequence: Synthetic oligonucleotide
uucccauacguccucaguc

SEQ ID NO: 2281981 - RNA, 19 nt, Artificial Sequence
  Description of Artificial Sequence: Synthetic oligonucleotide
gacagagauacuugcuccc

SEQ ID NO: 2281982 - RNA, 19 nt, Artificial Sequence
  Description of Artificial Sequence: Synthetic oligonucleotide
uguaaagaucaguuggaua

SEQ ID NO: 2281983 - RNA, 19 nt, Artificial Sequence
  Description of Artificial Sequence: Synthetic oligonucleotide
ucuagcucaucugaaguga

SEQ ID NO: 2281984 - RNA, 19 nt, Artificial Sequence
  Description of Artificial Sequence: Synthetic oligonucleotide
ugguuuguagagcaauuuc

SEQ ID NO: 2281985 - RNA, 19 nt, Artificial Sequence
  Description of Artificial Sequence: Synthetic oligonucleotide
uaucggauucaguugcuga

SEQ ID NO: 2281986 - RNA, 19 nt, Artificial Sequence
  Description of Artificial Sequence: Synthetic oligonucleotide
ucgcaacccauaauucagg

SEQ ID NO: 2281987 - RNA, 19 nt, Artificial Sequence
  Description of Artificial Sequence: Synthetic oligonucleotide
acgauuugggacugguguc

SEQ ID NO: 2281988 - RNA, 19 nt, Artificial Sequence
  Description of Artificial Sequence: Synthetic oligonucleotide
ugcuauaucaagguuuaaa

SEQ ID NO: 2281989 - RNA, 19 nt, Artificial Sequence
  Description of Artificial Sequence: Synthetic oligonucleotide
ucuugcauuaugcucuaua

SEQ ID NO: 2281990 - RNA, 19 nt, Artificial Sequence
  Description of Artificial Sequence: Synthetic oligonucleotide
uagagcaauuucucuagcu

SEQ ID NO: 2281991 - RNA, 19 nt, Artificial Sequence
  Description of Artificial Sequence: Synthetic oligonucleotide
aaaggggcuuucccauacg

SEQ ID NO: 2281992 - RNA, 19 nt, Artificial Sequence
  Description of Artificial Sequence: Synthetic oligonucleotide
ucauucgaauuguguaaag

SEQ ID NO: 2281993 - RNA, 19 nt, Artificial Sequence
  Description of Artificial Sequence: Synthetic oligonucleotide
aucaguuggauaagccacc

SEQ ID NO: 2281994 - RNA, 19 nt, Artificial Sequence
  Description of Artificial Sequence: Synthetic oligonucleotide
agacaagcuaaucucacua

SEQ ID NO: 2281995 - RNA, 19 nt, Artificial Sequence
  Description of Artificial Sequence: Synthetic oligonucleotide
guugaaaggggcuuuccca

SEQ ID NO: 2281996 - RNA, 19 nt, Artificial Sequence
  Description of Artificial Sequence: Synthetic oligonucleotide
uaaagaucaguuggauaag

SEQ ID NO: 2281997 - RNA, 19 nt, Artificial Sequence
  Description of Artificial Sequence: Synthetic oligonucleotide
aaugacugucgggauacug

SEQ ID NO: 2281998 - RNA, 19 nt, Artificial Sequence
  Description of Artificial Sequence: Synthetic oligonucleotide
caauuacacuuucagguuc

SEQ ID NO: 2281999 - RNA, 19 nt, Artificial Sequence
  Description of Artificial Sequence: Synthetic oligonucleotide
ugacugucgggauacugug

SEQ ID NO: 2282000 - RNA, 19 nt, Artificial Sequence
  Description of Artificial Sequence: Synthetic oligonucleotide
agcauaacacuggaaauga

SEQ ID NO: 2282001 - RNA, 19 nt, Artificial Sequence
  Description of Artificial Sequence: Synthetic oligonucleotide
caacccauaauucaggucu

SEQ ID NO: 2282002 - RNA, 19 nt, Artificial Sequence
  Description of Artificial Sequence: Synthetic oligonucleotide
gucaauaucggauucaguu

SEQ ID NO: 2282003 - RNA, 19 nt, Artificial Sequence
  Description of Artificial Sequence: Synthetic oligonucleotide
gauaagccaccacagugca

SEQ ID NO: 2282004 - RNA, 19 nt, Artificial Sequence
  Description of Artificial Sequence: Synthetic oligonucleotide
acugugagucacuugugcu

SEQ ID NO: 2282005 - RNA, 19 nt, Artificial Sequence
  Description of Artificial Sequence: Synthetic oligonucleotide
gacgauuugggacuggugu

SEQ ID NO: 2282006 - RNA, 19 nt, Artificial Sequence
  Description of Artificial Sequence: Synthetic oligonucleotide
gguuccaugucccaugggc

SEQ ID NO: 2282007 - RNA, 19 nt, Artificial Sequence
  Description of Artificial Sequence: Synthetic oligonucleotide
ucaagguuuaaaagcugau

SEQ ID NO: 2282008 - RNA, 19 nt, Artificial Sequence
  Description of Artificial Sequence: Synthetic oligonucleotide
cugauccugaaucugacga

SEQ ID NO: 2282009 - RNA, 19 nt, Artificial Sequence
  Description of Artificial Sequence: Synthetic oligonucleotide
auguaaagguuuuaccuuu

SEQ ID NO: 2282010 - RNA, 19 nt, Artificial Sequence
  Description of Artificial Sequence: Synthetic oligonucleotide
ccaccuaacagcauaacac

SEQ ID NO: 2282011 - RNA, 19 nt, Artificial Sequence
  Description of Artificial Sequence: Synthetic oligonucleotide
uauaucggacuucccaaau

SEQ ID NO: 2282012 - RNA, 19 nt, Artificial Sequence
  Description of Artificial Sequence: Synthetic oligonucleotide
ugucgggauacugugguug

SEQ ID NO: 2282013 - RNA, 19 nt, Artificial Sequence
  Description of Artificial Sequence: Synthetic oligonucleotide
acuucuggccccauucgcc

SEQ ID NO: 2282014 - RNA, 19 nt, Artificial Sequence
  Description of Artificial Sequence: Synthetic oligonucleotide
aacucaggaugcacucucc

SEQ ID NO: 2282015 - RNA, 19 nt, Artificial Sequence
  Description of Artificial Sequence: Synthetic oligonucleotide
ccuaacagcauaacacugg

SEQ ID NO: 2282016 - RNA, 19 nt, Artificial Sequence
  Description of Artificial Sequence: Synthetic oligonucleotide
cagauaaucgccuguaaaa

SEQ ID NO: 2282017 - RNA, 19 nt, Artificial Sequence
  Description of Artificial Sequence: Synthetic oligonucleotide
gaaaggggcuuucccauac

SEQ ID NO: 2282018 - RNA, 19 nt, Artificial Sequence
  Description of Artificial Sequence: Synthetic oligonucleotide
acacugaacucuccgguug

SEQ ID NO: 2282019 - RNA, 19 nt, Artificial Sequence
  Description of Artificial Sequence: Synthetic oligonucleotide
cucacuaucuggggcaugg

SEQ ID NO: 2282020 - RNA, 19 nt, Artificial Sequence
  Description of Artificial Sequence: Synthetic oligonucleotide
ugucccaugggcuaagcuu

SEQ ID NO: 2282021 - RNA, 19 nt, Artificial Sequence
  Description of Artificial Sequence: Synthetic oligonucleotide
cuugugggaucuuuccgag

SEQ ID NO: 2282022 - RNA, 19 nt, Artificial Sequence
  Description of Artificial Sequence: Synthetic oligonucleotide
accuucgcaacccauaauu

SEQ ID NO: 2282023 - RNA, 19 nt, Artificial Sequence
  Description of Artificial Sequence: Synthetic oligonucleotide
aaggggcuuucccauacgu

SEQ ID NO: 2282024 - RNA, 19 nt, Artificial Sequence
  Description of Artificial Sequence: Synthetic oligonucleotide
ucuccgguuguccagggau

SEQ ID NO: 2282025 - RNA, 19 nt, Artificial Sequence
  Description of Artificial Sequence: Synthetic oligonucleotide
ucgacuucuggccccauuc

SEQ ID NO: 2282026 - RNA, 19 nt, Artificial Sequence
  Description of Artificial Sequence: Synthetic oligonucleotide
cacuggaaaugacugucgg

SEQ ID NO: 2282027 - RNA, 19 nt, Artificial Sequence
  Description of Artificial Sequence: Synthetic oligonucleotide
gcuauaucaagguuuaaaa

SEQ ID NO: 2282028 - RNA, 19 nt, Artificial Sequence
  Description of Artificial Sequence: Synthetic oligonucleotide
uuugggccaacacggacuc

SEQ ID NO: 2282029 - RNA, 19 nt, Artificial Sequence
  Description of Artificial Sequence: Synthetic oligonucleotide
uguccacaaggucuaacuc

SEQ ID NO: 2282030 - RNA, 19 nt, Artificial Sequence
  Description of Artificial Sequence: Synthetic oligonucleotide
aacacggacucagaagaca

SEQ ID NO: 2282031 - RNA, 19 nt, Artificial Sequence
  Description of Artificial Sequence: Synthetic oligonucleotide
uuggauaagccaccacagu

SEQ ID NO: 2282032 - RNA, 19 nt, Artificial Sequence
  Description of Artificial Sequence: Synthetic oligonucleotide
acacuccucaucucucgac

SEQ ID NO: 2282033 - RNA, 19 nt, Artificial Sequence
  Description of Artificial Sequence: Synthetic oligonucleotide
uaacacuggaaaugacugu

SEQ ID NO: 2282034 - RNA, 19 nt, Artificial Sequence
  Description of Artificial Sequence: Synthetic oligonucleotide
acacacugaacucuccggu

SEQ ID NO: 2282035 - RNA, 19 nt, Artificial Sequence
  Description of Artificial Sequence: Synthetic oligonucleotide
uuucucuagcucaucugaa

SEQ ID NO: 2282036 - RNA, 19 nt, Artificial Sequence
  Description of Artificial Sequence: Synthetic oligonucleotide
aacucuccgguuguccagg

SEQ ID NO: 2282037 - RNA, 19 nt, Artificial Sequence
  Description of Artificial Sequence: Synthetic oligonucleotide
uaaucgccuguaaaaucga

SEQ ID NO: 2282038 - RNA, 19 nt, Artificial Sequence
  Description of Artificial Sequence: Synthetic oligonucleotide
acuugcucccaauucuucu

SEQ ID NO: 2282039 - RNA, 19 nt, Artificial Sequence
  Description of Artificial Sequence: Synthetic oligonucleotide
acuucccaaaucaaugcag

SEQ ID NO: 2282040 - RNA, 19 nt, Artificial Sequence
  Description of Artificial Sequence: Synthetic oligonucleotide
agauaaucgccuguaaaau

SEQ ID NO: 2282041 - RNA, 19 nt, Artificial Sequence
  Description of Artificial Sequence: Synthetic oligonucleotide
uugcauuaugcucuauaua

SEQ ID NO: 2282042 - RNA, 19 nt, Artificial Sequence
  Description of Artificial Sequence: Synthetic oligonucleotide
gauguaaagguuuuaccuu

SEQ ID NO: 2282043 - RNA, 19 nt, Artificial Sequence
  Description of Artificial Sequence: Synthetic oligonucleotide
ggauguaaagguuuuaccu

SEQ ID NO: 2282044 - RNA, 19 nt, Artificial Sequence
  Description of Artificial Sequence: Synthetic oligonucleotide
ucggacuucccaaaucaau

SEQ ID NO: 2282045 - RNA, 19 nt, Artificial Sequence
  Description of Artificial Sequence: Synthetic oligonucleotide
gguucguuaaauguucuug

SEQ ID NO: 2282046 - RNA, 19 nt, Artificial Sequence
  Description of Artificial Sequence: Synthetic oligonucleotide
augcucuauauaucggacu

SEQ ID NO: 2282047 - RNA, 19 nt, Artificial Sequence
  Description of Artificial Sequence: Synthetic oligonucleotide
ugggccaacacggacucag

SEQ ID NO: 2282048 - RNA, 19 nt, Artificial Sequence
  Description of Artificial Sequence: Synthetic oligonucleotide
cauaacacuggaaaugacu

SEQ ID NO: 2282049 - RNA, 19 nt, Artificial Sequence
  Description of Artificial Sequence: Synthetic oligonucleotide
uuucccauacguccucagu

SEQ ID NO: 2282050 - RNA, 19 nt, Artificial Sequence
  Description of Artificial Sequence: Synthetic oligonucleotide
ucccauacguccucagucu

SEQ ID NO: 2282051 - RNA, 19 nt, Artificial Sequence
  Description of Artificial Sequence: Synthetic oligonucleotide
uugucaguacagucaauau

SEQ ID NO: 2282052 - RNA, 19 nt, Artificial Sequence
  Description of Artificial Sequence: Synthetic oligonucleotide
ugugguuuguagagcaauu

SEQ ID NO: 2282053 - RNA, 19 nt, Artificial Sequence
  Description of Artificial Sequence: Synthetic oligonucleotide
cuguaaaaucgauuaacaa

SEQ ID NO: 2282054 - RNA, 19 nt, Artificial Sequence
  Description of Artificial Sequence: Synthetic oligonucleotide
cuucgcaacccauaauuca

SEQ ID NO: 2282055 - RNA, 19 nt, Artificial Sequence
  Description of Artificial Sequence: Synthetic oligonucleotide
gucucauucgaauugugua

SEQ ID NO: 2282056 - RNA, 19 nt, Artificial Sequence
  Description of Artificial Sequence: Synthetic oligonucleotide
ugucagguacacacacuga

SEQ ID NO: 2282057 - RNA, 19 nt, Artificial Sequence
  Description of Artificial Sequence: Synthetic oligonucleotide
cuaacagcauaacacugga

SEQ ID NO: 2282058 - RNA, 19 nt, Artificial Sequence
  Description of Artificial Sequence: Synthetic oligonucleotide
cuucccaaaucaaugcaga

SEQ ID NO: 2282059 - RNA, 19 nt, Artificial Sequence
  Description of Artificial Sequence: Synthetic oligonucleotide
gacuucuggccccauucgc

SEQ ID NO: 2282060 - RNA, 19 nt, Artificial Sequence
  Description of Artificial Sequence: Synthetic oligonucleotide
auauaucggacuucccaaa

SEQ ID NO: 2282061 - RNA, 19 nt, Artificial Sequence
  Description of Artificial Sequence: Synthetic oligonucleotide
ggacuucccaaaucaaugc

SEQ ID NO: 2282062 - RNA, 19 nt, Artificial Sequence
  Description of Artificial Sequence: Synthetic oligonucleotide
cauuccaccuucgcaaccc

SEQ ID NO: 2282063 - RNA, 19 nt, Artificial Sequence
  Description of Artificial Sequence: Synthetic oligonucleotide
ggagcuucgggcuucagga

SEQ ID NO: 2282064 - RNA, 19 nt, Artificial Sequence
  Description of Artificial Sequence: Synthetic oligonucleotide
aucggauucaguugcugau

SEQ ID NO: 2282065 - RNA, 19 nt, Artificial Sequence
  Description of Artificial Sequence: Synthetic oligonucleotide
ugacgauuugggacuggug

SEQ ID NO: 2282066 - RNA, 19 nt, Artificial Sequence
  Description of Artificial Sequence: Synthetic oligonucleotide
agguuuaaaagcugaucua

SEQ ID NO: 2282067 - RNA, 19 nt, Artificial Sequence
  Description of Artificial Sequence: Synthetic oligonucleotide
cuagcucaucugaagugac

SEQ ID NO: 2282068 - RNA, 19 nt, Artificial Sequence
  Description of Artificial Sequence: Synthetic oligonucleotide
gucagguacacacacugaa

SEQ ID NO: 2282069 - RNA, 19 nt, Artificial Sequence
  Description of Artificial Sequence: Synthetic oligonucleotide
caaugcagauaaucgccug

SEQ ID NO: 2282070 - RNA, 19 nt, Artificial Sequence
  Description of Artificial Sequence: Synthetic oligonucleotide
cagucaauaucggauucag

SEQ ID NO: 2282071 - RNA, 19 nt, Artificial Sequence
  Description of Artificial Sequence: Synthetic oligonucleotide
cugaucuaugccaccgaug

SEQ ID NO: 2282072 - RNA, 19 nt, Artificial Sequence
  Description of Artificial Sequence: Synthetic oligonucleotide
augggcuaagcuuuucaau

SEQ ID NO: 2282073 - RNA, 19 nt, Artificial Sequence
  Description of Artificial Sequence: Synthetic oligonucleotide
ggauaagccaccacagugc

SEQ ID NO: 2282074 - RNA, 19 nt, Artificial Sequence
  Description of Artificial Sequence: Synthetic oligonucleotide
agagauacuugcucccaau

SEQ ID NO: 2282075 - RNA, 19 nt, Artificial Sequence
  Description of Artificial Sequence: Synthetic oligonucleotide
ucaguuggauaagccacca

SEQ ID NO: 2282076 - RNA, 19 nt, Artificial Sequence
  Description of Artificial Sequence: Synthetic oligonucleotide
ugagucacuugugcugucc

SEQ ID NO: 2282077 - RNA, 19 nt, Artificial Sequence
  Description of Artificial Sequence: Synthetic oligonucleotide
aauaucggauucaguugcu

SEQ ID NO: 2282078 - RNA, 19 nt, Artificial Sequence
  Description of Artificial Sequence: Synthetic oligonucleotide
ugcagauaaucgccuguaa

SEQ ID NO: 2282079 - RNA, 19 nt, Artificial Sequence
  Description of Artificial Sequence: Synthetic oligonucleotide
caacauugucaggaauugg

SEQ ID NO: 2282080 - RNA, 19 nt, Artificial Sequence
  Description of Artificial Sequence: Synthetic oligonucleotide
uucaggaggucuugcaauu

SEQ ID NO: 2282081 - RNA, 19 nt, Artificial Sequence
  Description of Artificial Sequence: Synthetic oligonucleotide
cccaaaucaaugcagauaa

SEQ ID NO: 2282082 - RNA, 19 nt, Artificial Sequence
  Description of Artificial Sequence: Synthetic oligonucleotide
guugucaguacagucaaua

SEQ ID NO: 2282083 - RNA, 19 nt, Artificial Sequence
  Description of Artificial Sequence: Synthetic oligonucleotide
ggaauugguuccauguccc

SEQ ID NO: 2282084 - RNA, 19 nt, Artificial Sequence
  Description of Artificial Sequence: Synthetic oligonucleotide
gauuugggacuggugucag

SEQ ID NO: 2282085 - RNA, 19 nt, Artificial Sequence
  Description of Artificial Sequence: Synthetic oligonucleotide
accuaacagcauaacacug

SEQ ID NO: 2282086 - RNA, 19 nt, Artificial Sequence
  Description of Artificial Sequence: Synthetic oligonucleotide
cauucgaauuguguaaaga

SEQ ID NO: 2282087 - RNA, 19 nt, Artificial Sequence
  Description of Artificial Sequence: Synthetic oligonucleotide
ugacaccugcauacuguga

SEQ ID NO: 2282088 - RNA, 19 nt, Artificial Sequence
  Description of Artificial Sequence: Synthetic oligonucleotide
caggaauugguuccauguc

SEQ ID NO: 2282089 - RNA, 19 nt, Artificial Sequence
  Description of Artificial Sequence: Synthetic oligonucleotide
caguauuaucccaccuaac

SEQ ID NO: 2282090 - RNA, 19 nt, Artificial Sequence
  Description of Artificial Sequence: Synthetic oligonucleotide
agucucauucgaauugugu

SEQ ID NO: 2282091 - RNA, 19 nt, Artificial Sequence
  Description of Artificial Sequence: Synthetic oligonucleotide
acagucaauaucggauuca

SEQ ID NO: 2282092 - RNA, 19 nt, Artificial Sequence
  Description of Artificial Sequence: Synthetic oligonucleotide
ccuguaaaaucgauuaaca

SEQ ID NO: 2282093 - RNA, 19 nt, Artificial Sequence
  Description of Artificial Sequence: Synthetic oligonucleotide
acucaggaugcacucuccu

SEQ ID NO: 2282094 - RNA, 19 nt, Artificial Sequence
  Description of Artificial Sequence: Synthetic oligonucleotide
caaaguuauucucuguggu

SEQ ID NO: 2282095 - RNA, 19 nt, Artificial Sequence
  Description of Artificial Sequence: Synthetic oligonucleotide
gucaggaauugguuccaug

SEQ ID NO: 2282096 - RNA, 19 nt, Artificial Sequence
  Description of Artificial Sequence: Synthetic oligonucleotide
cuugcauuaugcucuauau

SEQ ID NO: 2282097 - RNA, 19 nt, Artificial Sequence
  Description of Artificial Sequence: Synthetic oligonucleotide
gacugucgggauacugugg

SEQ ID NO: 2282098 - RNA, 19 nt, Artificial Sequence
  Description of Artificial Sequence: Synthetic oligonucleotide
caggaggucuugcaauuac

SEQ ID NO: 2282099 - RNA, 19 nt, Artificial Sequence
  Description of Artificial Sequence: Synthetic oligonucleotide
guggaucaacauugucagg

SEQ ID NO: 2282100 - RNA, 19 nt, Artificial Sequence
  Description of Artificial Sequence: Synthetic oligonucleotide
ucaccccagccucugcuga

SEQ ID NO: 2282101 - RNA, 19 nt, Artificial Sequence
  Description of Artificial Sequence: Synthetic oligonucleotide
ggcuugugggaucuuuccg

SEQ ID NO: 2282102 - RNA, 19 nt, Artificial Sequence
  Description of Artificial Sequence: Synthetic oligonucleotide
uuccaugucccaugggcua

SEQ ID NO: 2282103 - RNA, 19 nt, Artificial Sequence
  Description of Artificial Sequence: Synthetic oligonucleotide
gaauugguuccauguccca

SEQ ID NO: 2282104 - RNA, 19 nt, Artificial Sequence
  Description of Artificial Sequence: Synthetic oligonucleotide
aagucucauucgaauugug

SEQ ID NO: 2282105 - RNA, 19 nt, Artificial Sequence
  Description of Artificial Sequence: Synthetic oligonucleotide
cagugcaguauuuuggaua

SEQ ID NO: 2282106 - RNA, 19 nt, Artificial Sequence
  Description of Artificial Sequence: Synthetic oligonucleotide
gccaacacggacucagaag

SEQ ID NO: 2282107 - RNA, 19 nt, Artificial Sequence
  Description of Artificial Sequence: Synthetic oligonucleotide
ugggccugcaaaagcugcu

SEQ ID NO: 2282108 - RNA, 19 nt, Artificial Sequence
  Description of Artificial Sequence: Synthetic oligonucleotide
cacagauccacugggccug

SEQ ID NO: 2282109 - RNA, 19 nt, Artificial Sequence
  Description of Artificial Sequence: Synthetic oligonucleotide
cugaacucuccgguugucc

SEQ ID NO: 2282110 - RNA, 19 nt, Artificial Sequence
  Description of Artificial Sequence: Synthetic oligonucleotide
gauguccacaaggucuaac

SEQ ID NO: 2282111 - RNA, 19 nt, Artificial Sequence
  Description of Artificial Sequence: Synthetic oligonucleotide
gcugauccugaaucugacg

SEQ ID NO: 2282112 - RNA, 19 nt, Artificial Sequence
  Description of Artificial Sequence: Synthetic oligonucleotide
gaauuguguaaagaucagu

SEQ ID NO: 2282113 - RNA, 19 nt, Artificial Sequence
  Description of Artificial Sequence: Synthetic oligonucleotide
gccuguaaaaucgauuaac

SEQ ID NO: 2282114 - RNA, 19 nt, Artificial Sequence
  Description of Artificial Sequence: Synthetic oligonucleotide
caacacggacucagaagac

SEQ ID NO: 2282115 - RNA, 19 nt, Artificial Sequence
  Description of Artificial Sequence: Synthetic oligonucleotide
cagguacacacacugaacu

SEQ ID NO: 2282116 - RNA, 19 nt, Artificial Sequence
  Description of Artificial Sequence: Synthetic oligonucleotide
acaccugcauacugugagu

SEQ ID NO: 2282117 - RNA, 19 nt, Artificial Sequence
  Description of Artificial Sequence: Synthetic oligonucleotide
acagagauacuugcuccca

SEQ ID NO: 2282118 - RNA, 19 nt, Artificial Sequence
  Description of Artificial Sequence: Synthetic oligonucleotide
caucugaagugacagagau

SEQ ID NO: 2282119 - RNA, 19 nt, Artificial Sequence
  Description of Artificial Sequence: Synthetic oligonucleotide
caguacagucaauaucgga

SEQ ID NO: 2282120 - RNA, 19 nt, Artificial Sequence
  Description of Artificial Sequence: Synthetic oligonucleotide
cacggacucagaagacaag

SEQ ID NO: 2282121 - RNA, 19 nt, Artificial Sequence
  Description of Artificial Sequence: Synthetic oligonucleotide
ucggauucaguugcugauc

SEQ ID NO: 2282122 - RNA, 19 nt, Artificial Sequence
  Description of Artificial Sequence: Synthetic oligonucleotide
ugaaaggggcuuucccaua

SEQ ID NO: 2282123 - RNA, 19 nt, Artificial Sequence
  Description of Artificial Sequence: Synthetic oligonucleotide
ucugacgauuugggacugg

SEQ ID NO: 2282124 - RNA, 19 nt, Artificial Sequence
  Description of Artificial Sequence: Synthetic oligonucleotide
ggaggucuugcaauuacac

SEQ ID NO: 2282125 - RNA, 19 nt, Artificial Sequence
  Description of Artificial Sequence: Synthetic oligonucleotide
caugggcuaagcuuuucaa

SEQ ID NO: 2282126 - RNA, 19 nt, Artificial Sequence
  Description of Artificial Sequence: Synthetic oligonucleotide
aucgauuaacaagucucau

SEQ ID NO: 2282127 - RNA, 19 nt, Artificial Sequence
  Description of Artificial Sequence: Synthetic oligonucleotide
caccuaacagcauaacacu

SEQ ID NO: 2282128 - RNA, 19 nt, Artificial Sequence
  Description of Artificial Sequence: Synthetic oligonucleotide
gacaagcuaaucucacuau

SEQ ID NO: 2282129 - RNA, 19 nt, Artificial Sequence
  Description of Artificial Sequence: Synthetic oligonucleotide
augucccaugggcuaagcu

SEQ ID NO: 2282130 - RNA, 19 nt, Artificial Sequence
  Description of Artificial Sequence: Synthetic oligonucleotide
aaucgccuguaaaaucgau

SEQ ID NO: 2282131 - RNA, 19 nt, Artificial Sequence
  Description of Artificial Sequence: Synthetic oligonucleotide
cuaugccaccgaugaugcg

SEQ ID NO: 2282132 - RNA, 19 nt, Artificial Sequence
  Description of Artificial Sequence: Synthetic oligonucleotide
acugaacucuccgguuguc

SEQ ID NO: 2282133 - RNA, 19 nt, Artificial Sequence
  Description of Artificial Sequence: Synthetic oligonucleotide
agcugaucuaugccaccga

SEQ ID NO: 2282134 - RNA, 19 nt, Artificial Sequence
  Description of Artificial Sequence: Synthetic oligonucleotide
cuguugaaaggggcuuucc

SEQ ID NO: 2282135 - RNA, 19 nt, Artificial Sequence
  Description of Artificial Sequence: Synthetic oligonucleotide
ugcauacugugagucacuu

SEQ ID NO: 2282136 - RNA, 19 nt, Artificial Sequence
  Description of Artificial Sequence: Synthetic oligonucleotide
gcagauaaucgccuguaaa

SEQ ID NO: 2282137 - RNA, 19 nt, Artificial Sequence
  Description of Artificial Sequence: Synthetic oligonucleotide
cuucuggccccauucgcca

SEQ ID NO: 2282138 - RNA, 19 nt, Artificial Sequence
  Description of Artificial Sequence: Synthetic oligonucleotide
uccgguuguccagggaugu

SEQ ID NO: 2282139 - RNA, 19 nt, Artificial Sequence
  Description of Artificial Sequence: Synthetic oligonucleotide
caccugcauacugugaguc

SEQ ID NO: 2282140 - RNA, 19 nt, Artificial Sequence
  Description of Artificial Sequence: Synthetic oligonucleotide
acacggacucagaagacaa

SEQ ID NO: 2282141 - RNA, 19 nt, Artificial Sequence
  Description of Artificial Sequence: Synthetic oligonucleotide
agguucguuaaauguucuu

SEQ ID NO: 2282142 - RNA, 19 nt, Artificial Sequence
  Description of Artificial Sequence: Synthetic oligonucleotide
cagggauguccacaagguc

SEQ ID NO: 2282143 - RNA, 19 nt, Artificial Sequence
  Description of Artificial Sequence: Synthetic oligonucleotide
cucauucgaauuguguaaa

SEQ ID NO: 2282144 - RNA, 19 nt, Artificial Sequence
  Description of Artificial Sequence: Synthetic oligonucleotide
cucagucuucugccauucc

SEQ ID NO: 2282145 - RNA, 19 nt, Artificial Sequence
  Description of Artificial Sequence: Synthetic oligonucleotide
guacagucaauaucggauu

SEQ ID NO: 2282146 - RNA, 19 nt, Artificial Sequence
  Description of Artificial Sequence: Synthetic oligonucleotide
aucuuuccgagaagggcca

SEQ ID NO: 2282147 - RNA, 19 nt, Artificial Sequence
  Description of Artificial Sequence: Synthetic oligonucleotide
gggaucuuuccgagaaggg

SEQ ID NO: 2282148 - RNA, 19 nt, Artificial Sequence
  Description of Artificial Sequence: Synthetic oligonucleotide
aaaugacugucgggauacu

SEQ ID NO: 2282149 - RNA, 19 nt, Artificial Sequence
  Description of Artificial Sequence: Synthetic oligonucleotide
ucuuuccgagaagggccag

SEQ ID NO: 2282150 - RNA, 19 nt, Artificial Sequence
  Description of Artificial Sequence: Synthetic oligonucleotide
cugccauuccaccuucgca

SEQ ID NO: 2282151 - RNA, 19 nt, Artificial Sequence
  Description of Artificial Sequence: Synthetic oligonucleotide
uccaugucccaugggcuaa

SEQ ID NO: 2282152 - RNA, 19 nt, Artificial Sequence
  Description of Artificial Sequence: Synthetic oligonucleotide
aggucuaacucaggaugca

SEQ ID NO: 2282153 - RNA, 19 nt, Artificial Sequence
  Description of Artificial Sequence: Synthetic oligonucleotide
agucaauaucggauucagu

SEQ ID NO: 2282154 - RNA, 19 nt, Artificial Sequence
  Description of Artificial Sequence: Synthetic oligonucleotide
ucaggaggucuugcaauua

SEQ ID NO: 2282155 - RNA, 19 nt, Artificial Sequence
  Description of Artificial Sequence: Synthetic oligonucleotide
ucacuugugcuguccuguu

SEQ ID NO: 2282156 - RNA, 19 nt, Artificial Sequence
  Description of Artificial Sequence: Synthetic oligonucleotide
ccagcagaggagcuucggg

SEQ ID NO: 2282157 - RNA, 19 nt, Artificial Sequence
  Description of Artificial Sequence: Synthetic oligonucleotide
cgaauuguguaaagaucag

SEQ ID NO: 2282158 - RNA, 19 nt, Artificial Sequence
  Description of Artificial Sequence: Synthetic oligonucleotide
ggaaaugacugucgggaua

SEQ ID NO: 2282159 - RNA, 19 nt, Artificial Sequence
  Description of Artificial Sequence: Synthetic oligonucleotide
gguacacacacugaacucu

SEQ ID NO: 2282160 - RNA, 19 nt, Artificial Sequence
  Description of Artificial Sequence: Synthetic oligonucleotide
ccuucgcaacccauaauuc

SEQ ID NO: 2282161 - RNA, 19 nt, Artificial Sequence
  Description of Artificial Sequence: Synthetic oligonucleotide
auuacacuuucagguucgu

SEQ ID NO: 2282162 - RNA, 19 nt, Artificial Sequence
  Description of Artificial Sequence: Synthetic oligonucleotide
ucacuaucuggggcauggc

SEQ ID NO: 2282163 - RNA, 19 nt, Artificial Sequence
  Description of Artificial Sequence: Synthetic oligonucleotide
cggauucaguugcugaucc

SEQ ID NO: 2282164 - RNA, 19 nt, Artificial Sequence
  Description of Artificial Sequence: Synthetic oligonucleotide
augcagauaaucgccugua

SEQ ID NO: 2282165 - RNA, 19 nt, Artificial Sequence
  Description of Artificial Sequence: Synthetic oligonucleotide
aacccauaauucaggucuu

SEQ ID NO: 2282166 - RNA, 19 nt, Artificial Sequence
  Description of Artificial Sequence: Synthetic oligonucleotide
aucgccuguaaaaucgauu

SEQ ID NO: 2282167 - RNA, 19 nt, Artificial Sequence
  Description of Artificial Sequence: Synthetic oligonucleotide
cuggugucagguacacaca

SEQ ID NO: 2282168 - RNA, 19 nt, Artificial Sequence
  Description of Artificial Sequence: Synthetic oligonucleotide
auaagccaccacagugcag

SEQ ID NO: 2282169 - RNA, 19 nt, Artificial Sequence
  Description of Artificial Sequence: Synthetic oligonucleotide
uuacacuuucagguucguu

SEQ ID NO: 2282170 - RNA, 19 nt, Artificial Sequence
  Description of Artificial Sequence: Synthetic oligonucleotide
aucugacgauuugggacug

SEQ ID NO: 2282171 - RNA, 19 nt, Artificial Sequence
  Description of Artificial Sequence: Synthetic oligonucleotide
gcuaagcuuuucaauuuca

SEQ ID NO: 2282172 - RNA, 19 nt, Artificial Sequence
  Description of Artificial Sequence: Synthetic oligonucleotide
gucuaacucaggaugcacu

SEQ ID NO: 2282173 - RNA, 19 nt, Artificial Sequence
  Description of Artificial Sequence: Synthetic oligonucleotide
augcguucacacuccucau

SEQ ID NO: 2282174 - RNA, 19 nt, Artificial Sequence
  Description of Artificial Sequence: Synthetic oligonucleotide
gcaacccauaauucagguc

SEQ ID NO: 2282175 - RNA, 19 nt, Artificial Sequence
  Description of Artificial Sequence: Synthetic oligonucleotide
uccuguugaaaggggcuuu

SEQ ID NO: 2282176 - RNA, 19 nt, Artificial Sequence
  Description of Artificial Sequence: Synthetic oligonucleotide
gauccugaaucugacgauu

SEQ ID NO: 2282177 - RNA, 19 nt, Artificial Sequence
  Description of Artificial Sequence: Synthetic oligonucleotide
gcauacugugagucacuug

SEQ ID NO: 2282178 - RNA, 19 nt, Artificial Sequence
  Description of Artificial Sequence: Synthetic oligonucleotide
gucacuugugcuguccugu

SEQ ID NO: 2282179 - RNA, 19 nt, Artificial Sequence
  Description of Artificial Sequence: Synthetic oligonucleotide
ugucaggaauugguuccau

SEQ ID NO: 2282180 - RNA, 19 nt, Artificial Sequence
  Description of Artificial Sequence: Synthetic oligonucleotide
gcugcuauaucaagguuua

SEQ ID NO: 2282181 - RNA, 19 nt, Artificial Sequence
  Description of Artificial Sequence: Synthetic oligonucleotide
caugucccaugggcuaagc

SEQ ID NO: 2282182 - RNA, 19 nt, Artificial Sequence
  Description of Artificial Sequence: Synthetic oligonucleotide
cauacguccucagucuucu

SEQ ID NO: 2282183 - RNA, 19 nt, Artificial Sequence
  Description of Artificial Sequence: Synthetic oligonucleotide
auccugaaucugacgauuu

SEQ ID NO: 2282184 - RNA, 19 nt, Artificial Sequence
  Description of Artificial Sequence: Synthetic oligonucleotide
guccagggauguccacaag

SEQ ID NO: 2282185 - RNA, 19 nt, Artificial Sequence
  Description of Artificial Sequence: Synthetic oligonucleotide
uucuggccccauucgccau

SEQ ID NO: 2282186 - RNA, 19 nt, Artificial Sequence
  Description of Artificial Sequence: Synthetic oligonucleotide
cacacuccucaucucucga

SEQ ID NO: 2282187 - RNA, 19 nt, Artificial Sequence
  Description of Artificial Sequence: Synthetic oligonucleotide
cuucugguggaucaacauu

SEQ ID NO: 2282188 - RNA, 19 nt, Artificial Sequence
  Description of Artificial Sequence: Synthetic oligonucleotide
cccaccuaacagcauaaca

SEQ ID NO: 2282189 - RNA, 19 nt, Artificial Sequence
  Description of Artificial Sequence: Synthetic oligonucleotide
aucucacuaucuggggcau

SEQ ID NO: 2282190 - RNA, 19 nt, Artificial Sequence
  Description of Artificial Sequence: Synthetic oligonucleotide
ucccaugggcuaagcuuuu

SEQ ID NO: 2282191 - RNA, 19 nt, Artificial Sequence
  Description of Artificial Sequence: Synthetic oligonucleotide
aucggacuucccaaaucaa

SEQ ID NO: 2282192 - RNA, 19 nt, Artificial Sequence
  Description of Artificial Sequence: Synthetic oligonucleotide
cacuaucuggggcauggcu

SEQ ID NO: 2282193 - RNA, 19 nt, Artificial Sequence
  Description of Artificial Sequence: Synthetic oligonucleotide
cacuccucaucucucgacu

SEQ ID NO: 2282194 - RNA, 19 nt, Artificial Sequence
  Description of Artificial Sequence: Synthetic oligonucleotide
ccauacguccucagucuuc

SEQ ID NO: 2282195 - RNA, 19 nt, Artificial Sequence
  Description of Artificial Sequence: Synthetic oligonucleotide
ccauuccaccuucgcaacc

SEQ ID NO: 2282196 - RNA, 19 nt, Artificial Sequence
  Description of Artificial Sequence: Synthetic oligonucleotide
gcucaucugaagugacaga

SEQ ID NO: 2282197 - RNA, 19 nt, Artificial Sequence
  Description of Artificial Sequence: Synthetic oligonucleotide
gcauaacacuggaaaugac

SEQ ID NO: 2282198 - RNA, 19 nt, Artificial Sequence
  Description of Artificial Sequence: Synthetic oligonucleotide
gaucuaugccaccgaugau

SEQ ID NO: 2282199 - RNA, 19 nt, Artificial Sequence
  Description of Artificial Sequence: Synthetic oligonucleotide
cagguucguuaaauguucu

SEQ ID NO: 2282200 - RNA, 19 nt, Artificial Sequence
  Description of Artificial Sequence: Synthetic oligonucleotide
ucgccauccugugguuugu

SEQ ID NO: 2282201 - RNA, 19 nt, Artificial Sequence
  Description of Artificial Sequence: Synthetic oligonucleotide
cugcaaaagcugcugcuau

SEQ ID NO: 2282202 - RNA, 19 nt, Artificial Sequence
  Description of Artificial Sequence: Synthetic oligonucleotide
auucgccauccugugguuu

SEQ ID NO: 2282203 - RNA, 19 nt, Artificial Sequence
  Description of Artificial Sequence: Synthetic oligonucleotide
cucugcugacaccugcaua

SEQ ID NO: 2282204 - RNA, 19 nt, Artificial Sequence
  Description of Artificial Sequence: Synthetic oligonucleotide
ccaccgaugaugcguucac

SEQ ID NO: 2282205 - RNA, 19 nt, Artificial Sequence
  Description of Artificial Sequence: Synthetic oligonucleotide
gucccaugggcuaagcuuu

SEQ ID NO: 2282206 - RNA, 19 nt, Artificial Sequence
  Description of Artificial Sequence: Synthetic oligonucleotide
cuaacucaggaugcacucu

SEQ ID NO: 2282207 - RNA, 19 nt, Artificial Sequence
  Description of Artificial Sequence: Synthetic oligonucleotide
gcucuauauaucggacuuc

SEQ ID NO: 2282208 - RNA, 19 nt, Artificial Sequence
  Description of Artificial Sequence: Synthetic oligonucleotide
ccaauucuucugguggauc

SEQ ID NO: 2282209 - RNA, 19 nt, Artificial Sequence
  Description of Artificial Sequence: Synthetic oligonucleotide
ggacuggugucagguacac

SEQ ID NO: 2282210 - RNA, 19 nt, Artificial Sequence
  Description of Artificial Sequence: Synthetic oligonucleotide
uucuugcauuaugcucuau

SEQ ID NO: 2282211 - RNA, 19 nt, Artificial Sequence
  Description of Artificial Sequence: Synthetic oligonucleotide
cacuuucagguucguuaaa

SEQ ID NO: 2282212 - RNA, 19 nt, Artificial Sequence
  Description of Artificial Sequence: Synthetic oligonucleotide
gacuggugucagguacaca

SEQ ID NO: 2282213 - RNA, 19 nt, Artificial Sequence
  Description of Artificial Sequence: Synthetic oligonucleotide
ccaugggcuaagcuuuuca

SEQ ID NO: 2282214 - RNA, 19 nt, Artificial Sequence
  Description of Artificial Sequence: Synthetic oligonucleotide
ccauucgccauccuguggu

SEQ ID NO: 2282215 - RNA, 19 nt, Artificial Sequence
  Description of Artificial Sequence: Synthetic oligonucleotide
gggauguccacaaggucua

SEQ ID NO: 2282216 - RNA, 19 nt, Artificial Sequence
  Description of Artificial Sequence: Synthetic oligonucleotide
cacugaacucuccgguugu

SEQ ID NO: 2282217 - RNA, 19 nt, Artificial Sequence
  Description of Artificial Sequence: Synthetic oligonucleotide
cugugguuuguagagcaau

SEQ ID NO: 2282218 - RNA, 19 nt, Artificial Sequence
  Description of Artificial Sequence: Synthetic oligonucleotide
cacacugaacucuccgguu

SEQ ID NO: 2282219 - RNA, 19 nt, Artificial Sequence
  Description of Artificial Sequence: Synthetic oligonucleotide
cugacgauuugggacuggu

SEQ ID NO: 2282220 - RNA, 19 nt, Artificial Sequence
  Description of Artificial Sequence: Synthetic oligonucleotide
uugggccaacacggacuca

SEQ ID NO: 2282221 - RNA, 19 nt, Artificial Sequence
  Description of Artificial Sequence: Synthetic oligonucleotide
gaggagcuucgggcuucag

SEQ ID NO: 2282222 - RNA, 19 nt, Artificial Sequence
  Description of Artificial Sequence: Synthetic oligonucleotide
cucuccgguuguccaggga

SEQ ID NO: 2282223 - RNA, 19 nt, Artificial Sequence
  Description of Artificial Sequence: Synthetic oligonucleotide
caccgaugaugcguucaca

SEQ ID NO: 2282224 - RNA, 19 nt, Artificial Sequence
  Description of Artificial Sequence: Synthetic oligonucleotide
gccaccgaugaugcguuca

SEQ ID NO: 2282225 - RNA, 19 nt, Artificial Sequence
  Description of Artificial Sequence: Synthetic oligonucleotide
cuucgggcuucaggagguc

SEQ ID NO: 2282226 - RNA, 19 nt, Artificial Sequence
  Description of Artificial Sequence: Synthetic oligonucleotide
gccccauucgccauccugu

SEQ ID NO: 2282227 - RNA, 19 nt, Artificial Sequence
  Description of Artificial Sequence: Synthetic oligonucleotide
cguucacacuccucaucuc

SEQ ID NO: 2282228 - RNA, 19 nt, Artificial Sequence
  Description of Artificial Sequence: Synthetic oligonucleotide
ggcauggcuugugggaucu

SEQ ID NO: 2282229 - RNA, 19 nt, Artificial Sequence
  Description of Artificial Sequence: Synthetic oligonucleotide
cugcuauaucaagguuuaa

SEQ ID NO: 2282230 - RNA, 19 nt, Artificial Sequence
  Description of Artificial Sequence: Synthetic oligonucleotide
ccaugucccaugggcuaag

SEQ ID NO: 2282231 - RNA, 19 nt, Artificial Sequence
  Description of Artificial Sequence: Synthetic oligonucleotide
ccgaugaugcguucacacu

SEQ ID NO: 2282232 - RNA, 19 nt, Artificial Sequence
  Description of Artificial Sequence: Synthetic oligonucleotide
gcuucgggcuucaggaggu

SEQ ID NO: 2282233 - RNA, 19 nt, Artificial Sequence
  Description of Artificial Sequence: Synthetic oligonucleotide
ucucgacuucuggccccau

SEQ ID NO: 2282234 - RNA, 19 nt, Artificial Sequence
  Description of Artificial Sequence: Synthetic oligonucleotide
cauucgccauccugugguu

SEQ ID NO: 2282235 - RNA, 19 nt, Artificial Sequence
  Description of Artificial Sequence: Synthetic oligonucleotide
cggacucagaagacaagcu

SEQ ID NO: 2282236 - RNA, 19 nt, Artificial Sequence
  Description of Artificial Sequence: Synthetic oligonucleotide
caccuucgcaacccauaau

SEQ ID NO: 2282237 - RNA, 19 nt, Artificial Sequence
  Description of Artificial Sequence: Synthetic oligonucleotide
cgcaacccauaauucaggu

SEQ ID NO: 2282238 - RNA, 19 nt, Artificial Sequence
  Description of Artificial Sequence: Synthetic oligonucleotide
cugucgggauacugugguu

SEQ ID NO: 2282239 - RNA, 19 nt, Artificial Sequence
  Description of Artificial Sequence: Synthetic oligonucleotide
ggauguccacaaggucuaa

SEQ ID NO: 2282240 - RNA, 19 nt, Artificial Sequence
  Description of Artificial Sequence: Synthetic oligonucleotide
cucgacuucuggccccauu

SEQ ID NO: 2282241 - RNA, 19 nt, Artificial Sequence
  Description of Artificial Sequence: Synthetic oligonucleotide
gggccaacacggacucaga

SEQ ID NO: 2282242 - RNA, 19 nt, Artificial Sequence
  Description of Artificial Sequence: Synthetic oligonucleotide
cgccuguaaaaucgauuaa

SEQ ID NO: 2282243 - RNA, 19 nt, Artificial Sequence
  Description of Artificial Sequence: Synthetic oligonucleotide
ccgguuguccagggauguc

SEQ ID NO: 2282244 - RNA, 19 nt, Artificial Sequence
  Description of Artificial Sequence: Synthetic oligonucleotide
cccauacguccucagucuu

SEQ ID NO: 2282245 - RNA, 19 nt, Artificial Sequence
  Description of Artificial Sequence: Synthetic oligonucleotide
uuaauuuugagcaacauga

SEQ ID NO: 2282246 - RNA, 19 nt, Artificial Sequence
  Description of Artificial Sequence: Synthetic oligonucleotide
uguucaaagaccaaaauag

SEQ ID NO: 2282247 - RNA, 19 nt, Artificial Sequence
  Description of Artificial Sequence: Synthetic oligonucleotide
uuuuaaauacuuuaugugg

SEQ ID NO: 2282248 - RNA, 19 nt, Artificial Sequence
  Description of Artificial Sequence: Synthetic oligonucleotide
aaaggaagacaauacaguc

SEQ ID NO: 2282249 - RNA, 19 nt, Artificial Sequence
  Description of Artificial Sequence: Synthetic oligonucleotide
acuuguuuaauuuugagca

SEQ ID NO: 2282250 - RNA, 19 nt, Artificial Sequence
  Description of Artificial Sequence: Synthetic oligonucleotide
aauagauacugcuaugguc

SEQ ID NO: 2282251 - RNA, 19 nt, Artificial Sequence
  Description of Artificial Sequence: Synthetic oligonucleotide
aacaccaccgccuccaucc

SEQ ID NO: 2282252 - RNA, 19 nt, Artificial Sequence
  Description of Artificial Sequence: Synthetic oligonucleotide
aaugaaccuguauauauuc

SEQ ID NO: 2282253 - RNA, 19 nt, Artificial Sequence
  Description of Artificial Sequence: Synthetic oligonucleotide
gaagcaagcauuaacacgg

SEQ ID NO: 2282254 - RNA, 19 nt, Artificial Sequence
  Description of Artificial Sequence: Synthetic oligonucleotide
  modified_base (16)..(16): a, c, u, g, unknown or other
aauacagucaugaucngag

SEQ ID NO: 2282255 - RNA, 19 nt, Artificial Sequence
  Description of Artificial Sequence: Synthetic oligonucleotide
aaaauagauacugcuaugg

SEQ ID NO: 2282256 - RNA, 19 nt, Artificial Sequence
  Description of Artificial Sequence: Synthetic oligonucleotide
gaagaaacagagcagguag

SEQ ID NO: 2282257 - RNA, 19 nt, Artificial Sequence
  Description of Artificial Sequence: Synthetic oligonucleotide
uagagauacaugaagaaac

SEQ ID NO: 2282258 - RNA, 19 nt, Artificial Sequence
  Description of Artificial Sequence: Synthetic oligonucleotide
gauuguguauuucuguugg

SEQ ID NO: 2282259 - RNA, 19 nt, Artificial Sequence
  Description of Artificial Sequence: Synthetic oligonucleotide
uuuaaauacuuuauguggu

SEQ ID NO: 2282260 - RNA, 19 nt, Artificial Sequence
  Description of Artificial Sequence: Synthetic oligonucleotide
uuaagggugguuuaaguag

SEQ ID NO: 2282261 - RNA, 19 nt, Artificial Sequence
  Description of Artificial Sequence: Synthetic oligonucleotide
uugagaaucagaaaucuac

SEQ ID NO: 2282262 - RNA, 19 nt, Artificial Sequence
  Description of Artificial Sequence: Synthetic oligonucleotide
uguauauauuccaaguggc

SEQ ID NO: 2282263 - RNA, 19 nt, Artificial Sequence
  Description of Artificial Sequence: Synthetic oligonucleotide
aauguaaugaugaaguaga

SEQ ID NO: 2282264 - RNA, 19 nt, Artificial Sequence
  Description of Artificial Sequence: Synthetic oligonucleotide
acuauagagauacaugaag

SEQ ID NO: 2282265 - RNA, 19 nt, Artificial Sequence
  Description of Artificial Sequence: Synthetic oligonucleotide
ucugguauuacccacuugu

SEQ ID NO: 2282266 - RNA, 19 nt, Artificial Sequence
  Description of Artificial Sequence: Synthetic oligonucleotide
agaaucauacuauagagau

SEQ ID NO: 2282267 - RNA, 19 nt, Artificial Sequence
  Description of Artificial Sequence: Synthetic oligonucleotide
auacuauagagauacauga

SEQ ID NO: 2282268 - RNA, 19 nt, Artificial Sequence
  Description of Artificial Sequence: Synthetic oligonucleotide
aaaucagacaauguaauga

SEQ ID NO: 2282269 - RNA, 19 nt, Artificial Sequence
  Description of Artificial Sequence: Synthetic oligonucleotide
  modified_base (19)..(19): a, c, u, g, unknown or other
gacaauacagucaugaucn

SEQ ID NO: 2282270 - RNA, 19 nt, Artificial Sequence
  Description of Artificial Sequence: Synthetic oligonucleotide
ugaagcaagcauuaacacg

SEQ ID NO: 2282271 - RNA, 19 nt, Artificial Sequence
  Description of Artificial Sequence: Synthetic oligonucleotide
uguauuaggcuccaggaga

SEQ ID NO: 2282272 - RNA, 19 nt, Artificial Sequence
  Description of Artificial Sequence: Synthetic oligonucleotide
uagaaaccaagcuugauca

SEQ ID NO: 2282273 - RNA, 19 nt, Artificial Sequence
  Description of Artificial Sequence: Synthetic oligonucleotide
agacaauacagucaugauc

SEQ ID NO: 2282274 - RNA, 19 nt, Artificial Sequence
  Description of Artificial Sequence: Synthetic oligonucleotide
uauggucacgguuuuaagg

SEQ ID NO: 2282275 - RNA, 19 nt, Artificial Sequence
  Description of Artificial Sequence: Synthetic oligonucleotide
auggucacgguuuuaaggg

SEQ ID NO: 2282276 - RNA, 19 nt, Artificial Sequence
  Description of Artificial Sequence: Synthetic oligonucleotide
cauguuaccacuuggcacc

SEQ ID NO: 2282277 - RNA, 19 nt, Artificial Sequence
  Description of Artificial Sequence: Synthetic oligonucleotide
ugagcaacaugaucuagcg

SEQ ID NO: 2282278 - RNA, 19 nt, Artificial Sequence
  Description of Artificial Sequence: Synthetic oligonucleotide
  modified_base (14)..(14): a, c, u, g, unknown or other
uacagucaugaucngagug

SEQ ID NO: 2282279 - RNA, 19 nt, Artificial Sequence
  Description of Artificial Sequence: Synthetic oligonucleotide
aacacucccauguuaccac

SEQ ID NO: 2282280 - RNA, 19 nt, Artificial Sequence
  Description of Artificial Sequence: Synthetic oligonucleotide
uucuaaaucagacaaugua

SEQ ID NO: 2282281 - RNA, 19 nt, Artificial Sequence
  Description of Artificial Sequence: Synthetic oligonucleotide
aaucagacaauguaaugau

SEQ ID NO: 2282282 - RNA, 19 nt, Artificial Sequence
  Description of Artificial Sequence: Synthetic oligonucleotide
uuuaaguagucucuggcuc

SEQ ID NO: 2282283 - RNA, 19 nt, Artificial Sequence
  Description of Artificial Sequence: Synthetic oligonucleotide
ugcaguguaguguagguug

SEQ ID NO: 2282284 - RNA, 19 nt, Artificial Sequence
  Description of Artificial Sequence: Synthetic oligonucleotide
auaaugaaccuguauauau

SEQ ID NO: 2282285 - RNA, 19 nt, Artificial Sequence
  Description of Artificial Sequence: Synthetic oligonucleotide
  modified_base (3)..(3): a, c, u, g, unknown or other
ucngaguggaaucugcucu

SEQ ID NO: 2282286 - RNA, 19 nt, Artificial Sequence
  Description of Artificial Sequence: Synthetic oligonucleotide
ucaaacacucccauguuac

SEQ ID NO: 2282287 - RNA, 19 nt, Artificial Sequence
  Description of Artificial Sequence: Synthetic oligonucleotide
aaauagauacugcuauggu

SEQ ID NO: 2282288 - RNA, 19 nt, Artificial Sequence
  Description of Artificial Sequence: Synthetic oligonucleotide
uauuccaaguggcaacagg

SEQ ID NO: 2282289 - RNA, 19 nt, Artificial Sequence
  Description of Artificial Sequence: Synthetic oligonucleotide
aacagagcagguagaaacc

SEQ ID NO: 2282290 - RNA, 19 nt, Artificial Sequence
  Description of Artificial Sequence: Synthetic oligonucleotide
ugagaaucagaaaucuaca

SEQ ID NO: 2282291 - RNA, 19 nt, Artificial Sequence
  Description of Artificial Sequence: Synthetic oligonucleotide
uuuuguucaaagaccaaaa

SEQ ID NO: 2282292 - RNA, 19 nt, Artificial Sequence
  Description of Artificial Sequence: Synthetic oligonucleotide
agcaacaugaucuagcguu

SEQ ID NO: 2282293 - RNA, 19 nt, Artificial Sequence
  Description of Artificial Sequence: Synthetic oligonucleotide
aaucuaguaagggcucucc

SEQ ID NO: 2282294 - RNA, 19 nt, Artificial Sequence
  Description of Artificial Sequence: Synthetic oligonucleotide
gagaagaggaacaccaccg

SEQ ID NO: 2282295 - RNA, 19 nt, Artificial Sequence
  Description of Artificial Sequence: Synthetic oligonucleotide
uagaaucauacuauagaga

SEQ ID NO: 2282296 - RNA, 19 nt, Artificial Sequence
  Description of Artificial Sequence: Synthetic oligonucleotide
agagaaaggaagacaauac

SEQ ID NO: 2282297 - RNA, 19 nt, Artificial Sequence
  Description of Artificial Sequence: Synthetic oligonucleotide
gagcgcacaaucuaguaag

SEQ ID NO: 2282298 - RNA, 19 nt, Artificial Sequence
  Description of Artificial Sequence: Synthetic oligonucleotide
aacacggugacaauggugu

SEQ ID NO: 2282299 - RNA, 19 nt, Artificial Sequence
  Description of Artificial Sequence: Synthetic oligonucleotide
uauagagauacaugaagaa

SEQ ID NO: 2282300 - RNA, 19 nt, Artificial Sequence
  Description of Artificial Sequence: Synthetic oligonucleotide
cacuuguuuaauuuugagc

SEQ ID NO: 2282301 - RNA, 19 nt, Artificial Sequence
  Description of Artificial Sequence: Synthetic oligonucleotide
auagauacugcuaugguca

SEQ ID NO: 2282302 - RNA, 19 nt, Artificial Sequence
  Description of Artificial Sequence: Synthetic oligonucleotide
auuaacacggugacaaugg

SEQ ID NO: 2282303 - RNA, 19 nt, Artificial Sequence
  Description of Artificial Sequence: Synthetic oligonucleotide
aaagcuagaaucauacuau

SEQ ID NO: 2282304 - RNA, 19 nt, Artificial Sequence
  Description of Artificial Sequence: Synthetic oligonucleotide
uaaaucagacaauguaaug

SEQ ID NO: 2282305 - RNA, 19 nt, Artificial Sequence
  Description of Artificial Sequence: Synthetic oligonucleotide
gaagacaauacagucauga

SEQ ID NO: 2282306 - RNA, 19 nt, Artificial Sequence
  Description of Artificial Sequence: Synthetic oligonucleotide
cagguagaaaccaagcuug

SEQ ID NO: 2282307 - RNA, 19 nt, Artificial Sequence
  Description of Artificial Sequence: Synthetic oligonucleotide
gugacuuuaacuguccccg

SEQ ID NO: 2282308 - RNA, 19 nt, Artificial Sequence
  Description of Artificial Sequence: Synthetic oligonucleotide
agucauuuauuaaagcuag

SEQ ID NO: 2282309 - RNA, 19 nt, Artificial Sequence
  Description of Artificial Sequence: Synthetic oligonucleotide
uauuguuugugugugcaag

SEQ ID NO: 2282310 - RNA, 19 nt, Artificial Sequence
  Description of Artificial Sequence: Synthetic oligonucleotide
cauucuaaaucagacaaug

SEQ ID NO: 2282311 - RNA, 19 nt, Artificial Sequence
  Description of Artificial Sequence: Synthetic oligonucleotide
gaaucugcucuccaggagc

SEQ ID NO: 2282312 - RNA, 19 nt, Artificial Sequence
  Description of Artificial Sequence: Synthetic oligonucleotide
uauauauuccaaguggcaa

SEQ ID NO: 2282313 - RNA, 19 nt, Artificial Sequence
  Description of Artificial Sequence: Synthetic oligonucleotide
ucuagcguugauguaauca

SEQ ID NO: 2282314 - RNA, 19 nt, Artificial Sequence
  Description of Artificial Sequence: Synthetic oligonucleotide
uuaacuguccccgauugug

SEQ ID NO: 2282315 - RNA, 19 nt, Artificial Sequence
  Description of Artificial Sequence: Synthetic oligonucleotide
cuagcguugauguaaucac

SEQ ID NO: 2282316 - RNA, 19 nt, Artificial Sequence
  Description of Artificial Sequence: Synthetic oligonucleotide
ugugacuuuaacugucccc

SEQ ID NO: 2282317 - RNA, 19 nt, Artificial Sequence
  Description of Artificial Sequence: Synthetic oligonucleotide
cuauagagauacaugaaga

SEQ ID NO: 2282318 - RNA, 19 nt, Artificial Sequence
  Description of Artificial Sequence: Synthetic oligonucleotide
cuaguaagggcucuccuag

SEQ ID NO: 2282319 - RNA, 19 nt, Artificial Sequence
  Description of Artificial Sequence: Synthetic oligonucleotide
ucaauugugcaguguagug

SEQ ID NO: 2282320 - RNA, 19 nt, Artificial Sequence
  Description of Artificial Sequence: Synthetic oligonucleotide
uaaucacauucuaaaucag

SEQ ID NO: 2282321 - RNA, 19 nt, Artificial Sequence
  Description of Artificial Sequence: Synthetic oligonucleotide
aauacuuuaugugguaaaa

SEQ ID NO: 2282322 - RNA, 19 nt, Artificial Sequence
  Description of Artificial Sequence: Synthetic oligonucleotide
uuuuaagggugguuuaagu

SEQ ID NO: 2282323 - RNA, 19 nt, Artificial Sequence
  Description of Artificial Sequence: Synthetic oligonucleotide
uagguuggcuucaaccccg

SEQ ID NO: 2282324 - RNA, 19 nt, Artificial Sequence
  Description of Artificial Sequence: Synthetic oligonucleotide
agugaagcaagcauuaaca

SEQ ID NO: 2282325 - RNA, 19 nt, Artificial Sequence
  Description of Artificial Sequence: Synthetic oligonucleotide
uaugcugggguugagaauc

SEQ ID NO: 2282326 - RNA, 19 nt, Artificial Sequence
  Description of Artificial Sequence: Synthetic oligonucleotide
  modified_base (13)..(13): a, c, u, g, unknown or other
acagucaugaucngagugg

SEQ ID NO: 2282327 - RNA, 19 nt, Artificial Sequence
  Description of Artificial Sequence: Synthetic oligonucleotide
gacaauguaaugaugaagu

SEQ ID NO: 2282328 - RNA, 19 nt, Artificial Sequence
  Description of Artificial Sequence: Synthetic oligonucleotide
  modified_base (6)..(6): a, c, u, g, unknown or other
ugaucngaguggaaucugc

SEQ ID NO: 2282329 - RNA, 19 nt, Artificial Sequence
  Description of Artificial Sequence: Synthetic oligonucleotide
  modified_base (4)..(4): a, c, u, g, unknown or other
aucngaguggaaucugcuc

SEQ ID NO: 2282330 - RNA, 19 nt, Artificial Sequence
  Description of Artificial Sequence: Synthetic oligonucleotide
agcauuaacacggugacaa

SEQ ID NO: 2282331 - RNA, 19 nt, Artificial Sequence
  Description of Artificial Sequence: Synthetic oligonucleotide
accacuuggcaccauaaug

SEQ ID NO: 2282332 - RNA, 19 nt, Artificial Sequence
  Description of Artificial Sequence: Synthetic oligonucleotide
agagaggaagaugagcgcg

SEQ ID NO: 2282333 - RNA, 19 nt, Artificial Sequence
  Description of Artificial Sequence: Synthetic oligonucleotide
gagaaaggaagacaauaca

SEQ ID NO: 2282334 - RNA, 19 nt, Artificial Sequence
  Description of Artificial Sequence: Synthetic oligonucleotide
ugaucuagcguugauguaa

SEQ ID NO: 2282335 - RNA, 19 nt, Artificial Sequence
  Description of Artificial Sequence: Synthetic oligonucleotide
accuguauauauuccaagu

SEQ ID NO: 2282336 - RNA, 19 nt, Artificial Sequence
  Description of Artificial Sequence: Synthetic oligonucleotide
caagcauuaacacggugac

SEQ ID NO: 2282337 - RNA, 19 nt, Artificial Sequence
  Description of Artificial Sequence: Synthetic oligonucleotide
uaagggugguuuaaguagu

SEQ ID NO: 2282338 - RNA, 19 nt, Artificial Sequence
  Description of Artificial Sequence: Synthetic oligonucleotide
cuagcuuguuauucaacag

SEQ ID NO: 2282339 - RNA, 19 nt, Artificial Sequence
  Description of Artificial Sequence: Synthetic oligonucleotide
guguauuucuguuggauca

SEQ ID NO: 2282340 - RNA, 19 nt, Artificial Sequence
  Description of Artificial Sequence: Synthetic oligonucleotide
ugguuuaaguagucucugg

SEQ ID NO: 2282341 - RNA, 19 nt, Artificial Sequence
  Description of Artificial Sequence: Synthetic oligonucleotide
ucauacuauagagauacau

SEQ ID NO: 2282342 - RNA, 19 nt, Artificial Sequence
  Description of Artificial Sequence: Synthetic oligonucleotide
cuuuaacuguccccgauug

SEQ ID NO: 2282343 - RNA, 19 nt, Artificial Sequence
  Description of Artificial Sequence: Synthetic oligonucleotide
uguuauucaacagccauuu

SEQ ID NO: 2282344 - RNA, 19 nt, Artificial Sequence
  Description of Artificial Sequence: Synthetic oligonucleotide
agacaauguaaugaugaag

SEQ ID NO: 2282345 - RNA, 19 nt, Artificial Sequence
  Description of Artificial Sequence: Synthetic oligonucleotide
gaaaccaagcuugaucaug

SEQ ID NO: 2282346 - RNA, 19 nt, Artificial Sequence
  Description of Artificial Sequence: Synthetic oligonucleotide
agauacaugaagaaacaga

SEQ ID NO: 2282347 - RNA, 19 nt, Artificial Sequence
  Description of Artificial Sequence: Synthetic oligonucleotide
aggaagaugagcgcgcaac

SEQ ID NO: 2282348 - RNA, 19 nt, Artificial Sequence
  Description of Artificial Sequence: Synthetic oligonucleotide
uauauuccaaguggcaaca

SEQ ID NO: 2282349 - RNA, 19 nt, Artificial Sequence
  Description of Artificial Sequence: Synthetic oligonucleotide
agugcagugaagcaagcau

SEQ ID NO: 2282350 - RNA, 19 nt, Artificial Sequence
  Description of Artificial Sequence: Synthetic oligonucleotide
aaacaccuucauaugcugg

SEQ ID NO: 2282351 - RNA, 19 nt, Artificial Sequence
  Description of Artificial Sequence: Synthetic oligonucleotide
uaacacggugacaauggug

SEQ ID NO: 2282352 - RNA, 19 nt, Artificial Sequence
  Description of Artificial Sequence: Synthetic oligonucleotide
uauuucuguuggaucaaac

SEQ ID NO: 2282353 - RNA, 19 nt, Artificial Sequence
  Description of Artificial Sequence: Synthetic oligonucleotide
uacuauagagauacaugaa

SEQ ID NO: 2282354 - RNA, 19 nt, Artificial Sequence
  Description of Artificial Sequence: Synthetic oligonucleotide
  modified_base (9)..(9): a, c, u, g, unknown or other
ucaugaucngaguggaauc

SEQ ID NO: 2282355 - RNA, 19 nt, Artificial Sequence
  Description of Artificial Sequence: Synthetic oligonucleotide
uccaaguggcaacagguaa

SEQ ID NO: 2282356 - RNA, 19 nt, Artificial Sequence
  Description of Artificial Sequence: Synthetic oligonucleotide
aaucugcucuccaggagcg

SEQ ID NO: 2282357 - RNA, 19 nt, Artificial Sequence
  Description of Artificial Sequence: Synthetic oligonucleotide
gagauacaugaagaaacag

SEQ ID NO: 2282358 - RNA, 19 nt, Artificial Sequence
  Description of Artificial Sequence: Synthetic oligonucleotide
uaaugaaccuguauauauu

SEQ ID NO: 2282359 - RNA, 19 nt, Artificial Sequence
  Description of Artificial Sequence: Synthetic oligonucleotide
acggugacaaugguguggc

SEQ ID NO: 2282360 - RNA, 19 nt, Artificial Sequence
  Description of Artificial Sequence: Synthetic oligonucleotide
uuaaagcuagaaucauacu

SEQ ID NO: 2282361 - RNA, 19 nt, Artificial Sequence
  Description of Artificial Sequence: Synthetic oligonucleotide
uccucaauugugcagugua

SEQ ID NO: 2282362 - RNA, 19 nt, Artificial Sequence
  Description of Artificial Sequence: Synthetic oligonucleotide
agcagguagaaaccaagcu

SEQ ID NO: 2282363 - RNA, 19 nt, Artificial Sequence
  Description of Artificial Sequence: Synthetic oligonucleotide
gguuuaaguagucucuggc

SEQ ID NO: 2282364 - RNA, 19 nt, Artificial Sequence
  Description of Artificial Sequence: Synthetic oligonucleotide
uuacccacuuguuuaauuu

SEQ ID NO: 2282365 - RNA, 19 nt, Artificial Sequence
  Description of Artificial Sequence: Synthetic oligonucleotide
ucagcucugguauuaccca

SEQ ID NO: 2282366 - RNA, 19 nt, Artificial Sequence
  Description of Artificial Sequence: Synthetic oligonucleotide
ucuaguaagggcucuccua

SEQ ID NO: 2282367 - RNA, 19 nt, Artificial Sequence
  Description of Artificial Sequence: Synthetic oligonucleotide
cauuaacacggugacaaug

SEQ ID NO: 2282368 - RNA, 19 nt, Artificial Sequence
  Description of Artificial Sequence: Synthetic oligonucleotide
ugcagugaagcaagcauua

SEQ ID NO: 2282369 - RNA, 19 nt, Artificial Sequence
  Description of Artificial Sequence: Synthetic oligonucleotide
agaugagcgcgcaacaguc

SEQ ID NO: 2282370 - RNA, 19 nt, Artificial Sequence
  Description of Artificial Sequence: Synthetic oligonucleotide
uuugagcaacaugaucuag

SEQ ID NO: 2282371 - RNA, 19 nt, Artificial Sequence
  Description of Artificial Sequence: Synthetic oligonucleotide
aguaagggcucuccuaggu

SEQ ID NO: 2282372 - RNA, 19 nt, Artificial Sequence
  Description of Artificial Sequence: Synthetic oligonucleotide
gugaagcaagcauuaacac

SEQ ID NO: 2282373 - RNA, 19 nt, Artificial Sequence
  Description of Artificial Sequence: Synthetic oligonucleotide
agguaaguugagaaggaag

SEQ ID NO: 2282374 - RNA, 19 nt, Artificial Sequence
  Description of Artificial Sequence: Synthetic oligonucleotide
auuccaaguggcaacaggu

SEQ ID NO: 2282375 - RNA, 19 nt, Artificial Sequence
  Description of Artificial Sequence: Synthetic oligonucleotide
uggaaucugcucuccagga

SEQ ID NO: 2282376 - RNA, 19 nt, Artificial Sequence
  Description of Artificial Sequence: Synthetic oligonucleotide
uuaacacggugacaauggu

SEQ ID NO: 2282377 - RNA, 19 nt, Artificial Sequence
  Description of Artificial Sequence: Synthetic oligonucleotide
gaccaaaauagauacugcu

SEQ ID NO: 2282378 - RNA, 19 nt, Artificial Sequence
  Description of Artificial Sequence: Synthetic oligonucleotide
uuucuagcuuguuauucaa

SEQ ID NO: 2282379 - RNA, 19 nt, Artificial Sequence
  Description of Artificial Sequence: Synthetic oligonucleotide
ugguauuacccacuuguuu

SEQ ID NO: 2282380 - RNA, 19 nt, Artificial Sequence
  Description of Artificial Sequence: Synthetic oligonucleotide
uuggcuucaaccccggcuu

SEQ ID NO: 2282381 - RNA, 19 nt, Artificial Sequence
  Description of Artificial Sequence: Synthetic oligonucleotide
gaagaugagcgcgcaacag

SEQ ID NO: 2282382 - RNA, 19 nt, Artificial Sequence
  Description of Artificial Sequence: Synthetic oligonucleotide
uuuaacuguccccgauugu

SEQ ID NO: 2282383 - RNA, 19 nt, Artificial Sequence
  Description of Artificial Sequence: Synthetic oligonucleotide
cagugaagcaagcauuaac

SEQ ID NO: 2282384 - RNA, 19 nt, Artificial Sequence
  Description of Artificial Sequence: Synthetic oligonucleotide
aggugugcccuuuauuucu

SEQ ID NO: 2282385 - RNA, 19 nt, Artificial Sequence
  Description of Artificial Sequence: Synthetic oligonucleotide
guauuaggcuccaggagag

SEQ ID NO: 2282386 - RNA, 19 nt, Artificial Sequence
  Description of Artificial Sequence: Synthetic oligonucleotide
caugaucuagcguugaugu

SEQ ID NO: 2282387 - RNA, 19 nt, Artificial Sequence
  Description of Artificial Sequence: Synthetic oligonucleotide
ucuuucaugugugacuuua

SEQ ID NO: 2282388 - RNA, 19 nt, Artificial Sequence
  Description of Artificial Sequence: Synthetic oligonucleotide
gguauuacccacuuguuua

SEQ ID NO: 2282389 - RNA, 19 nt, Artificial Sequence
  Description of Artificial Sequence: Synthetic oligonucleotide
ggugacaaugguguggccg

SEQ ID NO: 2282390 - RNA, 19 nt, Artificial Sequence
  Description of Artificial Sequence: Synthetic oligonucleotide
uagcguugauguaaucaca

SEQ ID NO: 2282391 - RNA, 19 nt, Artificial Sequence
  Description of Artificial Sequence: Synthetic oligonucleotide
gguaaguugagaaggaaga

SEQ ID NO: 2282392 - RNA, 19 nt, Artificial Sequence
  Description of Artificial Sequence: Synthetic oligonucleotide
aguguagguuggcuucaac

SEQ ID NO: 2282393 - RNA, 19 nt, Artificial Sequence
  Description of Artificial Sequence: Synthetic oligonucleotide
uccccgauuguguauuucu

SEQ ID NO: 2282394 - RNA, 19 nt, Artificial Sequence
  Description of Artificial Sequence: Synthetic oligonucleotide
uaguaagggcucuccuagg

SEQ ID NO: 2282395 - RNA, 19 nt, Artificial Sequence
  Description of Artificial Sequence: Synthetic oligonucleotide
aacaugaucuagcguugau

SEQ ID NO: 2282396 - RNA, 19 nt, Artificial Sequence
  Description of Artificial Sequence: Synthetic oligonucleotide
auguaaugaugaaguagac

SEQ ID NO: 2282397 - RNA, 19 nt, Artificial Sequence
  Description of Artificial Sequence: Synthetic oligonucleotide
uacaaagccagcacacauu

SEQ ID NO: 2282398 - RNA, 19 nt, Artificial Sequence
  Description of Artificial Sequence: Synthetic oligonucleotide
accaagcuugaucauggcu

SEQ ID NO: 2282399 - RNA, 19 nt, Artificial Sequence
  Description of Artificial Sequence: Synthetic oligonucleotide
ugaucauggcuucuuucau

SEQ ID NO: 2282400 - RNA, 19 nt, Artificial Sequence
  Description of Artificial Sequence: Synthetic oligonucleotide
acaugaucuagcguugaug

SEQ ID NO: 2282401 - RNA, 19 nt, Artificial Sequence
  Description of Artificial Sequence: Synthetic oligonucleotide
uuaccacuuggcaccauaa

SEQ ID NO: 2282402 - RNA, 19 nt, Artificial Sequence
  Description of Artificial Sequence: Synthetic oligonucleotide
ugugcccuuuauuucugug

SEQ ID NO: 2282403 - RNA, 19 nt, Artificial Sequence
  Description of Artificial Sequence: Synthetic oligonucleotide
caaacacucccauguuacc

SEQ ID NO: 2282404 - RNA, 19 nt, Artificial Sequence
  Description of Artificial Sequence: Synthetic oligonucleotide
  modified_base (18)..(18): a, c, u, g, unknown or other
acaauacagucaugaucng

SEQ ID NO: 2282405 - RNA, 19 nt, Artificial Sequence
  Description of Artificial Sequence: Synthetic oligonucleotide
uuguguauuucuguuggau

SEQ ID NO: 2282406 - RNA, 19 nt, Artificial Sequence
  Description of Artificial Sequence: Synthetic oligonucleotide
aucaaacacucccauguua

SEQ ID NO: 2282407 - RNA, 19 nt, Artificial Sequence
  Description of Artificial Sequence: Synthetic oligonucleotide
gaugaaccagugcagugaa

SEQ ID NO: 2282408 - RNA, 19 nt, Artificial Sequence
  Description of Artificial Sequence: Synthetic oligonucleotide
cauaugcugggguugagaa

SEQ ID NO: 2282409 - RNA, 19 nt, Artificial Sequence
  Description of Artificial Sequence: Synthetic oligonucleotide
uccaggagcgcacaaucua

SEQ ID NO: 2282410 - RNA, 19 nt, Artificial Sequence
  Description of Artificial Sequence: Synthetic oligonucleotide
cuauggucacgguuuuaag

SEQ ID NO: 2282411 - RNA, 19 nt, Artificial Sequence
  Description of Artificial Sequence: Synthetic oligonucleotide
gaugagcgcgcaacagucg

SEQ ID NO: 2282412 - RNA, 19 nt, Artificial Sequence
  Description of Artificial Sequence: Synthetic oligonucleotide
cacaaucuaguaagggcuc

SEQ ID NO: 2282413 - RNA, 19 nt, Artificial Sequence
  Description of Artificial Sequence: Synthetic oligonucleotide
acugcuauggucacgguuu

SEQ ID NO: 2282414 - RNA, 19 nt, Artificial Sequence
  Description of Artificial Sequence: Synthetic oligonucleotide
uucaaccccggcuucucca

SEQ ID NO: 2282415 - RNA, 19 nt, Artificial Sequence
  Description of Artificial Sequence: Synthetic oligonucleotide
accagugcagugaagcaag

SEQ ID NO: 2282416 - RNA, 19 nt, Artificial Sequence
  Description of Artificial Sequence: Synthetic oligonucleotide
guuuaaguagucucuggcu

SEQ ID NO: 2282417 - RNA, 19 nt, Artificial Sequence
  Description of Artificial Sequence: Synthetic oligonucleotide
auuacccacuuguuuaauu

SEQ ID NO: 2282418 - RNA, 19 nt, Artificial Sequence
  Description of Artificial Sequence: Synthetic oligonucleotide
gucaaaccagcuccggggc

SEQ ID NO: 2282419 - RNA, 19 nt, Artificial Sequence
  Description of Artificial Sequence: Synthetic oligonucleotide
gccauuuauuguuugugug

SEQ ID NO: 2282420 - RNA, 19 nt, Artificial Sequence
  Description of Artificial Sequence: Synthetic oligonucleotide
acaaugguguggccgguca

SEQ ID NO: 2282421 - RNA, 19 nt, Artificial Sequence
  Description of Artificial Sequence: Synthetic oligonucleotide
ccuguauauauuccaagug

SEQ ID NO: 2282422 - RNA, 19 nt, Artificial Sequence
  Description of Artificial Sequence: Synthetic oligonucleotide
uuaggcuccaggagagaaa

SEQ ID NO: 2282423 - RNA, 19 nt, Artificial Sequence
  Description of Artificial Sequence: Synthetic oligonucleotide
aaccagugcagugaagcaa

SEQ ID NO: 2282424 - RNA, 19 nt, Artificial Sequence
  Description of Artificial Sequence: Synthetic oligonucleotide
ucaaccccggcuucuccag

SEQ ID NO: 2282425 - RNA, 19 nt, Artificial Sequence
  Description of Artificial Sequence: Synthetic oligonucleotide
aagggugguuuaaguaguc

SEQ ID NO: 2282426 - RNA, 19 nt, Artificial Sequence
  Description of Artificial Sequence: Synthetic oligonucleotide
auuguguauuucuguugga

SEQ ID NO: 2282427 - RNA, 19 nt, Artificial Sequence
  Description of Artificial Sequence: Synthetic oligonucleotide
acuuggcaccauaaugaac

SEQ ID NO: 2282428 - RNA, 19 nt, Artificial Sequence
  Description of Artificial Sequence: Synthetic oligonucleotide
  modified_base (7)..(7): a, c, u, g, unknown or other
augaucngaguggaaucug

SEQ ID NO: 2282429 - RNA, 19 nt, Artificial Sequence
  Description of Artificial Sequence: Synthetic oligonucleotide
  modified_base (15)..(15): a, c, u, g, unknown or other
auacagucaugaucngagu

SEQ ID NO: 2282430 - RNA, 19 nt, Artificial Sequence
  Description of Artificial Sequence: Synthetic oligonucleotide
cacggugacaauggugugg

SEQ ID NO: 2282431 - RNA, 19 nt, Artificial Sequence
  Description of Artificial Sequence: Synthetic oligonucleotide
gucacgguuuuaagggugg

SEQ ID NO: 2282432 - RNA, 19 nt, Artificial Sequence
  Description of Artificial Sequence: Synthetic oligonucleotide
aucuaguaagggcucuccu

SEQ ID NO: 2282433 - RNA, 19 nt, Artificial Sequence
  Description of Artificial Sequence: Synthetic oligonucleotide
ucauaugcugggguugaga

SEQ ID NO: 2282434 - RNA, 19 nt, Artificial Sequence
  Description of Artificial Sequence: Synthetic oligonucleotide
caaaccagcuccggggccg

SEQ ID NO: 2282435 - RNA, 19 nt, Artificial Sequence
  Description of Artificial Sequence: Synthetic oligonucleotide
augagcgcgcaacagucga

SEQ ID NO: 2282436 - RNA, 19 nt, Artificial Sequence
  Description of Artificial Sequence: Synthetic oligonucleotide
uacugcuauggucacgguu

SEQ ID NO: 2282437 - RNA, 19 nt, Artificial Sequence
  Description of Artificial Sequence: Synthetic oligonucleotide
gugcaaggcacuguauuag

SEQ ID NO: 2282438 - RNA, 19 nt, Artificial Sequence
  Description of Artificial Sequence: Synthetic oligonucleotide
uguauuucuguuggaucaa

SEQ ID NO: 2282439 - RNA, 19 nt, Artificial Sequence
  Description of Artificial Sequence: Synthetic oligonucleotide
acuuuaacuguccccgauu

SEQ ID NO: 2282440 - RNA, 19 nt, Artificial Sequence
  Description of Artificial Sequence: Synthetic oligonucleotide
auucuaaaucagacaaugu

SEQ ID NO: 2282441 - RNA, 19 nt, Artificial Sequence
  Description of Artificial Sequence: Synthetic oligonucleotide
agcaagcauuaacacggug

SEQ ID NO: 2282442 - RNA, 19 nt, Artificial Sequence
  Description of Artificial Sequence: Synthetic oligonucleotide
gagaggaagaugagcgcgc

SEQ ID NO: 2282443 - RNA, 19 nt, Artificial Sequence
  Description of Artificial Sequence: Synthetic oligonucleotide
cagucgaggagcgagaaga

SEQ ID NO: 2282444 - RNA, 19 nt, Artificial Sequence
  Description of Artificial Sequence: Synthetic oligonucleotide
cuuguuuaauuuugagcaa

SEQ ID NO: 2282445 - RNA, 19 nt, Artificial Sequence
  Description of Artificial Sequence: Synthetic oligonucleotide
aaccccggcuucuccagcu

SEQ ID NO: 2282446 - RNA, 19 nt, Artificial Sequence
  Description of Artificial Sequence: Synthetic oligonucleotide
ugagcgcgcaacagucgag

SEQ ID NO: 2282447 - RNA, 19 nt, Artificial Sequence
  Description of Artificial Sequence: Synthetic oligonucleotide
acgguuuuaagggugguuu

SEQ ID NO: 2282448 - RNA, 19 nt, Artificial Sequence
  Description of Artificial Sequence: Synthetic oligonucleotide
ccauguuaccacuuggcac

SEQ ID NO: 2282449 - RNA, 19 nt, Artificial Sequence
  Description of Artificial Sequence: Synthetic oligonucleotide
auuaggcuccaggagagaa

SEQ ID NO: 2282450 - RNA, 19 nt, Artificial Sequence
  Description of Artificial Sequence: Synthetic oligonucleotide
cguugauguaaucacauuc

SEQ ID NO: 2282451 - RNA, 19 nt, Artificial Sequence
  Description of Artificial Sequence: Synthetic oligonucleotide
acaccuucauaugcugggg

SEQ ID NO: 2282452 - RNA, 19 nt, Artificial Sequence
  Description of Artificial Sequence: Synthetic oligonucleotide
gagcgcgcaacagucgagg

SEQ ID NO: 2282453 - RNA, 19 nt, Artificial Sequence
  Description of Artificial Sequence: Synthetic oligonucleotide
uggcuccucaauugugcag

SEQ ID NO: 2282454 - RNA, 19 nt, Artificial Sequence
  Description of Artificial Sequence: Synthetic oligonucleotide
ugacuuuaacuguccccga

SEQ ID NO: 2282455 - RNA, 19 nt, Artificial Sequence
  Description of Artificial Sequence: Synthetic oligonucleotide
gaaccuguauauauuccaa

SEQ ID NO: 2282456 - RNA, 19 nt, Artificial Sequence
  Description of Artificial Sequence: Synthetic oligonucleotide
uggucacgguuuuaagggu

SEQ ID NO: 2282457 - RNA, 19 nt, Artificial Sequence
  Description of Artificial Sequence: Synthetic oligonucleotide
  modified_base (2)..(2): a, c, u, g, unknown or other
cngaguggaaucugcucuc

SEQ ID NO: 2282458 - RNA, 19 nt, Artificial Sequence
  Description of Artificial Sequence: Synthetic oligonucleotide
aucagacaauguaaugaug

SEQ ID NO: 2282459 - RNA, 19 nt, Artificial Sequence
  Description of Artificial Sequence: Synthetic oligonucleotide
gugugacuuuaacuguccc

SEQ ID NO: 2282460 - RNA, 19 nt, Artificial Sequence
  Description of Artificial Sequence: Synthetic oligonucleotide
uugugugugcaaggcacug

SEQ ID NO: 2282461 - RNA, 19 nt, Artificial Sequence
  Description of Artificial Sequence: Synthetic oligonucleotide
ccaaguggcaacagguaag

SEQ ID NO: 2282462 - RNA, 19 nt, Artificial Sequence
  Description of Artificial Sequence: Synthetic oligonucleotide
gcaagcauuaacacgguga

SEQ ID NO: 2282463 - RNA, 19 nt, Artificial Sequence
  Description of Artificial Sequence: Synthetic oligonucleotide
  modified_base (10)..(10): a, c, u, g, unknown or other
gucaugaucngaguggaau

SEQ ID NO: 2282464 - RNA, 19 nt, Artificial Sequence
  Description of Artificial Sequence: Synthetic oligonucleotide
uuggcaccauaaugaaccu

SEQ ID NO: 2282465 - RNA, 19 nt, Artificial Sequence
  Description of Artificial Sequence: Synthetic oligonucleotide
cuaggugugcccuuuauuu

SEQ ID NO: 2282466 - RNA, 19 nt, Artificial Sequence
  Description of Artificial Sequence: Synthetic oligonucleotide
aacagucgaggagcgagaa

SEQ ID NO: 2282467 - RNA, 19 nt, Artificial Sequence
  Description of Artificial Sequence: Synthetic oligonucleotide
ggaaucugcucuccaggag

SEQ ID NO: 2282468 - RNA, 19 nt, Artificial Sequence
  Description of Artificial Sequence: Synthetic oligonucleotide
agaaaccaagcuugaucau

SEQ ID NO: 2282469 - RNA, 19 nt, Artificial Sequence
  Description of Artificial Sequence: Synthetic oligonucleotide
agcguugauguaaucacau

SEQ ID NO: 2282470 - RNA, 19 nt, Artificial Sequence
  Description of Artificial Sequence: Synthetic oligonucleotide
aagcauuaacacggugaca

SEQ ID NO: 2282471 - RNA, 19 nt, Artificial Sequence
  Description of Artificial Sequence: Synthetic oligonucleotide
acagucgaggagcgagaag

SEQ ID NO: 2282472 - RNA, 19 nt, Artificial Sequence
  Description of Artificial Sequence: Synthetic oligonucleotide
ccacuuggcaccauaauga

SEQ ID NO: 2282473 - RNA, 19 nt, Artificial Sequence
  Description of Artificial Sequence: Synthetic oligonucleotide
ugugugcaaggcacuguau

SEQ ID NO: 2282474 - RNA, 19 nt, Artificial Sequence
  Description of Artificial Sequence: Synthetic oligonucleotide
aucuagcguugauguaauc

SEQ ID NO: 2282475 - RNA, 19 nt, Artificial Sequence
  Description of Artificial Sequence: Synthetic oligonucleotide
gggugguuuaaguagucuc

SEQ ID NO: 2282476 - RNA, 19 nt, Artificial Sequence
  Description of Artificial Sequence: Synthetic oligonucleotide
acaaucuaguaagggcucu

SEQ ID NO: 2282477 - RNA, 19 nt, Artificial Sequence
  Description of Artificial Sequence: Synthetic oligonucleotide
gaagaugaaccagugcagu

SEQ ID NO: 2282478 - RNA, 19 nt, Artificial Sequence
  Description of Artificial Sequence: Synthetic oligonucleotide
acagguaaguugagaagga

SEQ ID NO: 2282479 - RNA, 19 nt, Artificial Sequence
  Description of Artificial Sequence: Synthetic oligonucleotide
auaugcugggguugagaau

SEQ ID NO: 2282480 - RNA, 19 nt, Artificial Sequence
  Description of Artificial Sequence: Synthetic oligonucleotide
cgucaaaccagcuccgggg

SEQ ID NO: 2282481 - RNA, 19 nt, Artificial Sequence
  Description of Artificial Sequence: Synthetic oligonucleotide
auauuccaaguggcaacag

SEQ ID NO: 2282482 - RNA, 19 nt, Artificial Sequence
  Description of Artificial Sequence: Synthetic oligonucleotide
uagucucuggcuccucaau

SEQ ID NO: 2282483 - RNA, 19 nt, Artificial Sequence
  Description of Artificial Sequence: Synthetic oligonucleotide
aggagcgagaagaggaaca

SEQ ID NO: 2282484 - RNA, 19 nt, Artificial Sequence
  Description of Artificial Sequence: Synthetic oligonucleotide
ugugugugcaaggcacugu

SEQ ID NO: 2282485 - RNA, 19 nt, Artificial Sequence
  Description of Artificial Sequence: Synthetic oligonucleotide
agcgcacaaucuaguaagg

SEQ ID NO: 2282486 - RNA, 19 nt, Artificial Sequence
  Description of Artificial Sequence: Synthetic oligonucleotide
guuggcuucaaccccggcu

SEQ ID NO: 2282487 - RNA, 19 nt, Artificial Sequence
  Description of Artificial Sequence: Synthetic oligonucleotide
caugugugacuuuaacugu

SEQ ID NO: 2282488 - RNA, 19 nt, Artificial Sequence
  Description of Artificial Sequence: Synthetic oligonucleotide
gaaucauacuauagagaua

SEQ ID NO: 2282489 - RNA, 19 nt, Artificial Sequence
  Description of Artificial Sequence: Synthetic oligonucleotide
cauaaugaaccuguauaua

SEQ ID NO: 2282490 - RNA, 19 nt, Artificial Sequence
  Description of Artificial Sequence: Synthetic oligonucleotide
acacucccauguuaccacu

SEQ ID NO: 2282491 - RNA, 19 nt, Artificial Sequence
  Description of Artificial Sequence: Synthetic oligonucleotide
gagcgagaagaggaacacc

SEQ ID NO: 2282492 - RNA, 19 nt, Artificial Sequence
  Description of Artificial Sequence: Synthetic oligonucleotide
uucauaugcugggguugag

SEQ ID NO: 2282493 - RNA, 19 nt, Artificial Sequence
  Description of Artificial Sequence: Synthetic oligonucleotide
uccuaggugugcccuuuau

SEQ ID NO: 2282494 - RNA, 19 nt, Artificial Sequence
  Description of Artificial Sequence: Synthetic oligonucleotide
  modified_base (17)..(17): a, c, u, g, unknown or other
caauacagucaugaucnga

SEQ ID NO: 2282495 - RNA, 19 nt, Artificial Sequence
  Description of Artificial Sequence: Synthetic oligonucleotide
cauacaaagccagcacaca

SEQ ID NO: 2282496 - RNA, 19 nt, Artificial Sequence
  Description of Artificial Sequence: Synthetic oligonucleotide
guuaccacuuggcaccaua

SEQ ID NO: 2282497 - RNA, 19 nt, Artificial Sequence
  Description of Artificial Sequence: Synthetic oligonucleotide
acacggugacaauggugug

SEQ ID NO: 2282498 - RNA, 19 nt, Artificial Sequence
  Description of Artificial Sequence: Synthetic oligonucleotide
ccucaauugugcaguguag

SEQ ID NO: 2282499 - RNA, 19 nt, Artificial Sequence
  Description of Artificial Sequence: Synthetic oligonucleotide
uauuaggcuccaggagaga

SEQ ID NO: 2282500 - RNA, 19 nt, Artificial Sequence
  Description of Artificial Sequence: Synthetic oligonucleotide
acuguccccgauuguguau

SEQ ID NO: 2282501 - RNA, 19 nt, Artificial Sequence
  Description of Artificial Sequence: Synthetic oligonucleotide
uauuacccacuuguuuaau

SEQ ID NO: 2282502 - RNA, 19 nt, Artificial Sequence
  Description of Artificial Sequence: Synthetic oligonucleotide
ggaagaugagcgcgcaaca

SEQ ID NO: 2282503 - RNA, 19 nt, Artificial Sequence
  Description of Artificial Sequence: Synthetic oligonucleotide
aagcaagcauuaacacggu

SEQ ID NO: 2282504 - RNA, 19 nt, Artificial Sequence
  Description of Artificial Sequence: Synthetic oligonucleotide
cuucauaugcugggguuga

SEQ ID NO: 2282505 - RNA, 19 nt, Artificial Sequence
  Description of Artificial Sequence: Synthetic oligonucleotide
agggugguuuaaguagucu

SEQ ID NO: 2282506 - RNA, 19 nt, Artificial Sequence
  Description of Artificial Sequence: Synthetic oligonucleotide
augaucuagcguugaugua

SEQ ID NO: 2282507 - RNA, 19 nt, Artificial Sequence
  Description of Artificial Sequence: Synthetic oligonucleotide
  modified_base (5)..(5): a, c, u, g, unknown or other
gaucngaguggaaucugcu

SEQ ID NO: 2282508 - RNA, 19 nt, Artificial Sequence
  Description of Artificial Sequence: Synthetic oligonucleotide
caaucuaguaagggcucuc

SEQ ID NO: 2282509 - RNA, 19 nt, Artificial Sequence
  Description of Artificial Sequence: Synthetic oligonucleotide
  modified_base (12)..(12): a, c, u, g, unknown or other
cagucaugaucngagugga

SEQ ID NO: 2282510 - RNA, 19 nt, Artificial Sequence
  Description of Artificial Sequence: Synthetic oligonucleotide
ggucacgguuuuaagggug

SEQ ID NO: 2282511 - RNA, 19 nt, Artificial Sequence
  Description of Artificial Sequence: Synthetic oligonucleotide
gguugagaaucagaaaucu

SEQ ID NO: 2282512 - RNA, 19 nt, Artificial Sequence
  Description of Artificial Sequence: Synthetic oligonucleotide
aucugcucuccaggagcgc

SEQ ID NO: 2282513 - RNA, 19 nt, Artificial Sequence
  Description of Artificial Sequence: Synthetic oligonucleotide
aagcuugaucauggcuucu

SEQ ID NO: 2282514 - RNA, 19 nt, Artificial Sequence
  Description of Artificial Sequence: Synthetic oligonucleotide
guugagaaucagaaaucua

SEQ ID NO: 2282515 - RNA, 19 nt, Artificial Sequence
  Description of Artificial Sequence: Synthetic oligonucleotide
gugugugcaaggcacugua

SEQ ID NO: 2282516 - RNA, 19 nt, Artificial Sequence
  Description of Artificial Sequence: Synthetic oligonucleotide
ggucagcucugguauuacc

SEQ ID NO: 2282517 - RNA, 19 nt, Artificial Sequence
  Description of Artificial Sequence: Synthetic oligonucleotide
cucugguauuacccacuug

SEQ ID NO: 2282518 - RNA, 19 nt, Artificial Sequence
  Description of Artificial Sequence: Synthetic oligonucleotide
ggagcgcacaaucuaguaa

SEQ ID NO: 2282519 - RNA, 19 nt, Artificial Sequence
  Description of Artificial Sequence: Synthetic oligonucleotide
ggcaccauaaugaaccugu

SEQ ID NO: 2282520 - RNA, 19 nt, Artificial Sequence
  Description of Artificial Sequence: Synthetic oligonucleotide
gcaaggcacuguauuaggc

SEQ ID NO: 2282521 - RNA, 19 nt, Artificial Sequence
  Description of Artificial Sequence: Synthetic oligonucleotide
caauugugcaguguagugu

SEQ ID NO: 2282522 - RNA, 19 nt, Artificial Sequence
  Description of Artificial Sequence: Synthetic oligonucleotide
gcaacaugaucuagcguug

SEQ ID NO: 2282523 - RNA, 19 nt, Artificial Sequence
  Description of Artificial Sequence: Synthetic oligonucleotide
gcacaaucuaguaagggcu

SEQ ID NO: 2282524 - RNA, 19 nt, Artificial Sequence
  Description of Artificial Sequence: Synthetic oligonucleotide
  modified_base (8)..(8): a, c, u, g, unknown or other
caugaucngaguggaaucu

SEQ ID NO: 2282525 - RNA, 19 nt, Artificial Sequence
  Description of Artificial Sequence: Synthetic oligonucleotide
gacuuuaacuguccccgau

SEQ ID NO: 2282526 - RNA, 19 nt, Artificial Sequence
  Description of Artificial Sequence: Synthetic oligonucleotide
ggguugagaaucagaaauc

SEQ ID NO: 2282527 - RNA, 19 nt, Artificial Sequence
  Description of Artificial Sequence: Synthetic oligonucleotide
gcgcacaaucuaguaaggg

SEQ ID NO: 2282528 - RNA, 19 nt, Artificial Sequence
  Description of Artificial Sequence: Synthetic oligonucleotide
agcgcgcaacagucgagga

SEQ ID NO: 2282529 - RNA, 19 nt, Artificial Sequence
  Description of Artificial Sequence: Synthetic oligonucleotide
cagcuucagucauuuauua

SEQ ID NO: 2282530 - RNA, 19 nt, Artificial Sequence
  Description of Artificial Sequence: Synthetic oligonucleotide
ugcugggguugagaaucag

SEQ ID NO: 2282531 - RNA, 19 nt, Artificial Sequence
  Description of Artificial Sequence: Synthetic oligonucleotide
cucaauugugcaguguagu

SEQ ID NO: 2282532 - RNA, 19 nt, Artificial Sequence
  Description of Artificial Sequence: Synthetic oligonucleotide
guagucucuggcuccucaa

SEQ ID NO: 2282533 - RNA, 19 nt, Artificial Sequence
  Description of Artificial Sequence: Synthetic oligonucleotide
augguguggccggucagcu

SEQ ID NO: 2282534 - RNA, 19 nt, Artificial Sequence
  Description of Artificial Sequence: Synthetic oligonucleotide
caacagucgaggagcgaga

SEQ ID NO: 2282535 - RNA, 19 nt, Artificial Sequence
  Description of Artificial Sequence: Synthetic oligonucleotide
gaacaccaccgccuccauc

SEQ ID NO: 2282536 - RNA, 19 nt, Artificial Sequence
  Description of Artificial Sequence: Synthetic oligonucleotide
cgcccgucaaaccagcucc

SEQ ID NO: 2282537 - RNA, 19 nt, Artificial Sequence
  Description of Artificial Sequence: Synthetic oligonucleotide
ggugguuuaaguagucucu

SEQ ID NO: 2282538 - RNA, 19 nt, Artificial Sequence
  Description of Artificial Sequence: Synthetic oligonucleotide
gcagguagaaaccaagcuu

SEQ ID NO: 2282539 - RNA, 19 nt, Artificial Sequence
  Description of Artificial Sequence: Synthetic oligonucleotide
guaaguugagaaggaagau

SEQ ID NO: 2282540 - RNA, 19 nt, Artificial Sequence
  Description of Artificial Sequence: Synthetic oligonucleotide
ucacgguuuuaaggguggu

SEQ ID NO: 2282541 - RNA, 19 nt, Artificial Sequence
  Description of Artificial Sequence: Synthetic oligonucleotide
cuccgcccgucaaaccagc

SEQ ID NO: 2282542 - RNA, 19 nt, Artificial Sequence
  Description of Artificial Sequence: Synthetic oligonucleotide
gguuuuaagggugguuuaa

SEQ ID NO: 2282543 - RNA, 19 nt, Artificial Sequence
  Description of Artificial Sequence: Synthetic oligonucleotide
gacaaugguguggccgguc

SEQ ID NO: 2282544 - RNA, 19 nt, Artificial Sequence
  Description of Artificial Sequence: Synthetic oligonucleotide
cgcgcaacagucgaggagc

SEQ ID NO: 2282545 - RNA, 19 nt, Artificial Sequence
  Description of Artificial Sequence: Synthetic oligonucleotide
uguggccggucagcucugg

SEQ ID NO: 2282546 - RNA, 19 nt, Artificial Sequence
  Description of Artificial Sequence: Synthetic oligonucleotide
auacugcuauggucacggu

SEQ ID NO: 2282547 - RNA, 19 nt, Artificial Sequence
  Description of Artificial Sequence: Synthetic oligonucleotide
ccgucaaaccagcuccggg

SEQ ID NO: 2282548 - RNA, 19 nt, Artificial Sequence
  Description of Artificial Sequence: Synthetic oligonucleotide
uggcuucaaccccggcuuc

SEQ ID NO: 2282549 - RNA, 19 nt, Artificial Sequence
  Description of Artificial Sequence: Synthetic oligonucleotide
ccauaaugaaccuguauau

SEQ ID NO: 2282550 - RNA, 19 nt, Artificial Sequence
  Description of Artificial Sequence: Synthetic oligonucleotide
augaaccagugcagugaag

SEQ ID NO: 2282551 - RNA, 19 nt, Artificial Sequence
  Description of Artificial Sequence: Synthetic oligonucleotide
gagcaacaugaucuagcgu

SEQ ID NO: 2282552 - RNA, 19 nt, Artificial Sequence
  Description of Artificial Sequence: Synthetic oligonucleotide
uccgcccgucaaaccagcu

SEQ ID NO: 2282553 - RNA, 19 nt, Artificial Sequence
  Description of Artificial Sequence: Synthetic oligonucleotide
ugacaaugguguggccggu

SEQ ID NO: 2282554 - RNA, 19 nt, Artificial Sequence
  Description of Artificial Sequence: Synthetic oligonucleotide
aucauacuauagagauaca

SEQ ID NO: 2282555 - RNA, 19 nt, Artificial Sequence
  Description of Artificial Sequence: Synthetic oligonucleotide
ucuccuaggugugcccuuu

SEQ ID NO: 2282556 - RNA, 19 nt, Artificial Sequence
  Description of Artificial Sequence: Synthetic oligonucleotide
gaucuagcguugauguaau

SEQ ID NO: 2282557 - RNA, 19 nt, Artificial Sequence
  Description of Artificial Sequence: Synthetic oligonucleotide
caacaugaucuagcguuga

SEQ ID NO: 2282558 - RNA, 19 nt, Artificial Sequence
  Description of Artificial Sequence: Synthetic oligonucleotide
ccaagcuugaucauggcuu

SEQ ID NO: 2282559 - RNA, 19 nt, Artificial Sequence
  Description of Artificial Sequence: Synthetic oligonucleotide
caaccccggcuucuccagc

SEQ ID NO: 2282560 - RNA, 19 nt, Artificial Sequence
  Description of Artificial Sequence: Synthetic oligonucleotide
agguuggcuucaaccccgg

SEQ ID NO: 2282561 - RNA, 19 nt, Artificial Sequence
  Description of Artificial Sequence: Synthetic oligonucleotide
uaguguagguuggcuucaa

SEQ ID NO: 2282562 - RNA, 19 nt, Artificial Sequence
  Description of Artificial Sequence: Synthetic oligonucleotide
gcgcgcaacagucgaggag

SEQ ID NO: 2282563 - RNA, 19 nt, Artificial Sequence
  Description of Artificial Sequence: Synthetic oligonucleotide
cagguaaguugagaaggaa

SEQ ID NO: 2282564 - RNA, 19 nt, Artificial Sequence
  Description of Artificial Sequence: Synthetic oligonucleotide
agcacacauuccugccuuu

SEQ ID NO: 2282565 - RNA, 19 nt, Artificial Sequence
  Description of Artificial Sequence: Synthetic oligonucleotide
ccccgauuguguauuucug

SEQ ID NO: 2282566 - RNA, 19 nt, Artificial Sequence
  Description of Artificial Sequence: Synthetic oligonucleotide
uguccccgauuguguauuu

SEQ ID NO: 2282567 - RNA, 19 nt, Artificial Sequence
  Description of Artificial Sequence: Synthetic oligonucleotide
gcuuguuauucaacagcca

SEQ ID NO: 2282568 - RNA, 19 nt, Artificial Sequence
  Description of Artificial Sequence: Synthetic oligonucleotide
caccauaaugaaccuguau

SEQ ID NO: 2282569 - RNA, 19 nt, Artificial Sequence
  Description of Artificial Sequence: Synthetic oligonucleotide
ggcucuccuaggugugccc

SEQ ID NO: 2282570 - RNA, 19 nt, Artificial Sequence
  Description of Artificial Sequence: Synthetic oligonucleotide
  modified_base (11)..(11): a, c, u, g, unknown or other
agucaugaucngaguggaa

SEQ ID NO: 2282571 - RNA, 19 nt, Artificial Sequence
  Description of Artificial Sequence: Synthetic oligonucleotide
ugcuauggucacgguuuua

SEQ ID NO: 2282572 - RNA, 19 nt, Artificial Sequence
  Description of Artificial Sequence: Synthetic oligonucleotide
caccuucauaugcuggggu

SEQ ID NO: 2282573 - RNA, 19 nt, Artificial Sequence
  Description of Artificial Sequence: Synthetic oligonucleotide
gcugggguugagaaucaga

SEQ ID NO: 2282574 - RNA, 19 nt, Artificial Sequence
  Description of Artificial Sequence: Synthetic oligonucleotide
cugguauuacccacuuguu

SEQ ID NO: 2282575 - RNA, 19 nt, Artificial Sequence
  Description of Artificial Sequence: Synthetic oligonucleotide
augcugggguugagaauca

SEQ ID NO: 2282576 - RNA, 19 nt, Artificial Sequence
  Description of Artificial Sequence: Synthetic oligonucleotide
gguuggcuucaaccccggc

SEQ ID NO: 2282577 - RNA, 19 nt, Artificial Sequence
  Description of Artificial Sequence: Synthetic oligonucleotide
gcuccgcccgucaaaccag

SEQ ID NO: 2282578 - RNA, 19 nt, Artificial Sequence
  Description of Artificial Sequence: Synthetic oligonucleotide
gcccuuuauuucuguggca

SEQ ID NO: 2282579 - RNA, 19 nt, Artificial Sequence
  Description of Artificial Sequence: Synthetic oligonucleotide
gcgcaacagucgaggagcg

SEQ ID NO: 2282580 - RNA, 19 nt, Artificial Sequence
  Description of Artificial Sequence: Synthetic oligonucleotide
uguuaccacuuggcaccau

SEQ ID NO: 2282581 - RNA, 19 nt, Artificial Sequence
  Description of Artificial Sequence: Synthetic oligonucleotide
guccccgauuguguauuuc

SEQ ID NO: 2282582 - RNA, 19 nt, Artificial Sequence
  Description of Artificial Sequence: Synthetic oligonucleotide
ggcacuguauuaggcucca

SEQ ID NO: 2282583 - RNA, 19 nt, Artificial Sequence
  Description of Artificial Sequence: Synthetic oligonucleotide
gggcucuccuaggugugcc

SEQ ID NO: 2282584 - RNA, 19 nt, Artificial Sequence
  Description of Artificial Sequence: Synthetic oligonucleotide
gcccgucaaaccagcuccg

SEQ ID NO: 2282585 - RNA, 19 nt, Artificial Sequence
  Description of Artificial Sequence: Synthetic oligonucleotide
cccgauuguguauuucugu

SEQ ID NO: 2282586 - RNA, 19 nt, Artificial Sequence
  Description of Artificial Sequence: Synthetic oligonucleotide
ggccggucagcucugguau

SEQ ID NO: 2282587 - RNA, 19 nt, Artificial Sequence
  Description of Artificial Sequence: Synthetic oligonucleotide
gguagaaaccaagcuugau

SEQ ID NO: 2282588 - RNA, 19 nt, Artificial Sequence
  Description of Artificial Sequence: Synthetic oligonucleotide
cagcacacauuccugccuu

SEQ ID NO: 2282589 - RNA, 19 nt, Artificial Sequence
  Description of Artificial Sequence: Synthetic oligonucleotide
cccgucaaaccagcuccgg

SEQ ID NO: 2282590 - RNA, 19 nt, Artificial Sequence
  Description of Artificial Sequence: Synthetic oligonucleotide
gcagugaagcaagcauuaa

SEQ ID NO: 2282591 - RNA, 19 nt, Artificial Sequence
  Description of Artificial Sequence: Synthetic oligonucleotide
gcuucaaccccggcuucuc

SEQ ID NO: 2282592 - RNA, 19 nt, Artificial Sequence
  Description of Artificial Sequence: Synthetic oligonucleotide
gccgcuccgcccgucaaac

SEQ ID NO: 2282593 - RNA, 19 nt, Artificial Sequence
  Description of Artificial Sequence: Synthetic oligonucleotide
ccgcccgucaaaccagcuc

SEQ ID NO: 2282594 - RNA, 19 nt, Artificial Sequence
  Description of Artificial Sequence: Synthetic oligonucleotide
guguggccggucagcucug

SEQ ID NO: 2282595 - RNA, 19 nt, Artificial Sequence
  Description of Artificial Sequence: Synthetic oligonucleotide
gugcaguguaguguagguu

SEQ ID NO: 2282596 - RNA, 19 nt, Artificial Sequence
  Description of Artificial Sequence: Synthetic oligonucleotide
cgcuccgcccgucaaacca

SEQ ID NO: 2282597 - RNA, 19 nt, Artificial Sequence
  Description of Artificial Sequence: Synthetic oligonucleotide
cacucccauguuaccacuu

SEQ ID NO: 2282598 - RNA, 19 nt, Artificial Sequence
  Description of Artificial Sequence: Synthetic oligonucleotide
cuguccccgauuguguauu

SEQ ID NO: 2282599 - RNA, 19 nt, Artificial Sequence
  Description of Artificial Sequence: Synthetic oligonucleotide
gcucugguauuacccacuu

SEQ ID NO: 2282600 - RNA, 19 nt, Artificial Sequence
  Description of Artificial Sequence: Synthetic oligonucleotide
cuccuaggugugcccuuua

SEQ ID NO: 2282601 - RNA, 19 nt, Artificial Sequence
  Description of Artificial Sequence: Synthetic oligonucleotide
ccagcacacauuccugccu

SEQ ID NO: 2282602 - RNA, 19 nt, Artificial Sequence
  Description of Artificial Sequence: Synthetic oligonucleotide
cacgguuuuaagggugguu

SEQ ID NO: 2282603 - RNA, 19 nt, Artificial Sequence
  Description of Artificial Sequence: Synthetic oligonucleotide
cugcuauggucacgguuuu

SEQ ID NO: 2282604 - RNA, 19 nt, Artificial Sequence
  Description of Artificial Sequence: Synthetic oligonucleotide
ggggccgcgccgccgggac

SEQ ID NO: 2282605 - RNA, 19 nt, Artificial Sequence
  Description of Artificial Sequence: Synthetic oligonucleotide
gcaccauaaugaaccugua

SEQ ID NO: 2282606 - RNA, 19 nt, Artificial Sequence
  Description of Artificial Sequence: Synthetic oligonucleotide
guggccggucagcucuggu

SEQ ID NO: 2282607 - RNA, 19 nt, Artificial Sequence
  Description of Artificial Sequence: Synthetic oligonucleotide
cucuccuaggugugcccuu

SEQ ID NO: 2282608 - RNA, 19 nt, Artificial Sequence
  Description of Artificial Sequence: Synthetic oligonucleotide
ccgcuccgcccgucaaacc

SEQ ID NO: 2282609 - RNA, 19 nt, Artificial Sequence
  Description of Artificial Sequence: Synthetic oligonucleotide
ccuaggugugcccuuuauu

SEQ ID NO: 2282610 - RNA, 19 nt, Artificial Sequence
  Description of Artificial Sequence: Synthetic oligonucleotide
cggugacaaugguguggcc

SEQ ID NO: 2282611 - RNA, 19 nt, Artificial Sequence
  Description of Artificial Sequence: Synthetic oligonucleotide
cggucagcucugguauuac

SEQ ID NO: 2282612 - RNA, 19 nt, Artificial Sequence
  Description of Artificial Sequence: Synthetic oligonucleotide
ccggucagcucugguauua

SEQ ID NO: 2282613 - RNA, 19 nt, Artificial Sequence
  Description of Artificial Sequence: Synthetic oligonucleotide
cgccgggacaggcggcaug

SEQ ID NO: 2282614 - RNA, 19 nt, Artificial Sequence
  Description of Artificial Sequence: Synthetic oligonucleotide
cgccuccauccuccgccgc

SEQ ID NO: 2282615 - RNA, 19 nt, Artificial Sequence
  Description of Artificial Sequence: Synthetic oligonucleotide
cgcaacagucgaggagcga

SEQ ID NO: 2282616 - RNA, 19 nt, Artificial Sequence
  Description of Artificial Sequence: Synthetic oligonucleotide
cggggccgcgccgccggga

SEQ ID NO: 2282617 - RNA, 19 nt, Artificial Sequence
  Description of Artificial Sequence: Synthetic oligonucleotide
ccgccgggacaggcggcau

SEQ ID NO: 2282618 - RNA, 19 nt, Artificial Sequence
  Description of Artificial Sequence: Synthetic oligonucleotide
  modified_base (1)..(1): a, c, u, g, unknown or other
ngaguggaaucugcucucc

SEQ ID NO: 2282619 - RNA, 19 nt, Artificial Sequence
  Description of Artificial Sequence: Synthetic oligonucleotide
uccaauaacgccaugaccg

SEQ ID NO: 2282620 - RNA, 19 nt, Artificial Sequence
  Description of Artificial Sequence: Synthetic oligonucleotide
aacauuuguccugagagcc

SEQ ID NO: 2282621 - RNA, 19 nt, Artificial Sequence
  Description of Artificial Sequence: Synthetic oligonucleotide
agaacauuuguccugagag

SEQ ID NO: 2282622 - RNA, 19 nt, Artificial Sequence
  Description of Artificial Sequence: Synthetic oligonucleotide
gagguuuccacuuucaccc

SEQ ID NO: 2282623 - RNA, 19 nt, Artificial Sequence
  Description of Artificial Sequence: Synthetic oligonucleotide
uaaggguuaaucucgauca

SEQ ID NO: 2282624 - RNA, 19 nt, Artificial Sequence
  Description of Artificial Sequence: Synthetic oligonucleotide
uuuucauccacguaguaga

SEQ ID NO: 2282625 - RNA, 19 nt, Artificial Sequence
  Description of Artificial Sequence: Synthetic oligonucleotide
aagcgaaagccacagcacc

SEQ ID NO: 2282626 - RNA, 19 nt, Artificial Sequence
  Description of Artificial Sequence: Synthetic oligonucleotide
agcgccuccgcacagaucc

SEQ ID NO: 2282627 - RNA, 19 nt, Artificial Sequence
  Description of Artificial Sequence: Synthetic oligonucleotide
ugaagcgaaagccacagca

SEQ ID NO: 2282628 - RNA, 19 nt, Artificial Sequence
  Description of Artificial Sequence: Synthetic oligonucleotide
uguaaguccccgcagaggc

SEQ ID NO: 2282629 - RNA, 19 nt, Artificial Sequence
  Description of Artificial Sequence: Synthetic oligonucleotide
ugcacaauagcccugcggc

SEQ ID NO: 2282630 - RNA, 19 nt, Artificial Sequence
  Description of Artificial Sequence: Synthetic oligonucleotide
aacgccaugaccguucagc

SEQ ID NO: 2282631 - RNA, 19 nt, Artificial Sequence
  Description of Artificial Sequence: Synthetic oligonucleotide
aacauuccuuucuugauca

SEQ ID NO: 2282632 - RNA, 19 nt, Artificial Sequence
  Description of Artificial Sequence: Synthetic oligonucleotide
uuguucacccuuaaggugc

SEQ ID NO: 2282633 - RNA, 19 nt, Artificial Sequence
  Description of Artificial Sequence: Synthetic oligonucleotide
gauaguacagccugcauuc

SEQ ID NO: 2282634 - RNA, 19 nt, Artificial Sequence
  Description of Artificial Sequence: Synthetic oligonucleotide
gaggggaggaaccagaacc

SEQ ID NO: 2282635 - RNA, 19 nt, Artificial Sequence
  Description of Artificial Sequence: Synthetic oligonucleotide
aggaagugaagcgaaagcc

SEQ ID NO: 2282636 - RNA, 19 nt, Artificial Sequence
  Description of Artificial Sequence: Synthetic oligonucleotide
aaucugaacauuccuuucu

SEQ ID NO: 2282637 - RNA, 19 nt, Artificial Sequence
  Description of Artificial Sequence: Synthetic oligonucleotide
agaauagcagucucugugg

SEQ ID NO: 2282638 - RNA, 19 nt, Artificial Sequence
  Description of Artificial Sequence: Synthetic oligonucleotide
uguccugagagccuagucc

SEQ ID NO: 2282639 - RNA, 19 nt, Artificial Sequence
  Description of Artificial Sequence: Synthetic oligonucleotide
guuaaucucgaucaccuug

SEQ ID NO: 2282640 - RNA, 19 nt, Artificial Sequence
  Description of Artificial Sequence: Synthetic oligonucleotide
gaaacuguagugucccggg

SEQ ID NO: 2282641 - RNA, 19 nt, Artificial Sequence
  Description of Artificial Sequence: Synthetic oligonucleotide
uccacuuucacccaaccau

SEQ ID NO: 2282642 - RNA, 19 nt, Artificial Sequence
  Description of Artificial Sequence: Synthetic oligonucleotide
uacauauugacaacgccuc

SEQ ID NO: 2282643 - RNA, 19 nt, Artificial Sequence
  Description of Artificial Sequence: Synthetic oligonucleotide
uuaaucucgaucaccuugu

SEQ ID NO: 2282644 - RNA, 19 nt, Artificial Sequence
  Description of Artificial Sequence: Synthetic oligonucleotide
guacuugugcaucagauca

SEQ ID NO: 2282645 - RNA, 19 nt, Artificial Sequence
  Description of Artificial Sequence: Synthetic oligonucleotide
aauaacgccaugaccguuc

SEQ ID NO: 2282646 - RNA, 19 nt, Artificial Sequence
  Description of Artificial Sequence: Synthetic oligonucleotide
ucauccacguaguagaguc

SEQ ID NO: 2282647 - RNA, 19 nt, Artificial Sequence
  Description of Artificial Sequence: Synthetic oligonucleotide
acugacaucagagguuucc

SEQ ID NO: 2282648 - RNA, 19 nt, Artificial Sequence
  Description of Artificial Sequence: Synthetic oligonucleotide
aaggcuagugugguugugc

SEQ ID NO: 2282649 - RNA, 19 nt, Artificial Sequence
  Description of Artificial Sequence: Synthetic oligonucleotide
uggagcaucauguuggaaa

SEQ ID NO: 2282650 - RNA, 19 nt, Artificial Sequence
  Description of Artificial Sequence: Synthetic oligonucleotide
ucaugugguacauauugac

SEQ ID NO: 2282651 - RNA, 19 nt, Artificial Sequence
  Description of Artificial Sequence: Synthetic oligonucleotide
cacgaugacuccaugcugg

SEQ ID NO: 2282652 - RNA, 19 nt, Artificial Sequence
  Description of Artificial Sequence: Synthetic oligonucleotide
caucagaucacugacauca

SEQ ID NO: 2282653 - RNA, 19 nt, Artificial Sequence
  Description of Artificial Sequence: Synthetic oligonucleotide
ugaucaccaccaaaggacc

SEQ ID NO: 2282654 - RNA, 19 nt, Artificial Sequence
  Description of Artificial Sequence: Synthetic oligonucleotide
aaggguuaaucucgaucac

SEQ ID NO: 2282655 - RNA, 19 nt, Artificial Sequence
  Description of Artificial Sequence: Synthetic oligonucleotide
auugacaacgccuccagaa

SEQ ID NO: 2282656 - RNA, 19 nt, Artificial Sequence
  Description of Artificial Sequence: Synthetic oligonucleotide
cagaauagcagucucugug

SEQ ID NO: 2282657 - RNA, 19 nt, Artificial Sequence
  Description of Artificial Sequence: Synthetic oligonucleotide
ugcaucagaucacugacau

SEQ ID NO: 2282658 - RNA, 19 nt, Artificial Sequence
  Description of Artificial Sequence: Synthetic oligonucleotide
ucggacaaggaagugaagc

SEQ ID NO: 2282659 - RNA, 19 nt, Artificial Sequence
  Description of Artificial Sequence: Synthetic oligonucleotide
gauguaaguccccgcagag

SEQ ID NO: 2282660 - RNA, 19 nt, Artificial Sequence
  Description of Artificial Sequence: Synthetic oligonucleotide
ucaaucugaacauuccuuu

SEQ ID NO: 2282661 - RNA, 19 nt, Artificial Sequence
  Description of Artificial Sequence: Synthetic oligonucleotide
ucucaaucugaacauuccu

SEQ ID NO: 2282662 - RNA, 19 nt, Artificial Sequence
  Description of Artificial Sequence: Synthetic oligonucleotide
guaguagaguccuggaccc

SEQ ID NO: 2282663 - RNA, 19 nt, Artificial Sequence
  Description of Artificial Sequence: Synthetic oligonucleotide
ugguacauauugacaacgc

SEQ ID NO: 2282664 - RNA, 19 nt, Artificial Sequence
  Description of Artificial Sequence: Synthetic oligonucleotide
agugucccggguccgagcc

SEQ ID NO: 2282665 - RNA, 19 nt, Artificial Sequence
  Description of Artificial Sequence: Synthetic oligonucleotide
aaggaccucaggaaguccg

SEQ ID NO: 2282666 - RNA, 19 nt, Artificial Sequence
  Description of Artificial Sequence: Synthetic oligonucleotide
ugauguaaguccccgcaga

SEQ ID NO: 2282667 - RNA, 19 nt, Artificial Sequence
  Description of Artificial Sequence: Synthetic oligonucleotide
uugaaggcuagugugguug

SEQ ID NO: 2282668 - RNA, 19 nt, Artificial Sequence
  Description of Artificial Sequence: Synthetic oligonucleotide
ucucggacaaggaagugaa

SEQ ID NO: 2282669 - RNA, 19 nt, Artificial Sequence
  Description of Artificial Sequence: Synthetic oligonucleotide
cacagauccaauaacgcca

SEQ ID NO: 2282670 - RNA, 19 nt, Artificial Sequence
  Description of Artificial Sequence: Synthetic oligonucleotide
uccaucaccccauaugcgu

SEQ ID NO: 2282671 - RNA, 19 nt, Artificial Sequence
  Description of Artificial Sequence: Synthetic oligonucleotide
agcagguaaggguuaaucu

SEQ ID NO: 2282672 - RNA, 19 nt, Artificial Sequence
  Description of Artificial Sequence: Synthetic oligonucleotide
aggguuaaucucgaucacc

SEQ ID NO: 2282673 - RNA, 19 nt, Artificial Sequence
  Description of Artificial Sequence: Synthetic oligonucleotide
gauccgucgacucucggac

SEQ ID NO: 2282674 - RNA, 19 nt, Artificial Sequence
  Description of Artificial Sequence: Synthetic oligonucleotide
acguaguagaguccuggac

SEQ ID NO: 2282675 - RNA, 19 nt, Artificial Sequence
  Description of Artificial Sequence: Synthetic oligonucleotide
aggcuagugugguugugcc

SEQ ID NO: 2282676 - RNA, 19 nt, Artificial Sequence
  Description of Artificial Sequence: Synthetic oligonucleotide
aaaggaccucaggaagucc

SEQ ID NO: 2282677 - RNA, 19 nt, Artificial Sequence
  Description of Artificial Sequence: Synthetic oligonucleotide
gugguacauauugacaacg

SEQ ID NO: 2282678 - RNA, 19 nt, Artificial Sequence
  Description of Artificial Sequence: Synthetic oligonucleotide
agaaacuguagugucccgg

SEQ ID NO: 2282679 - RNA, 19 nt, Artificial Sequence
  Description of Artificial Sequence: Synthetic oligonucleotide
guaaggguuaaucucgauc

SEQ ID NO: 2282680 - RNA, 19 nt, Artificial Sequence
  Description of Artificial Sequence: Synthetic oligonucleotide
acgccaugaccguucagcc

SEQ ID NO: 2282681 - RNA, 19 nt, Artificial Sequence
  Description of Artificial Sequence: Synthetic oligonucleotide
uaugcguagguguucccgc

SEQ ID NO: 2282682 - RNA, 19 nt, Artificial Sequence
  Description of Artificial Sequence: Synthetic oligonucleotide
ugaccguucagccccggag

SEQ ID NO: 2282683 - RNA, 19 nt, Artificial Sequence
  Description of Artificial Sequence: Synthetic oligonucleotide
agugaagcgaaagccacag

SEQ ID NO: 2282684 - RNA, 19 nt, Artificial Sequence
  Description of Artificial Sequence: Synthetic oligonucleotide
agauaguacagccugcauu

SEQ ID NO: 2282685 - RNA, 19 nt, Artificial Sequence
  Description of Artificial Sequence: Synthetic oligonucleotide
uuccgcagauaguacagcc

SEQ ID NO: 2282686 - RNA, 19 nt, Artificial Sequence
  Description of Artificial Sequence: Synthetic oligonucleotide
guuggaaagcagcuuggag

SEQ ID NO: 2282687 - RNA, 19 nt, Artificial Sequence
  Description of Artificial Sequence: Synthetic oligonucleotide
ugaacauuccuuucuugau

SEQ ID NO: 2282688 - RNA, 19 nt, Artificial Sequence
  Description of Artificial Sequence: Synthetic oligonucleotide
gaagugaagcgaaagccac

SEQ ID NO: 2282689 - RNA, 19 nt, Artificial Sequence
  Description of Artificial Sequence: Synthetic oligonucleotide
ugugguacauauugacaac

SEQ ID NO: 2282690 - RNA, 19 nt, Artificial Sequence
  Description of Artificial Sequence: Synthetic oligonucleotide
gaccucaggaaguccgugg

SEQ ID NO: 2282691 - RNA, 19 nt, Artificial Sequence
  Description of Artificial Sequence: Synthetic oligonucleotide
uugucccagccacagacca

SEQ ID NO: 2282692 - RNA, 19 nt, Artificial Sequence
  Description of Artificial Sequence: Synthetic oligonucleotide
uuuccacuuucacccaacc

SEQ ID NO: 2282693 - RNA, 19 nt, Artificial Sequence
  Description of Artificial Sequence: Synthetic oligonucleotide
ucagaucacugacaucaga

SEQ ID NO: 2282694 - RNA, 19 nt, Artificial Sequence
  Description of Artificial Sequence: Synthetic oligonucleotide
guccugagagccuaguccc

SEQ ID NO: 2282695 - RNA, 19 nt, Artificial Sequence
  Description of Artificial Sequence: Synthetic oligonucleotide
uuaaggugcugauguaagu

SEQ ID NO: 2282696 - RNA, 19 nt, Artificial Sequence
  Description of Artificial Sequence: Synthetic oligonucleotide
augcacaauagcccugcgg

SEQ ID NO: 2282697 - RNA, 19 nt, Artificial Sequence
  Description of Artificial Sequence: Synthetic oligonucleotide
auaugcguagguguucccg

SEQ ID NO: 2282698 - RNA, 19 nt, Artificial Sequence
  Description of Artificial Sequence: Synthetic oligonucleotide
cuuucugcacccagggcag

SEQ ID NO: 2282699 - RNA, 19 nt, Artificial Sequence
  Description of Artificial Sequence: Synthetic oligonucleotide
agauccaauaacgccauga

SEQ ID NO: 2282700 - RNA, 19 nt, Artificial Sequence
  Description of Artificial Sequence: Synthetic oligonucleotide
agcaucauguuggaaagca

SEQ ID NO: 2282701 - RNA, 19 nt, Artificial Sequence
  Description of Artificial Sequence: Synthetic oligonucleotide
ccuagucccguuuucaucc

SEQ ID NO: 2282702 - RNA, 19 nt, Artificial Sequence
  Description of Artificial Sequence: Synthetic oligonucleotide
ggagcaucauguuggaaag

SEQ ID NO: 2282703 - RNA, 19 nt, Artificial Sequence
  Description of Artificial Sequence: Synthetic oligonucleotide
gacaacgccuccagaauag

SEQ ID NO: 2282704 - RNA, 19 nt, Artificial Sequence
  Description of Artificial Sequence: Synthetic oligonucleotide
gguacauauugacaacgcc

SEQ ID NO: 2282705 - RNA, 19 nt, Artificial Sequence
  Description of Artificial Sequence: Synthetic oligonucleotide
uccgcacagauccaauaac

SEQ ID NO: 2282706 - RNA, 19 nt, Artificial Sequence
  Description of Artificial Sequence: Synthetic oligonucleotide
ucgacucucggacaaggaa

SEQ ID NO: 2282707 - RNA, 19 nt, Artificial Sequence
  Description of Artificial Sequence: Synthetic oligonucleotide
agcccugcggccaaggucg

SEQ ID NO: 2282708 - RNA, 19 nt, Artificial Sequence
  Description of Artificial Sequence: Synthetic oligonucleotide
uuccacuuucacccaacca

SEQ ID NO: 2282709 - RNA, 19 nt, Artificial Sequence
  Description of Artificial Sequence: Synthetic oligonucleotide
accccauaugcguaggugu

SEQ ID NO: 2282710 - RNA, 19 nt, Artificial Sequence
  Description of Artificial Sequence: Synthetic oligonucleotide
uugacaacgccuccagaau

SEQ ID NO: 2282711 - RNA, 19 nt, Artificial Sequence
  Description of Artificial Sequence: Synthetic oligonucleotide
aaacuguagugucccgggu

SEQ ID NO: 2282712 - RNA, 19 nt, Artificial Sequence
  Description of Artificial Sequence: Synthetic oligonucleotide
uggagaacauuuguccuga

SEQ ID NO: 2282713 - RNA, 19 nt, Artificial Sequence
  Description of Artificial Sequence: Synthetic oligonucleotide
guacuggagcaucauguug

SEQ ID NO: 2282714 - RNA, 19 nt, Artificial Sequence
  Description of Artificial Sequence: Synthetic oligonucleotide
agccguucccaguacugac

SEQ ID NO: 2282715 - RNA, 19 nt, Artificial Sequence
  Description of Artificial Sequence: Synthetic oligonucleotide
aagugcgagcuccggagcu

SEQ ID NO: 2282716 - RNA, 19 nt, Artificial Sequence
  Description of Artificial Sequence: Synthetic oligonucleotide
ugacaacgccuccagaaua

SEQ ID NO: 2282717 - RNA, 19 nt, Artificial Sequence
  Description of Artificial Sequence: Synthetic oligonucleotide
auuccgcagauaguacagc

SEQ ID NO: 2282718 - RNA, 19 nt, Artificial Sequence
  Description of Artificial Sequence: Synthetic oligonucleotide
uaaguccccgcagaggccc

SEQ ID NO: 2282719 - RNA, 19 nt, Artificial Sequence
  Description of Artificial Sequence: Synthetic oligonucleotide
gagaaacuguagugucccg

SEQ ID NO: 2282720 - RNA, 19 nt, Artificial Sequence
  Description of Artificial Sequence: Synthetic oligonucleotide
agugugguugugccauggg

SEQ ID NO: 2282721 - RNA, 19 nt, Artificial Sequence
  Description of Artificial Sequence: Synthetic oligonucleotide
gaagcgaaagccacagcac

SEQ ID NO: 2282722 - RNA, 19 nt, Artificial Sequence
  Description of Artificial Sequence: Synthetic oligonucleotide
uccgcagauaguacagccu

SEQ ID NO: 2282723 - RNA, 19 nt, Artificial Sequence
  Description of Artificial Sequence: Synthetic oligonucleotide
aacagccguucccaguacu

SEQ ID NO: 2282724 - RNA, 19 nt, Artificial Sequence
  Description of Artificial Sequence: Synthetic oligonucleotide
uacuugugcaucagaucac

SEQ ID NO: 2282725 - RNA, 19 nt, Artificial Sequence
  Description of Artificial Sequence: Synthetic oligonucleotide
agagccuagucccguuuuc

SEQ ID NO: 2282726 - RNA, 19 nt, Artificial Sequence
  Description of Artificial Sequence: Synthetic oligonucleotide
auaguacagccugcauucc

SEQ ID NO: 2282727 - RNA, 19 nt, Artificial Sequence
  Description of Artificial Sequence: Synthetic oligonucleotide
gaguccacggccacgauga

SEQ ID NO: 2282728 - RNA, 19 nt, Artificial Sequence
  Description of Artificial Sequence: Synthetic oligonucleotide
uauugacaacgccuccaga

SEQ ID NO: 2282729 - RNA, 19 nt, Artificial Sequence
  Description of Artificial Sequence: Synthetic oligonucleotide
ggccaucucaaucugaaca

SEQ ID NO: 2282730 - RNA, 19 nt, Artificial Sequence
  Description of Artificial Sequence: Synthetic oligonucleotide
agguccugccgguagccac

SEQ ID NO: 2282731 - RNA, 19 nt, Artificial Sequence
  Description of Artificial Sequence: Synthetic oligonucleotide
ggaggaaccagaaccaccc

SEQ ID NO: 2282732 - RNA, 19 nt, Artificial Sequence
  Description of Artificial Sequence: Synthetic oligonucleotide
gcacagauccaauaacgcc

SEQ ID NO: 2282733 - RNA, 19 nt, Artificial Sequence
  Description of Artificial Sequence: Synthetic oligonucleotide
cguaguagaguccuggacc

SEQ ID NO: 2282734 - RNA, 19 nt, Artificial Sequence
  Description of Artificial Sequence: Synthetic oligonucleotide
agcaccgaggggaggaacc

SEQ ID NO: 2282735 - RNA, 19 nt, Artificial Sequence
  Description of Artificial Sequence: Synthetic oligonucleotide
aguccuggacccuucuugu

SEQ ID NO: 2282736 - RNA, 19 nt, Artificial Sequence
  Description of Artificial Sequence: Synthetic oligonucleotide
acauuccuuucuugaucac

SEQ ID NO: 2282737 - RNA, 19 nt, Artificial Sequence
  Description of Artificial Sequence: Synthetic oligonucleotide
agcgaaagccacagcaccg

SEQ ID NO: 2282738 - RNA, 19 nt, Artificial Sequence
  Description of Artificial Sequence: Synthetic oligonucleotide
agauccgucgacucucgga

SEQ ID NO: 2282739 - RNA, 19 nt, Artificial Sequence
  Description of Artificial Sequence: Synthetic oligonucleotide
gacaucagagguuuccacu

SEQ ID NO: 2282740 - RNA, 19 nt, Artificial Sequence
  Description of Artificial Sequence: Synthetic oligonucleotide
gaagugcgagcuccggagc

SEQ ID NO: 2282741 - RNA, 19 nt, Artificial Sequence
  Description of Artificial Sequence: Synthetic oligonucleotide
gcagguaaggguuaaucuc

SEQ ID NO: 2282742 - RNA, 19 nt, Artificial Sequence
  Description of Artificial Sequence: Synthetic oligonucleotide
cuugucccagccacagacc

SEQ ID NO: 2282743 - RNA, 19 nt, Artificial Sequence
  Description of Artificial Sequence: Synthetic oligonucleotide
uucaggacugagguccugc

SEQ ID NO: 2282744 - RNA, 19 nt, Artificial Sequence
  Description of Artificial Sequence: Synthetic oligonucleotide
auguaaguccccgcagagg

SEQ ID NO: 2282745 - RNA, 19 nt, Artificial Sequence
  Description of Artificial Sequence: Synthetic oligonucleotide
agccacagcaccgagggga

SEQ ID NO: 2282746 - RNA, 19 nt, Artificial Sequence
  Description of Artificial Sequence: Synthetic oligonucleotide
ggucguaggccucuucagg

SEQ ID NO: 2282747 - RNA, 19 nt, Artificial Sequence
  Description of Artificial Sequence: Synthetic oligonucleotide
ugaaggcuagugugguugu

SEQ ID NO: 2282748 - RNA, 19 nt, Artificial Sequence
  Description of Artificial Sequence: Synthetic oligonucleotide
agcuugcacagagaaacug

SEQ ID NO: 2282749 - RNA, 19 nt, Artificial Sequence
  Description of Artificial Sequence: Synthetic oligonucleotide
ccguggagaacauuugucc

SEQ ID NO: 2282750 - RNA, 19 nt, Artificial Sequence
  Description of Artificial Sequence: Synthetic oligonucleotide
acaacgccuccagaauagc

SEQ ID NO: 2282751 - RNA, 19 nt, Artificial Sequence
  Description of Artificial Sequence: Synthetic oligonucleotide
uccgucgacucucggacaa

SEQ ID NO: 2282752 - RNA, 19 nt, Artificial Sequence
  Description of Artificial Sequence: Synthetic oligonucleotide
gucguaggccucuucagga

SEQ ID NO: 2282753 - RNA, 19 nt, Artificial Sequence
  Description of Artificial Sequence: Synthetic oligonucleotide
cuugugcaucagaucacug

SEQ ID NO: 2282754 - RNA, 19 nt, Artificial Sequence
  Description of Artificial Sequence: Synthetic oligonucleotide
gucucuguggguggcaugc

SEQ ID NO: 2282755 - RNA, 19 nt, Artificial Sequence
  Description of Artificial Sequence: Synthetic oligonucleotide
cugccgguagccacugucc

SEQ ID NO: 2282756 - RNA, 19 nt, Artificial Sequence
  Description of Artificial Sequence: Synthetic oligonucleotide
auuccuuggccaacagccg

SEQ ID NO: 2282757 - RNA, 19 nt, Artificial Sequence
  Description of Artificial Sequence: Synthetic oligonucleotide
cauccacguaguagagucc

SEQ ID NO: 2282758 - RNA, 19 nt, Artificial Sequence
  Description of Artificial Sequence: Synthetic oligonucleotide
gacacggagaugcgcuccc

SEQ ID NO: 2282759 - RNA, 19 nt, Artificial Sequence
  Description of Artificial Sequence: Synthetic oligonucleotide
cauauugacaacgccucca

SEQ ID NO: 2282760 - RNA, 19 nt, Artificial Sequence
  Description of Artificial Sequence: Synthetic oligonucleotide
auccacguaguagaguccu

SEQ ID NO: 2282761 - RNA, 19 nt, Artificial Sequence
  Description of Artificial Sequence: Synthetic oligonucleotide
agucccguuuucauccacg

SEQ ID NO: 2282762 - RNA, 19 nt, Artificial Sequence
  Description of Artificial Sequence: Synthetic oligonucleotide
auaacgccaugaccguuca

SEQ ID NO: 2282763 - RNA, 19 nt, Artificial Sequence
  Description of Artificial Sequence: Synthetic oligonucleotide
ugcccguggagaacauuug

SEQ ID NO: 2282764 - RNA, 19 nt, Artificial Sequence
  Description of Artificial Sequence: Synthetic oligonucleotide
ugcagacacggagaugcgc

SEQ ID NO: 2282765 - RNA, 19 nt, Artificial Sequence
  Description of Artificial Sequence: Synthetic oligonucleotide
ugcguagguguucccgcug

SEQ ID NO: 2282766 - RNA, 19 nt, Artificial Sequence
  Description of Artificial Sequence: Synthetic oligonucleotide
cagagguuuccacuuucac

SEQ ID NO: 2282767 - RNA, 19 nt, Artificial Sequence
  Description of Artificial Sequence: Synthetic oligonucleotide
ugccgguagccacugucca

SEQ ID NO: 2282768 - RNA, 19 nt, Artificial Sequence
  Description of Artificial Sequence: Synthetic oligonucleotide
aagugaagcgaaagccaca

SEQ ID NO: 2282769 - RNA, 19 nt, Artificial Sequence
  Description of Artificial Sequence: Synthetic oligonucleotide
cuugcacagagaaacugua

SEQ ID NO: 2282770 - RNA, 19 nt, Artificial Sequence
  Description of Artificial Sequence: Synthetic oligonucleotide
ccuuucuugaucaccacca

SEQ ID NO: 2282771 - RNA, 19 nt, Artificial Sequence
  Description of Artificial Sequence: Synthetic oligonucleotide
ucguaggccucuucaggac

SEQ ID NO: 2282772 - RNA, 19 nt, Artificial Sequence
  Description of Artificial Sequence: Synthetic oligonucleotide
acuggagcaucauguugga

SEQ ID NO: 2282773 - RNA, 19 nt, Artificial Sequence
  Description of Artificial Sequence: Synthetic oligonucleotide
gaccguucagccccggaga

SEQ ID NO: 2282774 - RNA, 19 nt, Artificial Sequence
  Description of Artificial Sequence: Synthetic oligonucleotide
aguccgugggcugcauccc

SEQ ID NO: 2282775 - RNA, 19 nt, Artificial Sequence
  Description of Artificial Sequence: Synthetic oligonucleotide
ccaaccaucuuccuucaug

SEQ ID NO: 2282776 - RNA, 19 nt, Artificial Sequence
  Description of Artificial Sequence: Synthetic oligonucleotide
cauaugcguagguguuccc

SEQ ID NO: 2282777 - RNA, 19 nt, Artificial Sequence
  Description of Artificial Sequence: Synthetic oligonucleotide
agcccacucgggccgcugc

SEQ ID NO: 2282778 - RNA, 19 nt, Artificial Sequence
  Description of Artificial Sequence: Synthetic oligonucleotide
uagcccugcggccaagguc

SEQ ID NO: 2282779 - RNA, 19 nt, Artificial Sequence
  Description of Artificial Sequence: Synthetic oligonucleotide
ucacccuuaaggugcugau

SEQ ID NO: 2282780 - RNA, 19 nt, Artificial Sequence
  Description of Artificial Sequence: Synthetic oligonucleotide
uccacguaguagaguccug

SEQ ID NO: 2282781 - RNA, 19 nt, Artificial Sequence
  Description of Artificial Sequence: Synthetic oligonucleotide
uuuguccugagagccuagu

SEQ ID NO: 2282782 - RNA, 19 nt, Artificial Sequence
  Description of Artificial Sequence: Synthetic oligonucleotide
guccaucaccccauaugcg

SEQ ID NO: 2282783 - RNA, 19 nt, Artificial Sequence
  Description of Artificial Sequence: Synthetic oligonucleotide
gagauccgucgacucucgg

SEQ ID NO: 2282784 - RNA, 19 nt, Artificial Sequence
  Description of Artificial Sequence: Synthetic oligonucleotide
ugcggccaaggucguaggc

SEQ ID NO: 2282785 - RNA, 19 nt, Artificial Sequence
  Description of Artificial Sequence: Synthetic oligonucleotide
cagcuuggaggcugcagac

SEQ ID NO: 2282786 - RNA, 19 nt, Artificial Sequence
  Description of Artificial Sequence: Synthetic oligonucleotide
ugcgcuccccauuccgcag

SEQ ID NO: 2282787 - RNA, 19 nt, Artificial Sequence
  Description of Artificial Sequence: Synthetic oligonucleotide
caugcacaauagcccugcg

SEQ ID NO: 2282788 - RNA, 19 nt, Artificial Sequence
  Description of Artificial Sequence: Synthetic oligonucleotide
ugagagccuagucccguuu

SEQ ID NO: 2282789 - RNA, 19 nt, Artificial Sequence
  Description of Artificial Sequence: Synthetic oligonucleotide
aucacugacaucagagguu

SEQ ID NO: 2282790 - RNA, 19 nt, Artificial Sequence
  Description of Artificial Sequence: Synthetic oligonucleotide
ucaccccauaugcguaggu

SEQ ID NO: 2282791 - RNA, 19 nt, Artificial Sequence
  Description of Artificial Sequence: Synthetic oligonucleotide
uucugcacccagggcagcc

SEQ ID NO: 2282792 - RNA, 19 nt, Artificial Sequence
  Description of Artificial Sequence: Synthetic oligonucleotide
uccccauuccgcagauagu

SEQ ID NO: 2282793 - RNA, 19 nt, Artificial Sequence
  Description of Artificial Sequence: Synthetic oligonucleotide
gagaugcgcuccccauucc

SEQ ID NO: 2282794 - RNA, 19 nt, Artificial Sequence
  Description of Artificial Sequence: Synthetic oligonucleotide
acuuucacccaaccaucuu

SEQ ID NO: 2282795 - RNA, 19 nt, Artificial Sequence
  Description of Artificial Sequence: Synthetic oligonucleotide
uguagugucccggguccga

SEQ ID NO: 2282796 - RNA, 19 nt, Artificial Sequence
  Description of Artificial Sequence: Synthetic oligonucleotide
acagauccaauaacgccau

SEQ ID NO: 2282797 - RNA, 19 nt, Artificial Sequence
  Description of Artificial Sequence: Synthetic oligonucleotide
cacaauagcccugcggcca

SEQ ID NO: 2282798 - RNA, 19 nt, Artificial Sequence
  Description of Artificial Sequence: Synthetic oligonucleotide
aucaccccauaugcguagg

SEQ ID NO: 2282799 - RNA, 19 nt, Artificial Sequence
  Description of Artificial Sequence: Synthetic oligonucleotide
augcguagguguucccgcu

SEQ ID NO: 2282800 - RNA, 19 nt, Artificial Sequence
  Description of Artificial Sequence: Synthetic oligonucleotide
uccggagcuugcacagaga

SEQ ID NO: 2282801 - RNA, 19 nt, Artificial Sequence
  Description of Artificial Sequence: Synthetic oligonucleotide
uagucccguuuucauccac

SEQ ID NO: 2282802 - RNA, 19 nt, Artificial Sequence
  Description of Artificial Sequence: Synthetic oligonucleotide
cucuguggguggcaugcac

SEQ ID NO: 2282803 - RNA, 19 nt, Artificial Sequence
  Description of Artificial Sequence: Synthetic oligonucleotide
gugccaagcagguaagggu

SEQ ID NO: 2282804 - RNA, 19 nt, Artificial Sequence
  Description of Artificial Sequence: Synthetic oligonucleotide
aggggaggaaccagaacca

SEQ ID NO: 2282805 - RNA, 19 nt, Artificial Sequence
  Description of Artificial Sequence: Synthetic oligonucleotide
uaacgccaugaccguucag

SEQ ID NO: 2282806 - RNA, 19 nt, Artificial Sequence
  Description of Artificial Sequence: Synthetic oligonucleotide
guuuccacuuucacccaac

SEQ ID NO: 2282807 - RNA, 19 nt, Artificial Sequence
  Description of Artificial Sequence: Synthetic oligonucleotide
acaauagcccugcggccaa

SEQ ID NO: 2282808 - RNA, 19 nt, Artificial Sequence
  Description of Artificial Sequence: Synthetic oligonucleotide
cucggacaaggaagugaag

SEQ ID NO: 2282809 - RNA, 19 nt, Artificial Sequence
  Description of Artificial Sequence: Synthetic oligonucleotide
agucucuguggguggcaug

SEQ ID NO: 2282810 - RNA, 19 nt, Artificial Sequence
  Description of Artificial Sequence: Synthetic oligonucleotide
cucaaucugaacauuccuu

SEQ ID NO: 2282811 - RNA, 19 nt, Artificial Sequence
  Description of Artificial Sequence: Synthetic oligonucleotide
caccuuguucacccuuaag

SEQ ID NO: 2282812 - RNA, 19 nt, Artificial Sequence
  Description of Artificial Sequence: Synthetic oligonucleotide
agccuagucccguuuucau

SEQ ID NO: 2282813 - RNA, 19 nt, Artificial Sequence
  Description of Artificial Sequence: Synthetic oligonucleotide
uaaucucgaucaccuuguu

SEQ ID NO: 2282814 - RNA, 19 nt, Artificial Sequence
  Description of Artificial Sequence: Synthetic oligonucleotide
acagccguucccaguacug

SEQ ID NO: 2282815 - RNA, 19 nt, Artificial Sequence
  Description of Artificial Sequence: Synthetic oligonucleotide
auagcccugcggccaaggu

SEQ ID NO: 2282816 - RNA, 19 nt, Artificial Sequence
  Description of Artificial Sequence: Synthetic oligonucleotide
ccgcagauaguacagccug

SEQ ID NO: 2282817 - RNA, 19 nt, Artificial Sequence
  Description of Artificial Sequence: Synthetic oligonucleotide
gaaggcuagugugguugug

SEQ ID NO: 2282818 - RNA, 19 nt, Artificial Sequence
  Description of Artificial Sequence: Synthetic oligonucleotide
aguagaguccuggacccuu

SEQ ID NO: 2282819 - RNA, 19 nt, Artificial Sequence
  Description of Artificial Sequence: Synthetic oligonucleotide
cuagugugguugugccaug

SEQ ID NO: 2282820 - RNA, 19 nt, Artificial Sequence
  Description of Artificial Sequence: Synthetic oligonucleotide
acacggagaugcgcucccc

SEQ ID NO: 2282821 - RNA, 19 nt, Artificial Sequence
  Description of Artificial Sequence: Synthetic oligonucleotide
agaccaugcugcccaugga

SEQ ID NO: 2282822 - RNA, 19 nt, Artificial Sequence
  Description of Artificial Sequence: Synthetic oligonucleotide
caccccauaugcguaggug

SEQ ID NO: 2282823 - RNA, 19 nt, Artificial Sequence
  Description of Artificial Sequence: Synthetic oligonucleotide
acauuuguccugagagccu

SEQ ID NO: 2282824 - RNA, 19 nt, Artificial Sequence
  Description of Artificial Sequence: Synthetic oligonucleotide
gugaagcgaaagccacagc

SEQ ID NO: 2282825 - RNA, 19 nt, Artificial Sequence
  Description of Artificial Sequence: Synthetic oligonucleotide
ccggguccgagccauaccc

SEQ ID NO: 2282826 - RNA, 19 nt, Artificial Sequence
  Description of Artificial Sequence: Synthetic oligonucleotide
gaggcccaugccccgguac

SEQ ID NO: 2282827 - RNA, 19 nt, Artificial Sequence
  Description of Artificial Sequence: Synthetic oligonucleotide
aguccacggccacgaugac

SEQ ID NO: 2282828 - RNA, 19 nt, Artificial Sequence
  Description of Artificial Sequence: Synthetic oligonucleotide
gagccuagucccguuuuca

SEQ ID NO: 2282829 - RNA, 19 nt, Artificial Sequence
  Description of Artificial Sequence: Synthetic oligonucleotide
cuccgcacagauccaauaa

SEQ ID NO: 2282830 - RNA, 19 nt, Artificial Sequence
  Description of Artificial Sequence: Synthetic oligonucleotide
cacguaguagaguccugga

SEQ ID NO: 2282831 - RNA, 19 nt, Artificial Sequence
  Description of Artificial Sequence: Synthetic oligonucleotide
aggcugcagacacggagau

SEQ ID NO: 2282832 - RNA, 19 nt, Artificial Sequence
  Description of Artificial Sequence: Synthetic oligonucleotide
accguucagccccggagau

SEQ ID NO: 2282833 - RNA, 19 nt, Artificial Sequence
  Description of Artificial Sequence: Synthetic oligonucleotide
ccacguaguagaguccugg

SEQ ID NO: 2282834 - RNA, 19 nt, Artificial Sequence
  Description of Artificial Sequence: Synthetic oligonucleotide
cguucagccccggagaucc

SEQ ID NO: 2282835 - RNA, 19 nt, Artificial Sequence
  Description of Artificial Sequence: Synthetic oligonucleotide
gacucucggacaaggaagu

SEQ ID NO: 2282836 - RNA, 19 nt, Artificial Sequence
  Description of Artificial Sequence: Synthetic oligonucleotide
ucccguuuucauccacgua

SEQ ID NO: 2282837 - RNA, 19 nt, Artificial Sequence
  Description of Artificial Sequence: Synthetic oligonucleotide
cucgguacuugugcaucag

SEQ ID NO: 2282838 - RNA, 19 nt, Artificial Sequence
  Description of Artificial Sequence: Synthetic oligonucleotide
guagugucccggguccgag

SEQ ID NO: 2282839 - RNA, 19 nt, Artificial Sequence
  Description of Artificial Sequence: Synthetic oligonucleotide
guaaguccccgcagaggcc

SEQ ID NO: 2282840 - RNA, 19 nt, Artificial Sequence
  Description of Artificial Sequence: Synthetic oligonucleotide
cagccccggagauccgucg

SEQ ID NO: 2282841 - RNA, 19 nt, Artificial Sequence
  Description of Artificial Sequence: Synthetic oligonucleotide
gcaugcacaauagcccugc

SEQ ID NO: 2282842 - RNA, 19 nt, Artificial Sequence
  Description of Artificial Sequence: Synthetic oligonucleotide
auggugccaagcagguaag

SEQ ID NO: 2282843 - RNA, 19 nt, Artificial Sequence
  Description of Artificial Sequence: Synthetic oligonucleotide
cagacacggagaugcgcuc

SEQ ID NO: 2282844 - RNA, 19 nt, Artificial Sequence
  Description of Artificial Sequence: Synthetic oligonucleotide
agguaaggguuaaucucga

SEQ ID NO: 2282845 - RNA, 19 nt, Artificial Sequence
  Description of Artificial Sequence: Synthetic oligonucleotide
auuuguccugagagccuag

SEQ ID NO: 2282846 - RNA, 19 nt, Artificial Sequence
  Description of Artificial Sequence: Synthetic oligonucleotide
gcaucauguuggaaagcag

SEQ ID NO: 2282847 - RNA, 19 nt, Artificial Sequence
  Description of Artificial Sequence: Synthetic oligonucleotide
cugcggccaaggucguagg

SEQ ID NO: 2282848 - RNA, 19 nt, Artificial Sequence
  Description of Artificial Sequence: Synthetic oligonucleotide
uucagccccggagauccgu

SEQ ID NO: 2282849 - RNA, 19 nt, Artificial Sequence
  Description of Artificial Sequence: Synthetic oligonucleotide
cacccuuaaggugcugaug

SEQ ID NO: 2282850 - RNA, 19 nt, Artificial Sequence
  Description of Artificial Sequence: Synthetic oligonucleotide
acaaggaagugaagcgaaa

SEQ ID NO: 2282851 - RNA, 19 nt, Artificial Sequence
  Description of Artificial Sequence: Synthetic oligonucleotide
auccgucgacucucggaca

SEQ ID NO: 2282852 - RNA, 19 nt, Artificial Sequence
  Description of Artificial Sequence: Synthetic oligonucleotide
acccuucuugucccagcca

SEQ ID NO: 2282853 - RNA, 19 nt, Artificial Sequence
  Description of Artificial Sequence: Synthetic oligonucleotide
cuguagugucccggguccg

SEQ ID NO: 2282854 - RNA, 19 nt, Artificial Sequence
  Description of Artificial Sequence: Synthetic oligonucleotide
ggguuaaucucgaucaccu

SEQ ID NO: 2282855 - RNA, 19 nt, Artificial Sequence
  Description of Artificial Sequence: Synthetic oligonucleotide
augaccguucagccccgga

SEQ ID NO: 2282856 - RNA, 19 nt, Artificial Sequence
  Description of Artificial Sequence: Synthetic oligonucleotide
cccguggagaacauuuguc

SEQ ID NO: 2282857 - RNA, 19 nt, Artificial Sequence
  Description of Artificial Sequence: Synthetic oligonucleotide
ccauuccgcagauaguaca

SEQ ID NO: 2282858 - RNA, 19 nt, Artificial Sequence
  Description of Artificial Sequence: Synthetic oligonucleotide
ugccaugggccaucucaau

SEQ ID NO: 2282859 - RNA, 19 nt, Artificial Sequence
  Description of Artificial Sequence: Synthetic oligonucleotide
ggagaacauuuguccugag

SEQ ID NO: 2282860 - RNA, 19 nt, Artificial Sequence
  Description of Artificial Sequence: Synthetic oligonucleotide
gugcaucagaucacugaca

SEQ ID NO: 2282861 - RNA, 19 nt, Artificial Sequence
  Description of Artificial Sequence: Synthetic oligonucleotide
acucucggacaaggaagug

SEQ ID NO: 2282862 - RNA, 19 nt, Artificial Sequence
  Description of Artificial Sequence: Synthetic oligonucleotide
ggagauccgucgacucucg

SEQ ID NO: 2282863 - RNA, 19 nt, Artificial Sequence
  Description of Artificial Sequence: Synthetic oligonucleotide
gcguagguguucccgcugc

SEQ ID NO: 2282864 - RNA, 19 nt, Artificial Sequence
  Description of Artificial Sequence: Synthetic oligonucleotide
cuagucccguuuucaucca

SEQ ID NO: 2282865 - RNA, 19 nt, Artificial Sequence
  Description of Artificial Sequence: Synthetic oligonucleotide
agccccggagauccgucga

SEQ ID NO: 2282866 - RNA, 19 nt, Artificial Sequence
  Description of Artificial Sequence: Synthetic oligonucleotide
ggacccuucuugucccagc

SEQ ID NO: 2282867 - RNA, 19 nt, Artificial Sequence
  Description of Artificial Sequence: Synthetic oligonucleotide
ucucuguggguggcaugca

SEQ ID NO: 2282868 - RNA, 19 nt, Artificial Sequence
  Description of Artificial Sequence: Synthetic oligonucleotide
cacuuucacccaaccaucu

SEQ ID NO: 2282869 - RNA, 19 nt, Artificial Sequence
  Description of Artificial Sequence: Synthetic oligonucleotide
cuccagaauagcagucucu

SEQ ID NO: 2282870 - RNA, 19 nt, Artificial Sequence
  Description of Artificial Sequence: Synthetic oligonucleotide
caaggucguaggccucuuc

SEQ ID NO: 2282871 - RNA, 19 nt, Artificial Sequence
  Description of Artificial Sequence: Synthetic oligonucleotide
gccauacccucuuucugca

SEQ ID NO: 2282872 - RNA, 19 nt, Artificial Sequence
  Description of Artificial Sequence: Synthetic oligonucleotide
uaggccucuucaggacuga

SEQ ID NO: 2282873 - RNA, 19 nt, Artificial Sequence
  Description of Artificial Sequence: Synthetic oligonucleotide
gcggccaaggucguaggcc

SEQ ID NO: 2282874 - RNA, 19 nt, Artificial Sequence
  Description of Artificial Sequence: Synthetic oligonucleotide
ccugcggccaaggucguag

SEQ ID NO: 2282875 - RNA, 19 nt, Artificial Sequence
  Description of Artificial Sequence: Synthetic oligonucleotide
gaucaccaccaaaggaccu

SEQ ID NO: 2282876 - RNA, 19 nt, Artificial Sequence
  Description of Artificial Sequence: Synthetic oligonucleotide
gccuagucccguuuucauc

SEQ ID NO: 2282877 - RNA, 19 nt, Artificial Sequence
  Description of Artificial Sequence: Synthetic oligonucleotide
ggcccgggaguccacggcc

SEQ ID NO: 2282878 - RNA, 19 nt, Artificial Sequence
  Description of Artificial Sequence: Synthetic oligonucleotide
guccuggacccuucuuguc

SEQ ID NO: 2282879 - RNA, 19 nt, Artificial Sequence
  Description of Artificial Sequence: Synthetic oligonucleotide
ucccggguccgagccauac

SEQ ID NO: 2282880 - RNA, 19 nt, Artificial Sequence
  Description of Artificial Sequence: Synthetic oligonucleotide
cccauuccgcagauaguac

SEQ ID NO: 2282881 - RNA, 19 nt, Artificial Sequence
  Description of Artificial Sequence: Synthetic oligonucleotide
aggaccucaggaaguccgu

SEQ ID NO: 2282882 - RNA, 19 nt, Artificial Sequence
  Description of Artificial Sequence: Synthetic oligonucleotide
uacccucuuucugcaccca

SEQ ID NO: 2282883 - RNA, 19 nt, Artificial Sequence
  Description of Artificial Sequence: Synthetic oligonucleotide
gggaagugcgagcuccgga

SEQ ID NO: 2282884 - RNA, 19 nt, Artificial Sequence
  Description of Artificial Sequence: Synthetic oligonucleotide
cugcccguggagaacauuu

SEQ ID NO: 2282885 - RNA, 19 nt, Artificial Sequence
  Description of Artificial Sequence: Synthetic oligonucleotide
cacggagaugcgcucccca

SEQ ID NO: 2282886 - RNA, 19 nt, Artificial Sequence
  Description of Artificial Sequence: Synthetic oligonucleotide
ggguccgagccauacccuc

SEQ ID NO: 2282887 - RNA, 19 nt, Artificial Sequence
  Description of Artificial Sequence: Synthetic oligonucleotide
ccggggaagugcgagcucc

SEQ ID NO: 2282888 - RNA, 19 nt, Artificial Sequence
  Description of Artificial Sequence: Synthetic oligonucleotide
uccgagccauacccucuuu

SEQ ID NO: 2282889 - RNA, 19 nt, Artificial Sequence
  Description of Artificial Sequence: Synthetic oligonucleotide
gucgacucucggacaagga

SEQ ID NO: 2282890 - RNA, 19 nt, Artificial Sequence
  Description of Artificial Sequence: Synthetic oligonucleotide
ggagaggcccaugccccgg

SEQ ID NO: 2282891 - RNA, 19 nt, Artificial Sequence
  Description of Artificial Sequence: Synthetic oligonucleotide
gagagccuagucccguuuu

SEQ ID NO: 2282892 - RNA, 19 nt, Artificial Sequence
  Description of Artificial Sequence: Synthetic oligonucleotide
caugaccguucagccccgg

SEQ ID NO: 2282893 - RNA, 19 nt, Artificial Sequence
  Description of Artificial Sequence: Synthetic oligonucleotide
gugccaugggccaucucaa

SEQ ID NO: 2282894 - RNA, 19 nt, Artificial Sequence
  Description of Artificial Sequence: Synthetic oligonucleotide
ggcuagugugguugugcca

SEQ ID NO: 2282895 - RNA, 19 nt, Artificial Sequence
  Description of Artificial Sequence: Synthetic oligonucleotide
gcaucagaucacugacauc

SEQ ID NO: 2282896 - RNA, 19 nt, Artificial Sequence
  Description of Artificial Sequence: Synthetic oligonucleotide
ccaacagccguucccagua

SEQ ID NO: 2282897 - RNA, 19 nt, Artificial Sequence
  Description of Artificial Sequence: Synthetic oligonucleotide
ggggaagugcgagcuccgg

SEQ ID NO: 2282898 - RNA, 19 nt, Artificial Sequence
  Description of Artificial Sequence: Synthetic oligonucleotide
gguacuggagcaucauguu

SEQ ID NO: 2282899 - RNA, 19 nt, Artificial Sequence
  Description of Artificial Sequence: Synthetic oligonucleotide
uuccuucaugugguacaua

SEQ ID NO: 2282900 - RNA, 19 nt, Artificial Sequence
  Description of Artificial Sequence: Synthetic oligonucleotide
acggccacgaugacuccau

SEQ ID NO: 2282901 - RNA, 19 nt, Artificial Sequence
  Description of Artificial Sequence: Synthetic oligonucleotide
ugguugugccaugggccau

SEQ ID NO: 2282902 - RNA, 19 nt, Artificial Sequence
  Description of Artificial Sequence: Synthetic oligonucleotide
ggaccucaggaaguccgug

SEQ ID NO: 2282903 - RNA, 19 nt, Artificial Sequence
  Description of Artificial Sequence: Synthetic oligonucleotide
cagccguucccaguacuga

SEQ ID NO: 2282904 - RNA, 19 nt, Artificial Sequence
  Description of Artificial Sequence: Synthetic oligonucleotide
ccggagcuugcacagagaa

SEQ ID NO: 2282905 - RNA, 19 nt, Artificial Sequence
  Description of Artificial Sequence: Synthetic oligonucleotide
ggggaggaaccagaaccac

SEQ ID NO: 2282906 - RNA, 19 nt, Artificial Sequence
  Description of Artificial Sequence: Synthetic oligonucleotide
uugugccaugggccaucuc

SEQ ID NO: 2282907 - RNA, 19 nt, Artificial Sequence
  Description of Artificial Sequence: Synthetic oligonucleotide
cgucgacucucggacaagg

SEQ ID NO: 2282908 - RNA, 19 nt, Artificial Sequence
  Description of Artificial Sequence: Synthetic oligonucleotide
ccgguagccacuguccauc

SEQ ID NO: 2282909 - RNA, 19 nt, Artificial Sequence
  Description of Artificial Sequence: Synthetic oligonucleotide
ccgguacuggagcaucaug

SEQ ID NO: 2282910 - RNA, 19 nt, Artificial Sequence
  Description of Artificial Sequence: Synthetic oligonucleotide
guucagccccggagauccg

SEQ ID NO: 2282911 - RNA, 19 nt, Artificial Sequence
  Description of Artificial Sequence: Synthetic oligonucleotide
gcgaaagccacagcaccga

SEQ ID NO: 2282912 - RNA, 19 nt, Artificial Sequence
  Description of Artificial Sequence: Synthetic oligonucleotide
ccaugaccguucagccccg

SEQ ID NO: 2282913 - RNA, 19 nt, Artificial Sequence
  Description of Artificial Sequence: Synthetic oligonucleotide
ccgagccauacccucuuuc

SEQ ID NO: 2282914 - RNA, 19 nt, Artificial Sequence
  Description of Artificial Sequence: Synthetic oligonucleotide
gguugugccaugggccauc

SEQ ID NO: 2282915 - RNA, 19 nt, Artificial Sequence
  Description of Artificial Sequence: Synthetic oligonucleotide
ccugcauuccuuggccaac

SEQ ID NO: 2282916 - RNA, 19 nt, Artificial Sequence
  Description of Artificial Sequence: Synthetic oligonucleotide
gccagacauggugccaagc

SEQ ID NO: 2282917 - RNA, 19 nt, Artificial Sequence
  Description of Artificial Sequence: Synthetic oligonucleotide
cuuccuucaugugguacau

SEQ ID NO: 2282918 - RNA, 19 nt, Artificial Sequence
  Description of Artificial Sequence: Synthetic oligonucleotide
cgaaagccacagcaccgag

SEQ ID NO: 2282919 - RNA, 19 nt, Artificial Sequence
  Description of Artificial Sequence: Synthetic oligonucleotide
ccauacccucuuucugcac

SEQ ID NO: 2282920 - RNA, 19 nt, Artificial Sequence
  Description of Artificial Sequence: Synthetic oligonucleotide
cgguacuggagcaucaugu

SEQ ID NO: 2282921 - RNA, 19 nt, Artificial Sequence
  Description of Artificial Sequence: Synthetic oligonucleotide
ugccccgguacuggagcau

SEQ ID NO: 2282922 - RNA, 19 nt, Artificial Sequence
  Description of Artificial Sequence: Synthetic oligonucleotide
cagaggcccgggaguccac

SEQ ID NO: 2282923 - RNA, 19 nt, Artificial Sequence
  Description of Artificial Sequence: Synthetic oligonucleotide
ccccauuccgcagauagua

SEQ ID NO: 2282924 - RNA, 19 nt, Artificial Sequence
  Description of Artificial Sequence: Synthetic oligonucleotide
ccaauaacgccaugaccgu

SEQ ID NO: 2282925 - RNA, 19 nt, Artificial Sequence
  Description of Artificial Sequence: Synthetic oligonucleotide
gccguucccaguacugaca

SEQ ID NO: 2282926 - RNA, 19 nt, Artificial Sequence
  Description of Artificial Sequence: Synthetic oligonucleotide
ccacucgggccgcugcccc

SEQ ID NO: 2282927 - RNA, 19 nt, Artificial Sequence
  Description of Artificial Sequence: Synthetic oligonucleotide
ccaucaccccauaugcgua

SEQ ID NO: 2282928 - RNA, 19 nt, Artificial Sequence
  Description of Artificial Sequence: Synthetic oligonucleotide
gcccguggagaacauuugu

SEQ ID NO: 2282929 - RNA, 19 nt, Artificial Sequence
  Description of Artificial Sequence: Synthetic oligonucleotide
cgagcuccggagcuugcac

SEQ ID NO: 2282930 - RNA, 19 nt, Artificial Sequence
  Description of Artificial Sequence: Synthetic oligonucleotide
ccccgcagaggcccgggag

SEQ ID NO: 2282931 - RNA, 19 nt, Artificial Sequence
  Description of Artificial Sequence: Synthetic oligonucleotide
gacugagguccugccggua

SEQ ID NO: 2282932 - RNA, 19 nt, Artificial Sequence
  Description of Artificial Sequence: Synthetic oligonucleotide
cuggagcaucauguuggaa

SEQ ID NO: 2282933 - RNA, 19 nt, Artificial Sequence
  Description of Artificial Sequence: Synthetic oligonucleotide
cgaggggaggaaccagaac

SEQ ID NO: 2282934 - RNA, 19 nt, Artificial Sequence
  Description of Artificial Sequence: Synthetic oligonucleotide
guccacggccacgaugacu

SEQ ID NO: 2282935 - RNA, 19 nt, Artificial Sequence
  Description of Artificial Sequence: Synthetic oligonucleotide
guugugccaugggccaucu

SEQ ID NO: 2282936 - RNA, 19 nt, Artificial Sequence
  Description of Artificial Sequence: Synthetic oligonucleotide
gccccggagauccgucgac

SEQ ID NO: 2282937 - RNA, 19 nt, Artificial Sequence
  Description of Artificial Sequence: Synthetic oligonucleotide
gagcgccuccgcacagauc

SEQ ID NO: 2282938 - RNA, 19 nt, Artificial Sequence
  Description of Artificial Sequence: Synthetic oligonucleotide
gcaccgaggggaggaacca

SEQ ID NO: 2282939 - RNA, 19 nt, Artificial Sequence
  Description of Artificial Sequence: Synthetic oligonucleotide
guccgagccauacccucuu

SEQ ID NO: 2282940 - RNA, 19 nt, Artificial Sequence
  Description of Artificial Sequence: Synthetic oligonucleotide
cgagccauacccucuuucu

SEQ ID NO: 2282941 - RNA, 19 nt, Artificial Sequence
  Description of Artificial Sequence: Synthetic oligonucleotide
caauaacgccaugaccguu

SEQ ID NO: 2282942 - RNA, 19 nt, Artificial Sequence
  Description of Artificial Sequence: Synthetic oligonucleotide
ccuccgcacagauccaaua

SEQ ID NO: 2282943 - RNA, 19 nt, Artificial Sequence
  Description of Artificial Sequence: Synthetic oligonucleotide
ccgaggggaggaaccagaa

SEQ ID NO: 2282944 - RNA, 19 nt, Artificial Sequence
  Description of Artificial Sequence: Synthetic oligonucleotide
ccgggaguccacggccacg

SEQ ID NO: 2282945 - RNA, 19 nt, Artificial Sequence
  Description of Artificial Sequence: Synthetic oligonucleotide
gguccgagccauacccucu

SEQ ID NO: 2282946 - RNA, 19 nt, Artificial Sequence
  Description of Artificial Sequence: Synthetic oligonucleotide
gccaagcagguaaggguua

SEQ ID NO: 2282947 - RNA, 19 nt, Artificial Sequence
  Description of Artificial Sequence: Synthetic oligonucleotide
gccccgguacuggagcauc

SEQ ID NO: 2282948 - RNA, 19 nt, Artificial Sequence
  Description of Artificial Sequence: Synthetic oligonucleotide
caagcagguaaggguuaau

SEQ ID NO: 2282949 - RNA, 19 nt, Artificial Sequence
  Description of Artificial Sequence: Synthetic oligonucleotide
gguccugccgguagccacu

SEQ ID NO: 2282950 - RNA, 19 nt, Artificial Sequence
  Description of Artificial Sequence: Synthetic oligonucleotide
gcgagcuccggagcuugca

SEQ ID NO: 2282951 - RNA, 19 nt, Artificial Sequence
  Description of Artificial Sequence: Synthetic oligonucleotide
cccgagcgccuccgcacag

SEQ ID NO: 2282952 - RNA, 19 nt, Artificial Sequence
  Description of Artificial Sequence: Synthetic oligonucleotide
cuggaacuugaaggcuagu

SEQ ID NO: 2282953 - RNA, 19 nt, Artificial Sequence
  Description of Artificial Sequence: Synthetic oligonucleotide
cccgggaguccacggccac

SEQ ID NO: 2282954 - RNA, 19 nt, Artificial Sequence
  Description of Artificial Sequence: Synthetic oligonucleotide
ccccgguacuggagcauca

SEQ ID NO: 2282955 - RNA, 19 nt, Artificial Sequence
  Description of Artificial Sequence: Synthetic oligonucleotide
ccgucgacucucggacaag

SEQ ID NO: 2282956 - RNA, 19 nt, Artificial Sequence
  Description of Artificial Sequence: Synthetic oligonucleotide
ccccauaugcguagguguu

SEQ ID NO: 2282957 - RNA, 19 nt, Artificial Sequence
  Description of Artificial Sequence: Synthetic oligonucleotide
cggccaaggucguaggccu

SEQ ID NO: 2282958 - RNA, 19 nt, Artificial Sequence
  Description of Artificial Sequence: Synthetic oligonucleotide
gcuccggagcuugcacaga

SEQ ID NO: 2282959 - RNA, 19 nt, Artificial Sequence
  Description of Artificial Sequence: Synthetic oligonucleotide
ccguucagccccggagauc

SEQ ID NO: 2282960 - RNA, 19 nt, Artificial Sequence
  Description of Artificial Sequence: Synthetic oligonucleotide
ccugagagccuagucccgu

SEQ ID NO: 2282961 - RNA, 19 nt, Artificial Sequence
  Description of Artificial Sequence: Synthetic oligonucleotide
cgggaguccacggccacga

SEQ ID NO: 2282962 - RNA, 19 nt, Artificial Sequence
  Description of Artificial Sequence: Synthetic oligonucleotide
ccucucgguacuugugcau

SEQ ID NO: 2282963 - RNA, 19 nt, Artificial Sequence
  Description of Artificial Sequence: Synthetic oligonucleotide
gcccgggaguccacggcca

SEQ ID NO: 2282964 - RNA, 19 nt, Artificial Sequence
  Description of Artificial Sequence: Synthetic oligonucleotide
cccggggaagugcgagcuc

SEQ ID NO: 2282965 - RNA, 19 nt, Artificial Sequence
  Description of Artificial Sequence: Synthetic oligonucleotide
cacuccucccugccccuuu

SEQ ID NO: 2282966 - RNA, 19 nt, Artificial Sequence
  Description of Artificial Sequence: Synthetic oligonucleotide
ccaucucaaucugaacauu

SEQ ID NO: 2282967 - RNA, 19 nt, Artificial Sequence
  Description of Artificial Sequence: Synthetic oligonucleotide
ccgagcgccuccgcacaga

SEQ ID NO: 2282968 - RNA, 19 nt, Artificial Sequence
  Description of Artificial Sequence: Synthetic oligonucleotide
gccuccgcacagauccaau

SEQ ID NO: 2282969 - RNA, 19 nt, Artificial Sequence
  Description of Artificial Sequence: Synthetic oligonucleotide
gcgccuccgcacagaucca

SEQ ID NO: 2282970 - RNA, 19 nt, Artificial Sequence
  Description of Artificial Sequence: Synthetic oligonucleotide
gcugcccguggagaacauu

SEQ ID NO: 2282971 - RNA, 19 nt, Artificial Sequence
  Description of Artificial Sequence: Synthetic oligonucleotide
gucccggguccgagccaua

SEQ ID NO: 2282972 - RNA, 19 nt, Artificial Sequence
  Description of Artificial Sequence: Synthetic oligonucleotide
cgagcgccuccgcacagau

SEQ ID NO: 2282973 - RNA, 19 nt, Artificial Sequence
  Description of Artificial Sequence: Synthetic oligonucleotide
cccgguacuggagcaucau

SEQ ID NO: 2282974 - RNA, 19 nt, Artificial Sequence
  Description of Artificial Sequence: Synthetic oligonucleotide
cggagaugcgcuccccauu

SEQ ID NO: 2282975 - RNA, 19 nt, Artificial Sequence
  Description of Artificial Sequence: Synthetic oligonucleotide
cgccuccgcacagauccaa

SEQ ID NO: 2282976 - RNA, 19 nt, Artificial Sequence
  Description of Artificial Sequence: Synthetic oligonucleotide
cccaaccaucuuccuucau

SEQ ID NO: 2282977 - RNA, 19 nt, Artificial Sequence
  Description of Artificial Sequence: Synthetic oligonucleotide
ccaaggucguaggccucuu

SEQ ID NO: 2282978 - RNA, 19 nt, Artificial Sequence
  Description of Artificial Sequence: Synthetic oligonucleotide
cgcuccccauuccgcagau

SEQ ID NO: 2282979 - RNA, 19 nt, Artificial Sequence
  Description of Artificial Sequence: Synthetic oligonucleotide
gcccugcggccaaggucgu

SEQ ID NO: 2282980 - RNA, 19 nt, Artificial Sequence
  Description of Artificial Sequence: Synthetic oligonucleotide
cccugcggccaaggucgua

SEQ ID NO: 2282981 - RNA, 19 nt, Artificial Sequence
  Description of Artificial Sequence: Synthetic oligonucleotide
ccacuccucccugccccuu

SEQ ID NO: 2282982 - RNA, 19 nt, Artificial Sequence
  Description of Artificial Sequence: Synthetic oligonucleotide
ugugucaagauuaugaucu

SEQ ID NO: 2282983 - RNA, 19 nt, Artificial Sequence
  Description of Artificial Sequence: Synthetic oligonucleotide
uguauguaaaacuucagag

SEQ ID NO: 2282984 - RNA, 19 nt, Artificial Sequence
  Description of Artificial Sequence: Synthetic oligonucleotide
aagauuaugaucuguuuca

SEQ ID NO: 2282985 - RNA, 19 nt, Artificial Sequence
  Description of Artificial Sequence: Synthetic oligonucleotide
uuuaaaguuucaauguuga

SEQ ID NO: 2282986 - RNA, 19 nt, Artificial Sequence
  Description of Artificial Sequence: Synthetic oligonucleotide
aaugccaguaauuuuaaaa

SEQ ID NO: 2282987 - RNA, 19 nt, Artificial Sequence
  Description of Artificial Sequence: Synthetic oligonucleotide
uugaaagacuaucagaaga

SEQ ID NO: 2282988 - RNA, 19 nt, Artificial Sequence
  Description of Artificial Sequence: Synthetic oligonucleotide
ucagcauagccacagaugc

SEQ ID NO: 2282989 - RNA, 19 nt, Artificial Sequence
  Description of Artificial Sequence: Synthetic oligonucleotide
uuuaacuuuuccugaacgg

SEQ ID NO: 2282990 - RNA, 19 nt, Artificial Sequence
  Description of Artificial Sequence: Synthetic oligonucleotide
aaauucucaaucguaacag

SEQ ID NO: 2282991 - RNA, 19 nt, Artificial Sequence
  Description of Artificial Sequence: Synthetic oligonucleotide
aguaauuuuaaaaugucag

SEQ ID NO: 2282992 - RNA, 19 nt, Artificial Sequence
  Description of Artificial Sequence: Synthetic oligonucleotide
aacacugugaaggagucgg

SEQ ID NO: 2282993 - RNA, 19 nt, Artificial Sequence
  Description of Artificial Sequence: Synthetic oligonucleotide
aaacccucucagcauagcc

SEQ ID NO: 2282994 - RNA, 19 nt, Artificial Sequence
  Description of Artificial Sequence: Synthetic oligonucleotide
uccauuuccuggaacaagg

SEQ ID NO: 2282995 - RNA, 19 nt, Artificial Sequence
  Description of Artificial Sequence: Synthetic oligonucleotide
gauaucauuaucuucuaga

SEQ ID NO: 2282996 - RNA, 19 nt, Artificial Sequence
  Description of Artificial Sequence: Synthetic oligonucleotide
ucgacuaucucauuuaacu

SEQ ID NO: 2282997 - RNA, 19 nt, Artificial Sequence
  Description of Artificial Sequence: Synthetic oligonucleotide
uuuucuucagccuccgacg

SEQ ID NO: 2282998 - RNA, 19 nt, Artificial Sequence
  Description of Artificial Sequence: Synthetic oligonucleotide
auuaugaucuguuucaaaa

SEQ ID NO: 2282999 - RNA, 19 nt, Artificial Sequence
  Description of Artificial Sequence: Synthetic oligonucleotide
aguuucaauguugaaagac

SEQ ID NO: 2283000 - RNA, 19 nt, Artificial Sequence
  Description of Artificial Sequence: Synthetic oligonucleotide
cucaagaaauucucaaucg

SEQ ID NO: 2283001 - RNA, 19 nt, Artificial Sequence
  Description of Artificial Sequence: Synthetic oligonucleotide
uaucugaucgacuaucuca

SEQ ID NO: 2283002 - RNA, 19 nt, Artificial Sequence
  Description of Artificial Sequence: Synthetic oligonucleotide
uuucugauaaacacuguga

SEQ ID NO: 2283003 - RNA, 19 nt, Artificial Sequence
  Description of Artificial Sequence: Synthetic oligonucleotide
uucuagauuuuccugggag

SEQ ID NO: 2283004 - RNA, 19 nt, Artificial Sequence
  Description of Artificial Sequence: Synthetic oligonucleotide
agaaauucucaaucguaac

SEQ ID NO: 2283005 - RNA, 19 nt, Artificial Sequence
  Description of Artificial Sequence: Synthetic oligonucleotide
ugcggcaacaggauuauag

SEQ ID NO: 2283006 - RNA, 19 nt, Artificial Sequence
  Description of Artificial Sequence: Synthetic oligonucleotide
agaauauuucauaaagggg

SEQ ID NO: 2283007 - RNA, 19 nt, Artificial Sequence
  Description of Artificial Sequence: Synthetic oligonucleotide
auuaucuucuagauuuucc

SEQ ID NO: 2283008 - RNA, 19 nt, Artificial Sequence
  Description of Artificial Sequence: Synthetic oligonucleotide
uggaguuucugauaaacac

SEQ ID NO: 2283009 - RNA, 19 nt, Artificial Sequence
  Description of Artificial Sequence: Synthetic oligonucleotide
uuuguaauuuauugggcga

SEQ ID NO: 2283010 - RNA, 19 nt, Artificial Sequence
  Description of Artificial Sequence: Synthetic oligonucleotide
uucucaaucguaacaggag

SEQ ID NO: 2283011 - RNA, 19 nt, Artificial Sequence
  Description of Artificial Sequence: Synthetic oligonucleotide
uuucacuguauguaaaacu

SEQ ID NO: 2283012 - RNA, 19 nt, Artificial Sequence
  Description of Artificial Sequence: Synthetic oligonucleotide
gugaagaucauuaccaugc

SEQ ID NO: 2283013 - RNA, 19 nt, Artificial Sequence
  Description of Artificial Sequence: Synthetic oligonucleotide
ucuucuagauuuuccuggg

SEQ ID NO: 2283014 - RNA, 19 nt, Artificial Sequence
  Description of Artificial Sequence: Synthetic oligonucleotide
ucaaacuuggccuuccaac

SEQ ID NO: 2283015 - RNA, 19 nt, Artificial Sequence
  Description of Artificial Sequence: Synthetic oligonucleotide
uuaacuuuuccugaacggc

SEQ ID NO: 2283016 - RNA, 19 nt, Artificial Sequence
  Description of Artificial Sequence: Synthetic oligonucleotide
uucacuguauguaaaacuu

SEQ ID NO: 2283017 - RNA, 19 nt, Artificial Sequence
  Description of Artificial Sequence: Synthetic oligonucleotide
aauaacugcuuuccgcuga

SEQ ID NO: 2283018 - RNA, 19 nt, Artificial Sequence
  Description of Artificial Sequence: Synthetic oligonucleotide
uaugaucuguuucaaaaua

SEQ ID NO: 2283019 - RNA, 19 nt, Artificial Sequence
  Description of Artificial Sequence: Synthetic oligonucleotide
uucagaguagucugcacag

SEQ ID NO: 2283020 - RNA, 19 nt, Artificial Sequence
  Description of Artificial Sequence: Synthetic oligonucleotide
gggagaauauuucauaaag

SEQ ID NO: 2283021 - RNA, 19 nt, Artificial Sequence
  Description of Artificial Sequence: Synthetic oligonucleotide
guuucugauaaacacugug

SEQ ID NO: 2283022 - RNA, 19 nt, Artificial Sequence
  Description of Artificial Sequence: Synthetic oligonucleotide
auagucaggaucauccucg

SEQ ID NO: 2283023 - RNA, 19 nt, Artificial Sequence
  Description of Artificial Sequence: Synthetic oligonucleotide
auaucauuaucuucuagau

SEQ ID NO: 2283024 - RNA, 19 nt, Artificial Sequence
  Description of Artificial Sequence: Synthetic oligonucleotide
uuucaauguugaaagacua

SEQ ID NO: 2283025 - RNA, 19 nt, Artificial Sequence
  Description of Artificial Sequence: Synthetic oligonucleotide
ucucaaucguaacaggagu

SEQ ID NO: 2283026 - RNA, 19 nt, Artificial Sequence
  Description of Artificial Sequence: Synthetic oligonucleotide
uuuaucugaucgacuaucu

SEQ ID NO: 2283027 - RNA, 19 nt, Artificial Sequence
  Description of Artificial Sequence: Synthetic oligonucleotide
aaugucagagauaucauua

SEQ ID NO: 2283028 - RNA, 19 nt, Artificial Sequence
  Description of Artificial Sequence: Synthetic oligonucleotide
agauccaaacccucucagc

SEQ ID NO: 2283029 - RNA, 19 nt, Artificial Sequence
  Description of Artificial Sequence: Synthetic oligonucleotide
uagucugucaucguggccc

SEQ ID NO: 2283030 - RNA, 19 nt, Artificial Sequence
  Description of Artificial Sequence: Synthetic oligonucleotide
ugccaguaauuuuaaaaug

SEQ ID NO: 2283031 - RNA, 19 nt, Artificial Sequence
  Description of Artificial Sequence: Synthetic oligonucleotide
aacaaggacucauccaccu

SEQ ID NO: 2283032 - RNA, 19 nt, Artificial Sequence
  Description of Artificial Sequence: Synthetic oligonucleotide
gauccaaacccucucagca

SEQ ID NO: 2283033 - RNA, 19 nt, Artificial Sequence
  Description of Artificial Sequence: Synthetic oligonucleotide
caagauuaugaucuguuuc

SEQ ID NO: 2283034 - RNA, 19 nt, Artificial Sequence
  Description of Artificial Sequence: Synthetic oligonucleotide
cauuaccaugccaagauuc

SEQ ID NO: 2283035 - RNA, 19 nt, Artificial Sequence
  Description of Artificial Sequence: Synthetic oligonucleotide
ugaacggcugucacaagag

SEQ ID NO: 2283036 - RNA, 19 nt, Artificial Sequence
  Description of Artificial Sequence: Synthetic oligonucleotide
augccaguaauuuuaaaau

SEQ ID NO: 2283037 - RNA, 19 nt, Artificial Sequence
  Description of Artificial Sequence: Synthetic oligonucleotide
uuucaaaauaacugcuuuc

SEQ ID NO: 2283038 - RNA, 19 nt, Artificial Sequence
  Description of Artificial Sequence: Synthetic oligonucleotide
uccaacucaagaaauucuc

SEQ ID NO: 2283039 - RNA, 19 nt, Artificial Sequence
  Description of Artificial Sequence: Synthetic oligonucleotide
aaauaacugcuuuccgcug

SEQ ID NO: 2283040 - RNA, 19 nt, Artificial Sequence
  Description of Artificial Sequence: Synthetic oligonucleotide
ucuagauuuuccugggaga

SEQ ID NO: 2283041 - RNA, 19 nt, Artificial Sequence
  Description of Artificial Sequence: Synthetic oligonucleotide
augugucaagauuaugauc

SEQ ID NO: 2283042 - RNA, 19 nt, Artificial Sequence
  Description of Artificial Sequence: Synthetic oligonucleotide
aucauuaccaugccaagau

SEQ ID NO: 2283043 - RNA, 19 nt, Artificial Sequence
  Description of Artificial Sequence: Synthetic oligonucleotide
uuuuccugggagaauauuu

SEQ ID NO: 2283044 - RNA, 19 nt, Artificial Sequence
  Description of Artificial Sequence: Synthetic oligonucleotide
uaucuucuagauuuuccug

SEQ ID NO: 2283045 - RNA, 19 nt, Artificial Sequence
  Description of Artificial Sequence: Synthetic oligonucleotide
ucaauguugaaagacuauc

SEQ ID NO: 2283046 - RNA, 19 nt, Artificial Sequence
  Description of Artificial Sequence: Synthetic oligonucleotide
ugauaaacacugugaagga

SEQ ID NO: 2283047 - RNA, 19 nt, Artificial Sequence
  Description of Artificial Sequence: Synthetic oligonucleotide
ggauagauggacuccagag

SEQ ID NO: 2283048 - RNA, 19 nt, Artificial Sequence
  Description of Artificial Sequence: Synthetic oligonucleotide
uuguaauuuauugggcgag

SEQ ID NO: 2283049 - RNA, 19 nt, Artificial Sequence
  Description of Artificial Sequence: Synthetic oligonucleotide
uuggccuuccaacucaaga

SEQ ID NO: 2283050 - RNA, 19 nt, Artificial Sequence
  Description of Artificial Sequence: Synthetic oligonucleotide
aaggggagcuucaucaggg

SEQ ID NO: 2283051 - RNA, 19 nt, Artificial Sequence
  Description of Artificial Sequence: Synthetic oligonucleotide
gauaaacacugugaaggag

SEQ ID NO: 2283052 - RNA, 19 nt, Artificial Sequence
  Description of Artificial Sequence: Synthetic oligonucleotide
ugugaaggagucgggauag

SEQ ID NO: 2283053 - RNA, 19 nt, Artificial Sequence
  Description of Artificial Sequence: Synthetic oligonucleotide
ucagccuccgacgucacgg

SEQ ID NO: 2283054 - RNA, 19 nt, Artificial Sequence
  Description of Artificial Sequence: Synthetic oligonucleotide
uuuuaucugaucgacuauc

SEQ ID NO: 2283055 - RNA, 19 nt, Artificial Sequence
  Description of Artificial Sequence: Synthetic oligonucleotide
ugaagaucauuaccaugcc

SEQ ID NO: 2283056 - RNA, 19 nt, Artificial Sequence
  Description of Artificial Sequence: Synthetic oligonucleotide
gguaaauggugaaagcugg

SEQ ID NO: 2283057 - RNA, 19 nt, Artificial Sequence
  Description of Artificial Sequence: Synthetic oligonucleotide
uuccaacucaagaaauucu

SEQ ID NO: 2283058 - RNA, 19 nt, Artificial Sequence
  Description of Artificial Sequence: Synthetic oligonucleotide
ggaacaaggacucauccac

SEQ ID NO: 2283059 - RNA, 19 nt, Artificial Sequence
  Description of Artificial Sequence: Synthetic oligonucleotide
auaaacacugugaaggagu

SEQ ID NO: 2283060 - RNA, 19 nt, Artificial Sequence
  Description of Artificial Sequence: Synthetic oligonucleotide
ucaaucguaacaggagugc

SEQ ID NO: 2283061 - RNA, 19 nt, Artificial Sequence
  Description of Artificial Sequence: Synthetic oligonucleotide
caagauucuccucagccug

SEQ ID NO: 2283062 - RNA, 19 nt, Artificial Sequence
  Description of Artificial Sequence: Synthetic oligonucleotide
acuaucagaagaauauucu

SEQ ID NO: 2283063 - RNA, 19 nt, Artificial Sequence
  Description of Artificial Sequence: Synthetic oligonucleotide
agucgggauagauggacuc

SEQ ID NO: 2283064 - RNA, 19 nt, Artificial Sequence
  Description of Artificial Sequence: Synthetic oligonucleotide
gauaucagaugugucaaga

SEQ ID NO: 2283065 - RNA, 19 nt, Artificial Sequence
  Description of Artificial Sequence: Synthetic oligonucleotide
gucagggacagucugucag

SEQ ID NO: 2283066 - RNA, 19 nt, Artificial Sequence
  Description of Artificial Sequence: Synthetic oligonucleotide
uggguggaguuucugauaa

SEQ ID NO: 2283067 - RNA, 19 nt, Artificial Sequence
  Description of Artificial Sequence: Synthetic oligonucleotide
uauugggcgaguuuauuua

SEQ ID NO: 2283068 - RNA, 19 nt, Artificial Sequence
  Description of Artificial Sequence: Synthetic oligonucleotide
ugucacaagagugaagauc

SEQ ID NO: 2283069 - RNA, 19 nt, Artificial Sequence
  Description of Artificial Sequence: Synthetic oligonucleotide
agaucauuaccaugccaag

SEQ ID NO: 2283070 - RNA, 19 nt, Artificial Sequence
  Description of Artificial Sequence: Synthetic oligonucleotide
cucaaucguaacaggagug

SEQ ID NO: 2283071 - RNA, 19 nt, Artificial Sequence
  Description of Artificial Sequence: Synthetic oligonucleotide
ugcuguggcagucacgccu

SEQ ID NO: 2283072 - RNA, 19 nt, Artificial Sequence
  Description of Artificial Sequence: Synthetic oligonucleotide
ugucagagauaucauuauc

SEQ ID NO: 2283073 - RNA, 19 nt, Artificial Sequence
  Description of Artificial Sequence: Synthetic oligonucleotide
ucagaagaauauucuccug

SEQ ID NO: 2283074 - RNA, 19 nt, Artificial Sequence
  Description of Artificial Sequence: Synthetic oligonucleotide
aagauucuccucagccugc

SEQ ID NO: 2283075 - RNA, 19 nt, Artificial Sequence
  Description of Artificial Sequence: Synthetic oligonucleotide
gaguagucugcacaguuuc

SEQ ID NO: 2283076 - RNA, 19 nt, Artificial Sequence
  Description of Artificial Sequence: Synthetic oligonucleotide
auagccacagaugcugugg

SEQ ID NO: 2283077 - RNA, 19 nt, Artificial Sequence
  Description of Artificial Sequence: Synthetic oligonucleotide
uucaauguugaaagacuau

SEQ ID NO: 2283078 - RNA, 19 nt, Artificial Sequence
  Description of Artificial Sequence: Synthetic oligonucleotide
uuauugggcgaguuuauuu

SEQ ID NO: 2283079 - RNA, 19 nt, Artificial Sequence
  Description of Artificial Sequence: Synthetic oligonucleotide
agucugagucacucucugc

SEQ ID NO: 2283080 - RNA, 19 nt, Artificial Sequence
  Description of Artificial Sequence: Synthetic oligonucleotide
uggaacaaggacucaucca

SEQ ID NO: 2283081 - RNA, 19 nt, Artificial Sequence
  Description of Artificial Sequence: Synthetic oligonucleotide
aaggaagauccaaacccuc

SEQ ID NO: 2283082 - RNA, 19 nt, Artificial Sequence
  Description of Artificial Sequence: Synthetic oligonucleotide
uuauagucaggaucauccu

SEQ ID NO: 2283083 - RNA, 19 nt, Artificial Sequence
  Description of Artificial Sequence: Synthetic oligonucleotide
uaaauggugaaagcugggu

SEQ ID NO: 2283084 - RNA, 19 nt, Artificial Sequence
  Description of Artificial Sequence: Synthetic oligonucleotide
uccgacgucacgguaaaug

SEQ ID NO: 2283085 - RNA, 19 nt, Artificial Sequence
  Description of Artificial Sequence: Synthetic oligonucleotide
caagagugaagaucauuac

SEQ ID NO: 2283086 - RNA, 19 nt, Artificial Sequence
  Description of Artificial Sequence: Synthetic oligonucleotide
guauguaaaacuucagagu

SEQ ID NO: 2283087 - RNA, 19 nt, Artificial Sequence
  Description of Artificial Sequence: Synthetic oligonucleotide
aggaacuggauaucagaug

SEQ ID NO: 2283088 - RNA, 19 nt, Artificial Sequence
  Description of Artificial Sequence: Synthetic oligonucleotide
acuucagaguagucugcac

SEQ ID NO: 2283089 - RNA, 19 nt, Artificial Sequence
  Description of Artificial Sequence: Synthetic oligonucleotide
cacguuguucccagcaucc

SEQ ID NO: 2283090 - RNA, 19 nt, Artificial Sequence
  Description of Artificial Sequence: Synthetic oligonucleotide
acaagagugaagaucauua

SEQ ID NO: 2283091 - RNA, 19 nt, Artificial Sequence
  Description of Artificial Sequence: Synthetic oligonucleotide
cuguauguaaaacuucaga

SEQ ID NO: 2283092 - RNA, 19 nt, Artificial Sequence
  Description of Artificial Sequence: Synthetic oligonucleotide
ugaucgacuaucucauuua

SEQ ID NO: 2283093 - RNA, 19 nt, Artificial Sequence
  Description of Artificial Sequence: Synthetic oligonucleotide
acgguaaauggugaaagcu

SEQ ID NO: 2283094 - RNA, 19 nt, Artificial Sequence
  Description of Artificial Sequence: Synthetic oligonucleotide
aaaaugucagagauaucau

SEQ ID NO: 2283095 - RNA, 19 nt, Artificial Sequence
  Description of Artificial Sequence: Synthetic oligonucleotide
aaacacugugaaggagucg

SEQ ID NO: 2283096 - RNA, 19 nt, Artificial Sequence
  Description of Artificial Sequence: Synthetic oligonucleotide
gaagaucauuaccaugcca

SEQ ID NO: 2283097 - RNA, 19 nt, Artificial Sequence
  Description of Artificial Sequence: Synthetic oligonucleotide
uuaucugaucgacuaucuc

SEQ ID NO: 2283098 - RNA, 19 nt, Artificial Sequence
  Description of Artificial Sequence: Synthetic oligonucleotide
cauggaacaguuucuucuc

SEQ ID NO: 2283099 - RNA, 19 nt, Artificial Sequence
  Description of Artificial Sequence: Synthetic oligonucleotide
ucgccguagucugucaucg

SEQ ID NO: 2283100 - RNA, 19 nt, Artificial Sequence
  Description of Artificial Sequence: Synthetic oligonucleotide
aaucguaacaggagugcca

SEQ ID NO: 2283101 - RNA, 19 nt, Artificial Sequence
  Description of Artificial Sequence: Synthetic oligonucleotide
gcaacaggauuauagucag

SEQ ID NO: 2283102 - RNA, 19 nt, Artificial Sequence
  Description of Artificial Sequence: Synthetic oligonucleotide
auucucaaucguaacagga

SEQ ID NO: 2283103 - RNA, 19 nt, Artificial Sequence
  Description of Artificial Sequence: Synthetic oligonucleotide
auaacugcuuuccgcugag

SEQ ID NO: 2283104 - RNA, 19 nt, Artificial Sequence
  Description of Artificial Sequence: Synthetic oligonucleotide
gaaggagucgggauagaug

SEQ ID NO: 2283105 - RNA, 19 nt, Artificial Sequence
  Description of Artificial Sequence: Synthetic oligonucleotide
auaucagaugugucaagau

SEQ ID NO: 2283106 - RNA, 19 nt, Artificial Sequence
  Description of Artificial Sequence: Synthetic oligonucleotide
cacgguaaauggugaaagc

SEQ ID NO: 2283107 - RNA, 19 nt, Artificial Sequence
  Description of Artificial Sequence: Synthetic oligonucleotide
ucugucaucguggcccgcg

SEQ ID NO: 2283108 - RNA, 19 nt, Artificial Sequence
  Description of Artificial Sequence: Synthetic oligonucleotide
guaaauggugaaagcuggg

SEQ ID NO: 2283109 - RNA, 19 nt, Artificial Sequence
  Description of Artificial Sequence: Synthetic oligonucleotide
uaacaggagugccauggaa

SEQ ID NO: 2283110 - RNA, 19 nt, Artificial Sequence
  Description of Artificial Sequence: Synthetic oligonucleotide
uccugaacggcugucacaa

SEQ ID NO: 2283111 - RNA, 19 nt, Artificial Sequence
  Description of Artificial Sequence: Synthetic oligonucleotide
cuucagaguagucugcaca

SEQ ID NO: 2283112 - RNA, 19 nt, Artificial Sequence
  Description of Artificial Sequence: Synthetic oligonucleotide
auguaaaacuucagaguag

SEQ ID NO: 2283113 - RNA, 19 nt, Artificial Sequence
  Description of Artificial Sequence: Synthetic oligonucleotide
uguaauuuauugggcgagu

SEQ ID NO: 2283114 - RNA, 19 nt, Artificial Sequence
  Description of Artificial Sequence: Synthetic oligonucleotide
agucacgccucucuggagu

SEQ ID NO: 2283115 - RNA, 19 nt, Artificial Sequence
  Description of Artificial Sequence: Synthetic oligonucleotide
caacucguugcgcugcucc

SEQ ID NO: 2283116 - RNA, 19 nt, Artificial Sequence
  Description of Artificial Sequence: Synthetic oligonucleotide
gauuaugaucuguuucaaa

SEQ ID NO: 2283117 - RNA, 19 nt, Artificial Sequence
  Description of Artificial Sequence: Synthetic oligonucleotide
uccaaacccucucagcaua

SEQ ID NO: 2283118 - RNA, 19 nt, Artificial Sequence
  Description of Artificial Sequence: Synthetic oligonucleotide
gaugugucaagauuaugau

SEQ ID NO: 2283119 - RNA, 19 nt, Artificial Sequence
  Description of Artificial Sequence: Synthetic oligonucleotide
gacuaucucauuuaacuuu

SEQ ID NO: 2283120 - RNA, 19 nt, Artificial Sequence
  Description of Artificial Sequence: Synthetic oligonucleotide
augucagagauaucauuau

SEQ ID NO: 2283121 - RNA, 19 nt, Artificial Sequence
  Description of Artificial Sequence: Synthetic oligonucleotide
cugagucacucucugcggc

SEQ ID NO: 2283122 - RNA, 19 nt, Artificial Sequence
  Description of Artificial Sequence: Synthetic oligonucleotide
gucagucugagucacucuc

SEQ ID NO: 2283123 - RNA, 19 nt, Artificial Sequence
  Description of Artificial Sequence: Synthetic oligonucleotide
ggaacaguuucuucucugc

SEQ ID NO: 2283124 - RNA, 19 nt, Artificial Sequence
  Description of Artificial Sequence: Synthetic oligonucleotide
ugucaagauuaugaucugu

SEQ ID NO: 2283125 - RNA, 19 nt, Artificial Sequence
  Description of Artificial Sequence: Synthetic oligonucleotide
auuaccaugccaagauucu

SEQ ID NO: 2283126 - RNA, 19 nt, Artificial Sequence
  Description of Artificial Sequence: Synthetic oligonucleotide
gauuauagucaggaucauc

SEQ ID NO: 2283127 - RNA, 19 nt, Artificial Sequence
  Description of Artificial Sequence: Synthetic oligonucleotide
caaucguaacaggagugcc

SEQ ID NO: 2283128 - RNA, 19 nt, Artificial Sequence
  Description of Artificial Sequence: Synthetic oligonucleotide
gaucauuaccaugccaaga

SEQ ID NO: 2283129 - RNA, 19 nt, Artificial Sequence
  Description of Artificial Sequence: Synthetic oligonucleotide
caacucaagaaauucucaa

SEQ ID NO: 2283130 - RNA, 19 nt, Artificial Sequence
  Description of Artificial Sequence: Synthetic oligonucleotide
aucgacuaucucauuuaac

SEQ ID NO: 2283131 - RNA, 19 nt, Artificial Sequence
  Description of Artificial Sequence: Synthetic oligonucleotide
agucugucaucguggcccg

SEQ ID NO: 2283132 - RNA, 19 nt, Artificial Sequence
  Description of Artificial Sequence: Synthetic oligonucleotide
gucagagauaucauuaucu

SEQ ID NO: 2283133 - RNA, 19 nt, Artificial Sequence
  Description of Artificial Sequence: Synthetic oligonucleotide
guugcgcugcuccucgccg

SEQ ID NO: 2283134 - RNA, 19 nt, Artificial Sequence
  Description of Artificial Sequence: Synthetic oligonucleotide
aacucguugcgcugcuccu

SEQ ID NO: 2283135 - RNA, 19 nt, Artificial Sequence
  Description of Artificial Sequence: Synthetic oligonucleotide
agcuccaaaucauccauuu

SEQ ID NO: 2283136 - RNA, 19 nt, Artificial Sequence
  Description of Artificial Sequence: Synthetic oligonucleotide
auugggcgaguuuauuuaa

SEQ ID NO: 2283137 - RNA, 19 nt, Artificial Sequence
  Description of Artificial Sequence: Synthetic oligonucleotide
gaucgacuaucucauuuaa

SEQ ID NO: 2283138 - RNA, 19 nt, Artificial Sequence
  Description of Artificial Sequence: Synthetic oligonucleotide
augaucuguuucaaaauaa

SEQ ID NO: 2283139 - RNA, 19 nt, Artificial Sequence
  Description of Artificial Sequence: Synthetic oligonucleotide
ggcaacaggauuauaguca

SEQ ID NO: 2283140 - RNA, 19 nt, Artificial Sequence
  Description of Artificial Sequence: Synthetic oligonucleotide
accaugccaagauucuccu

SEQ ID NO: 2283141 - RNA, 19 nt, Artificial Sequence
  Description of Artificial Sequence: Synthetic oligonucleotide
ucauuaccaugccaagauu

SEQ ID NO: 2283142 - RNA, 19 nt, Artificial Sequence
  Description of Artificial Sequence: Synthetic oligonucleotide
ucgggauagauggacucca

SEQ ID NO: 2283143 - RNA, 19 nt, Artificial Sequence
  Description of Artificial Sequence: Synthetic oligonucleotide
cucguugcgcugcuccucg

SEQ ID NO: 2283144 - RNA, 19 nt, Artificial Sequence
  Description of Artificial Sequence: Synthetic oligonucleotide
caggagcucugcaucaaac

SEQ ID NO: 2283145 - RNA, 19 nt, Artificial Sequence
  Description of Artificial Sequence: Synthetic oligonucleotide
accuccacguuguucccag

SEQ ID NO: 2283146 - RNA, 19 nt, Artificial Sequence
  Description of Artificial Sequence: Synthetic oligonucleotide
gacagucugucagucugag

SEQ ID NO: 2283147 - RNA, 19 nt, Artificial Sequence
  Description of Artificial Sequence: Synthetic oligonucleotide
uugggcgaguuuauuuaaa

SEQ ID NO: 2283148 - RNA, 19 nt, Artificial Sequence
  Description of Artificial Sequence: Synthetic oligonucleotide
cugaacggcugucacaaga

SEQ ID NO: 2283149 - RNA, 19 nt, Artificial Sequence
  Description of Artificial Sequence: Synthetic oligonucleotide
uuccugaacggcugucaca

SEQ ID NO: 2283150 - RNA, 19 nt, Artificial Sequence
  Description of Artificial Sequence: Synthetic oligonucleotide
aucugaucgacuaucucau

SEQ ID NO: 2283151 - RNA, 19 nt, Artificial Sequence
  Description of Artificial Sequence: Synthetic oligonucleotide
uagucaggaucauccucgc

SEQ ID NO: 2283152 - RNA, 19 nt, Artificial Sequence
  Description of Artificial Sequence: Synthetic oligonucleotide
uaauuuccaggagcucugc

SEQ ID NO: 2283153 - RNA, 19 nt, Artificial Sequence
  Description of Artificial Sequence: Synthetic oligonucleotide
ccgacgucacgguaaaugg

SEQ ID NO: 2283154 - RNA, 19 nt, Artificial Sequence
  Description of Artificial Sequence: Synthetic oligonucleotide
agcuggguggaguuucuga

SEQ ID NO: 2283155 - RNA, 19 nt, Artificial Sequence
  Description of Artificial Sequence: Synthetic oligonucleotide
ugaaggagucgggauagau

SEQ ID NO: 2283156 - RNA, 19 nt, Artificial Sequence
  Description of Artificial Sequence: Synthetic oligonucleotide
ugucagucugagucacucu

SEQ ID NO: 2283157 - RNA, 19 nt, Artificial Sequence
  Description of Artificial Sequence: Synthetic oligonucleotide
aucguaacaggagugccau

SEQ ID NO: 2283158 - RNA, 19 nt, Artificial Sequence
  Description of Artificial Sequence: Synthetic oligonucleotide
caaacuuggccuuccaacu

SEQ ID NO: 2283159 - RNA, 19 nt, Artificial Sequence
  Description of Artificial Sequence: Synthetic oligonucleotide
uccacguuguucccagcau

SEQ ID NO: 2283160 - RNA, 19 nt, Artificial Sequence
  Description of Artificial Sequence: Synthetic oligonucleotide
uuuauugggcgaguuuauu

SEQ ID NO: 2283161 - RNA, 19 nt, Artificial Sequence
  Description of Artificial Sequence: Synthetic oligonucleotide
ugccaagauucuccucagc

SEQ ID NO: 2283162 - RNA, 19 nt, Artificial Sequence
  Description of Artificial Sequence: Synthetic oligonucleotide
cguaacaggagugccaugg

SEQ ID NO: 2283163 - RNA, 19 nt, Artificial Sequence
  Description of Artificial Sequence: Synthetic oligonucleotide
gugucaagauuaugaucug

SEQ ID NO: 2283164 - RNA, 19 nt, Artificial Sequence
  Description of Artificial Sequence: Synthetic oligonucleotide
gagauaucauuaucuucua

SEQ ID NO: 2283165 - RNA, 19 nt, Artificial Sequence
  Description of Artificial Sequence: Synthetic oligonucleotide
uuaccaugccaagauucuc

SEQ ID NO: 2283166 - RNA, 19 nt, Artificial Sequence
  Description of Artificial Sequence: Synthetic oligonucleotide
agauuaugaucuguuucaa

SEQ ID NO: 2283167 - RNA, 19 nt, Artificial Sequence
  Description of Artificial Sequence: Synthetic oligonucleotide
auccaaacccucucagcau

SEQ ID NO: 2283168 - RNA, 19 nt, Artificial Sequence
  Description of Artificial Sequence: Synthetic oligonucleotide
ggaagauccaaacccucuc

SEQ ID NO: 2283169 - RNA, 19 nt, Artificial Sequence
  Description of Artificial Sequence: Synthetic oligonucleotide
ggcgaguuuauuuaaaguu

SEQ ID NO: 2283170 - RNA, 19 nt, Artificial Sequence
  Description of Artificial Sequence: Synthetic oligonucleotide
cuaucucauuuaacuuuuc

SEQ ID NO: 2283171 - RNA, 19 nt, Artificial Sequence
  Description of Artificial Sequence: Synthetic oligonucleotide
aggaagauccaaacccucu

SEQ ID NO: 2283172 - RNA, 19 nt, Artificial Sequence
  Description of Artificial Sequence: Synthetic oligonucleotide
cgaguuuauuuaaaguuuc

SEQ ID NO: 2283173 - RNA, 19 nt, Artificial Sequence
  Description of Artificial Sequence: Synthetic oligonucleotide
acggcugucacaagaguga

SEQ ID NO: 2283174 - RNA, 19 nt, Artificial Sequence
  Description of Artificial Sequence: Synthetic oligonucleotide
guagucugucaucguggcc

SEQ ID NO: 2283175 - RNA, 19 nt, Artificial Sequence
  Description of Artificial Sequence: Synthetic oligonucleotide
gucaucguggcccgcgcug

SEQ ID NO: 2283176 - RNA, 19 nt, Artificial Sequence
  Description of Artificial Sequence: Synthetic oligonucleotide
ccguagucugucaucgugg

SEQ ID NO: 2283177 - RNA, 19 nt, Artificial Sequence
  Description of Artificial Sequence: Synthetic oligonucleotide
agacuaucagaagaauauu

SEQ ID NO: 2283178 - RNA, 19 nt, Artificial Sequence
  Description of Artificial Sequence: Synthetic oligonucleotide
gucgggauagauggacucc

SEQ ID NO: 2283179 - RNA, 19 nt, Artificial Sequence
  Description of Artificial Sequence: Synthetic oligonucleotide
auuuauugggcgaguuuau

SEQ ID NO: 2283180 - RNA, 19 nt, Artificial Sequence
  Description of Artificial Sequence: Synthetic oligonucleotide
ucaucguggcccgcgcugc

SEQ ID NO: 2283181 - RNA, 19 nt, Artificial Sequence
  Description of Artificial Sequence: Synthetic oligonucleotide
cgguaaauggugaaagcug

SEQ ID NO: 2283182 - RNA, 19 nt, Artificial Sequence
  Description of Artificial Sequence: Synthetic oligonucleotide
ugucaucguggcccgcgcu

SEQ ID NO: 2283183 - RNA, 19 nt, Artificial Sequence
  Description of Artificial Sequence: Synthetic oligonucleotide
uuguucccagcauccucca

SEQ ID NO: 2283184 - RNA, 19 nt, Artificial Sequence
  Description of Artificial Sequence: Synthetic oligonucleotide
guaacaggagugccaugga

SEQ ID NO: 2283185 - RNA, 19 nt, Artificial Sequence
  Description of Artificial Sequence: Synthetic oligonucleotide
guaaaacuucagaguaguc

SEQ ID NO: 2283186 - RNA, 19 nt, Artificial Sequence
  Description of Artificial Sequence: Synthetic oligonucleotide
uccaacucguugcgcugcu

SEQ ID NO: 2283187 - RNA, 19 nt, Artificial Sequence
  Description of Artificial Sequence: Synthetic oligonucleotide
ucugcggcaacaggauuau

SEQ ID NO: 2283188 - RNA, 19 nt, Artificial Sequence
  Description of Artificial Sequence: Synthetic oligonucleotide
cucugcggcaacaggauua

SEQ ID NO: 2283189 - RNA, 19 nt, Artificial Sequence
  Description of Artificial Sequence: Synthetic oligonucleotide
uagauuuuccugggagaau

SEQ ID NO: 2283190 - RNA, 19 nt, Artificial Sequence
  Description of Artificial Sequence: Synthetic oligonucleotide
gccaguaauuuuaaaaugu

SEQ ID NO: 2283191 - RNA, 19 nt, Artificial Sequence
  Description of Artificial Sequence: Synthetic oligonucleotide
cuuggccuuccaacucaag

SEQ ID NO: 2283192 - RNA, 19 nt, Artificial Sequence
  Description of Artificial Sequence: Synthetic oligonucleotide
agucagggacagucuguca

SEQ ID NO: 2283193 - RNA, 19 nt, Artificial Sequence
  Description of Artificial Sequence: Synthetic oligonucleotide
aguagucugcacaguuuca

SEQ ID NO: 2283194 - RNA, 19 nt, Artificial Sequence
  Description of Artificial Sequence: Synthetic oligonucleotide
cucgccguagucugucauc

SEQ ID NO: 2283195 - RNA, 19 nt, Artificial Sequence
  Description of Artificial Sequence: Synthetic oligonucleotide
ggagucgggauagauggac

SEQ ID NO: 2283196 - RNA, 19 nt, Artificial Sequence
  Description of Artificial Sequence: Synthetic oligonucleotide
ucucugcggcaacaggauu

SEQ ID NO: 2283197 - RNA, 19 nt, Artificial Sequence
  Description of Artificial Sequence: Synthetic oligonucleotide
cagaugugucaagauuaug

SEQ ID NO: 2283198 - RNA, 19 nt, Artificial Sequence
  Description of Artificial Sequence: Synthetic oligonucleotide
uggugaaagcuggguggag

SEQ ID NO: 2283199 - RNA, 19 nt, Artificial Sequence
  Description of Artificial Sequence: Synthetic oligonucleotide
ucguaacaggagugccaug

SEQ ID NO: 2283200 - RNA, 19 nt, Artificial Sequence
  Description of Artificial Sequence: Synthetic oligonucleotide
gucugucagucugagucac

SEQ ID NO: 2283201 - RNA, 19 nt, Artificial Sequence
  Description of Artificial Sequence: Synthetic oligonucleotide
cuccacguuguucccagca

SEQ ID NO: 2283202 - RNA, 19 nt, Artificial Sequence
  Description of Artificial Sequence: Synthetic oligonucleotide
caaacccucucagcauagc

SEQ ID NO: 2283203 - RNA, 19 nt, Artificial Sequence
  Description of Artificial Sequence: Synthetic oligonucleotide
ccaacucaagaaauucuca

SEQ ID NO: 2283204 - RNA, 19 nt, Artificial Sequence
  Description of Artificial Sequence: Synthetic oligonucleotide
agaguagucugcacaguuu

SEQ ID NO: 2283205 - RNA, 19 nt, Artificial Sequence
  Description of Artificial Sequence: Synthetic oligonucleotide
ucugaucgacuaucucauu

SEQ ID NO: 2283206 - RNA, 19 nt, Artificial Sequence
  Description of Artificial Sequence: Synthetic oligonucleotide
cugcuuuccgcugaguuua

SEQ ID NO: 2283207 - RNA, 19 nt, Artificial Sequence
  Description of Artificial Sequence: Synthetic oligonucleotide
cuuuccgcugaguuuauuu

SEQ ID NO: 2283208 - RNA, 19 nt, Artificial Sequence
  Description of Artificial Sequence: Synthetic oligonucleotide
cugugaaggagucgggaua

SEQ ID NO: 2283209 - RNA, 19 nt, Artificial Sequence
  Description of Artificial Sequence: Synthetic oligonucleotide
cuuuuccugaacggcuguc

SEQ ID NO: 2283210 - RNA, 19 nt, Artificial Sequence
  Description of Artificial Sequence: Synthetic oligonucleotide
ggaguuucugauaaacacu

SEQ ID NO: 2283211 - RNA, 19 nt, Artificial Sequence
  Description of Artificial Sequence: Synthetic oligonucleotide
agauucuccucagccugca

SEQ ID NO: 2283212 - RNA, 19 nt, Artificial Sequence
  Description of Artificial Sequence: Synthetic oligonucleotide
gucacgguaaauggugaaa

SEQ ID NO: 2283213 - RNA, 19 nt, Artificial Sequence
  Description of Artificial Sequence: Synthetic oligonucleotide
gucaagauuaugaucuguu

SEQ ID NO: 2283214 - RNA, 19 nt, Artificial Sequence
  Description of Artificial Sequence: Synthetic oligonucleotide
cguagucugucaucguggc

SEQ ID NO: 2283215 - RNA, 19 nt, Artificial Sequence
  Description of Artificial Sequence: Synthetic oligonucleotide
gucacgccucucuggaguc

SEQ ID NO: 2283216 - RNA, 19 nt, Artificial Sequence
  Description of Artificial Sequence: Synthetic oligonucleotide
ccauggaacaguuucuucu

SEQ ID NO: 2283217 - RNA, 19 nt, Artificial Sequence
  Description of Artificial Sequence: Synthetic oligonucleotide
cagucacgccucucuggag

SEQ ID NO: 2283218 - RNA, 19 nt, Artificial Sequence
  Description of Artificial Sequence: Synthetic oligonucleotide
gcagucacgccucucugga

SEQ ID NO: 2283219 - RNA, 19 nt, Artificial Sequence
  Description of Artificial Sequence: Synthetic oligonucleotide
cacgccucucuggagucag

SEQ ID NO: 2283220 - RNA, 19 nt, Artificial Sequence
  Description of Artificial Sequence: Synthetic oligonucleotide
ggccuuccaacucaagaaa

SEQ ID NO: 2283221 - RNA, 19 nt, Artificial Sequence
  Description of Artificial Sequence: Synthetic oligonucleotide
acgucacgguaaaugguga

SEQ ID NO: 2283222 - RNA, 19 nt, Artificial Sequence
  Description of Artificial Sequence: Synthetic oligonucleotide
agccugcaaugccaguaau

SEQ ID NO: 2283223 - RNA, 19 nt, Artificial Sequence
  Description of Artificial Sequence: Synthetic oligonucleotide
uccucgccguagucuguca

SEQ ID NO: 2283224 - RNA, 19 nt, Artificial Sequence
  Description of Artificial Sequence: Synthetic oligonucleotide
guagucugcacaguuucau

SEQ ID NO: 2283225 - RNA, 19 nt, Artificial Sequence
  Description of Artificial Sequence: Synthetic oligonucleotide
ugcuuuccgcugaguuuau

SEQ ID NO: 2283226 - RNA, 19 nt, Artificial Sequence
  Description of Artificial Sequence: Synthetic oligonucleotide
cuggguggaguuucugaua

SEQ ID NO: 2283227 - RNA, 19 nt, Artificial Sequence
  Description of Artificial Sequence: Synthetic oligonucleotide
ucacgccucucuggaguca

SEQ ID NO: 2283228 - RNA, 19 nt, Artificial Sequence
  Description of Artificial Sequence: Synthetic oligonucleotide
acguuguucccagcauccu

SEQ ID NO: 2283229 - RNA, 19 nt, Artificial Sequence
  Description of Artificial Sequence: Synthetic oligonucleotide
cuucagccuccgacgucac

SEQ ID NO: 2283230 - RNA, 19 nt, Artificial Sequence
  Description of Artificial Sequence: Synthetic oligonucleotide
gauuuuccugggagaauau

SEQ ID NO: 2283231 - RNA, 19 nt, Artificial Sequence
  Description of Artificial Sequence: Synthetic oligonucleotide
cagaguagucugcacaguu

SEQ ID NO: 2283232 - RNA, 19 nt, Artificial Sequence
  Description of Artificial Sequence: Synthetic oligonucleotide
ccacguuguucccagcauc

SEQ ID NO: 2283233 - RNA, 19 nt, Artificial Sequence
  Description of Artificial Sequence: Synthetic oligonucleotide
cagccugcaaugccaguaa

SEQ ID NO: 2283234 - RNA, 19 nt, Artificial Sequence
  Description of Artificial Sequence: Synthetic oligonucleotide
gagucgggauagauggacu

SEQ ID NO: 2283235 - RNA, 19 nt, Artificial Sequence
  Description of Artificial Sequence: Synthetic oligonucleotide
gcggcaacaggauuauagu

SEQ ID NO: 2283236 - RNA, 19 nt, Artificial Sequence
  Description of Artificial Sequence: Synthetic oligonucleotide
gcgaguuuauuuaaaguuu

SEQ ID NO: 2283237 - RNA, 19 nt, Artificial Sequence
  Description of Artificial Sequence: Synthetic oligonucleotide
cuccucgccguagucuguc

SEQ ID NO: 2283238 - RNA, 19 nt, Artificial Sequence
  Description of Artificial Sequence: Synthetic oligonucleotide
acuuggccuuccaacucaa

SEQ ID NO: 2283239 - RNA, 19 nt, Artificial Sequence
  Description of Artificial Sequence: Synthetic oligonucleotide
ccuccaacucguugcgcug

SEQ ID NO: 2283240 - RNA, 19 nt, Artificial Sequence
  Description of Artificial Sequence: Synthetic oligonucleotide
ccaagauucuccucagccu

SEQ ID NO: 2283241 - RNA, 19 nt, Artificial Sequence
  Description of Artificial Sequence: Synthetic oligonucleotide
gccuccaacucguugcgcu

SEQ ID NO: 2283242 - RNA, 19 nt, Artificial Sequence
  Description of Artificial Sequence: Synthetic oligonucleotide
ggggagcuucaucagggua

SEQ ID NO: 2283243 - RNA, 19 nt, Artificial Sequence
  Description of Artificial Sequence: Synthetic oligonucleotide
cagcauagccacagaugcu

SEQ ID NO: 2283244 - RNA, 19 nt, Artificial Sequence
  Description of Artificial Sequence: Synthetic oligonucleotide
cacaagagugaagaucauu

SEQ ID NO: 2283245 - RNA, 19 nt, Artificial Sequence
  Description of Artificial Sequence: Synthetic oligonucleotide
agccuccgacgucacggua

SEQ ID NO: 2283246 - RNA, 19 nt, Artificial Sequence
  Description of Artificial Sequence: Synthetic oligonucleotide
ccugcaaugccaguaauuu

SEQ ID NO: 2283247 - RNA, 19 nt, Artificial Sequence
  Description of Artificial Sequence: Synthetic oligonucleotide
ggacagucugucagucuga

SEQ ID NO: 2283248 - RNA, 19 nt, Artificial Sequence
  Description of Artificial Sequence: Synthetic oligonucleotide
ccugaacggcugucacaag

SEQ ID NO: 2283249 - RNA, 19 nt, Artificial Sequence
  Description of Artificial Sequence: Synthetic oligonucleotide
cgggauagauggacuccag

SEQ ID NO: 2283250 - RNA, 19 nt, Artificial Sequence
  Description of Artificial Sequence: Synthetic oligonucleotide
cguugcgcugcuccucgcc

SEQ ID NO: 2283251 - RNA, 19 nt, Artificial Sequence
  Description of Artificial Sequence: Synthetic oligonucleotide
ggagucagggacagucugu

SEQ ID NO: 2283252 - RNA, 19 nt, Artificial Sequence
  Description of Artificial Sequence: Synthetic oligonucleotide
gccuccgacgucacgguaa

SEQ ID NO: 2283253 - RNA, 19 nt, Artificial Sequence
  Description of Artificial Sequence: Synthetic oligonucleotide
ggauuauagucaggaucau

SEQ ID NO: 2283254 - RNA, 19 nt, Artificial Sequence
  Description of Artificial Sequence: Synthetic oligonucleotide
cagccuccgacgucacggu

SEQ ID NO: 2283255 - RNA, 19 nt, Artificial Sequence
  Description of Artificial Sequence: Synthetic oligonucleotide
cgucacgguaaauggugaa

SEQ ID NO: 2283256 - RNA, 19 nt, Artificial Sequence
  Description of Artificial Sequence: Synthetic oligonucleotide
gcucugcaucaaacuuggc

SEQ ID NO: 2283257 - RNA, 19 nt, Artificial Sequence
  Description of Artificial Sequence: Synthetic oligonucleotide
ggagcuucaucaggguauu

SEQ ID NO: 2283258 - RNA, 19 nt, Artificial Sequence
  Description of Artificial Sequence: Synthetic oligonucleotide
gcauagccacagaugcugu

SEQ ID NO: 2283259 - RNA, 19 nt, Artificial Sequence
  Description of Artificial Sequence: Synthetic oligonucleotide
ccuccgacgucacgguaaa

SEQ ID NO: 2283260 - RNA, 19 nt, Artificial Sequence
  Description of Artificial Sequence: Synthetic oligonucleotide
ggagugccauggaacaguu

SEQ ID NO: 2283261 - RNA, 19 nt, Artificial Sequence
  Description of Artificial Sequence: Synthetic oligonucleotide
gagugccauggaacaguuu

SEQ ID NO: 2283262 - RNA, 19 nt, Artificial Sequence
  Description of Artificial Sequence: Synthetic oligonucleotide
gccugcaaugccaguaauu

SEQ ID NO: 2283263 - RNA, 19 nt, Artificial Sequence
  Description of Artificial Sequence: Synthetic oligonucleotide
caucguggcccgcgcugcu

SEQ ID NO: 2283264 - RNA, 19 nt, Artificial Sequence
  Description of Artificial Sequence: Synthetic oligonucleotide
cgacgucacgguaaauggu

SEQ ID NO: 2283265 - RNA, 19 nt, Artificial Sequence
  Description of Artificial Sequence: Synthetic oligonucleotide
gagcuucaucaggguauuu

SEQ ID NO: 2283266 - RNA, 19 nt, Artificial Sequence
  Description of Artificial Sequence: Synthetic oligonucleotide
cguggcccgcgcugcugcc

SEQ ID NO: 2283267 - RNA, 19 nt, Artificial Sequence
  Description of Artificial Sequence: Synthetic oligonucleotide
cugcggcaacaggauuaua

SEQ ID NO: 2283268 - RNA, 19 nt, Artificial Sequence
  Description of Artificial Sequence: Synthetic oligonucleotide
cggcugucacaagagugaa

SEQ ID NO: 2283269 - RNA, 19 nt, Artificial Sequence
  Description of Artificial Sequence: Synthetic oligonucleotide
ccucgccguagucugucau

SEQ ID NO: 2283270 - RNA, 19 nt, Artificial Sequence
  Description of Artificial Sequence: Synthetic oligonucleotide
cuccgacgucacgguaaau

SEQ ID NO: 2283271 - RNA, 19 nt, Artificial Sequence
  Description of Artificial Sequence: Synthetic oligonucleotide
cgccguagucugucaucgu

SEQ ID NO: 2283272 - RNA, 19 nt, Artificial Sequence
  Description of Artificial Sequence: Synthetic oligonucleotide
aagaaaauaauauuuugag

SEQ ID NO: 2283273 - RNA, 19 nt, Artificial Sequence
  Description of Artificial Sequence: Synthetic oligonucleotide
uuuaccuuuaguaaugagg

SEQ ID NO: 2283274 - RNA, 19 nt, Artificial Sequence
  Description of Artificial Sequence: Synthetic oligonucleotide
uuaccuuuaguaaugaggg

SEQ ID NO: 2283275 - RNA, 19 nt, Artificial Sequence
  Description of Artificial Sequence: Synthetic oligonucleotide
aaaccaaacuaauugauag

SEQ ID NO: 2283276 - RNA, 19 nt, Artificial Sequence
  Description of Artificial Sequence: Synthetic oligonucleotide
cuauaauuuauuuuggccc

SEQ ID NO: 2283277 - RNA, 19 nt, Artificial Sequence
  Description of Artificial Sequence: Synthetic oligonucleotide
uauuauauuaguauuuugu

SEQ ID NO: 2283278 - RNA, 19 nt, Artificial Sequence
  Description of Artificial Sequence: Synthetic oligonucleotide
ucuagagcaaauauaauca

SEQ ID NO: 2283279 - RNA, 19 nt, Artificial Sequence
  Description of Artificial Sequence: Synthetic oligonucleotide
aauauuuugagcuaauaua

SEQ ID NO: 2283280 - RNA, 19 nt, Artificial Sequence
  Description of Artificial Sequence: Synthetic oligonucleotide
uuuguaacuaaauaccucc

SEQ ID NO: 2283281 - RNA, 19 nt, Artificial Sequence
  Description of Artificial Sequence: Synthetic oligonucleotide
uacaauagaaauauuauau

SEQ ID NO: 2283282 - RNA, 19 nt, Artificial Sequence
  Description of Artificial Sequence: Synthetic oligonucleotide
aaugcuucgauaccgaaug

SEQ ID NO: 2283283 - RNA, 19 nt, Artificial Sequence
  Description of Artificial Sequence: Synthetic oligonucleotide
aauagaaauauuauauuag

SEQ ID NO: 2283284 - RNA, 19 nt, Artificial Sequence
  Description of Artificial Sequence: Synthetic oligonucleotide
auuuugagcuaauauaaac

SEQ ID NO: 2283285 - RNA, 19 nt, Artificial Sequence
  Description of Artificial Sequence: Synthetic oligonucleotide
aacaaaauaccaaaauugg

SEQ ID NO: 2283286 - RNA, 19 nt, Artificial Sequence
  Description of Artificial Sequence: Synthetic oligonucleotide
uaaauuaucugugaguucc

SEQ ID NO: 2283287 - RNA, 19 nt, Artificial Sequence
  Description of Artificial Sequence: Synthetic oligonucleotide
agaaauauuauauuaguau

SEQ ID NO: 2283288 - RNA, 19 nt, Artificial Sequence
  Description of Artificial Sequence: Synthetic oligonucleotide
ugaauaguugcuguuaucg

SEQ ID NO: 2283289 - RNA, 19 nt, Artificial Sequence
  Description of Artificial Sequence: Synthetic oligonucleotide
aaaauuaucacaccauaaa

SEQ ID NO: 2283290 - RNA, 19 nt, Artificial Sequence
  Description of Artificial Sequence: Synthetic oligonucleotide
uuaaaugauggcaucaugu

SEQ ID NO: 2283291 - RNA, 19 nt, Artificial Sequence
  Description of Artificial Sequence: Synthetic oligonucleotide
uuuauuuuggcccucuaca

SEQ ID NO: 2283292 - RNA, 19 nt, Artificial Sequence
  Description of Artificial Sequence: Synthetic oligonucleotide
ugucuuuaaacuacugugg

SEQ ID NO: 2283293 - RNA, 19 nt, Artificial Sequence
  Description of Artificial Sequence: Synthetic oligonucleotide
uuaaacgugacccugaguu

SEQ ID NO: 2283294 - RNA, 19 nt, Artificial Sequence
  Description of Artificial Sequence: Synthetic oligonucleotide
caauguagagaacagauag

SEQ ID NO: 2283295 - RNA, 19 nt, Artificial Sequence
  Description of Artificial Sequence: Synthetic oligonucleotide
uugaauaauacauuuugca

SEQ ID NO: 2283296 - RNA, 19 nt, Artificial Sequence
  Description of Artificial Sequence: Synthetic oligonucleotide
uuugagcuaauauaaacca

SEQ ID NO: 2283297 - RNA, 19 nt, Artificial Sequence
  Description of Artificial Sequence: Synthetic oligonucleotide
aauaccuccuuuguuaaac

SEQ ID NO: 2283298 - RNA, 19 nt, Artificial Sequence
  Description of Artificial Sequence: Synthetic oligonucleotide
auauucauggaacacacug

SEQ ID NO: 2283299 - RNA, 19 nt, Artificial Sequence
  Description of Artificial Sequence: Synthetic oligonucleotide
gaauaauacauuuugcauc

SEQ ID NO: 2283300 - RNA, 19 nt, Artificial Sequence
  Description of Artificial Sequence: Synthetic oligonucleotide
aaauauaaucacuggauaa

SEQ ID NO: 2283301 - RNA, 19 nt, Artificial Sequence
  Description of Artificial Sequence: Synthetic oligonucleotide
auaaauggcuugcuuauac

SEQ ID NO: 2283302 - RNA, 19 nt, Artificial Sequence
  Description of Artificial Sequence: Synthetic oligonucleotide
aaaauuggucauuauagaa

SEQ ID NO: 2283303 - RNA, 19 nt, Artificial Sequence
  Description of Artificial Sequence: Synthetic oligonucleotide
uauaaaccaaacuaauuga

SEQ ID NO: 2283304 - RNA, 19 nt, Artificial Sequence
  Description of Artificial Sequence: Synthetic oligonucleotide
aacagauagaacucccagg

SEQ ID NO: 2283305 - RNA, 19 nt, Artificial Sequence
  Description of Artificial Sequence: Synthetic oligonucleotide
aauacaaacuauagaacuc

SEQ ID NO: 2283306 - RNA, 19 nt, Artificial Sequence
  Description of Artificial Sequence: Synthetic oligonucleotide
aauuggucauuauagaaaa

SEQ ID NO: 2283307 - RNA, 19 nt, Artificial Sequence
  Description of Artificial Sequence: Synthetic oligonucleotide
aaauauucacugaacugcc

SEQ ID NO: 2283308 - RNA, 19 nt, Artificial Sequence
  Description of Artificial Sequence: Synthetic oligonucleotide
ucucauagcaaguagaaau

SEQ ID NO: 2283309 - RNA, 19 nt, Artificial Sequence
  Description of Artificial Sequence: Synthetic oligonucleotide
uuugaauggagaaugaauu

SEQ ID NO: 2283310 - RNA, 19 nt, Artificial Sequence
  Description of Artificial Sequence: Synthetic oligonucleotide
uaucacaccauaaaauaug

SEQ ID NO: 2283311 - RNA, 19 nt, Artificial Sequence
  Description of Artificial Sequence: Synthetic oligonucleotide
uauggguugaguuuggaga

SEQ ID NO: 2283312 - RNA, 19 nt, Artificial Sequence
  Description of Artificial Sequence: Synthetic oligonucleotide
augucuuuaaacuacugug

SEQ ID NO: 2283313 - RNA, 19 nt, Artificial Sequence
  Description of Artificial Sequence: Synthetic oligonucleotide
uaauauuuugagcuaauau

SEQ ID NO: 2283314 - RNA, 19 nt, Artificial Sequence
  Description of Artificial Sequence: Synthetic oligonucleotide
uuaguaaugagggauuucc

SEQ ID NO: 2283315 - RNA, 19 nt, Artificial Sequence
  Description of Artificial Sequence: Synthetic oligonucleotide
uuuauaaauggcuugcuua

SEQ ID NO: 2283316 - RNA, 19 nt, Artificial Sequence
  Description of Artificial Sequence: Synthetic oligonucleotide
aacuguaacaggugugcac

SEQ ID NO: 2283317 - RNA, 19 nt, Artificial Sequence
  Description of Artificial Sequence: Synthetic oligonucleotide
acaccauaaaauauguugc

SEQ ID NO: 2283318 - RNA, 19 nt, Artificial Sequence
  Description of Artificial Sequence: Synthetic oligonucleotide
acuacuguggccuguaguc

SEQ ID NO: 2283319 - RNA, 19 nt, Artificial Sequence
  Description of Artificial Sequence: Synthetic oligonucleotide
uucaucaaugcuucgauac

SEQ ID NO: 2283320 - RNA, 19 nt, Artificial Sequence
  Description of Artificial Sequence: Synthetic oligonucleotide
uauaauuuauuuuggcccu

SEQ ID NO: 2283321 - RNA, 19 nt, Artificial Sequence
  Description of Artificial Sequence: Synthetic oligonucleotide
uggauaaauuaucugugag

SEQ ID NO: 2283322 - RNA, 19 nt, Artificial Sequence
  Description of Artificial Sequence: Synthetic oligonucleotide
uuauauuaguauuuuguaa

SEQ ID NO: 2283323 - RNA, 19 nt, Artificial Sequence
  Description of Artificial Sequence: Synthetic oligonucleotide
aaaauauguugccaacucu

SEQ ID NO: 2283324 - RNA, 19 nt, Artificial Sequence
  Description of Artificial Sequence: Synthetic oligonucleotide
aaacuauagaacucuuucu

SEQ ID NO: 2283325 - RNA, 19 nt, Artificial Sequence
  Description of Artificial Sequence: Synthetic oligonucleotide
uccaaauauucacugaacu

SEQ ID NO: 2283326 - RNA, 19 nt, Artificial Sequence
  Description of Artificial Sequence: Synthetic oligonucleotide
ugagcuaauauaaaccaaa

SEQ ID NO: 2283327 - RNA, 19 nt, Artificial Sequence
  Description of Artificial Sequence: Synthetic oligonucleotide
uuuuggcuuauuuauacac

SEQ ID NO: 2283328 - RNA, 19 nt, Artificial Sequence
  Description of Artificial Sequence: Synthetic oligonucleotide
uuuuaacuguaacaggugu

SEQ ID NO: 2283329 - RNA, 19 nt, Artificial Sequence
  Description of Artificial Sequence: Synthetic oligonucleotide
ugaauaauacauuuugcau

SEQ ID NO: 2283330 - RNA, 19 nt, Artificial Sequence
  Description of Artificial Sequence: Synthetic oligonucleotide
cuugaauaauacauuuugc

SEQ ID NO: 2283331 - RNA, 19 nt, Artificial Sequence
  Description of Artificial Sequence: Synthetic oligonucleotide
auagaugucuuuaaacuac

SEQ ID NO: 2283332 - RNA, 19 nt, Artificial Sequence
  Description of Artificial Sequence: Synthetic oligonucleotide
accaaacuaauugauaggg

SEQ ID NO: 2283333 - RNA, 19 nt, Artificial Sequence
  Description of Artificial Sequence: Synthetic oligonucleotide
aauggguaacaagaguugg

SEQ ID NO: 2283334 - RNA, 19 nt, Artificial Sequence
  Description of Artificial Sequence: Synthetic oligonucleotide
gauacaaaauuaucacacc

SEQ ID NO: 2283335 - RNA, 19 nt, Artificial Sequence
  Description of Artificial Sequence: Synthetic oligonucleotide
auacaaaauuaucacacca

SEQ ID NO: 2283336 - RNA, 19 nt, Artificial Sequence
  Description of Artificial Sequence: Synthetic oligonucleotide
aguaaugagggauuuccag

SEQ ID NO: 2283337 - RNA, 19 nt, Artificial Sequence
  Description of Artificial Sequence: Synthetic oligonucleotide
aguuggcuaaucuuucccc

SEQ ID NO: 2283338 - RNA, 19 nt, Artificial Sequence
  Description of Artificial Sequence: Synthetic oligonucleotide
uagcaaguagaaaugauuc

SEQ ID NO: 2283339 - RNA, 19 nt, Artificial Sequence
  Description of Artificial Sequence: Synthetic oligonucleotide
aacuauagaacucuuucua

SEQ ID NO: 2283340 - RNA, 19 nt, Artificial Sequence
  Description of Artificial Sequence: Synthetic oligonucleotide
gaauacaaacuauagaacu

SEQ ID NO: 2283341 - RNA, 19 nt, Artificial Sequence
  Description of Artificial Sequence: Synthetic oligonucleotide
guagagaacagauagaacu

SEQ ID NO: 2283342 - RNA, 19 nt, Artificial Sequence
  Description of Artificial Sequence: Synthetic oligonucleotide
uuugaccuggaauacaaac

SEQ ID NO: 2283343 - RNA, 19 nt, Artificial Sequence
  Description of Artificial Sequence: Synthetic oligonucleotide
cacuauuccuccaacaaag

SEQ ID NO: 2283344 - RNA, 19 nt, Artificial Sequence
  Description of Artificial Sequence: Synthetic oligonucleotide
caaacuauagaacucuuuc

SEQ ID NO: 2283345 - RNA, 19 nt, Artificial Sequence
  Description of Artificial Sequence: Synthetic oligonucleotide
acuauagaacucuuucuag

SEQ ID NO: 2283346 - RNA, 19 nt, Artificial Sequence
  Description of Artificial Sequence: Synthetic oligonucleotide
auacauuuugcauccaaug

SEQ ID NO: 2283347 - RNA, 19 nt, Artificial Sequence
  Description of Artificial Sequence: Synthetic oligonucleotide
aaaauggguaacaagaguu

SEQ ID NO: 2283348 - RNA, 19 nt, Artificial Sequence
  Description of Artificial Sequence: Synthetic oligonucleotide
aguauuuuguaacuaaaua

SEQ ID NO: 2283349 - RNA, 19 nt, Artificial Sequence
  Description of Artificial Sequence: Synthetic oligonucleotide
aacuaaauaccuccuuugu

SEQ ID NO: 2283350 - RNA, 19 nt, Artificial Sequence
  Description of Artificial Sequence: Synthetic oligonucleotide
ccaaaauuggucauuauag

SEQ ID NO: 2283351 - RNA, 19 nt, Artificial Sequence
  Description of Artificial Sequence: Synthetic oligonucleotide
uuaacuguaacaggugugc

SEQ ID NO: 2283352 - RNA, 19 nt, Artificial Sequence
  Description of Artificial Sequence: Synthetic oligonucleotide
auuaguauuuuguaacuaa

SEQ ID NO: 2283353 - RNA, 19 nt, Artificial Sequence
  Description of Artificial Sequence: Synthetic oligonucleotide
aaauacaucuuaguaacaa

SEQ ID NO: 2283354 - RNA, 19 nt, Artificial Sequence
  Description of Artificial Sequence: Synthetic oligonucleotide
ugugaguuccaaauauuca

SEQ ID NO: 2283355 - RNA, 19 nt, Artificial Sequence
  Description of Artificial Sequence: Synthetic oligonucleotide
gcuaauauaaaccaaacua

SEQ ID NO: 2283356 - RNA, 19 nt, Artificial Sequence
  Description of Artificial Sequence: Synthetic oligonucleotide
uuuuguaacuaaauaccuc

SEQ ID NO: 2283357 - RNA, 19 nt, Artificial Sequence
  Description of Artificial Sequence: Synthetic oligonucleotide
uuauaaauggcuugcuuau

SEQ ID NO: 2283358 - RNA, 19 nt, Artificial Sequence
  Description of Artificial Sequence: Synthetic oligonucleotide
agagcaaauauaaucacug

SEQ ID NO: 2283359 - RNA, 19 nt, Artificial Sequence
  Description of Artificial Sequence: Synthetic oligonucleotide
agauauucauggaacacac

SEQ ID NO: 2283360 - RNA, 19 nt, Artificial Sequence
  Description of Artificial Sequence: Synthetic oligonucleotide
uugaaaacuagaagcagau

SEQ ID NO: 2283361 - RNA, 19 nt, Artificial Sequence
  Description of Artificial Sequence: Synthetic oligonucleotide
uuugcauccaauguagaga

SEQ ID NO: 2283362 - RNA, 19 nt, Artificial Sequence
  Description of Artificial Sequence: Synthetic oligonucleotide
auauuaguauuuuguaacu

SEQ ID NO: 2283363 - RNA, 19 nt, Artificial Sequence
  Description of Artificial Sequence: Synthetic oligonucleotide
uuaucacaccauaaaauau

SEQ ID NO: 2283364 - RNA, 19 nt, Artificial Sequence
  Description of Artificial Sequence: Synthetic oligonucleotide
ugugcacucauuaggauau

SEQ ID NO: 2283365 - RNA, 19 nt, Artificial Sequence
  Description of Artificial Sequence: Synthetic oligonucleotide
auaaauuaucugugaguuc

SEQ ID NO: 2283366 - RNA, 19 nt, Artificial Sequence
  Description of Artificial Sequence: Synthetic oligonucleotide
ugcuauaauuuauuuuggc

SEQ ID NO: 2283367 - RNA, 19 nt, Artificial Sequence
  Description of Artificial Sequence: Synthetic oligonucleotide
agaagcagauuacaaaagu

SEQ ID NO: 2283368 - RNA, 19 nt, Artificial Sequence
  Description of Artificial Sequence: Synthetic oligonucleotide
aaauugcuauaauuuauuu

SEQ ID NO: 2283369 - RNA, 19 nt, Artificial Sequence
  Description of Artificial Sequence: Synthetic oligonucleotide
uacaaaauuaucacaccau

SEQ ID NO: 2283370 - RNA, 19 nt, Artificial Sequence
  Description of Artificial Sequence: Synthetic oligonucleotide
auauuuugagcuaauauaa

SEQ ID NO: 2283371 - RNA, 19 nt, Artificial Sequence
  Description of Artificial Sequence: Synthetic oligonucleotide
uuucuuuggccaagguugg

SEQ ID NO: 2283372 - RNA, 19 nt, Artificial Sequence
  Description of Artificial Sequence: Synthetic oligonucleotide
gaugcugacguauggguug

SEQ ID NO: 2283373 - RNA, 19 nt, Artificial Sequence
  Description of Artificial Sequence: Synthetic oligonucleotide
uuccagauauucauggaac

SEQ ID NO: 2283374 - RNA, 19 nt, Artificial Sequence
  Description of Artificial Sequence: Synthetic oligonucleotide
aaauuggucauuauagaaa

SEQ ID NO: 2283375 - RNA, 19 nt, Artificial Sequence
  Description of Artificial Sequence: Synthetic oligonucleotide
uuuggcuuauuuauacacu

SEQ ID NO: 2283376 - RNA, 19 nt, Artificial Sequence
  Description of Artificial Sequence: Synthetic oligonucleotide
gcuauaauuuauuuuggcc

SEQ ID NO: 2283377 - RNA, 19 nt, Artificial Sequence
  Description of Artificial Sequence: Synthetic oligonucleotide
uauucauggaacacacugu

SEQ ID NO: 2283378 - RNA, 19 nt, Artificial Sequence
  Description of Artificial Sequence: Synthetic oligonucleotide
uagagcaaauauaaucacu

SEQ ID NO: 2283379 - RNA, 19 nt, Artificial Sequence
  Description of Artificial Sequence: Synthetic oligonucleotide
cauaaaauauguugccaac

SEQ ID NO: 2283380 - RNA, 19 nt, Artificial Sequence
  Description of Artificial Sequence: Synthetic oligonucleotide
aaauggcuugcuuauacua

SEQ ID NO: 2283381 - RNA, 19 nt, Artificial Sequence
  Description of Artificial Sequence: Synthetic oligonucleotide
ucuuucuagagcaaauaua

SEQ ID NO: 2283382 - RNA, 19 nt, Artificial Sequence
  Description of Artificial Sequence: Synthetic oligonucleotide
ugaguuccaaauauucacu

SEQ ID NO: 2283383 - RNA, 19 nt, Artificial Sequence
  Description of Artificial Sequence: Synthetic oligonucleotide
cuuuugucaggaugaauag

SEQ ID NO: 2283384 - RNA, 19 nt, Artificial Sequence
  Description of Artificial Sequence: Synthetic oligonucleotide
uaauugauagggcuguaau

SEQ ID NO: 2283385 - RNA, 19 nt, Artificial Sequence
  Description of Artificial Sequence: Synthetic oligonucleotide
ugcuuauacuauuuccaag

SEQ ID NO: 2283386 - RNA, 19 nt, Artificial Sequence
  Description of Artificial Sequence: Synthetic oligonucleotide
aaacuaauugauagggcug

SEQ ID NO: 2283387 - RNA, 19 nt, Artificial Sequence
  Description of Artificial Sequence: Synthetic oligonucleotide
acuagaagcagauuacaaa

SEQ ID NO: 2283388 - RNA, 19 nt, Artificial Sequence
  Description of Artificial Sequence: Synthetic oligonucleotide
uuauacuauuuccaagaaa

SEQ ID NO: 2283389 - RNA, 19 nt, Artificial Sequence
  Description of Artificial Sequence: Synthetic oligonucleotide
caauagaaauauuauauua

SEQ ID NO: 2283390 - RNA, 19 nt, Artificial Sequence
  Description of Artificial Sequence: Synthetic oligonucleotide
aaguagaaaugauucuuau

SEQ ID NO: 2283391 - RNA, 19 nt, Artificial Sequence
  Description of Artificial Sequence: Synthetic oligonucleotide
cuugcuuauacuauuucca

SEQ ID NO: 2283392 - RNA, 19 nt, Artificial Sequence
  Description of Artificial Sequence: Synthetic oligonucleotide
aggguuaacacuauuccuc

SEQ ID NO: 2283393 - RNA, 19 nt, Artificial Sequence
  Description of Artificial Sequence: Synthetic oligonucleotide
uagagaacagauagaacuc

SEQ ID NO: 2283394 - RNA, 19 nt, Artificial Sequence
  Description of Artificial Sequence: Synthetic oligonucleotide
uguuaaacgugacccugag

SEQ ID NO: 2283395 - RNA, 19 nt, Artificial Sequence
  Description of Artificial Sequence: Synthetic oligonucleotide
gaaauauuauauuaguauu

SEQ ID NO: 2283396 - RNA, 19 nt, Artificial Sequence
  Description of Artificial Sequence: Synthetic oligonucleotide
caucuuaguaacaacaaaa

SEQ ID NO: 2283397 - RNA, 19 nt, Artificial Sequence
  Description of Artificial Sequence: Synthetic oligonucleotide
gaguuccaaauauucacug

SEQ ID NO: 2283398 - RNA, 19 nt, Artificial Sequence
  Description of Artificial Sequence: Synthetic oligonucleotide
aacuaauugauagggcugu

SEQ ID NO: 2283399 - RNA, 19 nt, Artificial Sequence
  Description of Artificial Sequence: Synthetic oligonucleotide
agcuaauauaaaccaaacu

SEQ ID NO: 2283400 - RNA, 19 nt, Artificial Sequence
  Description of Artificial Sequence: Synthetic oligonucleotide
uccuuuguuaaacgugacc

SEQ ID NO: 2283401 - RNA, 19 nt, Artificial Sequence
  Description of Artificial Sequence: Synthetic oligonucleotide
cuaaauaccuccuuuguua

SEQ ID NO: 2283402 - RNA, 19 nt, Artificial Sequence
  Description of Artificial Sequence: Synthetic oligonucleotide
aaauggguaacaagaguug

SEQ ID NO: 2283403 - RNA, 19 nt, Artificial Sequence
  Description of Artificial Sequence: Synthetic oligonucleotide
acaaaauuaucacaccaua

SEQ ID NO: 2283404 - RNA, 19 nt, Artificial Sequence
  Description of Artificial Sequence: Synthetic oligonucleotide
ugaacugcccaaaccacac

SEQ ID NO: 2283405 - RNA, 19 nt, Artificial Sequence
  Description of Artificial Sequence: Synthetic oligonucleotide
uuaacacuauuccuccaac

SEQ ID NO: 2283406 - RNA, 19 nt, Artificial Sequence
  Description of Artificial Sequence: Synthetic oligonucleotide
aaugccucuccuugaauaa

SEQ ID NO: 2283407 - RNA, 19 nt, Artificial Sequence
  Description of Artificial Sequence: Synthetic oligonucleotide
auacaaacuauagaacucu

SEQ ID NO: 2283408 - RNA, 19 nt, Artificial Sequence
  Description of Artificial Sequence: Synthetic oligonucleotide
caucaaugcuucgauaccg

SEQ ID NO: 2283409 - RNA, 19 nt, Artificial Sequence
  Description of Artificial Sequence: Synthetic oligonucleotide
uuauuuuggcccucuacaa

SEQ ID NO: 2283410 - RNA, 19 nt, Artificial Sequence
  Description of Artificial Sequence: Synthetic oligonucleotide
acuuugauccuuuacuuuu

SEQ ID NO: 2283411 - RNA, 19 nt, Artificial Sequence
  Description of Artificial Sequence: Synthetic oligonucleotide
uuuuggcccucuacaauag

SEQ ID NO: 2283412 - RNA, 19 nt, Artificial Sequence
  Description of Artificial Sequence: Synthetic oligonucleotide
auacaucuuaguaacaaca

SEQ ID NO: 2283413 - RNA, 19 nt, Artificial Sequence
  Description of Artificial Sequence: Synthetic oligonucleotide
uccagauauucauggaaca

SEQ ID NO: 2283414 - RNA, 19 nt, Artificial Sequence
  Description of Artificial Sequence: Synthetic oligonucleotide
agauagaacucccaggguu

SEQ ID NO: 2283415 - RNA, 19 nt, Artificial Sequence
  Description of Artificial Sequence: Synthetic oligonucleotide
auuuuguaacuaaauaccu

SEQ ID NO: 2283416 - RNA, 19 nt, Artificial Sequence
  Description of Artificial Sequence: Synthetic oligonucleotide
uaaauaccuccuuuguuaa

SEQ ID NO: 2283417 - RNA, 19 nt, Artificial Sequence
  Description of Artificial Sequence: Synthetic oligonucleotide
cucuacaauagaaauauua

SEQ ID NO: 2283418 - RNA, 19 nt, Artificial Sequence
  Description of Artificial Sequence: Synthetic oligonucleotide
uaaaugauggcaucauguu

SEQ ID NO: 2283419 - RNA, 19 nt, Artificial Sequence
  Description of Artificial Sequence: Synthetic oligonucleotide
caggugugcacucauuagg

SEQ ID NO: 2283420 - RNA, 19 nt, Artificial Sequence
  Description of Artificial Sequence: Synthetic oligonucleotide
auacacuuucagaaauugc

SEQ ID NO: 2283421 - RNA, 19 nt, Artificial Sequence
  Description of Artificial Sequence: Synthetic oligonucleotide
ucuuuggccaagguugggg

SEQ ID NO: 2283422 - RNA, 19 nt, Artificial Sequence
  Description of Artificial Sequence: Synthetic oligonucleotide
aauauguugccaacucuca

SEQ ID NO: 2283423 - RNA, 19 nt, Artificial Sequence
  Description of Artificial Sequence: Synthetic oligonucleotide
aacuacuguggccuguagu

SEQ ID NO: 2283424 - RNA, 19 nt, Artificial Sequence
  Description of Artificial Sequence: Synthetic oligonucleotide
cugugaguuccaaauauuc

SEQ ID NO: 2283425 - RNA, 19 nt, Artificial Sequence
  Description of Artificial Sequence: Synthetic oligonucleotide
acacccuuuaccuuuagua

SEQ ID NO: 2283426 - RNA, 19 nt, Artificial Sequence
  Description of Artificial Sequence: Synthetic oligonucleotide
ugauagggcuguaaucucu

SEQ ID NO: 2283427 - RNA, 19 nt, Artificial Sequence
  Description of Artificial Sequence: Synthetic oligonucleotide
aagcagauuacaaaaguua

SEQ ID NO: 2283428 - RNA, 19 nt, Artificial Sequence
  Description of Artificial Sequence: Synthetic oligonucleotide
accaaaauuggucauuaua

SEQ ID NO: 2283429 - RNA, 19 nt, Artificial Sequence
  Description of Artificial Sequence: Synthetic oligonucleotide
uucgauaccgaaugccucu

SEQ ID NO: 2283430 - RNA, 19 nt, Artificial Sequence
  Description of Artificial Sequence: Synthetic oligonucleotide
ugcuguuaucguuauagau

SEQ ID NO: 2283431 - RNA, 19 nt, Artificial Sequence
  Description of Artificial Sequence: Synthetic oligonucleotide
aacuuugauccuuuacuuu

SEQ ID NO: 2283432 - RNA, 19 nt, Artificial Sequence
  Description of Artificial Sequence: Synthetic oligonucleotide
uugagcuaauauaaaccaa

SEQ ID NO: 2283433 - RNA, 19 nt, Artificial Sequence
  Description of Artificial Sequence: Synthetic oligonucleotide
acuuuugucaggaugaaua

SEQ ID NO: 2283434 - RNA, 19 nt, Artificial Sequence
  Description of Artificial Sequence: Synthetic oligonucleotide
uuguaacuaaauaccuccu

SEQ ID NO: 2283435 - RNA, 19 nt, Artificial Sequence
  Description of Artificial Sequence: Synthetic oligonucleotide
ucauagcaaguagaaauga

SEQ ID NO: 2283436 - RNA, 19 nt, Artificial Sequence
  Description of Artificial Sequence: Synthetic oligonucleotide
cuuaaaugauggcaucaug

SEQ ID NO: 2283437 - RNA, 19 nt, Artificial Sequence
  Description of Artificial Sequence: Synthetic oligonucleotide
agcaaguagaaaugauucu

SEQ ID NO: 2283438 - RNA, 19 nt, Artificial Sequence
  Description of Artificial Sequence: Synthetic oligonucleotide
guaaugagggauuuccaga

SEQ ID NO: 2283439 - RNA, 19 nt, Artificial Sequence
  Description of Artificial Sequence: Synthetic oligonucleotide
augaauaguugcuguuauc

SEQ ID NO: 2283440 - RNA, 19 nt, Artificial Sequence
  Description of Artificial Sequence: Synthetic oligonucleotide
aauguagagaacagauaga

SEQ ID NO: 2283441 - RNA, 19 nt, Artificial Sequence
  Description of Artificial Sequence: Synthetic oligonucleotide
ccuuuguuaaacgugaccc

SEQ ID NO: 2283442 - RNA, 19 nt, Artificial Sequence
  Description of Artificial Sequence: Synthetic oligonucleotide
ucaggaugaauaguugcug

SEQ ID NO: 2283443 - RNA, 19 nt, Artificial Sequence
  Description of Artificial Sequence: Synthetic oligonucleotide
ugccaacucucauagcaag

SEQ ID NO: 2283444 - RNA, 19 nt, Artificial Sequence
  Description of Artificial Sequence: Synthetic oligonucleotide
gcuuauacuauuuccaaga

SEQ ID NO: 2283445 - RNA, 19 nt, Artificial Sequence
  Description of Artificial Sequence: Synthetic oligonucleotide
agauuacaaaaguuacacu

SEQ ID NO: 2283446 - RNA, 19 nt, Artificial Sequence
  Description of Artificial Sequence: Synthetic oligonucleotide
gacguauggguugaguuug

SEQ ID NO: 2283447 - RNA, 19 nt, Artificial Sequence
  Description of Artificial Sequence: Synthetic oligonucleotide
uuguuaaacgugacccuga

SEQ ID NO: 2283448 - RNA, 19 nt, Artificial Sequence
  Description of Artificial Sequence: Synthetic oligonucleotide
gaugucuuuaaacuacugu

SEQ ID NO: 2283449 - RNA, 19 nt, Artificial Sequence
  Description of Artificial Sequence: Synthetic oligonucleotide
uuuaaacuacuguggccug

SEQ ID NO: 2283450 - RNA, 19 nt, Artificial Sequence
  Description of Artificial Sequence: Synthetic oligonucleotide
caaacuaauugauagggcu

SEQ ID NO: 2283451 - RNA, 19 nt, Artificial Sequence
  Description of Artificial Sequence: Synthetic oligonucleotide
aguuccaaauauucacuga

SEQ ID NO: 2283452 - RNA, 19 nt, Artificial Sequence
  Description of Artificial Sequence: Synthetic oligonucleotide
uugcuuauacuauuuccaa

SEQ ID NO: 2283453 - RNA, 19 nt, Artificial Sequence
  Description of Artificial Sequence: Synthetic oligonucleotide
uuaucguuauagaugucuu

SEQ ID NO: 2283454 - RNA, 19 nt, Artificial Sequence
  Description of Artificial Sequence: Synthetic oligonucleotide
aacucucauagcaaguaga

SEQ ID NO: 2283455 - RNA, 19 nt, Artificial Sequence
  Description of Artificial Sequence: Synthetic oligonucleotide
cugaguuugaccuggaaua

SEQ ID NO: 2283456 - RNA, 19 nt, Artificial Sequence
  Description of Artificial Sequence: Synthetic oligonucleotide
acaaaauaccaaaauuggu

SEQ ID NO: 2283457 - RNA, 19 nt, Artificial Sequence
  Description of Artificial Sequence: Synthetic oligonucleotide
uauuuuggcccucuacaau

SEQ ID NO: 2283458 - RNA, 19 nt, Artificial Sequence
  Description of Artificial Sequence: Synthetic oligonucleotide
uaguaaugagggauuucca

SEQ ID NO: 2283459 - RNA, 19 nt, Artificial Sequence
  Description of Artificial Sequence: Synthetic oligonucleotide
agaaauugcuauaauuuau

SEQ ID NO: 2283460 - RNA, 19 nt, Artificial Sequence
  Description of Artificial Sequence: Synthetic oligonucleotide
aauaauauuuugagcuaau

SEQ ID NO: 2283461 - RNA, 19 nt, Artificial Sequence
  Description of Artificial Sequence: Synthetic oligonucleotide
guauggguugaguuuggag

SEQ ID NO: 2283462 - RNA, 19 nt, Artificial Sequence
  Description of Artificial Sequence: Synthetic oligonucleotide
acuguaacaggugugcacu

SEQ ID NO: 2283463 - RNA, 19 nt, Artificial Sequence
  Description of Artificial Sequence: Synthetic oligonucleotide
auggguaacaagaguuggc

SEQ ID NO: 2283464 - RNA, 19 nt, Artificial Sequence
  Description of Artificial Sequence: Synthetic oligonucleotide
uggguaacaagaguuggcu

SEQ ID NO: 2283465 - RNA, 19 nt, Artificial Sequence
  Description of Artificial Sequence: Synthetic oligonucleotide
acuaaauaccuccuuuguu

SEQ ID NO: 2283466 - RNA, 19 nt, Artificial Sequence
  Description of Artificial Sequence: Synthetic oligonucleotide
ucauggaugcugacguaug

SEQ ID NO: 2283467 - RNA, 19 nt, Artificial Sequence
  Description of Artificial Sequence: Synthetic oligonucleotide
cauggaugcugacguaugg

SEQ ID NO: 2283468 - RNA, 19 nt, Artificial Sequence
  Description of Artificial Sequence: Synthetic oligonucleotide
caaacuuugauccuuuacu

SEQ ID NO: 2283469 - RNA, 19 nt, Artificial Sequence
  Description of Artificial Sequence: Synthetic oligonucleotide
cuacaauagaaauauuaua

SEQ ID NO: 2283470 - RNA, 19 nt, Artificial Sequence
  Description of Artificial Sequence: Synthetic oligonucleotide
uucacugaacugcccaaac

SEQ ID NO: 2283471 - RNA, 19 nt, Artificial Sequence
  Description of Artificial Sequence: Synthetic oligonucleotide
accuuuaguaaugagggau

SEQ ID NO: 2283472 - RNA, 19 nt, Artificial Sequence
  Description of Artificial Sequence: Synthetic oligonucleotide
gcuugcuuauacuauuucc

SEQ ID NO: 2283473 - RNA, 19 nt, Artificial Sequence
  Description of Artificial Sequence: Synthetic oligonucleotide
uauuaguauuuuguaacua

SEQ ID NO: 2283474 - RNA, 19 nt, Artificial Sequence
  Description of Artificial Sequence: Synthetic oligonucleotide
uuggcccucuacaauagaa

SEQ ID NO: 2283475 - RNA, 19 nt, Artificial Sequence
  Description of Artificial Sequence: Synthetic oligonucleotide
acaagaguuggcuaaucuu

SEQ ID NO: 2283476 - RNA, 19 nt, Artificial Sequence
  Description of Artificial Sequence: Synthetic oligonucleotide
cuuuaccuuuaguaaugag

SEQ ID NO: 2283477 - RNA, 19 nt, Artificial Sequence
  Description of Artificial Sequence: Synthetic oligonucleotide
aauggcuugcuuauacuau

SEQ ID NO: 2283478 - RNA, 19 nt, Artificial Sequence
  Description of Artificial Sequence: Synthetic oligonucleotide
gguaccuuaaaugauggca

SEQ ID NO: 2283479 - RNA, 19 nt, Artificial Sequence
  Description of Artificial Sequence: Synthetic oligonucleotide
uuucuagagcaaauauaau

SEQ ID NO: 2283480 - RNA, 19 nt, Artificial Sequence
  Description of Artificial Sequence: Synthetic oligonucleotide
ucuucuuucuuuggccaag

SEQ ID NO: 2283481 - RNA, 19 nt, Artificial Sequence
  Description of Artificial Sequence: Synthetic oligonucleotide
cuguuaucguuauagaugu

SEQ ID NO: 2283482 - RNA, 19 nt, Artificial Sequence
  Description of Artificial Sequence: Synthetic oligonucleotide
aaacuacuguggccuguag

SEQ ID NO: 2283483 - RNA, 19 nt, Artificial Sequence
  Description of Artificial Sequence: Synthetic oligonucleotide
ccaaauauucacugaacug

SEQ ID NO: 2283484 - RNA, 19 nt, Artificial Sequence
  Description of Artificial Sequence: Synthetic oligonucleotide
ccuggaauacaaacuauag

SEQ ID NO: 2283485 - RNA, 19 nt, Artificial Sequence
  Description of Artificial Sequence: Synthetic oligonucleotide
acugaacugcccaaaccac

SEQ ID NO: 2283486 - RNA, 19 nt, Artificial Sequence
  Description of Artificial Sequence: Synthetic oligonucleotide
accauaaaauauguugcca

SEQ ID NO: 2283487 - RNA, 19 nt, Artificial Sequence
  Description of Artificial Sequence: Synthetic oligonucleotide
gaaugccucuccuugaaua

SEQ ID NO: 2283488 - RNA, 19 nt, Artificial Sequence
  Description of Artificial Sequence: Synthetic oligonucleotide
aucuuaguaacaacaaaau

SEQ ID NO: 2283489 - RNA, 19 nt, Artificial Sequence
  Description of Artificial Sequence: Synthetic oligonucleotide
guuaacacuauuccuccaa

SEQ ID NO: 2283490 - RNA, 19 nt, Artificial Sequence
  Description of Artificial Sequence: Synthetic oligonucleotide
uauucacugaacugcccaa

SEQ ID NO: 2283491 - RNA, 19 nt, Artificial Sequence
  Description of Artificial Sequence: Synthetic oligonucleotide
cuuuaaacuacuguggccu

SEQ ID NO: 2283492 - RNA, 19 nt, Artificial Sequence
  Description of Artificial Sequence: Synthetic oligonucleotide
ugaguuugaccuggaauac

SEQ ID NO: 2283493 - RNA, 19 nt, Artificial Sequence
  Description of Artificial Sequence: Synthetic oligonucleotide
acccuuuaccuuuaguaau

SEQ ID NO: 2283494 - RNA, 19 nt, Artificial Sequence
  Description of Artificial Sequence: Synthetic oligonucleotide
gguaacaagaguuggcuaa

SEQ ID NO: 2283495 - RNA, 19 nt, Artificial Sequence
  Description of Artificial Sequence: Synthetic oligonucleotide
cacuggauaaauuaucugu

SEQ ID NO: 2283496 - RNA, 19 nt, Artificial Sequence
  Description of Artificial Sequence: Synthetic oligonucleotide
ucguuauagaugucuuuaa

SEQ ID NO: 2283497 - RNA, 19 nt, Artificial Sequence
  Description of Artificial Sequence: Synthetic oligonucleotide
auuaucugugaguuccaaa

SEQ ID NO: 2283498 - RNA, 19 nt, Artificial Sequence
  Description of Artificial Sequence: Synthetic oligonucleotide
uggcuaaucuuuccccuga

SEQ ID NO: 2283499 - RNA, 19 nt, Artificial Sequence
  Description of Artificial Sequence: Synthetic oligonucleotide
agaacucccaggguuaaca

SEQ ID NO: 2283500 - RNA, 19 nt, Artificial Sequence
  Description of Artificial Sequence: Synthetic oligonucleotide
caacucucauagcaaguag

SEQ ID NO: 2283501 - RNA, 19 nt, Artificial Sequence
  Description of Artificial Sequence: Synthetic oligonucleotide
gacccugaguuugaccugg

SEQ ID NO: 2283502 - RNA, 19 nt, Artificial Sequence
  Description of Artificial Sequence: Synthetic oligonucleotide
acacuauuccuccaacaaa

SEQ ID NO: 2283503 - RNA, 19 nt, Artificial Sequence
  Description of Artificial Sequence: Synthetic oligonucleotide
uaauuuauuuuggcccucu

SEQ ID NO: 2283504 - RNA, 19 nt, Artificial Sequence
  Description of Artificial Sequence: Synthetic oligonucleotide
aucguuauagaugucuuua

SEQ ID NO: 2283505 - RNA, 19 nt, Artificial Sequence
  Description of Artificial Sequence: Synthetic oligonucleotide
ugacguauggguugaguuu

SEQ ID NO: 2283506 - RNA, 19 nt, Artificial Sequence
  Description of Artificial Sequence: Synthetic oligonucleotide
guuaucguuauagaugucu

SEQ ID NO: 2283507 - RNA, 19 nt, Artificial Sequence
  Description of Artificial Sequence: Synthetic oligonucleotide
cuggauaaauuaucuguga

SEQ ID NO: 2283508 - RNA, 19 nt, Artificial Sequence
  Description of Artificial Sequence: Synthetic oligonucleotide
cagaaauugcuauaauuua

SEQ ID NO: 2283509 - RNA, 19 nt, Artificial Sequence
  Description of Artificial Sequence: Synthetic oligonucleotide
aauuuauuuuggcccucua

SEQ ID NO: 2283510 - RNA, 19 nt, Artificial Sequence
  Description of Artificial Sequence: Synthetic oligonucleotide
acuuucagaaauugcuaua

SEQ ID NO: 2283511 - RNA, 19 nt, Artificial Sequence
  Description of Artificial Sequence: Synthetic oligonucleotide
ccaggguuaacacuauucc

SEQ ID NO: 2283512 - RNA, 19 nt, Artificial Sequence
  Description of Artificial Sequence: Synthetic oligonucleotide
ggguuaacacuauuccucc

SEQ ID NO: 2283513 - RNA, 19 nt, Artificial Sequence
  Description of Artificial Sequence: Synthetic oligonucleotide
uuuaguaaugagggauuuc

SEQ ID NO: 2283514 - RNA, 19 nt, Artificial Sequence
  Description of Artificial Sequence: Synthetic oligonucleotide
aauuaucugugaguuccaa

SEQ ID NO: 2283515 - RNA, 19 nt, Artificial Sequence
  Description of Artificial Sequence: Synthetic oligonucleotide
cuucgauaccgaaugccuc

SEQ ID NO: 2283516 - RNA, 19 nt, Artificial Sequence
  Description of Artificial Sequence: Synthetic oligonucleotide
cggugucaaacuuugaucc

SEQ ID NO: 2283517 - RNA, 19 nt, Artificial Sequence
  Description of Artificial Sequence: Synthetic oligonucleotide
gaauggagaaugaauuuua

SEQ ID NO: 2283518 - RNA, 19 nt, Artificial Sequence
  Description of Artificial Sequence: Synthetic oligonucleotide
auggagaaugaauuuuauu

SEQ ID NO: 2283519 - RNA, 19 nt, Artificial Sequence
  Description of Artificial Sequence: Synthetic oligonucleotide
uguaacaggugugcacuca

SEQ ID NO: 2283520 - RNA, 19 nt, Artificial Sequence
  Description of Artificial Sequence: Synthetic oligonucleotide
auagggcuguaaucucuuc

SEQ ID NO: 2283521 - RNA, 19 nt, Artificial Sequence
  Description of Artificial Sequence: Synthetic oligonucleotide
ggagaaugaauuuuauucu

SEQ ID NO: 2283522 - RNA, 19 nt, Artificial Sequence
  Description of Artificial Sequence: Synthetic oligonucleotide
uaccuccuuuguuaaacgu

SEQ ID NO: 2283523 - RNA, 19 nt, Artificial Sequence
  Description of Artificial Sequence: Synthetic oligonucleotide
auauguugccaacucucau

SEQ ID NO: 2283524 - RNA, 19 nt, Artificial Sequence
  Description of Artificial Sequence: Synthetic oligonucleotide
uaucguuauagaugucuuu

SEQ ID NO: 2283525 - RNA, 19 nt, Artificial Sequence
  Description of Artificial Sequence: Synthetic oligonucleotide
gaugaauaguugcuguuau

SEQ ID NO: 2283526 - RNA, 19 nt, Artificial Sequence
  Description of Artificial Sequence: Synthetic oligonucleotide
uugauagggcuguaaucuc

SEQ ID NO: 2283527 - RNA, 19 nt, Artificial Sequence
  Description of Artificial Sequence: Synthetic oligonucleotide
uggcccucuacaauagaaa

SEQ ID NO: 2283528 - RNA, 19 nt, Artificial Sequence
  Description of Artificial Sequence: Synthetic oligonucleotide
uaccuuuaguaaugaggga

SEQ ID NO: 2283529 - RNA, 19 nt, Artificial Sequence
  Description of Artificial Sequence: Synthetic oligonucleotide
cagauauucauggaacaca

SEQ ID NO: 2283530 - RNA, 19 nt, Artificial Sequence
  Description of Artificial Sequence: Synthetic oligonucleotide
ucaaugcuucgauaccgaa

SEQ ID NO: 2283531 - RNA, 19 nt, Artificial Sequence
  Description of Artificial Sequence: Synthetic oligonucleotide
aguuugaccuggaauacaa

SEQ ID NO: 2283532 - RNA, 19 nt, Artificial Sequence
  Description of Artificial Sequence: Synthetic oligonucleotide
accuuaaaugauggcauca

SEQ ID NO: 2283533 - RNA, 19 nt, Artificial Sequence
  Description of Artificial Sequence: Synthetic oligonucleotide
caaguagaaaugauucuua

SEQ ID NO: 2283534 - RNA, 19 nt, Artificial Sequence
  Description of Artificial Sequence: Synthetic oligonucleotide
gaacucccaggguuaacac

SEQ ID NO: 2283535 - RNA, 19 nt, Artificial Sequence
  Description of Artificial Sequence: Synthetic oligonucleotide
ccuccaacaaagcugccgg

SEQ ID NO: 2283536 - RNA, 19 nt, Artificial Sequence
  Description of Artificial Sequence: Synthetic oligonucleotide
cuuauacuauuuccaagaa

SEQ ID NO: 2283537 - RNA, 19 nt, Artificial Sequence
  Description of Artificial Sequence: Synthetic oligonucleotide
uuaaacuacuguggccugu

SEQ ID NO: 2283538 - RNA, 19 nt, Artificial Sequence
  Description of Artificial Sequence: Synthetic oligonucleotide
aaaccacacccuuuaccuu

SEQ ID NO: 2283539 - RNA, 19 nt, Artificial Sequence
  Description of Artificial Sequence: Synthetic oligonucleotide
uugauccuuuacuuuuguc

SEQ ID NO: 2283540 - RNA, 19 nt, Artificial Sequence
  Description of Artificial Sequence: Synthetic oligonucleotide
ccaaacuaauugauagggc

SEQ ID NO: 2283541 - RNA, 19 nt, Artificial Sequence
  Description of Artificial Sequence: Synthetic oligonucleotide
uuuggcccucuacaauaga

SEQ ID NO: 2283542 - RNA, 19 nt, Artificial Sequence
  Description of Artificial Sequence: Synthetic oligonucleotide
gcaucauguucaucaaugc

SEQ ID NO: 2283543 - RNA, 19 nt, Artificial Sequence
  Description of Artificial Sequence: Synthetic oligonucleotide
gaauaguugcuguuaucgu

SEQ ID NO: 2283544 - RNA, 19 nt, Artificial Sequence
  Description of Artificial Sequence: Synthetic oligonucleotide
ugccucuccuugaauaaua

SEQ ID NO: 2283545 - RNA, 19 nt, Artificial Sequence
  Description of Artificial Sequence: Synthetic oligonucleotide
cuucuuucuuuggccaagg

SEQ ID NO: 2283546 - RNA, 19 nt, Artificial Sequence
  Description of Artificial Sequence: Synthetic oligonucleotide
uaaacgugacccugaguuu

SEQ ID NO: 2283547 - RNA, 19 nt, Artificial Sequence
  Description of Artificial Sequence: Synthetic oligonucleotide
auaguugcuguuaucguua

SEQ ID NO: 2283548 - RNA, 19 nt, Artificial Sequence
  Description of Artificial Sequence: Synthetic oligonucleotide
auaccaaaauuggucauua

SEQ ID NO: 2283549 - RNA, 19 nt, Artificial Sequence
  Description of Artificial Sequence: Synthetic oligonucleotide
gauagaacucccaggguua

SEQ ID NO: 2283550 - RNA, 19 nt, Artificial Sequence
  Description of Artificial Sequence: Synthetic oligonucleotide
accuccuuuguuaaacgug

SEQ ID NO: 2283551 - RNA, 19 nt, Artificial Sequence
  Description of Artificial Sequence: Synthetic oligonucleotide
uaacuguaacaggugugca

SEQ ID NO: 2283552 - RNA, 19 nt, Artificial Sequence
  Description of Artificial Sequence: Synthetic oligonucleotide
ggauaaauuaucugugagu

SEQ ID NO: 2283553 - RNA, 19 nt, Artificial Sequence
  Description of Artificial Sequence: Synthetic oligonucleotide
uggcuuauuuauacacuuu

SEQ ID NO: 2283554 - RNA, 19 nt, Artificial Sequence
  Description of Artificial Sequence: Synthetic oligonucleotide
agaacagauagaacuccca

SEQ ID NO: 2283555 - RNA, 19 nt, Artificial Sequence
  Description of Artificial Sequence: Synthetic oligonucleotide
cugccggugucaaacuuug

SEQ ID NO: 2283556 - RNA, 19 nt, Artificial Sequence
  Description of Artificial Sequence: Synthetic oligonucleotide
gaacugcccaaaccacacc

SEQ ID NO: 2283557 - RNA, 19 nt, Artificial Sequence
  Description of Artificial Sequence: Synthetic oligonucleotide
cacccuuuaccuuuaguaa

SEQ ID NO: 2283558 - RNA, 19 nt, Artificial Sequence
  Description of Artificial Sequence: Synthetic oligonucleotide
aucauggaugcugacguau

SEQ ID NO: 2283559 - RNA, 19 nt, Artificial Sequence
  Description of Artificial Sequence: Synthetic oligonucleotide
agggauuuccagauauuca

SEQ ID NO: 2283560 - RNA, 19 nt, Artificial Sequence
  Description of Artificial Sequence: Synthetic oligonucleotide
acucucauagcaaguagaa

SEQ ID NO: 2283561 - RNA, 19 nt, Artificial Sequence
  Description of Artificial Sequence: Synthetic oligonucleotide
cugaacugcccaaaccaca

SEQ ID NO: 2283562 - RNA, 19 nt, Artificial Sequence
  Description of Artificial Sequence: Synthetic oligonucleotide
ucacaccauaaaauauguu

SEQ ID NO: 2283563 - RNA, 19 nt, Artificial Sequence
  Description of Artificial Sequence: Synthetic oligonucleotide
uauaaauggcuugcuuaua

SEQ ID NO: 2283564 - RNA, 19 nt, Artificial Sequence
  Description of Artificial Sequence: Synthetic oligonucleotide
ccaaaccacacccuuuacc

SEQ ID NO: 2283565 - RNA, 19 nt, Artificial Sequence
  Description of Artificial Sequence: Synthetic oligonucleotide
ugacccugaguuugaccug

SEQ ID NO: 2283566 - RNA, 19 nt, Artificial Sequence
  Description of Artificial Sequence: Synthetic oligonucleotide
gggguaccuuaaaugaugg

SEQ ID NO: 2283567 - RNA, 19 nt, Artificial Sequence
  Description of Artificial Sequence: Synthetic oligonucleotide
gauaccgaaugccucuccu

SEQ ID NO: 2283568 - RNA, 19 nt, Artificial Sequence
  Description of Artificial Sequence: Synthetic oligonucleotide
auccaauguagagaacaga

SEQ ID NO: 2283569 - RNA, 19 nt, Artificial Sequence
  Description of Artificial Sequence: Synthetic oligonucleotide
uucuuuggccaagguuggg

SEQ ID NO: 2283570 - RNA, 19 nt, Artificial Sequence
  Description of Artificial Sequence: Synthetic oligonucleotide
uaaacuacuguggccugua

SEQ ID NO: 2283571 - RNA, 19 nt, Artificial Sequence
  Description of Artificial Sequence: Synthetic oligonucleotide
aggugugcacucauuagga

SEQ ID NO: 2283572 - RNA, 19 nt, Artificial Sequence
  Description of Artificial Sequence: Synthetic oligonucleotide
uuacuuuugucaggaugaa

SEQ ID NO: 2283573 - RNA, 19 nt, Artificial Sequence
  Description of Artificial Sequence: Synthetic oligonucleotide
uguugccaacucucauagc

SEQ ID NO: 2283574 - RNA, 19 nt, Artificial Sequence
  Description of Artificial Sequence: Synthetic oligonucleotide
gugugcacucauuaggaua

SEQ ID NO: 2283575 - RNA, 19 nt, Artificial Sequence
  Description of Artificial Sequence: Synthetic oligonucleotide
acucccaggguuaacacua

SEQ ID NO: 2283576 - RNA, 19 nt, Artificial Sequence
  Description of Artificial Sequence: Synthetic oligonucleotide
uguuaucguuauagauguc

SEQ ID NO: 2283577 - RNA, 19 nt, Artificial Sequence
  Description of Artificial Sequence: Synthetic oligonucleotide
aagcugccggugucaaacu

SEQ ID NO: 2283578 - RNA, 19 nt, Artificial Sequence
  Description of Artificial Sequence: Synthetic oligonucleotide
gaagcagauuacaaaaguu

SEQ ID NO: 2283579 - RNA, 19 nt, Artificial Sequence
  Description of Artificial Sequence: Synthetic oligonucleotide
ugaaaacuagaagcagauu

SEQ ID NO: 2283580 - RNA, 19 nt, Artificial Sequence
  Description of Artificial Sequence: Synthetic oligonucleotide
gcuaaucuuuccccugaag

SEQ ID NO: 2283581 - RNA, 19 nt, Artificial Sequence
  Description of Artificial Sequence: Synthetic oligonucleotide
accgaaugccucuccuuga

SEQ ID NO: 2283582 - RNA, 19 nt, Artificial Sequence
  Description of Artificial Sequence: Synthetic oligonucleotide
gaacucuuucuagagcaaa

SEQ ID NO: 2283583 - RNA, 19 nt, Artificial Sequence
  Description of Artificial Sequence: Synthetic oligonucleotide
acaaacuauagaacucuuu

SEQ ID NO: 2283584 - RNA, 19 nt, Artificial Sequence
  Description of Artificial Sequence: Synthetic oligonucleotide
acucuuucuagagcaaaua

SEQ ID NO: 2283585 - RNA, 19 nt, Artificial Sequence
  Description of Artificial Sequence: Synthetic oligonucleotide
acacuuucagaaauugcua

SEQ ID NO: 2283586 - RNA, 19 nt, Artificial Sequence
  Description of Artificial Sequence: Synthetic oligonucleotide
uaguugcuguuaucguuau

SEQ ID NO: 2283587 - RNA, 19 nt, Artificial Sequence
  Description of Artificial Sequence: Synthetic oligonucleotide
ugcauccaauguagagaac

SEQ ID NO: 2283588 - RNA, 19 nt, Artificial Sequence
  Description of Artificial Sequence: Synthetic oligonucleotide
auaccgaaugccucuccuu

SEQ ID NO: 2283589 - RNA, 19 nt, Artificial Sequence
  Description of Artificial Sequence: Synthetic oligonucleotide
aucaaugcuucgauaccga

SEQ ID NO: 2283590 - RNA, 19 nt, Artificial Sequence
  Description of Artificial Sequence: Synthetic oligonucleotide
guaccuuaaaugauggcau

SEQ ID NO: 2283591 - RNA, 19 nt, Artificial Sequence
  Description of Artificial Sequence: Synthetic oligonucleotide
gaguuugaccuggaauaca

SEQ ID NO: 2283592 - RNA, 19 nt, Artificial Sequence
  Description of Artificial Sequence: Synthetic oligonucleotide
ugcacucauuaggauauuu

SEQ ID NO: 2283593 - RNA, 19 nt, Artificial Sequence
  Description of Artificial Sequence: Synthetic oligonucleotide
uacuuuugucaggaugaau

SEQ ID NO: 2283594 - RNA, 19 nt, Artificial Sequence
  Description of Artificial Sequence: Synthetic oligonucleotide
uaacaggugugcacucauu

SEQ ID NO: 2283595 - RNA, 19 nt, Artificial Sequence
  Description of Artificial Sequence: Synthetic oligonucleotide
ccuccuuuguuaaacguga

SEQ ID NO: 2283596 - RNA, 19 nt, Artificial Sequence
  Description of Artificial Sequence: Synthetic oligonucleotide
cauagcaaguagaaaugau

SEQ ID NO: 2283597 - RNA, 19 nt, Artificial Sequence
  Description of Artificial Sequence: Synthetic oligonucleotide
cuaauugauagggcuguaa

SEQ ID NO: 2283598 - RNA, 19 nt, Artificial Sequence
  Description of Artificial Sequence: Synthetic oligonucleotide
ugcccaaaccacacccuuu

SEQ ID NO: 2283599 - RNA, 19 nt, Artificial Sequence
  Description of Artificial Sequence: Synthetic oligonucleotide
aacgugacccugaguuuga

SEQ ID NO: 2283600 - RNA, 19 nt, Artificial Sequence
  Description of Artificial Sequence: Synthetic oligonucleotide
guucaucaaugcuucgaua

SEQ ID NO: 2283601 - RNA, 19 nt, Artificial Sequence
  Description of Artificial Sequence: Synthetic oligonucleotide
ccggugucaaacuuugauc

SEQ ID NO: 2283602 - RNA, 19 nt, Artificial Sequence
  Description of Artificial Sequence: Synthetic oligonucleotide
auggaacacacuguucauu

SEQ ID NO: 2283603 - RNA, 19 nt, Artificial Sequence
  Description of Artificial Sequence: Synthetic oligonucleotide
auagaacucccaggguuaa

SEQ ID NO: 2283604 - RNA, 19 nt, Artificial Sequence
  Description of Artificial Sequence: Synthetic oligonucleotide
uguagucaucauggaugcu

SEQ ID NO: 2283605 - RNA, 19 nt, Artificial Sequence
  Description of Artificial Sequence: Synthetic oligonucleotide
ucgauaccgaaugccucuc

SEQ ID NO: 2283606 - RNA, 19 nt, Artificial Sequence
  Description of Artificial Sequence: Synthetic oligonucleotide
acguauggguugaguuugg

SEQ ID NO: 2283607 - RNA, 19 nt, Artificial Sequence
  Description of Artificial Sequence: Synthetic oligonucleotide
cugacguauggguugaguu

SEQ ID NO: 2283608 - RNA, 19 nt, Artificial Sequence
  Description of Artificial Sequence: Synthetic oligonucleotide
gauauucauggaacacacu

SEQ ID NO: 2283609 - RNA, 19 nt, Artificial Sequence
  Description of Artificial Sequence: Synthetic oligonucleotide
ggguaccuuaaaugauggc

SEQ ID NO: 2283610 - RNA, 19 nt, Artificial Sequence
  Description of Artificial Sequence: Synthetic oligonucleotide
gguuaacacuauuccucca

SEQ ID NO: 2283611 - RNA, 19 nt, Artificial Sequence
  Description of Artificial Sequence: Synthetic oligonucleotide
ggaugaauaguugcuguua

SEQ ID NO: 2283612 - RNA, 19 nt, Artificial Sequence
  Description of Artificial Sequence: Synthetic oligonucleotide
acgugacccugaguuugac

SEQ ID NO: 2283613 - RNA, 19 nt, Artificial Sequence
  Description of Artificial Sequence: Synthetic oligonucleotide
caaugcuucgauaccgaau

SEQ ID NO: 2283614 - RNA, 19 nt, Artificial Sequence
  Description of Artificial Sequence: Synthetic oligonucleotide
guaacaggugugcacucau

SEQ ID NO: 2283615 - RNA, 19 nt, Artificial Sequence
  Description of Artificial Sequence: Synthetic oligonucleotide
augcugacguauggguuga

SEQ ID NO: 2283616 - RNA, 19 nt, Artificial Sequence
  Description of Artificial Sequence: Synthetic oligonucleotide
guuaaacgugacccugagu

SEQ ID NO: 2283617 - RNA, 19 nt, Artificial Sequence
  Description of Artificial Sequence: Synthetic oligonucleotide
gucaaacuuugauccuuua

SEQ ID NO: 2283618 - RNA, 19 nt, Artificial Sequence
  Description of Artificial Sequence: Synthetic oligonucleotide
agcugccggugucaaacuu

SEQ ID NO: 2283619 - RNA, 19 nt, Artificial Sequence
  Description of Artificial Sequence: Synthetic oligonucleotide
cucucauagcaaguagaaa

SEQ ID NO: 2283620 - RNA, 19 nt, Artificial Sequence
  Description of Artificial Sequence: Synthetic oligonucleotide
acuaauugauagggcugua

SEQ ID NO: 2283621 - RNA, 19 nt, Artificial Sequence
  Description of Artificial Sequence: Synthetic oligonucleotide
gauagggcuguaaucucuu

SEQ ID NO: 2283622 - RNA, 19 nt, Artificial Sequence
  Description of Artificial Sequence: Synthetic oligonucleotide
guuugaccuggaauacaaa

SEQ ID NO: 2283623 - RNA, 19 nt, Artificial Sequence
  Description of Artificial Sequence: Synthetic oligonucleotide
guaacaagaguuggcuaau

SEQ ID NO: 2283624 - RNA, 19 nt, Artificial Sequence
  Description of Artificial Sequence: Synthetic oligonucleotide
cccucuacaauagaaauau

SEQ ID NO: 2283625 - RNA, 19 nt, Artificial Sequence
  Description of Artificial Sequence: Synthetic oligonucleotide
cauggaacacacuguucau

SEQ ID NO: 2283626 - RNA, 19 nt, Artificial Sequence
  Description of Artificial Sequence: Synthetic oligonucleotide
ggguaacaagaguuggcua

SEQ ID NO: 2283627 - RNA, 19 nt, Artificial Sequence
  Description of Artificial Sequence: Synthetic oligonucleotide
ugcugacguauggguugag

SEQ ID NO: 2283628 - RNA, 19 nt, Artificial Sequence
  Description of Artificial Sequence: Synthetic oligonucleotide
gcuucgauaccgaaugccu

SEQ ID NO: 2283629 - RNA, 19 nt, Artificial Sequence
  Description of Artificial Sequence: Synthetic oligonucleotide
cguuauagaugucuuuaaa

SEQ ID NO: 2283630 - RNA, 19 nt, Artificial Sequence
  Description of Artificial Sequence: Synthetic oligonucleotide
cgugacccugaguuugacc

SEQ ID NO: 2283631 - RNA, 19 nt, Artificial Sequence
  Description of Artificial Sequence: Synthetic oligonucleotide
gcccaaaccacacccuuua

SEQ ID NO: 2283632 - RNA, 19 nt, Artificial Sequence
  Description of Artificial Sequence: Synthetic oligonucleotide
gccggugucaaacuuugau

SEQ ID NO: 2283633 - RNA, 19 nt, Artificial Sequence
  Description of Artificial Sequence: Synthetic oligonucleotide
caaagcugccggugucaaa

SEQ ID NO: 2283634 - RNA, 19 nt, Artificial Sequence
  Description of Artificial Sequence: Synthetic oligonucleotide
ccaacucucauagcaagua

SEQ ID NO: 2283635 - RNA, 19 nt, Artificial Sequence
  Description of Artificial Sequence: Synthetic oligonucleotide
cuugcuaguuugugcuuuu

SEQ ID NO: 2283636 - RNA, 19 nt, Artificial Sequence
  Description of Artificial Sequence: Synthetic oligonucleotide
ggcuaaucuuuccccugaa

SEQ ID NO: 2283637 - RNA, 19 nt, Artificial Sequence
  Description of Artificial Sequence: Synthetic oligonucleotide
ccuuuaccuuuaguaauga

SEQ ID NO: 2283638 - RNA, 19 nt, Artificial Sequence
  Description of Artificial Sequence: Synthetic oligonucleotide
ggugugcacucauuaggau

SEQ ID NO: 2283639 - RNA, 19 nt, Artificial Sequence
  Description of Artificial Sequence: Synthetic oligonucleotide
ccuuuaguaaugagggauu

SEQ ID NO: 2283640 - RNA, 19 nt, Artificial Sequence
  Description of Artificial Sequence: Synthetic oligonucleotide
accacacccuuuaccuuua

SEQ ID NO: 2283641 - RNA, 19 nt, Artificial Sequence
  Description of Artificial Sequence: Synthetic oligonucleotide
gcccucuacaauagaaaua

SEQ ID NO: 2283642 - RNA, 19 nt, Artificial Sequence
  Description of Artificial Sequence: Synthetic oligonucleotide
cuccaacaaagcugccggu

SEQ ID NO: 2283643 - RNA, 19 nt, Artificial Sequence
  Description of Artificial Sequence: Synthetic oligonucleotide
cgauaccgaaugccucucc

SEQ ID NO: 2283644 - RNA, 19 nt, Artificial Sequence
  Description of Artificial Sequence: Synthetic oligonucleotide
gcacucauuaggauauuuu

SEQ ID NO: 2283645 - RNA, 19 nt, Artificial Sequence
  Description of Artificial Sequence: Synthetic oligonucleotide
cugcccaaaccacacccuu

SEQ ID NO: 2283646 - RNA, 19 nt, Artificial Sequence
  Description of Artificial Sequence: Synthetic oligonucleotide
ccgaaugccucuccuugaa

SEQ ID NO: 2283647 - RNA, 19 nt, Artificial Sequence
  Description of Artificial Sequence: Synthetic oligonucleotide
acccugaguuugaccugga

SEQ ID NO: 2283648 - RNA, 19 nt, Artificial Sequence
  Description of Artificial Sequence: Synthetic oligonucleotide
gccaacucucauagcaagu

SEQ ID NO: 2283649 - RNA, 19 nt, Artificial Sequence
  Description of Artificial Sequence: Synthetic oligonucleotide
gcugacguauggguugagu

SEQ ID NO: 2283650 - RNA, 19 nt, Artificial Sequence
  Description of Artificial Sequence: Synthetic oligonucleotide
cucccaggguuaacacuau

SEQ ID NO: 2283651 - RNA, 19 nt, Artificial Sequence
  Description of Artificial Sequence: Synthetic oligonucleotide
gcugccggugucaaacuuu

SEQ ID NO: 2283652 - RNA, 19 nt, Artificial Sequence
  Description of Artificial Sequence: Synthetic oligonucleotide
cguauggguugaguuugga

SEQ ID NO: 2283653 - RNA, 19 nt, Artificial Sequence
  Description of Artificial Sequence: Synthetic oligonucleotide
ccucuacaauagaaauauu

SEQ ID NO: 2283654 - RNA, 19 nt, Artificial Sequence
  Description of Artificial Sequence: Synthetic oligonucleotide
gugcacucauuaggauauu

SEQ ID NO: 2283655 - RNA, 19 nt, Artificial Sequence
  Description of Artificial Sequence: Synthetic oligonucleotide
cgaaugccucuccuugaau

SEQ ID NO: 2283656 - RNA, 19 nt, Artificial Sequence
  Description of Artificial Sequence: Synthetic oligonucleotide
aaaacucgggcacagaggc

SEQ ID NO: 2283657 - RNA, 19 nt, Artificial Sequence
  Description of Artificial Sequence: Synthetic oligonucleotide
ucuaccacggcauagagag

SEQ ID NO: 2283658 - RNA, 19 nt, Artificial Sequence
  Description of Artificial Sequence: Synthetic oligonucleotide
aagagguggcuauagagcc

SEQ ID NO: 2283659 - RNA, 19 nt, Artificial Sequence
  Description of Artificial Sequence: Synthetic oligonucleotide
auaggguucaaccaggagg

SEQ ID NO: 2283660 - RNA, 19 nt, Artificial Sequence
  Description of Artificial Sequence: Synthetic oligonucleotide
ucgacugaagcacacaccg

SEQ ID NO: 2283661 - RNA, 19 nt, Artificial Sequence
  Description of Artificial Sequence: Synthetic oligonucleotide
caugagacaagccagcucg

SEQ ID NO: 2283662 - RNA, 19 nt, Artificial Sequence
  Description of Artificial Sequence: Synthetic oligonucleotide
aauccuuccaguccuuugg

SEQ ID NO: 2283663 - RNA, 19 nt, Artificial Sequence
  Description of Artificial Sequence: Synthetic oligonucleotide
ugaaaacucgggcacagag

SEQ ID NO: 2283664 - RNA, 19 nt, Artificial Sequence
  Description of Artificial Sequence: Synthetic oligonucleotide
aaacacaucuaccacggca

SEQ ID NO: 2283665 - RNA, 19 nt, Artificial Sequence
  Description of Artificial Sequence: Synthetic oligonucleotide
auucggaacugcuggaugc

SEQ ID NO: 2283666 - RNA, 19 nt, Artificial Sequence
  Description of Artificial Sequence: Synthetic oligonucleotide
acuaggaacaccuggcccg

SEQ ID NO: 2283667 - RNA, 19 nt, Artificial Sequence
  Description of Artificial Sequence: Synthetic oligonucleotide
agacaagccagcucgugcc

SEQ ID NO: 2283668 - RNA, 19 nt, Artificial Sequence
  Description of Artificial Sequence: Synthetic oligonucleotide
cucugcaucugcuugaccc

SEQ ID NO: 2283669 - RNA, 19 nt, Artificial Sequence
  Description of Artificial Sequence: Synthetic oligonucleotide
guuuuguucguagagcugg

SEQ ID NO: 2283670 - RNA, 19 nt, Artificial Sequence
  Description of Artificial Sequence: Synthetic oligonucleotide
uccucuaucuccacuagga

SEQ ID NO: 2283671 - RNA, 19 nt, Artificial Sequence
  Description of Artificial Sequence: Synthetic oligonucleotide
acugcgacccaccaggcgg

SEQ ID NO: 2283672 - RNA, 19 nt, Artificial Sequence
  Description of Artificial Sequence: Synthetic oligonucleotide
uuguucguagagcuggucc

SEQ ID NO: 2283673 - RNA, 19 nt, Artificial Sequence
  Description of Artificial Sequence: Synthetic oligonucleotide
caagagguggcuauagagc

SEQ ID NO: 2283674 - RNA, 19 nt, Artificial Sequence
  Description of Artificial Sequence: Synthetic oligonucleotide
gacugaagcacacaccgug

SEQ ID NO: 2283675 - RNA, 19 nt, Artificial Sequence
  Description of Artificial Sequence: Synthetic oligonucleotide
aguuuguagagauggcaag

SEQ ID NO: 2283676 - RNA, 19 nt, Artificial Sequence
  Description of Artificial Sequence: Synthetic oligonucleotide
aagcucuccacacgugugg

SEQ ID NO: 2283677 - RNA, 19 nt, Artificial Sequence
  Description of Artificial Sequence: Synthetic oligonucleotide
agagcggucaggccaagac

SEQ ID NO: 2283678 - RNA, 19 nt, Artificial Sequence
  Description of Artificial Sequence: Synthetic oligonucleotide
uuuguagagauggcaagcc

SEQ ID NO: 2283679 - RNA, 19 nt, Artificial Sequence
  Description of Artificial Sequence: Synthetic oligonucleotide
aguuggaccaggcgcacac

SEQ ID NO: 2283680 - RNA, 19 nt, Artificial Sequence
  Description of Artificial Sequence: Synthetic oligonucleotide
gacggcacagaguuuguag

SEQ ID NO: 2283681 - RNA, 19 nt, Artificial Sequence
  Description of Artificial Sequence: Synthetic oligonucleotide
ucucgacugaagcacacac

SEQ ID NO: 2283682 - RNA, 19 nt, Artificial Sequence
  Description of Artificial Sequence: Synthetic oligonucleotide
aucaccagacggcacagag

SEQ ID NO: 2283683 - RNA, 19 nt, Artificial Sequence
  Description of Artificial Sequence: Synthetic oligonucleotide
acguuuuguucguagagcu

SEQ ID NO: 2283684 - RNA, 19 nt, Artificial Sequence
  Description of Artificial Sequence: Synthetic oligonucleotide
uguucguagagcuggucca

SEQ ID NO: 2283685 - RNA, 19 nt, Artificial Sequence
  Description of Artificial Sequence: Synthetic oligonucleotide
agcggucaggccaagacgc

SEQ ID NO: 2283686 - RNA, 19 nt, Artificial Sequence
  Description of Artificial Sequence: Synthetic oligonucleotide
uaccacggcauagagaggc

SEQ ID NO: 2283687 - RNA, 19 nt, Artificial Sequence
  Description of Artificial Sequence: Synthetic oligonucleotide
gacgaugugcaugucggcg

SEQ ID NO: 2283688 - RNA, 19 nt, Artificial Sequence
  Description of Artificial Sequence: Synthetic oligonucleotide
augacgaugugcaugucgg

SEQ ID NO: 2283689 - RNA, 19 nt, Artificial Sequence
  Description of Artificial Sequence: Synthetic oligonucleotide
aggcaaacacaucuaccac

SEQ ID NO: 2283690 - RNA, 19 nt, Artificial Sequence
  Description of Artificial Sequence: Synthetic oligonucleotide
cuuugggcgagguggagcc

SEQ ID NO: 2283691 - RNA, 19 nt, Artificial Sequence
  Description of Artificial Sequence: Synthetic oligonucleotide
uggcucgggucccagacgg

SEQ ID NO: 2283692 - RNA, 19 nt, Artificial Sequence
  Description of Artificial Sequence: Synthetic oligonucleotide
uccaguuggaccaggcgca

SEQ ID NO: 2283693 - RNA, 19 nt, Artificial Sequence
  Description of Artificial Sequence: Synthetic oligonucleotide
agcccuacggguucggagg

SEQ ID NO: 2283694 - RNA, 19 nt, Artificial Sequence
  Description of Artificial Sequence: Synthetic oligonucleotide
uggaucaccagacggcaca

SEQ ID NO: 2283695 - RNA, 19 nt, Artificial Sequence
  Description of Artificial Sequence: Synthetic oligonucleotide
uuccucuaucuccacuagg

SEQ ID NO: 2283696 - RNA, 19 nt, Artificial Sequence
  Description of Artificial Sequence: Synthetic oligonucleotide
acgaugugcaugucggcgg

SEQ ID NO: 2283697 - RNA, 19 nt, Artificial Sequence
  Description of Artificial Sequence: Synthetic oligonucleotide
cuccaguuggaccaggcgc

SEQ ID NO: 2283698 - RNA, 19 nt, Artificial Sequence
  Description of Artificial Sequence: Synthetic oligonucleotide
ggguauucggaacugcugg

SEQ ID NO: 2283699 - RNA, 19 nt, Artificial Sequence
  Description of Artificial Sequence: Synthetic oligonucleotide
cagauaggguucaaccagg

SEQ ID NO: 2283700 - RNA, 19 nt, Artificial Sequence
  Description of Artificial Sequence: Synthetic oligonucleotide
uccccguugaugacgaugu

SEQ ID NO: 2283701 - RNA, 19 nt, Artificial Sequence
  Description of Artificial Sequence: Synthetic oligonucleotide
gagacaagccagcucgugc

SEQ ID NO: 2283702 - RNA, 19 nt, Artificial Sequence
  Description of Artificial Sequence: Synthetic oligonucleotide
agguggagcccaucaaugg

SEQ ID NO: 2283703 - RNA, 19 nt, Artificial Sequence
  Description of Artificial Sequence: Synthetic oligonucleotide
ugcagaaauccuuccaguc

SEQ ID NO: 2283704 - RNA, 19 nt, Artificial Sequence
  Description of Artificial Sequence: Synthetic oligonucleotide
agaacacccaggcggcuac

SEQ ID NO: 2283705 - RNA, 19 nt, Artificial Sequence
  Description of Artificial Sequence: Synthetic oligonucleotide
aagacgcagaugcccgcac

SEQ ID NO: 2283706 - RNA, 19 nt, Artificial Sequence
  Description of Artificial Sequence: Synthetic oligonucleotide
aacacaucuaccacggcau

SEQ ID NO: 2283707 - RNA, 19 nt, Artificial Sequence
  Description of Artificial Sequence: Synthetic oligonucleotide
ugaagcacacaccgugggc

SEQ ID NO: 2283708 - RNA, 19 nt, Artificial Sequence
  Description of Artificial Sequence: Synthetic oligonucleotide
ugcacuucaugggaagcgg

SEQ ID NO: 2283709 - RNA, 19 nt, Artificial Sequence
  Description of Artificial Sequence: Synthetic oligonucleotide
auucauacuugcagaaauc

SEQ ID NO: 2283710 - RNA, 19 nt, Artificial Sequence
  Description of Artificial Sequence: Synthetic oligonucleotide
gauaggguucaaccaggag

SEQ ID NO: 2283711 - RNA, 19 nt, Artificial Sequence
  Description of Artificial Sequence: Synthetic oligonucleotide
uuguagagauggcaagcca

SEQ ID NO: 2283712 - RNA, 19 nt, Artificial Sequence
  Description of Artificial Sequence: Synthetic oligonucleotide
agaguuuguagagauggca

SEQ ID NO: 2283713 - RNA, 19 nt, Artificial Sequence
  Description of Artificial Sequence: Synthetic oligonucleotide
uacggcgcgcuguaggagg

SEQ ID NO: 2283714 - RNA, 19 nt, Artificial Sequence
  Description of Artificial Sequence: Synthetic oligonucleotide
aggucaggcaaugaaaacu

SEQ ID NO: 2283715 - RNA, 19 nt, Artificial Sequence
  Description of Artificial Sequence: Synthetic oligonucleotide
gagcggucaggccaagacg

SEQ ID NO: 2283716 - RNA, 19 nt, Artificial Sequence
  Description of Artificial Sequence: Synthetic oligonucleotide
ucuuccccguugaugacga

SEQ ID NO: 2283717 - RNA, 19 nt, Artificial Sequence
  Description of Artificial Sequence: Synthetic oligonucleotide
caucuccccgccaugagac

SEQ ID NO: 2283718 - RNA, 19 nt, Artificial Sequence
  Description of Artificial Sequence: Synthetic oligonucleotide
ggcuccgugcacuucaugg

SEQ ID NO: 2283719 - RNA, 19 nt, Artificial Sequence
  Description of Artificial Sequence: Synthetic oligonucleotide
uugcagaaauccuuccagu

SEQ ID NO: 2283720 - RNA, 19 nt, Artificial Sequence
  Description of Artificial Sequence: Synthetic oligonucleotide
agauggcaagccauacucc

SEQ ID NO: 2283721 - RNA, 19 nt, Artificial Sequence
  Description of Artificial Sequence: Synthetic oligonucleotide
ugccaagggcuauuuuggg

SEQ ID NO: 2283722 - RNA, 19 nt, Artificial Sequence
  Description of Artificial Sequence: Synthetic oligonucleotide
ucaaccaggagggcuuggg

SEQ ID NO: 2283723 - RNA, 19 nt, Artificial Sequence
  Description of Artificial Sequence: Synthetic oligonucleotide
uggcuauagagccccggcc

SEQ ID NO: 2283724 - RNA, 19 nt, Artificial Sequence
  Description of Artificial Sequence: Synthetic oligonucleotide
agacgcagaugcccgcacc

SEQ ID NO: 2283725 - RNA, 19 nt, Artificial Sequence
  Description of Artificial Sequence: Synthetic oligonucleotide
ggcaaugaaaacucgggca

SEQ ID NO: 2283726 - RNA, 19 nt, Artificial Sequence
  Description of Artificial Sequence: Synthetic oligonucleotide
augugcaugucggcggucc

SEQ ID NO: 2283727 - RNA, 19 nt, Artificial Sequence
  Description of Artificial Sequence: Synthetic oligonucleotide
ggcuauagagccccggccg

SEQ ID NO: 2283728 - RNA, 19 nt, Artificial Sequence
  Description of Artificial Sequence: Synthetic oligonucleotide
ugggaagcgggugggaggg

SEQ ID NO: 2283729 - RNA, 19 nt, Artificial Sequence
  Description of Artificial Sequence: Synthetic oligonucleotide
gcaaugaaaacucgggcac

SEQ ID NO: 2283730 - RNA, 19 nt, Artificial Sequence
  Description of Artificial Sequence: Synthetic oligonucleotide
gugccaagggcuauuuugg

SEQ ID NO: 2283731 - RNA, 19 nt, Artificial Sequence
  Description of Artificial Sequence: Synthetic oligonucleotide
agcccaucaauggccagcc

SEQ ID NO: 2283732 - RNA, 19 nt, Artificial Sequence
  Description of Artificial Sequence: Synthetic oligonucleotide
cacuaggaacaccuggccc

SEQ ID NO: 2283733 - RNA, 19 nt, Artificial Sequence
  Description of Artificial Sequence: Synthetic oligonucleotide
uguaggaggcagcacguuu

SEQ ID NO: 2283734 - RNA, 19 nt, Artificial Sequence
  Description of Artificial Sequence: Synthetic oligonucleotide
uccucacgcgggcagaaga

SEQ ID NO: 2283735 - RNA, 19 nt, Artificial Sequence
  Description of Artificial Sequence: Synthetic oligonucleotide
cucgacugaagcacacacc

SEQ ID NO: 2283736 - RNA, 19 nt, Artificial Sequence
  Description of Artificial Sequence: Synthetic oligonucleotide
aagggcuauuuugggcggc

SEQ ID NO: 2283737 - RNA, 19 nt, Artificial Sequence
  Description of Artificial Sequence: Synthetic oligonucleotide
ucccagacggguccacgcg

SEQ ID NO: 2283738 - RNA, 19 nt, Artificial Sequence
  Description of Artificial Sequence: Synthetic oligonucleotide
ccaagagguggcuauagag

SEQ ID NO: 2283739 - RNA, 19 nt, Artificial Sequence
  Description of Artificial Sequence: Synthetic oligonucleotide
ucuccacacguguggcucg

SEQ ID NO: 2283740 - RNA, 19 nt, Artificial Sequence
  Description of Artificial Sequence: Synthetic oligonucleotide
uuuuguucguagagcuggu

SEQ ID NO: 2283741 - RNA, 19 nt, Artificial Sequence
  Description of Artificial Sequence: Synthetic oligonucleotide
uccaagagguggcuauaga

SEQ ID NO: 2283742 - RNA, 19 nt, Artificial Sequence
  Description of Artificial Sequence: Synthetic oligonucleotide
ccuuccaguccuuugggcg

SEQ ID NO: 2283743 - RNA, 19 nt, Artificial Sequence
  Description of Artificial Sequence: Synthetic oligonucleotide
agcacguuuuguucguaga

SEQ ID NO: 2283744 - RNA, 19 nt, Artificial Sequence
  Description of Artificial Sequence: Synthetic oligonucleotide
cacggcauagagaggccgg

SEQ ID NO: 2283745 - RNA, 19 nt, Artificial Sequence
  Description of Artificial Sequence: Synthetic oligonucleotide
gaguuuguagagauggcaa

SEQ ID NO: 2283746 - RNA, 19 nt, Artificial Sequence
  Description of Artificial Sequence: Synthetic oligonucleotide
ugauggcgaagacccagcu

SEQ ID NO: 2283747 - RNA, 19 nt, Artificial Sequence
  Description of Artificial Sequence: Synthetic oligonucleotide
uggaugcgcagauaggguu

SEQ ID NO: 2283748 - RNA, 19 nt, Artificial Sequence
  Description of Artificial Sequence: Synthetic oligonucleotide
agagguggcuauagagccc

SEQ ID NO: 2283749 - RNA, 19 nt, Artificial Sequence
  Description of Artificial Sequence: Synthetic oligonucleotide
aagcacacaccgugggcga

SEQ ID NO: 2283750 - RNA, 19 nt, Artificial Sequence
  Description of Artificial Sequence: Synthetic oligonucleotide
auagagaggccgggcacac

SEQ ID NO: 2283751 - RNA, 19 nt, Artificial Sequence
  Description of Artificial Sequence: Synthetic oligonucleotide
guggcuauagagccccggc

SEQ ID NO: 2283752 - RNA, 19 nt, Artificial Sequence
  Description of Artificial Sequence: Synthetic oligonucleotide
uccuuccaguccuuugggc

SEQ ID NO: 2283753 - RNA, 19 nt, Artificial Sequence
  Description of Artificial Sequence: Synthetic oligonucleotide
agcucuccacacguguggc

SEQ ID NO: 2283754 - RNA, 19 nt, Artificial Sequence
  Description of Artificial Sequence: Synthetic oligonucleotide
gguggaggcaaacacaucu

SEQ ID NO: 2283755 - RNA, 19 nt, Artificial Sequence
  Description of Artificial Sequence: Synthetic oligonucleotide
gacugcgacccaccaggcg

SEQ ID NO: 2283756 - RNA, 19 nt, Artificial Sequence
  Description of Artificial Sequence: Synthetic oligonucleotide
cagccugugcaccacacuc

SEQ ID NO: 2283757 - RNA, 19 nt, Artificial Sequence
  Description of Artificial Sequence: Synthetic oligonucleotide
caaccaggagggcuugggg

SEQ ID NO: 2283758 - RNA, 19 nt, Artificial Sequence
  Description of Artificial Sequence: Synthetic oligonucleotide
agcugguccaagagguggc

SEQ ID NO: 2283759 - RNA, 19 nt, Artificial Sequence
  Description of Artificial Sequence: Synthetic oligonucleotide
cauucauacuugcagaaau

SEQ ID NO: 2283760 - RNA, 19 nt, Artificial Sequence
  Description of Artificial Sequence: Synthetic oligonucleotide
uuccccguugaugacgaug

SEQ ID NO: 2283761 - RNA, 19 nt, Artificial Sequence
  Description of Artificial Sequence: Synthetic oligonucleotide
uggcgugugauggcgaaga

SEQ ID NO: 2283762 - RNA, 19 nt, Artificial Sequence
  Description of Artificial Sequence: Synthetic oligonucleotide
gcacguuuuguucguagag

SEQ ID NO: 2283763 - RNA, 19 nt, Artificial Sequence
  Description of Artificial Sequence: Synthetic oligonucleotide
gcgcagauaggguucaacc

SEQ ID NO: 2283764 - RNA, 19 nt, Artificial Sequence
  Description of Artificial Sequence: Synthetic oligonucleotide
caggucaggcaaugaaaac

SEQ ID NO: 2283765 - RNA, 19 nt, Artificial Sequence
  Description of Artificial Sequence: Synthetic oligonucleotide
ccgacugcgacccaccagg

SEQ ID NO: 2283766 - RNA, 19 nt, Artificial Sequence
  Description of Artificial Sequence: Synthetic oligonucleotide
uugggcggcggacucagau

SEQ ID NO: 2283767 - RNA, 19 nt, Artificial Sequence
  Description of Artificial Sequence: Synthetic oligonucleotide
cacagaguuuguagagaug

SEQ ID NO: 2283768 - RNA, 19 nt, Artificial Sequence
  Description of Artificial Sequence: Synthetic oligonucleotide
cacaucuaccacggcauag

SEQ ID NO: 2283769 - RNA, 19 nt, Artificial Sequence
  Description of Artificial Sequence: Synthetic oligonucleotide
ugggccacccagcccuacg

SEQ ID NO: 2283770 - RNA, 19 nt, Artificial Sequence
  Description of Artificial Sequence: Synthetic oligonucleotide
cagcacguuuuguucguag

SEQ ID NO: 2283771 - RNA, 19 nt, Artificial Sequence
  Description of Artificial Sequence: Synthetic oligonucleotide
acucagaugguggccgcgg

SEQ ID NO: 2283772 - RNA, 19 nt, Artificial Sequence
  Description of Artificial Sequence: Synthetic oligonucleotide
uccgugcacuucaugggaa

SEQ ID NO: 2283773 - RNA, 19 nt, Artificial Sequence
  Description of Artificial Sequence: Synthetic oligonucleotide
gacgcagaugcccgcacca

SEQ ID NO: 2283774 - RNA, 19 nt, Artificial Sequence
  Description of Artificial Sequence: Synthetic oligonucleotide
uccacgcggauguuggcuc

SEQ ID NO: 2283775 - RNA, 19 nt, Artificial Sequence
  Description of Artificial Sequence: Synthetic oligonucleotide
uggaccaggcgcacacucu

SEQ ID NO: 2283776 - RNA, 19 nt, Artificial Sequence
  Description of Artificial Sequence: Synthetic oligonucleotide
cuaggaacaccuggcccgg

SEQ ID NO: 2283777 - RNA, 19 nt, Artificial Sequence
  Description of Artificial Sequence: Synthetic oligonucleotide
caugggaagcgggugggag

SEQ ID NO: 2283778 - RNA, 19 nt, Artificial Sequence
  Description of Artificial Sequence: Synthetic oligonucleotide
uucguagagcugguccaag

SEQ ID NO: 2283779 - RNA, 19 nt, Artificial Sequence
  Description of Artificial Sequence: Synthetic oligonucleotide
cuuccaguccuuugggcga

SEQ ID NO: 2283780 - RNA, 19 nt, Artificial Sequence
  Description of Artificial Sequence: Synthetic oligonucleotide
gcuccgugcacuucauggg

SEQ ID NO: 2283781 - RNA, 19 nt, Artificial Sequence
  Description of Artificial Sequence: Synthetic oligonucleotide
ggcggucccauccucacgc

SEQ ID NO: 2283782 - RNA, 19 nt, Artificial Sequence
  Description of Artificial Sequence: Synthetic oligonucleotide
uacggguucggaggcagca

SEQ ID NO: 2283783 - RNA, 19 nt, Artificial Sequence
  Description of Artificial Sequence: Synthetic oligonucleotide
ggguacgcgguuguggugg

SEQ ID NO: 2283784 - RNA, 19 nt, Artificial Sequence
  Description of Artificial Sequence: Synthetic oligonucleotide
ggucaggcaaugaaaacuc

SEQ ID NO: 2283785 - RNA, 19 nt, Artificial Sequence
  Description of Artificial Sequence: Synthetic oligonucleotide
cucagaugguggccgcggg

SEQ ID NO: 2283786 - RNA, 19 nt, Artificial Sequence
  Description of Artificial Sequence: Synthetic oligonucleotide
agaugcccgcaccagccca

SEQ ID NO: 2283787 - RNA, 19 nt, Artificial Sequence
  Description of Artificial Sequence: Synthetic oligonucleotide
gacucagaugguggccgcg

SEQ ID NO: 2283788 - RNA, 19 nt, Artificial Sequence
  Description of Artificial Sequence: Synthetic oligonucleotide
ugggcggcggacucagaug

SEQ ID NO: 2283789 - RNA, 19 nt, Artificial Sequence
  Description of Artificial Sequence: Synthetic oligonucleotide
ucggaggcagcagccaucu

SEQ ID NO: 2283790 - RNA, 19 nt, Artificial Sequence
  Description of Artificial Sequence: Synthetic oligonucleotide
cgugccaagggcuauuuug

SEQ ID NO: 2283791 - RNA, 19 nt, Artificial Sequence
  Description of Artificial Sequence: Synthetic oligonucleotide
cagcccuacggguucggag

SEQ ID NO: 2283792 - RNA, 19 nt, Artificial Sequence
  Description of Artificial Sequence: Synthetic oligonucleotide
guccaagagguggcuauag

SEQ ID NO: 2283793 - RNA, 19 nt, Artificial Sequence
  Description of Artificial Sequence: Synthetic oligonucleotide
acggcauagagaggccggg

SEQ ID NO: 2283794 - RNA, 19 nt, Artificial Sequence
  Description of Artificial Sequence: Synthetic oligonucleotide
gccaagggcuauuuugggc

SEQ ID NO: 2283795 - RNA, 19 nt, Artificial Sequence
  Description of Artificial Sequence: Synthetic oligonucleotide
agaggccgggcacacggca

SEQ ID NO: 2283796 - RNA, 19 nt, Artificial Sequence
  Description of Artificial Sequence: Synthetic oligonucleotide
gucccagacggguccacgc

SEQ ID NO: 2283797 - RNA, 19 nt, Artificial Sequence
  Description of Artificial Sequence: Synthetic oligonucleotide
uucaaccaggagggcuugg

SEQ ID NO: 2283798 - RNA, 19 nt, Artificial Sequence
  Description of Artificial Sequence: Synthetic oligonucleotide
uuuguucguagagcugguc

SEQ ID NO: 2283799 - RNA, 19 nt, Artificial Sequence
  Description of Artificial Sequence: Synthetic oligonucleotide
acgcgggcagaagagaaca

SEQ ID NO: 2283800 - RNA, 19 nt, Artificial Sequence
  Description of Artificial Sequence: Synthetic oligonucleotide
ggcuacggcgcgcuguagg

SEQ ID NO: 2283801 - RNA, 19 nt, Artificial Sequence
  Description of Artificial Sequence: Synthetic oligonucleotide
uacgcgguugugguggcgu

SEQ ID NO: 2283802 - RNA, 19 nt, Artificial Sequence
  Description of Artificial Sequence: Synthetic oligonucleotide
cuaccacggcauagagagg

SEQ ID NO: 2283803 - RNA, 19 nt, Artificial Sequence
  Description of Artificial Sequence: Synthetic oligonucleotide
ugcgcagauaggguucaac

SEQ ID NO: 2283804 - RNA, 19 nt, Artificial Sequence
  Description of Artificial Sequence: Synthetic oligonucleotide
uaucuccacuaggaacacc

SEQ ID NO: 2283805 - RNA, 19 nt, Artificial Sequence
  Description of Artificial Sequence: Synthetic oligonucleotide
cagaggccagacuggccgg

SEQ ID NO: 2283806 - RNA, 19 nt, Artificial Sequence
  Description of Artificial Sequence: Synthetic oligonucleotide
ggucccauccucacgcggg

SEQ ID NO: 2283807 - RNA, 19 nt, Artificial Sequence
  Description of Artificial Sequence: Synthetic oligonucleotide
agccccggccgacugcgac

SEQ ID NO: 2283808 - RNA, 19 nt, Artificial Sequence
  Description of Artificial Sequence: Synthetic oligonucleotide
gccaagacgcagaugcccg

SEQ ID NO: 2283809 - RNA, 19 nt, Artificial Sequence
  Description of Artificial Sequence: Synthetic oligonucleotide
cacacucuucuggaucacc

SEQ ID NO: 2283810 - RNA, 19 nt, Artificial Sequence
  Description of Artificial Sequence: Synthetic oligonucleotide
ccguugaugacgaugugca

SEQ ID NO: 2283811 - RNA, 19 nt, Artificial Sequence
  Description of Artificial Sequence: Synthetic oligonucleotide
guggcucgggucccagacg

SEQ ID NO: 2283812 - RNA, 19 nt, Artificial Sequence
  Description of Artificial Sequence: Synthetic oligonucleotide
ucuccccgccaugagacaa

SEQ ID NO: 2283813 - RNA, 19 nt, Artificial Sequence
  Description of Artificial Sequence: Synthetic oligonucleotide
gacaagccagcucgugcca

SEQ ID NO: 2283814 - RNA, 19 nt, Artificial Sequence
  Description of Artificial Sequence: Synthetic oligonucleotide
uggcgaagacccagcucug

SEQ ID NO: 2283815 - RNA, 19 nt, Artificial Sequence
  Description of Artificial Sequence: Synthetic oligonucleotide
gaugcccgcaccagcccag

SEQ ID NO: 2283816 - RNA, 19 nt, Artificial Sequence
  Description of Artificial Sequence: Synthetic oligonucleotide
accacggcauagagaggcc

SEQ ID NO: 2283817 - RNA, 19 nt, Artificial Sequence
  Description of Artificial Sequence: Synthetic oligonucleotide
agauaggguucaaccagga

SEQ ID NO: 2283818 - RNA, 19 nt, Artificial Sequence
  Description of Artificial Sequence: Synthetic oligonucleotide
cugaccaggucaggcaaug

SEQ ID NO: 2283819 - RNA, 19 nt, Artificial Sequence
  Description of Artificial Sequence: Synthetic oligonucleotide
cuggaucaccagacggcac

SEQ ID NO: 2283820 - RNA, 19 nt, Artificial Sequence
  Description of Artificial Sequence: Synthetic oligonucleotide
gguauucggaacugcugga

SEQ ID NO: 2283821 - RNA, 19 nt, Artificial Sequence
  Description of Artificial Sequence: Synthetic oligonucleotide
ugucuuccccguugaugac

SEQ ID NO: 2283822 - RNA, 19 nt, Artificial Sequence
  Description of Artificial Sequence: Synthetic oligonucleotide
gcggauguuggcuccgugc

SEQ ID NO: 2283823 - RNA, 19 nt, Artificial Sequence
  Description of Artificial Sequence: Synthetic oligonucleotide
cacgcgggcagaagagaac

SEQ ID NO: 2283824 - RNA, 19 nt, Artificial Sequence
  Description of Artificial Sequence: Synthetic oligonucleotide
uugacccucccgggguacg

SEQ ID NO: 2283825 - RNA, 19 nt, Artificial Sequence
  Description of Artificial Sequence: Synthetic oligonucleotide
aggguucaaccaggagggc

SEQ ID NO: 2283826 - RNA, 19 nt, Artificial Sequence
  Description of Artificial Sequence: Synthetic oligonucleotide
cuaucuccacuaggaacac

SEQ ID NO: 2283827 - RNA, 19 nt, Artificial Sequence
  Description of Artificial Sequence: Synthetic oligonucleotide
cgggcagaagagaacaccc

SEQ ID NO: 2283828 - RNA, 19 nt, Artificial Sequence
  Description of Artificial Sequence: Synthetic oligonucleotide
gugggcgaagcucuccaca

SEQ ID NO: 2283829 - RNA, 19 nt, Artificial Sequence
  Description of Artificial Sequence: Synthetic oligonucleotide
aggccagacuggccggguc

SEQ ID NO: 2283830 - RNA, 19 nt, Artificial Sequence
  Description of Artificial Sequence: Synthetic oligonucleotide
acccucccgggguacgcgg

SEQ ID NO: 2283831 - RNA, 19 nt, Artificial Sequence
  Description of Artificial Sequence: Synthetic oligonucleotide
gcaagccauacuccaguug

SEQ ID NO: 2283832 - RNA, 19 nt, Artificial Sequence
  Description of Artificial Sequence: Synthetic oligonucleotide
cagaugcccgcaccagccc

SEQ ID NO: 2283833 - RNA, 19 nt, Artificial Sequence
  Description of Artificial Sequence: Synthetic oligonucleotide
ggguccacgcggauguugg

SEQ ID NO: 2283834 - RNA, 19 nt, Artificial Sequence
  Description of Artificial Sequence: Synthetic oligonucleotide
cuccgugcacuucauggga

SEQ ID NO: 2283835 - RNA, 19 nt, Artificial Sequence
  Description of Artificial Sequence: Synthetic oligonucleotide
ucggcggucccauccucac

SEQ ID NO: 2283836 - RNA, 19 nt, Artificial Sequence
  Description of Artificial Sequence: Synthetic oligonucleotide
ggcuaggggcucucgacug

SEQ ID NO: 2283837 - RNA, 19 nt, Artificial Sequence
  Description of Artificial Sequence: Synthetic oligonucleotide
ugguggcgugugauggcga

SEQ ID NO: 2283838 - RNA, 19 nt, Artificial Sequence
  Description of Artificial Sequence: Synthetic oligonucleotide
ccgccaugagacaagccag

SEQ ID NO: 2283839 - RNA, 19 nt, Artificial Sequence
  Description of Artificial Sequence: Synthetic oligonucleotide
ggcggacucagaugguggc

SEQ ID NO: 2283840 - RNA, 19 nt, Artificial Sequence
  Description of Artificial Sequence: Synthetic oligonucleotide
guagagauggcaagccaua

SEQ ID NO: 2283841 - RNA, 19 nt, Artificial Sequence
  Description of Artificial Sequence: Synthetic oligonucleotide
gcauagagaggccgggcac

SEQ ID NO: 2283842 - RNA, 19 nt, Artificial Sequence
  Description of Artificial Sequence: Synthetic oligonucleotide
ggccaagacgcagaugccc

SEQ ID NO: 2283843 - RNA, 19 nt, Artificial Sequence
  Description of Artificial Sequence: Synthetic oligonucleotide
gcagaugcccgcaccagcc

SEQ ID NO: 2283844 - RNA, 19 nt, Artificial Sequence
  Description of Artificial Sequence: Synthetic oligonucleotide
caccagacggcacagaguu

SEQ ID NO: 2283845 - RNA, 19 nt, Artificial Sequence
  Description of Artificial Sequence: Synthetic oligonucleotide
gccagcucgugccaagggc

SEQ ID NO: 2283846 - RNA, 19 nt, Artificial Sequence
  Description of Artificial Sequence: Synthetic oligonucleotide
ugaccaggucaggcaauga

SEQ ID NO: 2283847 - RNA, 19 nt, Artificial Sequence
  Description of Artificial Sequence: Synthetic oligonucleotide
cuauagagccccggccgac

SEQ ID NO: 2283848 - RNA, 19 nt, Artificial Sequence
  Description of Artificial Sequence: Synthetic oligonucleotide
cccguugaugacgaugugc

SEQ ID NO: 2283849 - RNA, 19 nt, Artificial Sequence
  Description of Artificial Sequence: Synthetic oligonucleotide
cuacggguucggaggcagc

SEQ ID NO: 2283850 - RNA, 19 nt, Artificial Sequence
  Description of Artificial Sequence: Synthetic oligonucleotide
auuuugggcggcggacuca

SEQ ID NO: 2283851 - RNA, 19 nt, Artificial Sequence
  Description of Artificial Sequence: Synthetic oligonucleotide
uccuuugggcgagguggag

SEQ ID NO: 2283852 - RNA, 19 nt, Artificial Sequence
  Description of Artificial Sequence: Synthetic oligonucleotide
acggcgcgcuguaggaggc

SEQ ID NO: 2283853 - RNA, 19 nt, Artificial Sequence
  Description of Artificial Sequence: Synthetic oligonucleotide
ugcaugucggcggucccau

SEQ ID NO: 2283854 - RNA, 19 nt, Artificial Sequence
  Description of Artificial Sequence: Synthetic oligonucleotide
gguggcuauagagccccgg

SEQ ID NO: 2283855 - RNA, 19 nt, Artificial Sequence
  Description of Artificial Sequence: Synthetic oligonucleotide
cccgccaugagacaagcca

SEQ ID NO: 2283856 - RNA, 19 nt, Artificial Sequence
  Description of Artificial Sequence: Synthetic oligonucleotide
gaggccgggcacacggcag

SEQ ID NO: 2283857 - RNA, 19 nt, Artificial Sequence
  Description of Artificial Sequence: Synthetic oligonucleotide
acacaucuaccacggcaua

SEQ ID NO: 2283858 - RNA, 19 nt, Artificial Sequence
  Description of Artificial Sequence: Synthetic oligonucleotide
uggcuccgugcacuucaug

SEQ ID NO: 2283859 - RNA, 19 nt, Artificial Sequence
  Description of Artificial Sequence: Synthetic oligonucleotide
augaaaacucgggcacaga

SEQ ID NO: 2283860 - RNA, 19 nt, Artificial Sequence
  Description of Artificial Sequence: Synthetic oligonucleotide
cacacaccgugggcgaagc

SEQ ID NO: 2283861 - RNA, 19 nt, Artificial Sequence
  Description of Artificial Sequence: Synthetic oligonucleotide
ccgacucugcaucugcuug

SEQ ID NO: 2283862 - RNA, 19 nt, Artificial Sequence
  Description of Artificial Sequence: Synthetic oligonucleotide
guucaaccaggagggcuug

SEQ ID NO: 2283863 - RNA, 19 nt, Artificial Sequence
  Description of Artificial Sequence: Synthetic oligonucleotide
gggcgaagcucuccacacg

SEQ ID NO: 2283864 - RNA, 19 nt, Artificial Sequence
  Description of Artificial Sequence: Synthetic oligonucleotide
ggggcucucgacugaagca

SEQ ID NO: 2283865 - RNA, 19 nt, Artificial Sequence
  Description of Artificial Sequence: Synthetic oligonucleotide
gacccucccgggguacgcg

SEQ ID NO: 2283866 - RNA, 19 nt, Artificial Sequence
  Description of Artificial Sequence: Synthetic oligonucleotide
agacggguccacgcggaug

SEQ ID NO: 2283867 - RNA, 19 nt, Artificial Sequence
  Description of Artificial Sequence: Synthetic oligonucleotide
agccugugcaccacacucu

SEQ ID NO: 2283868 - RNA, 19 nt, Artificial Sequence
  Description of Artificial Sequence: Synthetic oligonucleotide
gucccgggguauucggaac

SEQ ID NO: 2283869 - RNA, 19 nt, Artificial Sequence
  Description of Artificial Sequence: Synthetic oligonucleotide
gggcucucgacugaagcac

SEQ ID NO: 2283870 - RNA, 19 nt, Artificial Sequence
  Description of Artificial Sequence: Synthetic oligonucleotide
cucgggucccagacggguc

SEQ ID NO: 2283871 - RNA, 19 nt, Artificial Sequence
  Description of Artificial Sequence: Synthetic oligonucleotide
caguccuuugggcgaggug

SEQ ID NO: 2283872 - RNA, 19 nt, Artificial Sequence
  Description of Artificial Sequence: Synthetic oligonucleotide
ggcgagguggagcccauca

SEQ ID NO: 2283873 - RNA, 19 nt, Artificial Sequence
  Description of Artificial Sequence: Synthetic oligonucleotide
ccucacgcgggcagaagag

SEQ ID NO: 2283874 - RNA, 19 nt, Artificial Sequence
  Description of Artificial Sequence: Synthetic oligonucleotide
gcgggcagaagagaacacc

SEQ ID NO: 2283875 - RNA, 19 nt, Artificial Sequence
  Description of Artificial Sequence: Synthetic oligonucleotide
ggaucaccagacggcacag

SEQ ID NO: 2283876 - RNA, 19 nt, Artificial Sequence
  Description of Artificial Sequence: Synthetic oligonucleotide
ucccgggguacgcgguugu

SEQ ID NO: 2283877 - RNA, 19 nt, Artificial Sequence
  Description of Artificial Sequence: Synthetic oligonucleotide
ugacccucccgggguacgc

SEQ ID NO: 2283878 - RNA, 19 nt, Artificial Sequence
  Description of Artificial Sequence: Synthetic oligonucleotide
ggggcuaggggcucucgac

SEQ ID NO: 2283879 - RNA, 19 nt, Artificial Sequence
  Description of Artificial Sequence: Synthetic oligonucleotide
cuacggcgcgcuguaggag

SEQ ID NO: 2283880 - RNA, 19 nt, Artificial Sequence
  Description of Artificial Sequence: Synthetic oligonucleotide
acggguucggaggcagcag

SEQ ID NO: 2283881 - RNA, 19 nt, Artificial Sequence
  Description of Artificial Sequence: Synthetic oligonucleotide
cuccacacguguggcucgg

SEQ ID NO: 2283882 - RNA, 19 nt, Artificial Sequence
  Description of Artificial Sequence: Synthetic oligonucleotide
aucuccccgccaugagaca

SEQ ID NO: 2283883 - RNA, 19 nt, Artificial Sequence
  Description of Artificial Sequence: Synthetic oligonucleotide
ggcacagaguuuguagaga

SEQ ID NO: 2283884 - RNA, 19 nt, Artificial Sequence
  Description of Artificial Sequence: Synthetic oligonucleotide
gcgugugauggcgaagacc

SEQ ID NO: 2283885 - RNA, 19 nt, Artificial Sequence
  Description of Artificial Sequence: Synthetic oligonucleotide
cuugacccucccgggguac

SEQ ID NO: 2283886 - RNA, 19 nt, Artificial Sequence
  Description of Artificial Sequence: Synthetic oligonucleotide
gcuacggcgcgcuguagga

SEQ ID NO: 2283887 - RNA, 19 nt, Artificial Sequence
  Description of Artificial Sequence: Synthetic oligonucleotide
augcccgcaccagcccagc

SEQ ID NO: 2283888 - RNA, 19 nt, Artificial Sequence
  Description of Artificial Sequence: Synthetic oligonucleotide
cacgcggauguuggcuccg

SEQ ID NO: 2283889 - RNA, 19 nt, Artificial Sequence
  Description of Artificial Sequence: Synthetic oligonucleotide
acgcgguugugguggcgug

SEQ ID NO: 2283890 - RNA, 19 nt, Artificial Sequence
  Description of Artificial Sequence: Synthetic oligonucleotide
auguuggcuccgugcacuu

SEQ ID NO: 2283891 - RNA, 19 nt, Artificial Sequence
  Description of Artificial Sequence: Synthetic oligonucleotide
ucgugccaagggcuauuuu

SEQ ID NO: 2283892 - RNA, 19 nt, Artificial Sequence
  Description of Artificial Sequence: Synthetic oligonucleotide
cuggaugcgcagauagggu

SEQ ID NO: 2283893 - RNA, 19 nt, Artificial Sequence
  Description of Artificial Sequence: Synthetic oligonucleotide
cccagacggguccacgcgg

SEQ ID NO: 2283894 - RNA, 19 nt, Artificial Sequence
  Description of Artificial Sequence: Synthetic oligonucleotide
ccaagacgcagaugcccgc

SEQ ID NO: 2283895 - RNA, 19 nt, Artificial Sequence
  Description of Artificial Sequence: Synthetic oligonucleotide
caagacgcagaugcccgca

SEQ ID NO: 2283896 - RNA, 19 nt, Artificial Sequence
  Description of Artificial Sequence: Synthetic oligonucleotide
acaagccagcucgugccaa

SEQ ID NO: 2283897 - RNA, 19 nt, Artificial Sequence
  Description of Artificial Sequence: Synthetic oligonucleotide
augagacaagccagcucgu

SEQ ID NO: 2283898 - RNA, 19 nt, Artificial Sequence
  Description of Artificial Sequence: Synthetic oligonucleotide
ggcgaagcucuccacacgu

SEQ ID NO: 2283899 - RNA, 19 nt, Artificial Sequence
  Description of Artificial Sequence: Synthetic oligonucleotide
guucguagagcugguccaa

SEQ ID NO: 2283900 - RNA, 19 nt, Artificial Sequence
  Description of Artificial Sequence: Synthetic oligonucleotide
cguuuuguucguagagcug

SEQ ID NO: 2283901 - RNA, 19 nt, Artificial Sequence
  Description of Artificial Sequence: Synthetic oligonucleotide
ccuuugggcgagguggagc

SEQ ID NO: 2283902 - RNA, 19 nt, Artificial Sequence
  Description of Artificial Sequence: Synthetic oligonucleotide
ccaugagacaagccagcuc

SEQ ID NO: 2283903 - RNA, 19 nt, Artificial Sequence
  Description of Artificial Sequence: Synthetic oligonucleotide
gaucaccagacggcacaga

SEQ ID NO: 2283904 - RNA, 19 nt, Artificial Sequence
  Description of Artificial Sequence: Synthetic oligonucleotide
cuauuuugggcggcggacu

SEQ ID NO: 2283905 - RNA, 19 nt, Artificial Sequence
  Description of Artificial Sequence: Synthetic oligonucleotide
uguuggcuccgugcacuuc

SEQ ID NO: 2283906 - RNA, 19 nt, Artificial Sequence
  Description of Artificial Sequence: Synthetic oligonucleotide
ccgugcacuucaugggaag

SEQ ID NO: 2283907 - RNA, 19 nt, Artificial Sequence
  Description of Artificial Sequence: Synthetic oligonucleotide
gaugugcaugucggcgguc

SEQ ID NO: 2283908 - RNA, 19 nt, Artificial Sequence
  Description of Artificial Sequence: Synthetic oligonucleotide
ccacggcauagagaggccg

SEQ ID NO: 2283909 - RNA, 19 nt, Artificial Sequence
  Description of Artificial Sequence: Synthetic oligonucleotide
acacaccgugggcgaagcu

SEQ ID NO: 2283910 - RNA, 19 nt, Artificial Sequence
  Description of Artificial Sequence: Synthetic oligonucleotide
auccucacgcgggcagaag

SEQ ID NO: 2283911 - RNA, 19 nt, Artificial Sequence
  Description of Artificial Sequence: Synthetic oligonucleotide
gguacgcgguugugguggc

SEQ ID NO: 2283912 - RNA, 19 nt, Artificial Sequence
  Description of Artificial Sequence: Synthetic oligonucleotide
guauucggaacugcuggau

SEQ ID NO: 2283913 - RNA, 19 nt, Artificial Sequence
  Description of Artificial Sequence: Synthetic oligonucleotide
ggucccgggguauucggaa

SEQ ID NO: 2283914 - RNA, 19 nt, Artificial Sequence
  Description of Artificial Sequence: Synthetic oligonucleotide
gacccaccaggcggucccg

SEQ ID NO: 2283915 - RNA, 19 nt, Artificial Sequence
  Description of Artificial Sequence: Synthetic oligonucleotide
ugcccgcaccagcccagcu

SEQ ID NO: 2283916 - RNA, 19 nt, Artificial Sequence
  Description of Artificial Sequence: Synthetic oligonucleotide
ccuacggguucggaggcag

SEQ ID NO: 2283917 - RNA, 19 nt, Artificial Sequence
  Description of Artificial Sequence: Synthetic oligonucleotide
gcggucccgggguauucgg

SEQ ID NO: 2283918 - RNA, 19 nt, Artificial Sequence
  Description of Artificial Sequence: Synthetic oligonucleotide
guaggaggcagcacguuuu

SEQ ID NO: 2283919 - RNA, 19 nt, Artificial Sequence
  Description of Artificial Sequence: Synthetic oligonucleotide
guacgcgguugugguggcg

SEQ ID NO: 2283920 - RNA, 19 nt, Artificial Sequence
  Description of Artificial Sequence: Synthetic oligonucleotide
ggguucggaggcagcagcc

SEQ ID NO: 2283921 - RNA, 19 nt, Artificial Sequence
  Description of Artificial Sequence: Synthetic oligonucleotide
ggaggcagcacguuuuguu

SEQ ID NO: 2283922 - RNA, 19 nt, Artificial Sequence
  Description of Artificial Sequence: Synthetic oligonucleotide
cucacgcgggcagaagaga

SEQ ID NO: 2283923 - RNA, 19 nt, Artificial Sequence
  Description of Artificial Sequence: Synthetic oligonucleotide
acccagcccuacggguucg

SEQ ID NO: 2283924 - RNA, 19 nt, Artificial Sequence
  Description of Artificial Sequence: Synthetic oligonucleotide
cucucgacugaagcacaca

SEQ ID NO: 2283925 - RNA, 19 nt, Artificial Sequence
  Description of Artificial Sequence: Synthetic oligonucleotide
gggcuauuuugggcggcgg

SEQ ID NO: 2283926 - RNA, 19 nt, Artificial Sequence
  Description of Artificial Sequence: Synthetic oligonucleotide
guccuuugggcgaggugga

SEQ ID NO: 2283927 - RNA, 19 nt, Artificial Sequence
  Description of Artificial Sequence: Synthetic oligonucleotide
aggcggucccgggguauuc

SEQ ID NO: 2283928 - RNA, 19 nt, Artificial Sequence
  Description of Artificial Sequence: Synthetic oligonucleotide
cacacucuugguggaggca

SEQ ID NO: 2283929 - RNA, 19 nt, Artificial Sequence
  Description of Artificial Sequence: Synthetic oligonucleotide
gcgcgcagggccccguggg

SEQ ID NO: 2283930 - RNA, 19 nt, Artificial Sequence
  Description of Artificial Sequence: Synthetic oligonucleotide
gcccuacggguucggaggc

SEQ ID NO: 2283931 - RNA, 19 nt, Artificial Sequence
  Description of Artificial Sequence: Synthetic oligonucleotide
cagccaucuccccgccaug

SEQ ID NO: 2283932 - RNA, 19 nt, Artificial Sequence
  Description of Artificial Sequence: Synthetic oligonucleotide
agacggcacagaguuugua

SEQ ID NO: 2283933 - RNA, 19 nt, Artificial Sequence
  Description of Artificial Sequence: Synthetic oligonucleotide
ggcggucccgggguauucg

SEQ ID NO: 2283934 - RNA, 19 nt, Artificial Sequence
  Description of Artificial Sequence: Synthetic oligonucleotide
gguccacgcggauguuggc

SEQ ID NO: 2283935 - RNA, 19 nt, Artificial Sequence
  Description of Artificial Sequence: Synthetic oligonucleotide
ugggcgagguggagcccau

SEQ ID NO: 2283936 - RNA, 19 nt, Artificial Sequence
  Description of Artificial Sequence: Synthetic oligonucleotide
cggcggacucagauggugg

SEQ ID NO: 2283937 - RNA, 19 nt, Artificial Sequence
  Description of Artificial Sequence: Synthetic oligonucleotide
ggcgcgcagggccccgugg

SEQ ID NO: 2283938 - RNA, 19 nt, Artificial Sequence
  Description of Artificial Sequence: Synthetic oligonucleotide
ggcgcgcuguaggaggcag

SEQ ID NO: 2283939 - RNA, 19 nt, Artificial Sequence
  Description of Artificial Sequence: Synthetic oligonucleotide
ggcgugugauggcgaagac

SEQ ID NO: 2283940 - RNA, 19 nt, Artificial Sequence
  Description of Artificial Sequence: Synthetic oligonucleotide
ccgggguacgcgguugugg

SEQ ID NO: 2283941 - RNA, 19 nt, Artificial Sequence
  Description of Artificial Sequence: Synthetic oligonucleotide
ccacgcggauguuggcucc

SEQ ID NO: 2283942 - RNA, 19 nt, Artificial Sequence
  Description of Artificial Sequence: Synthetic oligonucleotide
cuaggggcucucgacugaa

SEQ ID NO: 2283943 - RNA, 19 nt, Artificial Sequence
  Description of Artificial Sequence: Synthetic oligonucleotide
gcggucccauccucacgcg

SEQ ID NO: 2283944 - RNA, 19 nt, Artificial Sequence
  Description of Artificial Sequence: Synthetic oligonucleotide
gcggacucagaugguggcc

SEQ ID NO: 2283945 - RNA, 19 nt, Artificial Sequence
  Description of Artificial Sequence: Synthetic oligonucleotide
ggcgcacacucuuggugga

SEQ ID NO: 2283946 - RNA, 19 nt, Artificial Sequence
  Description of Artificial Sequence: Synthetic oligonucleotide
gucggcggucccauccuca

SEQ ID NO: 2283947 - RNA, 19 nt, Artificial Sequence
  Description of Artificial Sequence: Synthetic oligonucleotide
gguucggaggcagcagcca

SEQ ID NO: 2283948 - RNA, 19 nt, Artificial Sequence
  Description of Artificial Sequence: Synthetic oligonucleotide
cucccgggguacgcgguug

SEQ ID NO: 2283949 - RNA, 19 nt, Artificial Sequence
  Description of Artificial Sequence: Synthetic oligonucleotide
gcggcggacucagauggug

SEQ ID NO: 2283950 - RNA, 19 nt, Artificial Sequence
  Description of Artificial Sequence: Synthetic oligonucleotide
cgugcacuucaugggaagc

SEQ ID NO: 2283951 - RNA, 19 nt, Artificial Sequence
  Description of Artificial Sequence: Synthetic oligonucleotide
gcgguugugguggcgugug

SEQ ID NO: 2283952 - RNA, 19 nt, Artificial Sequence
  Description of Artificial Sequence: Synthetic oligonucleotide
gguucaaccaggagggcuu

SEQ ID NO: 2283953 - RNA, 19 nt, Artificial Sequence
  Description of Artificial Sequence: Synthetic oligonucleotide
agcucgugccaagggcuau

SEQ ID NO: 2283954 - RNA, 19 nt, Artificial Sequence
  Description of Artificial Sequence: Synthetic oligonucleotide
ggguucaaccaggagggcu

SEQ ID NO: 2283955 - RNA, 19 nt, Artificial Sequence
  Description of Artificial Sequence: Synthetic oligonucleotide
guccacgcggauguuggcu

SEQ ID NO: 2283956 - RNA, 19 nt, Artificial Sequence
  Description of Artificial Sequence: Synthetic oligonucleotide
gcucucgacugaagcacac

SEQ ID NO: 2283957 - RNA, 19 nt, Artificial Sequence
  Description of Artificial Sequence: Synthetic oligonucleotide
ccucuaucuccacuaggaa

SEQ ID NO: 2283958 - RNA, 19 nt, Artificial Sequence
  Description of Artificial Sequence: Synthetic oligonucleotide
gugugauggcgaagaccca

SEQ ID NO: 2283959 - RNA, 19 nt, Artificial Sequence
  Description of Artificial Sequence: Synthetic oligonucleotide
guguggcucgggucccaga

SEQ ID NO: 2283960 - RNA, 19 nt, Artificial Sequence
  Description of Artificial Sequence: Synthetic oligonucleotide
cagcucgugccaagggcua

SEQ ID NO: 2283961 - RNA, 19 nt, Artificial Sequence
  Description of Artificial Sequence: Synthetic oligonucleotide
caccgugggcgaagcucuc

SEQ ID NO: 2283962 - RNA, 19 nt, Artificial Sequence
  Description of Artificial Sequence: Synthetic oligonucleotide
ggcucucgacugaagcaca

SEQ ID NO: 2283963 - RNA, 19 nt, Artificial Sequence
  Description of Artificial Sequence: Synthetic oligonucleotide
ccagcucgugccaagggcu

SEQ ID NO: 2283964 - RNA, 19 nt, Artificial Sequence
  Description of Artificial Sequence: Synthetic oligonucleotide
gccggguccagagcgguca

SEQ ID NO: 2283965 - RNA, 19 nt, Artificial Sequence
  Description of Artificial Sequence: Synthetic oligonucleotide
ccugugcaccacacucuuc

SEQ ID NO: 2283966 - RNA, 19 nt, Artificial Sequence
  Description of Artificial Sequence: Synthetic oligonucleotide
gggcuaggggcucucgacu

SEQ ID NO: 2283967 - RNA, 19 nt, Artificial Sequence
  Description of Artificial Sequence: Synthetic oligonucleotide
cauccucacgcgggcagaa

SEQ ID NO: 2283968 - RNA, 19 nt, Artificial Sequence
  Description of Artificial Sequence: Synthetic oligonucleotide
ccgggguauucggaacugc

SEQ ID NO: 2283969 - RNA, 19 nt, Artificial Sequence
  Description of Artificial Sequence: Synthetic oligonucleotide
ccagacggguccacgcgga

SEQ ID NO: 2283970 - RNA, 19 nt, Artificial Sequence
  Description of Artificial Sequence: Synthetic oligonucleotide
acgcggauguuggcuccgu

SEQ ID NO: 2283971 - RNA, 19 nt, Artificial Sequence
  Description of Artificial Sequence: Synthetic oligonucleotide
gcuguaggaggcagcacgu

SEQ ID NO: 2283972 - RNA, 19 nt, Artificial Sequence
  Description of Artificial Sequence: Synthetic oligonucleotide
gcgagguggagcccaucaa

SEQ ID NO: 2283973 - RNA, 19 nt, Artificial Sequence
  Description of Artificial Sequence: Synthetic oligonucleotide
gguugugguggcgugugau

SEQ ID NO: 2283974 - RNA, 19 nt, Artificial Sequence
  Description of Artificial Sequence: Synthetic oligonucleotide
cugcgacccaccaggcggu

SEQ ID NO: 2283975 - RNA, 19 nt, Artificial Sequence
  Description of Artificial Sequence: Synthetic oligonucleotide
ggaccaggcgcacacucuu

SEQ ID NO: 2283976 - RNA, 19 nt, Artificial Sequence
  Description of Artificial Sequence: Synthetic oligonucleotide
caguuggaccaggcgcaca

SEQ ID NO: 2283977 - RNA, 19 nt, Artificial Sequence
  Description of Artificial Sequence: Synthetic oligonucleotide
ugcgacccaccaggcgguc

SEQ ID NO: 2283978 - RNA, 19 nt, Artificial Sequence
  Description of Artificial Sequence: Synthetic oligonucleotide
ggcucgggucccagacggg

SEQ ID NO: 2283979 - RNA, 19 nt, Artificial Sequence
  Description of Artificial Sequence: Synthetic oligonucleotide
ggccccaugucuuccccgu

SEQ ID NO: 2283980 - RNA, 19 nt, Artificial Sequence
  Description of Artificial Sequence: Synthetic oligonucleotide
gccacccagcccuacgggu

SEQ ID NO: 2283981 - RNA, 19 nt, Artificial Sequence
  Description of Artificial Sequence: Synthetic oligonucleotide
cgacugcgacccaccaggc

SEQ ID NO: 2283982 - RNA, 19 nt, Artificial Sequence
  Description of Artificial Sequence: Synthetic oligonucleotide
gccaugagacaagccagcu

SEQ ID NO: 2283983 - RNA, 19 nt, Artificial Sequence
  Description of Artificial Sequence: Synthetic oligonucleotide
ccaguuggaccaggcgcac

SEQ ID NO: 2283984 - RNA, 19 nt, Artificial Sequence
  Description of Artificial Sequence: Synthetic oligonucleotide
ggccgacugcgacccacca

SEQ ID NO: 2283985 - RNA, 19 nt, Artificial Sequence
  Description of Artificial Sequence: Synthetic oligonucleotide
ccccggccgacugcgaccc

SEQ ID NO: 2283986 - RNA, 19 nt, Artificial Sequence
  Description of Artificial Sequence: Synthetic oligonucleotide
guuggaccaggcgcacacu

SEQ ID NO: 2283987 - RNA, 19 nt, Artificial Sequence
  Description of Artificial Sequence: Synthetic oligonucleotide
ccccgccaugagacaagcc

SEQ ID NO: 2283988 - RNA, 19 nt, Artificial Sequence
  Description of Artificial Sequence: Synthetic oligonucleotide
gguccaagagguggcuaua

SEQ ID NO: 2283989 - RNA, 19 nt, Artificial Sequence
  Description of Artificial Sequence: Synthetic oligonucleotide
accagacggcacagaguuu

SEQ ID NO: 2283990 - RNA, 19 nt, Artificial Sequence
  Description of Artificial Sequence: Synthetic oligonucleotide
cagagcggucaggccaaga

SEQ ID NO: 2283991 - RNA, 19 nt, Artificial Sequence
  Description of Artificial Sequence: Synthetic oligonucleotide
cccgggguauucggaacug

SEQ ID NO: 2283992 - RNA, 19 nt, Artificial Sequence
  Description of Artificial Sequence: Synthetic oligonucleotide
ccgugggccacccagcccu

SEQ ID NO: 2283993 - RNA, 19 nt, Artificial Sequence
  Description of Artificial Sequence: Synthetic oligonucleotide
cgugggcgaagcucuccac

SEQ ID NO: 2283994 - RNA, 19 nt, Artificial Sequence
  Description of Artificial Sequence: Synthetic oligonucleotide
gcuugacccucccggggua

SEQ ID NO: 2283995 - RNA, 19 nt, Artificial Sequence
  Description of Artificial Sequence: Synthetic oligonucleotide
cccgugggccacccagccc

SEQ ID NO: 2283996 - RNA, 19 nt, Artificial Sequence
  Description of Artificial Sequence: Synthetic oligonucleotide
aggcggcuacggcgcgcug

SEQ ID NO: 2283997 - RNA, 19 nt, Artificial Sequence
  Description of Artificial Sequence: Synthetic oligonucleotide
gaggccagacuggccgggu

SEQ ID NO: 2283998 - RNA, 19 nt, Artificial Sequence
  Description of Artificial Sequence: Synthetic oligonucleotide
gugggccacccagcccuac

SEQ ID NO: 2283999 - RNA, 19 nt, Artificial Sequence
  Description of Artificial Sequence: Synthetic oligonucleotide
cucgggcacagaggccaga

SEQ ID NO: 2284000 - RNA, 19 nt, Artificial Sequence
  Description of Artificial Sequence: Synthetic oligonucleotide
gcggcuacggcgcgcugua

SEQ ID NO: 2284001 - RNA, 19 nt, Artificial Sequence
  Description of Artificial Sequence: Synthetic oligonucleotide
ccccguugaugacgaugug

SEQ ID NO: 2284002 - RNA, 19 nt, Artificial Sequence
  Description of Artificial Sequence: Synthetic oligonucleotide
ccggccgacugcgacccac

SEQ ID NO: 2284003 - RNA, 19 nt, Artificial Sequence
  Description of Artificial Sequence: Synthetic oligonucleotide
gcucgggucccagacgggu

SEQ ID NO: 2284004 - RNA, 19 nt, Artificial Sequence
  Description of Artificial Sequence: Synthetic oligonucleotide
caccagcccagcuccuuuu

SEQ ID NO: 2284005 - RNA, 19 nt, Artificial Sequence
  Description of Artificial Sequence: Synthetic oligonucleotide
cggccgacugcgacccacc

SEQ ID NO: 2284006 - RNA, 19 nt, Artificial Sequence
  Description of Artificial Sequence: Synthetic oligonucleotide
cgcgcuguaggaggcagca

SEQ ID NO: 2284007 - RNA, 19 nt, Artificial Sequence
  Description of Artificial Sequence: Synthetic oligonucleotide
gcaugucggcggucccauc

SEQ ID NO: 2284008 - RNA, 19 nt, Artificial Sequence
  Description of Artificial Sequence: Synthetic oligonucleotide
cggcggucccauccucacg

SEQ ID NO: 2284009 - RNA, 19 nt, Artificial Sequence
  Description of Artificial Sequence: Synthetic oligonucleotide
cucgugccaagggcuauuu

SEQ ID NO: 2284010 - RNA, 19 nt, Artificial Sequence
  Description of Artificial Sequence: Synthetic oligonucleotide
cgagguggagcccaucaau

SEQ ID NO: 2284011 - RNA, 19 nt, Artificial Sequence
  Description of Artificial Sequence: Synthetic oligonucleotide
caggcggcuacggcgcgcu

SEQ ID NO: 2284012 - RNA, 19 nt, Artificial Sequence
  Description of Artificial Sequence: Synthetic oligonucleotide
cgcggauguuggcuccgug

SEQ ID NO: 2284013 - RNA, 19 nt, Artificial Sequence
  Description of Artificial Sequence: Synthetic oligonucleotide
gcgcuguaggaggcagcac

SEQ ID NO: 2284014 - RNA, 19 nt, Artificial Sequence
  Description of Artificial Sequence: Synthetic oligonucleotide
cccagcccuacggguucgg

SEQ ID NO: 2284015 - RNA, 19 nt, Artificial Sequence
  Description of Artificial Sequence: Synthetic oligonucleotide
cgcgcagggccccgugggc

SEQ ID NO: 2284016 - RNA, 19 nt, Artificial Sequence
  Description of Artificial Sequence: Synthetic oligonucleotide
cuguaggaggcagcacguu

SEQ ID NO: 2284017 - RNA, 19 nt, Artificial Sequence
  Description of Artificial Sequence: Synthetic oligonucleotide
ggcggcuacggcgcgcugu

SEQ ID NO: 2284018 - RNA, 19 nt, Artificial Sequence
  Description of Artificial Sequence: Synthetic oligonucleotide
cgggguacgcgguuguggu

SEQ ID NO: 2284019 - RNA, 19 nt, Artificial Sequence
  Description of Artificial Sequence: Synthetic oligonucleotide
gcaccagcccagcuccuuu

SEQ ID NO: 2284020 - RNA, 19 nt, Artificial Sequence
  Description of Artificial Sequence: Synthetic oligonucleotide
cguguggcucgggucccag

SEQ ID NO: 2284021 - RNA, 19 nt, Artificial Sequence
  Description of Artificial Sequence: Synthetic oligonucleotide
ccggggcuaggggcucucg

SEQ ID NO: 2284022 - RNA, 19 nt, Artificial Sequence
  Description of Artificial Sequence: Synthetic oligonucleotide
cagacggguccacgcggau

SEQ ID NO: 2284023 - RNA, 19 nt, Artificial Sequence
  Description of Artificial Sequence: Synthetic oligonucleotide
acggguccacgcggauguu

SEQ ID NO: 2284024 - RNA, 19 nt, Artificial Sequence
  Description of Artificial Sequence: Synthetic oligonucleotide
ccagagcggucaggccaag

SEQ ID NO: 2284025 - RNA, 19 nt, Artificial Sequence
  Description of Artificial Sequence: Synthetic oligonucleotide
ccaggcgcacacucuuggu

SEQ ID NO: 2284026 - RNA, 19 nt, Artificial Sequence
  Description of Artificial Sequence: Synthetic oligonucleotide
ccacccagcccuacggguu

SEQ ID NO: 2284027 - RNA, 19 nt, Artificial Sequence
  Description of Artificial Sequence: Synthetic oligonucleotide
cgacugaagcacacaccgu

SEQ ID NO: 2284028 - RNA, 19 nt, Artificial Sequence
  Description of Artificial Sequence: Synthetic oligonucleotide
cuuccccguugaugacgau

SEQ ID NO: 2284029 - RNA, 19 nt, Artificial Sequence
  Description of Artificial Sequence: Synthetic oligonucleotide
ggccggguccagagcgguc

SEQ ID NO: 2284030 - RNA, 19 nt, Artificial Sequence
  Description of Artificial Sequence: Synthetic oligonucleotide
cggucccgggguauucgga

SEQ ID NO: 2284031 - RNA, 19 nt, Artificial Sequence
  Description of Artificial Sequence: Synthetic oligonucleotide
cggggcuaggggcucucga

SEQ ID NO: 2284032 - RNA, 19 nt, Artificial Sequence
  Description of Artificial Sequence: Synthetic oligonucleotide
ccagcccuacggguucgga

SEQ ID NO: 2284033 - RNA, 19 nt, Artificial Sequence
  Description of Artificial Sequence: Synthetic oligonucleotide
gggcgagguggagcccauc

SEQ ID NO: 2284034 - RNA, 19 nt, Artificial Sequence
  Description of Artificial Sequence: Synthetic oligonucleotide
cccuacggguucggaggca

SEQ ID NO: 2284035 - RNA, 19 nt, Artificial Sequence
  Description of Artificial Sequence: Synthetic oligonucleotide
ccaguccuuugggcgaggu

SEQ ID NO: 2284036 - RNA, 19 nt, Artificial Sequence
  Description of Artificial Sequence: Synthetic oligonucleotide
caggcggucccgggguauu

SEQ ID NO: 2284037 - RNA, 19 nt, Artificial Sequence
  Description of Artificial Sequence: Synthetic oligonucleotide
ggcggcggacucagauggu

SEQ ID NO: 2284038 - RNA, 19 nt, Artificial Sequence
  Description of Artificial Sequence: Synthetic oligonucleotide
cgccgacucugcaucugcu

SEQ ID NO: 2284039 - RNA, 19 nt, Artificial Sequence
  Description of Artificial Sequence: Synthetic oligonucleotide
ccccgggcacuggggcccc

SEQ ID NO: 2284040 - RNA, 19 nt, Artificial Sequence
  Description of Artificial Sequence: Synthetic oligonucleotide
cccggggcuaggggcucuc

SEQ ID NO: 2284041 - RNA, 19 nt, Artificial Sequence
  Description of Artificial Sequence: Synthetic oligonucleotide
gccccaugucuuccccguu

SEQ ID NO: 2284042 - RNA, 19 nt, Artificial Sequence
  Description of Artificial Sequence: Synthetic oligonucleotide
cccucccgggguacgcggu

SEQ ID NO: 2284043 - RNA, 19 nt, Artificial Sequence
  Description of Artificial Sequence: Synthetic oligonucleotide
cggcuacggcgcgcuguag

SEQ ID NO: 2284044 - RNA, 19 nt, Artificial Sequence
  Description of Artificial Sequence: Synthetic oligonucleotide
cgggucccagacgggucca

SEQ ID NO: 2284045 - RNA, 19 nt, Artificial Sequence
  Description of Artificial Sequence: Synthetic oligonucleotide
ccucccgggguacgcgguu

SEQ ID NO: 2284046 - RNA, 19 nt, Artificial Sequence
  Description of Artificial Sequence: Synthetic oligonucleotide
cgcgguugugguggcgugu

SEQ ID NO: 2284047 - RNA, 19 nt, Artificial Sequence
  Description of Artificial Sequence: Synthetic oligonucleotide
ccaggcggucccgggguau

SEQ ID NO: 2284048 - RNA, 19 nt, Artificial Sequence
  Description of Artificial Sequence: Synthetic oligonucleotide
gcccggggcuaggggcucu

SEQ ID NO: 2284049 - RNA, 19 nt, Artificial Sequence
  Description of Artificial Sequence: Synthetic oligonucleotide
cggcgcgcuguaggaggca

SEQ ID NO: 2284050 - RNA, 19 nt, Artificial Sequence
  Description of Artificial Sequence: Synthetic oligonucleotide
cccggccgacugcgaccca

SEQ ID NO: 2284051 - RNA, 19 nt, Artificial Sequence
  Description of Artificial Sequence: Synthetic oligonucleotide
ccgggcacuggggccccau

SEQ ID NO: 2284052 - RNA, 19 nt, Artificial Sequence
  Description of Artificial Sequence: Synthetic oligonucleotide
cccgggcacuggggcccca

SEQ ID NO: 2284053 - RNA, 19 nt, Artificial Sequence
  Description of Artificial Sequence: Synthetic oligonucleotide
cgggcgcgcagggccccgu

SEQ ID NO: 2284054 - RNA, 19 nt, Artificial Sequence
  Description of Artificial Sequence: Synthetic oligonucleotide
aauguguccccauucacag

SEQ ID NO: 2284055 - RNA, 19 nt, Artificial Sequence
  Description of Artificial Sequence: Synthetic oligonucleotide
auuagguuauggcucaggc

SEQ ID NO: 2284056 - RNA, 19 nt, Artificial Sequence
  Description of Artificial Sequence: Synthetic oligonucleotide
agguuuauuagguuauggc

SEQ ID NO: 2284057 - RNA, 19 nt, Artificial Sequence
  Description of Artificial Sequence: Synthetic oligonucleotide
gaagccucgaacuuggucc

SEQ ID NO: 2284058 - RNA, 19 nt, Artificial Sequence
  Description of Artificial Sequence: Synthetic oligonucleotide
ugugucuuucuucuuuucg

SEQ ID NO: 2284059 - RNA, 19 nt, Artificial Sequence
  Description of Artificial Sequence: Synthetic oligonucleotide
ugugaugagccccacgcgg

SEQ ID NO: 2284060 - RNA, 19 nt, Artificial Sequence
  Description of Artificial Sequence: Synthetic oligonucleotide
agucgaauguucugggugc

SEQ ID NO: 2284061 - RNA, 19 nt, Artificial Sequence
  Description of Artificial Sequence: Synthetic oligonucleotide
ucgugguagguauagacag

SEQ ID NO: 2284062 - RNA, 19 nt, Artificial Sequence
  Description of Artificial Sequence: Synthetic oligonucleotide
ugcaguucuuaccaugccg

SEQ ID NO: 2284063 - RNA, 19 nt, Artificial Sequence
  Description of Artificial Sequence: Synthetic oligonucleotide
ucaggugucagugagggga

SEQ ID NO: 2284064 - RNA, 19 nt, Artificial Sequence
  Description of Artificial Sequence: Synthetic oligonucleotide
cacggaaucguccagcugc

SEQ ID NO: 2284065 - RNA, 19 nt, Artificial Sequence
  Description of Artificial Sequence: Synthetic oligonucleotide
uuucgugguagguauagac

SEQ ID NO: 2284066 - RNA, 19 nt, Artificial Sequence
  Description of Artificial Sequence: Synthetic oligonucleotide
ucgaacuugguccugugcu

SEQ ID NO: 2284067 - RNA, 19 nt, Artificial Sequence
  Description of Artificial Sequence: Synthetic oligonucleotide
cucccguucauacagguag

SEQ ID NO: 2284068 - RNA, 19 nt, Artificial Sequence
  Description of Artificial Sequence: Synthetic oligonucleotide
agguauagacagcuccugc

SEQ ID NO: 2284069 - RNA, 19 nt, Artificial Sequence
  Description of Artificial Sequence: Synthetic oligonucleotide
agcgguuucccagacaucg

SEQ ID NO: 2284070 - RNA, 19 nt, Artificial Sequence
  Description of Artificial Sequence: Synthetic oligonucleotide
acacacauagcgcucacug

SEQ ID NO: 2284071 - RNA, 19 nt, Artificial Sequence
  Description of Artificial Sequence: Synthetic oligonucleotide
accugugccaccccgcugc

SEQ ID NO: 2284072 - RNA, 19 nt, Artificial Sequence
  Description of Artificial Sequence: Synthetic oligonucleotide
agugcaguucuuaccaugc

SEQ ID NO: 2284073 - RNA, 19 nt, Artificial Sequence
  Description of Artificial Sequence: Synthetic oligonucleotide
ugcguaaagcguacuggcg

SEQ ID NO: 2284074 - RNA, 19 nt, Artificial Sequence
  Description of Artificial Sequence: Synthetic oligonucleotide
guuuauuagguuauggcuc

SEQ ID NO: 2284075 - RNA, 19 nt, Artificial Sequence
  Description of Artificial Sequence: Synthetic oligonucleotide
uuagguuauggcucaggcc

SEQ ID NO: 2284076 - RNA, 19 nt, Artificial Sequence
  Description of Artificial Sequence: Synthetic oligonucleotide
ggucacugcacacacauag

SEQ ID NO: 2284077 - RNA, 19 nt, Artificial Sequence
  Description of Artificial Sequence: Synthetic oligonucleotide
auucacagggucuaccaug

SEQ ID NO: 2284078 - RNA, 19 nt, Artificial Sequence
  Description of Artificial Sequence: Synthetic oligonucleotide
uucgugguagguauagaca

SEQ ID NO: 2284079 - RNA, 19 nt, Artificial Sequence
  Description of Artificial Sequence: Synthetic oligonucleotide
gguagguauagacagcucc

SEQ ID NO: 2284080 - RNA, 19 nt, Artificial Sequence
  Description of Artificial Sequence: Synthetic oligonucleotide
uuugccucaggugucagug

SEQ ID NO: 2284081 - RNA, 19 nt, Artificial Sequence
  Description of Artificial Sequence: Synthetic oligonucleotide
uggccuuugccucaggugu

SEQ ID NO: 2284082 - RNA, 19 nt, Artificial Sequence
  Description of Artificial Sequence: Synthetic oligonucleotide
ucaggucugacaugcguag

SEQ ID NO: 2284083 - RNA, 19 nt, Artificial Sequence
  Description of Artificial Sequence: Synthetic oligonucleotide
aggucugacaugcguagcg

SEQ ID NO: 2284084 - RNA, 19 nt, Artificial Sequence
  Description of Artificial Sequence: Synthetic oligonucleotide
ucugccuguagcuucacuc

SEQ ID NO: 2284085 - RNA, 19 nt, Artificial Sequence
  Description of Artificial Sequence: Synthetic oligonucleotide
auagacagcuccugcagug

SEQ ID NO: 2284086 - RNA, 19 nt, Artificial Sequence
  Description of Artificial Sequence: Synthetic oligonucleotide
guauagacagcuccugcag

SEQ ID NO: 2284087 - RNA, 19 nt, Artificial Sequence
  Description of Artificial Sequence: Synthetic oligonucleotide
uucuuuucgugguagguau

SEQ ID NO: 2284088 - RNA, 19 nt, Artificial Sequence
  Description of Artificial Sequence: Synthetic oligonucleotide
caugguguggcauugcuca

SEQ ID NO: 2284089 - RNA, 19 nt, Artificial Sequence
  Description of Artificial Sequence: Synthetic oligonucleotide
agggucaugacagggcugc

SEQ ID NO: 2284090 - RNA, 19 nt, Artificial Sequence
  Description of Artificial Sequence: Synthetic oligonucleotide
uucacagggucuaccaugu

SEQ ID NO: 2284091 - RNA, 19 nt, Artificial Sequence
  Description of Artificial Sequence: Synthetic oligonucleotide
agcgcuuuguccuuguccu

SEQ ID NO: 2284092 - RNA, 19 nt, Artificial Sequence
  Description of Artificial Sequence: Synthetic oligonucleotide
acugcgugugaugagcccc

SEQ ID NO: 2284093 - RNA, 19 nt, Artificial Sequence
  Description of Artificial Sequence: Synthetic oligonucleotide
uuaccaugccgugucaucc

SEQ ID NO: 2284094 - RNA, 19 nt, Artificial Sequence
  Description of Artificial Sequence: Synthetic oligonucleotide
uggccucccguucauacag

SEQ ID NO: 2284095 - RNA, 19 nt, Artificial Sequence
  Description of Artificial Sequence: Synthetic oligonucleotide
uauuagguuauggcucagg

SEQ ID NO: 2284096 - RNA, 19 nt, Artificial Sequence
  Description of Artificial Sequence: Synthetic oligonucleotide
aaggccgcagcacugcaca

SEQ ID NO: 2284097 - RNA, 19 nt, Artificial Sequence
  Description of Artificial Sequence: Synthetic oligonucleotide
cugcguaaagcguacuggc

SEQ ID NO: 2284098 - RNA, 19 nt, Artificial Sequence
  Description of Artificial Sequence: Synthetic oligonucleotide
cauacagguagccgucugg

SEQ ID NO: 2284099 - RNA, 19 nt, Artificial Sequence
  Description of Artificial Sequence: Synthetic oligonucleotide
cagccuuaggcaugaaggg

SEQ ID NO: 2284100 - RNA, 19 nt, Artificial Sequence
  Description of Artificial Sequence: Synthetic oligonucleotide
aaagcguacuggcgucagg

SEQ ID NO: 2284101 - RNA, 19 nt, Artificial Sequence
  Description of Artificial Sequence: Synthetic oligonucleotide
uucuggugcaggauguacu

SEQ ID NO: 2284102 - RNA, 19 nt, Artificial Sequence
  Description of Artificial Sequence: Synthetic oligonucleotide
caaaaccugugccaccccg

SEQ ID NO: 2284103 - RNA, 19 nt, Artificial Sequence
  Description of Artificial Sequence: Synthetic oligonucleotide
agugagagacagcagcagu

SEQ ID NO: 2284104 - RNA, 19 nt, Artificial Sequence
  Description of Artificial Sequence: Synthetic oligonucleotide
uuaggcaugaagggguuga

SEQ ID NO: 2284105 - RNA, 19 nt, Artificial Sequence
  Description of Artificial Sequence: Synthetic oligonucleotide
auaggccuucaucugccgg

SEQ ID NO: 2284106 - RNA, 19 nt, Artificial Sequence
  Description of Artificial Sequence: Synthetic oligonucleotide
gauggccucccguucauac

SEQ ID NO: 2284107 - RNA, 19 nt, Artificial Sequence
  Description of Artificial Sequence: Synthetic oligonucleotide
auacagguagccgucuggg

SEQ ID NO: 2284108 - RNA, 19 nt, Artificial Sequence
  Description of Artificial Sequence: Synthetic oligonucleotide
cagguuuauuagguuaugg

SEQ ID NO: 2284109 - RNA, 19 nt, Artificial Sequence
  Description of Artificial Sequence: Synthetic oligonucleotide
acaaugaugucccgcucug

SEQ ID NO: 2284110 - RNA, 19 nt, Artificial Sequence
  Description of Artificial Sequence: Synthetic oligonucleotide
cuuuucgugguagguauag

SEQ ID NO: 2284111 - RNA, 19 nt, Artificial Sequence
  Description of Artificial Sequence: Synthetic oligonucleotide
ugaugucccgcucugucaa

SEQ ID NO: 2284112 - RNA, 19 nt, Artificial Sequence
  Description of Artificial Sequence: Synthetic oligonucleotide
cagucgaauguucugggug

SEQ ID NO: 2284113 - RNA, 19 nt, Artificial Sequence
  Description of Artificial Sequence: Synthetic oligonucleotide
cuggccgggacauuucugc

SEQ ID NO: 2284114 - RNA, 19 nt, Artificial Sequence
  Description of Artificial Sequence: Synthetic oligonucleotide
cugccuguagcuucacucc

SEQ ID NO: 2284115 - RNA, 19 nt, Artificial Sequence
  Description of Artificial Sequence: Synthetic oligonucleotide
uucugggugccauacccug

SEQ ID NO: 2284116 - RNA, 19 nt, Artificial Sequence
  Description of Artificial Sequence: Synthetic oligonucleotide
aaaccugugccaccccgcu

SEQ ID NO: 2284117 - RNA, 19 nt, Artificial Sequence
  Description of Artificial Sequence: Synthetic oligonucleotide
ggcaaucucuuucuucugg

SEQ ID NO: 2284118 - RNA, 19 nt, Artificial Sequence
  Description of Artificial Sequence: Synthetic oligonucleotide
acaugcguagcgguuuccc

SEQ ID NO: 2284119 - RNA, 19 nt, Artificial Sequence
  Description of Artificial Sequence: Synthetic oligonucleotide
aagcguacuggcgucaggu

SEQ ID NO: 2284120 - RNA, 19 nt, Artificial Sequence
  Description of Artificial Sequence: Synthetic oligonucleotide
uacagguagccgucugggg

SEQ ID NO: 2284121 - RNA, 19 nt, Artificial Sequence
  Description of Artificial Sequence: Synthetic oligonucleotide
guucuuaccaugccguguc

SEQ ID NO: 2284122 - RNA, 19 nt, Artificial Sequence
  Description of Artificial Sequence: Synthetic oligonucleotide
auugcucaggcugucucgg

SEQ ID NO: 2284123 - RNA, 19 nt, Artificial Sequence
  Description of Artificial Sequence: Synthetic oligonucleotide
cacugcacacacauagcgc

SEQ ID NO: 2284124 - RNA, 19 nt, Artificial Sequence
  Description of Artificial Sequence: Synthetic oligonucleotide
gguuuauuagguuauggcu

SEQ ID NO: 2284125 - RNA, 19 nt, Artificial Sequence
  Description of Artificial Sequence: Synthetic oligonucleotide
gacaucgggcaggugacgg

SEQ ID NO: 2284126 - RNA, 19 nt, Artificial Sequence
  Description of Artificial Sequence: Synthetic oligonucleotide
uccagcugcguaaagcgua

SEQ ID NO: 2284127 - RNA, 19 nt, Artificial Sequence
  Description of Artificial Sequence: Synthetic oligonucleotide
cacagggucaugacagggc

SEQ ID NO: 2284128 - RNA, 19 nt, Artificial Sequence
  Description of Artificial Sequence: Synthetic oligonucleotide
auguucugggugccauacc

SEQ ID NO: 2284129 - RNA, 19 nt, Artificial Sequence
  Description of Artificial Sequence: Synthetic oligonucleotide
aagccucgaacuugguccu

SEQ ID NO: 2284130 - RNA, 19 nt, Artificial Sequence
  Description of Artificial Sequence: Synthetic oligonucleotide
cacacauagcgcucacugc

SEQ ID NO: 2284131 - RNA, 19 nt, Artificial Sequence
  Description of Artificial Sequence: Synthetic oligonucleotide
gaaucguccagcugcguaa

SEQ ID NO: 2284132 - RNA, 19 nt, Artificial Sequence
  Description of Artificial Sequence: Synthetic oligonucleotide
agccuuaggcaugaagggg

SEQ ID NO: 2284133 - RNA, 19 nt, Artificial Sequence
  Description of Artificial Sequence: Synthetic oligonucleotide
cuccacgcacuccagagug

SEQ ID NO: 2284134 - RNA, 19 nt, Artificial Sequence
  Description of Artificial Sequence: Synthetic oligonucleotide
cucacugcgugugaugagc

SEQ ID NO: 2284135 - RNA, 19 nt, Artificial Sequence
  Description of Artificial Sequence: Synthetic oligonucleotide
ugucucgggucacugcaca

SEQ ID NO: 2284136 - RNA, 19 nt, Artificial Sequence
  Description of Artificial Sequence: Synthetic oligonucleotide
gaacuugguccugugcugc

SEQ ID NO: 2284137 - RNA, 19 nt, Artificial Sequence
  Description of Artificial Sequence: Synthetic oligonucleotide
agcugcguaaagcguacug

SEQ ID NO: 2284138 - RNA, 19 nt, Artificial Sequence
  Description of Artificial Sequence: Synthetic oligonucleotide
caaucucuuucuucuggug

SEQ ID NO: 2284139 - RNA, 19 nt, Artificial Sequence
  Description of Artificial Sequence: Synthetic oligonucleotide
cuuaccaugccgugucauc

SEQ ID NO: 2284140 - RNA, 19 nt, Artificial Sequence
  Description of Artificial Sequence: Synthetic oligonucleotide
ucugacaugcguagcgguu

SEQ ID NO: 2284141 - RNA, 19 nt, Artificial Sequence
  Description of Artificial Sequence: Synthetic oligonucleotide
ucagucgaauguucugggu

SEQ ID NO: 2284142 - RNA, 19 nt, Artificial Sequence
  Description of Artificial Sequence: Synthetic oligonucleotide
acuggcgucaggucugaca

SEQ ID NO: 2284143 - RNA, 19 nt, Artificial Sequence
  Description of Artificial Sequence: Synthetic oligonucleotide
cugcagugcaguucuuacc

SEQ ID NO: 2284144 - RNA, 19 nt, Artificial Sequence
  Description of Artificial Sequence: Synthetic oligonucleotide
cacuccagagugaccacag

SEQ ID NO: 2284145 - RNA, 19 nt, Artificial Sequence
  Description of Artificial Sequence: Synthetic oligonucleotide
acuccugagcccgcaaaac

SEQ ID NO: 2284146 - RNA, 19 nt, Artificial Sequence
  Description of Artificial Sequence: Synthetic oligonucleotide
gguauagacagcuccugca

SEQ ID NO: 2284147 - RNA, 19 nt, Artificial Sequence
  Description of Artificial Sequence: Synthetic oligonucleotide
ucguccagcugcguaaagc

SEQ ID NO: 2284148 - RNA, 19 nt, Artificial Sequence
  Description of Artificial Sequence: Synthetic oligonucleotide
ugguguggcauugcucagg

SEQ ID NO: 2284149 - RNA, 19 nt, Artificial Sequence
  Description of Artificial Sequence: Synthetic oligonucleotide
aggcagguuuauuagguua

SEQ ID NO: 2284150 - RNA, 19 nt, Artificial Sequence
  Description of Artificial Sequence: Synthetic oligonucleotide
agcaucccggcucagucga

SEQ ID NO: 2284151 - RNA, 19 nt, Artificial Sequence
  Description of Artificial Sequence: Synthetic oligonucleotide
cagcgcuuuguccuugucc

SEQ ID NO: 2284152 - RNA, 19 nt, Artificial Sequence
  Description of Artificial Sequence: Synthetic oligonucleotide
ucccguucauacagguagc

SEQ ID NO: 2284153 - RNA, 19 nt, Artificial Sequence
  Description of Artificial Sequence: Synthetic oligonucleotide
cagacaucgggcaggugac

SEQ ID NO: 2284154 - RNA, 19 nt, Artificial Sequence
  Description of Artificial Sequence: Synthetic oligonucleotide
uaaagcguacuggcgucag

SEQ ID NO: 2284155 - RNA, 19 nt, Artificial Sequence
  Description of Artificial Sequence: Synthetic oligonucleotide
cuuccggaucaguuucucc

SEQ ID NO: 2284156 - RNA, 19 nt, Artificial Sequence
  Description of Artificial Sequence: Synthetic oligonucleotide
uccacggaaucguccagcu

SEQ ID NO: 2284157 - RNA, 19 nt, Artificial Sequence
  Description of Artificial Sequence: Synthetic oligonucleotide
cagugcaguucuuaccaug

SEQ ID NO: 2284158 - RNA, 19 nt, Artificial Sequence
  Description of Artificial Sequence: Synthetic oligonucleotide
acgcacuccagagugacca

SEQ ID NO: 2284159 - RNA, 19 nt, Artificial Sequence
  Description of Artificial Sequence: Synthetic oligonucleotide
ugccuguagcuucacuccu

SEQ ID NO: 2284160 - RNA, 19 nt, Artificial Sequence
  Description of Artificial Sequence: Synthetic oligonucleotide
gcugcguaaagcguacugg

SEQ ID NO: 2284161 - RNA, 19 nt, Artificial Sequence
  Description of Artificial Sequence: Synthetic oligonucleotide
cauaggccuucaucugccg

SEQ ID NO: 2284162 - RNA, 19 nt, Artificial Sequence
  Description of Artificial Sequence: Synthetic oligonucleotide
gugccauacccugaggcag

SEQ ID NO: 2284163 - RNA, 19 nt, Artificial Sequence
  Description of Artificial Sequence: Synthetic oligonucleotide
ugagcccgcaaaaccugug

SEQ ID NO: 2284164 - RNA, 19 nt, Artificial Sequence
  Description of Artificial Sequence: Synthetic oligonucleotide
aguucuuaccaugccgugu

SEQ ID NO: 2284165 - RNA, 19 nt, Artificial Sequence
  Description of Artificial Sequence: Synthetic oligonucleotide
ugcguagcgguuucccaga

SEQ ID NO: 2284166 - RNA, 19 nt, Artificial Sequence
  Description of Artificial Sequence: Synthetic oligonucleotide
ucgggcaggugacggugcg

SEQ ID NO: 2284167 - RNA, 19 nt, Artificial Sequence
  Description of Artificial Sequence: Synthetic oligonucleotide
gcucagucgaauguucugg

SEQ ID NO: 2284168 - RNA, 19 nt, Artificial Sequence
  Description of Artificial Sequence: Synthetic oligonucleotide
agcacugcacauggugugg

SEQ ID NO: 2284169 - RNA, 19 nt, Artificial Sequence
  Description of Artificial Sequence: Synthetic oligonucleotide
acauagcgcucacugcgug

SEQ ID NO: 2284170 - RNA, 19 nt, Artificial Sequence
  Description of Artificial Sequence: Synthetic oligonucleotide
uugaggggccggcucacga

SEQ ID NO: 2284171 - RNA, 19 nt, Artificial Sequence
  Description of Artificial Sequence: Synthetic oligonucleotide
uccaggaagccucgaacuu

SEQ ID NO: 2284172 - RNA, 19 nt, Artificial Sequence
  Description of Artificial Sequence: Synthetic oligonucleotide
cucgaacuugguccugugc

SEQ ID NO: 2284173 - RNA, 19 nt, Artificial Sequence
  Description of Artificial Sequence: Synthetic oligonucleotide
agcguacuggcgucagguc

SEQ ID NO: 2284174 - RNA, 19 nt, Artificial Sequence
  Description of Artificial Sequence: Synthetic oligonucleotide
caccaucuguguuggguag

SEQ ID NO: 2284175 - RNA, 19 nt, Artificial Sequence
  Description of Artificial Sequence: Synthetic oligonucleotide
guggccuuugccucaggug

SEQ ID NO: 2284176 - RNA, 19 nt, Artificial Sequence
  Description of Artificial Sequence: Synthetic oligonucleotide
uuauuagguuauggcucag

SEQ ID NO: 2284177 - RNA, 19 nt, Artificial Sequence
  Description of Artificial Sequence: Synthetic oligonucleotide
guagcgguuucccagacau

SEQ ID NO: 2284178 - RNA, 19 nt, Artificial Sequence
  Description of Artificial Sequence: Synthetic oligonucleotide
cucgggucacugcacacac

SEQ ID NO: 2284179 - RNA, 19 nt, Artificial Sequence
  Description of Artificial Sequence: Synthetic oligonucleotide
ucugucaauguguccccau

SEQ ID NO: 2284180 - RNA, 19 nt, Artificial Sequence
  Description of Artificial Sequence: Synthetic oligonucleotide
acaugguguggcauugcuc

SEQ ID NO: 2284181 - RNA, 19 nt, Artificial Sequence
  Description of Artificial Sequence: Synthetic oligonucleotide
uucuuaccaugccguguca

SEQ ID NO: 2284182 - RNA, 19 nt, Artificial Sequence
  Description of Artificial Sequence: Synthetic oligonucleotide
gguguggcauugcucaggc

SEQ ID NO: 2284183 - RNA, 19 nt, Artificial Sequence
  Description of Artificial Sequence: Synthetic oligonucleotide
uuuucgugguagguauaga

SEQ ID NO: 2284184 - RNA, 19 nt, Artificial Sequence
  Description of Artificial Sequence: Synthetic oligonucleotide
ugacaugcguagcgguuuc

SEQ ID NO: 2284185 - RNA, 19 nt, Artificial Sequence
  Description of Artificial Sequence: Synthetic oligonucleotide
guuggguagaggggcagcc

SEQ ID NO: 2284186 - RNA, 19 nt, Artificial Sequence
  Description of Artificial Sequence: Synthetic oligonucleotide
ugaggggauccagaagcug

SEQ ID NO: 2284187 - RNA, 19 nt, Artificial Sequence
  Description of Artificial Sequence: Synthetic oligonucleotide
gugagagacagcagcaguc

SEQ ID NO: 2284188 - RNA, 19 nt, Artificial Sequence
  Description of Artificial Sequence: Synthetic oligonucleotide
cagcaucccggcucagucg

SEQ ID NO: 2284189 - RNA, 19 nt, Artificial Sequence
  Description of Artificial Sequence: Synthetic oligonucleotide
ucucgggucacugcacaca

SEQ ID NO: 2284190 - RNA, 19 nt, Artificial Sequence
  Description of Artificial Sequence: Synthetic oligonucleotide
ucacuccugagcccgcaaa

SEQ ID NO: 2284191 - RNA, 19 nt, Artificial Sequence
  Description of Artificial Sequence: Synthetic oligonucleotide
gggugccauacccugaggc

SEQ ID NO: 2284192 - RNA, 19 nt, Artificial Sequence
  Description of Artificial Sequence: Synthetic oligonucleotide
uggguagaggggcagccuu

SEQ ID NO: 2284193 - RNA, 19 nt, Artificial Sequence
  Description of Artificial Sequence: Synthetic oligonucleotide
uuauggcucaggccugcau

SEQ ID NO: 2284194 - RNA, 19 nt, Artificial Sequence
  Description of Artificial Sequence: Synthetic oligonucleotide
ugacggugcgggaugguuu

SEQ ID NO: 2284195 - RNA, 19 nt, Artificial Sequence
  Description of Artificial Sequence: Synthetic oligonucleotide
ugccgggcaaucucuuucu

SEQ ID NO: 2284196 - RNA, 19 nt, Artificial Sequence
  Description of Artificial Sequence: Synthetic oligonucleotide
uggggucaccacaggguca

SEQ ID NO: 2284197 - RNA, 19 nt, Artificial Sequence
  Description of Artificial Sequence: Synthetic oligonucleotide
aaccugugccaccccgcug

SEQ ID NO: 2284198 - RNA, 19 nt, Artificial Sequence
  Description of Artificial Sequence: Synthetic oligonucleotide
ucuuuucgugguagguaua

SEQ ID NO: 2284199 - RNA, 19 nt, Artificial Sequence
  Description of Artificial Sequence: Synthetic oligonucleotide
uccuuguccuugccaggug

SEQ ID NO: 2284200 - RNA, 19 nt, Artificial Sequence
  Description of Artificial Sequence: Synthetic oligonucleotide
cagguagccgucugggguc

SEQ ID NO: 2284201 - RNA, 19 nt, Artificial Sequence
  Description of Artificial Sequence: Synthetic oligonucleotide
uguuggguagaggggcagc

SEQ ID NO: 2284202 - RNA, 19 nt, Artificial Sequence
  Description of Artificial Sequence: Synthetic oligonucleotide
gguggaccugaacugggcc

SEQ ID NO: 2284203 - RNA, 19 nt, Artificial Sequence
  Description of Artificial Sequence: Synthetic oligonucleotide
aggggauccagaagcuggg

SEQ ID NO: 2284204 - RNA, 19 nt, Artificial Sequence
  Description of Artificial Sequence: Synthetic oligonucleotide
ugucccgcucugucaaugu

SEQ ID NO: 2284205 - RNA, 19 nt, Artificial Sequence
  Description of Artificial Sequence: Synthetic oligonucleotide
augguguggcauugcucag

SEQ ID NO: 2284206 - RNA, 19 nt, Artificial Sequence
  Description of Artificial Sequence: Synthetic oligonucleotide
ccucaggugucagugaggg

SEQ ID NO: 2284207 - RNA, 19 nt, Artificial Sequence
  Description of Artificial Sequence: Synthetic oligonucleotide
caguucuuaccaugccgug

SEQ ID NO: 2284208 - RNA, 19 nt, Artificial Sequence
  Description of Artificial Sequence: Synthetic oligonucleotide
gcagucaaaguccuucaca

SEQ ID NO: 2284209 - RNA, 19 nt, Artificial Sequence
  Description of Artificial Sequence: Synthetic oligonucleotide
cacgcgguccacggaaucg

SEQ ID NO: 2284210 - RNA, 19 nt, Artificial Sequence
  Description of Artificial Sequence: Synthetic oligonucleotide
ugguagguauagacagcuc

SEQ ID NO: 2284211 - RNA, 19 nt, Artificial Sequence
  Description of Artificial Sequence: Synthetic oligonucleotide
uagcuucacuccugagccc

SEQ ID NO: 2284212 - RNA, 19 nt, Artificial Sequence
  Description of Artificial Sequence: Synthetic oligonucleotide
uggccgggacauuucugcc

SEQ ID NO: 2284213 - RNA, 19 nt, Artificial Sequence
  Description of Artificial Sequence: Synthetic oligonucleotide
gucacugcacacacauagc

SEQ ID NO: 2284214 - RNA, 19 nt, Artificial Sequence
  Description of Artificial Sequence: Synthetic oligonucleotide
uccuuccggaucaguuucu

SEQ ID NO: 2284215 - RNA, 19 nt, Artificial Sequence
  Description of Artificial Sequence: Synthetic oligonucleotide
cagcuugguggccuuugcc

SEQ ID NO: 2284216 - RNA, 19 nt, Artificial Sequence
  Description of Artificial Sequence: Synthetic oligonucleotide
cagcacaaugaugucccgc

SEQ ID NO: 2284217 - RNA, 19 nt, Artificial Sequence
  Description of Artificial Sequence: Synthetic oligonucleotide
cagugagagacagcagcag

SEQ ID NO: 2284218 - RNA, 19 nt, Artificial Sequence
  Description of Artificial Sequence: Synthetic oligonucleotide
ucuuaccaugccgugucau

SEQ ID NO: 2284219 - RNA, 19 nt, Artificial Sequence
  Description of Artificial Sequence: Synthetic oligonucleotide
aaucguccagcugcguaaa

SEQ ID NO: 2284220 - RNA, 19 nt, Artificial Sequence
  Description of Artificial Sequence: Synthetic oligonucleotide
cagugaggggauccagaag

SEQ ID NO: 2284221 - RNA, 19 nt, Artificial Sequence
  Description of Artificial Sequence: Synthetic oligonucleotide
cacugcgugugaugagccc

SEQ ID NO: 2284222 - RNA, 19 nt, Artificial Sequence
  Description of Artificial Sequence: Synthetic oligonucleotide
ggucugacaugcguagcgg

SEQ ID NO: 2284223 - RNA, 19 nt, Artificial Sequence
  Description of Artificial Sequence: Synthetic oligonucleotide
cacgauggcugccuccuuc

SEQ ID NO: 2284224 - RNA, 19 nt, Artificial Sequence
  Description of Artificial Sequence: Synthetic oligonucleotide
acggaaucguccagcugcg

SEQ ID NO: 2284225 - RNA, 19 nt, Artificial Sequence
  Description of Artificial Sequence: Synthetic oligonucleotide
cucaggugucagugagggg

SEQ ID NO: 2284226 - RNA, 19 nt, Artificial Sequence
  Description of Artificial Sequence: Synthetic oligonucleotide
ggcagccuuaggcaugaag

SEQ ID NO: 2284227 - RNA, 19 nt, Artificial Sequence
  Description of Artificial Sequence: Synthetic oligonucleotide
gggacauuucugccuguag

SEQ ID NO: 2284228 - RNA, 19 nt, Artificial Sequence
  Description of Artificial Sequence: Synthetic oligonucleotide
ggugccauacccugaggca

SEQ ID NO: 2284229 - RNA, 19 nt, Artificial Sequence
  Description of Artificial Sequence: Synthetic oligonucleotide
aucacuggccgggacauuu

SEQ ID NO: 2284230 - RNA, 19 nt, Artificial Sequence
  Description of Artificial Sequence: Synthetic oligonucleotide
gucaugacagggcugcagu

SEQ ID NO: 2284231 - RNA, 19 nt, Artificial Sequence
  Description of Artificial Sequence: Synthetic oligonucleotide
caugacagggcugcaguga

SEQ ID NO: 2284232 - RNA, 19 nt, Artificial Sequence
  Description of Artificial Sequence: Synthetic oligonucleotide
guagguauagacagcuccu

SEQ ID NO: 2284233 - RNA, 19 nt, Artificial Sequence
  Description of Artificial Sequence: Synthetic oligonucleotide
cuggugcaggauguacucc

SEQ ID NO: 2284234 - RNA, 19 nt, Artificial Sequence
  Description of Artificial Sequence: Synthetic oligonucleotide
uccccauucacagggucua

SEQ ID NO: 2284235 - RNA, 19 nt, Artificial Sequence
  Description of Artificial Sequence: Synthetic oligonucleotide
caugcguagcgguuuccca

SEQ ID NO: 2284236 - RNA, 19 nt, Artificial Sequence
  Description of Artificial Sequence: Synthetic oligonucleotide
ccugcagugcaguucuuac

SEQ ID NO: 2284237 - RNA, 19 nt, Artificial Sequence
  Description of Artificial Sequence: Synthetic oligonucleotide
ggaagccucgaacuugguc

SEQ ID NO: 2284238 - RNA, 19 nt, Artificial Sequence
  Description of Artificial Sequence: Synthetic oligonucleotide
ggcucagucgaauguucug

SEQ ID NO: 2284239 - RNA, 19 nt, Artificial Sequence
  Description of Artificial Sequence: Synthetic oligonucleotide
ucgaauguucugggugcca

SEQ ID NO: 2284240 - RNA, 19 nt, Artificial Sequence
  Description of Artificial Sequence: Synthetic oligonucleotide
cuguagcuucacuccugag

SEQ ID NO: 2284241 - RNA, 19 nt, Artificial Sequence
  Description of Artificial Sequence: Synthetic oligonucleotide
gucgaauguucugggugcc

SEQ ID NO: 2284242 - RNA, 19 nt, Artificial Sequence
  Description of Artificial Sequence: Synthetic oligonucleotide
accccgcugcagcacaaug

SEQ ID NO: 2284243 - RNA, 19 nt, Artificial Sequence
  Description of Artificial Sequence: Synthetic oligonucleotide
agacaucgggcaggugacg

SEQ ID NO: 2284244 - RNA, 19 nt, Artificial Sequence
  Description of Artificial Sequence: Synthetic oligonucleotide
ucacuggccgggacauuuc

SEQ ID NO: 2284245 - RNA, 19 nt, Artificial Sequence
  Description of Artificial Sequence: Synthetic oligonucleotide
guccacggaaucguccagc

SEQ ID NO: 2284246 - RNA, 19 nt, Artificial Sequence
  Description of Artificial Sequence: Synthetic oligonucleotide
cugcacacacauagcgcuc

SEQ ID NO: 2284247 - RNA, 19 nt, Artificial Sequence
  Description of Artificial Sequence: Synthetic oligonucleotide
aagcugggcagcgcuuugu

SEQ ID NO: 2284248 - RNA, 19 nt, Artificial Sequence
  Description of Artificial Sequence: Synthetic oligonucleotide
agccgucuggggucaccac

SEQ ID NO: 2284249 - RNA, 19 nt, Artificial Sequence
  Description of Artificial Sequence: Synthetic oligonucleotide
uagccgucuggggucacca

SEQ ID NO: 2284250 - RNA, 19 nt, Artificial Sequence
  Description of Artificial Sequence: Synthetic oligonucleotide
cacaaugaugucccgcucu

SEQ ID NO: 2284251 - RNA, 19 nt, Artificial Sequence
  Description of Artificial Sequence: Synthetic oligonucleotide
gaccugaacugggcccugg

SEQ ID NO: 2284252 - RNA, 19 nt, Artificial Sequence
  Description of Artificial Sequence: Synthetic oligonucleotide
ucgggucacugcacacaca

SEQ ID NO: 2284253 - RNA, 19 nt, Artificial Sequence
  Description of Artificial Sequence: Synthetic oligonucleotide
cacgcacuccagagugacc

SEQ ID NO: 2284254 - RNA, 19 nt, Artificial Sequence
  Description of Artificial Sequence: Synthetic oligonucleotide
gucccgcucugucaaugug

SEQ ID NO: 2284255 - RNA, 19 nt, Artificial Sequence
  Description of Artificial Sequence: Synthetic oligonucleotide
gacaugcguagcgguuucc

SEQ ID NO: 2284256 - RNA, 19 nt, Artificial Sequence
  Description of Artificial Sequence: Synthetic oligonucleotide
guaaagcguacuggcguca

SEQ ID NO: 2284257 - RNA, 19 nt, Artificial Sequence
  Description of Artificial Sequence: Synthetic oligonucleotide
gccgggacauuucugccug

SEQ ID NO: 2284258 - RNA, 19 nt, Artificial Sequence
  Description of Artificial Sequence: Synthetic oligonucleotide
gguagaggggcagccuuag

SEQ ID NO: 2284259 - RNA, 19 nt, Artificial Sequence
  Description of Artificial Sequence: Synthetic oligonucleotide
aggugacggugcgggaugg

SEQ ID NO: 2284260 - RNA, 19 nt, Artificial Sequence
  Description of Artificial Sequence: Synthetic oligonucleotide
uccugcagugcaguucuua

SEQ ID NO: 2284261 - RNA, 19 nt, Artificial Sequence
  Description of Artificial Sequence: Synthetic oligonucleotide
ggaucaguuucuccacgca

SEQ ID NO: 2284262 - RNA, 19 nt, Artificial Sequence
  Description of Artificial Sequence: Synthetic oligonucleotide
ccagguggaccugaacugg

SEQ ID NO: 2284263 - RNA, 19 nt, Artificial Sequence
  Description of Artificial Sequence: Synthetic oligonucleotide
cuggcgucaggucugacau

SEQ ID NO: 2284264 - RNA, 19 nt, Artificial Sequence
  Description of Artificial Sequence: Synthetic oligonucleotide
guguuggguagaggggcag

SEQ ID NO: 2284265 - RNA, 19 nt, Artificial Sequence
  Description of Artificial Sequence: Synthetic oligonucleotide
agaagcugggcagcgcuuu

SEQ ID NO: 2284266 - RNA, 19 nt, Artificial Sequence
  Description of Artificial Sequence: Synthetic oligonucleotide
gucucgggucacugcacac

SEQ ID NO: 2284267 - RNA, 19 nt, Artificial Sequence
  Description of Artificial Sequence: Synthetic oligonucleotide
gucaggucugacaugcgua

SEQ ID NO: 2284268 - RNA, 19 nt, Artificial Sequence
  Description of Artificial Sequence: Synthetic oligonucleotide
uagcgguuucccagacauc

SEQ ID NO: 2284269 - RNA, 19 nt, Artificial Sequence
  Description of Artificial Sequence: Synthetic oligonucleotide
ggaaucguccagcugcgua

SEQ ID NO: 2284270 - RNA, 19 nt, Artificial Sequence
  Description of Artificial Sequence: Synthetic oligonucleotide
ccugagcccgcaaaaccug

SEQ ID NO: 2284271 - RNA, 19 nt, Artificial Sequence
  Description of Artificial Sequence: Synthetic oligonucleotide
ccgucuggggucaccacag

SEQ ID NO: 2284272 - RNA, 19 nt, Artificial Sequence
  Description of Artificial Sequence: Synthetic oligonucleotide
guugaggggccggcucacg

SEQ ID NO: 2284273 - RNA, 19 nt, Artificial Sequence
  Description of Artificial Sequence: Synthetic oligonucleotide
gcguaaagcguacuggcgu

SEQ ID NO: 2284274 - RNA, 19 nt, Artificial Sequence
  Description of Artificial Sequence: Synthetic oligonucleotide
ccguucauacagguagccg

SEQ ID NO: 2284275 - RNA, 19 nt, Artificial Sequence
  Description of Artificial Sequence: Synthetic oligonucleotide
cugcgugugaugagcccca

SEQ ID NO: 2284276 - RNA, 19 nt, Artificial Sequence
  Description of Artificial Sequence: Synthetic oligonucleotide
ccagcugcguaaagcguac

SEQ ID NO: 2284277 - RNA, 19 nt, Artificial Sequence
  Description of Artificial Sequence: Synthetic oligonucleotide
cguacuggcgucaggucug

SEQ ID NO: 2284278 - RNA, 19 nt, Artificial Sequence
  Description of Artificial Sequence: Synthetic oligonucleotide
cgcaaaaccugugccaccc

SEQ ID NO: 2284279 - RNA, 19 nt, Artificial Sequence
  Description of Artificial Sequence: Synthetic oligonucleotide
gguccacggaaucguccag

SEQ ID NO: 2284280 - RNA, 19 nt, Artificial Sequence
  Description of Artificial Sequence: Synthetic oligonucleotide
gucugacaugcguagcggu

SEQ ID NO: 2284281 - RNA, 19 nt, Artificial Sequence
  Description of Artificial Sequence: Synthetic oligonucleotide
cguaaagcguacuggcguc

SEQ ID NO: 2284282 - RNA, 19 nt, Artificial Sequence
  Description of Artificial Sequence: Synthetic oligonucleotide
cacuccugagcccgcaaaa

SEQ ID NO: 2284283 - RNA, 19 nt, Artificial Sequence
  Description of Artificial Sequence: Synthetic oligonucleotide
acgcgguccacggaaucgu

SEQ ID NO: 2284284 - RNA, 19 nt, Artificial Sequence
  Description of Artificial Sequence: Synthetic oligonucleotide
gcagguuuauuagguuaug

SEQ ID NO: 2284285 - RNA, 19 nt, Artificial Sequence
  Description of Artificial Sequence: Synthetic oligonucleotide
uucccuccgggcuccucuc

SEQ ID NO: 2284286 - RNA, 19 nt, Artificial Sequence
  Description of Artificial Sequence: Synthetic oligonucleotide
cccgcaaaaccugugccac

SEQ ID NO: 2284287 - RNA, 19 nt, Artificial Sequence
  Description of Artificial Sequence: Synthetic oligonucleotide
ucaggcugucucgggucac

SEQ ID NO: 2284288 - RNA, 19 nt, Artificial Sequence
  Description of Artificial Sequence: Synthetic oligonucleotide
gcaguucuuaccaugccgu

SEQ ID NO: 2284289 - RNA, 19 nt, Artificial Sequence
  Description of Artificial Sequence: Synthetic oligonucleotide
cacugcacaugguguggca

SEQ ID NO: 2284290 - RNA, 19 nt, Artificial Sequence
  Description of Artificial Sequence: Synthetic oligonucleotide
gcaaaaccugugccacccc

SEQ ID NO: 2284291 - RNA, 19 nt, Artificial Sequence
  Description of Artificial Sequence: Synthetic oligonucleotide
cacaugguguggcauugcu

SEQ ID NO: 2284292 - RNA, 19 nt, Artificial Sequence
  Description of Artificial Sequence: Synthetic oligonucleotide
gacggugcgggaugguuuu

SEQ ID NO: 2284293 - RNA, 19 nt, Artificial Sequence
  Description of Artificial Sequence: Synthetic oligonucleotide
cguucauacagguagccgu

SEQ ID NO: 2284294 - RNA, 19 nt, Artificial Sequence
  Description of Artificial Sequence: Synthetic oligonucleotide
cuugccagguggaccugaa

SEQ ID NO: 2284295 - RNA, 19 nt, Artificial Sequence
  Description of Artificial Sequence: Synthetic oligonucleotide
cuggcugcucaccaucugu

SEQ ID NO: 2284296 - RNA, 19 nt, Artificial Sequence
  Description of Artificial Sequence: Synthetic oligonucleotide
guagccgucuggggucacc

SEQ ID NO: 2284297 - RNA, 19 nt, Artificial Sequence
  Description of Artificial Sequence: Synthetic oligonucleotide
agcgcucacugcgugugau

SEQ ID NO: 2284298 - RNA, 19 nt, Artificial Sequence
  Description of Artificial Sequence: Synthetic oligonucleotide
gcgugugaugagccccacg

SEQ ID NO: 2284299 - RNA, 19 nt, Artificial Sequence
  Description of Artificial Sequence: Synthetic oligonucleotide
cccauucacagggucuacc

SEQ ID NO: 2284300 - RNA, 19 nt, Artificial Sequence
  Description of Artificial Sequence: Synthetic oligonucleotide
cacauagcgcucacugcgu

SEQ ID NO: 2284301 - RNA, 19 nt, Artificial Sequence
  Description of Artificial Sequence: Synthetic oligonucleotide
cccguucauacagguagcc

SEQ ID NO: 2284302 - RNA, 19 nt, Artificial Sequence
  Description of Artificial Sequence: Synthetic oligonucleotide
gccgucuggggucaccaca

SEQ ID NO: 2284303 - RNA, 19 nt, Artificial Sequence
  Description of Artificial Sequence: Synthetic oligonucleotide
aggcagcugugucuuucuu

SEQ ID NO: 2284304 - RNA, 19 nt, Artificial Sequence
  Description of Artificial Sequence: Synthetic oligonucleotide
agguagccgucugggguca

SEQ ID NO: 2284305 - RNA, 19 nt, Artificial Sequence
  Description of Artificial Sequence: Synthetic oligonucleotide
ccagcuugguggccuuugc

SEQ ID NO: 2284306 - RNA, 19 nt, Artificial Sequence
  Description of Artificial Sequence: Synthetic oligonucleotide
uggcucaggccugcaucac

SEQ ID NO: 2284307 - RNA, 19 nt, Artificial Sequence
  Description of Artificial Sequence: Synthetic oligonucleotide
gcugcagcucuuugaagcu

SEQ ID NO: 2284308 - RNA, 19 nt, Artificial Sequence
  Description of Artificial Sequence: Synthetic oligonucleotide
gcacugcacaugguguggc

SEQ ID NO: 2284309 - RNA, 19 nt, Artificial Sequence
  Description of Artificial Sequence: Synthetic oligonucleotide
ugcgugugaugagccccac

SEQ ID NO: 2284310 - RNA, 19 nt, Artificial Sequence
  Description of Artificial Sequence: Synthetic oligonucleotide
guuauggcucaggccugca

SEQ ID NO: 2284311 - RNA, 19 nt, Artificial Sequence
  Description of Artificial Sequence: Synthetic oligonucleotide
gcgguuucccagacaucgg

SEQ ID NO: 2284312 - RNA, 19 nt, Artificial Sequence
  Description of Artificial Sequence: Synthetic oligonucleotide
gccuuaggcaugaaggggu

SEQ ID NO: 2284313 - RNA, 19 nt, Artificial Sequence
  Description of Artificial Sequence: Synthetic oligonucleotide
gcguacuggcgucaggucu

SEQ ID NO: 2284314 - RNA, 19 nt, Artificial Sequence
  Description of Artificial Sequence: Synthetic oligonucleotide
cuucccuccgggcuccucu

SEQ ID NO: 2284315 - RNA, 19 nt, Artificial Sequence
  Description of Artificial Sequence: Synthetic oligonucleotide
guccuuguccuugccaggu

SEQ ID NO: 2284316 - RNA, 19 nt, Artificial Sequence
  Description of Artificial Sequence: Synthetic oligonucleotide
gugaugagccccacgcggu

SEQ ID NO: 2284317 - RNA, 19 nt, Artificial Sequence
  Description of Artificial Sequence: Synthetic oligonucleotide
gccggcucacgauggcugc

SEQ ID NO: 2284318 - RNA, 19 nt, Artificial Sequence
  Description of Artificial Sequence: Synthetic oligonucleotide
ggccggcucacgauggcug

SEQ ID NO: 2284319 - RNA, 19 nt, Artificial Sequence
  Description of Artificial Sequence: Synthetic oligonucleotide
ggcagguuuauuagguuau

SEQ ID NO: 2284320 - RNA, 19 nt, Artificial Sequence
  Description of Artificial Sequence: Synthetic oligonucleotide
cucugucaaugugucccca

SEQ ID NO: 2284321 - RNA, 19 nt, Artificial Sequence
  Description of Artificial Sequence: Synthetic oligonucleotide
ccgcaaaaccugugccacc

SEQ ID NO: 2284322 - RNA, 19 nt, Artificial Sequence
  Description of Artificial Sequence: Synthetic oligonucleotide
gggguugaggggccggcuc

SEQ ID NO: 2284323 - RNA, 19 nt, Artificial Sequence
  Description of Artificial Sequence: Synthetic oligonucleotide
ccggcucagucgaauguuc

SEQ ID NO: 2284324 - RNA, 19 nt, Artificial Sequence
  Description of Artificial Sequence: Synthetic oligonucleotide
agggguugaggggccggcu

SEQ ID NO: 2284325 - RNA, 19 nt, Artificial Sequence
  Description of Artificial Sequence: Synthetic oligonucleotide
ccacgcacuccagagugac

SEQ ID NO: 2284326 - RNA, 19 nt, Artificial Sequence
  Description of Artificial Sequence: Synthetic oligonucleotide
gccuguagcuucacuccug

SEQ ID NO: 2284327 - RNA, 19 nt, Artificial Sequence
  Description of Artificial Sequence: Synthetic oligonucleotide
cugagcccgcaaaaccugu

SEQ ID NO: 2284328 - RNA, 19 nt, Artificial Sequence
  Description of Artificial Sequence: Synthetic oligonucleotide
gcgguccacggaaucgucc

SEQ ID NO: 2284329 - RNA, 19 nt, Artificial Sequence
  Description of Artificial Sequence: Synthetic oligonucleotide
ggggauccagaagcugggc

SEQ ID NO: 2284330 - RNA, 19 nt, Artificial Sequence
  Description of Artificial Sequence: Synthetic oligonucleotide
aggccgcagcacugcacau

SEQ ID NO: 2284331 - RNA, 19 nt, Artificial Sequence
  Description of Artificial Sequence: Synthetic oligonucleotide
gaugucccgcucugucaau

SEQ ID NO: 2284332 - RNA, 19 nt, Artificial Sequence
  Description of Artificial Sequence: Synthetic oligonucleotide
ggccucccguucauacagg

SEQ ID NO: 2284333 - RNA, 19 nt, Artificial Sequence
  Description of Artificial Sequence: Synthetic oligonucleotide
cugggcccuggcugcucac

SEQ ID NO: 2284334 - RNA, 19 nt, Artificial Sequence
  Description of Artificial Sequence: Synthetic oligonucleotide
ccccgcugcagcacaauga

SEQ ID NO: 2284335 - RNA, 19 nt, Artificial Sequence
  Description of Artificial Sequence: Synthetic oligonucleotide
cacuggccgggacauuucu

SEQ ID NO: 2284336 - RNA, 19 nt, Artificial Sequence
  Description of Artificial Sequence: Synthetic oligonucleotide
gcguagcgguuucccagac

SEQ ID NO: 2284337 - RNA, 19 nt, Artificial Sequence
  Description of Artificial Sequence: Synthetic oligonucleotide
aggaagccucgaacuuggu

SEQ ID NO: 2284338 - RNA, 19 nt, Artificial Sequence
  Description of Artificial Sequence: Synthetic oligonucleotide
ggccgggacauuucugccu

SEQ ID NO: 2284339 - RNA, 19 nt, Artificial Sequence
  Description of Artificial Sequence: Synthetic oligonucleotide
ugagccccacgcgguccac

SEQ ID NO: 2284340 - RNA, 19 nt, Artificial Sequence
  Description of Artificial Sequence: Synthetic oligonucleotide
guccagcugcguaaagcgu

SEQ ID NO: 2284341 - RNA, 19 nt, Artificial Sequence
  Description of Artificial Sequence: Synthetic oligonucleotide
agcagcagucaaaguccuu

SEQ ID NO: 2284342 - RNA, 19 nt, Artificial Sequence
  Description of Artificial Sequence: Synthetic oligonucleotide
ggcucacgauggcugccuc

SEQ ID NO: 2284343 - RNA, 19 nt, Artificial Sequence
  Description of Artificial Sequence: Synthetic oligonucleotide
ggggccggcucacgauggc

SEQ ID NO: 2284344 - RNA, 19 nt, Artificial Sequence
  Description of Artificial Sequence: Synthetic oligonucleotide
gccaccccgcugcagcaca

SEQ ID NO: 2284345 - RNA, 19 nt, Artificial Sequence
  Description of Artificial Sequence: Synthetic oligonucleotide
cgguccacggaaucgucca

SEQ ID NO: 2284346 - RNA, 19 nt, Artificial Sequence
  Description of Artificial Sequence: Synthetic oligonucleotide
caaugaugucccgcucugu

SEQ ID NO: 2284347 - RNA, 19 nt, Artificial Sequence
  Description of Artificial Sequence: Synthetic oligonucleotide
gccucccguucauacaggu

SEQ ID NO: 2284348 - RNA, 19 nt, Artificial Sequence
  Description of Artificial Sequence: Synthetic oligonucleotide
ccuuugccucaggugucag

SEQ ID NO: 2284349 - RNA, 19 nt, Artificial Sequence
  Description of Artificial Sequence: Synthetic oligonucleotide
gcagcgcuuuguccuuguc

SEQ ID NO: 2284350 - RNA, 19 nt, Artificial Sequence
  Description of Artificial Sequence: Synthetic oligonucleotide
cgcucacugcgugugauga

SEQ ID NO: 2284351 - RNA, 19 nt, Artificial Sequence
  Description of Artificial Sequence: Synthetic oligonucleotide
gugacggugcgggaugguu

SEQ ID NO: 2284352 - RNA, 19 nt, Artificial Sequence
  Description of Artificial Sequence: Synthetic oligonucleotide
guguggcauugcucaggcu

SEQ ID NO: 2284353 - RNA, 19 nt, Artificial Sequence
  Description of Artificial Sequence: Synthetic oligonucleotide
ccacgcgguccacggaauc

SEQ ID NO: 2284354 - RNA, 19 nt, Artificial Sequence
  Description of Artificial Sequence: Synthetic oligonucleotide
gcaucacuggccgggacau

SEQ ID NO: 2284355 - RNA, 19 nt, Artificial Sequence
  Description of Artificial Sequence: Synthetic oligonucleotide
ggguagaggggcagccuua

SEQ ID NO: 2284356 - RNA, 19 nt, Artificial Sequence
  Description of Artificial Sequence: Synthetic oligonucleotide
cgcacuccagagugaccac

SEQ ID NO: 2284357 - RNA, 19 nt, Artificial Sequence
  Description of Artificial Sequence: Synthetic oligonucleotide
cccgcugcagcacaaugau

SEQ ID NO: 2284358 - RNA, 19 nt, Artificial Sequence
  Description of Artificial Sequence: Synthetic oligonucleotide
cgggucacugcacacacau

SEQ ID NO: 2284359 - RNA, 19 nt, Artificial Sequence
  Description of Artificial Sequence: Synthetic oligonucleotide
ccggcucacgauggcugcc

SEQ ID NO: 2284360 - RNA, 19 nt, Artificial Sequence
  Description of Artificial Sequence: Synthetic oligonucleotide
ccccacgcgguccacggaa

SEQ ID NO: 2284361 - RNA, 19 nt, Artificial Sequence
  Description of Artificial Sequence: Synthetic oligonucleotide
caucccggcucagucgaau

SEQ ID NO: 2284362 - RNA, 19 nt, Artificial Sequence
  Description of Artificial Sequence: Synthetic oligonucleotide
ccucccguucauacaggua

SEQ ID NO: 2284363 - RNA, 19 nt, Artificial Sequence
  Description of Artificial Sequence: Synthetic oligonucleotide
cgucaggucugacaugcgu

SEQ ID NO: 2284364 - RNA, 19 nt, Artificial Sequence
  Description of Artificial Sequence: Synthetic oligonucleotide
guguccccauucacagggu

SEQ ID NO: 2284365 - RNA, 19 nt, Artificial Sequence
  Description of Artificial Sequence: Synthetic oligonucleotide
ccccauucacagggucuac

SEQ ID NO: 2284366 - RNA, 19 nt, Artificial Sequence
  Description of Artificial Sequence: Synthetic oligonucleotide
cguagcgguuucccagaca

SEQ ID NO: 2284367 - RNA, 19 nt, Artificial Sequence
  Description of Artificial Sequence: Synthetic oligonucleotide
cgcgguccacggaaucguc

SEQ ID NO: 2284368 - RNA, 19 nt, Artificial Sequence
  Description of Artificial Sequence: Synthetic oligonucleotide
ccuuaggcaugaagggguu

SEQ ID NO: 2284369 - RNA, 19 nt, Artificial Sequence
  Description of Artificial Sequence: Synthetic oligonucleotide
ccauacccugaggcagcug

SEQ ID NO: 2284370 - RNA, 19 nt, Artificial Sequence
  Description of Artificial Sequence: Synthetic oligonucleotide
gggucacugcacacacaua

SEQ ID NO: 2284371 - RNA, 19 nt, Artificial Sequence
  Description of Artificial Sequence: Synthetic oligonucleotide
gguagccgucuggggucac

SEQ ID NO: 2284372 - RNA, 19 nt, Artificial Sequence
  Description of Artificial Sequence: Synthetic oligonucleotide
gggucaccacagggucaug

SEQ ID NO: 2284373 - RNA, 19 nt, Artificial Sequence
  Description of Artificial Sequence: Synthetic oligonucleotide
cagcugcguaaagcguacu

SEQ ID NO: 2284374 - RNA, 19 nt, Artificial Sequence
  Description of Artificial Sequence: Synthetic oligonucleotide
cggcucagucgaauguucu

SEQ ID NO: 2284375 - RNA, 19 nt, Artificial Sequence
  Description of Artificial Sequence: Synthetic oligonucleotide
gccccacgcgguccacgga

SEQ ID NO: 2284376 - RNA, 19 nt, Artificial Sequence
  Description of Artificial Sequence: Synthetic oligonucleotide
ggugacggugcgggauggu

SEQ ID NO: 2284377 - RNA, 19 nt, Artificial Sequence
  Description of Artificial Sequence: Synthetic oligonucleotide
gccgggcaaucucuuucuu

SEQ ID NO: 2284378 - RNA, 19 nt, Artificial Sequence
  Description of Artificial Sequence: Synthetic oligonucleotide
ccaccccgcugcagcacaa

SEQ ID NO: 2284379 - RNA, 19 nt, Artificial Sequence
  Description of Artificial Sequence: Synthetic oligonucleotide
gcgcuuuguccuuguccuu

SEQ ID NO: 2284380 - RNA, 19 nt, Artificial Sequence
  Description of Artificial Sequence: Synthetic oligonucleotide
gcaucccggcucagucgaa

SEQ ID NO: 2284381 - RNA, 19 nt, Artificial Sequence
  Description of Artificial Sequence: Synthetic oligonucleotide
caucacuggccgggacauu

SEQ ID NO: 2284382 - RNA, 19 nt, Artificial Sequence
  Description of Artificial Sequence: Synthetic oligonucleotide
cccggcucagucgaauguu

SEQ ID NO: 2284383 - RNA, 19 nt, Artificial Sequence
  Description of Artificial Sequence: Synthetic oligonucleotide
caccccgcugcagcacaau

SEQ ID NO: 2284384 - RNA, 19 nt, Artificial Sequence
  Description of Artificial Sequence: Synthetic oligonucleotide
cccacgcgguccacggaau

SEQ ID NO: 2284385 - RNA, 19 nt, Artificial Sequence
  Description of Artificial Sequence: Synthetic oligonucleotide
ccgggacauuucugccugu

SEQ ID NO: 2284386 - RNA, 19 nt, Artificial Sequence
  Description of Artificial Sequence: Synthetic oligonucleotide
ccgcagcacugcacauggu

SEQ ID NO: 2284387 - RNA, 19 nt, Artificial Sequence
  Description of Artificial Sequence: Synthetic oligonucleotide
cggcucacgauggcugccu

SEQ ID NO: 2284388 - RNA, 19 nt, Artificial Sequence
  Description of Artificial Sequence: Synthetic oligonucleotide
gggcagccuuaggcaugaa

SEQ ID NO: 2284389 - RNA, 19 nt, Artificial Sequence
  Description of Artificial Sequence: Synthetic oligonucleotide
cggaaucguccagcugcgu

SEQ ID NO: 2284390 - RNA, 19 nt, Artificial Sequence
  Description of Artificial Sequence: Synthetic oligonucleotide
gaugaugcuaauuacaggg

SEQ ID NO: 2284391 - RNA, 19 nt, Artificial Sequence
  Description of Artificial Sequence: Synthetic oligonucleotide
auuguauaguaauugaggg

SEQ ID NO: 2284392 - RNA, 19 nt, Artificial Sequence
  Description of Artificial Sequence: Synthetic oligonucleotide
aauuguauaguaauugagg

SEQ ID NO: 2284393 - RNA, 19 nt, Artificial Sequence
  Description of Artificial Sequence: Synthetic oligonucleotide
uguauaguaauugagggag

SEQ ID NO: 2284394 - RNA, 19 nt, Artificial Sequence
  Description of Artificial Sequence: Synthetic oligonucleotide
caggauuucaaacuuaugg

SEQ ID NO: 2284395 - RNA, 19 nt, Artificial Sequence
  Description of Artificial Sequence: Synthetic oligonucleotide
agaaguacaaaccaacaag

SEQ ID NO: 2284396 - RNA, 19 nt, Artificial Sequence
  Description of Artificial Sequence: Synthetic oligonucleotide
aaaacgugugcccacgagg

SEQ ID NO: 2284397 - RNA, 19 nt, Artificial Sequence
  Description of Artificial Sequence: Synthetic oligonucleotide
gauugcaaagcucauguag

SEQ ID NO: 2284398 - RNA, 19 nt, Artificial Sequence
  Description of Artificial Sequence: Synthetic oligonucleotide
guacaaaccaacaagaggc

SEQ ID NO: 2284399 - RNA, 19 nt, Artificial Sequence
  Description of Artificial Sequence: Synthetic oligonucleotide
gauuucaaacuuauggugg

SEQ ID NO: 2284400 - RNA, 19 nt, Artificial Sequence
  Description of Artificial Sequence: Synthetic oligonucleotide
cuaauuacagggcaguucc

SEQ ID NO: 2284401 - RNA, 19 nt, Artificial Sequence
  Description of Artificial Sequence: Synthetic oligonucleotide
aaacuuaugguggaagaac

SEQ ID NO: 2284402 - RNA, 19 nt, Artificial Sequence
  Description of Artificial Sequence: Synthetic oligonucleotide
uaguaauugagggagaugc

SEQ ID NO: 2284403 - RNA, 19 nt, Artificial Sequence
  Description of Artificial Sequence: Synthetic oligonucleotide
uaauugagggagaugcugg

SEQ ID NO: 2284404 - RNA, 19 nt, Artificial Sequence
  Description of Artificial Sequence: Synthetic oligonucleotide
ugagcuagcucuauaacug

SEQ ID NO: 2284405 - RNA, 19 nt, Artificial Sequence
  Description of Artificial Sequence: Synthetic oligonucleotide
aauuacagggcaguucccc

SEQ ID NO: 2284406 - RNA, 19 nt, Artificial Sequence
  Description of Artificial Sequence: Synthetic oligonucleotide
aaacaggaggaugaggucg

SEQ ID NO: 2284407 - RNA, 19 nt, Artificial Sequence
  Description of Artificial Sequence: Synthetic oligonucleotide
aagaugaugcuaauuacag

SEQ ID NO: 2284408 - RNA, 19 nt, Artificial Sequence
  Description of Artificial Sequence: Synthetic oligonucleotide
cuugucagcacacaauugc

SEQ ID NO: 2284409 - RNA, 19 nt, Artificial Sequence
  Description of Artificial Sequence: Synthetic oligonucleotide
aagaacuccaagcggaaga

SEQ ID NO: 2284410 - RNA, 19 nt, Artificial Sequence
  Description of Artificial Sequence: Synthetic oligonucleotide
uguguucccagcauccagg

SEQ ID NO: 2284411 - RNA, 19 nt, Artificial Sequence
  Description of Artificial Sequence: Synthetic oligonucleotide
uacauuaauuguauaguaa

SEQ ID NO: 2284412 - RNA, 19 nt, Artificial Sequence
  Description of Artificial Sequence: Synthetic oligonucleotide
aggauuucaaacuuauggu

SEQ ID NO: 2284413 - RNA, 19 nt, Artificial Sequence
  Description of Artificial Sequence: Synthetic oligonucleotide
uuugagaaguacaaaccaa

SEQ ID NO: 2284414 - RNA, 19 nt, Artificial Sequence
  Description of Artificial Sequence: Synthetic oligonucleotide
agcucuauaacuggugggc

SEQ ID NO: 2284415 - RNA, 19 nt, Artificial Sequence
  Description of Artificial Sequence: Synthetic oligonucleotide
aaagcucauguaguggaac

SEQ ID NO: 2284416 - RNA, 19 nt, Artificial Sequence
  Description of Artificial Sequence: Synthetic oligonucleotide
uuuaaacaggaggaugagg

SEQ ID NO: 2284417 - RNA, 19 nt, Artificial Sequence
  Description of Artificial Sequence: Synthetic oligonucleotide
ucgaggacaaaugacacca

SEQ ID NO: 2284418 - RNA, 19 nt, Artificial Sequence
  Description of Artificial Sequence: Synthetic oligonucleotide
aaacgugugcccacgaggg

SEQ ID NO: 2284419 - RNA, 19 nt, Artificial Sequence
  Description of Artificial Sequence: Synthetic oligonucleotide
cuagcucuauaacuggugg

SEQ ID NO: 2284420 - RNA, 19 nt, Artificial Sequence
  Description of Artificial Sequence: Synthetic oligonucleotide
uguugagucucucaauuuc

SEQ ID NO: 2284421 - RNA, 19 nt, Artificial Sequence
  Description of Artificial Sequence: Synthetic oligonucleotide
uuguauaguaauugaggga

SEQ ID NO: 2284422 - RNA, 19 nt, Artificial Sequence
  Description of Artificial Sequence: Synthetic oligonucleotide
acaauugcugucuggccac

SEQ ID NO: 2284423 - RNA, 19 nt, Artificial Sequence
  Description of Artificial Sequence: Synthetic oligonucleotide
aguccauucugucucaaca

SEQ ID NO: 2284424 - RNA, 19 nt, Artificial Sequence
  Description of Artificial Sequence: Synthetic oligonucleotide
aagcggaagacaaagauuu

SEQ ID NO: 2284425 - RNA, 19 nt, Artificial Sequence
  Description of Artificial Sequence: Synthetic oligonucleotide
auuuccacuacagugacau

SEQ ID NO: 2284426 - RNA, 19 nt, Artificial Sequence
  Description of Artificial Sequence: Synthetic oligonucleotide
uugcaccccaagaugaugc

SEQ ID NO: 2284427 - RNA, 19 nt, Artificial Sequence
  Description of Artificial Sequence: Synthetic oligonucleotide
agaugcuccauugaugauc

SEQ ID NO: 2284428 - RNA, 19 nt, Artificial Sequence
  Description of Artificial Sequence: Synthetic oligonucleotide
uucaaacuuaugguggaag

SEQ ID NO: 2284429 - RNA, 19 nt, Artificial Sequence
  Description of Artificial Sequence: Synthetic oligonucleotide
gaugcuccauugaugaucc

SEQ ID NO: 2284430 - RNA, 19 nt, Artificial Sequence
  Description of Artificial Sequence: Synthetic oligonucleotide
aaguccauucugucucaac

SEQ ID NO: 2284431 - RNA, 19 nt, Artificial Sequence
  Description of Artificial Sequence: Synthetic oligonucleotide
ggauuucaaacuuauggug

SEQ ID NO: 2284432 - RNA, 19 nt, Artificial Sequence
  Description of Artificial Sequence: Synthetic oligonucleotide
gagggugcuuauuuuauac

SEQ ID NO: 2284433 - RNA, 19 nt, Artificial Sequence
  Description of Artificial Sequence: Synthetic oligonucleotide
aacuuaugguggaagaacu

SEQ ID NO: 2284434 - RNA, 19 nt, Artificial Sequence
  Description of Artificial Sequence: Synthetic oligonucleotide
uuguggacgugucagcccc

SEQ ID NO: 2284435 - RNA, 19 nt, Artificial Sequence
  Description of Artificial Sequence: Synthetic oligonucleotide
gaugcuaauuacagggcag

SEQ ID NO: 2284436 - RNA, 19 nt, Artificial Sequence
  Description of Artificial Sequence: Synthetic oligonucleotide
uccacuacagugacauuug

SEQ ID NO: 2284437 - RNA, 19 nt, Artificial Sequence
  Description of Artificial Sequence: Synthetic oligonucleotide
acgauugucauuuccacua

SEQ ID NO: 2284438 - RNA, 19 nt, Artificial Sequence
  Description of Artificial Sequence: Synthetic oligonucleotide
uuuuaaacaggaggaugag

SEQ ID NO: 2284439 - RNA, 19 nt, Artificial Sequence
  Description of Artificial Sequence: Synthetic oligonucleotide
acauuuguggacgugucag

SEQ ID NO: 2284440 - RNA, 19 nt, Artificial Sequence
  Description of Artificial Sequence: Synthetic oligonucleotide
gcauuugagaaguacaaac

SEQ ID NO: 2284441 - RNA, 19 nt, Artificial Sequence
  Description of Artificial Sequence: Synthetic oligonucleotide
uagcucuauaacugguggg

SEQ ID NO: 2284442 - RNA, 19 nt, Artificial Sequence
  Description of Artificial Sequence: Synthetic oligonucleotide
uccagaugcuccauugaug

SEQ ID NO: 2284443 - RNA, 19 nt, Artificial Sequence
  Description of Artificial Sequence: Synthetic oligonucleotide
auugucauuuccacuacag

SEQ ID NO: 2284444 - RNA, 19 nt, Artificial Sequence
  Description of Artificial Sequence: Synthetic oligonucleotide
gggagaaugugguaggcgg

SEQ ID NO: 2284445 - RNA, 19 nt, Artificial Sequence
  Description of Artificial Sequence: Synthetic oligonucleotide
agaagauggaugagcgugc

SEQ ID NO: 2284446 - RNA, 19 nt, Artificial Sequence
  Description of Artificial Sequence: Synthetic oligonucleotide
caagaugaugcuaauuaca

SEQ ID NO: 2284447 - RNA, 19 nt, Artificial Sequence
  Description of Artificial Sequence: Synthetic oligonucleotide
uccaggauuucaaacuuau

SEQ ID NO: 2284448 - RNA, 19 nt, Artificial Sequence
  Description of Artificial Sequence: Synthetic oligonucleotide
aacgugugcccacgagggc

SEQ ID NO: 2284449 - RNA, 19 nt, Artificial Sequence
  Description of Artificial Sequence: Synthetic oligonucleotide
gagcuagcucuauaacugg

SEQ ID NO: 2284450 - RNA, 19 nt, Artificial Sequence
  Description of Artificial Sequence: Synthetic oligonucleotide
augaugcuaauuacagggc

SEQ ID NO: 2284451 - RNA, 19 nt, Artificial Sequence
  Description of Artificial Sequence: Synthetic oligonucleotide
uuacagcccucccagggcc

SEQ ID NO: 2284452 - RNA, 19 nt, Artificial Sequence
  Description of Artificial Sequence: Synthetic oligonucleotide
agaacuccaagcggaagac

SEQ ID NO: 2284453 - RNA, 19 nt, Artificial Sequence
  Description of Artificial Sequence: Synthetic oligonucleotide
accaucaacgccaggcugc

SEQ ID NO: 2284454 - RNA, 19 nt, Artificial Sequence
  Description of Artificial Sequence: Synthetic oligonucleotide
guaauugagggagaugcug

SEQ ID NO: 2284455 - RNA, 19 nt, Artificial Sequence
  Description of Artificial Sequence: Synthetic oligonucleotide
uucagcgcauuugagaagu

SEQ ID NO: 2284456 - RNA, 19 nt, Artificial Sequence
  Description of Artificial Sequence: Synthetic oligonucleotide
uacaaaccaacaagaggcu

SEQ ID NO: 2284457 - RNA, 19 nt, Artificial Sequence
  Description of Artificial Sequence: Synthetic oligonucleotide
aggcuuccgagcuccaccc

SEQ ID NO: 2284458 - RNA, 19 nt, Artificial Sequence
  Description of Artificial Sequence: Synthetic oligonucleotide
uguucugucuuccguuaca

SEQ ID NO: 2284459 - RNA, 19 nt, Artificial Sequence
  Description of Artificial Sequence: Synthetic oligonucleotide
gacgugggcaccaggauag

SEQ ID NO: 2284460 - RNA, 19 nt, Artificial Sequence
  Description of Artificial Sequence: Synthetic oligonucleotide
auugcaaagcucauguagu

SEQ ID NO: 2284461 - RNA, 19 nt, Artificial Sequence
  Description of Artificial Sequence: Synthetic oligonucleotide
uugucauuuccacuacagu

SEQ ID NO: 2284462 - RNA, 19 nt, Artificial Sequence
  Description of Artificial Sequence: Synthetic oligonucleotide
gaugauccgggccacccgc

SEQ ID NO: 2284463 - RNA, 19 nt, Artificial Sequence
  Description of Artificial Sequence: Synthetic oligonucleotide
gauagcuccccguagggaa

SEQ ID NO: 2284464 - RNA, 19 nt, Artificial Sequence
  Description of Artificial Sequence: Synthetic oligonucleotide
aacaagaggcuguguaaaa

SEQ ID NO: 2284465 - RNA, 19 nt, Artificial Sequence
  Description of Artificial Sequence: Synthetic oligonucleotide
cucagagcagcugaauucc

SEQ ID NO: 2284466 - RNA, 19 nt, Artificial Sequence
  Description of Artificial Sequence: Synthetic oligonucleotide
guccauucugucucaacag

SEQ ID NO: 2284467 - RNA, 19 nt, Artificial Sequence
  Description of Artificial Sequence: Synthetic oligonucleotide
gaggacgauugucauuucc

SEQ ID NO: 2284468 - RNA, 19 nt, Artificial Sequence
  Description of Artificial Sequence: Synthetic oligonucleotide
uuuguggacgugucagccc

SEQ ID NO: 2284469 - RNA, 19 nt, Artificial Sequence
  Description of Artificial Sequence: Synthetic oligonucleotide
aaggagggugcuuauuuua

SEQ ID NO: 2284470 - RNA, 19 nt, Artificial Sequence
  Description of Artificial Sequence: Synthetic oligonucleotide
agcucauguaguggaacgc

SEQ ID NO: 2284471 - RNA, 19 nt, Artificial Sequence
  Description of Artificial Sequence: Synthetic oligonucleotide
ugaugauccgggccacccg

SEQ ID NO: 2284472 - RNA, 19 nt, Artificial Sequence
  Description of Artificial Sequence: Synthetic oligonucleotide
uuccacuacagugacauuu

SEQ ID NO: 2284473 - RNA, 19 nt, Artificial Sequence
  Description of Artificial Sequence: Synthetic oligonucleotide
aacuccaagcggaagacaa

SEQ ID NO: 2284474 - RNA, 19 nt, Artificial Sequence
  Description of Artificial Sequence: Synthetic oligonucleotide
aucaacgccaggcugcccu

SEQ ID NO: 2284475 - RNA, 19 nt, Artificial Sequence
  Description of Artificial Sequence: Synthetic oligonucleotide
uaugguggaagaacuccaa

SEQ ID NO: 2284476 - RNA, 19 nt, Artificial Sequence
  Description of Artificial Sequence: Synthetic oligonucleotide
caccaaggggagaaugugg

SEQ ID NO: 2284477 - RNA, 19 nt, Artificial Sequence
  Description of Artificial Sequence: Synthetic oligonucleotide
auugugggcugccaccaag

SEQ ID NO: 2284478 - RNA, 19 nt, Artificial Sequence
  Description of Artificial Sequence: Synthetic oligonucleotide
ugcuuauuuuauacauuaa

SEQ ID NO: 2284479 - RNA, 19 nt, Artificial Sequence
  Description of Artificial Sequence: Synthetic oligonucleotide
caggauagcuccccguagg

SEQ ID NO: 2284480 - RNA, 19 nt, Artificial Sequence
  Description of Artificial Sequence: Synthetic oligonucleotide
uaauuacagggcaguuccc

SEQ ID NO: 2284481 - RNA, 19 nt, Artificial Sequence
  Description of Artificial Sequence: Synthetic oligonucleotide
uauaacuggugggcuauug

SEQ ID NO: 2284482 - RNA, 19 nt, Artificial Sequence
  Description of Artificial Sequence: Synthetic oligonucleotide
gaaugugguaggcgggccc

SEQ ID NO: 2284483 - RNA, 19 nt, Artificial Sequence
  Description of Artificial Sequence: Synthetic oligonucleotide
ugucuuccguuacagcccu

SEQ ID NO: 2284484 - RNA, 19 nt, Artificial Sequence
  Description of Artificial Sequence: Synthetic oligonucleotide
uccccaagaaguccauucu

SEQ ID NO: 2284485 - RNA, 19 nt, Artificial Sequence
  Description of Artificial Sequence: Synthetic oligonucleotide
agaccaggauugcaaagcu

SEQ ID NO: 2284486 - RNA, 19 nt, Artificial Sequence
  Description of Artificial Sequence: Synthetic oligonucleotide
ucuuccguuacagcccucc

SEQ ID NO: 2284487 - RNA, 19 nt, Artificial Sequence
  Description of Artificial Sequence: Synthetic oligonucleotide
uuccguuacagcccuccca

SEQ ID NO: 2284488 - RNA, 19 nt, Artificial Sequence
  Description of Artificial Sequence: Synthetic oligonucleotide
ucuauaacuggugggcuau

SEQ ID NO: 2284489 - RNA, 19 nt, Artificial Sequence
  Description of Artificial Sequence: Synthetic oligonucleotide
cagagccgcagcaagauca

SEQ ID NO: 2284490 - RNA, 19 nt, Artificial Sequence
  Description of Artificial Sequence: Synthetic oligonucleotide
cuccaagcggaagacaaag

SEQ ID NO: 2284491 - RNA, 19 nt, Artificial Sequence
  Description of Artificial Sequence: Synthetic oligonucleotide
agggagcgcaagccaaggc

SEQ ID NO: 2284492 - RNA, 19 nt, Artificial Sequence
  Description of Artificial Sequence: Synthetic oligonucleotide
acuuaugguggaagaacuc

SEQ ID NO: 2284493 - RNA, 19 nt, Artificial Sequence
  Description of Artificial Sequence: Synthetic oligonucleotide
guuacagcccucccagggc

SEQ ID NO: 2284494 - RNA, 19 nt, Artificial Sequence
  Description of Artificial Sequence: Synthetic oligonucleotide
ugaagaagaccaggauugc

SEQ ID NO: 2284495 - RNA, 19 nt, Artificial Sequence
  Description of Artificial Sequence: Synthetic oligonucleotide
ugcagaggcaggcuuccga

SEQ ID NO: 2284496 - RNA, 19 nt, Artificial Sequence
  Description of Artificial Sequence: Synthetic oligonucleotide
cacaauugcugucuggcca

SEQ ID NO: 2284497 - RNA, 19 nt, Artificial Sequence
  Description of Artificial Sequence: Synthetic oligonucleotide
gauugucauuuccacuaca

SEQ ID NO: 2284498 - RNA, 19 nt, Artificial Sequence
  Description of Artificial Sequence: Synthetic oligonucleotide
agggugcuuauuuuauaca

SEQ ID NO: 2284499 - RNA, 19 nt, Artificial Sequence
  Description of Artificial Sequence: Synthetic oligonucleotide
uugaugauccgggccaccc

SEQ ID NO: 2284500 - RNA, 19 nt, Artificial Sequence
  Description of Artificial Sequence: Synthetic oligonucleotide
gaagaacuccaagcggaag

SEQ ID NO: 2284501 - RNA, 19 nt, Artificial Sequence
  Description of Artificial Sequence: Synthetic oligonucleotide
aggucgaggacaaaugaca

SEQ ID NO: 2284502 - RNA, 19 nt, Artificial Sequence
  Description of Artificial Sequence: Synthetic oligonucleotide
aaugugguaggcgggccca

SEQ ID NO: 2284503 - RNA, 19 nt, Artificial Sequence
  Description of Artificial Sequence: Synthetic oligonucleotide
gucgaggacaaaugacacc

SEQ ID NO: 2284504 - RNA, 19 nt, Artificial Sequence
  Description of Artificial Sequence: Synthetic oligonucleotide
gaaggcuaguucccauccc

SEQ ID NO: 2284505 - RNA, 19 nt, Artificial Sequence
  Description of Artificial Sequence: Synthetic oligonucleotide
auaguaauugagggagaug

SEQ ID NO: 2284506 - RNA, 19 nt, Artificial Sequence
  Description of Artificial Sequence: Synthetic oligonucleotide
uucccagcauccagggagc

SEQ ID NO: 2284507 - RNA, 19 nt, Artificial Sequence
  Description of Artificial Sequence: Synthetic oligonucleotide
ggacaaaugacaccaccac

SEQ ID NO: 2284508 - RNA, 19 nt, Artificial Sequence
  Description of Artificial Sequence: Synthetic oligonucleotide
uucucuaggguggugcuuc

SEQ ID NO: 2284509 - RNA, 19 nt, Artificial Sequence
  Description of Artificial Sequence: Synthetic oligonucleotide
gaagauggaugagcgugcc

SEQ ID NO: 2284510 - RNA, 19 nt, Artificial Sequence
  Description of Artificial Sequence: Synthetic oligonucleotide
gaggaggagacgugggcac

SEQ ID NO: 2284511 - RNA, 19 nt, Artificial Sequence
  Description of Artificial Sequence: Synthetic oligonucleotide
acaaaccaacaagaggcug

SEQ ID NO: 2284512 - RNA, 19 nt, Artificial Sequence
  Description of Artificial Sequence: Synthetic oligonucleotide
ggaaggcuaguucccaucc

SEQ ID NO: 2284513 - RNA, 19 nt, Artificial Sequence
  Description of Artificial Sequence: Synthetic oligonucleotide
guuugaagcugauggugca

SEQ ID NO: 2284514 - RNA, 19 nt, Artificial Sequence
  Description of Artificial Sequence: Synthetic oligonucleotide
ucagagcagcugaauucca

SEQ ID NO: 2284515 - RNA, 19 nt, Artificial Sequence
  Description of Artificial Sequence: Synthetic oligonucleotide
agcgcauuugagaaguaca

SEQ ID NO: 2284516 - RNA, 19 nt, Artificial Sequence
  Description of Artificial Sequence: Synthetic oligonucleotide
aacaggaggaugaggucga

SEQ ID NO: 2284517 - RNA, 19 nt, Artificial Sequence
  Description of Artificial Sequence: Synthetic oligonucleotide
cuacagugacauuugugga

SEQ ID NO: 2284518 - RNA, 19 nt, Artificial Sequence
  Description of Artificial Sequence: Synthetic oligonucleotide
aggacgauugucauuucca

SEQ ID NO: 2284519 - RNA, 19 nt, Artificial Sequence
  Description of Artificial Sequence: Synthetic oligonucleotide
aauugcugucuggccacag

SEQ ID NO: 2284520 - RNA, 19 nt, Artificial Sequence
  Description of Artificial Sequence: Synthetic oligonucleotide
ggcauugcaccccaagaug

SEQ ID NO: 2284521 - RNA, 19 nt, Artificial Sequence
  Description of Artificial Sequence: Synthetic oligonucleotide
gugggcugccaccaagggg

SEQ ID NO: 2284522 - RNA, 19 nt, Artificial Sequence
  Description of Artificial Sequence: Synthetic oligonucleotide
uucccauccccaagaaguc

SEQ ID NO: 2284523 - RNA, 19 nt, Artificial Sequence
  Description of Artificial Sequence: Synthetic oligonucleotide
cuucagcgcauuugagaag

SEQ ID NO: 2284524 - RNA, 19 nt, Artificial Sequence
  Description of Artificial Sequence: Synthetic oligonucleotide
acuggacuugucagcacac

SEQ ID NO: 2284525 - RNA, 19 nt, Artificial Sequence
  Description of Artificial Sequence: Synthetic oligonucleotide
caggcuuccgagcuccacc

SEQ ID NO: 2284526 - RNA, 19 nt, Artificial Sequence
  Description of Artificial Sequence: Synthetic oligonucleotide
gaagaagaccaggauugca

SEQ ID NO: 2284527 - RNA, 19 nt, Artificial Sequence
  Description of Artificial Sequence: Synthetic oligonucleotide
aggacuggacuugucagca

SEQ ID NO: 2284528 - RNA, 19 nt, Artificial Sequence
  Description of Artificial Sequence: Synthetic oligonucleotide
gcuccacccaccaucaacg

SEQ ID NO: 2284529 - RNA, 19 nt, Artificial Sequence
  Description of Artificial Sequence: Synthetic oligonucleotide
gcuauugugggcugccacc

SEQ ID NO: 2284530 - RNA, 19 nt, Artificial Sequence
  Description of Artificial Sequence: Synthetic oligonucleotide
ugccuguucugucuuccgu

SEQ ID NO: 2284531 - RNA, 19 nt, Artificial Sequence
  Description of Artificial Sequence: Synthetic oligonucleotide
gaucagcaggccaagagcu

SEQ ID NO: 2284532 - RNA, 19 nt, Artificial Sequence
  Description of Artificial Sequence: Synthetic oligonucleotide
uggugggcuauugugggcu

SEQ ID NO: 2284533 - RNA, 19 nt, Artificial Sequence
  Description of Artificial Sequence: Synthetic oligonucleotide
gacuugucagcacacaauu

SEQ ID NO: 2284534 - RNA, 19 nt, Artificial Sequence
  Description of Artificial Sequence: Synthetic oligonucleotide
caaaccaacaagaggcugu

SEQ ID NO: 2284535 - RNA, 19 nt, Artificial Sequence
  Description of Artificial Sequence: Synthetic oligonucleotide
augaggucgaggacaaaug

SEQ ID NO: 2284536 - RNA, 19 nt, Artificial Sequence
  Description of Artificial Sequence: Synthetic oligonucleotide
accaaggggagaauguggu

SEQ ID NO: 2284537 - RNA, 19 nt, Artificial Sequence
  Description of Artificial Sequence: Synthetic oligonucleotide
gagaggacgauugucauuu

SEQ ID NO: 2284538 - RNA, 19 nt, Artificial Sequence
  Description of Artificial Sequence: Synthetic oligonucleotide
caaagaugaggacuggacu

SEQ ID NO: 2284539 - RNA, 19 nt, Artificial Sequence
  Description of Artificial Sequence: Synthetic oligonucleotide
cccacgagggcauugcacc

SEQ ID NO: 2284540 - RNA, 19 nt, Artificial Sequence
  Description of Artificial Sequence: Synthetic oligonucleotide
gaugaggucgaggacaaau

SEQ ID NO: 2284541 - RNA, 19 nt, Artificial Sequence
  Description of Artificial Sequence: Synthetic oligonucleotide
aguaauugagggagaugcu

SEQ ID NO: 2284542 - RNA, 19 nt, Artificial Sequence
  Description of Artificial Sequence: Synthetic oligonucleotide
gacgauugucauuuccacu

SEQ ID NO: 2284543 - RNA, 19 nt, Artificial Sequence
  Description of Artificial Sequence: Synthetic oligonucleotide
ugagaggacgauugucauu

SEQ ID NO: 2284544 - RNA, 19 nt, Artificial Sequence
  Description of Artificial Sequence: Synthetic oligonucleotide
ggacgauugucauuuccac

SEQ ID NO: 2284545 - RNA, 19 nt, Artificial Sequence
  Description of Artificial Sequence: Synthetic oligonucleotide
acuugucagcacacaauug

SEQ ID NO: 2284546 - RNA, 19 nt, Artificial Sequence
  Description of Artificial Sequence: Synthetic oligonucleotide
caagaaguccauucugucu

SEQ ID NO: 2284547 - RNA, 19 nt, Artificial Sequence
  Description of Artificial Sequence: Synthetic oligonucleotide
uuccgagcuccacccacca

SEQ ID NO: 2284548 - RNA, 19 nt, Artificial Sequence
  Description of Artificial Sequence: Synthetic oligonucleotide
caccccaagaugaugcuaa

SEQ ID NO: 2284549 - RNA, 19 nt, Artificial Sequence
  Description of Artificial Sequence: Synthetic oligonucleotide
agacgugggcaccaggaua

SEQ ID NO: 2284550 - RNA, 19 nt, Artificial Sequence
  Description of Artificial Sequence: Synthetic oligonucleotide
agaggacgauugucauuuc

SEQ ID NO: 2284551 - RNA, 19 nt, Artificial Sequence
  Description of Artificial Sequence: Synthetic oligonucleotide
cagugagcuagcucuauaa

SEQ ID NO: 2284552 - RNA, 19 nt, Artificial Sequence
  Description of Artificial Sequence: Synthetic oligonucleotide
accaggauagcuccccgua

SEQ ID NO: 2284553 - RNA, 19 nt, Artificial Sequence
  Description of Artificial Sequence: Synthetic oligonucleotide
gaagaagauggaugagcgu

SEQ ID NO: 2284554 - RNA, 19 nt, Artificial Sequence
  Description of Artificial Sequence: Synthetic oligonucleotide
gaugagcgugccuguucug

SEQ ID NO: 2284555 - RNA, 19 nt, Artificial Sequence
  Description of Artificial Sequence: Synthetic oligonucleotide
caaacuuaugguggaagaa

SEQ ID NO: 2284556 - RNA, 19 nt, Artificial Sequence
  Description of Artificial Sequence: Synthetic oligonucleotide
uaguucccauccccaagaa

SEQ ID NO: 2284557 - RNA, 19 nt, Artificial Sequence
  Description of Artificial Sequence: Synthetic oligonucleotide
caggauugcaaagcucaug

SEQ ID NO: 2284558 - RNA, 19 nt, Artificial Sequence
  Description of Artificial Sequence: Synthetic oligonucleotide
agcgcaagccaaggcaaag

SEQ ID NO: 2284559 - RNA, 19 nt, Artificial Sequence
  Description of Artificial Sequence: Synthetic oligonucleotide
ccugagaggacgauuguca

SEQ ID NO: 2284560 - RNA, 19 nt, Artificial Sequence
  Description of Artificial Sequence: Synthetic oligonucleotide
ugauccgggccacccgcca

SEQ ID NO: 2284561 - RNA, 19 nt, Artificial Sequence
  Description of Artificial Sequence: Synthetic oligonucleotide
gauccgggccacccgccag

SEQ ID NO: 2284562 - RNA, 19 nt, Artificial Sequence
  Description of Artificial Sequence: Synthetic oligonucleotide
acgugugcccacgagggca

SEQ ID NO: 2284563 - RNA, 19 nt, Artificial Sequence
  Description of Artificial Sequence: Synthetic oligonucleotide
cuguucugucuuccguuac

SEQ ID NO: 2284564 - RNA, 19 nt, Artificial Sequence
  Description of Artificial Sequence: Synthetic oligonucleotide
uauugugggcugccaccaa

SEQ ID NO: 2284565 - RNA, 19 nt, Artificial Sequence
  Description of Artificial Sequence: Synthetic oligonucleotide
auagcuccccguagggaag

SEQ ID NO: 2284566 - RNA, 19 nt, Artificial Sequence
  Description of Artificial Sequence: Synthetic oligonucleotide
ugaauuccagaugcuccau

SEQ ID NO: 2284567 - RNA, 19 nt, Artificial Sequence
  Description of Artificial Sequence: Synthetic oligonucleotide
gcuaauuacagggcaguuc

SEQ ID NO: 2284568 - RNA, 19 nt, Artificial Sequence
  Description of Artificial Sequence: Synthetic oligonucleotide
guauaguaauugagggaga

SEQ ID NO: 2284569 - RNA, 19 nt, Artificial Sequence
  Description of Artificial Sequence: Synthetic oligonucleotide
ccuucagcgcauuugagaa

SEQ ID NO: 2284570 - RNA, 19 nt, Artificial Sequence
  Description of Artificial Sequence: Synthetic oligonucleotide
gcacacaauugcugucugg

SEQ ID NO: 2284571 - RNA, 19 nt, Artificial Sequence
  Description of Artificial Sequence: Synthetic oligonucleotide
uccccguagggaagaugug

SEQ ID NO: 2284572 - RNA, 19 nt, Artificial Sequence
  Description of Artificial Sequence: Synthetic oligonucleotide
gggagcgcaagccaaggca

SEQ ID NO: 2284573 - RNA, 19 nt, Artificial Sequence
  Description of Artificial Sequence: Synthetic oligonucleotide
gcucauguaguggaacgcc

SEQ ID NO: 2284574 - RNA, 19 nt, Artificial Sequence
  Description of Artificial Sequence: Synthetic oligonucleotide
cuccacccaccaucaacgc

SEQ ID NO: 2284575 - RNA, 19 nt, Artificial Sequence
  Description of Artificial Sequence: Synthetic oligonucleotide
cuauugugggcugccacca

SEQ ID NO: 2284576 - RNA, 19 nt, Artificial Sequence
  Description of Artificial Sequence: Synthetic oligonucleotide
ggucgaggacaaaugacac

SEQ ID NO: 2284577 - RNA, 19 nt, Artificial Sequence
  Description of Artificial Sequence: Synthetic oligonucleotide
ccaagaaguccauucuguc

SEQ ID NO: 2284578 - RNA, 19 nt, Artificial Sequence
  Description of Artificial Sequence: Synthetic oligonucleotide
cagcgcauuugagaaguac

SEQ ID NO: 2284579 - RNA, 19 nt, Artificial Sequence
  Description of Artificial Sequence: Synthetic oligonucleotide
acgugucagccccugcaga

SEQ ID NO: 2284580 - RNA, 19 nt, Artificial Sequence
  Description of Artificial Sequence: Synthetic oligonucleotide
ggggagaaugugguaggcg

SEQ ID NO: 2284581 - RNA, 19 nt, Artificial Sequence
  Description of Artificial Sequence: Synthetic oligonucleotide
augauccgggccacccgcc

SEQ ID NO: 2284582 - RNA, 19 nt, Artificial Sequence
  Description of Artificial Sequence: Synthetic oligonucleotide
cucuauaacuggugggcua

SEQ ID NO: 2284583 - RNA, 19 nt, Artificial Sequence
  Description of Artificial Sequence: Synthetic oligonucleotide
agcuagcucuauaacuggu

SEQ ID NO: 2284584 - RNA, 19 nt, Artificial Sequence
  Description of Artificial Sequence: Synthetic oligonucleotide
ugcuaauuacagggcaguu

SEQ ID NO: 2284585 - RNA, 19 nt, Artificial Sequence
  Description of Artificial Sequence: Synthetic oligonucleotide
gugucagccccugcagagg

SEQ ID NO: 2284586 - RNA, 19 nt, Artificial Sequence
  Description of Artificial Sequence: Synthetic oligonucleotide
caaagcucauguaguggaa

SEQ ID NO: 2284587 - RNA, 19 nt, Artificial Sequence
  Description of Artificial Sequence: Synthetic oligonucleotide
agagccgcagcaagaucag

SEQ ID NO: 2284588 - RNA, 19 nt, Artificial Sequence
  Description of Artificial Sequence: Synthetic oligonucleotide
gcauugcaccccaagauga

SEQ ID NO: 2284589 - RNA, 19 nt, Artificial Sequence
  Description of Artificial Sequence: Synthetic oligonucleotide
gugggcaccaggauagcuc

SEQ ID NO: 2284590 - RNA, 19 nt, Artificial Sequence
  Description of Artificial Sequence: Synthetic oligonucleotide
cguagggaagauguguucc

SEQ ID NO: 2284591 - RNA, 19 nt, Artificial Sequence
  Description of Artificial Sequence: Synthetic oligonucleotide
cagggagcgcaagccaagg

SEQ ID NO: 2284592 - RNA, 19 nt, Artificial Sequence
  Description of Artificial Sequence: Synthetic oligonucleotide
aggagggugcuuauuuuau

SEQ ID NO: 2284593 - RNA, 19 nt, Artificial Sequence
  Description of Artificial Sequence: Synthetic oligonucleotide
gaccaggauugcaaagcuc

SEQ ID NO: 2284594 - RNA, 19 nt, Artificial Sequence
  Description of Artificial Sequence: Synthetic oligonucleotide
cugcagaggaggagacgug

SEQ ID NO: 2284595 - RNA, 19 nt, Artificial Sequence
  Description of Artificial Sequence: Synthetic oligonucleotide
ugcccacgagggcauugca

SEQ ID NO: 2284596 - RNA, 19 nt, Artificial Sequence
  Description of Artificial Sequence: Synthetic oligonucleotide
cacgagggcauugcacccc

SEQ ID NO: 2284597 - RNA, 19 nt, Artificial Sequence
  Description of Artificial Sequence: Synthetic oligonucleotide
ucccagcauccagggagcg

SEQ ID NO: 2284598 - RNA, 19 nt, Artificial Sequence
  Description of Artificial Sequence: Synthetic oligonucleotide
uacagcccucccagggccu

SEQ ID NO: 2284599 - RNA, 19 nt, Artificial Sequence
  Description of Artificial Sequence: Synthetic oligonucleotide
ggcuauugugggcugccac

SEQ ID NO: 2284600 - RNA, 19 nt, Artificial Sequence
  Description of Artificial Sequence: Synthetic oligonucleotide
gaacuccaagcggaagaca

SEQ ID NO: 2284601 - RNA, 19 nt, Artificial Sequence
  Description of Artificial Sequence: Synthetic oligonucleotide
cugcccuucagcgcauuug

SEQ ID NO: 2284602 - RNA, 19 nt, Artificial Sequence
  Description of Artificial Sequence: Synthetic oligonucleotide
ugcuucuggaaggcuaguu

SEQ ID NO: 2284603 - RNA, 19 nt, Artificial Sequence
  Description of Artificial Sequence: Synthetic oligonucleotide
gaaggagggugcuuauuuu

SEQ ID NO: 2284604 - RNA, 19 nt, Artificial Sequence
  Description of Artificial Sequence: Synthetic oligonucleotide
gaugaggacuggacuuguc

SEQ ID NO: 2284605 - RNA, 19 nt, Artificial Sequence
  Description of Artificial Sequence: Synthetic oligonucleotide
gguaggcgggcccagggga

SEQ ID NO: 2284606 - RNA, 19 nt, Artificial Sequence
  Description of Artificial Sequence: Synthetic oligonucleotide
agccaguuugaagcugaug

SEQ ID NO: 2284607 - RNA, 19 nt, Artificial Sequence
  Description of Artificial Sequence: Synthetic oligonucleotide
ucagcgcauuugagaagua

SEQ ID NO: 2284608 - RNA, 19 nt, Artificial Sequence
  Description of Artificial Sequence: Synthetic oligonucleotide
ggagacgugggcaccagga

SEQ ID NO: 2284609 - RNA, 19 nt, Artificial Sequence
  Description of Artificial Sequence: Synthetic oligonucleotide
accacggcauccaggauuu

SEQ ID NO: 2284610 - RNA, 19 nt, Artificial Sequence
  Description of Artificial Sequence: Synthetic oligonucleotide
cagagccaguuugaagcug

SEQ ID NO: 2284611 - RNA, 19 nt, Artificial Sequence
  Description of Artificial Sequence: Synthetic oligonucleotide
ccaggauuucaaacuuaug

SEQ ID NO: 2284612 - RNA, 19 nt, Artificial Sequence
  Description of Artificial Sequence: Synthetic oligonucleotide
ccgagcuccacccaccauc

SEQ ID NO: 2284613 - RNA, 19 nt, Artificial Sequence
  Description of Artificial Sequence: Synthetic oligonucleotide
gaggagacgugggcaccag

SEQ ID NO: 2284614 - RNA, 19 nt, Artificial Sequence
  Description of Artificial Sequence: Synthetic oligonucleotide
agcauccagggagcgcaag

SEQ ID NO: 2284615 - RNA, 19 nt, Artificial Sequence
  Description of Artificial Sequence: Synthetic oligonucleotide
gaggcaggcuuccgagcuc

SEQ ID NO: 2284616 - RNA, 19 nt, Artificial Sequence
  Description of Artificial Sequence: Synthetic oligonucleotide
uaggcgggcccaggggaag

SEQ ID NO: 2284617 - RNA, 19 nt, Artificial Sequence
  Description of Artificial Sequence: Synthetic oligonucleotide
uagcuccccguagggaaga

SEQ ID NO: 2284618 - RNA, 19 nt, Artificial Sequence
  Description of Artificial Sequence: Synthetic oligonucleotide
ccaggauagcuccccguag

SEQ ID NO: 2284619 - RNA, 19 nt, Artificial Sequence
  Description of Artificial Sequence: Synthetic oligonucleotide
gcaccaggauagcuccccg

SEQ ID NO: 2284620 - RNA, 19 nt, Artificial Sequence
  Description of Artificial Sequence: Synthetic oligonucleotide
uuuccacuacagugacauu

SEQ ID NO: 2284621 - RNA, 19 nt, Artificial Sequence
  Description of Artificial Sequence: Synthetic oligonucleotide
cauucugucucaacagcuu

SEQ ID NO: 2284622 - RNA, 19 nt, Artificial Sequence
  Description of Artificial Sequence: Synthetic oligonucleotide
gaauuccagaugcuccauu

SEQ ID NO: 2284623 - RNA, 19 nt, Artificial Sequence
  Description of Artificial Sequence: Synthetic oligonucleotide
auccgggccacccgccaga

SEQ ID NO: 2284624 - RNA, 19 nt, Artificial Sequence
  Description of Artificial Sequence: Synthetic oligonucleotide
aggcuaguucccaucccca

SEQ ID NO: 2284625 - RNA, 19 nt, Artificial Sequence
  Description of Artificial Sequence: Synthetic oligonucleotide
acgugggcaccaggauagc

SEQ ID NO: 2284626 - RNA, 19 nt, Artificial Sequence
  Description of Artificial Sequence: Synthetic oligonucleotide
ggaugagcgugccuguucu

SEQ ID NO: 2284627 - RNA, 19 nt, Artificial Sequence
  Description of Artificial Sequence: Synthetic oligonucleotide
accccaagaugaugcuaau

SEQ ID NO: 2284628 - RNA, 19 nt, Artificial Sequence
  Description of Artificial Sequence: Synthetic oligonucleotide
gguacagagccaguuugaa

SEQ ID NO: 2284629 - RNA, 19 nt, Artificial Sequence
  Description of Artificial Sequence: Synthetic oligonucleotide
cccuucagcgcauuugaga

SEQ ID NO: 2284630 - RNA, 19 nt, Artificial Sequence
  Description of Artificial Sequence: Synthetic oligonucleotide
acccgccagagccgcagca

SEQ ID NO: 2284631 - RNA, 19 nt, Artificial Sequence
  Description of Artificial Sequence: Synthetic oligonucleotide
cggaagacaaagauuuuaa

SEQ ID NO: 2284632 - RNA, 19 nt, Artificial Sequence
  Description of Artificial Sequence: Synthetic oligonucleotide
ccacgagggcauugcaccc

SEQ ID NO: 2284633 - RNA, 19 nt, Artificial Sequence
  Description of Artificial Sequence: Synthetic oligonucleotide
gcgcauuugagaaguacaa

SEQ ID NO: 2284634 - RNA, 19 nt, Artificial Sequence
  Description of Artificial Sequence: Synthetic oligonucleotide
gugggcuauugugggcugc

SEQ ID NO: 2284635 - RNA, 19 nt, Artificial Sequence
  Description of Artificial Sequence: Synthetic oligonucleotide
gagacgugggcaccaggau

SEQ ID NO: 2284636 - RNA, 19 nt, Artificial Sequence
  Description of Artificial Sequence: Synthetic oligonucleotide
ggagcgcaagccaaggcaa

SEQ ID NO: 2284637 - RNA, 19 nt, Artificial Sequence
  Description of Artificial Sequence: Synthetic oligonucleotide
uccgggccacccgccagag

SEQ ID NO: 2284638 - RNA, 19 nt, Artificial Sequence
  Description of Artificial Sequence: Synthetic oligonucleotide
ccaccaaggggagaaugug

SEQ ID NO: 2284639 - RNA, 19 nt, Artificial Sequence
  Description of Artificial Sequence: Synthetic oligonucleotide
cuggacuugucagcacaca

SEQ ID NO: 2284640 - RNA, 19 nt, Artificial Sequence
  Description of Artificial Sequence: Synthetic oligonucleotide
ggaagaacuccaagcggaa

SEQ ID NO: 2284641 - RNA, 19 nt, Artificial Sequence
  Description of Artificial Sequence: Synthetic oligonucleotide
gggcauugcaccccaagau

SEQ ID NO: 2284642 - RNA, 19 nt, Artificial Sequence
  Description of Artificial Sequence: Synthetic oligonucleotide
ccguagggaagauguguuc

SEQ ID NO: 2284643 - RNA, 19 nt, Artificial Sequence
  Description of Artificial Sequence: Synthetic oligonucleotide
ggacuggacuugucagcac

SEQ ID NO: 2284644 - RNA, 19 nt, Artificial Sequence
  Description of Artificial Sequence: Synthetic oligonucleotide
caccacggcauccaggauu

SEQ ID NO: 2284645 - RNA, 19 nt, Artificial Sequence
  Description of Artificial Sequence: Synthetic oligonucleotide
agggccugagaggacgauu

SEQ ID NO: 2284646 - RNA, 19 nt, Artificial Sequence
  Description of Artificial Sequence: Synthetic oligonucleotide
ggauagcuccccguaggga

SEQ ID NO: 2284647 - RNA, 19 nt, Artificial Sequence
  Description of Artificial Sequence: Synthetic oligonucleotide
guggguacagagccaguuu

SEQ ID NO: 2284648 - RNA, 19 nt, Artificial Sequence
  Description of Artificial Sequence: Synthetic oligonucleotide
ccaucaacgccaggcugcc

SEQ ID NO: 2284649 - RNA, 19 nt, Artificial Sequence
  Description of Artificial Sequence: Synthetic oligonucleotide
cauugcaccccaagaugau

SEQ ID NO: 2284650 - RNA, 19 nt, Artificial Sequence
  Description of Artificial Sequence: Synthetic oligonucleotide
auggaugagcgugccuguu

SEQ ID NO: 2284651 - RNA, 19 nt, Artificial Sequence
  Description of Artificial Sequence: Synthetic oligonucleotide
gagcgcaagccaaggcaaa

SEQ ID NO: 2284652 - RNA, 19 nt, Artificial Sequence
  Description of Artificial Sequence: Synthetic oligonucleotide
agcggaagacaaagauuuu

SEQ ID NO: 2284653 - RNA, 19 nt, Artificial Sequence
  Description of Artificial Sequence: Synthetic oligonucleotide
caucaacgccaggcugccc

SEQ ID NO: 2284654 - RNA, 19 nt, Artificial Sequence
  Description of Artificial Sequence: Synthetic oligonucleotide
gccugagaggacgauuguc

SEQ ID NO: 2284655 - RNA, 19 nt, Artificial Sequence
  Description of Artificial Sequence: Synthetic oligonucleotide
ggaggagacgugggcacca

SEQ ID NO: 2284656 - RNA, 19 nt, Artificial Sequence
  Description of Artificial Sequence: Synthetic oligonucleotide
ggugcuuauuuuauacauu

SEQ ID NO: 2284657 - RNA, 19 nt, Artificial Sequence
  Description of Artificial Sequence: Synthetic oligonucleotide
ccguuacagcccucccagg

SEQ ID NO: 2284658 - RNA, 19 nt, Artificial Sequence
  Description of Artificial Sequence: Synthetic oligonucleotide
gcuuguugagucucucaau

SEQ ID NO: 2284659 - RNA, 19 nt, Artificial Sequence
  Description of Artificial Sequence: Synthetic oligonucleotide
ccgccagagccgcagcaag

SEQ ID NO: 2284660 - RNA, 19 nt, Artificial Sequence
  Description of Artificial Sequence: Synthetic oligonucleotide
agcccucccagggccugag

SEQ ID NO: 2284661 - RNA, 19 nt, Artificial Sequence
  Description of Artificial Sequence: Synthetic oligonucleotide
ggacuugucagcacacaau

SEQ ID NO: 2284662 - RNA, 19 nt, Artificial Sequence
  Description of Artificial Sequence: Synthetic oligonucleotide
cuggaaggcuaguucccau

SEQ ID NO: 2284663 - RNA, 19 nt, Artificial Sequence
  Description of Artificial Sequence: Synthetic oligonucleotide
guaggcgggcccaggggaa

SEQ ID NO: 2284664 - RNA, 19 nt, Artificial Sequence
  Description of Artificial Sequence: Synthetic oligonucleotide
gcccacgagggcauugcac

SEQ ID NO: 2284665 - RNA, 19 nt, Artificial Sequence
  Description of Artificial Sequence: Synthetic oligonucleotide
gcucuauaacuggugggcu

SEQ ID NO: 2284666 - RNA, 19 nt, Artificial Sequence
  Description of Artificial Sequence: Synthetic oligonucleotide
gcgcaagccaaggcaaaga

SEQ ID NO: 2284667 - RNA, 19 nt, Artificial Sequence
  Description of Artificial Sequence: Synthetic oligonucleotide
caccaggauagcuccccgu

SEQ ID NO: 2284668 - RNA, 19 nt, Artificial Sequence
  Description of Artificial Sequence: Synthetic oligonucleotide
gcccuucagcgcauuugag

SEQ ID NO: 2284669 - RNA, 19 nt, Artificial Sequence
  Description of Artificial Sequence: Synthetic oligonucleotide
cgagcuccacccaccauca

SEQ ID NO: 2284670 - RNA, 19 nt, Artificial Sequence
  Description of Artificial Sequence: Synthetic oligonucleotide
caacgccaggcugcccuuc

SEQ ID NO: 2284671 - RNA, 19 nt, Artificial Sequence
  Description of Artificial Sequence: Synthetic oligonucleotide
cccugcagugagcuagcuc

SEQ ID NO: 2284672 - RNA, 19 nt, Artificial Sequence
  Description of Artificial Sequence: Synthetic oligonucleotide
ccagagccgcagcaagauc

SEQ ID NO: 2284673 - RNA, 19 nt, Artificial Sequence
  Description of Artificial Sequence: Synthetic oligonucleotide
gagcuccacccaccaucaa

SEQ ID NO: 2284674 - RNA, 19 nt, Artificial Sequence
  Description of Artificial Sequence: Synthetic oligonucleotide
gccaccaaggggagaaugu

SEQ ID NO: 2284675 - RNA, 19 nt, Artificial Sequence
  Description of Artificial Sequence: Synthetic oligonucleotide
cccagcauccagggagcgc

SEQ ID NO: 2284676 - RNA, 19 nt, Artificial Sequence
  Description of Artificial Sequence: Synthetic oligonucleotide
gcaggcuuccgagcuccac

SEQ ID NO: 2284677 - RNA, 19 nt, Artificial Sequence
  Description of Artificial Sequence: Synthetic oligonucleotide
gcaggccaagagcuucaaa

SEQ ID NO: 2284678 - RNA, 19 nt, Artificial Sequence
  Description of Artificial Sequence: Synthetic oligonucleotide
ggcuuccgagcuccaccca

SEQ ID NO: 2284679 - RNA, 19 nt, Artificial Sequence
  Description of Artificial Sequence: Synthetic oligonucleotide
agcuccccguagggaagau

SEQ ID NO: 2284680 - RNA, 19 nt, Artificial Sequence
  Description of Artificial Sequence: Synthetic oligonucleotide
cgcauuugagaaguacaaa

SEQ ID NO: 2284681 - RNA, 19 nt, Artificial Sequence
  Description of Artificial Sequence: Synthetic oligonucleotide
ccaccaucaacgccaggcu

SEQ ID NO: 2284682 - RNA, 19 nt, Artificial Sequence
  Description of Artificial Sequence: Synthetic oligonucleotide
gggcaccaggauagcuccc

SEQ ID NO: 2284683 - RNA, 19 nt, Artificial Sequence
  Description of Artificial Sequence: Synthetic oligonucleotide
gagccaguuugaagcugau

SEQ ID NO: 2284684 - RNA, 19 nt, Artificial Sequence
  Description of Artificial Sequence: Synthetic oligonucleotide
ccagggccugagaggacga

SEQ ID NO: 2284685 - RNA, 19 nt, Artificial Sequence
  Description of Artificial Sequence: Synthetic oligonucleotide
cccguagggaagauguguu

SEQ ID NO: 2284686 - RNA, 19 nt, Artificial Sequence
  Description of Artificial Sequence: Synthetic oligonucleotide
ggccugagaggacgauugu

SEQ ID NO: 2284687 - RNA, 19 nt, Artificial Sequence
  Description of Artificial Sequence: Synthetic oligonucleotide
gcaccccaagaugaugcua

SEQ ID NO: 2284688 - RNA, 19 nt, Artificial Sequence
  Description of Artificial Sequence: Synthetic oligonucleotide
gccagagccgcagcaagau

SEQ ID NO: 2284689 - RNA, 19 nt, Artificial Sequence
  Description of Artificial Sequence: Synthetic oligonucleotide
gucuuccguuacagcccuc

SEQ ID NO: 2284690 - RNA, 19 nt, Artificial Sequence
  Description of Artificial Sequence: Synthetic oligonucleotide
cuauaacuggugggcuauu

SEQ ID NO: 2284691 - RNA, 19 nt, Artificial Sequence
  Description of Artificial Sequence: Synthetic oligonucleotide
ccccguagggaagaugugu

SEQ ID NO: 2284692 - RNA, 19 nt, Artificial Sequence
  Description of Artificial Sequence: Synthetic oligonucleotide
ccaggauugcaaagcucau

SEQ ID NO: 2284693 - RNA, 19 nt, Artificial Sequence
  Description of Artificial Sequence: Synthetic oligonucleotide
aggcugcccuucagcgcau

SEQ ID NO: 2284694 - RNA, 19 nt, Artificial Sequence
  Description of Artificial Sequence: Synthetic oligonucleotide
gggaaggagggugcuuauu

SEQ ID NO: 2284695 - RNA, 19 nt, Artificial Sequence
  Description of Artificial Sequence: Synthetic oligonucleotide
gcugcccuucagcgcauuu

SEQ ID NO: 2284696 - RNA, 19 nt, Artificial Sequence
  Description of Artificial Sequence: Synthetic oligonucleotide
cccgccagagccgcagcaa

SEQ ID NO: 2284697 - RNA, 19 nt, Artificial Sequence
  Description of Artificial Sequence: Synthetic oligonucleotide
cagggccugagaggacgau

SEQ ID NO: 2284698 - RNA, 19 nt, Artificial Sequence
  Description of Artificial Sequence: Synthetic oligonucleotide
ccccucccugcagugagcu

SEQ ID NO: 2284699 - RNA, 19 nt, Artificial Sequence
  Description of Artificial Sequence: Synthetic oligonucleotide
cgugugcccacgagggcau

SEQ ID NO: 2284700 - RNA, 19 nt, Artificial Sequence
  Description of Artificial Sequence: Synthetic oligonucleotide
cgugggcaccaggauagcu

SEQ ID NO: 2284701 - RNA, 19 nt, Artificial Sequence
  Description of Artificial Sequence: Synthetic oligonucleotide
ccccugcagaggcaggcuu

SEQ ID NO: 2284702 - RNA, 19 nt, Artificial Sequence
  Description of Artificial Sequence: Synthetic oligonucleotide
ccacggcauccaggauuuc

SEQ ID NO: 2284703 - RNA, 19 nt, Artificial Sequence
  Description of Artificial Sequence: Synthetic oligonucleotide
cccucccugcagugagcua

SEQ ID NO: 2284704 - RNA, 19 nt, Artificial Sequence
  Description of Artificial Sequence: Synthetic oligonucleotide
gccacccgccagagccgca

SEQ ID NO: 2284705 - RNA, 19 nt, Artificial Sequence
  Description of Artificial Sequence: Synthetic oligonucleotide
cgagggcauugcaccccaa

SEQ ID NO: 2284706 - RNA, 19 nt, Artificial Sequence
  Description of Artificial Sequence: Synthetic oligonucleotide
gaaagguucaaguaguggg

SEQ ID NO: 2284707 - RNA, 19 nt, Artificial Sequence
  Description of Artificial Sequence: Synthetic oligonucleotide
auacuggggaaacugaggc

SEQ ID NO: 2284708 - RNA, 19 nt, Artificial Sequence
  Description of Artificial Sequence: Synthetic oligonucleotide
uucaaguagggaaggaagg

SEQ ID NO: 2284709 - RNA, 19 nt, Artificial Sequence
  Description of Artificial Sequence: Synthetic oligonucleotide
aagaguuugccuuccagug

SEQ ID NO: 2284710 - RNA, 19 nt, Artificial Sequence
  Description of Artificial Sequence: Synthetic oligonucleotide
gaugcuugaagagcgagcg

SEQ ID NO: 2284711 - RNA, 19 nt, Artificial Sequence
  Description of Artificial Sequence: Synthetic oligonucleotide
aaguagggaaggaagggcc

SEQ ID NO: 2284712 - RNA, 19 nt, Artificial Sequence
  Description of Artificial Sequence: Synthetic oligonucleotide
auucaaagggccugcaggg

SEQ ID NO: 2284713 - RNA, 19 nt, Artificial Sequence
  Description of Artificial Sequence: Synthetic oligonucleotide
uccgguagcaccuugacuc

SEQ ID NO: 2284714 - RNA, 19 nt, Artificial Sequence
  Description of Artificial Sequence: Synthetic oligonucleotide
uacuucugagcauucaaag

SEQ ID NO: 2284715 - RNA, 19 nt, Artificial Sequence
  Description of Artificial Sequence: Synthetic oligonucleotide
aauucucacacuugaagua

SEQ ID NO: 2284716 - RNA, 19 nt, Artificial Sequence
  Description of Artificial Sequence: Synthetic oligonucleotide
ucaaguagugggaauggca

SEQ ID NO: 2284717 - RNA, 19 nt, Artificial Sequence
  Description of Artificial Sequence: Synthetic oligonucleotide
augcucugcacaaacaugc

SEQ ID NO: 2284718 - RNA, 19 nt, Artificial Sequence
  Description of Artificial Sequence: Synthetic oligonucleotide
caaguagugggaauggcag

SEQ ID NO: 2284719 - RNA, 19 nt, Artificial Sequence
  Description of Artificial Sequence: Synthetic oligonucleotide
aaggaaugaagaaggcccc

SEQ ID NO: 2284720 - RNA, 19 nt, Artificial Sequence
  Description of Artificial Sequence: Synthetic oligonucleotide
aguucggaagcgcaggagg

SEQ ID NO: 2284721 - RNA, 19 nt, Artificial Sequence
  Description of Artificial Sequence: Synthetic oligonucleotide
aucgggaccacccugaggu

SEQ ID NO: 2284722 - RNA, 19 nt, Artificial Sequence
  Description of Artificial Sequence: Synthetic oligonucleotide
agcaccuugacucuuagau

SEQ ID NO: 2284723 - RNA, 19 nt, Artificial Sequence
  Description of Artificial Sequence: Synthetic oligonucleotide
aauacuggggaaacugagg

SEQ ID NO: 2284724 - RNA, 19 nt, Artificial Sequence
  Description of Artificial Sequence: Synthetic oligonucleotide
ugcaacucagggcugagca

SEQ ID NO: 2284725 - RNA, 19 nt, Artificial Sequence
  Description of Artificial Sequence: Synthetic oligonucleotide
cagaucacgaauacugggg

SEQ ID NO: 2284726 - RNA, 19 nt, Artificial Sequence
  Description of Artificial Sequence: Synthetic oligonucleotide
ucugcaguggcuagcaugu

SEQ ID NO: 2284727 - RNA, 19 nt, Artificial Sequence
  Description of Artificial Sequence: Synthetic oligonucleotide
uggggaaacucucagugca

SEQ ID NO: 2284728 - RNA, 19 nt, Artificial Sequence
  Description of Artificial Sequence: Synthetic oligonucleotide
ugaaagguucaaguagugg

SEQ ID NO: 2284729 - RNA, 19 nt, Artificial Sequence
  Description of Artificial Sequence: Synthetic oligonucleotide
ucauuggucccucuggaga

SEQ ID NO: 2284730 - RNA, 19 nt, Artificial Sequence
  Description of Artificial Sequence: Synthetic oligonucleotide
ugaagaaggccccuccacc

SEQ ID NO: 2284731 - RNA, 19 nt, Artificial Sequence
  Description of Artificial Sequence: Synthetic oligonucleotide
ggcaaaggaaugaagaagg

SEQ ID NO: 2284732 - RNA, 19 nt, Artificial Sequence
  Description of Artificial Sequence: Synthetic oligonucleotide
aguagugggaauggcagac

SEQ ID NO: 2284733 - RNA, 19 nt, Artificial Sequence
  Description of Artificial Sequence: Synthetic oligonucleotide
acaugcagaugcuugaaga

SEQ ID NO: 2284734 - RNA, 19 nt, Artificial Sequence
  Description of Artificial Sequence: Synthetic oligonucleotide
uuguagugcaucuugccgu

SEQ ID NO: 2284735 - RNA, 19 nt, Artificial Sequence
  Description of Artificial Sequence: Synthetic oligonucleotide
aaugaagaaggccccucca

SEQ ID NO: 2284736 - RNA, 19 nt, Artificial Sequence
  Description of Artificial Sequence: Synthetic oligonucleotide
augaagaaggccccuccac

SEQ ID NO: 2284737 - RNA, 19 nt, Artificial Sequence
  Description of Artificial Sequence: Synthetic oligonucleotide
uccuccauccuccacucag

SEQ ID NO: 2284738 - RNA, 19 nt, Artificial Sequence
  Description of Artificial Sequence: Synthetic oligonucleotide
agagcgagcggugaguucg

SEQ ID NO: 2284739 - RNA, 19 nt, Artificial Sequence
  Description of Artificial Sequence: Synthetic oligonucleotide
uuuaaaggacagacacugc

SEQ ID NO: 2284740 - RNA, 19 nt, Artificial Sequence
  Description of Artificial Sequence: Synthetic oligonucleotide
uugucgagcucacuggagc

SEQ ID NO: 2284741 - RNA, 19 nt, Artificial Sequence
  Description of Artificial Sequence: Synthetic oligonucleotide
caugcagaugcuugaagag

SEQ ID NO: 2284742 - RNA, 19 nt, Artificial Sequence
  Description of Artificial Sequence: Synthetic oligonucleotide
gacgugaggccaaagggcg

SEQ ID NO: 2284743 - RNA, 19 nt, Artificial Sequence
  Description of Artificial Sequence: Synthetic oligonucleotide
ucugggcaaccucaggucc

SEQ ID NO: 2284744 - RNA, 19 nt, Artificial Sequence
  Description of Artificial Sequence: Synthetic oligonucleotide
aaccucagguccucauugg

SEQ ID NO: 2284745 - RNA, 19 nt, Artificial Sequence
  Description of Artificial Sequence: Synthetic oligonucleotide
gaaugaagaaggccccucc

SEQ ID NO: 2284746 - RNA, 19 nt, Artificial Sequence
  Description of Artificial Sequence: Synthetic oligonucleotide
cuugccgugggcuaccagc

SEQ ID NO: 2284747 - RNA, 19 nt, Artificial Sequence
  Description of Artificial Sequence: Synthetic oligonucleotide
uccuugucgagcucacugg

SEQ ID NO: 2284748 - RNA, 19 nt, Artificial Sequence
  Description of Artificial Sequence: Synthetic oligonucleotide
guucaaguagggaaggaag

SEQ ID NO: 2284749 - RNA, 19 nt, Artificial Sequence
  Description of Artificial Sequence: Synthetic oligonucleotide
ucaguucgaccucugcucc

SEQ ID NO: 2284750 - RNA, 19 nt, Artificial Sequence
  Description of Artificial Sequence: Synthetic oligonucleotide
ugugccagaucacgaauac

SEQ ID NO: 2284751 - RNA, 19 nt, Artificial Sequence
  Description of Artificial Sequence: Synthetic oligonucleotide
ugcaguggcuagcaugucc

SEQ ID NO: 2284752 - RNA, 19 nt, Artificial Sequence
  Description of Artificial Sequence: Synthetic oligonucleotide
agcuggacucugcaguggc

SEQ ID NO: 2284753 - RNA, 19 nt, Artificial Sequence
  Description of Artificial Sequence: Synthetic oligonucleotide
uagugcaucuugccguggg

SEQ ID NO: 2284754 - RNA, 19 nt, Artificial Sequence
  Description of Artificial Sequence: Synthetic oligonucleotide
gacagguggcucuuugucc

SEQ ID NO: 2284755 - RNA, 19 nt, Artificial Sequence
  Description of Artificial Sequence: Synthetic oligonucleotide
agaucacgaauacugggga

SEQ ID NO: 2284756 - RNA, 19 nt, Artificial Sequence
  Description of Artificial Sequence: Synthetic oligonucleotide
uugaagagcgagcggugag

SEQ ID NO: 2284757 - RNA, 19 nt, Artificial Sequence
  Description of Artificial Sequence: Synthetic oligonucleotide
aucggaagaguuugccuuc

SEQ ID NO: 2284758 - RNA, 19 nt, Artificial Sequence
  Description of Artificial Sequence: Synthetic oligonucleotide
agcaucggaagaguuugcc

SEQ ID NO: 2284759 - RNA, 19 nt, Artificial Sequence
  Description of Artificial Sequence: Synthetic oligonucleotide
gaaacucucagugcaacuc

SEQ ID NO: 2284760 - RNA, 19 nt, Artificial Sequence
  Description of Artificial Sequence: Synthetic oligonucleotide
uguagugcaucuugccgug

SEQ ID NO: 2284761 - RNA, 19 nt, Artificial Sequence
  Description of Artificial Sequence: Synthetic oligonucleotide
acgaauacuggggaaacug

SEQ ID NO: 2284762 - RNA, 19 nt, Artificial Sequence
  Description of Artificial Sequence: Synthetic oligonucleotide
uugacucuuagauggcugu

SEQ ID NO: 2284763 - RNA, 19 nt, Artificial Sequence
  Description of Artificial Sequence: Synthetic oligonucleotide
cagacucagggcgagaugc

SEQ ID NO: 2284764 - RNA, 19 nt, Artificial Sequence
  Description of Artificial Sequence: Synthetic oligonucleotide
ugggcuaccagcuccugca

SEQ ID NO: 2284765 - RNA, 19 nt, Artificial Sequence
  Description of Artificial Sequence: Synthetic oligonucleotide
cuugacucuuagauggcug

SEQ ID NO: 2284766 - RNA, 19 nt, Artificial Sequence
  Description of Artificial Sequence: Synthetic oligonucleotide
cucaguucgaccucugcuc

SEQ ID NO: 2284767 - RNA, 19 nt, Artificial Sequence
  Description of Artificial Sequence: Synthetic oligonucleotide
agaugcuugaagagcgagc

SEQ ID NO: 2284768 - RNA, 19 nt, Artificial Sequence
  Description of Artificial Sequence: Synthetic oligonucleotide
acucaguucgaccucugcu

SEQ ID NO: 2284769 - RNA, 19 nt, Artificial Sequence
  Description of Artificial Sequence: Synthetic oligonucleotide
guucaaguagugggaaugg

SEQ ID NO: 2284770 - RNA, 19 nt, Artificial Sequence
  Description of Artificial Sequence: Synthetic oligonucleotide
agacacugcuacuucugag

SEQ ID NO: 2284771 - RNA, 19 nt, Artificial Sequence
  Description of Artificial Sequence: Synthetic oligonucleotide
aggaacgggcggcagucgc

SEQ ID NO: 2284772 - RNA, 19 nt, Artificial Sequence
  Description of Artificial Sequence: Synthetic oligonucleotide
cauuggucccucuggagac

SEQ ID NO: 2284773 - RNA, 19 nt, Artificial Sequence
  Description of Artificial Sequence: Synthetic oligonucleotide
gggacgugaggccaaaggg

SEQ ID NO: 2284774 - RNA, 19 nt, Artificial Sequence
  Description of Artificial Sequence: Synthetic oligonucleotide
gguacggagaugcugugcc

SEQ ID NO: 2284775 - RNA, 19 nt, Artificial Sequence
  Description of Artificial Sequence: Synthetic oligonucleotide
ugcagggucggacgucugg

SEQ ID NO: 2284776 - RNA, 19 nt, Artificial Sequence
  Description of Artificial Sequence: Synthetic oligonucleotide
agcgguugggcuuguagug

SEQ ID NO: 2284777 - RNA, 19 nt, Artificial Sequence
  Description of Artificial Sequence: Synthetic oligonucleotide
uuggacgguuccuccaucc

SEQ ID NO: 2284778 - RNA, 19 nt, Artificial Sequence
  Description of Artificial Sequence: Synthetic oligonucleotide
aguucgaccucugcucccc

SEQ ID NO: 2284779 - RNA, 19 nt, Artificial Sequence
  Description of Artificial Sequence: Synthetic oligonucleotide
gcuggggaaacucucagug

SEQ ID NO: 2284780 - RNA, 19 nt, Artificial Sequence
  Description of Artificial Sequence: Synthetic oligonucleotide
uagugggaauggcagacuc

SEQ ID NO: 2284781 - RNA, 19 nt, Artificial Sequence
  Description of Artificial Sequence: Synthetic oligonucleotide
aagagcgagcggugaguuc

SEQ ID NO: 2284782 - RNA, 19 nt, Artificial Sequence
  Description of Artificial Sequence: Synthetic oligonucleotide
gacgccaccuccuugucga

SEQ ID NO: 2284783 - RNA, 19 nt, Artificial Sequence
  Description of Artificial Sequence: Synthetic oligonucleotide
gacgguuccuccauccucc

SEQ ID NO: 2284784 - RNA, 19 nt, Artificial Sequence
  Description of Artificial Sequence: Synthetic oligonucleotide
gacucuuagauggcugugc

SEQ ID NO: 2284785 - RNA, 19 nt, Artificial Sequence
  Description of Artificial Sequence: Synthetic oligonucleotide
agaguuugccuuccaguga

SEQ ID NO: 2284786 - RNA, 19 nt, Artificial Sequence
  Description of Artificial Sequence: Synthetic oligonucleotide
ucgagcucacuggagcugg

SEQ ID NO: 2284787 - RNA, 19 nt, Artificial Sequence
  Description of Artificial Sequence: Synthetic oligonucleotide
cucagugcaacucagggcu

SEQ ID NO: 2284788 - RNA, 19 nt, Artificial Sequence
  Description of Artificial Sequence: Synthetic oligonucleotide
uucaaagggccugcagggg

SEQ ID NO: 2284789 - RNA, 19 nt, Artificial Sequence
  Description of Artificial Sequence: Synthetic oligonucleotide
uucaaguagugggaauggc

SEQ ID NO: 2284790 - RNA, 19 nt, Artificial Sequence
  Description of Artificial Sequence: Synthetic oligonucleotide
aacucagggcugagcaucg

SEQ ID NO: 2284791 - RNA, 19 nt, Artificial Sequence
  Description of Artificial Sequence: Synthetic oligonucleotide
cuccacccuacccuggugg

SEQ ID NO: 2284792 - RNA, 19 nt, Artificial Sequence
  Description of Artificial Sequence: Synthetic oligonucleotide
uagcgguugggcuuguagu

SEQ ID NO: 2284793 - RNA, 19 nt, Artificial Sequence
  Description of Artificial Sequence: Synthetic oligonucleotide
ugacuguguaggugggcag

SEQ ID NO: 2284794 - RNA, 19 nt, Artificial Sequence
  Description of Artificial Sequence: Synthetic oligonucleotide
ugucgagcucacuggagcu

SEQ ID NO: 2284795 - RNA, 19 nt, Artificial Sequence
  Description of Artificial Sequence: Synthetic oligonucleotide
gaaguagcgguugggcuug

SEQ ID NO: 2284796 - RNA, 19 nt, Artificial Sequence
  Description of Artificial Sequence: Synthetic oligonucleotide
cuugucgagcucacuggag

SEQ ID NO: 2284797 - RNA, 19 nt, Artificial Sequence
  Description of Artificial Sequence: Synthetic oligonucleotide
uccagugacuguguaggug

SEQ ID NO: 2284798 - RNA, 19 nt, Artificial Sequence
  Description of Artificial Sequence: Synthetic oligonucleotide
aagguucaaguagugggaa

SEQ ID NO: 2284799 - RNA, 19 nt, Artificial Sequence
  Description of Artificial Sequence: Synthetic oligonucleotide
cucauuggucccucuggag

SEQ ID NO: 2284800 - RNA, 19 nt, Artificial Sequence
  Description of Artificial Sequence: Synthetic oligonucleotide
cuccccgugccuucggugg

SEQ ID NO: 2284801 - RNA, 19 nt, Artificial Sequence
  Description of Artificial Sequence: Synthetic oligonucleotide
ucaggcgacagguggcucu

SEQ ID NO: 2284802 - RNA, 19 nt, Artificial Sequence
  Description of Artificial Sequence: Synthetic oligonucleotide
ggcgucaggcgacaggugg

SEQ ID NO: 2284803 - RNA, 19 nt, Artificial Sequence
  Description of Artificial Sequence: Synthetic oligonucleotide
gugaguucggaagcgcagg

SEQ ID NO: 2284804 - RNA, 19 nt, Artificial Sequence
  Description of Artificial Sequence: Synthetic oligonucleotide
ucacgaauacuggggaaac

SEQ ID NO: 2284805 - RNA, 19 nt, Artificial Sequence
  Description of Artificial Sequence: Synthetic oligonucleotide
aguggcuagcauguccggg

SEQ ID NO: 2284806 - RNA, 19 nt, Artificial Sequence
  Description of Artificial Sequence: Synthetic oligonucleotide
uugccgugggcuaccagcu

SEQ ID NO: 2284807 - RNA, 19 nt, Artificial Sequence
  Description of Artificial Sequence: Synthetic oligonucleotide
aguggguacggagaugcug

SEQ ID NO: 2284808 - RNA, 19 nt, Artificial Sequence
  Description of Artificial Sequence: Synthetic oligonucleotide
gaggcaauucucacacuug

SEQ ID NO: 2284809 - RNA, 19 nt, Artificial Sequence
  Description of Artificial Sequence: Synthetic oligonucleotide
ggaagaguuugccuuccag

SEQ ID NO: 2284810 - RNA, 19 nt, Artificial Sequence
  Description of Artificial Sequence: Synthetic oligonucleotide
aggguucaaguagggaagg

SEQ ID NO: 2284811 - RNA, 19 nt, Artificial Sequence
  Description of Artificial Sequence: Synthetic oligonucleotide
gggcaaaggaaugaagaag

SEQ ID NO: 2284812 - RNA, 19 nt, Artificial Sequence
  Description of Artificial Sequence: Synthetic oligonucleotide
ucgucugggcaaccucagg

SEQ ID NO: 2284813 - RNA, 19 nt, Artificial Sequence
  Description of Artificial Sequence: Synthetic oligonucleotide
aucacgaauacuggggaaa

SEQ ID NO: 2284814 - RNA, 19 nt, Artificial Sequence
  Description of Artificial Sequence: Synthetic oligonucleotide
ggcggcaggguucaaguag

SEQ ID NO: 2284815 - RNA, 19 nt, Artificial Sequence
  Description of Artificial Sequence: Synthetic oligonucleotide
ugaagagcgagcggugagu

SEQ ID NO: 2284816 - RNA, 19 nt, Artificial Sequence
  Description of Artificial Sequence: Synthetic oligonucleotide
ucgaccucugcuccccgug

SEQ ID NO: 2284817 - RNA, 19 nt, Artificial Sequence
  Description of Artificial Sequence: Synthetic oligonucleotide
uagagcaggguaucuguuu

SEQ ID NO: 2284818 - RNA, 19 nt, Artificial Sequence
  Description of Artificial Sequence: Synthetic oligonucleotide
ucagugcaacucagggcug

SEQ ID NO: 2284819 - RNA, 19 nt, Artificial Sequence
  Description of Artificial Sequence: Synthetic oligonucleotide
guagcaccuugacucuuag

SEQ ID NO: 2284820 - RNA, 19 nt, Artificial Sequence
  Description of Artificial Sequence: Synthetic oligonucleotide
ggggacgugaggccaaagg

SEQ ID NO: 2284821 - RNA, 19 nt, Artificial Sequence
  Description of Artificial Sequence: Synthetic oligonucleotide
gugggcaguggguacggag

SEQ ID NO: 2284822 - RNA, 19 nt, Artificial Sequence
  Description of Artificial Sequence: Synthetic oligonucleotide
caacucagggcugagcauc

SEQ ID NO: 2284823 - RNA, 19 nt, Artificial Sequence
  Description of Artificial Sequence: Synthetic oligonucleotide
cugcacgcaccugagggcg

SEQ ID NO: 2284824 - RNA, 19 nt, Artificial Sequence
  Description of Artificial Sequence: Synthetic oligonucleotide
gaucacgaauacuggggaa

SEQ ID NO: 2284825 - RNA, 19 nt, Artificial Sequence
  Description of Artificial Sequence: Synthetic oligonucleotide
gcaguggcuagcauguccg

SEQ ID NO: 2284826 - RNA, 19 nt, Artificial Sequence
  Description of Artificial Sequence: Synthetic oligonucleotide
agggcuagagcaggguauc

SEQ ID NO: 2284827 - RNA, 19 nt, Artificial Sequence
  Description of Artificial Sequence: Synthetic oligonucleotide
agggcggcaggguucaagu

SEQ ID NO: 2284828 - RNA, 19 nt, Artificial Sequence
  Description of Artificial Sequence: Synthetic oligonucleotide
cagggcgagaugcaggguc

SEQ ID NO: 2284829 - RNA, 19 nt, Artificial Sequence
  Description of Artificial Sequence: Synthetic oligonucleotide
gcaguggguacggagaugc

SEQ ID NO: 2284830 - RNA, 19 nt, Artificial Sequence
  Description of Artificial Sequence: Synthetic oligonucleotide
acgucgucugggcaaccuc

SEQ ID NO: 2284831 - RNA, 19 nt, Artificial Sequence
  Description of Artificial Sequence: Synthetic oligonucleotide
cagaugcuugaagagcgag

SEQ ID NO: 2284832 - RNA, 19 nt, Artificial Sequence
  Description of Artificial Sequence: Synthetic oligonucleotide
ugacucuuagauggcugug

SEQ ID NO: 2284833 - RNA, 19 nt, Artificial Sequence
  Description of Artificial Sequence: Synthetic oligonucleotide
agcggugaguucggaagcg

SEQ ID NO: 2284834 - RNA, 19 nt, Artificial Sequence
  Description of Artificial Sequence: Synthetic oligonucleotide
uccucggcgacgcgggcgc

SEQ ID NO: 2284835 - RNA, 19 nt, Artificial Sequence
  Description of Artificial Sequence: Synthetic oligonucleotide
uggagacgccaccuccuug

SEQ ID NO: 2284836 - RNA, 19 nt, Artificial Sequence
  Description of Artificial Sequence: Synthetic oligonucleotide
gugaaagguucaaguagug

SEQ ID NO: 2284837 - RNA, 19 nt, Artificial Sequence
  Description of Artificial Sequence: Synthetic oligonucleotide
aagggcggcaggguucaag

SEQ ID NO: 2284838 - RNA, 19 nt, Artificial Sequence
  Description of Artificial Sequence: Synthetic oligonucleotide
uggacgguuccuccauccu

SEQ ID NO: 2284839 - RNA, 19 nt, Artificial Sequence
  Description of Artificial Sequence: Synthetic oligonucleotide
ugguggacgucgucugggc

SEQ ID NO: 2284840 - RNA, 19 nt, Artificial Sequence
  Description of Artificial Sequence: Synthetic oligonucleotide
ucggaagaguuugccuucc

SEQ ID NO: 2284841 - RNA, 19 nt, Artificial Sequence
  Description of Artificial Sequence: Synthetic oligonucleotide
ugcuacuucugagcauuca

SEQ ID NO: 2284842 - RNA, 19 nt, Artificial Sequence
  Description of Artificial Sequence: Synthetic oligonucleotide
gcuagcauguccgggcugg

SEQ ID NO: 2284843 - RNA, 19 nt, Artificial Sequence
  Description of Artificial Sequence: Synthetic oligonucleotide
ugcaucuugccgugggcua

SEQ ID NO: 2284844 - RNA, 19 nt, Artificial Sequence
  Description of Artificial Sequence: Synthetic oligonucleotide
ggacgugaggccaaagggc

SEQ ID NO: 2284845 - RNA, 19 nt, Artificial Sequence
  Description of Artificial Sequence: Synthetic oligonucleotide
acucucagugcaacucagg

SEQ ID NO: 2284846 - RNA, 19 nt, Artificial Sequence
  Description of Artificial Sequence: Synthetic oligonucleotide
gacagacacugcuacuucu

SEQ ID NO: 2284847 - RNA, 19 nt, Artificial Sequence
  Description of Artificial Sequence: Synthetic oligonucleotide
guaggugggcaguggguac

SEQ ID NO: 2284848 - RNA, 19 nt, Artificial Sequence
  Description of Artificial Sequence: Synthetic oligonucleotide
gaccucugcuccccgugcc

SEQ ID NO: 2284849 - RNA, 19 nt, Artificial Sequence
  Description of Artificial Sequence: Synthetic oligonucleotide
uuccucggcgacgcgggcg

SEQ ID NO: 2284850 - RNA, 19 nt, Artificial Sequence
  Description of Artificial Sequence: Synthetic oligonucleotide
ggagcuggacucugcagug

SEQ ID NO: 2284851 - RNA, 19 nt, Artificial Sequence
  Description of Artificial Sequence: Synthetic oligonucleotide
gucugggcaaccucagguc

SEQ ID NO: 2284852 - RNA, 19 nt, Artificial Sequence
  Description of Artificial Sequence: Synthetic oligonucleotide
uuccagugacuguguaggu

SEQ ID NO: 2284853 - RNA, 19 nt, Artificial Sequence
  Description of Artificial Sequence: Synthetic oligonucleotide
agggcgagaugcagggucg

SEQ ID NO: 2284854 - RNA, 19 nt, Artificial Sequence
  Description of Artificial Sequence: Synthetic oligonucleotide
agguucaaguagugggaau

SEQ ID NO: 2284855 - RNA, 19 nt, Artificial Sequence
  Description of Artificial Sequence: Synthetic oligonucleotide
cacucaguucgaccucugc

SEQ ID NO: 2284856 - RNA, 19 nt, Artificial Sequence
  Description of Artificial Sequence: Synthetic oligonucleotide
acuguguaggugggcagug

SEQ ID NO: 2284857 - RNA, 19 nt, Artificial Sequence
  Description of Artificial Sequence: Synthetic oligonucleotide
ugagggcgcaucgggacca

SEQ ID NO: 2284858 - RNA, 19 nt, Artificial Sequence
  Description of Artificial Sequence: Synthetic oligonucleotide
uccugcaugcuggggaaac

SEQ ID NO: 2284859 - RNA, 19 nt, Artificial Sequence
  Description of Artificial Sequence: Synthetic oligonucleotide
cugagggcgcaucgggacc

SEQ ID NO: 2284860 - RNA, 19 nt, Artificial Sequence
  Description of Artificial Sequence: Synthetic oligonucleotide
gagcuggacucugcagugg

SEQ ID NO: 2284861 - RNA, 19 nt, Artificial Sequence
  Description of Artificial Sequence: Synthetic oligonucleotide
cagggucggacgucugggg

SEQ ID NO: 2284862 - RNA, 19 nt, Artificial Sequence
  Description of Artificial Sequence: Synthetic oligonucleotide
aacgggcggcagucgcggg

SEQ ID NO: 2284863 - RNA, 19 nt, Artificial Sequence
  Description of Artificial Sequence: Synthetic oligonucleotide
gccagaucacgaauacugg

SEQ ID NO: 2284864 - RNA, 19 nt, Artificial Sequence
  Description of Artificial Sequence: Synthetic oligonucleotide
gacucugcaguggcuagca

SEQ ID NO: 2284865 - RNA, 19 nt, Artificial Sequence
  Description of Artificial Sequence: Synthetic oligonucleotide
agaugcagggucggacguc

SEQ ID NO: 2284866 - RNA, 19 nt, Artificial Sequence
  Description of Artificial Sequence: Synthetic oligonucleotide
uggguacggagaugcugug

SEQ ID NO: 2284867 - RNA, 19 nt, Artificial Sequence
  Description of Artificial Sequence: Synthetic oligonucleotide
ggugaguucggaagcgcag

SEQ ID NO: 2284868 - RNA, 19 nt, Artificial Sequence
  Description of Artificial Sequence: Synthetic oligonucleotide
gguaucuguuucccuggug

SEQ ID NO: 2284869 - RNA, 19 nt, Artificial Sequence
  Description of Artificial Sequence: Synthetic oligonucleotide
gacuuccgguagcaccuug

SEQ ID NO: 2284870 - RNA, 19 nt, Artificial Sequence
  Description of Artificial Sequence: Synthetic oligonucleotide
cgagcggugaguucggaag

SEQ ID NO: 2284871 - RNA, 19 nt, Artificial Sequence
  Description of Artificial Sequence: Synthetic oligonucleotide
caguucgaccucugcuccc

SEQ ID NO: 2284872 - RNA, 19 nt, Artificial Sequence
  Description of Artificial Sequence: Synthetic oligonucleotide
ggugaaagguucaaguagu

SEQ ID NO: 2284873 - RNA, 19 nt, Artificial Sequence
  Description of Artificial Sequence: Synthetic oligonucleotide
ucggaagcgcaggaggcaa

SEQ ID NO: 2284874 - RNA, 19 nt, Artificial Sequence
  Description of Artificial Sequence: Synthetic oligonucleotide
ugcuagaggcugguggguc

SEQ ID NO: 2284875 - RNA, 19 nt, Artificial Sequence
  Description of Artificial Sequence: Synthetic oligonucleotide
uagcaccuugacucuuaga

SEQ ID NO: 2284876 - RNA, 19 nt, Artificial Sequence
  Description of Artificial Sequence: Synthetic oligonucleotide
ugagcaugcucugcacaaa

SEQ ID NO: 2284877 - RNA, 19 nt, Artificial Sequence
  Description of Artificial Sequence: Synthetic oligonucleotide
guggacgucgucugggcaa

SEQ ID NO: 2284878 - RNA, 19 nt, Artificial Sequence
  Description of Artificial Sequence: Synthetic oligonucleotide
ugccuuccagugacugugu

SEQ ID NO: 2284879 - RNA, 19 nt, Artificial Sequence
  Description of Artificial Sequence: Synthetic oligonucleotide
gcuagaggcuggugggucc

SEQ ID NO: 2284880 - RNA, 19 nt, Artificial Sequence
  Description of Artificial Sequence: Synthetic oligonucleotide
agugcaacucagggcugag

SEQ ID NO: 2284881 - RNA, 19 nt, Artificial Sequence
  Description of Artificial Sequence: Synthetic oligonucleotide
uccccgugccuucgguggc

SEQ ID NO: 2284882 - RNA, 19 nt, Artificial Sequence
  Description of Artificial Sequence: Synthetic oligonucleotide
ggcgagaggugaaagguuc

SEQ ID NO: 2284883 - RNA, 19 nt, Artificial Sequence
  Description of Artificial Sequence: Synthetic oligonucleotide
uucgaccucugcuccccgu

SEQ ID NO: 2284884 - RNA, 19 nt, Artificial Sequence
  Description of Artificial Sequence: Synthetic oligonucleotide
ugccuucgguggcugcggc

SEQ ID NO: 2284885 - RNA, 19 nt, Artificial Sequence
  Description of Artificial Sequence: Synthetic oligonucleotide
guucgaccucugcuccccg

SEQ ID NO: 2284886 - RNA, 19 nt, Artificial Sequence
  Description of Artificial Sequence: Synthetic oligonucleotide
agcaugcucugcacaaaca

SEQ ID NO: 2284887 - RNA, 19 nt, Artificial Sequence
  Description of Artificial Sequence: Synthetic oligonucleotide
gcggcaggguucaaguagg

SEQ ID NO: 2284888 - RNA, 19 nt, Artificial Sequence
  Description of Artificial Sequence: Synthetic oligonucleotide
uggacgucgucugggcaac

SEQ ID NO: 2284889 - RNA, 19 nt, Artificial Sequence
  Description of Artificial Sequence: Synthetic oligonucleotide
cuuggacgguuccuccauc

SEQ ID NO: 2284890 - RNA, 19 nt, Artificial Sequence
  Description of Artificial Sequence: Synthetic oligonucleotide
cugugccagaucacgaaua

SEQ ID NO: 2284891 - RNA, 19 nt, Artificial Sequence
  Description of Artificial Sequence: Synthetic oligonucleotide
acuuccgguagcaccuuga

SEQ ID NO: 2284892 - RNA, 19 nt, Artificial Sequence
  Description of Artificial Sequence: Synthetic oligonucleotide
gcaggaggcaauucucaca

SEQ ID NO: 2284893 - RNA, 19 nt, Artificial Sequence
  Description of Artificial Sequence: Synthetic oligonucleotide
ccacccugaggucuucugg

SEQ ID NO: 2284894 - RNA, 19 nt, Artificial Sequence
  Description of Artificial Sequence: Synthetic oligonucleotide
gccgugggcuaccagcucc

SEQ ID NO: 2284895 - RNA, 19 nt, Artificial Sequence
  Description of Artificial Sequence: Synthetic oligonucleotide
gaagcgcaggaggcaauuc

SEQ ID NO: 2284896 - RNA, 19 nt, Artificial Sequence
  Description of Artificial Sequence: Synthetic oligonucleotide
gaugcagggucggacgucu

SEQ ID NO: 2284897 - RNA, 19 nt, Artificial Sequence
  Description of Artificial Sequence: Synthetic oligonucleotide
gucgucugggcaaccucag

SEQ ID NO: 2284898 - RNA, 19 nt, Artificial Sequence
  Description of Artificial Sequence: Synthetic oligonucleotide
guggguacggagaugcugu

SEQ ID NO: 2284899 - RNA, 19 nt, Artificial Sequence
  Description of Artificial Sequence: Synthetic oligonucleotide
cuucgguggcugcggcucc

SEQ ID NO: 2284900 - RNA, 19 nt, Artificial Sequence
  Description of Artificial Sequence: Synthetic oligonucleotide
uuccuccauccuccacuca

SEQ ID NO: 2284901 - RNA, 19 nt, Artificial Sequence
  Description of Artificial Sequence: Synthetic oligonucleotide
gucgagcucacuggagcug

SEQ ID NO: 2284902 - RNA, 19 nt, Artificial Sequence
  Description of Artificial Sequence: Synthetic oligonucleotide
caucuugccgugggcuacc

SEQ ID NO: 2284903 - RNA, 19 nt, Artificial Sequence
  Description of Artificial Sequence: Synthetic oligonucleotide
agaaggccccuccacccua

SEQ ID NO: 2284904 - RNA, 19 nt, Artificial Sequence
  Description of Artificial Sequence: Synthetic oligonucleotide
guacggagaugcugugcca

SEQ ID NO: 2284905 - RNA, 19 nt, Artificial Sequence
  Description of Artificial Sequence: Synthetic oligonucleotide
ggacagacacugcuacuuc

SEQ ID NO: 2284906 - RNA, 19 nt, Artificial Sequence
  Description of Artificial Sequence: Synthetic oligonucleotide
ccugagggcgcaucgggac

SEQ ID NO: 2284907 - RNA, 19 nt, Artificial Sequence
  Description of Artificial Sequence: Synthetic oligonucleotide
cugagcauucaaagggccu

SEQ ID NO: 2284908 - RNA, 19 nt, Artificial Sequence
  Description of Artificial Sequence: Synthetic oligonucleotide
acccuacccugguggucac

SEQ ID NO: 2284909 - RNA, 19 nt, Artificial Sequence
  Description of Artificial Sequence: Synthetic oligonucleotide
gcagggucggacgucuggg

SEQ ID NO: 2284910 - RNA, 19 nt, Artificial Sequence
  Description of Artificial Sequence: Synthetic oligonucleotide
ugcuccccgugccuucggu

SEQ ID NO: 2284911 - RNA, 19 nt, Artificial Sequence
  Description of Artificial Sequence: Synthetic oligonucleotide
ggaaugaagaaggccccuc

SEQ ID NO: 2284912 - RNA, 19 nt, Artificial Sequence
  Description of Artificial Sequence: Synthetic oligonucleotide
ggacgguuccuccauccuc

SEQ ID NO: 2284913 - RNA, 19 nt, Artificial Sequence
  Description of Artificial Sequence: Synthetic oligonucleotide
cacccuacccuggugguca

SEQ ID NO: 2284914 - RNA, 19 nt, Artificial Sequence
  Description of Artificial Sequence: Synthetic oligonucleotide
cuagcauguccgggcuggg

SEQ ID NO: 2284915 - RNA, 19 nt, Artificial Sequence
  Description of Artificial Sequence: Synthetic oligonucleotide
gagcgagcggugaguucgg

SEQ ID NO: 2284916 - RNA, 19 nt, Artificial Sequence
  Description of Artificial Sequence: Synthetic oligonucleotide
gcuuccucggcgacgcggg

SEQ ID NO: 2284917 - RNA, 19 nt, Artificial Sequence
  Description of Artificial Sequence: Synthetic oligonucleotide
ggaggcaauucucacacuu

SEQ ID NO: 2284918 - RNA, 19 nt, Artificial Sequence
  Description of Artificial Sequence: Synthetic oligonucleotide
ccaaagggcggcaggguuc

SEQ ID NO: 2284919 - RNA, 19 nt, Artificial Sequence
  Description of Artificial Sequence: Synthetic oligonucleotide
ccugcacgcaccugagggc

SEQ ID NO: 2284920 - RNA, 19 nt, Artificial Sequence
  Description of Artificial Sequence: Synthetic oligonucleotide
gugccuucgguggcugcgg

SEQ ID NO: 2284921 - RNA, 19 nt, Artificial Sequence
  Description of Artificial Sequence: Synthetic oligonucleotide
gggguuguggcggggcugg

SEQ ID NO: 2284922 - RNA, 19 nt, Artificial Sequence
  Description of Artificial Sequence: Synthetic oligonucleotide
caaagggcggcaggguuca

SEQ ID NO: 2284923 - RNA, 19 nt, Artificial Sequence
  Description of Artificial Sequence: Synthetic oligonucleotide
ggaacgggcggcagucgcg

SEQ ID NO: 2284924 - RNA, 19 nt, Artificial Sequence
  Description of Artificial Sequence: Synthetic oligonucleotide
ggagacgccaccuccuugu

SEQ ID NO: 2284925 - RNA, 19 nt, Artificial Sequence
  Description of Artificial Sequence: Synthetic oligonucleotide
gagacgccaccuccuuguc

SEQ ID NO: 2284926 - RNA, 19 nt, Artificial Sequence
  Description of Artificial Sequence: Synthetic oligonucleotide
gagcucacuggagcuggac

SEQ ID NO: 2284927 - RNA, 19 nt, Artificial Sequence
  Description of Artificial Sequence: Synthetic oligonucleotide
cuacccugguggucaccug

SEQ ID NO: 2284928 - RNA, 19 nt, Artificial Sequence
  Description of Artificial Sequence: Synthetic oligonucleotide
gauggcugugcuagaggcu

SEQ ID NO: 2284929 - RNA, 19 nt, Artificial Sequence
  Description of Artificial Sequence: Synthetic oligonucleotide
acgguuccuccauccucca

SEQ ID NO: 2284930 - RNA, 19 nt, Artificial Sequence
  Description of Artificial Sequence: Synthetic oligonucleotide
gugcaacucagggcugagc

SEQ ID NO: 2284931 - RNA, 19 nt, Artificial Sequence
  Description of Artificial Sequence: Synthetic oligonucleotide
gcaugcucugcacaaacau

SEQ ID NO: 2284932 - RNA, 19 nt, Artificial Sequence
  Description of Artificial Sequence: Synthetic oligonucleotide
cauguccgggcugggcuug

SEQ ID NO: 2284933 - RNA, 19 nt, Artificial Sequence
  Description of Artificial Sequence: Synthetic oligonucleotide
caggaacgggcggcagucg

SEQ ID NO: 2284934 - RNA, 19 nt, Artificial Sequence
  Description of Artificial Sequence: Synthetic oligonucleotide
cugagcaucggaagaguuu

SEQ ID NO: 2284935 - RNA, 19 nt, Artificial Sequence
  Description of Artificial Sequence: Synthetic oligonucleotide
agggcgcaucgggaccacc

SEQ ID NO: 2284936 - RNA, 19 nt, Artificial Sequence
  Description of Artificial Sequence: Synthetic oligonucleotide
agacucagggcgagaugca

SEQ ID NO: 2284937 - RNA, 19 nt, Artificial Sequence
  Description of Artificial Sequence: Synthetic oligonucleotide
uuguggcggggcugggcuc

SEQ ID NO: 2284938 - RNA, 19 nt, Artificial Sequence
  Description of Artificial Sequence: Synthetic oligonucleotide
cuggacucugcaguggcua

SEQ ID NO: 2284939 - RNA, 19 nt, Artificial Sequence
  Description of Artificial Sequence: Synthetic oligonucleotide
gaagagcgagcggugaguu

SEQ ID NO: 2284940 - RNA, 19 nt, Artificial Sequence
  Description of Artificial Sequence: Synthetic oligonucleotide
ucgggaccacccugagguc

SEQ ID NO: 2284941 - RNA, 19 nt, Artificial Sequence
  Description of Artificial Sequence: Synthetic oligonucleotide
gguggacgucgucugggca

SEQ ID NO: 2284942 - RNA, 19 nt, Artificial Sequence
  Description of Artificial Sequence: Synthetic oligonucleotide
uucgguggcugcggcucca

SEQ ID NO: 2284943 - RNA, 19 nt, Artificial Sequence
  Description of Artificial Sequence: Synthetic oligonucleotide
cagggcuagagcaggguau

SEQ ID NO: 2284944 - RNA, 19 nt, Artificial Sequence
  Description of Artificial Sequence: Synthetic oligonucleotide
gcgguugggcuuguagugc

SEQ ID NO: 2284945 - RNA, 19 nt, Artificial Sequence
  Description of Artificial Sequence: Synthetic oligonucleotide
acgcaccugagggcgcauc

SEQ ID NO: 2284946 - RNA, 19 nt, Artificial Sequence
  Description of Artificial Sequence: Synthetic oligonucleotide
ggguacggagaugcugugc

SEQ ID NO: 2284947 - RNA, 19 nt, Artificial Sequence
  Description of Artificial Sequence: Synthetic oligonucleotide
gcaucggaagaguuugccu

SEQ ID NO: 2284948 - RNA, 19 nt, Artificial Sequence
  Description of Artificial Sequence: Synthetic oligonucleotide
gcgagaugcagggucggac

SEQ ID NO: 2284949 - RNA, 19 nt, Artificial Sequence
  Description of Artificial Sequence: Synthetic oligonucleotide
gggcgcaucgggaccaccc

SEQ ID NO: 2284950 - RNA, 19 nt, Artificial Sequence
  Description of Artificial Sequence: Synthetic oligonucleotide
gcaucgggaccacccugag

SEQ ID NO: 2284951 - RNA, 19 nt, Artificial Sequence
  Description of Artificial Sequence: Synthetic oligonucleotide
cauccuccacucaguucga

SEQ ID NO: 2284952 - RNA, 19 nt, Artificial Sequence
  Description of Artificial Sequence: Synthetic oligonucleotide
gugcaucuugccgugggcu

SEQ ID NO: 2284953 - RNA, 19 nt, Artificial Sequence
  Description of Artificial Sequence: Synthetic oligonucleotide
guccgggcugggcuuggac

SEQ ID NO: 2284954 - RNA, 19 nt, Artificial Sequence
  Description of Artificial Sequence: Synthetic oligonucleotide
cgacagguggcucuuuguc

SEQ ID NO: 2284955 - RNA, 19 nt, Artificial Sequence
  Description of Artificial Sequence: Synthetic oligonucleotide
gcaccugagggcgcaucgg

SEQ ID NO: 2284956 - RNA, 19 nt, Artificial Sequence
  Description of Artificial Sequence: Synthetic oligonucleotide
ggggcgagaggugaaaggu

SEQ ID NO: 2284957 - RNA, 19 nt, Artificial Sequence
  Description of Artificial Sequence: Synthetic oligonucleotide
ggcuagcauguccgggcug

SEQ ID NO: 2284958 - RNA, 19 nt, Artificial Sequence
  Description of Artificial Sequence: Synthetic oligonucleotide
gcaucuugccgugggcuac

SEQ ID NO: 2284959 - RNA, 19 nt, Artificial Sequence
  Description of Artificial Sequence: Synthetic oligonucleotide
cgcaccugagggcgcaucg

SEQ ID NO: 2284960 - RNA, 19 nt, Artificial Sequence
  Description of Artificial Sequence: Synthetic oligonucleotide
ggcaauucucacacuugaa

SEQ ID NO: 2284961 - RNA, 19 nt, Artificial Sequence
  Description of Artificial Sequence: Synthetic oligonucleotide
gucccucuggagacgccac

SEQ ID NO: 2284962 - RNA, 19 nt, Artificial Sequence
  Description of Artificial Sequence: Synthetic oligonucleotide
ggcggcuuccucggcgacg

SEQ ID NO: 2284963 - RNA, 19 nt, Artificial Sequence
  Description of Artificial Sequence: Synthetic oligonucleotide
cgcaggaggcaauucucac

SEQ ID NO: 2284964 - RNA, 19 nt, Artificial Sequence
  Description of Artificial Sequence: Synthetic oligonucleotide
gcuccccgugccuucggug

SEQ ID NO: 2284965 - RNA, 19 nt, Artificial Sequence
  Description of Artificial Sequence: Synthetic oligonucleotide
guagugggaauggcagacu

SEQ ID NO: 2284966 - RNA, 19 nt, Artificial Sequence
  Description of Artificial Sequence: Synthetic oligonucleotide
ccaggaacgggcggcaguc

SEQ ID NO: 2284967 - RNA, 19 nt, Artificial Sequence
  Description of Artificial Sequence: Synthetic oligonucleotide
gacgucgucugggcaaccu

SEQ ID NO: 2284968 - RNA, 19 nt, Artificial Sequence
  Description of Artificial Sequence: Synthetic oligonucleotide
ccuucgguggcugcggcuc

SEQ ID NO: 2284969 - RNA, 19 nt, Artificial Sequence
  Description of Artificial Sequence: Synthetic oligonucleotide
aaguagcgguugggcuugu

SEQ ID NO: 2284970 - RNA, 19 nt, Artificial Sequence
  Description of Artificial Sequence: Synthetic oligonucleotide
uggcagacucagggcgaga

SEQ ID NO: 2284971 - RNA, 19 nt, Artificial Sequence
  Description of Artificial Sequence: Synthetic oligonucleotide
ggcggggcugggcucugag

SEQ ID NO: 2284972 - RNA, 19 nt, Artificial Sequence
  Description of Artificial Sequence: Synthetic oligonucleotide
ggcaggguucaaguaggga

SEQ ID NO: 2284973 - RNA, 19 nt, Artificial Sequence
  Description of Artificial Sequence: Synthetic oligonucleotide
gcgcaucgggaccacccug

SEQ ID NO: 2284974 - RNA, 19 nt, Artificial Sequence
  Description of Artificial Sequence: Synthetic oligonucleotide
gcgucaggcgacagguggc

SEQ ID NO: 2284975 - RNA, 19 nt, Artificial Sequence
  Description of Artificial Sequence: Synthetic oligonucleotide
ggguucaaguagggaagga

SEQ ID NO: 2284976 - RNA, 19 nt, Artificial Sequence
  Description of Artificial Sequence: Synthetic oligonucleotide
gcggugaguucggaagcgc

SEQ ID NO: 2284977 - RNA, 19 nt, Artificial Sequence
  Description of Artificial Sequence: Synthetic oligonucleotide
cgugccuucgguggcugcg

SEQ ID NO: 2284978 - RNA, 19 nt, Artificial Sequence
  Description of Artificial Sequence: Synthetic oligonucleotide
gguagcaccuugacucuua

SEQ ID NO: 2284979 - RNA, 19 nt, Artificial Sequence
  Description of Artificial Sequence: Synthetic oligonucleotide
gggcgagaugcagggucgg

SEQ ID NO: 2284980 - RNA, 19 nt, Artificial Sequence
  Description of Artificial Sequence: Synthetic oligonucleotide
ggcaguggguacggagaug

SEQ ID NO: 2284981 - RNA, 19 nt, Artificial Sequence
  Description of Artificial Sequence: Synthetic oligonucleotide
gguggguccuggagcagca

SEQ ID NO: 2284982 - RNA, 19 nt, Artificial Sequence
  Description of Artificial Sequence: Synthetic oligonucleotide
cgucgucugggcaaccuca

SEQ ID NO: 2284983 - RNA, 19 nt, Artificial Sequence
  Description of Artificial Sequence: Synthetic oligonucleotide
gcgcaggaggcaauucuca

SEQ ID NO: 2284984 - RNA, 19 nt, Artificial Sequence
  Description of Artificial Sequence: Synthetic oligonucleotide
cacgaauacuggggaaacu

SEQ ID NO: 2284985 - RNA, 19 nt, Artificial Sequence
  Description of Artificial Sequence: Synthetic oligonucleotide
gcagaugcuugaagagcga

SEQ ID NO: 2284986 - RNA, 19 nt, Artificial Sequence
  Description of Artificial Sequence: Synthetic oligonucleotide
gcgagaggugaaagguuca

SEQ ID NO: 2284987 - RNA, 19 nt, Artificial Sequence
  Description of Artificial Sequence: Synthetic oligonucleotide
cacaaacaugcagaugcuu

SEQ ID NO: 2284988 - RNA, 19 nt, Artificial Sequence
  Description of Artificial Sequence: Synthetic oligonucleotide
ggggcggcuuccucggcga

SEQ ID NO: 2284989 - RNA, 19 nt, Artificial Sequence
  Description of Artificial Sequence: Synthetic oligonucleotide
agcgagcggugaguucgga

SEQ ID NO: 2284990 - RNA, 19 nt, Artificial Sequence
  Description of Artificial Sequence: Synthetic oligonucleotide
gugccagaucacgaauacu

SEQ ID NO: 2284991 - RNA, 19 nt, Artificial Sequence
  Description of Artificial Sequence: Synthetic oligonucleotide
gucaggcgacagguggcuc

SEQ ID NO: 2284992 - RNA, 19 nt, Artificial Sequence
  Description of Artificial Sequence: Synthetic oligonucleotide
gcugugcuagaggcuggug

SEQ ID NO: 2284993 - RNA, 19 nt, Artificial Sequence
  Description of Artificial Sequence: Synthetic oligonucleotide
ggggaaacucucagugcaa

SEQ ID NO: 2284994 - RNA, 19 nt, Artificial Sequence
  Description of Artificial Sequence: Synthetic oligonucleotide
cacugcuacuucugagcau

SEQ ID NO: 2284995 - RNA, 19 nt, Artificial Sequence
  Description of Artificial Sequence: Synthetic oligonucleotide
cugcaguggcuagcauguc

SEQ ID NO: 2284996 - RNA, 19 nt, Artificial Sequence
  Description of Artificial Sequence: Synthetic oligonucleotide
cuccauccuccacucaguu

SEQ ID NO: 2284997 - RNA, 19 nt, Artificial Sequence
  Description of Artificial Sequence: Synthetic oligonucleotide
gcgagcggugaguucggaa

SEQ ID NO: 2284998 - RNA, 19 nt, Artificial Sequence
  Description of Artificial Sequence: Synthetic oligonucleotide
aaagggcggcaggguucaa

SEQ ID NO: 2284999 - RNA, 19 nt, Artificial Sequence
  Description of Artificial Sequence: Synthetic oligonucleotide
gcuuggacgguuccuccau

SEQ ID NO: 2285000 - RNA, 19 nt, Artificial Sequence
  Description of Artificial Sequence: Synthetic oligonucleotide
ggguaucuguuucccuggu

SEQ ID NO: 2285001 - RNA, 19 nt, Artificial Sequence
  Description of Artificial Sequence: Synthetic oligonucleotide
gcaacucagggcugagcau

SEQ ID NO: 2285002 - RNA, 19 nt, Artificial Sequence
  Description of Artificial Sequence: Synthetic oligonucleotide
cgcaucgggaccacccuga

SEQ ID NO: 2285003 - RNA, 19 nt, Artificial Sequence
  Description of Artificial Sequence: Synthetic oligonucleotide
gugcuagaggcuggugggu

SEQ ID NO: 2285004 - RNA, 19 nt, Artificial Sequence
  Description of Artificial Sequence: Synthetic oligonucleotide
ccagggcuagagcagggua

SEQ ID NO: 2285005 - RNA, 19 nt, Artificial Sequence
  Description of Artificial Sequence: Synthetic oligonucleotide
cggugaguucggaagcgca

SEQ ID NO: 2285006 - RNA, 19 nt, Artificial Sequence
  Description of Artificial Sequence: Synthetic oligonucleotide
ccuccacccuacccuggug

SEQ ID NO: 2285007 - RNA, 19 nt, Artificial Sequence
  Description of Artificial Sequence: Synthetic oligonucleotide
cucggcgacgcgggcgcuc

SEQ ID NO: 2285008 - RNA, 19 nt, Artificial Sequence
  Description of Artificial Sequence: Synthetic oligonucleotide
ggcgcaucgggaccacccu

SEQ ID NO: 2285009 - RNA, 19 nt, Artificial Sequence
  Description of Artificial Sequence: Synthetic oligonucleotide
ggcgagaugcagggucgga

SEQ ID NO: 2285010 - RNA, 19 nt, Artificial Sequence
  Description of Artificial Sequence: Synthetic oligonucleotide
ggcugagcaucggaagagu

SEQ ID NO: 2285011 - RNA, 19 nt, Artificial Sequence
  Description of Artificial Sequence: Synthetic oligonucleotide
cuaccagcuccugcaugcu

SEQ ID NO: 2285012 - RNA, 19 nt, Artificial Sequence
  Description of Artificial Sequence: Synthetic oligonucleotide
gccuuccagugacugugua

SEQ ID NO: 2285013 - RNA, 19 nt, Artificial Sequence
  Description of Artificial Sequence: Synthetic oligonucleotide
cuggagacgccaccuccuu

SEQ ID NO: 2285014 - RNA, 19 nt, Artificial Sequence
  Description of Artificial Sequence: Synthetic oligonucleotide
gcgacgcgggcgcucgauc

SEQ ID NO: 2285015 - RNA, 19 nt, Artificial Sequence
  Description of Artificial Sequence: Synthetic oligonucleotide
cgacgcgggcgcucgauca

SEQ ID NO: 2285016 - RNA, 19 nt, Artificial Sequence
  Description of Artificial Sequence: Synthetic oligonucleotide
ggacgucgucugggcaacc

SEQ ID NO: 2285017 - RNA, 19 nt, Artificial Sequence
  Description of Artificial Sequence: Synthetic oligonucleotide
gcugagcaucggaagaguu

SEQ ID NO: 2285018 - RNA, 19 nt, Artificial Sequence
  Description of Artificial Sequence: Synthetic oligonucleotide
gggcggcaggguucaagua

SEQ ID NO: 2285019 - RNA, 19 nt, Artificial Sequence
  Description of Artificial Sequence: Synthetic oligonucleotide
ccuccauccuccacucagu

SEQ ID NO: 2285020 - RNA, 19 nt, Artificial Sequence
  Description of Artificial Sequence: Synthetic oligonucleotide
ccgugccuucgguggcugc

SEQ ID NO: 2285021 - RNA, 19 nt, Artificial Sequence
  Description of Artificial Sequence: Synthetic oligonucleotide
ggaagcgcaggaggcaauu

SEQ ID NO: 2285022 - RNA, 19 nt, Artificial Sequence
  Description of Artificial Sequence: Synthetic oligonucleotide
gcacgcaccugagggcgca

SEQ ID NO: 2285023 - RNA, 19 nt, Artificial Sequence
  Description of Artificial Sequence: Synthetic oligonucleotide
ccacccuacccuggugguc

SEQ ID NO: 2285024 - RNA, 19 nt, Artificial Sequence
  Description of Artificial Sequence: Synthetic oligonucleotide
cgagaggugaaagguucaa

SEQ ID NO: 2285025 - RNA, 19 nt, Artificial Sequence
  Description of Artificial Sequence: Synthetic oligonucleotide
guggcggggcugggcucug

SEQ ID NO: 2285026 - RNA, 19 nt, Artificial Sequence
  Description of Artificial Sequence: Synthetic oligonucleotide
ccgguagcaccuugacucu

SEQ ID NO: 2285027 - RNA, 19 nt, Artificial Sequence
  Description of Artificial Sequence: Synthetic oligonucleotide
gcuggacucugcaguggcu

SEQ ID NO: 2285028 - RNA, 19 nt, Artificial Sequence
  Description of Artificial Sequence: Synthetic oligonucleotide
cgguuccuccauccuccac

SEQ ID NO: 2285029 - RNA, 19 nt, Artificial Sequence
  Description of Artificial Sequence: Synthetic oligonucleotide
gggcaaccucagguccuca

SEQ ID NO: 2285030 - RNA, 19 nt, Artificial Sequence
  Description of Artificial Sequence: Synthetic oligonucleotide
cccgugccuucgguggcug

SEQ ID NO: 2285031 - RNA, 19 nt, Artificial Sequence
  Description of Artificial Sequence: Synthetic oligonucleotide
caggcgacagguggcucuu

SEQ ID NO: 2285032 - RNA, 19 nt, Artificial Sequence
  Description of Artificial Sequence: Synthetic oligonucleotide
cgagcucacuggagcugga

SEQ ID NO: 2285033 - RNA, 19 nt, Artificial Sequence
  Description of Artificial Sequence: Synthetic oligonucleotide
cccuccacccuacccuggu

SEQ ID NO: 2285034 - RNA, 19 nt, Artificial Sequence
  Description of Artificial Sequence: Synthetic oligonucleotide
ggacuuccgguagcaccuu

SEQ ID NO: 2285035 - RNA, 19 nt, Artificial Sequence
  Description of Artificial Sequence: Synthetic oligonucleotide
cgucaggcgacagguggcu

SEQ ID NO: 2285036 - RNA, 19 nt, Artificial Sequence
  Description of Artificial Sequence: Synthetic oligonucleotide
ggcgacgcgggcgcucgau

SEQ ID NO: 2285037 - RNA, 19 nt, Artificial Sequence
  Description of Artificial Sequence: Synthetic oligonucleotide
cggagaugcugugccagau

SEQ ID NO: 2285038 - RNA, 19 nt, Artificial Sequence
  Description of Artificial Sequence: Synthetic oligonucleotide
cacgcaccugagggcgcau

SEQ ID NO: 2285039 - RNA, 19 nt, Artificial Sequence
  Description of Artificial Sequence: Synthetic oligonucleotide
ccccgugccuucgguggcu

SEQ ID NO: 2285040 - RNA, 19 nt, Artificial Sequence
  Description of Artificial Sequence: Synthetic oligonucleotide
uguaaauccaagcucaggg

SEQ ID NO: 2285041 - RNA, 19 nt, Artificial Sequence
  Description of Artificial Sequence: Synthetic oligonucleotide
aaggucaagauauagaaga

SEQ ID NO: 2285042 - RNA, 19 nt, Artificial Sequence
  Description of Artificial Sequence: Synthetic oligonucleotide
caagauauagaagagaagg

SEQ ID NO: 2285043 - RNA, 19 nt, Artificial Sequence
  Description of Artificial Sequence: Synthetic oligonucleotide
ucuucuaccaggaagaaau

SEQ ID NO: 2285044 - RNA, 19 nt, Artificial Sequence
  Description of Artificial Sequence: Synthetic oligonucleotide
aacuacaagucccagcagg

SEQ ID NO: 2285045 - RNA, 19 nt, Artificial Sequence
  Description of Artificial Sequence: Synthetic oligonucleotide
aaagcaaccacucccagga

SEQ ID NO: 2285046 - RNA, 19 nt, Artificial Sequence
  Description of Artificial Sequence: Synthetic oligonucleotide
uaaacccugagagagaugg

SEQ ID NO: 2285047 - RNA, 19 nt, Artificial Sequence
  Description of Artificial Sequence: Synthetic oligonucleotide
agcacuuugcgguaaaccc

SEQ ID NO: 2285048 - RNA, 19 nt, Artificial Sequence
  Description of Artificial Sequence: Synthetic oligonucleotide
gaugacaagggucaagccg

SEQ ID NO: 2285049 - RNA, 19 nt, Artificial Sequence
  Description of Artificial Sequence: Synthetic oligonucleotide
uuuagcucggaucuuagcu

SEQ ID NO: 2285050 - RNA, 19 nt, Artificial Sequence
  Description of Artificial Sequence: Synthetic oligonucleotide
acuacucaacuacaagucc

SEQ ID NO: 2285051 - RNA, 19 nt, Artificial Sequence
  Description of Artificial Sequence: Synthetic oligonucleotide
uugcgguaaacccugagag

SEQ ID NO: 2285052 - RNA, 19 nt, Artificial Sequence
  Description of Artificial Sequence: Synthetic oligonucleotide
gaucuuagcuuugaggugg

SEQ ID NO: 2285053 - RNA, 19 nt, Artificial Sequence
  Description of Artificial Sequence: Synthetic oligonucleotide
aguacagcaggucugccac

SEQ ID NO: 2285054 - RNA, 19 nt, Artificial Sequence
  Description of Artificial Sequence: Synthetic oligonucleotide
ugauuggucaccaacccca

SEQ ID NO: 2285055 - RNA, 19 nt, Artificial Sequence
  Description of Artificial Sequence: Synthetic oligonucleotide
agccguugaagacagcucc

SEQ ID NO: 2285056 - RNA, 19 nt, Artificial Sequence
  Description of Artificial Sequence: Synthetic oligonucleotide
cuuuccuggacucuuagag

SEQ ID NO: 2285057 - RNA, 19 nt, Artificial Sequence
  Description of Artificial Sequence: Synthetic oligonucleotide
aaacguucugucugcuccc

SEQ ID NO: 2285058 - RNA, 19 nt, Artificial Sequence
  Description of Artificial Sequence: Synthetic oligonucleotide
ucaccaaccccacauacug

SEQ ID NO: 2285059 - RNA, 19 nt, Artificial Sequence
  Description of Artificial Sequence: Synthetic oligonucleotide
aaugccgcagcugugugac

SEQ ID NO: 2285060 - RNA, 19 nt, Artificial Sequence
  Description of Artificial Sequence: Synthetic oligonucleotide
aauggcucggccgaguggg

SEQ ID NO: 2285061 - RNA, 19 nt, Artificial Sequence
  Description of Artificial Sequence: Synthetic oligonucleotide
uuagcuuugagguggcuca

SEQ ID NO: 2285062 - RNA, 19 nt, Artificial Sequence
  Description of Artificial Sequence: Synthetic oligonucleotide
uuuggauccgguccggucc

SEQ ID NO: 2285063 - RNA, 19 nt, Artificial Sequence
  Description of Artificial Sequence: Synthetic oligonucleotide
acaccaaccucucacggcg

SEQ ID NO: 2285064 - RNA, 19 nt, Artificial Sequence
  Description of Artificial Sequence: Synthetic oligonucleotide
caaacguucugucugcucc

SEQ ID NO: 2285065 - RNA, 19 nt, Artificial Sequence
  Description of Artificial Sequence: Synthetic oligonucleotide
cuacucaacuacaaguccc

SEQ ID NO: 2285066 - RNA, 19 nt, Artificial Sequence
  Description of Artificial Sequence: Synthetic oligonucleotide
cuaccaggaagaaaugccg

SEQ ID NO: 2285067 - RNA, 19 nt, Artificial Sequence
  Description of Artificial Sequence: Synthetic oligonucleotide
ucggaucuuagcuuugagg

SEQ ID NO: 2285068 - RNA, 19 nt, Artificial Sequence
  Description of Artificial Sequence: Synthetic oligonucleotide
guugaagacagcucccacg

SEQ ID NO: 2285069 - RNA, 19 nt, Artificial Sequence
  Description of Artificial Sequence: Synthetic oligonucleotide
cacgcuaaagugcaggagg

SEQ ID NO: 2285070 - RNA, 19 nt, Artificial Sequence
  Description of Artificial Sequence: Synthetic oligonucleotide
gaugcucgggaagagaagg

SEQ ID NO: 2285071 - RNA, 19 nt, Artificial Sequence
  Description of Artificial Sequence: Synthetic oligonucleotide
aaucagcugggacaaacgu

SEQ ID NO: 2285072 - RNA, 19 nt, Artificial Sequence
  Description of Artificial Sequence: Synthetic oligonucleotide
ggaaauguaguccgggucg

SEQ ID NO: 2285073 - RNA, 19 nt, Artificial Sequence
  Description of Artificial Sequence: Synthetic oligonucleotide
aaagccccagcauaggggu

SEQ ID NO: 2285074 - RNA, 19 nt, Artificial Sequence
  Description of Artificial Sequence: Synthetic oligonucleotide
uuccuggacucuuagagca

SEQ ID NO: 2285075 - RNA, 19 nt, Artificial Sequence
  Description of Artificial Sequence: Synthetic oligonucleotide
uuaggaaauguaguccggg

SEQ ID NO: 2285076 - RNA, 19 nt, Artificial Sequence
  Description of Artificial Sequence: Synthetic oligonucleotide
uuugcgguaaacccugaga

SEQ ID NO: 2285077 - RNA, 19 nt, Artificial Sequence
  Description of Artificial Sequence: Synthetic oligonucleotide
aggaaauguaguccggguc

SEQ ID NO: 2285078 - RNA, 19 nt, Artificial Sequence
  Description of Artificial Sequence: Synthetic oligonucleotide
aguuguaaauccaagcuca

SEQ ID NO: 2285079 - RNA, 19 nt, Artificial Sequence
  Description of Artificial Sequence: Synthetic oligonucleotide
ucggcuuuggcuuuggauc

SEQ ID NO: 2285080 - RNA, 19 nt, Artificial Sequence
  Description of Artificial Sequence: Synthetic oligonucleotide
cacguaugaagcaaucagc

SEQ ID NO: 2285081 - RNA, 19 nt, Artificial Sequence
  Description of Artificial Sequence: Synthetic oligonucleotide
aagacggcuccagacgucc

SEQ ID NO: 2285082 - RNA, 19 nt, Artificial Sequence
  Description of Artificial Sequence: Synthetic oligonucleotide
aagacagcucccacgaagg

SEQ ID NO: 2285083 - RNA, 19 nt, Artificial Sequence
  Description of Artificial Sequence: Synthetic oligonucleotide
guaaauccaagcucagggc

SEQ ID NO: 2285084 - RNA, 19 nt, Artificial Sequence
  Description of Artificial Sequence: Synthetic oligonucleotide
agcugauuggucaccaacc

SEQ ID NO: 2285085 - RNA, 19 nt, Artificial Sequence
  Description of Artificial Sequence: Synthetic oligonucleotide
uacgcagccacagacacca

SEQ ID NO: 2285086 - RNA, 19 nt, Artificial Sequence
  Description of Artificial Sequence: Synthetic oligonucleotide
gagacaccaaccucucacg

SEQ ID NO: 2285087 - RNA, 19 nt, Artificial Sequence
  Description of Artificial Sequence: Synthetic oligonucleotide
ugaagcaaucagcugggac

SEQ ID NO: 2285088 - RNA, 19 nt, Artificial Sequence
  Description of Artificial Sequence: Synthetic oligonucleotide
aauccaagcucagggcucg

SEQ ID NO: 2285089 - RNA, 19 nt, Artificial Sequence
  Description of Artificial Sequence: Synthetic oligonucleotide
agagcagagccucuuagga

SEQ ID NO: 2285090 - RNA, 19 nt, Artificial Sequence
  Description of Artificial Sequence: Synthetic oligonucleotide
cuuaggaaauguaguccgg

SEQ ID NO: 2285091 - RNA, 19 nt, Artificial Sequence
  Description of Artificial Sequence: Synthetic oligonucleotide
ucucacggcgccuccagcg

SEQ ID NO: 2285092 - RNA, 19 nt, Artificial Sequence
  Description of Artificial Sequence: Synthetic oligonucleotide
gugaagacggcuccagacg

SEQ ID NO: 2285093 - RNA, 19 nt, Artificial Sequence
  Description of Artificial Sequence: Synthetic oligonucleotide
uacucaacuacaaguccca

SEQ ID NO: 2285094 - RNA, 19 nt, Artificial Sequence
  Description of Artificial Sequence: Synthetic oligonucleotide
gaagaaaugccgcagcugu

SEQ ID NO: 2285095 - RNA, 19 nt, Artificial Sequence
  Description of Artificial Sequence: Synthetic oligonucleotide
ucacggaagugcaggacag

SEQ ID NO: 2285096 - RNA, 19 nt, Artificial Sequence
  Description of Artificial Sequence: Synthetic oligonucleotide
ggacucuuagagcagagcc

SEQ ID NO: 2285097 - RNA, 19 nt, Artificial Sequence
  Description of Artificial Sequence: Synthetic oligonucleotide
uggcuuuggauccgguccg

SEQ ID NO: 2285098 - RNA, 19 nt, Artificial Sequence
  Description of Artificial Sequence: Synthetic oligonucleotide
caaccccacauacuggucg

SEQ ID NO: 2285099 - RNA, 19 nt, Artificial Sequence
  Description of Artificial Sequence: Synthetic oligonucleotide
caggucuucuaccaggaag

SEQ ID NO: 2285100 - RNA, 19 nt, Artificial Sequence
  Description of Artificial Sequence: Synthetic oligonucleotide
caaagcaaccacucccagg

SEQ ID NO: 2285101 - RNA, 19 nt, Artificial Sequence
  Description of Artificial Sequence: Synthetic oligonucleotide
caaucagcugggacaaacg

SEQ ID NO: 2285102 - RNA, 19 nt, Artificial Sequence
  Description of Artificial Sequence: Synthetic oligonucleotide
uggaugcucgggaagagaa

SEQ ID NO: 2285103 - RNA, 19 nt, Artificial Sequence
  Description of Artificial Sequence: Synthetic oligonucleotide
cucaacuacaagucccagc

SEQ ID NO: 2285104 - RNA, 19 nt, Artificial Sequence
  Description of Artificial Sequence: Synthetic oligonucleotide
agggucaagccguugaaga

SEQ ID NO: 2285105 - RNA, 19 nt, Artificial Sequence
  Description of Artificial Sequence: Synthetic oligonucleotide
agacaccaaccucucacgg

SEQ ID NO: 2285106 - RNA, 19 nt, Artificial Sequence
  Description of Artificial Sequence: Synthetic oligonucleotide
agcagagccucuuaggaaa

SEQ ID NO: 2285107 - RNA, 19 nt, Artificial Sequence
  Description of Artificial Sequence: Synthetic oligonucleotide
agacaccucucucauucgg

SEQ ID NO: 2285108 - RNA, 19 nt, Artificial Sequence
  Description of Artificial Sequence: Synthetic oligonucleotide
gagucuuuauuacaguugu

SEQ ID NO: 2285109 - RNA, 19 nt, Artificial Sequence
  Description of Artificial Sequence: Synthetic oligonucleotide
auauagaagagaagggcca

SEQ ID NO: 2285110 - RNA, 19 nt, Artificial Sequence
  Description of Artificial Sequence: Synthetic oligonucleotide
cugacuacucaacuacaag

SEQ ID NO: 2285111 - RNA, 19 nt, Artificial Sequence
  Description of Artificial Sequence: Synthetic oligonucleotide
ggcgcagagacccagcagg

SEQ ID NO: 2285112 - RNA, 19 nt, Artificial Sequence
  Description of Artificial Sequence: Synthetic oligonucleotide
cuucccaccgggaaauggc

SEQ ID NO: 2285113 - RNA, 19 nt, Artificial Sequence
  Description of Artificial Sequence: Synthetic oligonucleotide
acaagggucaagccguuga

SEQ ID NO: 2285114 - RNA, 19 nt, Artificial Sequence
  Description of Artificial Sequence: Synthetic oligonucleotide
aucaccccggugcacggcc

SEQ ID NO: 2285115 - RNA, 19 nt, Artificial Sequence
  Description of Artificial Sequence: Synthetic oligonucleotide
gggacaaacguucugucug

SEQ ID NO: 2285116 - RNA, 19 nt, Artificial Sequence
  Description of Artificial Sequence: Synthetic oligonucleotide
gacaccaaccucucacggc

SEQ ID NO: 2285117 - RNA, 19 nt, Artificial Sequence
  Description of Artificial Sequence: Synthetic oligonucleotide
acaaacguucugucugcuc

SEQ ID NO: 2285118 - RNA, 19 nt, Artificial Sequence
  Description of Artificial Sequence: Synthetic oligonucleotide
agauccauguccagguagg

SEQ ID NO: 2285119 - RNA, 19 nt, Artificial Sequence
  Description of Artificial Sequence: Synthetic oligonucleotide
cuuuauuacaguuguaaau

SEQ ID NO: 2285120 - RNA, 19 nt, Artificial Sequence
  Description of Artificial Sequence: Synthetic oligonucleotide
augacaagggucaagccgu

SEQ ID NO: 2285121 - RNA, 19 nt, Artificial Sequence
  Description of Artificial Sequence: Synthetic oligonucleotide
uguaguccgggucgcuuag

SEQ ID NO: 2285122 - RNA, 19 nt, Artificial Sequence
  Description of Artificial Sequence: Synthetic oligonucleotide
uaggaaauguaguccgggu

SEQ ID NO: 2285123 - RNA, 19 nt, Artificial Sequence
  Description of Artificial Sequence: Synthetic oligonucleotide
acggaagugcaggacagcg

SEQ ID NO: 2285124 - RNA, 19 nt, Artificial Sequence
  Description of Artificial Sequence: Synthetic oligonucleotide
acguaugaagcaaucagcu

SEQ ID NO: 2285125 - RNA, 19 nt, Artificial Sequence
  Description of Artificial Sequence: Synthetic oligonucleotide
cacuuugcgguaaacccug

SEQ ID NO: 2285126 - RNA, 19 nt, Artificial Sequence
  Description of Artificial Sequence: Synthetic oligonucleotide
accaaccccacauacuggu

SEQ ID NO: 2285127 - RNA, 19 nt, Artificial Sequence
  Description of Artificial Sequence: Synthetic oligonucleotide
cagacaccacgcuaaagug

SEQ ID NO: 2285128 - RNA, 19 nt, Artificial Sequence
  Description of Artificial Sequence: Synthetic oligonucleotide
caagcucagggcucgacug

SEQ ID NO: 2285129 - RNA, 19 nt, Artificial Sequence
  Description of Artificial Sequence: Synthetic oligonucleotide
uuagcucggaucuuagcuu

SEQ ID NO: 2285130 - RNA, 19 nt, Artificial Sequence
  Description of Artificial Sequence: Synthetic oligonucleotide
aaaugccgcagcuguguga

SEQ ID NO: 2285131 - RNA, 19 nt, Artificial Sequence
  Description of Artificial Sequence: Synthetic oligonucleotide
gaaauggcucggccgagug

SEQ ID NO: 2285132 - RNA, 19 nt, Artificial Sequence
  Description of Artificial Sequence: Synthetic oligonucleotide
aggaagaaaugccgcagcu

SEQ ID NO: 2285133 - RNA, 19 nt, Artificial Sequence
  Description of Artificial Sequence: Synthetic oligonucleotide
accaaccucucacggcgcc

SEQ ID NO: 2285134 - RNA, 19 nt, Artificial Sequence
  Description of Artificial Sequence: Synthetic oligonucleotide
cugauuggucaccaacccc

SEQ ID NO: 2285135 - RNA, 19 nt, Artificial Sequence
  Description of Artificial Sequence: Synthetic oligonucleotide
ucgacuggaccccaugcaa

SEQ ID NO: 2285136 - RNA, 19 nt, Artificial Sequence
  Description of Artificial Sequence: Synthetic oligonucleotide
aagggucaagccguugaag

SEQ ID NO: 2285137 - RNA, 19 nt, Artificial Sequence
  Description of Artificial Sequence: Synthetic oligonucleotide
guguccuuccaguacagca

SEQ ID NO: 2285138 - RNA, 19 nt, Artificial Sequence
  Description of Artificial Sequence: Synthetic oligonucleotide
ugggacaaacguucugucu

SEQ ID NO: 2285139 - RNA, 19 nt, Artificial Sequence
  Description of Artificial Sequence: Synthetic oligonucleotide
acaaagcaaccacucccag

SEQ ID NO: 2285140 - RNA, 19 nt, Artificial Sequence
  Description of Artificial Sequence: Synthetic oligonucleotide
accaggaagaaaugccgca

SEQ ID NO: 2285141 - RNA, 19 nt, Artificial Sequence
  Description of Artificial Sequence: Synthetic oligonucleotide
ccagcauagggguuggugg

SEQ ID NO: 2285142 - RNA, 19 nt, Artificial Sequence
  Description of Artificial Sequence: Synthetic oligonucleotide
agccucuuaggaaauguag

SEQ ID NO: 2285143 - RNA, 19 nt, Artificial Sequence
  Description of Artificial Sequence: Synthetic oligonucleotide
acagcucccacgaagguca

SEQ ID NO: 2285144 - RNA, 19 nt, Artificial Sequence
  Description of Artificial Sequence: Synthetic oligonucleotide
aaccccacauacuggucga

SEQ ID NO: 2285145 - RNA, 19 nt, Artificial Sequence
  Description of Artificial Sequence: Synthetic oligonucleotide
aagcaaucagcugggacaa

SEQ ID NO: 2285146 - RNA, 19 nt, Artificial Sequence
  Description of Artificial Sequence: Synthetic oligonucleotide
gaaauguaguccgggucgc

SEQ ID NO: 2285147 - RNA, 19 nt, Artificial Sequence
  Description of Artificial Sequence: Synthetic oligonucleotide
aaccucucacggcgccucc

SEQ ID NO: 2285148 - RNA, 19 nt, Artificial Sequence
  Description of Artificial Sequence: Synthetic oligonucleotide
gcgguaaacccugagagag

SEQ ID NO: 2285149 - RNA, 19 nt, Artificial Sequence
  Description of Artificial Sequence: Synthetic oligonucleotide
aagccguugaagacagcuc

SEQ ID NO: 2285150 - RNA, 19 nt, Artificial Sequence
  Description of Artificial Sequence: Synthetic oligonucleotide
agaaaugccgcagcugugu

SEQ ID NO: 2285151 - RNA, 19 nt, Artificial Sequence
  Description of Artificial Sequence: Synthetic oligonucleotide
aacguucugucugcucccg

SEQ ID NO: 2285152 - RNA, 19 nt, Artificial Sequence
  Description of Artificial Sequence: Synthetic oligonucleotide
guccgggucgcuuaggcac

SEQ ID NO: 2285153 - RNA, 19 nt, Artificial Sequence
  Description of Artificial Sequence: Synthetic oligonucleotide
cacgaaggucaagauauag

SEQ ID NO: 2285154 - RNA, 19 nt, Artificial Sequence
  Description of Artificial Sequence: Synthetic oligonucleotide
agcgucugacuacucaacu

SEQ ID NO: 2285155 - RNA, 19 nt, Artificial Sequence
  Description of Artificial Sequence: Synthetic oligonucleotide
acagcgucugacuacucaa

SEQ ID NO: 2285156 - RNA, 19 nt, Artificial Sequence
  Description of Artificial Sequence: Synthetic oligonucleotide
aagagaagggccagcuuga

SEQ ID NO: 2285157 - RNA, 19 nt, Artificial Sequence
  Description of Artificial Sequence: Synthetic oligonucleotide
cuuagcuuugagguggcuc

SEQ ID NO: 2285158 - RNA, 19 nt, Artificial Sequence
  Description of Artificial Sequence: Synthetic oligonucleotide
gucaagccguugaagacag

SEQ ID NO: 2285159 - RNA, 19 nt, Artificial Sequence
  Description of Artificial Sequence: Synthetic oligonucleotide
aggucaagauauagaagag

SEQ ID NO: 2285160 - RNA, 19 nt, Artificial Sequence
  Description of Artificial Sequence: Synthetic oligonucleotide
gucacggaagugcaggaca

SEQ ID NO: 2285161 - RNA, 19 nt, Artificial Sequence
  Description of Artificial Sequence: Synthetic oligonucleotide
gacagcgucugacuacuca

SEQ ID NO: 2285162 - RNA, 19 nt, Artificial Sequence
  Description of Artificial Sequence: Synthetic oligonucleotide
ugcaggacagcgucugacu

SEQ ID NO: 2285163 - RNA, 19 nt, Artificial Sequence
  Description of Artificial Sequence: Synthetic oligonucleotide
gacggugaacaaagcaacc

SEQ ID NO: 2285164 - RNA, 19 nt, Artificial Sequence
  Description of Artificial Sequence: Synthetic oligonucleotide
ccacguaugaagcaaucag

SEQ ID NO: 2285165 - RNA, 19 nt, Artificial Sequence
  Description of Artificial Sequence: Synthetic oligonucleotide
ggaagugcaggacagcguc

SEQ ID NO: 2285166 - RNA, 19 nt, Artificial Sequence
  Description of Artificial Sequence: Synthetic oligonucleotide
ugcaaagccccagcauagg

SEQ ID NO: 2285167 - RNA, 19 nt, Artificial Sequence
  Description of Artificial Sequence: Synthetic oligonucleotide
acuguggagaccacguaug

SEQ ID NO: 2285168 - RNA, 19 nt, Artificial Sequence
  Description of Artificial Sequence: Synthetic oligonucleotide
ggagucuuuauuacaguug

SEQ ID NO: 2285169 - RNA, 19 nt, Artificial Sequence
  Description of Artificial Sequence: Synthetic oligonucleotide
acuggaccccaugcaaagc

SEQ ID NO: 2285170 - RNA, 19 nt, Artificial Sequence
  Description of Artificial Sequence: Synthetic oligonucleotide
gggauuuuagcucggaucu

SEQ ID NO: 2285171 - RNA, 19 nt, Artificial Sequence
  Description of Artificial Sequence: Synthetic oligonucleotide
acuucccaccgggaaaugg

SEQ ID NO: 2285172 - RNA, 19 nt, Artificial Sequence
  Description of Artificial Sequence: Synthetic oligonucleotide
auuuuagcucggaucuuag

SEQ ID NO: 2285173 - RNA, 19 nt, Artificial Sequence
  Description of Artificial Sequence: Synthetic oligonucleotide
gauuuuagcucggaucuua

SEQ ID NO: 2285174 - RNA, 19 nt, Artificial Sequence
  Description of Artificial Sequence: Synthetic oligonucleotide
cuaaagugcaggaggcaga

SEQ ID NO: 2285175 - RNA, 19 nt, Artificial Sequence
  Description of Artificial Sequence: Synthetic oligonucleotide
accacgcuaaagugcagga

SEQ ID NO: 2285176 - RNA, 19 nt, Artificial Sequence
  Description of Artificial Sequence: Synthetic oligonucleotide
ucagggucagauccauguc

SEQ ID NO: 2285177 - RNA, 19 nt, Artificial Sequence
  Description of Artificial Sequence: Synthetic oligonucleotide
uucccaccgggaaauggcu

SEQ ID NO: 2285178 - RNA, 19 nt, Artificial Sequence
  Description of Artificial Sequence: Synthetic oligonucleotide
ucgggaagagaagggaaac

SEQ ID NO: 2285179 - RNA, 19 nt, Artificial Sequence
  Description of Artificial Sequence: Synthetic oligonucleotide
agagccucuuaggaaaugu

SEQ ID NO: 2285180 - RNA, 19 nt, Artificial Sequence
  Description of Artificial Sequence: Synthetic oligonucleotide
agagaggccaugaggcccg

SEQ ID NO: 2285181 - RNA, 19 nt, Artificial Sequence
  Description of Artificial Sequence: Synthetic oligonucleotide
gucgcuuaggcacuuccca

SEQ ID NO: 2285182 - RNA, 19 nt, Artificial Sequence
  Description of Artificial Sequence: Synthetic oligonucleotide
ucgcuuaggcacuucccac

SEQ ID NO: 2285183 - RNA, 19 nt, Artificial Sequence
  Description of Artificial Sequence: Synthetic oligonucleotide
gcugauuggucaccaaccc

SEQ ID NO: 2285184 - RNA, 19 nt, Artificial Sequence
  Description of Artificial Sequence: Synthetic oligonucleotide
acgaaggucaagauauaga

SEQ ID NO: 2285185 - RNA, 19 nt, Artificial Sequence
  Description of Artificial Sequence: Synthetic oligonucleotide
cuuugcgguaaacccugag

SEQ ID NO: 2285186 - RNA, 19 nt, Artificial Sequence
  Description of Artificial Sequence: Synthetic oligonucleotide
uguggaugcucgggaagag

SEQ ID NO: 2285187 - RNA, 19 nt, Artificial Sequence
  Description of Artificial Sequence: Synthetic oligonucleotide
gcuuaggcacuucccaccg

SEQ ID NO: 2285188 - RNA, 19 nt, Artificial Sequence
  Description of Artificial Sequence: Synthetic oligonucleotide
ccucuuaggaaauguaguc

SEQ ID NO: 2285189 - RNA, 19 nt, Artificial Sequence
  Description of Artificial Sequence: Synthetic oligonucleotide
ggaucuuagcuuugaggug

SEQ ID NO: 2285190 - RNA, 19 nt, Artificial Sequence
  Description of Artificial Sequence: Synthetic oligonucleotide
ugcucgggaagagaaggga

SEQ ID NO: 2285191 - RNA, 19 nt, Artificial Sequence
  Description of Artificial Sequence: Synthetic oligonucleotide
gaauccaccaggucuucua

SEQ ID NO: 2285192 - RNA, 19 nt, Artificial Sequence
  Description of Artificial Sequence: Synthetic oligonucleotide
agaggcuguggaugcucgg

SEQ ID NO: 2285193 - RNA, 19 nt, Artificial Sequence
  Description of Artificial Sequence: Synthetic oligonucleotide
uggacucuuagagcagagc

SEQ ID NO: 2285194 - RNA, 19 nt, Artificial Sequence
  Description of Artificial Sequence: Synthetic oligonucleotide
caccacgcuaaagugcagg

SEQ ID NO: 2285195 - RNA, 19 nt, Artificial Sequence
  Description of Artificial Sequence: Synthetic oligonucleotide
acggccugcagcacuuugc

SEQ ID NO: 2285196 - RNA, 19 nt, Artificial Sequence
  Description of Artificial Sequence: Synthetic oligonucleotide
cacaggagucuuuauuaca

SEQ ID NO: 2285197 - RNA, 19 nt, Artificial Sequence
  Description of Artificial Sequence: Synthetic oligonucleotide
cuuuggauccgguccgguc

SEQ ID NO: 2285198 - RNA, 19 nt, Artificial Sequence
  Description of Artificial Sequence: Synthetic oligonucleotide
ugccgcagcugugugacug

SEQ ID NO: 2285199 - RNA, 19 nt, Artificial Sequence
  Description of Artificial Sequence: Synthetic oligonucleotide
uagcucggaucuuagcuuu

SEQ ID NO: 2285200 - RNA, 19 nt, Artificial Sequence
  Description of Artificial Sequence: Synthetic oligonucleotide
agagaauccaccaggucuu

SEQ ID NO: 2285201 - RNA, 19 nt, Artificial Sequence
  Description of Artificial Sequence: Synthetic oligonucleotide
aucuuagcuuugagguggc

SEQ ID NO: 2285202 - RNA, 19 nt, Artificial Sequence
  Description of Artificial Sequence: Synthetic oligonucleotide
caggacagcgucugacuac

SEQ ID NO: 2285203 - RNA, 19 nt, Artificial Sequence
  Description of Artificial Sequence: Synthetic oligonucleotide
gagaccacguaugaagcaa

SEQ ID NO: 2285204 - RNA, 19 nt, Artificial Sequence
  Description of Artificial Sequence: Synthetic oligonucleotide
cuggacucuuagagcagag

SEQ ID NO: 2285205 - RNA, 19 nt, Artificial Sequence
  Description of Artificial Sequence: Synthetic oligonucleotide
ucggccgagugggagaggc

SEQ ID NO: 2285206 - RNA, 19 nt, Artificial Sequence
  Description of Artificial Sequence: Synthetic oligonucleotide
ggacaaacguucugucugc

SEQ ID NO: 2285207 - RNA, 19 nt, Artificial Sequence
  Description of Artificial Sequence: Synthetic oligonucleotide
accacguaugaagcaauca

SEQ ID NO: 2285208 - RNA, 19 nt, Artificial Sequence
  Description of Artificial Sequence: Synthetic oligonucleotide
gauccauguccagguaggc

SEQ ID NO: 2285209 - RNA, 19 nt, Artificial Sequence
  Description of Artificial Sequence: Synthetic oligonucleotide
gauccgguccgguccccgg

SEQ ID NO: 2285210 - RNA, 19 nt, Artificial Sequence
  Description of Artificial Sequence: Synthetic oligonucleotide
cugguguccuuccaguaca

SEQ ID NO: 2285211 - RNA, 19 nt, Artificial Sequence
  Description of Artificial Sequence: Synthetic oligonucleotide
cucggaucuuagcuuugag

SEQ ID NO: 2285212 - RNA, 19 nt, Artificial Sequence
  Description of Artificial Sequence: Synthetic oligonucleotide
cuuaggcacuucccaccgg

SEQ ID NO: 2285213 - RNA, 19 nt, Artificial Sequence
  Description of Artificial Sequence: Synthetic oligonucleotide
cugggacaaacguucuguc

SEQ ID NO: 2285214 - RNA, 19 nt, Artificial Sequence
  Description of Artificial Sequence: Synthetic oligonucleotide
gacguccugguguccuucc

SEQ ID NO: 2285215 - RNA, 19 nt, Artificial Sequence
  Description of Artificial Sequence: Synthetic oligonucleotide
agcugggacaaacguucug

SEQ ID NO: 2285216 - RNA, 19 nt, Artificial Sequence
  Description of Artificial Sequence: Synthetic oligonucleotide
accucucucauucggcuuu

SEQ ID NO: 2285217 - RNA, 19 nt, Artificial Sequence
  Description of Artificial Sequence: Synthetic oligonucleotide
aaauguaguccgggucgcu

SEQ ID NO: 2285218 - RNA, 19 nt, Artificial Sequence
  Description of Artificial Sequence: Synthetic oligonucleotide
gagcagagccucuuaggaa

SEQ ID NO: 2285219 - RNA, 19 nt, Artificial Sequence
  Description of Artificial Sequence: Synthetic oligonucleotide
gacuguggagaccacguau

SEQ ID NO: 2285220 - RNA, 19 nt, Artificial Sequence
  Description of Artificial Sequence: Synthetic oligonucleotide
ugaagacagcucccacgaa

SEQ ID NO: 2285221 - RNA, 19 nt, Artificial Sequence
  Description of Artificial Sequence: Synthetic oligonucleotide
ggacggugaacaaagcaac

SEQ ID NO: 2285222 - RNA, 19 nt, Artificial Sequence
  Description of Artificial Sequence: Synthetic oligonucleotide
cuuccaguacagcaggucu

SEQ ID NO: 2285223 - RNA, 19 nt, Artificial Sequence
  Description of Artificial Sequence: Synthetic oligonucleotide
guccccgggauuuuagcuc

SEQ ID NO: 2285224 - RNA, 19 nt, Artificial Sequence
  Description of Artificial Sequence: Synthetic oligonucleotide
ggucaagauauagaagaga

SEQ ID NO: 2285225 - RNA, 19 nt, Artificial Sequence
  Description of Artificial Sequence: Synthetic oligonucleotide
ucuuagagcagagccucuu

SEQ ID NO: 2285226 - RNA, 19 nt, Artificial Sequence
  Description of Artificial Sequence: Synthetic oligonucleotide
acucaacuacaagucccag

SEQ ID NO: 2285227 - RNA, 19 nt, Artificial Sequence
  Description of Artificial Sequence: Synthetic oligonucleotide
cagcgucugacuacucaac

SEQ ID NO: 2285228 - RNA, 19 nt, Artificial Sequence
  Description of Artificial Sequence: Synthetic oligonucleotide
auuggucaccaaccccaca

SEQ ID NO: 2285229 - RNA, 19 nt, Artificial Sequence
  Description of Artificial Sequence: Synthetic oligonucleotide
ggaagaaaugccgcagcug

SEQ ID NO: 2285230 - RNA, 19 nt, Artificial Sequence
  Description of Artificial Sequence: Synthetic oligonucleotide
ucgaucugggccugguguu

SEQ ID NO: 2285231 - RNA, 19 nt, Artificial Sequence
  Description of Artificial Sequence: Synthetic oligonucleotide
augcucgggaagagaaggg

SEQ ID NO: 2285232 - RNA, 19 nt, Artificial Sequence
  Description of Artificial Sequence: Synthetic oligonucleotide
agacagcucccacgaaggu

SEQ ID NO: 2285233 - RNA, 19 nt, Artificial Sequence
  Description of Artificial Sequence: Synthetic oligonucleotide
auccgguccgguccccggg

SEQ ID NO: 2285234 - RNA, 19 nt, Artificial Sequence
  Description of Artificial Sequence: Synthetic oligonucleotide
agaagagaagggccagcuu

SEQ ID NO: 2285235 - RNA, 19 nt, Artificial Sequence
  Description of Artificial Sequence: Synthetic oligonucleotide
gucgaucugggccuggugu

SEQ ID NO: 2285236 - RNA, 19 nt, Artificial Sequence
  Description of Artificial Sequence: Synthetic oligonucleotide
cuccagacguccugguguc

SEQ ID NO: 2285237 - RNA, 19 nt, Artificial Sequence
  Description of Artificial Sequence: Synthetic oligonucleotide
uccgggucgcuuaggcacu

SEQ ID NO: 2285238 - RNA, 19 nt, Artificial Sequence
  Description of Artificial Sequence: Synthetic oligonucleotide
aguccgggucgcuuaggca

SEQ ID NO: 2285239 - RNA, 19 nt, Artificial Sequence
  Description of Artificial Sequence: Synthetic oligonucleotide
gacugcuggggugugggca

SEQ ID NO: 2285240 - RNA, 19 nt, Artificial Sequence
  Description of Artificial Sequence: Synthetic oligonucleotide
cccaccgggaaauggcucg

SEQ ID NO: 2285241 - RNA, 19 nt, Artificial Sequence
  Description of Artificial Sequence: Synthetic oligonucleotide
gcuguggaugcucgggaag

SEQ ID NO: 2285242 - RNA, 19 nt, Artificial Sequence
  Description of Artificial Sequence: Synthetic oligonucleotide
ucgggcagagacaccucuc

SEQ ID NO: 2285243 - RNA, 19 nt, Artificial Sequence
  Description of Artificial Sequence: Synthetic oligonucleotide
caggaugacaagggucaag

SEQ ID NO: 2285244 - RNA, 19 nt, Artificial Sequence
  Description of Artificial Sequence: Synthetic oligonucleotide
gggucaagccguugaagac

SEQ ID NO: 2285245 - RNA, 19 nt, Artificial Sequence
  Description of Artificial Sequence: Synthetic oligonucleotide
uagcuuugagguggcucag

SEQ ID NO: 2285246 - RNA, 19 nt, Artificial Sequence
  Description of Artificial Sequence: Synthetic oligonucleotide
ccgggaaauggcucggccg

SEQ ID NO: 2285247 - RNA, 19 nt, Artificial Sequence
  Description of Artificial Sequence: Synthetic oligonucleotide
agccccagcauagggguug

SEQ ID NO: 2285248 - RNA, 19 nt, Artificial Sequence
  Description of Artificial Sequence: Synthetic oligonucleotide
ucauucggcuuuggcuuug

SEQ ID NO: 2285249 - RNA, 19 nt, Artificial Sequence
  Description of Artificial Sequence: Synthetic oligonucleotide
uccgcggccuuuccuggac

SEQ ID NO: 2285250 - RNA, 19 nt, Artificial Sequence
  Description of Artificial Sequence: Synthetic oligonucleotide
ucccaccgggaaauggcuc

SEQ ID NO: 2285251 - RNA, 19 nt, Artificial Sequence
  Description of Artificial Sequence: Synthetic oligonucleotide
ucccagcaggcuccgcggc

SEQ ID NO: 2285252 - RNA, 19 nt, Artificial Sequence
  Description of Artificial Sequence: Synthetic oligonucleotide
agacguccugguguccuuc

SEQ ID NO: 2285253 - RNA, 19 nt, Artificial Sequence
  Description of Artificial Sequence: Synthetic oligonucleotide
ggucaagccguugaagaca

SEQ ID NO: 2285254 - RNA, 19 nt, Artificial Sequence
  Description of Artificial Sequence: Synthetic oligonucleotide
aggcacuucccaccgggaa

SEQ ID NO: 2285255 - RNA, 19 nt, Artificial Sequence
  Description of Artificial Sequence: Synthetic oligonucleotide
gggacggugaacaaagcaa

SEQ ID NO: 2285256 - RNA, 19 nt, Artificial Sequence
  Description of Artificial Sequence: Synthetic oligonucleotide
aggcccgugaagacggcuc

SEQ ID NO: 2285257 - RNA, 19 nt, Artificial Sequence
  Description of Artificial Sequence: Synthetic oligonucleotide
gucccucgggcagagacac

SEQ ID NO: 2285258 - RNA, 19 nt, Artificial Sequence
  Description of Artificial Sequence: Synthetic oligonucleotide
aagcaaccacucccaggau

SEQ ID NO: 2285259 - RNA, 19 nt, Artificial Sequence
  Description of Artificial Sequence: Synthetic oligonucleotide
cacagacaccacgcuaaag

SEQ ID NO: 2285260 - RNA, 19 nt, Artificial Sequence
  Description of Artificial Sequence: Synthetic oligonucleotide
cucgacuggaccccaugca

SEQ ID NO: 2285261 - RNA, 19 nt, Artificial Sequence
  Description of Artificial Sequence: Synthetic oligonucleotide
gaccacguaugaagcaauc

SEQ ID NO: 2285262 - RNA, 19 nt, Artificial Sequence
  Description of Artificial Sequence: Synthetic oligonucleotide
caagccguugaagacagcu

SEQ ID NO: 2285263 - RNA, 19 nt, Artificial Sequence
  Description of Artificial Sequence: Synthetic oligonucleotide
ccacaggagucuuuauuac

SEQ ID NO: 2285264 - RNA, 19 nt, Artificial Sequence
  Description of Artificial Sequence: Synthetic oligonucleotide
ucaagccguugaagacagc

SEQ ID NO: 2285265 - RNA, 19 nt, Artificial Sequence
  Description of Artificial Sequence: Synthetic oligonucleotide
aaacccugagagagauggu

SEQ ID NO: 2285266 - RNA, 19 nt, Artificial Sequence
  Description of Artificial Sequence: Synthetic oligonucleotide
aucugggccugguguuguc

SEQ ID NO: 2285267 - RNA, 19 nt, Artificial Sequence
  Description of Artificial Sequence: Synthetic oligonucleotide
cacggcgccuccagcggcg

SEQ ID NO: 2285268 - RNA, 19 nt, Artificial Sequence
  Description of Artificial Sequence: Synthetic oligonucleotide
uggaaaggguuggugccau

SEQ ID NO: 2285269 - RNA, 19 nt, Artificial Sequence
  Description of Artificial Sequence: Synthetic oligonucleotide
cagcugugugacuguggag

SEQ ID NO: 2285270 - RNA, 19 nt, Artificial Sequence
  Description of Artificial Sequence: Synthetic oligonucleotide
gacaagggucaagccguug

SEQ ID NO: 2285271 - RNA, 19 nt, Artificial Sequence
  Description of Artificial Sequence: Synthetic oligonucleotide
agcggcgggucacggaagu

SEQ ID NO: 2285272 - RNA, 19 nt, Artificial Sequence
  Description of Artificial Sequence: Synthetic oligonucleotide
agggguugguggcuucaga

SEQ ID NO: 2285273 - RNA, 19 nt, Artificial Sequence
  Description of Artificial Sequence: Synthetic oligonucleotide
cugugugacuguggagacc

SEQ ID NO: 2285274 - RNA, 19 nt, Artificial Sequence
  Description of Artificial Sequence: Synthetic oligonucleotide
cuguggagaccacguauga

SEQ ID NO: 2285275 - RNA, 19 nt, Artificial Sequence
  Description of Artificial Sequence: Synthetic oligonucleotide
gcucgacuggaccccaugc

SEQ ID NO: 2285276 - RNA, 19 nt, Artificial Sequence
  Description of Artificial Sequence: Synthetic oligonucleotide
agcauagggguugguggcu

SEQ ID NO: 2285277 - RNA, 19 nt, Artificial Sequence
  Description of Artificial Sequence: Synthetic oligonucleotide
gucugacuacucaacuaca

SEQ ID NO: 2285278 - RNA, 19 nt, Artificial Sequence
  Description of Artificial Sequence: Synthetic oligonucleotide
gggucgcuuaggcacuucc

SEQ ID NO: 2285279 - RNA, 19 nt, Artificial Sequence
  Description of Artificial Sequence: Synthetic oligonucleotide
gaagggaaacaggacugcu

SEQ ID NO: 2285280 - RNA, 19 nt, Artificial Sequence
  Description of Artificial Sequence: Synthetic oligonucleotide
uccgguccgguccccggga

SEQ ID NO: 2285281 - RNA, 19 nt, Artificial Sequence
  Description of Artificial Sequence: Synthetic oligonucleotide
cguaugaagcaaucagcug

SEQ ID NO: 2285282 - RNA, 19 nt, Artificial Sequence
  Description of Artificial Sequence: Synthetic oligonucleotide
caccaaccucucacggcgc

SEQ ID NO: 2285283 - RNA, 19 nt, Artificial Sequence
  Description of Artificial Sequence: Synthetic oligonucleotide
ugacaagggucaagccguu

SEQ ID NO: 2285284 - RNA, 19 nt, Artificial Sequence
  Description of Artificial Sequence: Synthetic oligonucleotide
ccugguguccuuccaguac

SEQ ID NO: 2285285 - RNA, 19 nt, Artificial Sequence
  Description of Artificial Sequence: Synthetic oligonucleotide
cuuagagcagagccucuua

SEQ ID NO: 2285286 - RNA, 19 nt, Artificial Sequence
  Description of Artificial Sequence: Synthetic oligonucleotide
ggcuccgcggccuuuccug

SEQ ID NO: 2285287 - RNA, 19 nt, Artificial Sequence
  Description of Artificial Sequence: Synthetic oligonucleotide
gugcaggacagcgucugac

SEQ ID NO: 2285288 - RNA, 19 nt, Artificial Sequence
  Description of Artificial Sequence: Synthetic oligonucleotide
uggcucggccgagugggag

SEQ ID NO: 2285289 - RNA, 19 nt, Artificial Sequence
  Description of Artificial Sequence: Synthetic oligonucleotide
cggaucuuagcuuugaggu

SEQ ID NO: 2285290 - RNA, 19 nt, Artificial Sequence
  Description of Artificial Sequence: Synthetic oligonucleotide
guaaacccugagagagaug

SEQ ID NO: 2285291 - RNA, 19 nt, Artificial Sequence
  Description of Artificial Sequence: Synthetic oligonucleotide
cagggcucgacuggacccc

SEQ ID NO: 2285292 - RNA, 19 nt, Artificial Sequence
  Description of Artificial Sequence: Synthetic oligonucleotide
uccaagcucagggcucgac

SEQ ID NO: 2285293 - RNA, 19 nt, Artificial Sequence
  Description of Artificial Sequence: Synthetic oligonucleotide
gaagacggcuccagacguc

SEQ ID NO: 2285294 - RNA, 19 nt, Artificial Sequence
  Description of Artificial Sequence: Synthetic oligonucleotide
auucggcuuuggcuuugga

SEQ ID NO: 2285295 - RNA, 19 nt, Artificial Sequence
  Description of Artificial Sequence: Synthetic oligonucleotide
ucuuagcuuugagguggcu

SEQ ID NO: 2285296 - RNA, 19 nt, Artificial Sequence
  Description of Artificial Sequence: Synthetic oligonucleotide
agaccacguaugaagcaau

SEQ ID NO: 2285297 - RNA, 19 nt, Artificial Sequence
  Description of Artificial Sequence: Synthetic oligonucleotide
gcucccacgaaggucaaga

SEQ ID NO: 2285298 - RNA, 19 nt, Artificial Sequence
  Description of Artificial Sequence: Synthetic oligonucleotide
cucucacggcgccuccagc

SEQ ID NO: 2285299 - RNA, 19 nt, Artificial Sequence
  Description of Artificial Sequence: Synthetic oligonucleotide
caagggucaagccguugaa

SEQ ID NO: 2285300 - RNA, 19 nt, Artificial Sequence
  Description of Artificial Sequence: Synthetic oligonucleotide
cacggaagugcaggacagc

SEQ ID NO: 2285301 - RNA, 19 nt, Artificial Sequence
  Description of Artificial Sequence: Synthetic oligonucleotide
guaguccgggucgcuuagg

SEQ ID NO: 2285302 - RNA, 19 nt, Artificial Sequence
  Description of Artificial Sequence: Synthetic oligonucleotide
cggugaacaaagcaaccac

SEQ ID NO: 2285303 - RNA, 19 nt, Artificial Sequence
  Description of Artificial Sequence: Synthetic oligonucleotide
caagucccagcaggcuccg

SEQ ID NO: 2285304 - RNA, 19 nt, Artificial Sequence
  Description of Artificial Sequence: Synthetic oligonucleotide
ggaugcucgggaagagaag

SEQ ID NO: 2285305 - RNA, 19 nt, Artificial Sequence
  Description of Artificial Sequence: Synthetic oligonucleotide
guacgcagccacagacacc

SEQ ID NO: 2285306 - RNA, 19 nt, Artificial Sequence
  Description of Artificial Sequence: Synthetic oligonucleotide
caaccucucacggcgccuc

SEQ ID NO: 2285307 - RNA, 19 nt, Artificial Sequence
  Description of Artificial Sequence: Synthetic oligonucleotide
cacggccugcagcacuuug

SEQ ID NO: 2285308 - RNA, 19 nt, Artificial Sequence
  Description of Artificial Sequence: Synthetic oligonucleotide
ggucgcuuaggcacuuccc

SEQ ID NO: 2285309 - RNA, 19 nt, Artificial Sequence
  Description of Artificial Sequence: Synthetic oligonucleotide
ucaccccggugcacggccu

SEQ ID NO: 2285310 - RNA, 19 nt, Artificial Sequence
  Description of Artificial Sequence: Synthetic oligonucleotide
gguaaacccugagagagau

SEQ ID NO: 2285311 - RNA, 19 nt, Artificial Sequence
  Description of Artificial Sequence: Synthetic oligonucleotide
gccagguacgcagccacag

SEQ ID NO: 2285312 - RNA, 19 nt, Artificial Sequence
  Description of Artificial Sequence: Synthetic oligonucleotide
cgcuuaggcacuucccacc

SEQ ID NO: 2285313 - RNA, 19 nt, Artificial Sequence
  Description of Artificial Sequence: Synthetic oligonucleotide
ggcccgugaagacggcucc

SEQ ID NO: 2285314 - RNA, 19 nt, Artificial Sequence
  Description of Artificial Sequence: Synthetic oligonucleotide
gagccucuuaggaaaugua

SEQ ID NO: 2285315 - RNA, 19 nt, Artificial Sequence
  Description of Artificial Sequence: Synthetic oligonucleotide
ggaccccaugcaaagcccc

SEQ ID NO: 2285316 - RNA, 19 nt, Artificial Sequence
  Description of Artificial Sequence: Synthetic oligonucleotide
cagagccucuuaggaaaug

SEQ ID NO: 2285317 - RNA, 19 nt, Artificial Sequence
  Description of Artificial Sequence: Synthetic oligonucleotide
uccagacguccuggugucc

SEQ ID NO: 2285318 - RNA, 19 nt, Artificial Sequence
  Description of Artificial Sequence: Synthetic oligonucleotide
aggagucccucgggcagag

SEQ ID NO: 2285319 - RNA, 19 nt, Artificial Sequence
  Description of Artificial Sequence: Synthetic oligonucleotide
gccacagacaccacgcuaa

SEQ ID NO: 2285320 - RNA, 19 nt, Artificial Sequence
  Description of Artificial Sequence: Synthetic oligonucleotide
ggcaggagucccucgggca

SEQ ID NO: 2285321 - RNA, 19 nt, Artificial Sequence
  Description of Artificial Sequence: Synthetic oligonucleotide
agucuuuauuacaguugua

SEQ ID NO: 2285322 - RNA, 19 nt, Artificial Sequence
  Description of Artificial Sequence: Synthetic oligonucleotide
ggcacuucccaccgggaaa

SEQ ID NO: 2285323 - RNA, 19 nt, Artificial Sequence
  Description of Artificial Sequence: Synthetic oligonucleotide
accccggugcacggccugc

SEQ ID NO: 2285324 - RNA, 19 nt, Artificial Sequence
  Description of Artificial Sequence: Synthetic oligonucleotide
gcuccgcggccuuuccugg

SEQ ID NO: 2285325 - RNA, 19 nt, Artificial Sequence
  Description of Artificial Sequence: Synthetic oligonucleotide
gcugggacaaacguucugu

SEQ ID NO: 2285326 - RNA, 19 nt, Artificial Sequence
  Description of Artificial Sequence: Synthetic oligonucleotide
ucccucgggcagagacacc

SEQ ID NO: 2285327 - RNA, 19 nt, Artificial Sequence
  Description of Artificial Sequence: Synthetic oligonucleotide
gacaaacguucugucugcu

SEQ ID NO: 2285328 - RNA, 19 nt, Artificial Sequence
  Description of Artificial Sequence: Synthetic oligonucleotide
agcucggaucuuagcuuug

SEQ ID NO: 2285329 - RNA, 19 nt, Artificial Sequence
  Description of Artificial Sequence: Synthetic oligonucleotide
ggcucgacuggaccccaug

SEQ ID NO: 2285330 - RNA, 19 nt, Artificial Sequence
  Description of Artificial Sequence: Synthetic oligonucleotide
gcgcagagacccagcaggg

SEQ ID NO: 2285331 - RNA, 19 nt, Artificial Sequence
  Description of Artificial Sequence: Synthetic oligonucleotide
gguguccuuccaguacagc

SEQ ID NO: 2285332 - RNA, 19 nt, Artificial Sequence
  Description of Artificial Sequence: Synthetic oligonucleotide
cagcggcgggucacggaag

SEQ ID NO: 2285333 - RNA, 19 nt, Artificial Sequence
  Description of Artificial Sequence: Synthetic oligonucleotide
gccucuuaggaaauguagu

SEQ ID NO: 2285334 - RNA, 19 nt, Artificial Sequence
  Description of Artificial Sequence: Synthetic oligonucleotide
cccagcauagggguuggug

SEQ ID NO: 2285335 - RNA, 19 nt, Artificial Sequence
  Description of Artificial Sequence: Synthetic oligonucleotide
caucaccccggugcacggc

SEQ ID NO: 2285336 - RNA, 19 nt, Artificial Sequence
  Description of Artificial Sequence: Synthetic oligonucleotide
gguccccgggauuuuagcu

SEQ ID NO: 2285337 - RNA, 19 nt, Artificial Sequence
  Description of Artificial Sequence: Synthetic oligonucleotide
cgggucacggaagugcagg

SEQ ID NO: 2285338 - RNA, 19 nt, Artificial Sequence
  Description of Artificial Sequence: Synthetic oligonucleotide
gcgucugacuacucaacua

SEQ ID NO: 2285339 - RNA, 19 nt, Artificial Sequence
  Description of Artificial Sequence: Synthetic oligonucleotide
caccgggaaauggcucggc

SEQ ID NO: 2285340 - RNA, 19 nt, Artificial Sequence
  Description of Artificial Sequence: Synthetic oligonucleotide
ccacgcuaaagugcaggag

SEQ ID NO: 2285341 - RNA, 19 nt, Artificial Sequence
  Description of Artificial Sequence: Synthetic oligonucleotide
cucgggcagagacaccucu

SEQ ID NO: 2285342 - RNA, 19 nt, Artificial Sequence
  Description of Artificial Sequence: Synthetic oligonucleotide
acuuugcgguaaacccuga

SEQ ID NO: 2285343 - RNA, 19 nt, Artificial Sequence
  Description of Artificial Sequence: Synthetic oligonucleotide
gcucggccgagugggagag

SEQ ID NO: 2285344 - RNA, 19 nt, Artificial Sequence
  Description of Artificial Sequence: Synthetic oligonucleotide
cuccagcggcgggucacgg

SEQ ID NO: 2285345 - RNA, 19 nt, Artificial Sequence
  Description of Artificial Sequence: Synthetic oligonucleotide
gcacuuugcgguaaacccu

SEQ ID NO: 2285346 - RNA, 19 nt, Artificial Sequence
  Description of Artificial Sequence: Synthetic oligonucleotide
ggauccgguccgguccccg

SEQ ID NO: 2285347 - RNA, 19 nt, Artificial Sequence
  Description of Artificial Sequence: Synthetic oligonucleotide
uggauccgguccggucccc

SEQ ID NO: 2285348 - RNA, 19 nt, Artificial Sequence
  Description of Artificial Sequence: Synthetic oligonucleotide
ccucucacggcgccuccag

SEQ ID NO: 2285349 - RNA, 19 nt, Artificial Sequence
  Description of Artificial Sequence: Synthetic oligonucleotide
uccgguccccgggauuuua

SEQ ID NO: 2285350 - RNA, 19 nt, Artificial Sequence
  Description of Artificial Sequence: Synthetic oligonucleotide
ccaaccccacauacugguc

SEQ ID NO: 2285351 - RNA, 19 nt, Artificial Sequence
  Description of Artificial Sequence: Synthetic oligonucleotide
ccuuuccuggacucuuaga

SEQ ID NO: 2285352 - RNA, 19 nt, Artificial Sequence
  Description of Artificial Sequence: Synthetic oligonucleotide
ggcucggccgagugggaga

SEQ ID NO: 2285353 - RNA, 19 nt, Artificial Sequence
  Description of Artificial Sequence: Synthetic oligonucleotide
ggaaaggguuggugccauc

SEQ ID NO: 2285354 - RNA, 19 nt, Artificial Sequence
  Description of Artificial Sequence: Synthetic oligonucleotide
caccccggugcacggccug

SEQ ID NO: 2285355 - RNA, 19 nt, Artificial Sequence
  Description of Artificial Sequence: Synthetic oligonucleotide
guacagcaggucugccacu

SEQ ID NO: 2285356 - RNA, 19 nt, Artificial Sequence
  Description of Artificial Sequence: Synthetic oligonucleotide
ggcgggucacggaagugca

SEQ ID NO: 2285357 - RNA, 19 nt, Artificial Sequence
  Description of Artificial Sequence: Synthetic oligonucleotide
augccgcagcugugugacu

SEQ ID NO: 2285358 - RNA, 19 nt, Artificial Sequence
  Description of Artificial Sequence: Synthetic oligonucleotide
aagccccagcauagggguu

SEQ ID NO: 2285359 - RNA, 19 nt, Artificial Sequence
  Description of Artificial Sequence: Synthetic oligonucleotide
cacuucccaccgggaaaug

SEQ ID NO: 2285360 - RNA, 19 nt, Artificial Sequence
  Description of Artificial Sequence: Synthetic oligonucleotide
agggcucgacuggacccca

SEQ ID NO: 2285361 - RNA, 19 nt, Artificial Sequence
  Description of Artificial Sequence: Synthetic oligonucleotide
cccgugaagacggcuccag

SEQ ID NO: 2285362 - RNA, 19 nt, Artificial Sequence
  Description of Artificial Sequence: Synthetic oligonucleotide
ccgguccccgggauuuuag

SEQ ID NO: 2285363 - RNA, 19 nt, Artificial Sequence
  Description of Artificial Sequence: Synthetic oligonucleotide
agacggcuccagacguccu

SEQ ID NO: 2285364 - RNA, 19 nt, Artificial Sequence
  Description of Artificial Sequence: Synthetic oligonucleotide
ccaccgggaaauggcucgg

SEQ ID NO: 2285365 - RNA, 19 nt, Artificial Sequence
  Description of Artificial Sequence: Synthetic oligonucleotide
ccaguacagcaggucugcc

SEQ ID NO: 2285366 - RNA, 19 nt, Artificial Sequence
  Description of Artificial Sequence: Synthetic oligonucleotide
agcaaucagcugggacaaa

SEQ ID NO: 2285367 - RNA, 19 nt, Artificial Sequence
  Description of Artificial Sequence: Synthetic oligonucleotide
cggcgggucacggaagugc

SEQ ID NO: 2285368 - RNA, 19 nt, Artificial Sequence
  Description of Artificial Sequence: Synthetic oligonucleotide
cuccgcggccuuuccugga

SEQ ID NO: 2285369 - RNA, 19 nt, Artificial Sequence
  Description of Artificial Sequence: Synthetic oligonucleotide
cucggccgagugggagagg

SEQ ID NO: 2285370 - RNA, 19 nt, Artificial Sequence
  Description of Artificial Sequence: Synthetic oligonucleotide
gaggcccgugaagacggcu

SEQ ID NO: 2285371 - RNA, 19 nt, Artificial Sequence
  Description of Artificial Sequence: Synthetic oligonucleotide
augguggcgcagagaccca

SEQ ID NO: 2285372 - RNA, 19 nt, Artificial Sequence
  Description of Artificial Sequence: Synthetic oligonucleotide
cgguccccgggauuuuagc

SEQ ID NO: 2285373 - RNA, 19 nt, Artificial Sequence
  Description of Artificial Sequence: Synthetic oligonucleotide
auccaagcucagggcucga

SEQ ID NO: 2285374 - RNA, 19 nt, Artificial Sequence
  Description of Artificial Sequence: Synthetic oligonucleotide
ccagguacgcagccacaga

SEQ ID NO: 2285375 - RNA, 19 nt, Artificial Sequence
  Description of Artificial Sequence: Synthetic oligonucleotide
ggaaauggcucggccgagu

SEQ ID NO: 2285376 - RNA, 19 nt, Artificial Sequence
  Description of Artificial Sequence: Synthetic oligonucleotide
ccccgggauuuuagcucgg

SEQ ID NO: 2285377 - RNA, 19 nt, Artificial Sequence
  Description of Artificial Sequence: Synthetic oligonucleotide
cugcagcacuuugcgguaa

SEQ ID NO: 2285378 - RNA, 19 nt, Artificial Sequence
  Description of Artificial Sequence: Synthetic oligonucleotide
auggcucggccgaguggga

SEQ ID NO: 2285379 - RNA, 19 nt, Artificial Sequence
  Description of Artificial Sequence: Synthetic oligonucleotide
ccgagugggagaggcugug

SEQ ID NO: 2285380 - RNA, 19 nt, Artificial Sequence
  Description of Artificial Sequence: Synthetic oligonucleotide
ccuccagcggcgggucacg

SEQ ID NO: 2285381 - RNA, 19 nt, Artificial Sequence
  Description of Artificial Sequence: Synthetic oligonucleotide
gcacuucccaccgggaaau

SEQ ID NO: 2285382 - RNA, 19 nt, Artificial Sequence
  Description of Artificial Sequence: Synthetic oligonucleotide
cgacuggaccccaugcaaa

SEQ ID NO: 2285383 - RNA, 19 nt, Artificial Sequence
  Description of Artificial Sequence: Synthetic oligonucleotide
cgguaaacccugagagaga

SEQ ID NO: 2285384 - RNA, 19 nt, Artificial Sequence
  Description of Artificial Sequence: Synthetic oligonucleotide
ccgugaagacggcuccaga

SEQ ID NO: 2285385 - RNA, 19 nt, Artificial Sequence
  Description of Artificial Sequence: Synthetic oligonucleotide
cgcggccuuuccuggacuc

SEQ ID NO: 2285386 - RNA, 19 nt, Artificial Sequence
  Description of Artificial Sequence: Synthetic oligonucleotide
cccucgggcagagacaccu

SEQ ID NO: 2285387 - RNA, 19 nt, Artificial Sequence
  Description of Artificial Sequence: Synthetic oligonucleotide
ccacagacaccacgcuaaa

SEQ ID NO: 2285388 - RNA, 19 nt, Artificial Sequence
  Description of Artificial Sequence: Synthetic oligonucleotide
gguccgguccccgggauuu

SEQ ID NO: 2285389 - RNA, 19 nt, Artificial Sequence
  Description of Artificial Sequence: Synthetic oligonucleotide
ggauuuuagcucggaucuu

SEQ ID NO: 2285390 - RNA, 19 nt, Artificial Sequence
  Description of Artificial Sequence: Synthetic oligonucleotide
ggacagcgucugacuacuc

SEQ ID NO: 2285391 - RNA, 19 nt, Artificial Sequence
  Description of Artificial Sequence: Synthetic oligonucleotide
gcggcgggucacggaagug

SEQ ID NO: 2285392 - RNA, 19 nt, Artificial Sequence
  Description of Artificial Sequence: Synthetic oligonucleotide
cagacguccugguguccuu

SEQ ID NO: 2285393 - RNA, 19 nt, Artificial Sequence
  Description of Artificial Sequence: Synthetic oligonucleotide
ggccuuuccuggacucuua

SEQ ID NO: 2285394 - RNA, 19 nt, Artificial Sequence
  Description of Artificial Sequence: Synthetic oligonucleotide
ccagacguccugguguccu

SEQ ID NO: 2285395 - RNA, 19 nt, Artificial Sequence
  Description of Artificial Sequence: Synthetic oligonucleotide
gcuuuggauccgguccggu

SEQ ID NO: 2285396 - RNA, 19 nt, Artificial Sequence
  Description of Artificial Sequence: Synthetic oligonucleotide
cccgggauuuuagcucgga

SEQ ID NO: 2285397 - RNA, 19 nt, Artificial Sequence
  Description of Artificial Sequence: Synthetic oligonucleotide
ccgggauuuuagcucggau

SEQ ID NO: 2285398 - RNA, 19 nt, Artificial Sequence
  Description of Artificial Sequence: Synthetic oligonucleotide
gccgagugggagaggcugu

SEQ ID NO: 2285399 - RNA, 19 nt, Artificial Sequence
  Description of Artificial Sequence: Synthetic oligonucleotide
gcggccuuuccuggacucu

SEQ ID NO: 2285400 - RNA, 19 nt, Artificial Sequence
  Description of Artificial Sequence: Synthetic oligonucleotide
ggagucccucgggcagaga

SEQ ID NO: 2285401 - RNA, 19 nt, Artificial Sequence
  Description of Artificial Sequence: Synthetic oligonucleotide
ccaaccucucacggcgccu

SEQ ID NO: 2285402 - RNA, 19 nt, Artificial Sequence
  Description of Artificial Sequence: Synthetic oligonucleotide
guccgguccccgggauuuu

SEQ ID NO: 2285403 - RNA, 19 nt, Artificial Sequence
  Description of Artificial Sequence: Synthetic oligonucleotide
cgggucgcuuaggcacuuc

SEQ ID NO: 2285404 - RNA, 19 nt, Artificial Sequence
  Description of Artificial Sequence: Synthetic oligonucleotide
ccgcggccuuuccuggacu

SEQ ID NO: 2285405 - RNA, 19 nt, Artificial Sequence
  Description of Artificial Sequence: Synthetic oligonucleotide
gggcucgacuggaccccau

SEQ ID NO: 2285406 - RNA, 19 nt, Artificial Sequence
  Description of Artificial Sequence: Synthetic oligonucleotide
ccgguccgguccccgggau

SEQ ID NO: 2285407 - RNA, 19 nt, Artificial Sequence
  Description of Artificial Sequence: Synthetic oligonucleotide
ccgggucgcuuaggcacuu

SEQ ID NO: 2285408 - RNA, 19 nt, Artificial Sequence
  Description of Artificial Sequence: Synthetic oligonucleotide
ccccagcauagggguuggu

SEQ ID NO: 2285409 - RNA, 19 nt, Artificial Sequence
  Description of Artificial Sequence: Synthetic oligonucleotide
cgguccgguccccgggauu

SEQ ID NO: 2285410 - RNA, 19 nt, Artificial Sequence
  Description of Artificial Sequence: Synthetic oligonucleotide
aauaacauggcuuuuaaug

SEQ ID NO: 2285411 - RNA, 19 nt, Artificial Sequence
  Description of Artificial Sequence: Synthetic oligonucleotide
uaaauuauaaacaaccuuc

SEQ ID NO: 2285412 - RNA, 19 nt, Artificial Sequence
  Description of Artificial Sequence: Synthetic oligonucleotide
aagaaauacaaaugagacc

SEQ ID NO: 2285413 - RNA, 19 nt, Artificial Sequence
  Description of Artificial Sequence: Synthetic oligonucleotide
uuaggcaccaaacaaacgg

SEQ ID NO: 2285414 - RNA, 19 nt, Artificial Sequence
  Description of Artificial Sequence: Synthetic oligonucleotide
aauccaauggauuuuacug

SEQ ID NO: 2285415 - RNA, 19 nt, Artificial Sequence
  Description of Artificial Sequence: Synthetic oligonucleotide
ucauauaacuauaacagug

SEQ ID NO: 2285416 - RNA, 19 nt, Artificial Sequence
  Description of Artificial Sequence: Synthetic oligonucleotide
uauuauuccauuauguucu

SEQ ID NO: 2285417 - RNA, 19 nt, Artificial Sequence
  Description of Artificial Sequence: Synthetic oligonucleotide
auuauguucuguuaggcac

SEQ ID NO: 2285418 - RNA, 19 nt, Artificial Sequence
  Description of Artificial Sequence: Synthetic oligonucleotide
uuaacuaauacuaaugaaa

SEQ ID NO: 2285419 - RNA, 19 nt, Artificial Sequence
  Description of Artificial Sequence: Synthetic oligonucleotide
uuaaagaacauuauucuga

SEQ ID NO: 2285420 - RNA, 19 nt, Artificial Sequence
  Description of Artificial Sequence: Synthetic oligonucleotide
uaacuuauuaagcagauuc

SEQ ID NO: 2285421 - RNA, 19 nt, Artificial Sequence
  Description of Artificial Sequence: Synthetic oligonucleotide
uuuagauaauucaaaacug

SEQ ID NO: 2285422 - RNA, 19 nt, Artificial Sequence
  Description of Artificial Sequence: Synthetic oligonucleotide
agaaauacaaaugagaccu

SEQ ID NO: 2285423 - RNA, 19 nt, Artificial Sequence
  Description of Artificial Sequence: Synthetic oligonucleotide
aauagggcaacauuaaaga

SEQ ID NO: 2285424 - RNA, 19 nt, Artificial Sequence
  Description of Artificial Sequence: Synthetic oligonucleotide
aauauuaaggccuuugcaa

SEQ ID NO: 2285425 - RNA, 19 nt, Artificial Sequence
  Description of Artificial Sequence: Synthetic oligonucleotide
ucuucauauaacuauaaca

SEQ ID NO: 2285426 - RNA, 19 nt, Artificial Sequence
  Description of Artificial Sequence: Synthetic oligonucleotide
  modified_base (7)..(7): a, c, u, g, unknown or other
aaaaccnugagaugcaaga

SEQ ID NO: 2285427 - RNA, 19 nt, Artificial Sequence
  Description of Artificial Sequence: Synthetic oligonucleotide
auaacagugcuuuacaaag

SEQ ID NO: 2285428 - RNA, 19 nt, Artificial Sequence
  Description of Artificial Sequence: Synthetic oligonucleotide
uuauaaacaaccuucaaua

SEQ ID NO: 2285429 - RNA, 19 nt, Artificial Sequence
  Description of Artificial Sequence: Synthetic oligonucleotide
ugugacacauuacagaagc

SEQ ID NO: 2285430 - RNA, 19 nt, Artificial Sequence
  Description of Artificial Sequence: Synthetic oligonucleotide
ucgaacaaaaucaucagug

SEQ ID NO: 2285431 - RNA, 19 nt, Artificial Sequence
  Description of Artificial Sequence: Synthetic oligonucleotide
uuagauaauucaaaacugc

SEQ ID NO: 2285432 - RNA, 19 nt, Artificial Sequence
  Description of Artificial Sequence: Synthetic oligonucleotide
caucaaaugaggaagauuc

SEQ ID NO: 2285433 - RNA, 19 nt, Artificial Sequence
  Description of Artificial Sequence: Synthetic oligonucleotide
aaacaucauuuguugaucg

SEQ ID NO: 2285434 - RNA, 19 nt, Artificial Sequence
  Description of Artificial Sequence: Synthetic oligonucleotide
uuuacaaaggacauuuugu

SEQ ID NO: 2285435 - RNA, 19 nt, Artificial Sequence
  Description of Artificial Sequence: Synthetic oligonucleotide
acauuaaagaacauuauuc

SEQ ID NO: 2285436 - RNA, 19 nt, Artificial Sequence
  Description of Artificial Sequence: Synthetic oligonucleotide
acacaaauaguacaggauc

SEQ ID NO: 2285437 - RNA, 19 nt, Artificial Sequence
  Description of Artificial Sequence: Synthetic oligonucleotide
auuaaccguacuuuuauuc

SEQ ID NO: 2285438 - RNA, 19 nt, Artificial Sequence
  Description of Artificial Sequence: Synthetic oligonucleotide
acaaaugagaccucgaaca

SEQ ID NO: 2285439 - RNA, 19 nt, Artificial Sequence
  Description of Artificial Sequence: Synthetic oligonucleotide
acaauauuaaggccuuugc

SEQ ID NO: 2285440 - RNA, 19 nt, Artificial Sequence
  Description of Artificial Sequence: Synthetic oligonucleotide
aaauauaucucacaauguu

SEQ ID NO: 2285441 - RNA, 19 nt, Artificial Sequence
  Description of Artificial Sequence: Synthetic oligonucleotide
aauucuauguacaauauua

SEQ ID NO: 2285442 - RNA, 19 nt, Artificial Sequence
  Description of Artificial Sequence: Synthetic oligonucleotide
aaugcaaauguuuaauuuu

SEQ ID NO: 2285443 - RNA, 19 nt, Artificial Sequence
  Description of Artificial Sequence: Synthetic oligonucleotide
cauauaacuauaacagugc

SEQ ID NO: 2285444 - RNA, 19 nt, Artificial Sequence
  Description of Artificial Sequence: Synthetic oligonucleotide
agaucuguguauuaauuuc

SEQ ID NO: 2285445 - RNA, 19 nt, Artificial Sequence
  Description of Artificial Sequence: Synthetic oligonucleotide
ucuuuaucaaauuaaccgu

SEQ ID NO: 2285446 - RNA, 19 nt, Artificial Sequence
  Description of Artificial Sequence: Synthetic oligonucleotide
aaauagggcaacauuaaag

SEQ ID NO: 2285447 - RNA, 19 nt, Artificial Sequence
  Description of Artificial Sequence: Synthetic oligonucleotide
aacuauaacagugcuuuac

SEQ ID NO: 2285448 - RNA, 19 nt, Artificial Sequence
  Description of Artificial Sequence: Synthetic oligonucleotide
aacaucauuuguugaucgc

SEQ ID NO: 2285449 - RNA, 19 nt, Artificial Sequence
  Description of Artificial Sequence: Synthetic oligonucleotide
aaggauauuuucacaauac

SEQ ID NO: 2285450 - RNA, 19 nt, Artificial Sequence
  Description of Artificial Sequence: Synthetic oligonucleotide
uugcaaguaaaucuuagga

SEQ ID NO: 2285451 - RNA, 19 nt, Artificial Sequence
  Description of Artificial Sequence: Synthetic oligonucleotide
ucuuggauccaaaacaaga

SEQ ID NO: 2285452 - RNA, 19 nt, Artificial Sequence
  Description of Artificial Sequence: Synthetic oligonucleotide
uuugcaaguaaaucuuagg

SEQ ID NO: 2285453 - RNA, 19 nt, Artificial Sequence
  Description of Artificial Sequence: Synthetic oligonucleotide
uaaguauuauuccauuaug

SEQ ID NO: 2285454 - RNA, 19 nt, Artificial Sequence
  Description of Artificial Sequence: Synthetic oligonucleotide
auuaaagaacauuauucug

SEQ ID NO: 2285455 - RNA, 19 nt, Artificial Sequence
  Description of Artificial Sequence: Synthetic oligonucleotide
acauuacagaagcagcugc

SEQ ID NO: 2285456 - RNA, 19 nt, Artificial Sequence
  Description of Artificial Sequence: Synthetic oligonucleotide
uccuuuauacgaaagagau

SEQ ID NO: 2285457 - RNA, 19 nt, Artificial Sequence
  Description of Artificial Sequence: Synthetic oligonucleotide
uuauucaaaauaacauggc

SEQ ID NO: 2285458 - RNA, 19 nt, Artificial Sequence
  Description of Artificial Sequence: Synthetic oligonucleotide
aauaaauuauaaacaaccu

SEQ ID NO: 2285459 - RNA, 19 nt, Artificial Sequence
  Description of Artificial Sequence: Synthetic oligonucleotide
uguguauuaauuucuuuga

SEQ ID NO: 2285460 - RNA, 19 nt, Artificial Sequence
  Description of Artificial Sequence: Synthetic oligonucleotide
uuauuaagcagauucugcu

SEQ ID NO: 2285461 - RNA, 19 nt, Artificial Sequence
  Description of Artificial Sequence: Synthetic oligonucleotide
ugacaauuauuucuugucc

SEQ ID NO: 2285462 - RNA, 19 nt, Artificial Sequence
  Description of Artificial Sequence: Synthetic oligonucleotide
uguucuuuaucaaauuaac

SEQ ID NO: 2285463 - RNA, 19 nt, Artificial Sequence
  Description of Artificial Sequence: Synthetic oligonucleotide
aaggacauuuuguaaagga

SEQ ID NO: 2285464 - RNA, 19 nt, Artificial Sequence
  Description of Artificial Sequence: Synthetic oligonucleotide
acuuaacuaauacuaauga

SEQ ID NO: 2285465 - RNA, 19 nt, Artificial Sequence
  Description of Artificial Sequence: Synthetic oligonucleotide
aauauaucucacaauguug

SEQ ID NO: 2285466 - RNA, 19 nt, Artificial Sequence
  Description of Artificial Sequence: Synthetic oligonucleotide
uauacgaaagagaucuuca

SEQ ID NO: 2285467 - RNA, 19 nt, Artificial Sequence
  Description of Artificial Sequence: Synthetic oligonucleotide
cuuauuaagcagauucugc

SEQ ID NO: 2285468 - RNA, 19 nt, Artificial Sequence
  Description of Artificial Sequence: Synthetic oligonucleotide
aauuauuucuuguccauuu

SEQ ID NO: 2285469 - RNA, 19 nt, Artificial Sequence
  Description of Artificial Sequence: Synthetic oligonucleotide
aaacuuaacuaauacuaau

SEQ ID NO: 2285470 - RNA, 19 nt, Artificial Sequence
  Description of Artificial Sequence: Synthetic oligonucleotide
ucuuuagauaauucaaaac

SEQ ID NO: 2285471 - RNA, 19 nt, Artificial Sequence
  Description of Artificial Sequence: Synthetic oligonucleotide
aagaugggaugccagugac

SEQ ID NO: 2285472 - RNA, 19 nt, Artificial Sequence
  Description of Artificial Sequence: Synthetic oligonucleotide
uccaauggauuuuacuggg

SEQ ID NO: 2285473 - RNA, 19 nt, Artificial Sequence
  Description of Artificial Sequence: Synthetic oligonucleotide
ucaauauuuguacauuauc

SEQ ID NO: 2285474 - RNA, 19 nt, Artificial Sequence
  Description of Artificial Sequence: Synthetic oligonucleotide
gauccuuuauacgaaagag

SEQ ID NO: 2285475 - RNA, 19 nt, Artificial Sequence
  Description of Artificial Sequence: Synthetic oligonucleotide
acaaacggcguccaguaac

SEQ ID NO: 2285476 - RNA, 19 nt, Artificial Sequence
  Description of Artificial Sequence: Synthetic oligonucleotide
  modified_base (5)..(5): a, c, u, g, unknown or other
aaccnugagaugcaagaug

SEQ ID NO: 2285477 - RNA, 19 nt, Artificial Sequence
  Description of Artificial Sequence: Synthetic oligonucleotide
aacuuaacuaauacuaaug

SEQ ID NO: 2285478 - RNA, 19 nt, Artificial Sequence
  Description of Artificial Sequence: Synthetic oligonucleotide
augccuuaauucuauguac

SEQ ID NO: 2285479 - RNA, 19 nt, Artificial Sequence
  Description of Artificial Sequence: Synthetic oligonucleotide
acuaauacuaaugaaaaua

SEQ ID NO: 2285480 - RNA, 19 nt, Artificial Sequence
  Description of Artificial Sequence: Synthetic oligonucleotide
auaaauuauaaacaaccuu

SEQ ID NO: 2285481 - RNA, 19 nt, Artificial Sequence
  Description of Artificial Sequence: Synthetic oligonucleotide
auaacuauaacagugcuuu

SEQ ID NO: 2285482 - RNA, 19 nt, Artificial Sequence
  Description of Artificial Sequence: Synthetic oligonucleotide
uagggcaacauuaaagaac

SEQ ID NO: 2285483 - RNA, 19 nt, Artificial Sequence
  Description of Artificial Sequence: Synthetic oligonucleotide
uuuaucaaauuaaccguac

SEQ ID NO: 2285484 - RNA, 19 nt, Artificial Sequence
  Description of Artificial Sequence: Synthetic oligonucleotide
aaaauaacauggcuuuuaa

SEQ ID NO: 2285485 - RNA, 19 nt, Artificial Sequence
  Description of Artificial Sequence: Synthetic oligonucleotide
acaucauuuguugaucgcc

SEQ ID NO: 2285486 - RNA, 19 nt, Artificial Sequence
  Description of Artificial Sequence: Synthetic oligonucleotide
aaaggauauuuucacaaua

SEQ ID NO: 2285487 - RNA, 19 nt, Artificial Sequence
  Description of Artificial Sequence: Synthetic oligonucleotide
uccauuauguucuguuagg

SEQ ID NO: 2285488 - RNA, 19 nt, Artificial Sequence
  Description of Artificial Sequence: Synthetic oligonucleotide
aucuucauauaacuauaac

SEQ ID NO: 2285489 - RNA, 19 nt, Artificial Sequence
  Description of Artificial Sequence: Synthetic oligonucleotide
acauuucaucugcugagcc

SEQ ID NO: 2285490 - RNA, 19 nt, Artificial Sequence
  Description of Artificial Sequence: Synthetic oligonucleotide
cauguguaaguauuauucc

SEQ ID NO: 2285491 - RNA, 19 nt, Artificial Sequence
  Description of Artificial Sequence: Synthetic oligonucleotide
uguuaggcaccaaacaaac

SEQ ID NO: 2285492 - RNA, 19 nt, Artificial Sequence
  Description of Artificial Sequence: Synthetic oligonucleotide
uccaaaacaagaucugugu

SEQ ID NO: 2285493 - RNA, 19 nt, Artificial Sequence
  Description of Artificial Sequence: Synthetic oligonucleotide
  modified_base (4)..(4): a, c, u, g, unknown or other
accnugagaugcaagaugg

SEQ ID NO: 2285494 - RNA, 19 nt, Artificial Sequence
  Description of Artificial Sequence: Synthetic oligonucleotide
gauuucuuggauccaaaac

SEQ ID NO: 2285495 - RNA, 19 nt, Artificial Sequence
  Description of Artificial Sequence: Synthetic oligonucleotide
auuaagcagauucugcugu

SEQ ID NO: 2285496 - RNA, 19 nt, Artificial Sequence
  Description of Artificial Sequence: Synthetic oligonucleotide
aaauuauaaacaaccuuca

SEQ ID NO: 2285497 - RNA, 19 nt, Artificial Sequence
  Description of Artificial Sequence: Synthetic oligonucleotide
aaugauuugccuucucaau

SEQ ID NO: 2285498 - RNA, 19 nt, Artificial Sequence
  Description of Artificial Sequence: Synthetic oligonucleotide
ugacacauuacagaagcag

SEQ ID NO: 2285499 - RNA, 19 nt, Artificial Sequence
  Description of Artificial Sequence: Synthetic oligonucleotide
cuuaauucuauguacaaua

SEQ ID NO: 2285500 - RNA, 19 nt, Artificial Sequence
  Description of Artificial Sequence: Synthetic oligonucleotide
uaugccuuaauucuaugua

SEQ ID NO: 2285501 - RNA, 19 nt, Artificial Sequence
  Description of Artificial Sequence: Synthetic oligonucleotide
gugacaucaaaugaggaag

SEQ ID NO: 2285502 - RNA, 19 nt, Artificial Sequence
  Description of Artificial Sequence: Synthetic oligonucleotide
aaguauuauuccauuaugu

SEQ ID NO: 2285503 - RNA, 19 nt, Artificial Sequence
  Description of Artificial Sequence: Synthetic oligonucleotide
uuucuuggauccaaaacaa

SEQ ID NO: 2285504 - RNA, 19 nt, Artificial Sequence
  Description of Artificial Sequence: Synthetic oligonucleotide
cuuuauacgaaagagaucu

SEQ ID NO: 2285505 - RNA, 19 nt, Artificial Sequence
  Description of Artificial Sequence: Synthetic oligonucleotide
uguguaaguauuauuccau

SEQ ID NO: 2285506 - RNA, 19 nt, Artificial Sequence
  Description of Artificial Sequence: Synthetic oligonucleotide
gguauauuguucuuuauca

SEQ ID NO: 2285507 - RNA, 19 nt, Artificial Sequence
  Description of Artificial Sequence: Synthetic oligonucleotide
uauuaagcagauucugcug

SEQ ID NO: 2285508 - RNA, 19 nt, Artificial Sequence
  Description of Artificial Sequence: Synthetic oligonucleotide
uuauguucuguuaggcacc

SEQ ID NO: 2285509 - RNA, 19 nt, Artificial Sequence
  Description of Artificial Sequence: Synthetic oligonucleotide
cuaauacuaaugaaaauaa

SEQ ID NO: 2285510 - RNA, 19 nt, Artificial Sequence
  Description of Artificial Sequence: Synthetic oligonucleotide
uugagagguauauuguucu

SEQ ID NO: 2285511 - RNA, 19 nt, Artificial Sequence
  Description of Artificial Sequence: Synthetic oligonucleotide
uuuauaugccuuaauucua

SEQ ID NO: 2285512 - RNA, 19 nt, Artificial Sequence
  Description of Artificial Sequence: Synthetic oligonucleotide
uuuacugggagcuugcauu

SEQ ID NO: 2285513 - RNA, 19 nt, Artificial Sequence
  Description of Artificial Sequence: Synthetic oligonucleotide
uacaaaugagaccucgaac

SEQ ID NO: 2285514 - RNA, 19 nt, Artificial Sequence
  Description of Artificial Sequence: Synthetic oligonucleotide
aaaauagggcaacauuaaa

SEQ ID NO: 2285515 - RNA, 19 nt, Artificial Sequence
  Description of Artificial Sequence: Synthetic oligonucleotide
auauaacuauaacagugcu

SEQ ID NO: 2285516 - RNA, 19 nt, Artificial Sequence
  Description of Artificial Sequence: Synthetic oligonucleotide
acuauaacagugcuuuaca

SEQ ID NO: 2285517 - RNA, 19 nt, Artificial Sequence
  Description of Artificial Sequence: Synthetic oligonucleotide
gaacaaaaucaucaguguc

SEQ ID NO: 2285518 - RNA, 19 nt, Artificial Sequence
  Description of Artificial Sequence: Synthetic oligonucleotide
aguauuauuccauuauguu

SEQ ID NO: 2285519 - RNA, 19 nt, Artificial Sequence
  Description of Artificial Sequence: Synthetic oligonucleotide
ugcuuuauaugccuuaauu

SEQ ID NO: 2285520 - RNA, 19 nt, Artificial Sequence
  Description of Artificial Sequence: Synthetic oligonucleotide
cuuugcaaguaaaucuuag

SEQ ID NO: 2285521 - RNA, 19 nt, Artificial Sequence
  Description of Artificial Sequence: Synthetic oligonucleotide
auauaucucacaauguuga

SEQ ID NO: 2285522 - RNA, 19 nt, Artificial Sequence
  Description of Artificial Sequence: Synthetic oligonucleotide
uucuguuaggcaccaaaca

SEQ ID NO: 2285523 - RNA, 19 nt, Artificial Sequence
  Description of Artificial Sequence: Synthetic oligonucleotide
uuaucaaauuaaccguacu

SEQ ID NO: 2285524 - RNA, 19 nt, Artificial Sequence
  Description of Artificial Sequence: Synthetic oligonucleotide
uuauaugccuuaauucuau

SEQ ID NO: 2285525 - RNA, 19 nt, Artificial Sequence
  Description of Artificial Sequence: Synthetic oligonucleotide
uuucaaaacuuaacuaaua

SEQ ID NO: 2285526 - RNA, 19 nt, Artificial Sequence
  Description of Artificial Sequence: Synthetic oligonucleotide
auguguaaguauuauucca

SEQ ID NO: 2285527 - RNA, 19 nt, Artificial Sequence
  Description of Artificial Sequence: Synthetic oligonucleotide
agacacaaauaguacagga

SEQ ID NO: 2285528 - RNA, 19 nt, Artificial Sequence
  Description of Artificial Sequence: Synthetic oligonucleotide
gaggucuuuagauaauuca

SEQ ID NO: 2285529 - RNA, 19 nt, Artificial Sequence
  Description of Artificial Sequence: Synthetic oligonucleotide
uuguugaucgcccuuucac

SEQ ID NO: 2285530 - RNA, 19 nt, Artificial Sequence
  Description of Artificial Sequence: Synthetic oligonucleotide
aaaacuuaacuaauacuaa

SEQ ID NO: 2285531 - RNA, 19 nt, Artificial Sequence
  Description of Artificial Sequence: Synthetic oligonucleotide
ugccuuaauucuauguaca

SEQ ID NO: 2285532 - RNA, 19 nt, Artificial Sequence
  Description of Artificial Sequence: Synthetic oligonucleotide
gaagauucauaucuccuga

SEQ ID NO: 2285533 - RNA, 19 nt, Artificial Sequence
  Description of Artificial Sequence: Synthetic oligonucleotide
cuuuauaugccuuaauucu

SEQ ID NO: 2285534 - RNA, 19 nt, Artificial Sequence
  Description of Artificial Sequence: Synthetic oligonucleotide
ucaaauuaaccguacuuuu

SEQ ID NO: 2285535 - RNA, 19 nt, Artificial Sequence
  Description of Artificial Sequence: Synthetic oligonucleotide
aacaaccuucaauauuugu

SEQ ID NO: 2285536 - RNA, 19 nt, Artificial Sequence
  Description of Artificial Sequence: Synthetic oligonucleotide
cauggaaugauuugccuuc

SEQ ID NO: 2285537 - RNA, 19 nt, Artificial Sequence
  Description of Artificial Sequence: Synthetic oligonucleotide
agugacaucaaaugaggaa

SEQ ID NO: 2285538 - RNA, 19 nt, Artificial Sequence
  Description of Artificial Sequence: Synthetic oligonucleotide
cucuugagcccaucgaacg

SEQ ID NO: 2285539 - RNA, 19 nt, Artificial Sequence
  Description of Artificial Sequence: Synthetic oligonucleotide
caucauuuguugaucgccc

SEQ ID NO: 2285540 - RNA, 19 nt, Artificial Sequence
  Description of Artificial Sequence: Synthetic oligonucleotide
caauggauuuuacugggag

SEQ ID NO: 2285541 - RNA, 19 nt, Artificial Sequence
  Description of Artificial Sequence: Synthetic oligonucleotide
caacaaguucuuuucacac

SEQ ID NO: 2285542 - RNA, 19 nt, Artificial Sequence
  Description of Artificial Sequence: Synthetic oligonucleotide
uacaauauuaaggccuuug

SEQ ID NO: 2285543 - RNA, 19 nt, Artificial Sequence
  Description of Artificial Sequence: Synthetic oligonucleotide
gacacauuacagaagcagc

SEQ ID NO: 2285544 - RNA, 19 nt, Artificial Sequence
  Description of Artificial Sequence: Synthetic oligonucleotide
auaaacaaccuucaauauu

SEQ ID NO: 2285545 - RNA, 19 nt, Artificial Sequence
  Description of Artificial Sequence: Synthetic oligonucleotide
aauucaaaacugcuuuaua

SEQ ID NO: 2285546 - RNA, 19 nt, Artificial Sequence
  Description of Artificial Sequence: Synthetic oligonucleotide
ucuuuucacacauuucauc

SEQ ID NO: 2285547 - RNA, 19 nt, Artificial Sequence
  Description of Artificial Sequence: Synthetic oligonucleotide
uucucaauccaauggauuu

SEQ ID NO: 2285548 - RNA, 19 nt, Artificial Sequence
  Description of Artificial Sequence: Synthetic oligonucleotide
uaacauggcuuuuaaugac

SEQ ID NO: 2285549 - RNA, 19 nt, Artificial Sequence
  Description of Artificial Sequence: Synthetic oligonucleotide
caauauuuguacauuaucu

SEQ ID NO: 2285550 - RNA, 19 nt, Artificial Sequence
  Description of Artificial Sequence: Synthetic oligonucleotide
acuuauuaagcagauucug

SEQ ID NO: 2285551 - RNA, 19 nt, Artificial Sequence
  Description of Artificial Sequence: Synthetic oligonucleotide
auaugccuuaauucuaugu

SEQ ID NO: 2285552 - RNA, 19 nt, Artificial Sequence
  Description of Artificial Sequence: Synthetic oligonucleotide
augccagugacaucaaaug

SEQ ID NO: 2285553 - RNA, 19 nt, Artificial Sequence
  Description of Artificial Sequence: Synthetic oligonucleotide
uaucuucauauaacuauaa

SEQ ID NO: 2285554 - RNA, 19 nt, Artificial Sequence
  Description of Artificial Sequence: Synthetic oligonucleotide
uacgaaagagaucuucauc

SEQ ID NO: 2285555 - RNA, 19 nt, Artificial Sequence
  Description of Artificial Sequence: Synthetic oligonucleotide
uaggcaccaaacaaacggc

SEQ ID NO: 2285556 - RNA, 19 nt, Artificial Sequence
  Description of Artificial Sequence: Synthetic oligonucleotide
uguacaauauuaaggccuu

SEQ ID NO: 2285557 - RNA, 19 nt, Artificial Sequence
  Description of Artificial Sequence: Synthetic oligonucleotide
aaauaacauggcuuuuaau

SEQ ID NO: 2285558 - RNA, 19 nt, Artificial Sequence
  Description of Artificial Sequence: Synthetic oligonucleotide
aacuuauuaagcagauucu

SEQ ID NO: 2285559 - RNA, 19 nt, Artificial Sequence
  Description of Artificial Sequence: Synthetic oligonucleotide
uacaaaggacauuuuguaa

SEQ ID NO: 2285560 - RNA, 19 nt, Artificial Sequence
  Description of Artificial Sequence: Synthetic oligonucleotide
uuacagaagcagcugcucu

SEQ ID NO: 2285561 - RNA, 19 nt, Artificial Sequence
  Description of Artificial Sequence: Synthetic oligonucleotide
uuguauucuccugaggucu

SEQ ID NO: 2285562 - RNA, 19 nt, Artificial Sequence
  Description of Artificial Sequence: Synthetic oligonucleotide
acaaaaugcaaauguuuaa

SEQ ID NO: 2285563 - RNA, 19 nt, Artificial Sequence
  Description of Artificial Sequence: Synthetic oligonucleotide
cauuaaagaacauuauucu

SEQ ID NO: 2285564 - RNA, 19 nt, Artificial Sequence
  Description of Artificial Sequence: Synthetic oligonucleotide
uuauacgaaagagaucuuc

SEQ ID NO: 2285565 - RNA, 19 nt, Artificial Sequence
  Description of Artificial Sequence: Synthetic oligonucleotide
uauuaaggccuuugcaagu

SEQ ID NO: 2285566 - RNA, 19 nt, Artificial Sequence
  Description of Artificial Sequence: Synthetic oligonucleotide
agaacauuauucugaaaua

SEQ ID NO: 2285567 - RNA, 19 nt, Artificial Sequence
  Description of Artificial Sequence: Synthetic oligonucleotide
uguacauuaucuucauaua

SEQ ID NO: 2285568 - RNA, 19 nt, Artificial Sequence
  Description of Artificial Sequence: Synthetic oligonucleotide
ugccagugacaucaaauga

SEQ ID NO: 2285569 - RNA, 19 nt, Artificial Sequence
  Description of Artificial Sequence: Synthetic oligonucleotide
guuuguauucuccugaggu

SEQ ID NO: 2285570 - RNA, 19 nt, Artificial Sequence
  Description of Artificial Sequence: Synthetic oligonucleotide
agcccaucgaacgaccucc

SEQ ID NO: 2285571 - RNA, 19 nt, Artificial Sequence
  Description of Artificial Sequence: Synthetic oligonucleotide
ccauguguaaguauuauuc

SEQ ID NO: 2285572 - RNA, 19 nt, Artificial Sequence
  Description of Artificial Sequence: Synthetic oligonucleotide
uccugaggucuuuagauaa

SEQ ID NO: 2285573 - RNA, 19 nt, Artificial Sequence
  Description of Artificial Sequence: Synthetic oligonucleotide
uaaaggauauuuucacaau

SEQ ID NO: 2285574 - RNA, 19 nt, Artificial Sequence
  Description of Artificial Sequence: Synthetic oligonucleotide
guacauuaucuucauauaa

SEQ ID NO: 2285575 - RNA, 19 nt, Artificial Sequence
  Description of Artificial Sequence: Synthetic oligonucleotide
gguaagaaauacaaaugag

SEQ ID NO: 2285576 - RNA, 19 nt, Artificial Sequence
  Description of Artificial Sequence: Synthetic oligonucleotide
gaaugauuugccuucucaa

SEQ ID NO: 2285577 - RNA, 19 nt, Artificial Sequence
  Description of Artificial Sequence: Synthetic oligonucleotide
guugaucgcccuuucacug

SEQ ID NO: 2285578 - RNA, 19 nt, Artificial Sequence
  Description of Artificial Sequence: Synthetic oligonucleotide
uguugaucgcccuuucacu

SEQ ID NO: 2285579 - RNA, 19 nt, Artificial Sequence
  Description of Artificial Sequence: Synthetic oligonucleotide
ugccauggaaugauuugcc

SEQ ID NO: 2285580 - RNA, 19 nt, Artificial Sequence
  Description of Artificial Sequence: Synthetic oligonucleotide
aagagaucuucaucucuga

SEQ ID NO: 2285581 - RNA, 19 nt, Artificial Sequence
  Description of Artificial Sequence: Synthetic oligonucleotide
aucaaauuaaccguacuuu

SEQ ID NO: 2285582 - RNA, 19 nt, Artificial Sequence
  Description of Artificial Sequence: Synthetic oligonucleotide
acaauuauuucuuguccau

SEQ ID NO: 2285583 - RNA, 19 nt, Artificial Sequence
  Description of Artificial Sequence: Synthetic oligonucleotide
aauuaaccguacuuuuauu

SEQ ID NO: 2285584 - RNA, 19 nt, Artificial Sequence
  Description of Artificial Sequence: Synthetic oligonucleotide
auggcuuuuaaugacaauu

SEQ ID NO: 2285585 - RNA, 19 nt, Artificial Sequence
  Description of Artificial Sequence: Synthetic oligonucleotide
gcuuuauaugccuuaauuc

SEQ ID NO: 2285586 - RNA, 19 nt, Artificial Sequence
  Description of Artificial Sequence: Synthetic oligonucleotide
ucaaaugaggaagauucau

SEQ ID NO: 2285587 - RNA, 19 nt, Artificial Sequence
  Description of Artificial Sequence: Synthetic oligonucleotide
uaguacaggauccuuuaua

SEQ ID NO: 2285588 - RNA, 19 nt, Artificial Sequence
  Description of Artificial Sequence: Synthetic oligonucleotide
aauacaaaugagaccucga

SEQ ID NO: 2285589 - RNA, 19 nt, Artificial Sequence
  Description of Artificial Sequence: Synthetic oligonucleotide
auuacagaagcagcugcuc

SEQ ID NO: 2285590 - RNA, 19 nt, Artificial Sequence
  Description of Artificial Sequence: Synthetic oligonucleotide
uuaagcagauucugcugug

SEQ ID NO: 2285591 - RNA, 19 nt, Artificial Sequence
  Description of Artificial Sequence: Synthetic oligonucleotide
cuuucacugccauggaaug

SEQ ID NO: 2285592 - RNA, 19 nt, Artificial Sequence
  Description of Artificial Sequence: Synthetic oligonucleotide
ugcuccauguguaaguauu

SEQ ID NO: 2285593 - RNA, 19 nt, Artificial Sequence
  Description of Artificial Sequence: Synthetic oligonucleotide
auauuguucuuuaucaaau

SEQ ID NO: 2285594 - RNA, 19 nt, Artificial Sequence
  Description of Artificial Sequence: Synthetic oligonucleotide
aagauucauaucuccugau

SEQ ID NO: 2285595 - RNA, 19 nt, Artificial Sequence
  Description of Artificial Sequence: Synthetic oligonucleotide
ugaggucuuuagauaauuc

SEQ ID NO: 2285596 - RNA, 19 nt, Artificial Sequence
  Description of Artificial Sequence: Synthetic oligonucleotide
ucaucagugucaucuggcu

SEQ ID NO: 2285597 - RNA, 19 nt, Artificial Sequence
  Description of Artificial Sequence: Synthetic oligonucleotide
cacaauaccauguuucaaa

SEQ ID NO: 2285598 - RNA, 19 nt, Artificial Sequence
  Description of Artificial Sequence: Synthetic oligonucleotide
caucgaacgaccuccaaga

SEQ ID NO: 2285599 - RNA, 19 nt, Artificial Sequence
  Description of Artificial Sequence: Synthetic oligonucleotide
caauauuaaggccuuugca

SEQ ID NO: 2285600 - RNA, 19 nt, Artificial Sequence
  Description of Artificial Sequence: Synthetic oligonucleotide
aaauaguacaggauccuuu

SEQ ID NO: 2285601 - RNA, 19 nt, Artificial Sequence
  Description of Artificial Sequence: Synthetic oligonucleotide
ugcucuugagcccaucgaa

SEQ ID NO: 2285602 - RNA, 19 nt, Artificial Sequence
  Description of Artificial Sequence: Synthetic oligonucleotide
uauaugccuuaauucuaug

SEQ ID NO: 2285603 - RNA, 19 nt, Artificial Sequence
  Description of Artificial Sequence: Synthetic oligonucleotide
uauuguucuuuaucaaauu

SEQ ID NO: 2285604 - RNA, 19 nt, Artificial Sequence
  Description of Artificial Sequence: Synthetic oligonucleotide
uaaccguacuuuuauucaa

SEQ ID NO: 2285605 - RNA, 19 nt, Artificial Sequence
  Description of Artificial Sequence: Synthetic oligonucleotide
gauucugcugugaaacgug

SEQ ID NO: 2285606 - RNA, 19 nt, Artificial Sequence
  Description of Artificial Sequence: Synthetic oligonucleotide
ucuugagcccaucgaacga

SEQ ID NO: 2285607 - RNA, 19 nt, Artificial Sequence
  Description of Artificial Sequence: Synthetic oligonucleotide
acaagaucuguguauuaau

SEQ ID NO: 2285608 - RNA, 19 nt, Artificial Sequence
  Description of Artificial Sequence: Synthetic oligonucleotide
cuuuaucaaauuaaccgua

SEQ ID NO: 2285609 - RNA, 19 nt, Artificial Sequence
  Description of Artificial Sequence: Synthetic oligonucleotide
aaagaacauuauucugaaa

SEQ ID NO: 2285610 - RNA, 19 nt, Artificial Sequence
  Description of Artificial Sequence: Synthetic oligonucleotide
uuucagugauuucuuggau

SEQ ID NO: 2285611 - RNA, 19 nt, Artificial Sequence
  Description of Artificial Sequence: Synthetic oligonucleotide
caguaacuuauuaagcaga

SEQ ID NO: 2285612 - RNA, 19 nt, Artificial Sequence
  Description of Artificial Sequence: Synthetic oligonucleotide
agaugcaagaugggaugcc

SEQ ID NO: 2285613 - RNA, 19 nt, Artificial Sequence
  Description of Artificial Sequence: Synthetic oligonucleotide
ccagacacaaauaguacag

SEQ ID NO: 2285614 - RNA, 19 nt, Artificial Sequence
  Description of Artificial Sequence: Synthetic oligonucleotide
aguaaaucuuaggacaaaa

SEQ ID NO: 2285615 - RNA, 19 nt, Artificial Sequence
  Description of Artificial Sequence: Synthetic oligonucleotide
auagggcaacauuaaagaa

SEQ ID NO: 2285616 - RNA, 19 nt, Artificial Sequence
  Description of Artificial Sequence: Synthetic oligonucleotide
aguucuuuucacacauuuc

SEQ ID NO: 2285617 - RNA, 19 nt, Artificial Sequence
  Description of Artificial Sequence: Synthetic oligonucleotide
auaucucacaauguugaga

SEQ ID NO: 2285618 - RNA, 19 nt, Artificial Sequence
  Description of Artificial Sequence: Synthetic oligonucleotide
uaucuccugaugcuccaug

SEQ ID NO: 2285619 - RNA, 19 nt, Artificial Sequence
  Description of Artificial Sequence: Synthetic oligonucleotide
acaccagcaaguuuguauu

SEQ ID NO: 2285620 - RNA, 19 nt, Artificial Sequence
  Description of Artificial Sequence: Synthetic oligonucleotide
ucgaacgaccuccaagaaa

SEQ ID NO: 2285621 - RNA, 19 nt, Artificial Sequence
  Description of Artificial Sequence: Synthetic oligonucleotide
cagcaaguuuguauucucc

SEQ ID NO: 2285622 - RNA, 19 nt, Artificial Sequence
  Description of Artificial Sequence: Synthetic oligonucleotide
ugaucgcccuuucacugcc

SEQ ID NO: 2285623 - RNA, 19 nt, Artificial Sequence
  Description of Artificial Sequence: Synthetic oligonucleotide
auuauuccauuauguucug

SEQ ID NO: 2285624 - RNA, 19 nt, Artificial Sequence
  Description of Artificial Sequence: Synthetic oligonucleotide
  modified_base (6)..(6): a, c, u, g, unknown or other
aaaccnugagaugcaagau

SEQ ID NO: 2285625 - RNA, 19 nt, Artificial Sequence
  Description of Artificial Sequence: Synthetic oligonucleotide
cauuauguucuguuaggca

SEQ ID NO: 2285626 - RNA, 19 nt, Artificial Sequence
  Description of Artificial Sequence: Synthetic oligonucleotide
aaacaagaucuguguauua

SEQ ID NO: 2285627 - RNA, 19 nt, Artificial Sequence
  Description of Artificial Sequence: Synthetic oligonucleotide
ugcaagaugggaugccagu

SEQ ID NO: 2285628 - RNA, 19 nt, Artificial Sequence
  Description of Artificial Sequence: Synthetic oligonucleotide
auccaaaacaagaucugug

SEQ ID NO: 2285629 - RNA, 19 nt, Artificial Sequence
  Description of Artificial Sequence: Synthetic oligonucleotide
uugaucgcccuuucacugc

SEQ ID NO: 2285630 - RNA, 19 nt, Artificial Sequence
  Description of Artificial Sequence: Synthetic oligonucleotide
caaguaaaucuuaggacaa

SEQ ID NO: 2285631 - RNA, 19 nt, Artificial Sequence
  Description of Artificial Sequence: Synthetic oligonucleotide
aaaugagaccucgaacaaa

SEQ ID NO: 2285632 - RNA, 19 nt, Artificial Sequence
  Description of Artificial Sequence: Synthetic oligonucleotide
guauauuguucuuuaucaa

SEQ ID NO: 2285633 - RNA, 19 nt, Artificial Sequence
  Description of Artificial Sequence: Synthetic oligonucleotide
auuccauuauguucuguua

SEQ ID NO: 2285634 - RNA, 19 nt, Artificial Sequence
  Description of Artificial Sequence: Synthetic oligonucleotide
ucaauccaauggauuuuac

SEQ ID NO: 2285635 - RNA, 19 nt, Artificial Sequence
  Description of Artificial Sequence: Synthetic oligonucleotide
aucauuuguugaucgcccu

SEQ ID NO: 2285636 - RNA, 19 nt, Artificial Sequence
  Description of Artificial Sequence: Synthetic oligonucleotide
agccagacacaaauaguac

SEQ ID NO: 2285637 - RNA, 19 nt, Artificial Sequence
  Description of Artificial Sequence: Synthetic oligonucleotide
agauucugcugugaaacgu

SEQ ID NO: 2285638 - RNA, 19 nt, Artificial Sequence
  Description of Artificial Sequence: Synthetic oligonucleotide
agugcuuuacaaaggacau

SEQ ID NO: 2285639 - RNA, 19 nt, Artificial Sequence
  Description of Artificial Sequence: Synthetic oligonucleotide
cagacacaaauaguacagg

SEQ ID NO: 2285640 - RNA, 19 nt, Artificial Sequence
  Description of Artificial Sequence: Synthetic oligonucleotide
aguaacuuauuaagcagau

SEQ ID NO: 2285641 - RNA, 19 nt, Artificial Sequence
  Description of Artificial Sequence: Synthetic oligonucleotide
uccauguguaaguauuauu

SEQ ID NO: 2285642 - RNA, 19 nt, Artificial Sequence
  Description of Artificial Sequence: Synthetic oligonucleotide
aaacaaccuucaauauuug

SEQ ID NO: 2285643 - RNA, 19 nt, Artificial Sequence
  Description of Artificial Sequence: Synthetic oligonucleotide
guuaggcaccaaacaaacg

SEQ ID NO: 2285644 - RNA, 19 nt, Artificial Sequence
  Description of Artificial Sequence: Synthetic oligonucleotide
uuuggauggugcagugggu

SEQ ID NO: 2285645 - RNA, 19 nt, Artificial Sequence
  Description of Artificial Sequence: Synthetic oligonucleotide
uugagcccaucgaacgacc

SEQ ID NO: 2285646 - RNA, 19 nt, Artificial Sequence
  Description of Artificial Sequence: Synthetic oligonucleotide
uuuguacauuaucuucaua

SEQ ID NO: 2285647 - RNA, 19 nt, Artificial Sequence
  Description of Artificial Sequence: Synthetic oligonucleotide
aggucuuuagauaauucaa

SEQ ID NO: 2285648 - RNA, 19 nt, Artificial Sequence
  Description of Artificial Sequence: Synthetic oligonucleotide
auucuauguacaauauuaa

SEQ ID NO: 2285649 - RNA, 19 nt, Artificial Sequence
  Description of Artificial Sequence: Synthetic oligonucleotide
gaacauuauucugaaauau

SEQ ID NO: 2285650 - RNA, 19 nt, Artificial Sequence
  Description of Artificial Sequence: Synthetic oligonucleotide
aucucacaauguugagagg

SEQ ID NO: 2285651 - RNA, 19 nt, Artificial Sequence
  Description of Artificial Sequence: Synthetic oligonucleotide
aacggcguccaguaacuua

SEQ ID NO: 2285652 - RNA, 19 nt, Artificial Sequence
  Description of Artificial Sequence: Synthetic oligonucleotide
  modified_base (2)..(2): a, c, u, g, unknown or other
cnugagaugcaagauggga

SEQ ID NO: 2285653 - RNA, 19 nt, Artificial Sequence
  Description of Artificial Sequence: Synthetic oligonucleotide
gacauuuuguaaaggauau

SEQ ID NO: 2285654 - RNA, 19 nt, Artificial Sequence
  Description of Artificial Sequence: Synthetic oligonucleotide
uauguucuguuaggcacca

SEQ ID NO: 2285655 - RNA, 19 nt, Artificial Sequence
  Description of Artificial Sequence: Synthetic oligonucleotide
uccugaugcuccaugugua

SEQ ID NO: 2285656 - RNA, 19 nt, Artificial Sequence
  Description of Artificial Sequence: Synthetic oligonucleotide
uuaaggccuuugcaaguaa

SEQ ID NO: 2285657 - RNA, 19 nt, Artificial Sequence
  Description of Artificial Sequence: Synthetic oligonucleotide
ggaaugauuugccuucuca

SEQ ID NO: 2285658 - RNA, 19 nt, Artificial Sequence
  Description of Artificial Sequence: Synthetic oligonucleotide
cacauuucaucugcugagc

SEQ ID NO: 2285659 - RNA, 19 nt, Artificial Sequence
  Description of Artificial Sequence: Synthetic oligonucleotide
guucuguuaggcaccaaac

SEQ ID NO: 2285660 - RNA, 19 nt, Artificial Sequence
  Description of Artificial Sequence: Synthetic oligonucleotide
caaaacaagaucuguguau

SEQ ID NO: 2285661 - RNA, 19 nt, Artificial Sequence
  Description of Artificial Sequence: Synthetic oligonucleotide
aaguaaaucuuaggacaaa

SEQ ID NO: 2285662 - RNA, 19 nt, Artificial Sequence
  Description of Artificial Sequence: Synthetic oligonucleotide
ugggagcuugcauuuucug

SEQ ID NO: 2285663 - RNA, 19 nt, Artificial Sequence
  Description of Artificial Sequence: Synthetic oligonucleotide
uuacugggagcuugcauuu

SEQ ID NO: 2285664 - RNA, 19 nt, Artificial Sequence
  Description of Artificial Sequence: Synthetic oligonucleotide
ucauuuguugaucgcccuu

SEQ ID NO: 2285665 - RNA, 19 nt, Artificial Sequence
  Description of Artificial Sequence: Synthetic oligonucleotide
aggcaccaaacaaacggcg

SEQ ID NO: 2285666 - RNA, 19 nt, Artificial Sequence
  Description of Artificial Sequence: Synthetic oligonucleotide
gaucuguguauuaauuucu

SEQ ID NO: 2285667 - RNA, 19 nt, Artificial Sequence
  Description of Artificial Sequence: Synthetic oligonucleotide
uaagcagauucugcuguga

SEQ ID NO: 2285668 - RNA, 19 nt, Artificial Sequence
  Description of Artificial Sequence: Synthetic oligonucleotide
ucacaauguugagagguau

SEQ ID NO: 2285669 - RNA, 19 nt, Artificial Sequence
  Description of Artificial Sequence: Synthetic oligonucleotide
accguacuuuuauucaaaa

SEQ ID NO: 2285670 - RNA, 19 nt, Artificial Sequence
  Description of Artificial Sequence: Synthetic oligonucleotide
cuugagcccaucgaacgac

SEQ ID NO: 2285671 - RNA, 19 nt, Artificial Sequence
  Description of Artificial Sequence: Synthetic oligonucleotide
auaguacaggauccuuuau

SEQ ID NO: 2285672 - RNA, 19 nt, Artificial Sequence
  Description of Artificial Sequence: Synthetic oligonucleotide
agcagauucugcugugaaa

SEQ ID NO: 2285673 - RNA, 19 nt, Artificial Sequence
  Description of Artificial Sequence: Synthetic oligonucleotide
ugagcccaucgaacgaccu

SEQ ID NO: 2285674 - RNA, 19 nt, Artificial Sequence
  Description of Artificial Sequence: Synthetic oligonucleotide
aaccguacuuuuauucaaa

SEQ ID NO: 2285675 - RNA, 19 nt, Artificial Sequence
  Description of Artificial Sequence: Synthetic oligonucleotide
ucuggcucagugugacaca

SEQ ID NO: 2285676 - RNA, 19 nt, Artificial Sequence
  Description of Artificial Sequence: Synthetic oligonucleotide
uguauucuccugaggucuu

SEQ ID NO: 2285677 - RNA, 19 nt, Artificial Sequence
  Description of Artificial Sequence: Synthetic oligonucleotide
uggugcaguggguaagaaa

SEQ ID NO: 2285678 - RNA, 19 nt, Artificial Sequence
  Description of Artificial Sequence: Synthetic oligonucleotide
ugagagguauauuguucuu

SEQ ID NO: 2285679 - RNA, 19 nt, Artificial Sequence
  Description of Artificial Sequence: Synthetic oligonucleotide
acaucaaaugaggaagauu

SEQ ID NO: 2285680 - RNA, 19 nt, Artificial Sequence
  Description of Artificial Sequence: Synthetic oligonucleotide
gcugcucuugagcccaucg

SEQ ID NO: 2285681 - RNA, 19 nt, Artificial Sequence
  Description of Artificial Sequence: Synthetic oligonucleotide
auuaaggccuuugcaagua

SEQ ID NO: 2285682 - RNA, 19 nt, Artificial Sequence
  Description of Artificial Sequence: Synthetic oligonucleotide
caaaugagaccucgaacaa

SEQ ID NO: 2285683 - RNA, 19 nt, Artificial Sequence
  Description of Artificial Sequence: Synthetic oligonucleotide
caagaugggaugccaguga

SEQ ID NO: 2285684 - RNA, 19 nt, Artificial Sequence
  Description of Artificial Sequence: Synthetic oligonucleotide
cugaugcuccauguguaag

SEQ ID NO: 2285685 - RNA, 19 nt, Artificial Sequence
  Description of Artificial Sequence: Synthetic oligonucleotide
ggauccaaaacaagaucug

SEQ ID NO: 2285686 - RNA, 19 nt, Artificial Sequence
  Description of Artificial Sequence: Synthetic oligonucleotide
uaacuauaacagugcuuua

SEQ ID NO: 2285687 - RNA, 19 nt, Artificial Sequence
  Description of Artificial Sequence: Synthetic oligonucleotide
gugugacacauuacagaag

SEQ ID NO: 2285688 - RNA, 19 nt, Artificial Sequence
  Description of Artificial Sequence: Synthetic oligonucleotide
gacacaaauaguacaggau

SEQ ID NO: 2285689 - RNA, 19 nt, Artificial Sequence
  Description of Artificial Sequence: Synthetic oligonucleotide
caauccaauggauuuuacu

SEQ ID NO: 2285690 - RNA, 19 nt, Artificial Sequence
  Description of Artificial Sequence: Synthetic oligonucleotide
aguggguaagaaauacaaa

SEQ ID NO: 2285691 - RNA, 19 nt, Artificial Sequence
  Description of Artificial Sequence: Synthetic oligonucleotide
uugcauuuucugugccacu

SEQ ID NO: 2285692 - RNA, 19 nt, Artificial Sequence
  Description of Artificial Sequence: Synthetic oligonucleotide
ccauuauguucuguuaggc

SEQ ID NO: 2285693 - RNA, 19 nt, Artificial Sequence
  Description of Artificial Sequence: Synthetic oligonucleotide
cagugacaucaaaugagga

SEQ ID NO: 2285694 - RNA, 19 nt, Artificial Sequence
  Description of Artificial Sequence: Synthetic oligonucleotide
ccaucgaacgaccuccaag

SEQ ID NO: 2285695 - RNA, 19 nt, Artificial Sequence
  Description of Artificial Sequence: Synthetic oligonucleotide
ggugcaguggguaagaaau

SEQ ID NO: 2285696 - RNA, 19 nt, Artificial Sequence
  Description of Artificial Sequence: Synthetic oligonucleotide
cauaucuccugaugcucca

SEQ ID NO: 2285697 - RNA, 19 nt, Artificial Sequence
  Description of Artificial Sequence: Synthetic oligonucleotide
cgaacgaccuccaagaaaa

SEQ ID NO: 2285698 - RNA, 19 nt, Artificial Sequence
  Description of Artificial Sequence: Synthetic oligonucleotide
gaugcuccauguguaagua

SEQ ID NO: 2285699 - RNA, 19 nt, Artificial Sequence
  Description of Artificial Sequence: Synthetic oligonucleotide
acggcguccaguaacuuau

SEQ ID NO: 2285700 - RNA, 19 nt, Artificial Sequence
  Description of Artificial Sequence: Synthetic oligonucleotide
ggucuuuagauaauucaaa

SEQ ID NO: 2285701 - RNA, 19 nt, Artificial Sequence
  Description of Artificial Sequence: Synthetic oligonucleotide
cauuacagaagcagcugcu

SEQ ID NO: 2285702 - RNA, 19 nt, Artificial Sequence
  Description of Artificial Sequence: Synthetic oligonucleotide
gccuucucaauccaaugga

SEQ ID NO: 2285703 - RNA, 19 nt, Artificial Sequence
  Description of Artificial Sequence: Synthetic oligonucleotide
acauggcuuuuaaugacaa

SEQ ID NO: 2285704 - RNA, 19 nt, Artificial Sequence
  Description of Artificial Sequence: Synthetic oligonucleotide
aucgaacgaccuccaagaa

SEQ ID NO: 2285705 - RNA, 19 nt, Artificial Sequence
  Description of Artificial Sequence: Synthetic oligonucleotide
caagaucuguguauuaauu

SEQ ID NO: 2285706 - RNA, 19 nt, Artificial Sequence
  Description of Artificial Sequence: Synthetic oligonucleotide
ccuuuauacgaaagagauc

SEQ ID NO: 2285707 - RNA, 19 nt, Artificial Sequence
  Description of Artificial Sequence: Synthetic oligonucleotide
ggcucagugugacacauua

SEQ ID NO: 2285708 - RNA, 19 nt, Artificial Sequence
  Description of Artificial Sequence: Synthetic oligonucleotide
gcaagaugggaugccagug

SEQ ID NO: 2285709 - RNA, 19 nt, Artificial Sequence
  Description of Artificial Sequence: Synthetic oligonucleotide
  modified_base (3)..(3): a, c, u, g, unknown or other
ccnugagaugcaagauggg

SEQ ID NO: 2285710 - RNA, 19 nt, Artificial Sequence
  Description of Artificial Sequence: Synthetic oligonucleotide
gagcccaucgaacgaccuc

SEQ ID NO: 2285711 - RNA, 19 nt, Artificial Sequence
  Description of Artificial Sequence: Synthetic oligonucleotide
gccacuuucuccaacaagu

SEQ ID NO: 2285712 - RNA, 19 nt, Artificial Sequence
  Description of Artificial Sequence: Synthetic oligonucleotide
uauucuccugaggucuuua

SEQ ID NO: 2285713 - RNA, 19 nt, Artificial Sequence
  Description of Artificial Sequence: Synthetic oligonucleotide
aucgcccuuucacugccau

SEQ ID NO: 2285714 - RNA, 19 nt, Artificial Sequence
  Description of Artificial Sequence: Synthetic oligonucleotide
caaacggcguccaguaacu

SEQ ID NO: 2285715 - RNA, 19 nt, Artificial Sequence
  Description of Artificial Sequence: Synthetic oligonucleotide
gagguauauuguucuuuau

SEQ ID NO: 2285716 - RNA, 19 nt, Artificial Sequence
  Description of Artificial Sequence: Synthetic oligonucleotide
gcguccaguaacuuauuaa

SEQ ID NO: 2285717 - RNA, 19 nt, Artificial Sequence
  Description of Artificial Sequence: Synthetic oligonucleotide
gccuuaauucuauguacaa

SEQ ID NO: 2285718 - RNA, 19 nt, Artificial Sequence
  Description of Artificial Sequence: Synthetic oligonucleotide
ccagcaaguuuguauucuc

SEQ ID NO: 2285719 - RNA, 19 nt, Artificial Sequence
  Description of Artificial Sequence: Synthetic oligonucleotide
gagagguauauuguucuuu

SEQ ID NO: 2285720 - RNA, 19 nt, Artificial Sequence
  Description of Artificial Sequence: Synthetic oligonucleotide
uggauuuuacugggagcuu

SEQ ID NO: 2285721 - RNA, 19 nt, Artificial Sequence
  Description of Artificial Sequence: Synthetic oligonucleotide
agaugggaugccagugaca

SEQ ID NO: 2285722 - RNA, 19 nt, Artificial Sequence
  Description of Artificial Sequence: Synthetic oligonucleotide
cugugccacuuucuccaac

SEQ ID NO: 2285723 - RNA, 19 nt, Artificial Sequence
  Description of Artificial Sequence: Synthetic oligonucleotide
gacaucaaaugaggaagau

SEQ ID NO: 2285724 - RNA, 19 nt, Artificial Sequence
  Description of Artificial Sequence: Synthetic oligonucleotide
cugcucuugagcccaucga

SEQ ID NO: 2285725 - RNA, 19 nt, Artificial Sequence
  Description of Artificial Sequence: Synthetic oligonucleotide
gugacacauuacagaagca

SEQ ID NO: 2285726 - RNA, 19 nt, Artificial Sequence
  Description of Artificial Sequence: Synthetic oligonucleotide
gggagcuugcauuuucugu

SEQ ID NO: 2285727 - RNA, 19 nt, Artificial Sequence
  Description of Artificial Sequence: Synthetic oligonucleotide
gcucuugagcccaucgaac

SEQ ID NO: 2285728 - RNA, 19 nt, Artificial Sequence
  Description of Artificial Sequence: Synthetic oligonucleotide
aaacggcguccaguaacuu

SEQ ID NO: 2285729 - RNA, 19 nt, Artificial Sequence
  Description of Artificial Sequence: Synthetic oligonucleotide
ggcaacauuaaagaacauu

SEQ ID NO: 2285730 - RNA, 19 nt, Artificial Sequence
  Description of Artificial Sequence: Synthetic oligonucleotide
ccaaacaaacggcguccag

SEQ ID NO: 2285731 - RNA, 19 nt, Artificial Sequence
  Description of Artificial Sequence: Synthetic oligonucleotide
cugggagcuugcauuuucu

SEQ ID NO: 2285732 - RNA, 19 nt, Artificial Sequence
  Description of Artificial Sequence: Synthetic oligonucleotide
uggcucagugugacacauu

SEQ ID NO: 2285733 - RNA, 19 nt, Artificial Sequence
  Description of Artificial Sequence: Synthetic oligonucleotide
guaacuuauuaagcagauu

SEQ ID NO: 2285734 - RNA, 19 nt, Artificial Sequence
  Description of Artificial Sequence: Synthetic oligonucleotide
ccaauggauuuuacuggga

SEQ ID NO: 2285735 - RNA, 19 nt, Artificial Sequence
  Description of Artificial Sequence: Synthetic oligonucleotide
augagaccucgaacaaaau

SEQ ID NO: 2285736 - RNA, 19 nt, Artificial Sequence
  Description of Artificial Sequence: Synthetic oligonucleotide
cgaacaaaaucaucagugu

SEQ ID NO: 2285737 - RNA, 19 nt, Artificial Sequence
  Description of Artificial Sequence: Synthetic oligonucleotide
caauuauuucuuguccauu

SEQ ID NO: 2285738 - RNA, 19 nt, Artificial Sequence
  Description of Artificial Sequence: Synthetic oligonucleotide
cacugccauggaaugauuu

SEQ ID NO: 2285739 - RNA, 19 nt, Artificial Sequence
  Description of Artificial Sequence: Synthetic oligonucleotide
uacugggagcuugcauuuu

SEQ ID NO: 2285740 - RNA, 19 nt, Artificial Sequence
  Description of Artificial Sequence: Synthetic oligonucleotide
ggcguccaguaacuuauua

SEQ ID NO: 2285741 - RNA, 19 nt, Artificial Sequence
  Description of Artificial Sequence: Synthetic oligonucleotide
ccuuugcaaguaaaucuua

SEQ ID NO: 2285742 - RNA, 19 nt, Artificial Sequence
  Description of Artificial Sequence: Synthetic oligonucleotide
cauggcuuuuaaugacaau

SEQ ID NO: 2285743 - RNA, 19 nt, Artificial Sequence
  Description of Artificial Sequence: Synthetic oligonucleotide
cugaggucuuuagauaauu

SEQ ID NO: 2285744 - RNA, 19 nt, Artificial Sequence
  Description of Artificial Sequence: Synthetic oligonucleotide
gugcaguggguaagaaaua

SEQ ID NO: 2285745 - RNA, 19 nt, Artificial Sequence
  Description of Artificial Sequence: Synthetic oligonucleotide
cuccauguguaaguauuau

SEQ ID NO: 2285746 - RNA, 19 nt, Artificial Sequence
  Description of Artificial Sequence: Synthetic oligonucleotide
gaucgcccuuucacugcca

SEQ ID NO: 2285747 - RNA, 19 nt, Artificial Sequence
  Description of Artificial Sequence: Synthetic oligonucleotide
ggcaccaaacaaacggcgu

SEQ ID NO: 2285748 - RNA, 19 nt, Artificial Sequence
  Description of Artificial Sequence: Synthetic oligonucleotide
ccauggaaugauuugccuu

SEQ ID NO: 2285749 - RNA, 19 nt, Artificial Sequence
  Description of Artificial Sequence: Synthetic oligonucleotide
ccuucucaauccaauggau

SEQ ID NO: 2285750 - RNA, 19 nt, Artificial Sequence
  Description of Artificial Sequence: Synthetic oligonucleotide
caauguugagagguauauu

SEQ ID NO: 2285751 - RNA, 19 nt, Artificial Sequence
  Description of Artificial Sequence: Synthetic oligonucleotide
cuggcucagugugacacau

SEQ ID NO: 2285752 - RNA, 19 nt, Artificial Sequence
  Description of Artificial Sequence: Synthetic oligonucleotide
ccuuaauucuauguacaau

SEQ ID NO: 2285753 - RNA, 19 nt, Artificial Sequence
  Description of Artificial Sequence: Synthetic oligonucleotide
ccguacuuuuauucaaaau

SEQ ID NO: 2285754 - RNA, 19 nt, Artificial Sequence
  Description of Artificial Sequence: Synthetic oligonucleotide
gugcuuuacaaaggacauu

SEQ ID NO: 2285755 - RNA, 19 nt, Artificial Sequence
  Description of Artificial Sequence: Synthetic oligonucleotide
cccuuucacugccauggaa

SEQ ID NO: 2285756 - RNA, 19 nt, Artificial Sequence
  Description of Artificial Sequence: Synthetic oligonucleotide
gcauuuucugugccacuuu

SEQ ID NO: 2285757 - RNA, 19 nt, Artificial Sequence
  Description of Artificial Sequence: Synthetic oligonucleotide
gcccuuucacugccaugga

SEQ ID NO: 2285758 - RNA, 19 nt, Artificial Sequence
  Description of Artificial Sequence: Synthetic oligonucleotide
guauucuccugaggucuuu

SEQ ID NO: 2285759 - RNA, 19 nt, Artificial Sequence
  Description of Artificial Sequence: Synthetic oligonucleotide
ccugaggucuuuagauaau

SEQ ID NO: 2285760 - RNA, 19 nt, Artificial Sequence
  Description of Artificial Sequence: Synthetic oligonucleotide
gcccaucgaacgaccucca

SEQ ID NO: 2285761 - RNA, 19 nt, Artificial Sequence
  Description of Artificial Sequence: Synthetic oligonucleotide
cccaucgaacgaccuccaa

SEQ ID NO: 2285762 - RNA, 19 nt, Artificial Sequence
  Description of Artificial Sequence: Synthetic oligonucleotide
cggcguccaguaacuuauu

SEQ ID NO: 2285763 - RNA, 19 nt, Artificial Sequence
  Description of Artificial Sequence: Synthetic oligonucleotide
  modified_base (1)..(1): a, c, u, g, unknown or other
nugagaugcaagaugggau

SEQ ID NO: 2285764 - RNA, 19 nt, Artificial Sequence
  Description of Artificial Sequence: Synthetic oligonucleotide
aauacugugauucagagag

SEQ ID NO: 2285765 - RNA, 19 nt, Artificial Sequence
  Description of Artificial Sequence: Synthetic oligonucleotide
aaaaccugaaccuuggugc

SEQ ID NO: 2285766 - RNA, 19 nt, Artificial Sequence
  Description of Artificial Sequence: Synthetic oligonucleotide
agaacaaugacccuuuagc

SEQ ID NO: 2285767 - RNA, 19 nt, Artificial Sequence
  Description of Artificial Sequence: Synthetic oligonucleotide
uuuauauucugaaacagug

SEQ ID NO: 2285768 - RNA, 19 nt, Artificial Sequence
  Description of Artificial Sequence: Synthetic oligonucleotide
aaagaaaugaagaauccac

SEQ ID NO: 2285769 - RNA, 19 nt, Artificial Sequence
  Description of Artificial Sequence: Synthetic oligonucleotide
uccaauaagugacaggugg

SEQ ID NO: 2285770 - RNA, 19 nt, Artificial Sequence
  Description of Artificial Sequence: Synthetic oligonucleotide
uuauuuagugcauuuaaag

SEQ ID NO: 2285771 - RNA, 19 nt, Artificial Sequence
  Description of Artificial Sequence: Synthetic oligonucleotide
agagaguugauuuuguuuc

SEQ ID NO: 2285772 - RNA, 19 nt, Artificial Sequence
  Description of Artificial Sequence: Synthetic oligonucleotide
aagaccucaucauaggaac

SEQ ID NO: 2285773 - RNA, 19 nt, Artificial Sequence
  Description of Artificial Sequence: Synthetic oligonucleotide
auuuagugcauuuaaagcu

SEQ ID NO: 2285774 - RNA, 19 nt, Artificial Sequence
  Description of Artificial Sequence: Synthetic oligonucleotide
uauuuagugcauuuaaagc

SEQ ID NO: 2285775 - RNA, 19 nt, Artificial Sequence
  Description of Artificial Sequence: Synthetic oligonucleotide
aagaaaugaagaauccacc

SEQ ID NO: 2285776 - RNA, 19 nt, Artificial Sequence
  Description of Artificial Sequence: Synthetic oligonucleotide
uuuucaacaauuauaggau

SEQ ID NO: 2285777 - RNA, 19 nt, Artificial Sequence
  Description of Artificial Sequence: Synthetic oligonucleotide
uuuccaauaagugacaggu

SEQ ID NO: 2285778 - RNA, 19 nt, Artificial Sequence
  Description of Artificial Sequence: Synthetic oligonucleotide
uuuaauacugugauucaga

SEQ ID NO: 2285779 - RNA, 19 nt, Artificial Sequence
  Description of Artificial Sequence: Synthetic oligonucleotide
aauuauaggaucaucaguu

SEQ ID NO: 2285780 - RNA, 19 nt, Artificial Sequence
  Description of Artificial Sequence: Synthetic oligonucleotide
ugcauuauuucccaaggug

SEQ ID NO: 2285781 - RNA, 19 nt, Artificial Sequence
  Description of Artificial Sequence: Synthetic oligonucleotide
uuuaagaccucaucauagg

SEQ ID NO: 2285782 - RNA, 19 nt, Artificial Sequence
  Description of Artificial Sequence: Synthetic oligonucleotide
aauaagugacagguggagc

SEQ ID NO: 2285783 - RNA, 19 nt, Artificial Sequence
  Description of Artificial Sequence: Synthetic oligonucleotide
aucaguuaagucuucugcg

SEQ ID NO: 2285784 - RNA, 19 nt, Artificial Sequence
  Description of Artificial Sequence: Synthetic oligonucleotide
uccguuuccaauaagugac

SEQ ID NO: 2285785 - RNA, 19 nt, Artificial Sequence
  Description of Artificial Sequence: Synthetic oligonucleotide
aacaauuauaggaucauca

SEQ ID NO: 2285786 - RNA, 19 nt, Artificial Sequence
  Description of Artificial Sequence: Synthetic oligonucleotide
cacauccacaucaugaugg

SEQ ID NO: 2285787 - RNA, 19 nt, Artificial Sequence
  Description of Artificial Sequence: Synthetic oligonucleotide
uguuuggcauuuaagaccu

SEQ ID NO: 2285788 - RNA, 19 nt, Artificial Sequence
  Description of Artificial Sequence: Synthetic oligonucleotide
cuugacuugauuuucaaca

SEQ ID NO: 2285789 - RNA, 19 nt, Artificial Sequence
  Description of Artificial Sequence: Synthetic oligonucleotide
cagaccuucggcauuaucg

SEQ ID NO: 2285790 - RNA, 19 nt, Artificial Sequence
  Description of Artificial Sequence: Synthetic oligonucleotide
uguaagugcccgaagaaga

SEQ ID NO: 2285791 - RNA, 19 nt, Artificial Sequence
  Description of Artificial Sequence: Synthetic oligonucleotide
uucaacaauuauaggauca

SEQ ID NO: 2285792 - RNA, 19 nt, Artificial Sequence
  Description of Artificial Sequence: Synthetic oligonucleotide
acaauuauaggaucaucag

SEQ ID NO: 2285793 - RNA, 19 nt, Artificial Sequence
  Description of Artificial Sequence: Synthetic oligonucleotide
gaagaagaaucucauuugc

SEQ ID NO: 2285794 - RNA, 19 nt, Artificial Sequence
  Description of Artificial Sequence: Synthetic oligonucleotide
ucaguuaagucuucugcgg

SEQ ID NO: 2285795 - RNA, 19 nt, Artificial Sequence
  Description of Artificial Sequence: Synthetic oligonucleotide
aucaguuaacuccagcagg

SEQ ID NO: 2285796 - RNA, 19 nt, Artificial Sequence
  Description of Artificial Sequence: Synthetic oligonucleotide
uuuuguuuccaaugauugg

SEQ ID NO: 2285797 - RNA, 19 nt, Artificial Sequence
  Description of Artificial Sequence: Synthetic oligonucleotide
uggacguauaccuuuaucu

SEQ ID NO: 2285798 - RNA, 19 nt, Artificial Sequence
  Description of Artificial Sequence: Synthetic oligonucleotide
aacauccucacagacucgc

SEQ ID NO: 2285799 - RNA, 19 nt, Artificial Sequence
  Description of Artificial Sequence: Synthetic oligonucleotide
ucaucaguuaacuccagca

SEQ ID NO: 2285800 - RNA, 19 nt, Artificial Sequence
  Description of Artificial Sequence: Synthetic oligonucleotide
uauaggaucaucaguuaac

SEQ ID NO: 2285801 - RNA, 19 nt, Artificial Sequence
  Description of Artificial Sequence: Synthetic oligonucleotide
uuguuuauauucugaaaca

SEQ ID NO: 2285802 - RNA, 19 nt, Artificial Sequence
  Description of Artificial Sequence: Synthetic oligonucleotide
agaccuucggcauuaucgc

SEQ ID NO: 2285803 - RNA, 19 nt, Artificial Sequence
  Description of Artificial Sequence: Synthetic oligonucleotide
cucuuuaauacugugauuc

SEQ ID NO: 2285804 - RNA, 19 nt, Artificial Sequence
  Description of Artificial Sequence: Synthetic oligonucleotide
uaucgcuaaaaccuucucc

SEQ ID NO: 2285805 - RNA, 19 nt, Artificial Sequence
  Description of Artificial Sequence: Synthetic oligonucleotide
auaagugacagguggagca

SEQ ID NO: 2285806 - RNA, 19 nt, Artificial Sequence
  Description of Artificial Sequence: Synthetic oligonucleotide
aucgcuaaaaccuucuccu

SEQ ID NO: 2285807 - RNA, 19 nt, Artificial Sequence
  Description of Artificial Sequence: Synthetic oligonucleotide
aguuucucaaguuguuugg

SEQ ID NO: 2285808 - RNA, 19 nt, Artificial Sequence
  Description of Artificial Sequence: Synthetic oligonucleotide
caaugauugggauaccacc

SEQ ID NO: 2285809 - RNA, 19 nt, Artificial Sequence
  Description of Artificial Sequence: Synthetic oligonucleotide
agagaaguuucucaaguug

SEQ ID NO: 2285810 - RNA, 19 nt, Artificial Sequence
  Description of Artificial Sequence: Synthetic oligonucleotide
gaaacaguguaagugcccg

SEQ ID NO: 2285811 - RNA, 19 nt, Artificial Sequence
  Description of Artificial Sequence: Synthetic oligonucleotide
ugcuauguggccaucaaaa

SEQ ID NO: 2285812 - RNA, 19 nt, Artificial Sequence
  Description of Artificial Sequence: Synthetic oligonucleotide
aauaauggcuugauuagcu

SEQ ID NO: 2285813 - RNA, 19 nt, Artificial Sequence
  Description of Artificial Sequence: Synthetic oligonucleotide
acucagguuauuuagugca

SEQ ID NO: 2285814 - RNA, 19 nt, Artificial Sequence
  Description of Artificial Sequence: Synthetic oligonucleotide
auuuaagaccucaucauag

SEQ ID NO: 2285815 - RNA, 19 nt, Artificial Sequence
  Description of Artificial Sequence: Synthetic oligonucleotide
uuaagaccucaucauagga

SEQ ID NO: 2285816 - RNA, 19 nt, Artificial Sequence
  Description of Artificial Sequence: Synthetic oligonucleotide
ucaguuaacuccagcaggu

SEQ ID NO: 2285817 - RNA, 19 nt, Artificial Sequence
  Description of Artificial Sequence: Synthetic oligonucleotide
uuaagucuucugcggaccg

SEQ ID NO: 2285818 - RNA, 19 nt, Artificial Sequence
  Description of Artificial Sequence: Synthetic oligonucleotide
gacguauaccuuuaucuug

SEQ ID NO: 2285819 - RNA, 19 nt, Artificial Sequence
  Description of Artificial Sequence: Synthetic oligonucleotide
ugagaaagcugcauuauuu

SEQ ID NO: 2285820 - RNA, 19 nt, Artificial Sequence
  Description of Artificial Sequence: Synthetic oligonucleotide
uuuaucuugacuugauuuu

SEQ ID NO: 2285821 - RNA, 19 nt, Artificial Sequence
  Description of Artificial Sequence: Synthetic oligonucleotide
ugacagucauauuugugag

SEQ ID NO: 2285822 - RNA, 19 nt, Artificial Sequence
  Description of Artificial Sequence: Synthetic oligonucleotide
ugauggugggcuaaagccc

SEQ ID NO: 2285823 - RNA, 19 nt, Artificial Sequence
  Description of Artificial Sequence: Synthetic oligonucleotide
aguuaacuccagcagguag

SEQ ID NO: 2285824 - RNA, 19 nt, Artificial Sequence
  Description of Artificial Sequence: Synthetic oligonucleotide
uuuagugcauuuaaagcuu

SEQ ID NO: 2285825 - RNA, 19 nt, Artificial Sequence
  Description of Artificial Sequence: Synthetic oligonucleotide
uuauaggaucaucaguuaa

SEQ ID NO: 2285826 - RNA, 19 nt, Artificial Sequence
  Description of Artificial Sequence: Synthetic oligonucleotide
agcagggagaacaaugacc

SEQ ID NO: 2285827 - RNA, 19 nt, Artificial Sequence
  Description of Artificial Sequence: Synthetic oligonucleotide
uugauuagcugagaaagcu

SEQ ID NO: 2285828 - RNA, 19 nt, Artificial Sequence
  Description of Artificial Sequence: Synthetic oligonucleotide
augaagaauccaccugggc

SEQ ID NO: 2285829 - RNA, 19 nt, Artificial Sequence
  Description of Artificial Sequence: Synthetic oligonucleotide
auuauuucccaaggugacc

SEQ ID NO: 2285830 - RNA, 19 nt, Artificial Sequence
  Description of Artificial Sequence: Synthetic oligonucleotide
uaagaccucaucauaggaa

SEQ ID NO: 2285831 - RNA, 19 nt, Artificial Sequence
  Description of Artificial Sequence: Synthetic oligonucleotide
ugggcuaaagcccucauuu

SEQ ID NO: 2285832 - RNA, 19 nt, Artificial Sequence
  Description of Artificial Sequence: Synthetic oligonucleotide
aaugaagaauccaccuggg

SEQ ID NO: 2285833 - RNA, 19 nt, Artificial Sequence
  Description of Artificial Sequence: Synthetic oligonucleotide
uaauggcuugauuagcuga

SEQ ID NO: 2285834 - RNA, 19 nt, Artificial Sequence
  Description of Artificial Sequence: Synthetic oligonucleotide
uuccguuuccaauaaguga

SEQ ID NO: 2285835 - RNA, 19 nt, Artificial Sequence
  Description of Artificial Sequence: Synthetic oligonucleotide
agccaaucagaccuucggc

SEQ ID NO: 2285836 - RNA, 19 nt, Artificial Sequence
  Description of Artificial Sequence: Synthetic oligonucleotide
agcuucaaaaccugaaccu

SEQ ID NO: 2285837 - RNA, 19 nt, Artificial Sequence
  Description of Artificial Sequence: Synthetic oligonucleotide
ugaaacaguguaagugccc

SEQ ID NO: 2285838 - RNA, 19 nt, Artificial Sequence
  Description of Artificial Sequence: Synthetic oligonucleotide
ucuccauacagcagggaga

SEQ ID NO: 2285839 - RNA, 19 nt, Artificial Sequence
  Description of Artificial Sequence: Synthetic oligonucleotide
aagugcccgaagaagaauc

SEQ ID NO: 2285840 - RNA, 19 nt, Artificial Sequence
  Description of Artificial Sequence: Synthetic oligonucleotide
cugaaacaguguaagugcc

SEQ ID NO: 2285841 - RNA, 19 nt, Artificial Sequence
  Description of Artificial Sequence: Synthetic oligonucleotide
uauuugugagcaaccucag

SEQ ID NO: 2285842 - RNA, 19 nt, Artificial Sequence
  Description of Artificial Sequence: Synthetic oligonucleotide
ucuucugcggaccgcgagg

SEQ ID NO: 2285843 - RNA, 19 nt, Artificial Sequence
  Description of Artificial Sequence: Synthetic oligonucleotide
aaaccugaaccuuggugcu

SEQ ID NO: 2285844 - RNA, 19 nt, Artificial Sequence
  Description of Artificial Sequence: Synthetic oligonucleotide
ucggcauuaucgcuaaaac

SEQ ID NO: 2285845 - RNA, 19 nt, Artificial Sequence
  Description of Artificial Sequence: Synthetic oligonucleotide
uuucaacaauuauaggauc

SEQ ID NO: 2285846 - RNA, 19 nt, Artificial Sequence
  Description of Artificial Sequence: Synthetic oligonucleotide
uuucucaaguuguuuggca

SEQ ID NO: 2285847 - RNA, 19 nt, Artificial Sequence
  Description of Artificial Sequence: Synthetic oligonucleotide
ucucauuugcuauguggcc

SEQ ID NO: 2285848 - RNA, 19 nt, Artificial Sequence
  Description of Artificial Sequence: Synthetic oligonucleotide
uccacaucaugaugguggg

SEQ ID NO: 2285849 - RNA, 19 nt, Artificial Sequence
  Description of Artificial Sequence: Synthetic oligonucleotide
caucaguuaacuccagcag

SEQ ID NO: 2285850 - RNA, 19 nt, Artificial Sequence
  Description of Artificial Sequence: Synthetic oligonucleotide
auugggauaccacccagcu

SEQ ID NO: 2285851 - RNA, 19 nt, Artificial Sequence
  Description of Artificial Sequence: Synthetic oligonucleotide
ucaguaguccuucugucau

SEQ ID NO: 2285852 - RNA, 19 nt, Artificial Sequence
  Description of Artificial Sequence: Synthetic oligonucleotide
cuuuaauacugugauucag

SEQ ID NO: 2285853 - RNA, 19 nt, Artificial Sequence
  Description of Artificial Sequence: Synthetic oligonucleotide
ugcccgaagaagaaucuca

SEQ ID NO: 2285854 - RNA, 19 nt, Artificial Sequence
  Description of Artificial Sequence: Synthetic oligonucleotide
cuuccguuuccaauaagug

SEQ ID NO: 2285855 - RNA, 19 nt, Artificial Sequence
  Description of Artificial Sequence: Synthetic oligonucleotide
auaccuuuaucuugacuug

SEQ ID NO: 2285856 - RNA, 19 nt, Artificial Sequence
  Description of Artificial Sequence: Synthetic oligonucleotide
aguaguccuucugucaugg

SEQ ID NO: 2285857 - RNA, 19 nt, Artificial Sequence
  Description of Artificial Sequence: Synthetic oligonucleotide
aagucuucugcggaccgcg

SEQ ID NO: 2285858 - RNA, 19 nt, Artificial Sequence
  Description of Artificial Sequence: Synthetic oligonucleotide
cucaucauaggaaccauca

SEQ ID NO: 2285859 - RNA, 19 nt, Artificial Sequence
  Description of Artificial Sequence: Synthetic oligonucleotide
caugauggugggcuaaagc

SEQ ID NO: 2285860 - RNA, 19 nt, Artificial Sequence
  Description of Artificial Sequence: Synthetic oligonucleotide
cucacagacucgcuggacg

SEQ ID NO: 2285861 - RNA, 19 nt, Artificial Sequence
  Description of Artificial Sequence: Synthetic oligonucleotide
ugauugggauaccacccag

SEQ ID NO: 2285862 - RNA, 19 nt, Artificial Sequence
  Description of Artificial Sequence: Synthetic oligonucleotide
ugaaccuuggugcuuccgu

SEQ ID NO: 2285863 - RNA, 19 nt, Artificial Sequence
  Description of Artificial Sequence: Synthetic oligonucleotide
acucgcuggacguauaccu

SEQ ID NO: 2285864 - RNA, 19 nt, Artificial Sequence
  Description of Artificial Sequence: Synthetic oligonucleotide
aaugacccuuuagcgaagg

SEQ ID NO: 2285865 - RNA, 19 nt, Artificial Sequence
  Description of Artificial Sequence: Synthetic oligonucleotide
uugacuugauuuucaacau

SEQ ID NO: 2285866 - RNA, 19 nt, Artificial Sequence
  Description of Artificial Sequence: Synthetic oligonucleotide
gagaguugauuuuguuucc

SEQ ID NO: 2285867 - RNA, 19 nt, Artificial Sequence
  Description of Artificial Sequence: Synthetic oligonucleotide
uuaacuccagcagguagag

SEQ ID NO: 2285868 - RNA, 19 nt, Artificial Sequence
  Description of Artificial Sequence: Synthetic oligonucleotide
ucauauuugugagcaaccu

SEQ ID NO: 2285869 - RNA, 19 nt, Artificial Sequence
  Description of Artificial Sequence: Synthetic oligonucleotide
agcgaagggaggcugacca

SEQ ID NO: 2285870 - RNA, 19 nt, Artificial Sequence
  Description of Artificial Sequence: Synthetic oligonucleotide
ugggcagccuuccacucgg

SEQ ID NO: 2285871 - RNA, 19 nt, Artificial Sequence
  Description of Artificial Sequence: Synthetic oligonucleotide
uuaucuugacuugauuuuc

SEQ ID NO: 2285872 - RNA, 19 nt, Artificial Sequence
  Description of Artificial Sequence: Synthetic oligonucleotide
auaggaaccaucaguuaag

SEQ ID NO: 2285873 - RNA, 19 nt, Artificial Sequence
  Description of Artificial Sequence: Synthetic oligonucleotide
uuuagcgaagggaggcuga

SEQ ID NO: 2285874 - RNA, 19 nt, Artificial Sequence
  Description of Artificial Sequence: Synthetic oligonucleotide
gaugcaguagcaggcgccg

SEQ ID NO: 2285875 - RNA, 19 nt, Artificial Sequence
  Description of Artificial Sequence: Synthetic oligonucleotide
cauaggaaccaucaguuaa

SEQ ID NO: 2285876 - RNA, 19 nt, Artificial Sequence
  Description of Artificial Sequence: Synthetic oligonucleotide
caauaagugacagguggag

SEQ ID NO: 2285877 - RNA, 19 nt, Artificial Sequence
  Description of Artificial Sequence: Synthetic oligonucleotide
cauauuugugagcaaccuc

SEQ ID NO: 2285878 - RNA, 19 nt, Artificial Sequence
  Description of Artificial Sequence: Synthetic oligonucleotide
uuugcuauguggccaucaa

SEQ ID NO: 2285879 - RNA, 19 nt, Artificial Sequence
  Description of Artificial Sequence: Synthetic oligonucleotide
ugguagucauuggugacag

SEQ ID NO: 2285880 - RNA, 19 nt, Artificial Sequence
  Description of Artificial Sequence: Synthetic oligonucleotide
uuccaauaagugacaggug

SEQ ID NO: 2285881 - RNA, 19 nt, Artificial Sequence
  Description of Artificial Sequence: Synthetic oligonucleotide
uccaaugauugggauacca

SEQ ID NO: 2285882 - RNA, 19 nt, Artificial Sequence
  Description of Artificial Sequence: Synthetic oligonucleotide
aguguaagugcccgaagaa

SEQ ID NO: 2285883 - RNA, 19 nt, Artificial Sequence
  Description of Artificial Sequence: Synthetic oligonucleotide
ugacccuuuagcgaaggga

SEQ ID NO: 2285884 - RNA, 19 nt, Artificial Sequence
  Description of Artificial Sequence: Synthetic oligonucleotide
ucaacaauuauaggaucau

SEQ ID NO: 2285885 - RNA, 19 nt, Artificial Sequence
  Description of Artificial Sequence: Synthetic oligonucleotide
guuugcgcccgccuggccg

SEQ ID NO: 2285886 - RNA, 19 nt, Artificial Sequence
  Description of Artificial Sequence: Synthetic oligonucleotide
agacucgcuggacguauac

SEQ ID NO: 2285887 - RNA, 19 nt, Artificial Sequence
  Description of Artificial Sequence: Synthetic oligonucleotide
aauccaccugggcacucag

SEQ ID NO: 2285888 - RNA, 19 nt, Artificial Sequence
  Description of Artificial Sequence: Synthetic oligonucleotide
aggaaccaucaguuaaguc

SEQ ID NO: 2285889 - RNA, 19 nt, Artificial Sequence
  Description of Artificial Sequence: Synthetic oligonucleotide
guagaugcaguagcaggcg

SEQ ID NO: 2285890 - RNA, 19 nt, Artificial Sequence
  Description of Artificial Sequence: Synthetic oligonucleotide
auuauaggaucaucaguua

SEQ ID NO: 2285891 - RNA, 19 nt, Artificial Sequence
  Description of Artificial Sequence: Synthetic oligonucleotide
gaagaaucucauuugcuau

SEQ ID NO: 2285892 - RNA, 19 nt, Artificial Sequence
  Description of Artificial Sequence: Synthetic oligonucleotide
uggcuggauucucagacaa

SEQ ID NO: 2285893 - RNA, 19 nt, Artificial Sequence
  Description of Artificial Sequence: Synthetic oligonucleotide
aggggcagccaaucagacc

SEQ ID NO: 2285894 - RNA, 19 nt, Artificial Sequence
  Description of Artificial Sequence: Synthetic oligonucleotide
ggcauuaucgcuaaaaccu

SEQ ID NO: 2285895 - RNA, 19 nt, Artificial Sequence
  Description of Artificial Sequence: Synthetic oligonucleotide
uaagugacagguggagcag

SEQ ID NO: 2285896 - RNA, 19 nt, Artificial Sequence
  Description of Artificial Sequence: Synthetic oligonucleotide
uuaucgcuaaaaccuucuc

SEQ ID NO: 2285897 - RNA, 19 nt, Artificial Sequence
  Description of Artificial Sequence: Synthetic oligonucleotide
uucggcauuaucgcuaaaa

SEQ ID NO: 2285898 - RNA, 19 nt, Artificial Sequence
  Description of Artificial Sequence: Synthetic oligonucleotide
aacaguguaagugcccgaa

SEQ ID NO: 2285899 - RNA, 19 nt, Artificial Sequence
  Description of Artificial Sequence: Synthetic oligonucleotide
augauugggauaccaccca

SEQ ID NO: 2285900 - RNA, 19 nt, Artificial Sequence
  Description of Artificial Sequence: Synthetic oligonucleotide
cuuuaucuugacuugauuu

SEQ ID NO: 2285901 - RNA, 19 nt, Artificial Sequence
  Description of Artificial Sequence: Synthetic oligonucleotide
aaacaguguaagugcccga

SEQ ID NO: 2285902 - RNA, 19 nt, Artificial Sequence
  Description of Artificial Sequence: Synthetic oligonucleotide
ucacagacucgcuggacgu

SEQ ID NO: 2285903 - RNA, 19 nt, Artificial Sequence
  Description of Artificial Sequence: Synthetic oligonucleotide
uuagugcauuuaaagcuuu

SEQ ID NO: 2285904 - RNA, 19 nt, Artificial Sequence
  Description of Artificial Sequence: Synthetic oligonucleotide
guguaagugcccgaagaag

SEQ ID NO: 2285905 - RNA, 19 nt, Artificial Sequence
  Description of Artificial Sequence: Synthetic oligonucleotide
agaccucaucauaggaacc

SEQ ID NO: 2285906 - RNA, 19 nt, Artificial Sequence
  Description of Artificial Sequence: Synthetic oligonucleotide
uuugggcgcaguccucucc

SEQ ID NO: 2285907 - RNA, 19 nt, Artificial Sequence
  Description of Artificial Sequence: Synthetic oligonucleotide
gguagaugcaguagcaggc

SEQ ID NO: 2285908 - RNA, 19 nt, Artificial Sequence
  Description of Artificial Sequence: Synthetic oligonucleotide
uagagaaguuucucaaguu

SEQ ID NO: 2285909 - RNA, 19 nt, Artificial Sequence
  Description of Artificial Sequence: Synthetic oligonucleotide
auuaucgcuaaaaccuucu

SEQ ID NO: 2285910 - RNA, 19 nt, Artificial Sequence
  Description of Artificial Sequence: Synthetic oligonucleotide
guuaacuccagcagguaga

SEQ ID NO: 2285911 - RNA, 19 nt, Artificial Sequence
  Description of Artificial Sequence: Synthetic oligonucleotide
acaguguaagugcccgaag

SEQ ID NO: 2285912 - RNA, 19 nt, Artificial Sequence
  Description of Artificial Sequence: Synthetic oligonucleotide
uacugugauucagagaguu

SEQ ID NO: 2285913 - RNA, 19 nt, Artificial Sequence
  Description of Artificial Sequence: Synthetic oligonucleotide
gauugggauaccacccagc

SEQ ID NO: 2285914 - RNA, 19 nt, Artificial Sequence
  Description of Artificial Sequence: Synthetic oligonucleotide
acguauaccuuuaucuuga

SEQ ID NO: 2285915 - RNA, 19 nt, Artificial Sequence
  Description of Artificial Sequence: Synthetic oligonucleotide
uucugucauggcuggauuc

SEQ ID NO: 2285916 - RNA, 19 nt, Artificial Sequence
  Description of Artificial Sequence: Synthetic oligonucleotide
uuagcugagaaagcugcau

SEQ ID NO: 2285917 - RNA, 19 nt, Artificial Sequence
  Description of Artificial Sequence: Synthetic oligonucleotide
cagcagguagagaaguuuc

SEQ ID NO: 2285918 - RNA, 19 nt, Artificial Sequence
  Description of Artificial Sequence: Synthetic oligonucleotide
aggggcgcaguuugcgccc

SEQ ID NO: 2285919 - RNA, 19 nt, Artificial Sequence
  Description of Artificial Sequence: Synthetic oligonucleotide
ugagaagaugcugguaguc

SEQ ID NO: 2285920 - RNA, 19 nt, Artificial Sequence
  Description of Artificial Sequence: Synthetic oligonucleotide
uaccuuuaucuugacuuga

SEQ ID NO: 2285921 - RNA, 19 nt, Artificial Sequence
  Description of Artificial Sequence: Synthetic oligonucleotide
ucugcggaccgcgaggggc

SEQ ID NO: 2285922 - RNA, 19 nt, Artificial Sequence
  Description of Artificial Sequence: Synthetic oligonucleotide
ucccaaggugaccaaugcu

SEQ ID NO: 2285923 - RNA, 19 nt, Artificial Sequence
  Description of Artificial Sequence: Synthetic oligonucleotide
cagguagagaaguuucuca

SEQ ID NO: 2285924 - RNA, 19 nt, Artificial Sequence
  Description of Artificial Sequence: Synthetic oligonucleotide
aaucagaccuucggcauua

SEQ ID NO: 2285925 - RNA, 19 nt, Artificial Sequence
  Description of Artificial Sequence: Synthetic oligonucleotide
uggugacagucauauuugu

SEQ ID NO: 2285926 - RNA, 19 nt, Artificial Sequence
  Description of Artificial Sequence: Synthetic oligonucleotide
uugcuauguggccaucaaa

SEQ ID NO: 2285927 - RNA, 19 nt, Artificial Sequence
  Description of Artificial Sequence: Synthetic oligonucleotide
uagcugagaaagcugcauu

SEQ ID NO: 2285928 - RNA, 19 nt, Artificial Sequence
  Description of Artificial Sequence: Synthetic oligonucleotide
accugaaccuuggugcuuc

SEQ ID NO: 2285929 - RNA, 19 nt, Artificial Sequence
  Description of Artificial Sequence: Synthetic oligonucleotide
cauuuaagaccucaucaua

SEQ ID NO: 2285930 - RNA, 19 nt, Artificial Sequence
  Description of Artificial Sequence: Synthetic oligonucleotide
caauuauaggaucaucagu

SEQ ID NO: 2285931 - RNA, 19 nt, Artificial Sequence
  Description of Artificial Sequence: Synthetic oligonucleotide
aucuugacuugauuuucaa

SEQ ID NO: 2285932 - RNA, 19 nt, Artificial Sequence
  Description of Artificial Sequence: Synthetic oligonucleotide
augacccuuuagcgaaggg

SEQ ID NO: 2285933 - RNA, 19 nt, Artificial Sequence
  Description of Artificial Sequence: Synthetic oligonucleotide
aaccuuggugcuuccguuu

SEQ ID NO: 2285934 - RNA, 19 nt, Artificial Sequence
  Description of Artificial Sequence: Synthetic oligonucleotide
ucaugauggugggcuaaag

SEQ ID NO: 2285935 - RNA, 19 nt, Artificial Sequence
  Description of Artificial Sequence: Synthetic oligonucleotide
agaguugauuuuguuucca

SEQ ID NO: 2285936 - RNA, 19 nt, Artificial Sequence
  Description of Artificial Sequence: Synthetic oligonucleotide
cucauuugcuauguggcca

SEQ ID NO: 2285937 - RNA, 19 nt, Artificial Sequence
  Description of Artificial Sequence: Synthetic oligonucleotide
uuugcgcccgccuggccgc

SEQ ID NO: 2285938 - RNA, 19 nt, Artificial Sequence
  Description of Artificial Sequence: Synthetic oligonucleotide
caguguaagugcccgaaga

SEQ ID NO: 2285939 - RNA, 19 nt, Artificial Sequence
  Description of Artificial Sequence: Synthetic oligonucleotide
ugcuuccguuuccaauaag

SEQ ID NO: 2285940 - RNA, 19 nt, Artificial Sequence
  Description of Artificial Sequence: Synthetic oligonucleotide
cuucugcggaccgcgaggg

SEQ ID NO: 2285941 - RNA, 19 nt, Artificial Sequence
  Description of Artificial Sequence: Synthetic oligonucleotide
cuuuagcgaagggaggcug

SEQ ID NO: 2285942 - RNA, 19 nt, Artificial Sequence
  Description of Artificial Sequence: Synthetic oligonucleotide
caacaauuauaggaucauc

SEQ ID NO: 2285943 - RNA, 19 nt, Artificial Sequence
  Description of Artificial Sequence: Synthetic oligonucleotide
ucagccgguagaugcagua

SEQ ID NO: 2285944 - RNA, 19 nt, Artificial Sequence
  Description of Artificial Sequence: Synthetic oligonucleotide
cgagucagccgguagaugc

SEQ ID NO: 2285945 - RNA, 19 nt, Artificial Sequence
  Description of Artificial Sequence: Synthetic oligonucleotide
auuugcuauguggccauca

SEQ ID NO: 2285946 - RNA, 19 nt, Artificial Sequence
  Description of Artificial Sequence: Synthetic oligonucleotide
cuggacguauaccuuuauc

SEQ ID NO: 2285947 - RNA, 19 nt, Artificial Sequence
  Description of Artificial Sequence: Synthetic oligonucleotide
ugagcaaccucaggccagc

SEQ ID NO: 2285948 - RNA, 19 nt, Artificial Sequence
  Description of Artificial Sequence: Synthetic oligonucleotide
acccagcucacgaauaaug

SEQ ID NO: 2285949 - RNA, 19 nt, Artificial Sequence
  Description of Artificial Sequence: Synthetic oligonucleotide
cagaguucaggggauccgc

SEQ ID NO: 2285950 - RNA, 19 nt, Artificial Sequence
  Description of Artificial Sequence: Synthetic oligonucleotide
cgaagaagaaucucauuug

SEQ ID NO: 2285951 - RNA, 19 nt, Artificial Sequence
  Description of Artificial Sequence: Synthetic oligonucleotide
ucacgaauaauggcuugau

SEQ ID NO: 2285952 - RNA, 19 nt, Artificial Sequence
  Description of Artificial Sequence: Synthetic oligonucleotide
uugggauaccacccagcuc

SEQ ID NO: 2285953 - RNA, 19 nt, Artificial Sequence
  Description of Artificial Sequence: Synthetic oligonucleotide
uggugcuuccguuuccaau

SEQ ID NO: 2285954 - RNA, 19 nt, Artificial Sequence
  Description of Artificial Sequence: Synthetic oligonucleotide
uaagucuucugcggaccgc

SEQ ID NO: 2285955 - RNA, 19 nt, Artificial Sequence
  Description of Artificial Sequence: Synthetic oligonucleotide
ucagguuauuuagugcauu

SEQ ID NO: 2285956 - RNA, 19 nt, Artificial Sequence
  Description of Artificial Sequence: Synthetic oligonucleotide
aguuugcgcccgccuggcc

SEQ ID NO: 2285957 - RNA, 19 nt, Artificial Sequence
  Description of Artificial Sequence: Synthetic oligonucleotide
cauacagcagggagaacaa

SEQ ID NO: 2285958 - RNA, 19 nt, Artificial Sequence
  Description of Artificial Sequence: Synthetic oligonucleotide
ggugcuuccguuuccaaua

SEQ ID NO: 2285959 - RNA, 19 nt, Artificial Sequence
  Description of Artificial Sequence: Synthetic oligonucleotide
caguuaagucuucugcgga

SEQ ID NO: 2285960 - RNA, 19 nt, Artificial Sequence
  Description of Artificial Sequence: Synthetic oligonucleotide
uuagcgaagggaggcugac

SEQ ID NO: 2285961 - RNA, 19 nt, Artificial Sequence
  Description of Artificial Sequence: Synthetic oligonucleotide
cagccaacugcacagcaga

SEQ ID NO: 2285962 - RNA, 19 nt, Artificial Sequence
  Description of Artificial Sequence: Synthetic oligonucleotide
cugcggaccgcgaggggcg

SEQ ID NO: 2285963 - RNA, 19 nt, Artificial Sequence
  Description of Artificial Sequence: Synthetic oligonucleotide
uaagugcccgaagaagaau

SEQ ID NO: 2285964 - RNA, 19 nt, Artificial Sequence
  Description of Artificial Sequence: Synthetic oligonucleotide
ucagaccuucggcauuauc

SEQ ID NO: 2285965 - RNA, 19 nt, Artificial Sequence
  Description of Artificial Sequence: Synthetic oligonucleotide
gcaguuugcgcccgccugg

SEQ ID NO: 2285966 - RNA, 19 nt, Artificial Sequence
  Description of Artificial Sequence: Synthetic oligonucleotide
gaaccaucaguuaagucuu

SEQ ID NO: 2285967 - RNA, 19 nt, Artificial Sequence
  Description of Artificial Sequence: Synthetic oligonucleotide
gacucgcuggacguauacc

SEQ ID NO: 2285968 - RNA, 19 nt, Artificial Sequence
  Description of Artificial Sequence: Synthetic oligonucleotide
auuagcugagaaagcugca

SEQ ID NO: 2285969 - RNA, 19 nt, Artificial Sequence
  Description of Artificial Sequence: Synthetic oligonucleotide
cacaucaugauggugggcu

SEQ ID NO: 2285970 - RNA, 19 nt, Artificial Sequence
  Description of Artificial Sequence: Synthetic oligonucleotide
aggcaguuguuuauauucu

SEQ ID NO: 2285971 - RNA, 19 nt, Artificial Sequence
  Description of Artificial Sequence: Synthetic oligonucleotide
ucgcuggacguauaccuuu

SEQ ID NO: 2285972 - RNA, 19 nt, Artificial Sequence
  Description of Artificial Sequence: Synthetic oligonucleotide
cgguagaugcaguagcagg

SEQ ID NO: 2285973 - RNA, 19 nt, Artificial Sequence
  Description of Artificial Sequence: Synthetic oligonucleotide
ggcgcaguccucuccauac

SEQ ID NO: 2285974 - RNA, 19 nt, Artificial Sequence
  Description of Artificial Sequence: Synthetic oligonucleotide
gugagcaaccucaggccag

SEQ ID NO: 2285975 - RNA, 19 nt, Artificial Sequence
  Description of Artificial Sequence: Synthetic oligonucleotide
agguggagcaggccaguga

SEQ ID NO: 2285976 - RNA, 19 nt, Artificial Sequence
  Description of Artificial Sequence: Synthetic oligonucleotide
ggugacagucauauuugug

SEQ ID NO: 2285977 - RNA, 19 nt, Artificial Sequence
  Description of Artificial Sequence: Synthetic oligonucleotide
agucagccgguagaugcag

SEQ ID NO: 2285978 - RNA, 19 nt, Artificial Sequence
  Description of Artificial Sequence: Synthetic oligonucleotide
gauggugggcuaaagcccu

SEQ ID NO: 2285979 - RNA, 19 nt, Artificial Sequence
  Description of Artificial Sequence: Synthetic oligonucleotide
cggcauuaucgcuaaaacc

SEQ ID NO: 2285980 - RNA, 19 nt, Artificial Sequence
  Description of Artificial Sequence: Synthetic oligonucleotide
caguaguccuucugucaug

SEQ ID NO: 2285981 - RNA, 19 nt, Artificial Sequence
  Description of Artificial Sequence: Synthetic oligonucleotide
auaccacccagcucacgaa

SEQ ID NO: 2285982 - RNA, 19 nt, Artificial Sequence
  Description of Artificial Sequence: Synthetic oligonucleotide
aagcugcauuauuucccaa

SEQ ID NO: 2285983 - RNA, 19 nt, Artificial Sequence
  Description of Artificial Sequence: Synthetic oligonucleotide
ccauacagcagggagaaca

SEQ ID NO: 2285984 - RNA, 19 nt, Artificial Sequence
  Description of Artificial Sequence: Synthetic oligonucleotide
agugcccgaagaagaaucu

SEQ ID NO: 2285985 - RNA, 19 nt, Artificial Sequence
  Description of Artificial Sequence: Synthetic oligonucleotide
ucgcuaaaaccuucuccuu

SEQ ID NO: 2285986 - RNA, 19 nt, Artificial Sequence
  Description of Artificial Sequence: Synthetic oligonucleotide
cucacgaauaauggcuuga

SEQ ID NO: 2285987 - RNA, 19 nt, Artificial Sequence
  Description of Artificial Sequence: Synthetic oligonucleotide
guaagugcccgaagaagaa

SEQ ID NO: 2285988 - RNA, 19 nt, Artificial Sequence
  Description of Artificial Sequence: Synthetic oligonucleotide
cuccauacagcagggagaa

SEQ ID NO: 2285989 - RNA, 19 nt, Artificial Sequence
  Description of Artificial Sequence: Synthetic oligonucleotide
guauaccuuuaucuugacu

SEQ ID NO: 2285990 - RNA, 19 nt, Artificial Sequence
  Description of Artificial Sequence: Synthetic oligonucleotide
gcaaccucaggccagccaa

SEQ ID NO: 2285991 - RNA, 19 nt, Artificial Sequence
  Description of Artificial Sequence: Synthetic oligonucleotide
gcauuuaaagcuuucucuu

SEQ ID NO: 2285992 - RNA, 19 nt, Artificial Sequence
  Description of Artificial Sequence: Synthetic oligonucleotide
ggcgccggcgcccaggacc

SEQ ID NO: 2285993 - RNA, 19 nt, Artificial Sequence
  Description of Artificial Sequence: Synthetic oligonucleotide
cugaaccuuggugcuuccg

SEQ ID NO: 2285994 - RNA, 19 nt, Artificial Sequence
  Description of Artificial Sequence: Synthetic oligonucleotide
cagagaguugauuuuguuu

SEQ ID NO: 2285995 - RNA, 19 nt, Artificial Sequence
  Description of Artificial Sequence: Synthetic oligonucleotide
acagacucgcuggacguau

SEQ ID NO: 2285996 - RNA, 19 nt, Artificial Sequence
  Description of Artificial Sequence: Synthetic oligonucleotide
ugggcacucaguaguccuu

SEQ ID NO: 2285997 - RNA, 19 nt, Artificial Sequence
  Description of Artificial Sequence: Synthetic oligonucleotide
cauuuaaagcuuucucuuu

SEQ ID NO: 2285998 - RNA, 19 nt, Artificial Sequence
  Description of Artificial Sequence: Synthetic oligonucleotide
cauccacaucaugauggug

SEQ ID NO: 2285999 - RNA, 19 nt, Artificial Sequence
  Description of Artificial Sequence: Synthetic oligonucleotide
cacucaguaguccuucugu

SEQ ID NO: 2286000 - RNA, 19 nt, Artificial Sequence
  Description of Artificial Sequence: Synthetic oligonucleotide
cccuuuagcgaagggaggc

SEQ ID NO: 2286001 - RNA, 19 nt, Artificial Sequence
  Description of Artificial Sequence: Synthetic oligonucleotide
caaccucaggccagccaac

SEQ ID NO: 2286002 - RNA, 19 nt, Artificial Sequence
  Description of Artificial Sequence: Synthetic oligonucleotide
accuuuaucuugacuugau

SEQ ID NO: 2286003 - RNA, 19 nt, Artificial Sequence
  Description of Artificial Sequence: Synthetic oligonucleotide
ccaauaagugacaggugga

SEQ ID NO: 2286004 - RNA, 19 nt, Artificial Sequence
  Description of Artificial Sequence: Synthetic oligonucleotide
uagcgaagggaggcugacc

SEQ ID NO: 2286005 - RNA, 19 nt, Artificial Sequence
  Description of Artificial Sequence: Synthetic oligonucleotide
gcucacgaauaauggcuug

SEQ ID NO: 2286006 - RNA, 19 nt, Artificial Sequence
  Description of Artificial Sequence: Synthetic oligonucleotide
gaauccaccugggcacuca

SEQ ID NO: 2286007 - RNA, 19 nt, Artificial Sequence
  Description of Artificial Sequence: Synthetic oligonucleotide
uuggugcuuccguuuccaa

SEQ ID NO: 2286008 - RNA, 19 nt, Artificial Sequence
  Description of Artificial Sequence: Synthetic oligonucleotide
cuuggugcuuccguuucca

SEQ ID NO: 2286009 - RNA, 19 nt, Artificial Sequence
  Description of Artificial Sequence: Synthetic oligonucleotide
uggugggcuaaagcccuca

SEQ ID NO: 2286010 - RNA, 19 nt, Artificial Sequence
  Description of Artificial Sequence: Synthetic oligonucleotide
aucaugauggugggcuaaa

SEQ ID NO: 2286011 - RNA, 19 nt, Artificial Sequence
  Description of Artificial Sequence: Synthetic oligonucleotide
uuccaaugauugggauacc

SEQ ID NO: 2286012 - RNA, 19 nt, Artificial Sequence
  Description of Artificial Sequence: Synthetic oligonucleotide
ucaaguuguuuggcauuua

SEQ ID NO: 2286013 - RNA, 19 nt, Artificial Sequence
  Description of Artificial Sequence: Synthetic oligonucleotide
cagccgguagaugcaguag

SEQ ID NO: 2286014 - RNA, 19 nt, Artificial Sequence
  Description of Artificial Sequence: Synthetic oligonucleotide
agccaacugcacagcagag

SEQ ID NO: 2286015 - RNA, 19 nt, Artificial Sequence
  Description of Artificial Sequence: Synthetic oligonucleotide
ccagccaacugcacagcag

SEQ ID NO: 2286016 - RNA, 19 nt, Artificial Sequence
  Description of Artificial Sequence: Synthetic oligonucleotide
accuucggcauuaucgcua

SEQ ID NO: 2286017 - RNA, 19 nt, Artificial Sequence
  Description of Artificial Sequence: Synthetic oligonucleotide
guagcaggcgccggcgccc

SEQ ID NO: 2286018 - RNA, 19 nt, Artificial Sequence
  Description of Artificial Sequence: Synthetic oligonucleotide
caguagcaggcgccggcgc

SEQ ID NO: 2286019 - RNA, 19 nt, Artificial Sequence
  Description of Artificial Sequence: Synthetic oligonucleotide
gaaccuuggugcuuccguu

SEQ ID NO: 2286020 - RNA, 19 nt, Artificial Sequence
  Description of Artificial Sequence: Synthetic oligonucleotide
uaacuccagcagguagaga

SEQ ID NO: 2286021 - RNA, 19 nt, Artificial Sequence
  Description of Artificial Sequence: Synthetic oligonucleotide
aaccugaaccuuggugcuu

SEQ ID NO: 2286022 - RNA, 19 nt, Artificial Sequence
  Description of Artificial Sequence: Synthetic oligonucleotide
gaccuucggcauuaucgcu

SEQ ID NO: 2286023 - RNA, 19 nt, Artificial Sequence
  Description of Artificial Sequence: Synthetic oligonucleotide
caccugggcacucaguagu

SEQ ID NO: 2286024 - RNA, 19 nt, Artificial Sequence
  Description of Artificial Sequence: Synthetic oligonucleotide
ggacguauaccuuuaucuu

SEQ ID NO: 2286025 - RNA, 19 nt, Artificial Sequence
  Description of Artificial Sequence: Synthetic oligonucleotide
ggcagccuuccacucggag

SEQ ID NO: 2286026 - RNA, 19 nt, Artificial Sequence
  Description of Artificial Sequence: Synthetic oligonucleotide
gcuuccguuuccaauaagu

SEQ ID NO: 2286027 - RNA, 19 nt, Artificial Sequence
  Description of Artificial Sequence: Synthetic oligonucleotide
caguuugcgcccgccuggc

SEQ ID NO: 2286028 - RNA, 19 nt, Artificial Sequence
  Description of Artificial Sequence: Synthetic oligonucleotide
gugcuuccguuuccaauaa

SEQ ID NO: 2286029 - RNA, 19 nt, Artificial Sequence
  Description of Artificial Sequence: Synthetic oligonucleotide
cugcauuauuucccaaggu

SEQ ID NO: 2286030 - RNA, 19 nt, Artificial Sequence
  Description of Artificial Sequence: Synthetic oligonucleotide
cugggcacucaguaguccu

SEQ ID NO: 2286031 - RNA, 19 nt, Artificial Sequence
  Description of Artificial Sequence: Synthetic oligonucleotide
caggaccagcccugccgcc

SEQ ID NO: 2286032 - RNA, 19 nt, Artificial Sequence
  Description of Artificial Sequence: Synthetic oligonucleotide
uggccgcgggccccgaguc

SEQ ID NO: 2286033 - RNA, 19 nt, Artificial Sequence
  Description of Artificial Sequence: Synthetic oligonucleotide
gcaguccucuccauacagc

SEQ ID NO: 2286034 - RNA, 19 nt, Artificial Sequence
  Description of Artificial Sequence: Synthetic oligonucleotide
gugcccgaagaagaaucuc

SEQ ID NO: 2286035 - RNA, 19 nt, Artificial Sequence
  Description of Artificial Sequence: Synthetic oligonucleotide
cucagguuauuuagugcau

SEQ ID NO: 2286036 - RNA, 19 nt, Artificial Sequence
  Description of Artificial Sequence: Synthetic oligonucleotide
auggugggcuaaagcccuc

SEQ ID NO: 2286037 - RNA, 19 nt, Artificial Sequence
  Description of Artificial Sequence: Synthetic oligonucleotide
gcgaggggcgcaguuugcg

SEQ ID NO: 2286038 - RNA, 19 nt, Artificial Sequence
  Description of Artificial Sequence: Synthetic oligonucleotide
cgcaguccucuccauacag

SEQ ID NO: 2286039 - RNA, 19 nt, Artificial Sequence
  Description of Artificial Sequence: Synthetic oligonucleotide
uccuucugucauggcugga

SEQ ID NO: 2286040 - RNA, 19 nt, Artificial Sequence
  Description of Artificial Sequence: Synthetic oligonucleotide
ccuuggugcuuccguuucc

SEQ ID NO: 2286041 - RNA, 19 nt, Artificial Sequence
  Description of Artificial Sequence: Synthetic oligonucleotide
gaagaugcugguagucauu

SEQ ID NO: 2286042 - RNA, 19 nt, Artificial Sequence
  Description of Artificial Sequence: Synthetic oligonucleotide
uccauacagcagggagaac

SEQ ID NO: 2286043 - RNA, 19 nt, Artificial Sequence
  Description of Artificial Sequence: Synthetic oligonucleotide
gugauucagagaguugauu

SEQ ID NO: 2286044 - RNA, 19 nt, Artificial Sequence
  Description of Artificial Sequence: Synthetic oligonucleotide
cucaaguuguuuggcauuu

SEQ ID NO: 2286045 - RNA, 19 nt, Artificial Sequence
  Description of Artificial Sequence: Synthetic oligonucleotide
cccaaggugaccaaugcuu

SEQ ID NO: 2286046 - RNA, 19 nt, Artificial Sequence
  Description of Artificial Sequence: Synthetic oligonucleotide
cuggauucucagacaaauu

SEQ ID NO: 2286047 - RNA, 19 nt, Artificial Sequence
  Description of Artificial Sequence: Synthetic oligonucleotide
gccagccaacugcacagca

SEQ ID NO: 2286048 - RNA, 19 nt, Artificial Sequence
  Description of Artificial Sequence: Synthetic oligonucleotide
ugggcgcaguccucuccau

SEQ ID NO: 2286049 - RNA, 19 nt, Artificial Sequence
  Description of Artificial Sequence: Synthetic oligonucleotide
cguauaccuuuaucuugac

SEQ ID NO: 2286050 - RNA, 19 nt, Artificial Sequence
  Description of Artificial Sequence: Synthetic oligonucleotide
cacgaauaauggcuugauu

SEQ ID NO: 2286051 - RNA, 19 nt, Artificial Sequence
  Description of Artificial Sequence: Synthetic oligonucleotide
agucuucugcggaccgcga

SEQ ID NO: 2286052 - RNA, 19 nt, Artificial Sequence
  Description of Artificial Sequence: Synthetic oligonucleotide
cgggccccgagucagccgg

SEQ ID NO: 2286053 - RNA, 19 nt, Artificial Sequence
  Description of Artificial Sequence: Synthetic oligonucleotide
ccugaaccuuggugcuucc

SEQ ID NO: 2286054 - RNA, 19 nt, Artificial Sequence
  Description of Artificial Sequence: Synthetic oligonucleotide
caaggugaccaaugcuuuu

SEQ ID NO: 2286055 - RNA, 19 nt, Artificial Sequence
  Description of Artificial Sequence: Synthetic oligonucleotide
ccguuuccaauaagugaca

SEQ ID NO: 2286056 - RNA, 19 nt, Artificial Sequence
  Description of Artificial Sequence: Synthetic oligonucleotide
cagcccgcgucccgcgcgc

SEQ ID NO: 2286057 - RNA, 19 nt, Artificial Sequence
  Description of Artificial Sequence: Synthetic oligonucleotide
caaucagaccuucggcauu

SEQ ID NO: 2286058 - RNA, 19 nt, Artificial Sequence
  Description of Artificial Sequence: Synthetic oligonucleotide
gggcacucaguaguccuuc

SEQ ID NO: 2286059 - RNA, 19 nt, Artificial Sequence
  Description of Artificial Sequence: Synthetic oligonucleotide
ugcggaccgcgaggggcgc

SEQ ID NO: 2286060 - RNA, 19 nt, Artificial Sequence
  Description of Artificial Sequence: Synthetic oligonucleotide
ccuucggcauuaucgcuaa

SEQ ID NO: 2286061 - RNA, 19 nt, Artificial Sequence
  Description of Artificial Sequence: Synthetic oligonucleotide
cgcaguuugcgcccgccug

SEQ ID NO: 2286062 - RNA, 19 nt, Artificial Sequence
  Description of Artificial Sequence: Synthetic oligonucleotide
cgaggggcgcaguuugcgc

SEQ ID NO: 2286063 - RNA, 19 nt, Artificial Sequence
  Description of Artificial Sequence: Synthetic oligonucleotide
caguuaacuccagcaggua

SEQ ID NO: 2286064 - RNA, 19 nt, Artificial Sequence
  Description of Artificial Sequence: Synthetic oligonucleotide
ccgcgaggggcgcaguuug

SEQ ID NO: 2286065 - RNA, 19 nt, Artificial Sequence
  Description of Artificial Sequence: Synthetic oligonucleotide
gugggcuaaagcccucauu

SEQ ID NO: 2286066 - RNA, 19 nt, Artificial Sequence
  Description of Artificial Sequence: Synthetic oligonucleotide
ccggcgcccaggaccagcc

SEQ ID NO: 2286067 - RNA, 19 nt, Artificial Sequence
  Description of Artificial Sequence: Synthetic oligonucleotide
cucgcuggacguauaccuu

SEQ ID NO: 2286068 - RNA, 19 nt, Artificial Sequence
  Description of Artificial Sequence: Synthetic oligonucleotide
gccccgagucagccgguag

SEQ ID NO: 2286069 - RNA, 19 nt, Artificial Sequence
  Description of Artificial Sequence: Synthetic oligonucleotide
ggcagccaaucagaccuuc

SEQ ID NO: 2286070 - RNA, 19 nt, Artificial Sequence
  Description of Artificial Sequence: Synthetic oligonucleotide
ccagcccgcgucccgcgcg

SEQ ID NO: 2286071 - RNA, 19 nt, Artificial Sequence
  Description of Artificial Sequence: Synthetic oligonucleotide
gccgcgggccccgagucag

SEQ ID NO: 2286072 - RNA, 19 nt, Artificial Sequence
  Description of Artificial Sequence: Synthetic oligonucleotide
cugccgccacccagcccgc

SEQ ID NO: 2286073 - RNA, 19 nt, Artificial Sequence
  Description of Artificial Sequence: Synthetic oligonucleotide
cagggagaacaaugacccu

SEQ ID NO: 2286074 - RNA, 19 nt, Artificial Sequence
  Description of Artificial Sequence: Synthetic oligonucleotide
ccacaucaugauggugggc

SEQ ID NO: 2286075 - RNA, 19 nt, Artificial Sequence
  Description of Artificial Sequence: Synthetic oligonucleotide
ggcgcaguuugcgcccgcc

SEQ ID NO: 2286076 - RNA, 19 nt, Artificial Sequence
  Description of Artificial Sequence: Synthetic oligonucleotide
cagacucgcuggacguaua

SEQ ID NO: 2286077 - RNA, 19 nt, Artificial Sequence
  Description of Artificial Sequence: Synthetic oligonucleotide
agccuuccacucggaggca

SEQ ID NO: 2286078 - RNA, 19 nt, Artificial Sequence
  Description of Artificial Sequence: Synthetic oligonucleotide
gcgggccccgagucagccg

SEQ ID NO: 2286079 - RNA, 19 nt, Artificial Sequence
  Description of Artificial Sequence: Synthetic oligonucleotide
ggggcgcaguuugcgcccg

SEQ ID NO: 2286080 - RNA, 19 nt, Artificial Sequence
  Description of Artificial Sequence: Synthetic oligonucleotide
ccacccagcucacgaauaa

SEQ ID NO: 2286081 - RNA, 19 nt, Artificial Sequence
  Description of Artificial Sequence: Synthetic oligonucleotide
ccaaggugaccaaugcuuu

SEQ ID NO: 2286082 - RNA, 19 nt, Artificial Sequence
  Description of Artificial Sequence: Synthetic oligonucleotide
gcgcaguccucuccauaca

SEQ ID NO: 2286083 - RNA, 19 nt, Artificial Sequence
  Description of Artificial Sequence: Synthetic oligonucleotide
gccaacugcacagcagagu

SEQ ID NO: 2286084 - RNA, 19 nt, Artificial Sequence
  Description of Artificial Sequence: Synthetic oligonucleotide
cacucggaggcaguuguuu

SEQ ID NO: 2286085 - RNA, 19 nt, Artificial Sequence
  Description of Artificial Sequence: Synthetic oligonucleotide
gguagucauuggugacagu

SEQ ID NO: 2286086 - RNA, 19 nt, Artificial Sequence
  Description of Artificial Sequence: Synthetic oligonucleotide
gucagccgguagaugcagu

SEQ ID NO: 2286087 - RNA, 19 nt, Artificial Sequence
  Description of Artificial Sequence: Synthetic oligonucleotide
gcccgcgucccgcgcgccg

SEQ ID NO: 2286088 - RNA, 19 nt, Artificial Sequence
  Description of Artificial Sequence: Synthetic oligonucleotide
ggugggcuaaagcccucau

SEQ ID NO: 2286089 - RNA, 19 nt, Artificial Sequence
  Description of Artificial Sequence: Synthetic oligonucleotide
gcuggacguauaccuuuau

SEQ ID NO: 2286090 - RNA, 19 nt, Artificial Sequence
  Description of Artificial Sequence: Synthetic oligonucleotide
cuuccacucggaggcaguu

SEQ ID NO: 2286091 - RNA, 19 nt, Artificial Sequence
  Description of Artificial Sequence: Synthetic oligonucleotide
gaccgcgaggggcgcaguu

SEQ ID NO: 2286092 - RNA, 19 nt, Artificial Sequence
  Description of Artificial Sequence: Synthetic oligonucleotide
gcgcccgccuggccgcggg

SEQ ID NO: 2286093 - RNA, 19 nt, Artificial Sequence
  Description of Artificial Sequence: Synthetic oligonucleotide
gccacccagcccgcguccc

SEQ ID NO: 2286094 - RNA, 19 nt, Artificial Sequence
  Description of Artificial Sequence: Synthetic oligonucleotide
cuggccgcgggccccgagu

SEQ ID NO: 2286095 - RNA, 19 nt, Artificial Sequence
  Description of Artificial Sequence: Synthetic oligonucleotide
cgcgaggggcgcaguuugc

SEQ ID NO: 2286096 - RNA, 19 nt, Artificial Sequence
  Description of Artificial Sequence: Synthetic oligonucleotide
gccggcgcccaggaccagc

SEQ ID NO: 2286097 - RNA, 19 nt, Artificial Sequence
  Description of Artificial Sequence: Synthetic oligonucleotide
cacccagcucacgaauaau

SEQ ID NO: 2286098 - RNA, 19 nt, Artificial Sequence
  Description of Artificial Sequence: Synthetic oligonucleotide
gggcgcaguuugcgcccgc

SEQ ID NO: 2286099 - RNA, 19 nt, Artificial Sequence
  Description of Artificial Sequence: Synthetic oligonucleotide
ccgccacccagcccgcguc

SEQ ID NO: 2286100 - RNA, 19 nt, Artificial Sequence
  Description of Artificial Sequence: Synthetic oligonucleotide
ccuuuagcgaagggaggcu

SEQ ID NO: 2286101 - RNA, 19 nt, Artificial Sequence
  Description of Artificial Sequence: Synthetic oligonucleotide
gucccgcgcgccgcccaug

SEQ ID NO: 2286102 - RNA, 19 nt, Artificial Sequence
  Description of Artificial Sequence: Synthetic oligonucleotide
gcgccggcgcccaggacca

SEQ ID NO: 2286103 - RNA, 19 nt, Artificial Sequence
  Description of Artificial Sequence: Synthetic oligonucleotide
cccgaagaagaaucucauu

SEQ ID NO: 2286104 - RNA, 19 nt, Artificial Sequence
  Description of Artificial Sequence: Synthetic oligonucleotide
gcccgccuggccgcgggcc

SEQ ID NO: 2286105 - RNA, 19 nt, Artificial Sequence
  Description of Artificial Sequence: Synthetic oligonucleotide
ggccgcgggccccgaguca

SEQ ID NO: 2286106 - RNA, 19 nt, Artificial Sequence
  Description of Artificial Sequence: Synthetic oligonucleotide
cgcuggacguauaccuuua

SEQ ID NO: 2286107 - RNA, 19 nt, Artificial Sequence
  Description of Artificial Sequence: Synthetic oligonucleotide
gcgcaguuugcgcccgccu

SEQ ID NO: 2286108 - RNA, 19 nt, Artificial Sequence
  Description of Artificial Sequence: Synthetic oligonucleotide
cgcgggccccgagucagcc

SEQ ID NO: 2286109 - RNA, 19 nt, Artificial Sequence
  Description of Artificial Sequence: Synthetic oligonucleotide
ccuggccgcgggccccgag

SEQ ID NO: 2286110 - RNA, 19 nt, Artificial Sequence
  Description of Artificial Sequence: Synthetic oligonucleotide
ccgcgggccccgagucagc

SEQ ID NO: 2286111 - RNA, 19 nt, Artificial Sequence
  Description of Artificial Sequence: Synthetic oligonucleotide
cggaggcaguuguuuauau

SEQ ID NO: 2286112 - RNA, 19 nt, Artificial Sequence
  Description of Artificial Sequence: Synthetic oligonucleotide
ccgcgucccgcgcgccgcc

SEQ ID NO: 2286113 - RNA, 19 nt, Artificial Sequence
  Description of Artificial Sequence: Synthetic oligonucleotide
ggccccgagucagccggua

SEQ ID NO: 2286114 - RNA, 19 nt, Artificial Sequence
  Description of Artificial Sequence: Synthetic oligonucleotide
gcggaccgcgaggggcgca

SEQ ID NO: 2286115 - RNA, 19 nt, Artificial Sequence
  Description of Artificial Sequence: Synthetic oligonucleotide
cgcgucccgcgcgccgccc

SEQ ID NO: 2286116 - RNA, 19 nt, Artificial Sequence
  Description of Artificial Sequence: Synthetic oligonucleotide
ggaccgcgaggggcgcagu

SEQ ID NO: 2286117 - RNA, 19 nt, Artificial Sequence
  Description of Artificial Sequence: Synthetic oligonucleotide
gggccccgagucagccggu

SEQ ID NO: 2286118 - RNA, 19 nt, Artificial Sequence
  Description of Artificial Sequence: Synthetic oligonucleotide
cgccggcgcccaggaccag

SEQ ID NO: 2286119 - RNA, 19 nt, Artificial Sequence
  Description of Artificial Sequence: Synthetic oligonucleotide
aaaccuuuagccuaacggc

SEQ ID NO: 2286120 - RNA, 19 nt, Artificial Sequence
  Description of Artificial Sequence: Synthetic oligonucleotide
aaaugaggaaaagagaacc

SEQ ID NO: 2286121 - RNA, 19 nt, Artificial Sequence
  Description of Artificial Sequence: Synthetic oligonucleotide
aaggauccuaccuagagag

SEQ ID NO: 2286122 - RNA, 19 nt, Artificial Sequence
  Description of Artificial Sequence: Synthetic oligonucleotide
uucgucaacaucuucaucc

SEQ ID NO: 2286123 - RNA, 19 nt, Artificial Sequence
  Description of Artificial Sequence: Synthetic oligonucleotide
uccacaaucccuuugaugu

SEQ ID NO: 2286124 - RNA, 19 nt, Artificial Sequence
  Description of Artificial Sequence: Synthetic oligonucleotide
uguguaaacagcccuuugg

SEQ ID NO: 2286125 - RNA, 19 nt, Artificial Sequence
  Description of Artificial Sequence: Synthetic oligonucleotide
accagaugaacuuuacugc

SEQ ID NO: 2286126 - RNA, 19 nt, Artificial Sequence
  Description of Artificial Sequence: Synthetic oligonucleotide
gaugcagugacucuagcag

SEQ ID NO: 2286127 - RNA, 19 nt, Artificial Sequence
  Description of Artificial Sequence: Synthetic oligonucleotide
aaagugaacuuaauaaguc

SEQ ID NO: 2286128 - RNA, 19 nt, Artificial Sequence
  Description of Artificial Sequence: Synthetic oligonucleotide
aguuugaagaaaguauucc

SEQ ID NO: 2286129 - RNA, 19 nt, Artificial Sequence
  Description of Artificial Sequence: Synthetic oligonucleotide
guugguaugacacauugug

SEQ ID NO: 2286130 - RNA, 19 nt, Artificial Sequence
  Description of Artificial Sequence: Synthetic oligonucleotide
auggacguagaauaugcgc

SEQ ID NO: 2286131 - RNA, 19 nt, Artificial Sequence
  Description of Artificial Sequence: Synthetic oligonucleotide
ugguguauugcauaugucc

SEQ ID NO: 2286132 - RNA, 19 nt, Artificial Sequence
  Description of Artificial Sequence: Synthetic oligonucleotide
uaauucacaaaaccuuuag

SEQ ID NO: 2286133 - RNA, 19 nt, Artificial Sequence
  Description of Artificial Sequence: Synthetic oligonucleotide
aagccaauccaauuugguc

SEQ ID NO: 2286134 - RNA, 19 nt, Artificial Sequence
  Description of Artificial Sequence: Synthetic oligonucleotide
ucugguguaagaaauaauu

SEQ ID NO: 2286135 - RNA, 19 nt, Artificial Sequence
  Description of Artificial Sequence: Synthetic oligonucleotide
agaugguucaauuaacuca

SEQ ID NO: 2286136 - RNA, 19 nt, Artificial Sequence
  Description of Artificial Sequence: Synthetic oligonucleotide
agagaguuccuagagaugg

SEQ ID NO: 2286137 - RNA, 19 nt, Artificial Sequence
  Description of Artificial Sequence: Synthetic oligonucleotide
gaacuuuacugcuugagac

SEQ ID NO: 2286138 - RNA, 19 nt, Artificial Sequence
  Description of Artificial Sequence: Synthetic oligonucleotide
uugcauauguccuagcuga

SEQ ID NO: 2286139 - RNA, 19 nt, Artificial Sequence
  Description of Artificial Sequence: Synthetic oligonucleotide
aacggcacuguguaaacag

SEQ ID NO: 2286140 - RNA, 19 nt, Artificial Sequence
  Description of Artificial Sequence: Synthetic oligonucleotide
aauguuguauccaaguacu

SEQ ID NO: 2286141 - RNA, 19 nt, Artificial Sequence
  Description of Artificial Sequence: Synthetic oligonucleotide
uagaauaugcgcauggaaa

SEQ ID NO: 2286142 - RNA, 19 nt, Artificial Sequence
  Description of Artificial Sequence: Synthetic oligonucleotide
aauuccacaaucccuuuga

SEQ ID NO: 2286143 - RNA, 19 nt, Artificial Sequence
  Description of Artificial Sequence: Synthetic oligonucleotide
ugaauuuccuuccuuuccc

SEQ ID NO: 2286144 - RNA, 19 nt, Artificial Sequence
  Description of Artificial Sequence: Synthetic oligonucleotide
aagugaacuuaauaaguca

SEQ ID NO: 2286145 - RNA, 19 nt, Artificial Sequence
  Description of Artificial Sequence: Synthetic oligonucleotide
gaauguuguauccaaguac

SEQ ID NO: 2286146 - RNA, 19 nt, Artificial Sequence
  Description of Artificial Sequence: Synthetic oligonucleotide
uaauuuuauggccuucacc

SEQ ID NO: 2286147 - RNA, 19 nt, Artificial Sequence
  Description of Artificial Sequence: Synthetic oligonucleotide
ucuucugugguccauagua

SEQ ID NO: 2286148 - RNA, 19 nt, Artificial Sequence
  Description of Artificial Sequence: Synthetic oligonucleotide
ucaaggauccuaccuagag

SEQ ID NO: 2286149 - RNA, 19 nt, Artificial Sequence
  Description of Artificial Sequence: Synthetic oligonucleotide
aaaccuacaggccugcagu

SEQ ID NO: 2286150 - RNA, 19 nt, Artificial Sequence
  Description of Artificial Sequence: Synthetic oligonucleotide
aagaaaguauuccuuugcu

SEQ ID NO: 2286151 - RNA, 19 nt, Artificial Sequence
  Description of Artificial Sequence: Synthetic oligonucleotide
uucaguaaagccaauccaa

SEQ ID NO: 2286152 - RNA, 19 nt, Artificial Sequence
  Description of Artificial Sequence: Synthetic oligonucleotide
uaggcugcaagucuguaag

SEQ ID NO: 2286153 - RNA, 19 nt, Artificial Sequence
  Description of Artificial Sequence: Synthetic oligonucleotide
uaaagccaauccaauuugg

SEQ ID NO: 2286154 - RNA, 19 nt, Artificial Sequence
  Description of Artificial Sequence: Synthetic oligonucleotide
uuugucaaggauccuaccu

SEQ ID NO: 2286155 - RNA, 19 nt, Artificial Sequence
  Description of Artificial Sequence: Synthetic oligonucleotide
uguuguauccaaguacugg

SEQ ID NO: 2286156 - RNA, 19 nt, Artificial Sequence
  Description of Artificial Sequence: Synthetic oligonucleotide
uggacguagaauaugcgca

SEQ ID NO: 2286157 - RNA, 19 nt, Artificial Sequence
  Description of Artificial Sequence: Synthetic oligonucleotide
guuguauccaaguacuggc

SEQ ID NO: 2286158 - RNA, 19 nt, Artificial Sequence
  Description of Artificial Sequence: Synthetic oligonucleotide
uucacaaaaccuuuagccu

SEQ ID NO: 2286159 - RNA, 19 nt, Artificial Sequence
  Description of Artificial Sequence: Synthetic oligonucleotide
aagaugugccuguagcauc

SEQ ID NO: 2286160 - RNA, 19 nt, Artificial Sequence
  Description of Artificial Sequence: Synthetic oligonucleotide
ugugccuguagcauccugg

SEQ ID NO: 2286161 - RNA, 19 nt, Artificial Sequence
  Description of Artificial Sequence: Synthetic oligonucleotide
uuguuuggucaccagauga

SEQ ID NO: 2286162 - RNA, 19 nt, Artificial Sequence
  Description of Artificial Sequence: Synthetic oligonucleotide
ugaacuuaauaagucaaca

SEQ ID NO: 2286163 - RNA, 19 nt, Artificial Sequence
  Description of Artificial Sequence: Synthetic oligonucleotide
agccaauccaauuuggucu

SEQ ID NO: 2286164 - RNA, 19 nt, Artificial Sequence
  Description of Artificial Sequence: Synthetic oligonucleotide
uaguugguaugacacauug

SEQ ID NO: 2286165 - RNA, 19 nt, Artificial Sequence
  Description of Artificial Sequence: Synthetic oligonucleotide
ugaacuuuacugcuugaga

SEQ ID NO: 2286166 - RNA, 19 nt, Artificial Sequence
  Description of Artificial Sequence: Synthetic oligonucleotide
cugcaagucuguaagacgc

SEQ ID NO: 2286167 - RNA, 19 nt, Artificial Sequence
  Description of Artificial Sequence: Synthetic oligonucleotide
ucaguuugaagaaaguauu

SEQ ID NO: 2286168 - RNA, 19 nt, Artificial Sequence
  Description of Artificial Sequence: Synthetic oligonucleotide
uguauccaaguacuggcag

SEQ ID NO: 2286169 - RNA, 19 nt, Artificial Sequence
  Description of Artificial Sequence: Synthetic oligonucleotide
uauugcauauguccuagcu

SEQ ID NO: 2286170 - RNA, 19 nt, Artificial Sequence
  Description of Artificial Sequence: Synthetic oligonucleotide
uaauuuguugucuggguac

SEQ ID NO: 2286171 - RNA, 19 nt, Artificial Sequence
  Description of Artificial Sequence: Synthetic oligonucleotide
aggauauuucaagaugugc

SEQ ID NO: 2286172 - RNA, 19 nt, Artificial Sequence
  Description of Artificial Sequence: Synthetic oligonucleotide
cauccaagcagauccacgg

SEQ ID NO: 2286173 - RNA, 19 nt, Artificial Sequence
  Description of Artificial Sequence: Synthetic oligonucleotide
uuucacauuuagaagucac

SEQ ID NO: 2286174 - RNA, 19 nt, Artificial Sequence
  Description of Artificial Sequence: Synthetic oligonucleotide
aacuuuacugcuugagaca

SEQ ID NO: 2286175 - RNA, 19 nt, Artificial Sequence
  Description of Artificial Sequence: Synthetic oligonucleotide
aguaaagccaauccaauuu

SEQ ID NO: 2286176 - RNA, 19 nt, Artificial Sequence
  Description of Artificial Sequence: Synthetic oligonucleotide
uuugaugucacaggcaaac

SEQ ID NO: 2286177 - RNA, 19 nt, Artificial Sequence
  Description of Artificial Sequence: Synthetic oligonucleotide
agagagaguuccuagagau

SEQ ID NO: 2286178 - RNA, 19 nt, Artificial Sequence
  Description of Artificial Sequence: Synthetic oligonucleotide
uggcuuuugucaaggaucc

SEQ ID NO: 2286179 - RNA, 19 nt, Artificial Sequence
  Description of Artificial Sequence: Synthetic oligonucleotide
gaugucacaggcaaacugc

SEQ ID NO: 2286180 - RNA, 19 nt, Artificial Sequence
  Description of Artificial Sequence: Synthetic oligonucleotide
agucacaccauugacacug

SEQ ID NO: 2286181 - RNA, 19 nt, Artificial Sequence
  Description of Artificial Sequence: Synthetic oligonucleotide
aauaugcgcauggaaauga

SEQ ID NO: 2286182 - RNA, 19 nt, Artificial Sequence
  Description of Artificial Sequence: Synthetic oligonucleotide
ucauccaagcagauccacg

SEQ ID NO: 2286183 - RNA, 19 nt, Artificial Sequence
  Description of Artificial Sequence: Synthetic oligonucleotide
uaggcauggacguagaaua

SEQ ID NO: 2286184 - RNA, 19 nt, Artificial Sequence
  Description of Artificial Sequence: Synthetic oligonucleotide
auauguccuagcugauucc

SEQ ID NO: 2286185 - RNA, 19 nt, Artificial Sequence
  Description of Artificial Sequence: Synthetic oligonucleotide
guugucuggguacugaaug

SEQ ID NO: 2286186 - RNA, 19 nt, Artificial Sequence
  Description of Artificial Sequence: Synthetic oligonucleotide
uccucugucaugccaaagc

SEQ ID NO: 2286187 - RNA, 19 nt, Artificial Sequence
  Description of Artificial Sequence: Synthetic oligonucleotide
uguauugcauauguccuag

SEQ ID NO: 2286188 - RNA, 19 nt, Artificial Sequence
  Description of Artificial Sequence: Synthetic oligonucleotide
ugucaaggauccuaccuag

SEQ ID NO: 2286189 - RNA, 19 nt, Artificial Sequence
  Description of Artificial Sequence: Synthetic oligonucleotide
uccugguacauucagcuuc

SEQ ID NO: 2286190 - RNA, 19 nt, Artificial Sequence
  Description of Artificial Sequence: Synthetic oligonucleotide
gucacaggcaaacugcucc

SEQ ID NO: 2286191 - RNA, 19 nt, Artificial Sequence
  Description of Artificial Sequence: Synthetic oligonucleotide
caaaucuugcugcuguagg

SEQ ID NO: 2286192 - RNA, 19 nt, Artificial Sequence
  Description of Artificial Sequence: Synthetic oligonucleotide
gaaaagagaaccaggccug

SEQ ID NO: 2286193 - RNA, 19 nt, Artificial Sequence
  Description of Artificial Sequence: Synthetic oligonucleotide
guaaagccaauccaauuug

SEQ ID NO: 2286194 - RNA, 19 nt, Artificial Sequence
  Description of Artificial Sequence: Synthetic oligonucleotide
gacgagugugccuuuggcg

SEQ ID NO: 2286195 - RNA, 19 nt, Artificial Sequence
  Description of Artificial Sequence: Synthetic oligonucleotide
acucuaaaccuacaggccu

SEQ ID NO: 2286196 - RNA, 19 nt, Artificial Sequence
  Description of Artificial Sequence: Synthetic oligonucleotide
cauauguccuagcugauuc

SEQ ID NO: 2286197 - RNA, 19 nt, Artificial Sequence
  Description of Artificial Sequence: Synthetic oligonucleotide
acguagaauaugcgcaugg

SEQ ID NO: 2286198 - RNA, 19 nt, Artificial Sequence
  Description of Artificial Sequence: Synthetic oligonucleotide
ggauauuucaagaugugcc

SEQ ID NO: 2286199 - RNA, 19 nt, Artificial Sequence
  Description of Artificial Sequence: Synthetic oligonucleotide
uacuggcagaaccaccugg

SEQ ID NO: 2286200 - RNA, 19 nt, Artificial Sequence
  Description of Artificial Sequence: Synthetic oligonucleotide
ucaagaugugccuguagca

SEQ ID NO: 2286201 - RNA, 19 nt, Artificial Sequence
  Description of Artificial Sequence: Synthetic oligonucleotide
ucacaaaaccuuuagccua

SEQ ID NO: 2286202 - RNA, 19 nt, Artificial Sequence
  Description of Artificial Sequence: Synthetic oligonucleotide
uuccaucuaaaagugaacu

SEQ ID NO: 2286203 - RNA, 19 nt, Artificial Sequence
  Description of Artificial Sequence: Synthetic oligonucleotide
gauuccucuuguuugguca

SEQ ID NO: 2286204 - RNA, 19 nt, Artificial Sequence
  Description of Artificial Sequence: Synthetic oligonucleotide
ugaauguuguauccaagua

SEQ ID NO: 2286205 - RNA, 19 nt, Artificial Sequence
  Description of Artificial Sequence: Synthetic oligonucleotide
agacauguucgucaacauc

SEQ ID NO: 2286206 - RNA, 19 nt, Artificial Sequence
  Description of Artificial Sequence: Synthetic oligonucleotide
gugaggauauuucaagaug

SEQ ID NO: 2286207 - RNA, 19 nt, Artificial Sequence
  Description of Artificial Sequence: Synthetic oligonucleotide
uauuucaagaugugccugu

SEQ ID NO: 2286208 - RNA, 19 nt, Artificial Sequence
  Description of Artificial Sequence: Synthetic oligonucleotide
uguaaacagcccuuuggcu

SEQ ID NO: 2286209 - RNA, 19 nt, Artificial Sequence
  Description of Artificial Sequence: Synthetic oligonucleotide
uugguaugacacauuguga

SEQ ID NO: 2286210 - RNA, 19 nt, Artificial Sequence
  Description of Artificial Sequence: Synthetic oligonucleotide
gcacucuaaaccuacaggc

SEQ ID NO: 2286211 - RNA, 19 nt, Artificial Sequence
  Description of Artificial Sequence: Synthetic oligonucleotide
ucucgaacucggaacuccg

SEQ ID NO: 2286212 - RNA, 19 nt, Artificial Sequence
  Description of Artificial Sequence: Synthetic oligonucleotide
ucuggguacugaauguugu

SEQ ID NO: 2286213 - RNA, 19 nt, Artificial Sequence
  Description of Artificial Sequence: Synthetic oligonucleotide
guacauucagcuucagggc

SEQ ID NO: 2286214 - RNA, 19 nt, Artificial Sequence
  Description of Artificial Sequence: Synthetic oligonucleotide
aaagcgaugcagugacucu

SEQ ID NO: 2286215 - RNA, 19 nt, Artificial Sequence
  Description of Artificial Sequence: Synthetic oligonucleotide
agaugugccuguagcaucc

SEQ ID NO: 2286216 - RNA, 19 nt, Artificial Sequence
  Description of Artificial Sequence: Synthetic oligonucleotide
aaccuacaggccugcaguc

SEQ ID NO: 2286217 - RNA, 19 nt, Artificial Sequence
  Description of Artificial Sequence: Synthetic oligonucleotide
augaggaaaagagaaccag

SEQ ID NO: 2286218 - RNA, 19 nt, Artificial Sequence
  Description of Artificial Sequence: Synthetic oligonucleotide
cacucuaaaccuacaggcc

SEQ ID NO: 2286219 - RNA, 19 nt, Artificial Sequence
  Description of Artificial Sequence: Synthetic oligonucleotide
gaaaugaggaaaagagaac

SEQ ID NO: 2286220 - RNA, 19 nt, Artificial Sequence
  Description of Artificial Sequence: Synthetic oligonucleotide
gacauguucgucaacaucu

SEQ ID NO: 2286221 - RNA, 19 nt, Artificial Sequence
  Description of Artificial Sequence: Synthetic oligonucleotide
ucgaacucggaacuccggc

SEQ ID NO: 2286222 - RNA, 19 nt, Artificial Sequence
  Description of Artificial Sequence: Synthetic oligonucleotide
uggacuaguugguaugaca

SEQ ID NO: 2286223 - RNA, 19 nt, Artificial Sequence
  Description of Artificial Sequence: Synthetic oligonucleotide
uguuuggucaccagaugaa

SEQ ID NO: 2286224 - RNA, 19 nt, Artificial Sequence
  Description of Artificial Sequence: Synthetic oligonucleotide
uuguauccaaguacuggca

SEQ ID NO: 2286225 - RNA, 19 nt, Artificial Sequence
  Description of Artificial Sequence: Synthetic oligonucleotide
acgagugugccuuuggcgu

SEQ ID NO: 2286226 - RNA, 19 nt, Artificial Sequence
  Description of Artificial Sequence: Synthetic oligonucleotide
uaagacgcugccucauucc

SEQ ID NO: 2286227 - RNA, 19 nt, Artificial Sequence
  Description of Artificial Sequence: Synthetic oligonucleotide
uugucaaggauccuaccua

SEQ ID NO: 2286228 - RNA, 19 nt, Artificial Sequence
  Description of Artificial Sequence: Synthetic oligonucleotide
uuagccuaacggcacugug

SEQ ID NO: 2286229 - RNA, 19 nt, Artificial Sequence
  Description of Artificial Sequence: Synthetic oligonucleotide
gauacagccuuccucuguc

SEQ ID NO: 2286230 - RNA, 19 nt, Artificial Sequence
  Description of Artificial Sequence: Synthetic oligonucleotide
acaccauugacacugucuu

SEQ ID NO: 2286231 - RNA, 19 nt, Artificial Sequence
  Description of Artificial Sequence: Synthetic oligonucleotide
agugacucuagcagagccc

SEQ ID NO: 2286232 - RNA, 19 nt, Artificial Sequence
  Description of Artificial Sequence: Synthetic oligonucleotide
cauggacguagaauaugcg

SEQ ID NO: 2286233 - RNA, 19 nt, Artificial Sequence
  Description of Artificial Sequence: Synthetic oligonucleotide
gguaugacacauugugagg

SEQ ID NO: 2286234 - RNA, 19 nt, Artificial Sequence
  Description of Artificial Sequence: Synthetic oligonucleotide
aaccuuuagccuaacggca

SEQ ID NO: 2286235 - RNA, 19 nt, Artificial Sequence
  Description of Artificial Sequence: Synthetic oligonucleotide
acugcccuaauuuguuguc

SEQ ID NO: 2286236 - RNA, 19 nt, Artificial Sequence
  Description of Artificial Sequence: Synthetic oligonucleotide
aagacgcugccucauucca

SEQ ID NO: 2286237 - RNA, 19 nt, Artificial Sequence
  Description of Artificial Sequence: Synthetic oligonucleotide
gugacucuagcagagcccg

SEQ ID NO: 2286238 - RNA, 19 nt, Artificial Sequence
  Description of Artificial Sequence: Synthetic oligonucleotide
gaauuccacaaucccuuug

SEQ ID NO: 2286239 - RNA, 19 nt, Artificial Sequence
  Description of Artificial Sequence: Synthetic oligonucleotide
uuuugucaaggauccuacc

SEQ ID NO: 2286240 - RNA, 19 nt, Artificial Sequence
  Description of Artificial Sequence: Synthetic oligonucleotide
aguccaucccugcugagga

SEQ ID NO: 2286241 - RNA, 19 nt, Artificial Sequence
  Description of Artificial Sequence: Synthetic oligonucleotide
ggcacucuaaaccuacagg

SEQ ID NO: 2286242 - RNA, 19 nt, Artificial Sequence
  Description of Artificial Sequence: Synthetic oligonucleotide
aaagccaauccaauuuggu

SEQ ID NO: 2286243 - RNA, 19 nt, Artificial Sequence
  Description of Artificial Sequence: Synthetic oligonucleotide
uuggucuguuugaauuucc

SEQ ID NO: 2286244 - RNA, 19 nt, Artificial Sequence
  Description of Artificial Sequence: Synthetic oligonucleotide
agugaacuuaauaagucaa

SEQ ID NO: 2286245 - RNA, 19 nt, Artificial Sequence
  Description of Artificial Sequence: Synthetic oligonucleotide
agaaaguauuccuuugcuu

SEQ ID NO: 2286246 - RNA, 19 nt, Artificial Sequence
  Description of Artificial Sequence: Synthetic oligonucleotide
caguuugaagaaaguauuc

SEQ ID NO: 2286247 - RNA, 19 nt, Artificial Sequence
  Description of Artificial Sequence: Synthetic oligonucleotide
gucuguaagacgcugccuc

SEQ ID NO: 2286248 - RNA, 19 nt, Artificial Sequence
  Description of Artificial Sequence: Synthetic oligonucleotide
ugacgagugugccuuuggc

SEQ ID NO: 2286249 - RNA, 19 nt, Artificial Sequence
  Description of Artificial Sequence: Synthetic oligonucleotide
cagugacucuagcagagcc

SEQ ID NO: 2286250 - RNA, 19 nt, Artificial Sequence
  Description of Artificial Sequence: Synthetic oligonucleotide
aacucggaacuccggcauc

SEQ ID NO: 2286251 - RNA, 19 nt, Artificial Sequence
  Description of Artificial Sequence: Synthetic oligonucleotide
gaauaugcgcauggaaaug

SEQ ID NO: 2286252 - RNA, 19 nt, Artificial Sequence
  Description of Artificial Sequence: Synthetic oligonucleotide
uccggcaucagugacgagu

SEQ ID NO: 2286253 - RNA, 19 nt, Artificial Sequence
  Description of Artificial Sequence: Synthetic oligonucleotide
aguacuggcagaaccaccu

SEQ ID NO: 2286254 - RNA, 19 nt, Artificial Sequence
  Description of Artificial Sequence: Synthetic oligonucleotide
auauuucaagaugugccug

SEQ ID NO: 2286255 - RNA, 19 nt, Artificial Sequence
  Description of Artificial Sequence: Synthetic oligonucleotide
uagccuaacggcacugugu

SEQ ID NO: 2286256 - RNA, 19 nt, Artificial Sequence
  Description of Artificial Sequence: Synthetic oligonucleotide
ugcccuaauuuguugucug

SEQ ID NO: 2286257 - RNA, 19 nt, Artificial Sequence
  Description of Artificial Sequence: Synthetic oligonucleotide
caaaaccuuuagccuaacg

SEQ ID NO: 2286258 - RNA, 19 nt, Artificial Sequence
  Description of Artificial Sequence: Synthetic oligonucleotide
ucaccagaugaacuuuacu

SEQ ID NO: 2286259 - RNA, 19 nt, Artificial Sequence
  Description of Artificial Sequence: Synthetic oligonucleotide
cuucaguaaagccaaucca

SEQ ID NO: 2286260 - RNA, 19 nt, Artificial Sequence
  Description of Artificial Sequence: Synthetic oligonucleotide
ucuguaagacgcugccuca

SEQ ID NO: 2286261 - RNA, 19 nt, Artificial Sequence
  Description of Artificial Sequence: Synthetic oligonucleotide
ugcaguccaucccugcuga

SEQ ID NO: 2286262 - RNA, 19 nt, Artificial Sequence
  Description of Artificial Sequence: Synthetic oligonucleotide
aggcacucuaaaccuacag

SEQ ID NO: 2286263 - RNA, 19 nt, Artificial Sequence
  Description of Artificial Sequence: Synthetic oligonucleotide
aacuccggcaucagugacg

SEQ ID NO: 2286264 - RNA, 19 nt, Artificial Sequence
  Description of Artificial Sequence: Synthetic oligonucleotide
cauuucauucuucaguaaa

SEQ ID NO: 2286265 - RNA, 19 nt, Artificial Sequence
  Description of Artificial Sequence: Synthetic oligonucleotide
ucgucaacaucuucaucca

SEQ ID NO: 2286266 - RNA, 19 nt, Artificial Sequence
  Description of Artificial Sequence: Synthetic oligonucleotide
uggucuguuugaauuuccu

SEQ ID NO: 2286267 - RNA, 19 nt, Artificial Sequence
  Description of Artificial Sequence: Synthetic oligonucleotide
uccuagcugauuccucuug

SEQ ID NO: 2286268 - RNA, 19 nt, Artificial Sequence
  Description of Artificial Sequence: Synthetic oligonucleotide
uguuugaauuuccuuccuu

SEQ ID NO: 2286269 - RNA, 19 nt, Artificial Sequence
  Description of Artificial Sequence: Synthetic oligonucleotide
agagaugguucaauuaacu

SEQ ID NO: 2286270 - RNA, 19 nt, Artificial Sequence
  Description of Artificial Sequence: Synthetic oligonucleotide
ucaugccaaagcgaugcag

SEQ ID NO: 2286271 - RNA, 19 nt, Artificial Sequence
  Description of Artificial Sequence: Synthetic oligonucleotide
uuuggcguccucaguuuga

SEQ ID NO: 2286272 - RNA, 19 nt, Artificial Sequence
  Description of Artificial Sequence: Synthetic oligonucleotide
cucuaaaccuacaggccug

SEQ ID NO: 2286273 - RNA, 19 nt, Artificial Sequence
  Description of Artificial Sequence: Synthetic oligonucleotide
uccaucuaaaagugaacuu

SEQ ID NO: 2286274 - RNA, 19 nt, Artificial Sequence
  Description of Artificial Sequence: Synthetic oligonucleotide
augcgcauggaaaugagga

SEQ ID NO: 2286275 - RNA, 19 nt, Artificial Sequence
  Description of Artificial Sequence: Synthetic oligonucleotide
uaaacagcccuuuggcuuu

SEQ ID NO: 2286276 - RNA, 19 nt, Artificial Sequence
  Description of Artificial Sequence: Synthetic oligonucleotide
uauguccuagcugauuccu

SEQ ID NO: 2286277 - RNA, 19 nt, Artificial Sequence
  Description of Artificial Sequence: Synthetic oligonucleotide
ggauccuaccuagagagag

SEQ ID NO: 2286278 - RNA, 19 nt, Artificial Sequence
  Description of Artificial Sequence: Synthetic oligonucleotide
guaccacugcccuaauuug

SEQ ID NO: 2286279 - RNA, 19 nt, Artificial Sequence
  Description of Artificial Sequence: Synthetic oligonucleotide
guagaauaugcgcauggaa

SEQ ID NO: 2286280 - RNA, 19 nt, Artificial Sequence
  Description of Artificial Sequence: Synthetic oligonucleotide
uggacccauaggcugcaag

SEQ ID NO: 2286281 - RNA, 19 nt, Artificial Sequence
  Description of Artificial Sequence: Synthetic oligonucleotide
acuuuacugcuugagacau

SEQ ID NO: 2286282 - RNA, 19 nt, Artificial Sequence
  Description of Artificial Sequence: Synthetic oligonucleotide
gcugcaagucuguaagacg

SEQ ID NO: 2286283 - RNA, 19 nt, Artificial Sequence
  Description of Artificial Sequence: Synthetic oligonucleotide
caaagcgaugcagugacuc

SEQ ID NO: 2286284 - RNA, 19 nt, Artificial Sequence
  Description of Artificial Sequence: Synthetic oligonucleotide
ccuaccuagagagaguucc

SEQ ID NO: 2286285 - RNA, 19 nt, Artificial Sequence
  Description of Artificial Sequence: Synthetic oligonucleotide
uucugguguaagaaauaau

SEQ ID NO: 2286286 - RNA, 19 nt, Artificial Sequence
  Description of Artificial Sequence: Synthetic oligonucleotide
gaggauauuucaagaugug

SEQ ID NO: 2286287 - RNA, 19 nt, Artificial Sequence
  Description of Artificial Sequence: Synthetic oligonucleotide
cucaguuugaagaaaguau

SEQ ID NO: 2286288 - RNA, 19 nt, Artificial Sequence
  Description of Artificial Sequence: Synthetic oligonucleotide
uccucaguuugaagaaagu

SEQ ID NO: 2286289 - RNA, 19 nt, Artificial Sequence
  Description of Artificial Sequence: Synthetic oligonucleotide
gccuguagcauccugguac

SEQ ID NO: 2286290 - RNA, 19 nt, Artificial Sequence
  Description of Artificial Sequence: Synthetic oligonucleotide
cuuguuuggucaccagaug

SEQ ID NO: 2286291 - RNA, 19 nt, Artificial Sequence
  Description of Artificial Sequence: Synthetic oligonucleotide
accuuuagccuaacggcac

SEQ ID NO: 2286292 - RNA, 19 nt, Artificial Sequence
  Description of Artificial Sequence: Synthetic oligonucleotide
cuaacggcacuguguaaac

SEQ ID NO: 2286293 - RNA, 19 nt, Artificial Sequence
  Description of Artificial Sequence: Synthetic oligonucleotide
ucuaaaccuacaggccugc

SEQ ID NO: 2286294 - RNA, 19 nt, Artificial Sequence
  Description of Artificial Sequence: Synthetic oligonucleotide
gacuaguugguaugacaca

SEQ ID NO: 2286295 - RNA, 19 nt, Artificial Sequence
  Description of Artificial Sequence: Synthetic oligonucleotide
gaaccaggccuggauacag

SEQ ID NO: 2286296 - RNA, 19 nt, Artificial Sequence
  Description of Artificial Sequence: Synthetic oligonucleotide
uguugucuggguacugaau

SEQ ID NO: 2286297 - RNA, 19 nt, Artificial Sequence
  Description of Artificial Sequence: Synthetic oligonucleotide
augcagugacucuagcaga

SEQ ID NO: 2286298 - RNA, 19 nt, Artificial Sequence
  Description of Artificial Sequence: Synthetic oligonucleotide
gugaacuuaauaagucaac

SEQ ID NO: 2286299 - RNA, 19 nt, Artificial Sequence
  Description of Artificial Sequence: Synthetic oligonucleotide
cuccuugguaccacugccc

SEQ ID NO: 2286300 - RNA, 19 nt, Artificial Sequence
  Description of Artificial Sequence: Synthetic oligonucleotide
cuaauuuguugucugggua

SEQ ID NO: 2286301 - RNA, 19 nt, Artificial Sequence
  Description of Artificial Sequence: Synthetic oligonucleotide
ggacuaguugguaugacac

SEQ ID NO: 2286302 - RNA, 19 nt, Artificial Sequence
  Description of Artificial Sequence: Synthetic oligonucleotide
ugcaagucuguaagacgcu

SEQ ID NO: 2286303 - RNA, 19 nt, Artificial Sequence
  Description of Artificial Sequence: Synthetic oligonucleotide
ucuagcagagcccgcucuc

SEQ ID NO: 2286304 - RNA, 19 nt, Artificial Sequence
  Description of Artificial Sequence: Synthetic oligonucleotide
aucuucauccaagcagauc

SEQ ID NO: 2286305 - RNA, 19 nt, Artificial Sequence
  Description of Artificial Sequence: Synthetic oligonucleotide
guaagacgcugccucauuc

SEQ ID NO: 2286306 - RNA, 19 nt, Artificial Sequence
  Description of Artificial Sequence: Synthetic oligonucleotide
ugcgcauggaaaugaggaa

SEQ ID NO: 2286307 - RNA, 19 nt, Artificial Sequence
  Description of Artificial Sequence: Synthetic oligonucleotide
uccuagagaugguucaauu

SEQ ID NO: 2286308 - RNA, 19 nt, Artificial Sequence
  Description of Artificial Sequence: Synthetic oligonucleotide
guauccaaguacuggcaga

SEQ ID NO: 2286309 - RNA, 19 nt, Artificial Sequence
  Description of Artificial Sequence: Synthetic oligonucleotide
gcugaggacuccuugguac

SEQ ID NO: 2286310 - RNA, 19 nt, Artificial Sequence
  Description of Artificial Sequence: Synthetic oligonucleotide
aucagugacgagugugccu

SEQ ID NO: 2286311 - RNA, 19 nt, Artificial Sequence
  Description of Artificial Sequence: Synthetic oligonucleotide
cuggauacagccuuccucu

SEQ ID NO: 2286312 - RNA, 19 nt, Artificial Sequence
  Description of Artificial Sequence: Synthetic oligonucleotide
ggcguccucaguuugaaga

SEQ ID NO: 2286313 - RNA, 19 nt, Artificial Sequence
  Description of Artificial Sequence: Synthetic oligonucleotide
cauccugguacauucagcu

SEQ ID NO: 2286314 - RNA, 19 nt, Artificial Sequence
  Description of Artificial Sequence: Synthetic oligonucleotide
cucgaacucggaacuccgg

SEQ ID NO: 2286315 - RNA, 19 nt, Artificial Sequence
  Description of Artificial Sequence: Synthetic oligonucleotide
uggguacugaauguuguau

SEQ ID NO: 2286316 - RNA, 19 nt, Artificial Sequence
  Description of Artificial Sequence: Synthetic oligonucleotide
ugauuccucuuguuugguc

SEQ ID NO: 2286317 - RNA, 19 nt, Artificial Sequence
  Description of Artificial Sequence: Synthetic oligonucleotide
gccaaagcgaugcagugac

SEQ ID NO: 2286318 - RNA, 19 nt, Artificial Sequence
  Description of Artificial Sequence: Synthetic oligonucleotide
agccuaacggcacugugua

SEQ ID NO: 2286319 - RNA, 19 nt, Artificial Sequence
  Description of Artificial Sequence: Synthetic oligonucleotide
gugacgagugugccuuugg

SEQ ID NO: 2286320 - RNA, 19 nt, Artificial Sequence
  Description of Artificial Sequence: Synthetic oligonucleotide
cugaauguuguauccaagu

SEQ ID NO: 2286321 - RNA, 19 nt, Artificial Sequence
  Description of Artificial Sequence: Synthetic oligonucleotide
auggacuaguugguaugac

SEQ ID NO: 2286322 - RNA, 19 nt, Artificial Sequence
  Description of Artificial Sequence: Synthetic oligonucleotide
gcauggacguagaauaugc

SEQ ID NO: 2286323 - RNA, 19 nt, Artificial Sequence
  Description of Artificial Sequence: Synthetic oligonucleotide
uuuagccuaacggcacugu

SEQ ID NO: 2286324 - RNA, 19 nt, Artificial Sequence
  Description of Artificial Sequence: Synthetic oligonucleotide
caaguacuggcagaaccac

SEQ ID NO: 2286325 - RNA, 19 nt, Artificial Sequence
  Description of Artificial Sequence: Synthetic oligonucleotide
caagcagauccacgguccc

SEQ ID NO: 2286326 - RNA, 19 nt, Artificial Sequence
  Description of Artificial Sequence: Synthetic oligonucleotide
uucagggcaggcacucuaa

SEQ ID NO: 2286327 - RNA, 19 nt, Artificial Sequence
  Description of Artificial Sequence: Synthetic oligonucleotide
ccaagcagauccacggucc

SEQ ID NO: 2286328 - RNA, 19 nt, Artificial Sequence
  Description of Artificial Sequence: Synthetic oligonucleotide
caaggauccuaccuagaga

SEQ ID NO: 2286329 - RNA, 19 nt, Artificial Sequence
  Description of Artificial Sequence: Synthetic oligonucleotide
guuuggucaccagaugaac

SEQ ID NO: 2286330 - RNA, 19 nt, Artificial Sequence
  Description of Artificial Sequence: Synthetic oligonucleotide
cuuuggcguccucaguuug

SEQ ID NO: 2286331 - RNA, 19 nt, Artificial Sequence
  Description of Artificial Sequence: Synthetic oligonucleotide
uguaagacgcugccucauu

SEQ ID NO: 2286332 - RNA, 19 nt, Artificial Sequence
  Description of Artificial Sequence: Synthetic oligonucleotide
gagagaguuccuagagaug

SEQ ID NO: 2286333 - RNA, 19 nt, Artificial Sequence
  Description of Artificial Sequence: Synthetic oligonucleotide
gaacuccggcaucagugac

SEQ ID NO: 2286334 - RNA, 19 nt, Artificial Sequence
  Description of Artificial Sequence: Synthetic oligonucleotide
guauugcauauguccuagc

SEQ ID NO: 2286335 - RNA, 19 nt, Artificial Sequence
  Description of Artificial Sequence: Synthetic oligonucleotide
gacguagaauaugcgcaug

SEQ ID NO: 2286336 - RNA, 19 nt, Artificial Sequence
  Description of Artificial Sequence: Synthetic oligonucleotide
gacgcugccucauuccaaa

SEQ ID NO: 2286337 - RNA, 19 nt, Artificial Sequence
  Description of Artificial Sequence: Synthetic oligonucleotide
cuagcagagcccgcucucg

SEQ ID NO: 2286338 - RNA, 19 nt, Artificial Sequence
  Description of Artificial Sequence: Synthetic oligonucleotide
acacauugugaggauauuu

SEQ ID NO: 2286339 - RNA, 19 nt, Artificial Sequence
  Description of Artificial Sequence: Synthetic oligonucleotide
auaugcgcauggaaaugag

SEQ ID NO: 2286340 - RNA, 19 nt, Artificial Sequence
  Description of Artificial Sequence: Synthetic oligonucleotide
uggauacagccuuccucug

SEQ ID NO: 2286341 - RNA, 19 nt, Artificial Sequence
  Description of Artificial Sequence: Synthetic oligonucleotide
guccauaguaauucacaaa

SEQ ID NO: 2286342 - RNA, 19 nt, Artificial Sequence
  Description of Artificial Sequence: Synthetic oligonucleotide
aaacugcuccagcaaugua

SEQ ID NO: 2286343 - RNA, 19 nt, Artificial Sequence
  Description of Artificial Sequence: Synthetic oligonucleotide
auuccaaaucuugcugcug

SEQ ID NO: 2286344 - RNA, 19 nt, Artificial Sequence
  Description of Artificial Sequence: Synthetic oligonucleotide
gaguuccuagagaugguuc

SEQ ID NO: 2286345 - RNA, 19 nt, Artificial Sequence
  Description of Artificial Sequence: Synthetic oligonucleotide
agagcccgcucucgaacuc

SEQ ID NO: 2286346 - RNA, 19 nt, Artificial Sequence
  Description of Artificial Sequence: Synthetic oligonucleotide
cacaaaaccuuuagccuaa

SEQ ID NO: 2286347 - RNA, 19 nt, Artificial Sequence
  Description of Artificial Sequence: Synthetic oligonucleotide
cuucugguguaagaaauaa

SEQ ID NO: 2286348 - RNA, 19 nt, Artificial Sequence
  Description of Artificial Sequence: Synthetic oligonucleotide
caccauuucauucuucagu

SEQ ID NO: 2286349 - RNA, 19 nt, Artificial Sequence
  Description of Artificial Sequence: Synthetic oligonucleotide
gcuguaggcauggacguag

SEQ ID NO: 2286350 - RNA, 19 nt, Artificial Sequence
  Description of Artificial Sequence: Synthetic oligonucleotide
aagcgaugcagugacucua

SEQ ID NO: 2286351 - RNA, 19 nt, Artificial Sequence
  Description of Artificial Sequence: Synthetic oligonucleotide
cuuuacugcuugagacaug

SEQ ID NO: 2286352 - RNA, 19 nt, Artificial Sequence
  Description of Artificial Sequence: Synthetic oligonucleotide
acuccggcaucagugacga

SEQ ID NO: 2286353 - RNA, 19 nt, Artificial Sequence
  Description of Artificial Sequence: Synthetic oligonucleotide
ugcauauguccuagcugau

SEQ ID NO: 2286354 - RNA, 19 nt, Artificial Sequence
  Description of Artificial Sequence: Synthetic oligonucleotide
gccaauccaauuuggucug

SEQ ID NO: 2286355 - RNA, 19 nt, Artificial Sequence
  Description of Artificial Sequence: Synthetic oligonucleotide
gucuggguacugaauguug

SEQ ID NO: 2286356 - RNA, 19 nt, Artificial Sequence
  Description of Artificial Sequence: Synthetic oligonucleotide
uaacggcacuguguaaaca

SEQ ID NO: 2286357 - RNA, 19 nt, Artificial Sequence
  Description of Artificial Sequence: Synthetic oligonucleotide
gacccauaggcugcaaguc

SEQ ID NO: 2286358 - RNA, 19 nt, Artificial Sequence
  Description of Artificial Sequence: Synthetic oligonucleotide
ugaggacuccuugguacca

SEQ ID NO: 2286359 - RNA, 19 nt, Artificial Sequence
  Description of Artificial Sequence: Synthetic oligonucleotide
ucggaacuccggcaucagu

SEQ ID NO: 2286360 - RNA, 19 nt, Artificial Sequence
  Description of Artificial Sequence: Synthetic oligonucleotide
cuuuagccuaacggcacug

SEQ ID NO: 2286361 - RNA, 19 nt, Artificial Sequence
  Description of Artificial Sequence: Synthetic oligonucleotide
cuucugugguccauaguaa

SEQ ID NO: 2286362 - RNA, 19 nt, Artificial Sequence
  Description of Artificial Sequence: Synthetic oligonucleotide
cucugucaugccaaagcga

SEQ ID NO: 2286363 - RNA, 19 nt, Artificial Sequence
  Description of Artificial Sequence: Synthetic oligonucleotide
guaauucacaaaaccuuua

SEQ ID NO: 2286364 - RNA, 19 nt, Artificial Sequence
  Description of Artificial Sequence: Synthetic oligonucleotide
cagcccuuuggcuuuuguc

SEQ ID NO: 2286365 - RNA, 19 nt, Artificial Sequence
  Description of Artificial Sequence: Synthetic oligonucleotide
gcccuaauuuguugucugg

SEQ ID NO: 2286366 - RNA, 19 nt, Artificial Sequence
  Description of Artificial Sequence: Synthetic oligonucleotide
cugucaugccaaagcgaug

SEQ ID NO: 2286367 - RNA, 19 nt, Artificial Sequence
  Description of Artificial Sequence: Synthetic oligonucleotide
guguauugcauauguccua

SEQ ID NO: 2286368 - RNA, 19 nt, Artificial Sequence
  Description of Artificial Sequence: Synthetic oligonucleotide
aguugguaugacacauugu

SEQ ID NO: 2286369 - RNA, 19 nt, Artificial Sequence
  Description of Artificial Sequence: Synthetic oligonucleotide
ugacucuagcagagcccgc

SEQ ID NO: 2286370 - RNA, 19 nt, Artificial Sequence
  Description of Artificial Sequence: Synthetic oligonucleotide
agaguuccuagagaugguu

SEQ ID NO: 2286371 - RNA, 19 nt, Artificial Sequence
  Description of Artificial Sequence: Synthetic oligonucleotide
cacaccauugacacugucu

SEQ ID NO: 2286372 - RNA, 19 nt, Artificial Sequence
  Description of Artificial Sequence: Synthetic oligonucleotide
aggacuccuugguaccacu

SEQ ID NO: 2286373 - RNA, 19 nt, Artificial Sequence
  Description of Artificial Sequence: Synthetic oligonucleotide
uuccuagagaugguucaau

SEQ ID NO: 2286374 - RNA, 19 nt, Artificial Sequence
  Description of Artificial Sequence: Synthetic oligonucleotide
gagcccgcucucgaacucg

SEQ ID NO: 2286375 - RNA, 19 nt, Artificial Sequence
  Description of Artificial Sequence: Synthetic oligonucleotide
agcgaugcagugacucuag

SEQ ID NO: 2286376 - RNA, 19 nt, Artificial Sequence
  Description of Artificial Sequence: Synthetic oligonucleotide
ugcuugagacauguucguc

SEQ ID NO: 2286377 - RNA, 19 nt, Artificial Sequence
  Description of Artificial Sequence: Synthetic oligonucleotide
acucggaacuccggcauca

SEQ ID NO: 2286378 - RNA, 19 nt, Artificial Sequence
  Description of Artificial Sequence: Synthetic oligonucleotide
ucacaccauugacacuguc

SEQ ID NO: 2286379 - RNA, 19 nt, Artificial Sequence
  Description of Artificial Sequence: Synthetic oligonucleotide
auguccuagcugauuccuc

SEQ ID NO: 2286380 - RNA, 19 nt, Artificial Sequence
  Description of Artificial Sequence: Synthetic oligonucleotide
uccuaccuagagagaguuc

SEQ ID NO: 2286381 - RNA, 19 nt, Artificial Sequence
  Description of Artificial Sequence: Synthetic oligonucleotide
uaccuagagagaguuccua

SEQ ID NO: 2286382 - RNA, 19 nt, Artificial Sequence
  Description of Artificial Sequence: Synthetic oligonucleotide
uccacaucuucugguguaa

SEQ ID NO: 2286383 - RNA, 19 nt, Artificial Sequence
  Description of Artificial Sequence: Synthetic oligonucleotide
guucgucaacaucuucauc

SEQ ID NO: 2286384 - RNA, 19 nt, Artificial Sequence
  Description of Artificial Sequence: Synthetic oligonucleotide
guacuggcagaaccaccug

SEQ ID NO: 2286385 - RNA, 19 nt, Artificial Sequence
  Description of Artificial Sequence: Synthetic oligonucleotide
gccucauuccaaaucuugc

SEQ ID NO: 2286386 - RNA, 19 nt, Artificial Sequence
  Description of Artificial Sequence: Synthetic oligonucleotide
agugacgagugugccuuug

SEQ ID NO: 2286387 - RNA, 19 nt, Artificial Sequence
  Description of Artificial Sequence: Synthetic oligonucleotide
ggcugcaagucuguaagac

SEQ ID NO: 2286388 - RNA, 19 nt, Artificial Sequence
  Description of Artificial Sequence: Synthetic oligonucleotide
ucuggacccauaggcugca

SEQ ID NO: 2286389 - RNA, 19 nt, Artificial Sequence
  Description of Artificial Sequence: Synthetic oligonucleotide
gguguauugcauauguccu

SEQ ID NO: 2286390 - RNA, 19 nt, Artificial Sequence
  Description of Artificial Sequence: Synthetic oligonucleotide
agucuguaagacgcugccu

SEQ ID NO: 2286391 - RNA, 19 nt, Artificial Sequence
  Description of Artificial Sequence: Synthetic oligonucleotide
caccauugacacugucuuc

SEQ ID NO: 2286392 - RNA, 19 nt, Artificial Sequence
  Description of Artificial Sequence: Synthetic oligonucleotide
uuggcguccucaguuugaa

SEQ ID NO: 2286393 - RNA, 19 nt, Artificial Sequence
  Description of Artificial Sequence: Synthetic oligonucleotide
cggaacuccggcaucagug

SEQ ID NO: 2286394 - RNA, 19 nt, Artificial Sequence
  Description of Artificial Sequence: Synthetic oligonucleotide
gaacucggaacuccggcau

SEQ ID NO: 2286395 - RNA, 19 nt, Artificial Sequence
  Description of Artificial Sequence: Synthetic oligonucleotide
uggcguccucaguuugaag

SEQ ID NO: 2286396 - RNA, 19 nt, Artificial Sequence
  Description of Artificial Sequence: Synthetic oligonucleotide
ggcauggacguagaauaug

SEQ ID NO: 2286397 - RNA, 19 nt, Artificial Sequence
  Description of Artificial Sequence: Synthetic oligonucleotide
gcaaacugcuccagcaaug

SEQ ID NO: 2286398 - RNA, 19 nt, Artificial Sequence
  Description of Artificial Sequence: Synthetic oligonucleotide
auuucaagaugugccugua

SEQ ID NO: 2286399 - RNA, 19 nt, Artificial Sequence
  Description of Artificial Sequence: Synthetic oligonucleotide
aggcugcaagucuguaaga

SEQ ID NO: 2286400 - RNA, 19 nt, Artificial Sequence
  Description of Artificial Sequence: Synthetic oligonucleotide
cuuugaugucacaggcaaa

SEQ ID NO: 2286401 - RNA, 19 nt, Artificial Sequence
  Description of Artificial Sequence: Synthetic oligonucleotide
gagacauguucgucaacau

SEQ ID NO: 2286402 - RNA, 19 nt, Artificial Sequence
  Description of Artificial Sequence: Synthetic oligonucleotide
uggucaccagaugaacuuu

SEQ ID NO: 2286403 - RNA, 19 nt, Artificial Sequence
  Description of Artificial Sequence: Synthetic oligonucleotide
ccggcaucagugacgagug

SEQ ID NO: 2286404 - RNA, 19 nt, Artificial Sequence
  Description of Artificial Sequence: Synthetic oligonucleotide
guaggcauggacguagaau

SEQ ID NO: 2286405 - RNA, 19 nt, Artificial Sequence
  Description of Artificial Sequence: Synthetic oligonucleotide
accugguguauugcauaug

SEQ ID NO: 2286406 - RNA, 19 nt, Artificial Sequence
  Description of Artificial Sequence: Synthetic oligonucleotide
gacucuagcagagcccgcu

SEQ ID NO: 2286407 - RNA, 19 nt, Artificial Sequence
  Description of Artificial Sequence: Synthetic oligonucleotide
uuacugcuugagacauguu

SEQ ID NO: 2286408 - RNA, 19 nt, Artificial Sequence
  Description of Artificial Sequence: Synthetic oligonucleotide
ccuagagaugguucaauua

SEQ ID NO: 2286409 - RNA, 19 nt, Artificial Sequence
  Description of Artificial Sequence: Synthetic oligonucleotide
ggacccauaggcugcaagu

SEQ ID NO: 2286410 - RNA, 19 nt, Artificial Sequence
  Description of Artificial Sequence: Synthetic oligonucleotide
guuccuagagaugguucaa

SEQ ID NO: 2286411 - RNA, 19 nt, Artificial Sequence
  Description of Artificial Sequence: Synthetic oligonucleotide
gauccuaccuagagagagu

SEQ ID NO: 2286412 - RNA, 19 nt, Artificial Sequence
  Description of Artificial Sequence: Synthetic oligonucleotide
cuucagggcaggcacucua

SEQ ID NO: 2286413 - RNA, 19 nt, Artificial Sequence
  Description of Artificial Sequence: Synthetic oligonucleotide
ccuccaccacucuggaccc

SEQ ID NO: 2286414 - RNA, 19 nt, Artificial Sequence
  Description of Artificial Sequence: Synthetic oligonucleotide
caagaugugccuguagcau

SEQ ID NO: 2286415 - RNA, 19 nt, Artificial Sequence
  Description of Artificial Sequence: Synthetic oligonucleotide
caguaaagccaauccaauu

SEQ ID NO: 2286416 - RNA, 19 nt, Artificial Sequence
  Description of Artificial Sequence: Synthetic oligonucleotide
ccgcucucgaacucggaac

SEQ ID NO: 2286417 - RNA, 19 nt, Artificial Sequence
  Description of Artificial Sequence: Synthetic oligonucleotide
ccugguguauugcauaugu

SEQ ID NO: 2286418 - RNA, 19 nt, Artificial Sequence
  Description of Artificial Sequence: Synthetic oligonucleotide
ccugguacauucagcuuca

SEQ ID NO: 2286419 - RNA, 19 nt, Artificial Sequence
  Description of Artificial Sequence: Synthetic oligonucleotide
cuguaggcauggacguaga

SEQ ID NO: 2286420 - RNA, 19 nt, Artificial Sequence
  Description of Artificial Sequence: Synthetic oligonucleotide
gcgcauggaaaugaggaaa

SEQ ID NO: 2286421 - RNA, 19 nt, Artificial Sequence
  Description of Artificial Sequence: Synthetic oligonucleotide
ccuaacggcacuguguaaa

SEQ ID NO: 2286422 - RNA, 19 nt, Artificial Sequence
  Description of Artificial Sequence: Synthetic oligonucleotide
agcccgcucucgaacucgg

SEQ ID NO: 2286423 - RNA, 19 nt, Artificial Sequence
  Description of Artificial Sequence: Synthetic oligonucleotide
gugccuguagcauccuggu

SEQ ID NO: 2286424 - RNA, 19 nt, Artificial Sequence
  Description of Artificial Sequence: Synthetic oligonucleotide
cuaccuagagagaguuccu

SEQ ID NO: 2286425 - RNA, 19 nt, Artificial Sequence
  Description of Artificial Sequence: Synthetic oligonucleotide
cugcuugagacauguucgu

SEQ ID NO: 2286426 - RNA, 19 nt, Artificial Sequence
  Description of Artificial Sequence: Synthetic oligonucleotide
aggcauggacguagaauau

SEQ ID NO: 2286427 - RNA, 19 nt, Artificial Sequence
  Description of Artificial Sequence: Synthetic oligonucleotide
acaggaucauccacaucuu

SEQ ID NO: 2286428 - RNA, 19 nt, Artificial Sequence
  Description of Artificial Sequence: Synthetic oligonucleotide
caggcacucuaaaccuaca

SEQ ID NO: 2286429 - RNA, 19 nt, Artificial Sequence
  Description of Artificial Sequence: Synthetic oligonucleotide
aggauccuaccuagagaga

SEQ ID NO: 2286430 - RNA, 19 nt, Artificial Sequence
  Description of Artificial Sequence: Synthetic oligonucleotide
ugcuguaggcauggacgua

SEQ ID NO: 2286431 - RNA, 19 nt, Artificial Sequence
  Description of Artificial Sequence: Synthetic oligonucleotide
ccuaauuuguugucugggu

SEQ ID NO: 2286432 - RNA, 19 nt, Artificial Sequence
  Description of Artificial Sequence: Synthetic oligonucleotide
gcguccucaguuugaagaa

SEQ ID NO: 2286433 - RNA, 19 nt, Artificial Sequence
  Description of Artificial Sequence: Synthetic oligonucleotide
ccuguagcauccugguaca

SEQ ID NO: 2286434 - RNA, 19 nt, Artificial Sequence
  Description of Artificial Sequence: Synthetic oligonucleotide
cuguuugaauuuccuuccu

SEQ ID NO: 2286435 - RNA, 19 nt, Artificial Sequence
  Description of Artificial Sequence: Synthetic oligonucleotide
ggacguagaauaugcgcau

SEQ ID NO: 2286436 - RNA, 19 nt, Artificial Sequence
  Description of Artificial Sequence: Synthetic oligonucleotide
ccucauuccaaaucuugcu

SEQ ID NO: 2286437 - RNA, 19 nt, Artificial Sequence
  Description of Artificial Sequence: Synthetic oligonucleotide
ggacuccuugguaccacug

SEQ ID NO: 2286438 - RNA, 19 nt, Artificial Sequence
  Description of Artificial Sequence: Synthetic oligonucleotide
ccacugcccuaauuuguug

SEQ ID NO: 2286439 - RNA, 19 nt, Artificial Sequence
  Description of Artificial Sequence: Synthetic oligonucleotide
aaacagcccuuuggcuuuu

SEQ ID NO: 2286440 - RNA, 19 nt, Artificial Sequence
  Description of Artificial Sequence: Synthetic oligonucleotide
gcccuuuggcuuuugucaa

SEQ ID NO: 2286441 - RNA, 19 nt, Artificial Sequence
  Description of Artificial Sequence: Synthetic oligonucleotide
ggauacagccuuccucugu

SEQ ID NO: 2286442 - RNA, 19 nt, Artificial Sequence
  Description of Artificial Sequence: Synthetic oligonucleotide
cugguacauucagcuucag

SEQ ID NO: 2286443 - RNA, 19 nt, Artificial Sequence
  Description of Artificial Sequence: Synthetic oligonucleotide
gagaguuccuagagauggu

SEQ ID NO: 2286444 - RNA, 19 nt, Artificial Sequence
  Description of Artificial Sequence: Synthetic oligonucleotide
cuagcugauuccucuuguu

SEQ ID NO: 2286445 - RNA, 19 nt, Artificial Sequence
  Description of Artificial Sequence: Synthetic oligonucleotide
gcagugacucuagcagagc

SEQ ID NO: 2286446 - RNA, 19 nt, Artificial Sequence
  Description of Artificial Sequence: Synthetic oligonucleotide
agacgcugccucauuccaa

SEQ ID NO: 2286447 - RNA, 19 nt, Artificial Sequence
  Description of Artificial Sequence: Synthetic oligonucleotide
cucuagcagagcccgcucu

SEQ ID NO: 2286448 - RNA, 19 nt, Artificial Sequence
  Description of Artificial Sequence: Synthetic oligonucleotide
cuaaaccuacaggccugca

SEQ ID NO: 2286449 - RNA, 19 nt, Artificial Sequence
  Description of Artificial Sequence: Synthetic oligonucleotide
cuccagcaauguaugaguu

SEQ ID NO: 2286450 - RNA, 19 nt, Artificial Sequence
  Description of Artificial Sequence: Synthetic oligonucleotide
acgcugccucauuccaaau

SEQ ID NO: 2286451 - RNA, 19 nt, Artificial Sequence
  Description of Artificial Sequence: Synthetic oligonucleotide
ucccugcugaggacuccuu

SEQ ID NO: 2286452 - RNA, 19 nt, Artificial Sequence
  Description of Artificial Sequence: Synthetic oligonucleotide
ggccuggauacagccuucc

SEQ ID NO: 2286453 - RNA, 19 nt, Artificial Sequence
  Description of Artificial Sequence: Synthetic oligonucleotide
ccaaaucuucuguggucca

SEQ ID NO: 2286454 - RNA, 19 nt, Artificial Sequence
  Description of Artificial Sequence: Synthetic oligonucleotide
cgcauggaaaugaggaaaa

SEQ ID NO: 2286455 - RNA, 19 nt, Artificial Sequence
  Description of Artificial Sequence: Synthetic oligonucleotide
cccugcugaggacuccuug

SEQ ID NO: 2286456 - RNA, 19 nt, Artificial Sequence
  Description of Artificial Sequence: Synthetic oligonucleotide
ggucaccagaugaacuuua

SEQ ID NO: 2286457 - RNA, 19 nt, Artificial Sequence
  Description of Artificial Sequence: Synthetic oligonucleotide
cgaacucggaacuccggca

SEQ ID NO: 2286458 - RNA, 19 nt, Artificial Sequence
  Description of Artificial Sequence: Synthetic oligonucleotide
cauugacacugucuucuuu

SEQ ID NO: 2286459 - RNA, 19 nt, Artificial Sequence
  Description of Artificial Sequence: Synthetic oligonucleotide
cauaggcugcaagucugua

SEQ ID NO: 2286460 - RNA, 19 nt, Artificial Sequence
  Description of Artificial Sequence: Synthetic oligonucleotide
ccaucccugcugaggacuc

SEQ ID NO: 2286461 - RNA, 19 nt, Artificial Sequence
  Description of Artificial Sequence: Synthetic oligonucleotide
cugcccuaauuuguugucu

SEQ ID NO: 2286462 - RNA, 19 nt, Artificial Sequence
  Description of Artificial Sequence: Synthetic oligonucleotide
ccauuucauucuucaguaa

SEQ ID NO: 2286463 - RNA, 19 nt, Artificial Sequence
  Description of Artificial Sequence: Synthetic oligonucleotide
caaaucuucugugguccau

SEQ ID NO: 2286464 - RNA, 19 nt, Artificial Sequence
  Description of Artificial Sequence: Synthetic oligonucleotide
gaugugccuguagcauccu

SEQ ID NO: 2286465 - RNA, 19 nt, Artificial Sequence
  Description of Artificial Sequence: Synthetic oligonucleotide
cguagaauaugcgcaugga

SEQ ID NO: 2286466 - RNA, 19 nt, Artificial Sequence
  Description of Artificial Sequence: Synthetic oligonucleotide
cugauuccucuuguuuggu

SEQ ID NO: 2286467 - RNA, 19 nt, Artificial Sequence
  Description of Artificial Sequence: Synthetic oligonucleotide
ccuagcugauuccucuugu

SEQ ID NO: 2286468 - RNA, 19 nt, Artificial Sequence
  Description of Artificial Sequence: Synthetic oligonucleotide
cuccggcaucagugacgag

SEQ ID NO: 2286469 - RNA, 19 nt, Artificial Sequence
  Description of Artificial Sequence: Synthetic oligonucleotide
cuguaagacgcugccucau

SEQ ID NO: 2286470 - RNA, 19 nt, Artificial Sequence
  Description of Artificial Sequence: Synthetic oligonucleotide
gcucucgaacucggaacuc

SEQ ID NO: 2286471 - RNA, 19 nt, Artificial Sequence
  Description of Artificial Sequence: Synthetic oligonucleotide
caauccaauuuggucuguu

SEQ ID NO: 2286472 - RNA, 19 nt, Artificial Sequence
  Description of Artificial Sequence: Synthetic oligonucleotide
cccgcucucgaacucggaa

SEQ ID NO: 2286473 - RNA, 19 nt, Artificial Sequence
  Description of Artificial Sequence: Synthetic oligonucleotide
gucacaccauugacacugu

SEQ ID NO: 2286474 - RNA, 19 nt, Artificial Sequence
  Description of Artificial Sequence: Synthetic oligonucleotide
cuacaggccugcaguccau

SEQ ID NO: 2286475 - RNA, 19 nt, Artificial Sequence
  Description of Artificial Sequence: Synthetic oligonucleotide
ccuuuagccuaacggcacu

SEQ ID NO: 2286476 - RNA, 19 nt, Artificial Sequence
  Description of Artificial Sequence: Synthetic oligonucleotide
gccuaacggcacuguguaa

SEQ ID NO: 2286477 - RNA, 19 nt, Artificial Sequence
  Description of Artificial Sequence: Synthetic oligonucleotide
gcauauguccuagcugauu

SEQ ID NO: 2286478 - RNA, 19 nt, Artificial Sequence
  Description of Artificial Sequence: Synthetic oligonucleotide
gccuggauacagccuuccu

SEQ ID NO: 2286479 - RNA, 19 nt, Artificial Sequence
  Description of Artificial Sequence: Synthetic oligonucleotide
cgcucucgaacucggaacu

SEQ ID NO: 2286480 - RNA, 19 nt, Artificial Sequence
  Description of Artificial Sequence: Synthetic oligonucleotide
ccuugguaccacugcccua

SEQ ID NO: 2286481 - RNA, 19 nt, Artificial Sequence
  Description of Artificial Sequence: Synthetic oligonucleotide
ccuuuggcguccucaguuu

SEQ ID NO: 2286482 - RNA, 19 nt, Artificial Sequence
  Description of Artificial Sequence: Synthetic oligonucleotide
cuggacccauaggcugcaa

SEQ ID NO: 2286483 - RNA, 19 nt, Artificial Sequence
  Description of Artificial Sequence: Synthetic oligonucleotide
ccaauccaauuuggucugu

SEQ ID NO: 2286484 - RNA, 19 nt, Artificial Sequence
  Description of Artificial Sequence: Synthetic oligonucleotide
agaacaaaaccacacaagc

SEQ ID NO: 2286485 - RNA, 19 nt, Artificial Sequence
  Description of Artificial Sequence: Synthetic oligonucleotide
uagaccaugaaauugauuc

SEQ ID NO: 2286486 - RNA, 19 nt, Artificial Sequence
  Description of Artificial Sequence: Synthetic oligonucleotide
uuuaauagcccauucacga

SEQ ID NO: 2286487 - RNA, 19 nt, Artificial Sequence
  Description of Artificial Sequence: Synthetic oligonucleotide
uuuuaauagcccauucacg

SEQ ID NO: 2286488 - RNA, 19 nt, Artificial Sequence
  Description of Artificial Sequence: Synthetic oligonucleotide
auaacucgcaaccugugcc

SEQ ID NO: 2286489 - RNA, 19 nt, Artificial Sequence
  Description of Artificial Sequence: Synthetic oligonucleotide
gaagcuuucagucugguuc

SEQ ID NO: 2286490 - RNA, 19 nt, Artificial Sequence
  Description of Artificial Sequence: Synthetic oligonucleotide
auuuuagcgagucugagga

SEQ ID NO: 2286491 - RNA, 19 nt, Artificial Sequence
  Description of Artificial Sequence: Synthetic oligonucleotide
agggagaacgacuagcggc

SEQ ID NO: 2286492 - RNA, 19 nt, Artificial Sequence
  Description of Artificial Sequence: Synthetic oligonucleotide
cucauguucacaaaagaag

SEQ ID NO: 2286493 - RNA, 19 nt, Artificial Sequence
  Description of Artificial Sequence: Synthetic oligonucleotide
uucuaugugaugcugaguc

SEQ ID NO: 2286494 - RNA, 19 nt, Artificial Sequence
  Description of Artificial Sequence: Synthetic oligonucleotide
gucuuuauaacucgcaacc

SEQ ID NO: 2286495 - RNA, 19 nt, Artificial Sequence
  Description of Artificial Sequence: Synthetic oligonucleotide
uagaugcagacacuuauag

SEQ ID NO: 2286496 - RNA, 19 nt, Artificial Sequence
  Description of Artificial Sequence: Synthetic oligonucleotide
agucuuuauaacucgcaac

SEQ ID NO: 2286497 - RNA, 19 nt, Artificial Sequence
  Description of Artificial Sequence: Synthetic oligonucleotide
guugcuaugaagcuuucag

SEQ ID NO: 2286498 - RNA, 19 nt, Artificial Sequence
  Description of Artificial Sequence: Synthetic oligonucleotide
gaugcagacacuuauagcu

SEQ ID NO: 2286499 - RNA, 19 nt, Artificial Sequence
  Description of Artificial Sequence: Synthetic oligonucleotide
aagaggucgacuuuaaaua

SEQ ID NO: 2286500 - RNA, 19 nt, Artificial Sequence
  Description of Artificial Sequence: Synthetic oligonucleotide
uuuagaugcagacacuuau

SEQ ID NO: 2286501 - RNA, 19 nt, Artificial Sequence
  Description of Artificial Sequence: Synthetic oligonucleotide
aagagcuccagauuccgag

SEQ ID NO: 2286502 - RNA, 19 nt, Artificial Sequence
  Description of Artificial Sequence: Synthetic oligonucleotide
ucagggagaacgacuagcg

SEQ ID NO: 2286503 - RNA, 19 nt, Artificial Sequence
  Description of Artificial Sequence: Synthetic oligonucleotide
gauuuuagcgagucugagg

SEQ ID NO: 2286504 - RNA, 19 nt, Artificial Sequence
  Description of Artificial Sequence: Synthetic oligonucleotide
cuugcuuugcucacggucg

SEQ ID NO: 2286505 - RNA, 19 nt, Artificial Sequence
  Description of Artificial Sequence: Synthetic oligonucleotide
cauuucugguauuauaaag

SEQ ID NO: 2286506 - RNA, 19 nt, Artificial Sequence
  Description of Artificial Sequence: Synthetic oligonucleotide
uucauucauagauucuccg

SEQ ID NO: 2286507 - RNA, 19 nt, Artificial Sequence
  Description of Artificial Sequence: Synthetic oligonucleotide
uguuuacacuuucaaagca

SEQ ID NO: 2286508 - RNA, 19 nt, Artificial Sequence
  Description of Artificial Sequence: Synthetic oligonucleotide
uguucacaaaagaaggcca

SEQ ID NO: 2286509 - RNA, 19 nt, Artificial Sequence
  Description of Artificial Sequence: Synthetic oligonucleotide
auugauuccugcuucuaag

SEQ ID NO: 2286510 - RNA, 19 nt, Artificial Sequence
  Description of Artificial Sequence: Synthetic oligonucleotide
uucauagauucuccgaggc

SEQ ID NO: 2286511 - RNA, 19 nt, Artificial Sequence
  Description of Artificial Sequence: Synthetic oligonucleotide
uuucugguauuauaaaggu

SEQ ID NO: 2286512 - RNA, 19 nt, Artificial Sequence
  Description of Artificial Sequence: Synthetic oligonucleotide
uuaaauagcucuccacugu

SEQ ID NO: 2286513 - RNA, 19 nt, Artificial Sequence
  Description of Artificial Sequence: Synthetic oligonucleotide
uuagucuccacuucgggcu

SEQ ID NO: 2286514 - RNA, 19 nt, Artificial Sequence
  Description of Artificial Sequence: Synthetic oligonucleotide
uauacucucacaagccacc

SEQ ID NO: 2286515 - RNA, 19 nt, Artificial Sequence
  Description of Artificial Sequence: Synthetic oligonucleotide
cuauuucauucauagauuc

SEQ ID NO: 2286516 - RNA, 19 nt, Artificial Sequence
  Description of Artificial Sequence: Synthetic oligonucleotide
aaagaaggccaaguuuagc

SEQ ID NO: 2286517 - RNA, 19 nt, Artificial Sequence
  Description of Artificial Sequence: Synthetic oligonucleotide
uuauagcuggaguagcaag

SEQ ID NO: 2286518 - RNA, 19 nt, Artificial Sequence
  Description of Artificial Sequence: Synthetic oligonucleotide
aguuaaugcuucuauuucu

SEQ ID NO: 2286519 - RNA, 19 nt, Artificial Sequence
  Description of Artificial Sequence: Synthetic oligonucleotide
agagauuuuagcgagucug

SEQ ID NO: 2286520 - RNA, 19 nt, Artificial Sequence
  Description of Artificial Sequence: Synthetic oligonucleotide
uuccuuagucuccacuucg

SEQ ID NO: 2286521 - RNA, 19 nt, Artificial Sequence
  Description of Artificial Sequence: Synthetic oligonucleotide
ugguagaccaugaaauuga

SEQ ID NO: 2286522 - RNA, 19 nt, Artificial Sequence
  Description of Artificial Sequence: Synthetic oligonucleotide
auucauagauucuccgagg

SEQ ID NO: 2286523 - RNA, 19 nt, Artificial Sequence
  Description of Artificial Sequence: Synthetic oligonucleotide
uucucuuaaguacuccuca

SEQ ID NO: 2286524 - RNA, 19 nt, Artificial Sequence
  Description of Artificial Sequence: Synthetic oligonucleotide
augauuuuauguuuacacu

SEQ ID NO: 2286525 - RNA, 19 nt, Artificial Sequence
  Description of Artificial Sequence: Synthetic oligonucleotide
ucaaccagugcuucuaugu

SEQ ID NO: 2286526 - RNA, 19 nt, Artificial Sequence
  Description of Artificial Sequence: Synthetic oligonucleotide
uccuauacucucacaagcc

SEQ ID NO: 2286527 - RNA, 19 nt, Artificial Sequence
  Description of Artificial Sequence: Synthetic oligonucleotide
agaggucgacuuuaaauag

SEQ ID NO: 2286528 - RNA, 19 nt, Artificial Sequence
  Description of Artificial Sequence: Synthetic oligonucleotide
agaacgacuagcggcagcc

SEQ ID NO: 2286529 - RNA, 19 nt, Artificial Sequence
  Description of Artificial Sequence: Synthetic oligonucleotide
aauagcucuccacuguuaa

SEQ ID NO: 2286530 - RNA, 19 nt, Artificial Sequence
  Description of Artificial Sequence: Synthetic oligonucleotide
uauaacucgcaaccugugc

SEQ ID NO: 2286531 - RNA, 19 nt, Artificial Sequence
  Description of Artificial Sequence: Synthetic oligonucleotide
uuaauagcccauucacgag

SEQ ID NO: 2286532 - RNA, 19 nt, Artificial Sequence
  Description of Artificial Sequence: Synthetic oligonucleotide
uaauagcccauucacgagu

SEQ ID NO: 2286533 - RNA, 19 nt, Artificial Sequence
  Description of Artificial Sequence: Synthetic oligonucleotide
ucuauuucauucauagauu

SEQ ID NO: 2286534 - RNA, 19 nt, Artificial Sequence
  Description of Artificial Sequence: Synthetic oligonucleotide
uuaacauuguugcuaugaa

SEQ ID NO: 2286535 - RNA, 19 nt, Artificial Sequence
  Description of Artificial Sequence: Synthetic oligonucleotide
cuuuauaacucgcaaccug

SEQ ID NO: 2286536 - RNA, 19 nt, Artificial Sequence
  Description of Artificial Sequence: Synthetic oligonucleotide
gacugcuucucuuaaguac

SEQ ID NO: 2286537 - RNA, 19 nt, Artificial Sequence
  Description of Artificial Sequence: Synthetic oligonucleotide
aauugauuccugcuucuaa

SEQ ID NO: 2286538 - RNA, 19 nt, Artificial Sequence
  Description of Artificial Sequence: Synthetic oligonucleotide
ucuccgaggcuccugaagc

SEQ ID NO: 2286539 - RNA, 19 nt, Artificial Sequence
  Description of Artificial Sequence: Synthetic oligonucleotide
ucacgguugggccacacug

SEQ ID NO: 2286540 - RNA, 19 nt, Artificial Sequence
  Description of Artificial Sequence: Synthetic oligonucleotide
uuuagcccuugauuaaaag

SEQ ID NO: 2286541 - RNA, 19 nt, Artificial Sequence
  Description of Artificial Sequence: Synthetic oligonucleotide
aaguacuccucauguucac

SEQ ID NO: 2286542 - RNA, 19 nt, Artificial Sequence
  Description of Artificial Sequence: Synthetic oligonucleotide
ugagucuuuauaacucgca

SEQ ID NO: 2286543 - RNA, 19 nt, Artificial Sequence
  Description of Artificial Sequence: Synthetic oligonucleotide
uuuagcgagucugaggaug

SEQ ID NO: 2286544 - RNA, 19 nt, Artificial Sequence
  Description of Artificial Sequence: Synthetic oligonucleotide
cuuagucuccacuucgggc

SEQ ID NO: 2286545 - RNA, 19 nt, Artificial Sequence
  Description of Artificial Sequence: Synthetic oligonucleotide
uucguuuuccuuagucucc

SEQ ID NO: 2286546 - RNA, 19 nt, Artificial Sequence
  Description of Artificial Sequence: Synthetic oligonucleotide
accacuuucugucauggca

SEQ ID NO: 2286547 - RNA, 19 nt, Artificial Sequence
  Description of Artificial Sequence: Synthetic oligonucleotide
caaaagaaggccaaguuua

SEQ ID NO: 2286548 - RNA, 19 nt, Artificial Sequence
  Description of Artificial Sequence: Synthetic oligonucleotide
uuugguguucaaccagugc

SEQ ID NO: 2286549 - RNA, 19 nt, Artificial Sequence
  Description of Artificial Sequence: Synthetic oligonucleotide
uugguagaccaugaaauug

SEQ ID NO: 2286550 - RNA, 19 nt, Artificial Sequence
  Description of Artificial Sequence: Synthetic oligonucleotide
uucugguauuauaaaggug

SEQ ID NO: 2286551 - RNA, 19 nt, Artificial Sequence
  Description of Artificial Sequence: Synthetic oligonucleotide
ucguccuauacucucacaa

SEQ ID NO: 2286552 - RNA, 19 nt, Artificial Sequence
  Description of Artificial Sequence: Synthetic oligonucleotide
acaaaagaaggccaaguuu

SEQ ID NO: 2286553 - RNA, 19 nt, Artificial Sequence
  Description of Artificial Sequence: Synthetic oligonucleotide
ucgacuuuaaauagcucuc

SEQ ID NO: 2286554 - RNA, 19 nt, Artificial Sequence
  Description of Artificial Sequence: Synthetic oligonucleotide
uugauuccugcuucuaagc

SEQ ID NO: 2286555 - RNA, 19 nt, Artificial Sequence
  Description of Artificial Sequence: Synthetic oligonucleotide
cuucguuuuccuuagucuc

SEQ ID NO: 2286556 - RNA, 19 nt, Artificial Sequence
  Description of Artificial Sequence: Synthetic oligonucleotide
aaccagugcuucuauguga

SEQ ID NO: 2286557 - RNA, 19 nt, Artificial Sequence
  Description of Artificial Sequence: Synthetic oligonucleotide
uuauaacucgcaaccugug

SEQ ID NO: 2286558 - RNA, 19 nt, Artificial Sequence
  Description of Artificial Sequence: Synthetic oligonucleotide
guccuauacucucacaagc

SEQ ID NO: 2286559 - RNA, 19 nt, Artificial Sequence
  Description of Artificial Sequence: Synthetic oligonucleotide
acgaguggaugcugaaacc

SEQ ID NO: 2286560 - RNA, 19 nt, Artificial Sequence
  Description of Artificial Sequence: Synthetic oligonucleotide
uuuuccuuagucuccacuu

SEQ ID NO: 2286561 - RNA, 19 nt, Artificial Sequence
  Description of Artificial Sequence: Synthetic oligonucleotide
uuccgguuggugaacacug

SEQ ID NO: 2286562 - RNA, 19 nt, Artificial Sequence
  Description of Artificial Sequence: Synthetic oligonucleotide
acggucgucagggagaacg

SEQ ID NO: 2286563 - RNA, 19 nt, Artificial Sequence
  Description of Artificial Sequence: Synthetic oligonucleotide
aaaagaaggccaaguuuag

SEQ ID NO: 2286564 - RNA, 19 nt, Artificial Sequence
  Description of Artificial Sequence: Synthetic oligonucleotide
cuauacucucacaagccac

SEQ ID NO: 2286565 - RNA, 19 nt, Artificial Sequence
  Description of Artificial Sequence: Synthetic oligonucleotide
gacacuuauagcuggagua

SEQ ID NO: 2286566 - RNA, 19 nt, Artificial Sequence
  Description of Artificial Sequence: Synthetic oligonucleotide
caaguuuagcccuugauua

SEQ ID NO: 2286567 - RNA, 19 nt, Artificial Sequence
  Description of Artificial Sequence: Synthetic oligonucleotide
aagcaguuaaugcuucuau

SEQ ID NO: 2286568 - RNA, 19 nt, Artificial Sequence
  Description of Artificial Sequence: Synthetic oligonucleotide
cauuuugguguucaaccag

SEQ ID NO: 2286569 - RNA, 19 nt, Artificial Sequence
  Description of Artificial Sequence: Synthetic oligonucleotide
caagcacacacagaagugg

SEQ ID NO: 2286570 - RNA, 19 nt, Artificial Sequence
  Description of Artificial Sequence: Synthetic oligonucleotide
guuaacauuguugcuauga

SEQ ID NO: 2286571 - RNA, 19 nt, Artificial Sequence
  Description of Artificial Sequence: Synthetic oligonucleotide
cuuucagucugguucuccc

SEQ ID NO: 2286572 - RNA, 19 nt, Artificial Sequence
  Description of Artificial Sequence: Synthetic oligonucleotide
acucucacaagccaccaca

SEQ ID NO: 2286573 - RNA, 19 nt, Artificial Sequence
  Description of Artificial Sequence: Synthetic oligonucleotide
cauagauucuccgaggcuc

SEQ ID NO: 2286574 - RNA, 19 nt, Artificial Sequence
  Description of Artificial Sequence: Synthetic oligonucleotide
uuuugguguucaaccagug

SEQ ID NO: 2286575 - RNA, 19 nt, Artificial Sequence
  Description of Artificial Sequence: Synthetic oligonucleotide
ugaaaccaccaccuggcca

SEQ ID NO: 2286576 - RNA, 19 nt, Artificial Sequence
  Description of Artificial Sequence: Synthetic oligonucleotide
uuugcucacggucgucagg

SEQ ID NO: 2286577 - RNA, 19 nt, Artificial Sequence
  Description of Artificial Sequence: Synthetic oligonucleotide
aguggaugcugaaaccacc

SEQ ID NO: 2286578 - RNA, 19 nt, Artificial Sequence
  Description of Artificial Sequence: Synthetic oligonucleotide
ugggacguaggcaaagccu

SEQ ID NO: 2286579 - RNA, 19 nt, Artificial Sequence
  Description of Artificial Sequence: Synthetic oligonucleotide
cacauuucugguauuauaa

SEQ ID NO: 2286580 - RNA, 19 nt, Artificial Sequence
  Description of Artificial Sequence: Synthetic oligonucleotide
aaguuuagcccuugauuaa

SEQ ID NO: 2286581 - RNA, 19 nt, Artificial Sequence
  Description of Artificial Sequence: Synthetic oligonucleotide
ccacuguuaacauuguugc

SEQ ID NO: 2286582 - RNA, 19 nt, Artificial Sequence
  Description of Artificial Sequence: Synthetic oligonucleotide
gaagaggucgacuuuaaau

SEQ ID NO: 2286583 - RNA, 19 nt, Artificial Sequence
  Description of Artificial Sequence: Synthetic oligonucleotide
auagauucuccgaggcucc

SEQ ID NO: 2286584 - RNA, 19 nt, Artificial Sequence
  Description of Artificial Sequence: Synthetic oligonucleotide
acuguuaacauuguugcua

SEQ ID NO: 2286585 - RNA, 19 nt, Artificial Sequence
  Description of Artificial Sequence: Synthetic oligonucleotide
ugguugguagaccaugaaa

SEQ ID NO: 2286586 - RNA, 19 nt, Artificial Sequence
  Description of Artificial Sequence: Synthetic oligonucleotide
uugcuaugaagcuuucagu

SEQ ID NO: 2286587 - RNA, 19 nt, Artificial Sequence
  Description of Artificial Sequence: Synthetic oligonucleotide
gucgacuuuaaauagcucu

SEQ ID NO: 2286588 - RNA, 19 nt, Artificial Sequence
  Description of Artificial Sequence: Synthetic oligonucleotide
gaacccacacuccagcuuc

SEQ ID NO: 2286589 - RNA, 19 nt, Artificial Sequence
  Description of Artificial Sequence: Synthetic oligonucleotide
ucacaagccaccacauuuc

SEQ ID NO: 2286590 - RNA, 19 nt, Artificial Sequence
  Description of Artificial Sequence: Synthetic oligonucleotide
acacuuauagcuggaguag

SEQ ID NO: 2286591 - RNA, 19 nt, Artificial Sequence
  Description of Artificial Sequence: Synthetic oligonucleotide
uuagaugcagacacuuaua

SEQ ID NO: 2286592 - RNA, 19 nt, Artificial Sequence
  Description of Artificial Sequence: Synthetic oligonucleotide
aauagcccauucacgagug

SEQ ID NO: 2286593 - RNA, 19 nt, Artificial Sequence
  Description of Artificial Sequence: Synthetic oligonucleotide
cagaacucacgguugggcc

SEQ ID NO: 2286594 - RNA, 19 nt, Artificial Sequence
  Description of Artificial Sequence: Synthetic oligonucleotide
auuccgaggguuccgguug

SEQ ID NO: 2286595 - RNA, 19 nt, Artificial Sequence
  Description of Artificial Sequence: Synthetic oligonucleotide
ucauagauucuccgaggcu

SEQ ID NO: 2286596 - RNA, 19 nt, Artificial Sequence
  Description of Artificial Sequence: Synthetic oligonucleotide
cugagucuuuauaacucgc

SEQ ID NO: 2286597 - RNA, 19 nt, Artificial Sequence
  Description of Artificial Sequence: Synthetic oligonucleotide
ugcgaacccacacuccagc

SEQ ID NO: 2286598 - RNA, 19 nt, Artificial Sequence
  Description of Artificial Sequence: Synthetic oligonucleotide
uuuuagaugcagacacuua

SEQ ID NO: 2286599 - RNA, 19 nt, Artificial Sequence
  Description of Artificial Sequence: Synthetic oligonucleotide
uuucugucauggcauucug

SEQ ID NO: 2286600 - RNA, 19 nt, Artificial Sequence
  Description of Artificial Sequence: Synthetic oligonucleotide
gcugagucuuuauaacucg

SEQ ID NO: 2286601 - RNA, 19 nt, Artificial Sequence
  Description of Artificial Sequence: Synthetic oligonucleotide
agugggaagaggucgacuu

SEQ ID NO: 2286602 - RNA, 19 nt, Artificial Sequence
  Description of Artificial Sequence: Synthetic oligonucleotide
ucuuuauaacucgcaaccu

SEQ ID NO: 2286603 - RNA, 19 nt, Artificial Sequence
  Description of Artificial Sequence: Synthetic oligonucleotide
acucguccuauacucucac

SEQ ID NO: 2286604 - RNA, 19 nt, Artificial Sequence
  Description of Artificial Sequence: Synthetic oligonucleotide
gaagcgccaucgccgaugg

SEQ ID NO: 2286605 - RNA, 19 nt, Artificial Sequence
  Description of Artificial Sequence: Synthetic oligonucleotide
ugaaucgcuggcgaggaac

SEQ ID NO: 2286606 - RNA, 19 nt, Artificial Sequence
  Description of Artificial Sequence: Synthetic oligonucleotide
ucuaugugaugcugagucu

SEQ ID NO: 2286607 - RNA, 19 nt, Artificial Sequence
  Description of Artificial Sequence: Synthetic oligonucleotide
agcaagugaugauuuuaug

SEQ ID NO: 2286608 - RNA, 19 nt, Artificial Sequence
  Description of Artificial Sequence: Synthetic oligonucleotide
uuggugaacacuggggcca

SEQ ID NO: 2286609 - RNA, 19 nt, Artificial Sequence
  Description of Artificial Sequence: Synthetic oligonucleotide
cuucucuuaaguacuccuc

SEQ ID NO: 2286610 - RNA, 19 nt, Artificial Sequence
  Description of Artificial Sequence: Synthetic oligonucleotide
uucccgcaaacugacagcc

SEQ ID NO: 2286611 - RNA, 19 nt, Artificial Sequence
  Description of Artificial Sequence: Synthetic oligonucleotide
uucauuccuuucuuucugu

SEQ ID NO: 2286612 - RNA, 19 nt, Artificial Sequence
  Description of Artificial Sequence: Synthetic oligonucleotide
agugacugcuucucuuaag

SEQ ID NO: 2286613 - RNA, 19 nt, Artificial Sequence
  Description of Artificial Sequence: Synthetic oligonucleotide
acuagcggcagccauguua

SEQ ID NO: 2286614 - RNA, 19 nt, Artificial Sequence
  Description of Artificial Sequence: Synthetic oligonucleotide
uaggcaaagccucccagua

SEQ ID NO: 2286615 - RNA, 19 nt, Artificial Sequence
  Description of Artificial Sequence: Synthetic oligonucleotide
cucuuaaguacuccucaug

SEQ ID NO: 2286616 - RNA, 19 nt, Artificial Sequence
  Description of Artificial Sequence: Synthetic oligonucleotide
acaccacuuucugucaugg

SEQ ID NO: 2286617 - RNA, 19 nt, Artificial Sequence
  Description of Artificial Sequence: Synthetic oligonucleotide
ggcaaagccucccaguacc

SEQ ID NO: 2286618 - RNA, 19 nt, Artificial Sequence
  Description of Artificial Sequence: Synthetic oligonucleotide
uccgguuggugaacacugg

SEQ ID NO: 2286619 - RNA, 19 nt, Artificial Sequence
  Description of Artificial Sequence: Synthetic oligonucleotide
aacgacuagcggcagccau

SEQ ID NO: 2286620 - RNA, 19 nt, Artificial Sequence
  Description of Artificial Sequence: Synthetic oligonucleotide
agacccgcggcugaagcgc

SEQ ID NO: 2286621 - RNA, 19 nt, Artificial Sequence
  Description of Artificial Sequence: Synthetic oligonucleotide
ucgucagggagaacgacua

SEQ ID NO: 2286622 - RNA, 19 nt, Artificial Sequence
  Description of Artificial Sequence: Synthetic oligonucleotide
aggaguugguugguagacc

SEQ ID NO: 2286623 - RNA, 19 nt, Artificial Sequence
  Description of Artificial Sequence: Synthetic oligonucleotide
ggaugcugaaaccaccacc

SEQ ID NO: 2286624 - RNA, 19 nt, Artificial Sequence
  Description of Artificial Sequence: Synthetic oligonucleotide
cugcuucuaagcaucgcug

SEQ ID NO: 2286625 - RNA, 19 nt, Artificial Sequence
  Description of Artificial Sequence: Synthetic oligonucleotide
ucgccgaugggacguaggc

SEQ ID NO: 2286626 - RNA, 19 nt, Artificial Sequence
  Description of Artificial Sequence: Synthetic oligonucleotide
gcuggcgaggaacuggucg

SEQ ID NO: 2286627 - RNA, 19 nt, Artificial Sequence
  Description of Artificial Sequence: Synthetic oligonucleotide
gaggucgacuuuaaauagc

SEQ ID NO: 2286628 - RNA, 19 nt, Artificial Sequence
  Description of Artificial Sequence: Synthetic oligonucleotide
cagcacucguccuauacuc

SEQ ID NO: 2286629 - RNA, 19 nt, Artificial Sequence
  Description of Artificial Sequence: Synthetic oligonucleotide
ucucuuaaguacuccucau

SEQ ID NO: 2286630 - RNA, 19 nt, Artificial Sequence
  Description of Artificial Sequence: Synthetic oligonucleotide
agcccuugauuaaaagaac

SEQ ID NO: 2286631 - RNA, 19 nt, Artificial Sequence
  Description of Artificial Sequence: Synthetic oligonucleotide
cuucgggcugaaucgcugg

SEQ ID NO: 2286632 - RNA, 19 nt, Artificial Sequence
  Description of Artificial Sequence: Synthetic oligonucleotide
auuuugguguucaaccagu

SEQ ID NO: 2286633 - RNA, 19 nt, Artificial Sequence
  Description of Artificial Sequence: Synthetic oligonucleotide
gauucuccgaggcuccuga

SEQ ID NO: 2286634 - RNA, 19 nt, Artificial Sequence
  Description of Artificial Sequence: Synthetic oligonucleotide
uuucagucugguucucccu

SEQ ID NO: 2286635 - RNA, 19 nt, Artificial Sequence
  Description of Artificial Sequence: Synthetic oligonucleotide
aagccucccaguacccggc

SEQ ID NO: 2286636 - RNA, 19 nt, Artificial Sequence
  Description of Artificial Sequence: Synthetic oligonucleotide
acagaagugggaagagguc

SEQ ID NO: 2286637 - RNA, 19 nt, Artificial Sequence
  Description of Artificial Sequence: Synthetic oligonucleotide
uucuucuauuucauucaua

SEQ ID NO: 2286638 - RNA, 19 nt, Artificial Sequence
  Description of Artificial Sequence: Synthetic oligonucleotide
augccucccaaggaguugg

SEQ ID NO: 2286639 - RNA, 19 nt, Artificial Sequence
  Description of Artificial Sequence: Synthetic oligonucleotide
caaccagugcuucuaugug

SEQ ID NO: 2286640 - RNA, 19 nt, Artificial Sequence
  Description of Artificial Sequence: Synthetic oligonucleotide
aggucgacuuuaaauagcu

SEQ ID NO: 2286641 - RNA, 19 nt, Artificial Sequence
  Description of Artificial Sequence: Synthetic oligonucleotide
gaacacuggggccacagcu

SEQ ID NO: 2286642 - RNA, 19 nt, Artificial Sequence
  Description of Artificial Sequence: Synthetic oligonucleotide
ugaagcgccaucgccgaug

SEQ ID NO: 2286643 - RNA, 19 nt, Artificial Sequence
  Description of Artificial Sequence: Synthetic oligonucleotide
uaagcaucgcugugccagc

SEQ ID NO: 2286644 - RNA, 19 nt, Artificial Sequence
  Description of Artificial Sequence: Synthetic oligonucleotide
gagauuuuagcgagucuga

SEQ ID NO: 2286645 - RNA, 19 nt, Artificial Sequence
  Description of Artificial Sequence: Synthetic oligonucleotide
ugguguucaaccagugcuu

SEQ ID NO: 2286646 - RNA, 19 nt, Artificial Sequence
  Description of Artificial Sequence: Synthetic oligonucleotide
cacuuauagcuggaguagc

SEQ ID NO: 2286647 - RNA, 19 nt, Artificial Sequence
  Description of Artificial Sequence: Synthetic oligonucleotide
gccauuuccagacccgcgg

SEQ ID NO: 2286648 - RNA, 19 nt, Artificial Sequence
  Description of Artificial Sequence: Synthetic oligonucleotide
gaugggacguaggcaaagc

SEQ ID NO: 2286649 - RNA, 19 nt, Artificial Sequence
  Description of Artificial Sequence: Synthetic oligonucleotide
uccagauuccgaggguucc

SEQ ID NO: 2286650 - RNA, 19 nt, Artificial Sequence
  Description of Artificial Sequence: Synthetic oligonucleotide
uguuaacauuguugcuaug

SEQ ID NO: 2286651 - RNA, 19 nt, Artificial Sequence
  Description of Artificial Sequence: Synthetic oligonucleotide
cuagcggcagccauguuaa

SEQ ID NO: 2286652 - RNA, 19 nt, Artificial Sequence
  Description of Artificial Sequence: Synthetic oligonucleotide
uaugugaugcugagucuuu

SEQ ID NO: 2286653 - RNA, 19 nt, Artificial Sequence
  Description of Artificial Sequence: Synthetic oligonucleotide
uggaugcugaaaccaccac

SEQ ID NO: 2286654 - RNA, 19 nt, Artificial Sequence
  Description of Artificial Sequence: Synthetic oligonucleotide
uuuccagacccgcggcuga

SEQ ID NO: 2286655 - RNA, 19 nt, Artificial Sequence
  Description of Artificial Sequence: Synthetic oligonucleotide
acuuucugucauggcauuc

SEQ ID NO: 2286656 - RNA, 19 nt, Artificial Sequence
  Description of Artificial Sequence: Synthetic oligonucleotide
agcgccaucgccgauggga

SEQ ID NO: 2286657 - RNA, 19 nt, Artificial Sequence
  Description of Artificial Sequence: Synthetic oligonucleotide
acuuauagcuggaguagca

SEQ ID NO: 2286658 - RNA, 19 nt, Artificial Sequence
  Description of Artificial Sequence: Synthetic oligonucleotide
aacucgcaaccugugccag

SEQ ID NO: 2286659 - RNA, 19 nt, Artificial Sequence
  Description of Artificial Sequence: Synthetic oligonucleotide
uagcccauucacgagugga

SEQ ID NO: 2286660 - RNA, 19 nt, Artificial Sequence
  Description of Artificial Sequence: Synthetic oligonucleotide
ccaugaaauugauuccugc

SEQ ID NO: 2286661 - RNA, 19 nt, Artificial Sequence
  Description of Artificial Sequence: Synthetic oligonucleotide
aaauugauuccugcuucua

SEQ ID NO: 2286662 - RNA, 19 nt, Artificial Sequence
  Description of Artificial Sequence: Synthetic oligonucleotide
auagcccauucacgagugg

SEQ ID NO: 2286663 - RNA, 19 nt, Artificial Sequence
  Description of Artificial Sequence: Synthetic oligonucleotide
gaacuggucgagcgggcug

SEQ ID NO: 2286664 - RNA, 19 nt, Artificial Sequence
  Description of Artificial Sequence: Synthetic oligonucleotide
guacuccucauguucacaa

SEQ ID NO: 2286665 - RNA, 19 nt, Artificial Sequence
  Description of Artificial Sequence: Synthetic oligonucleotide
ucguuuuccuuagucucca

SEQ ID NO: 2286666 - RNA, 19 nt, Artificial Sequence
  Description of Artificial Sequence: Synthetic oligonucleotide
cuuugcucacggucgucag

SEQ ID NO: 2286667 - RNA, 19 nt, Artificial Sequence
  Description of Artificial Sequence: Synthetic oligonucleotide
gcugaaaccaccaccuggc

SEQ ID NO: 2286668 - RNA, 19 nt, Artificial Sequence
  Description of Artificial Sequence: Synthetic oligonucleotide
agccccguucuuuccuggc

SEQ ID NO: 2286669 - RNA, 19 nt, Artificial Sequence
  Description of Artificial Sequence: Synthetic oligonucleotide
agcaucgcugugccagcac

SEQ ID NO: 2286670 - RNA, 19 nt, Artificial Sequence
  Description of Artificial Sequence: Synthetic oligonucleotide
uaccccuaagagcuccaga

SEQ ID NO: 2286671 - RNA, 19 nt, Artificial Sequence
  Description of Artificial Sequence: Synthetic oligonucleotide
gagaacgacuagcggcagc

SEQ ID NO: 2286672 - RNA, 19 nt, Artificial Sequence
  Description of Artificial Sequence: Synthetic oligonucleotide
gauuccugcuucuaagcau

SEQ ID NO: 2286673 - RNA, 19 nt, Artificial Sequence
  Description of Artificial Sequence: Synthetic oligonucleotide
aucgcugugccagcacucg

SEQ ID NO: 2286674 - RNA, 19 nt, Artificial Sequence
  Description of Artificial Sequence: Synthetic oligonucleotide
ugacugcuucucuuaagua

SEQ ID NO: 2286675 - RNA, 19 nt, Artificial Sequence
  Description of Artificial Sequence: Synthetic oligonucleotide
cuucuauuucauucauaga

SEQ ID NO: 2286676 - RNA, 19 nt, Artificial Sequence
  Description of Artificial Sequence: Synthetic oligonucleotide
ucuccacuguuaacauugu

SEQ ID NO: 2286677 - RNA, 19 nt, Artificial Sequence
  Description of Artificial Sequence: Synthetic oligonucleotide
aguuuagcccuugauuaaa

SEQ ID NO: 2286678 - RNA, 19 nt, Artificial Sequence
  Description of Artificial Sequence: Synthetic oligonucleotide
uacucucacaagccaccac

SEQ ID NO: 2286679 - RNA, 19 nt, Artificial Sequence
  Description of Artificial Sequence: Synthetic oligonucleotide
gugacugcuucucuuaagu

SEQ ID NO: 2286680 - RNA, 19 nt, Artificial Sequence
  Description of Artificial Sequence: Synthetic oligonucleotide
gaccaugaaauugauuccu

SEQ ID NO: 2286681 - RNA, 19 nt, Artificial Sequence
  Description of Artificial Sequence: Synthetic oligonucleotide
cccuaagagcuccagauuc

SEQ ID NO: 2286682 - RNA, 19 nt, Artificial Sequence
  Description of Artificial Sequence: Synthetic oligonucleotide
caaggaguugguugguaga

SEQ ID NO: 2286683 - RNA, 19 nt, Artificial Sequence
  Description of Artificial Sequence: Synthetic oligonucleotide
ccuaagagcuccagauucc

SEQ ID NO: 2286684 - RNA, 19 nt, Artificial Sequence
  Description of Artificial Sequence: Synthetic oligonucleotide
uggucgagcgggcugcgaa

SEQ ID NO: 2286685 - RNA, 19 nt, Artificial Sequence
  Description of Artificial Sequence: Synthetic oligonucleotide
agucugaggaugccuccca

SEQ ID NO: 2286686 - RNA, 19 nt, Artificial Sequence
  Description of Artificial Sequence: Synthetic oligonucleotide
ugguauuauaaagguguuu

SEQ ID NO: 2286687 - RNA, 19 nt, Artificial Sequence
  Description of Artificial Sequence: Synthetic oligonucleotide
ucuaagcaucgcugugcca

SEQ ID NO: 2286688 - RNA, 19 nt, Artificial Sequence
  Description of Artificial Sequence: Synthetic oligonucleotide
gacguaggcaaagccuccc

SEQ ID NO: 2286689 - RNA, 19 nt, Artificial Sequence
  Description of Artificial Sequence: Synthetic oligonucleotide
ucgcuggcgaggaacuggu

SEQ ID NO: 2286690 - RNA, 19 nt, Artificial Sequence
  Description of Artificial Sequence: Synthetic oligonucleotide
aagugggaagaggucgacu

SEQ ID NO: 2286691 - RNA, 19 nt, Artificial Sequence
  Description of Artificial Sequence: Synthetic oligonucleotide
uuuuagcgagucugaggau

SEQ ID NO: 2286692 - RNA, 19 nt, Artificial Sequence
  Description of Artificial Sequence: Synthetic oligonucleotide
cacacagaagugggaagag

SEQ ID NO: 2286693 - RNA, 19 nt, Artificial Sequence
  Description of Artificial Sequence: Synthetic oligonucleotide
guagcaagugaugauuuua

SEQ ID NO: 2286694 - RNA, 19 nt, Artificial Sequence
  Description of Artificial Sequence: Synthetic oligonucleotide
gagucugaggaugccuccc

SEQ ID NO: 2286695 - RNA, 19 nt, Artificial Sequence
  Description of Artificial Sequence: Synthetic oligonucleotide
gaggguuccgguuggugaa

SEQ ID NO: 2286696 - RNA, 19 nt, Artificial Sequence
  Description of Artificial Sequence: Synthetic oligonucleotide
cucacggucgucagggaga

SEQ ID NO: 2286697 - RNA, 19 nt, Artificial Sequence
  Description of Artificial Sequence: Synthetic oligonucleotide
aaauagcucuccacuguua

SEQ ID NO: 2286698 - RNA, 19 nt, Artificial Sequence
  Description of Artificial Sequence: Synthetic oligonucleotide
cacaccacuuucugucaug

SEQ ID NO: 2286699 - RNA, 19 nt, Artificial Sequence
  Description of Artificial Sequence: Synthetic oligonucleotide
ccaaggaguugguugguag

SEQ ID NO: 2286700 - RNA, 19 nt, Artificial Sequence
  Description of Artificial Sequence: Synthetic oligonucleotide
ccucccaaggaguugguug

SEQ ID NO: 2286701 - RNA, 19 nt, Artificial Sequence
  Description of Artificial Sequence: Synthetic oligonucleotide
cagauuccgaggguuccgg

SEQ ID NO: 2286702 - RNA, 19 nt, Artificial Sequence
  Description of Artificial Sequence: Synthetic oligonucleotide
gaugccucccaaggaguug

SEQ ID NO: 2286703 - RNA, 19 nt, Artificial Sequence
  Description of Artificial Sequence: Synthetic oligonucleotide
agcggcagccauguuaacu

SEQ ID NO: 2286704 - RNA, 19 nt, Artificial Sequence
  Description of Artificial Sequence: Synthetic oligonucleotide
gaacucacgguugggccac

SEQ ID NO: 2286705 - RNA, 19 nt, Artificial Sequence
  Description of Artificial Sequence: Synthetic oligonucleotide
ucucacaagccaccacauu

SEQ ID NO: 2286706 - RNA, 19 nt, Artificial Sequence
  Description of Artificial Sequence: Synthetic oligonucleotide
cucacaagccaccacauuu

SEQ ID NO: 2286707 - RNA, 19 nt, Artificial Sequence
  Description of Artificial Sequence: Synthetic oligonucleotide
gguugguagaccaugaaau

SEQ ID NO: 2286708 - RNA, 19 nt, Artificial Sequence
  Description of Artificial Sequence: Synthetic oligonucleotide
aaucgcuggcgaggaacug

SEQ ID NO: 2286709 - RNA, 19 nt, Artificial Sequence
  Description of Artificial Sequence: Synthetic oligonucleotide
cuccagauuccgaggguuc

SEQ ID NO: 2286710 - RNA, 19 nt, Artificial Sequence
  Description of Artificial Sequence: Synthetic oligonucleotide
cuggcgaggaacuggucga

SEQ ID NO: 2286711 - RNA, 19 nt, Artificial Sequence
  Description of Artificial Sequence: Synthetic oligonucleotide
ggcugaaucgcuggcgagg

SEQ ID NO: 2286712 - RNA, 19 nt, Artificial Sequence
  Description of Artificial Sequence: Synthetic oligonucleotide
gcuucuaagcaucgcugug

SEQ ID NO: 2286713 - RNA, 19 nt, Artificial Sequence
  Description of Artificial Sequence: Synthetic oligonucleotide
cugcgaacccacacuccag

SEQ ID NO: 2286714 - RNA, 19 nt, Artificial Sequence
  Description of Artificial Sequence: Synthetic oligonucleotide
ggccuugcuuugcucacgg

SEQ ID NO: 2286715 - RNA, 19 nt, Artificial Sequence
  Description of Artificial Sequence: Synthetic oligonucleotide
ccugugccagaacucacgg

SEQ ID NO: 2286716 - RNA, 19 nt, Artificial Sequence
  Description of Artificial Sequence: Synthetic oligonucleotide
cuuauagcuggaguagcaa

SEQ ID NO: 2286717 - RNA, 19 nt, Artificial Sequence
  Description of Artificial Sequence: Synthetic oligonucleotide
guggaugcugaaaccacca

SEQ ID NO: 2286718 - RNA, 19 nt, Artificial Sequence
  Description of Artificial Sequence: Synthetic oligonucleotide
ccuuagucuccacuucggg

SEQ ID NO: 2286719 - RNA, 19 nt, Artificial Sequence
  Description of Artificial Sequence: Synthetic oligonucleotide
accagugcuucuaugugau

SEQ ID NO: 2286720 - RNA, 19 nt, Artificial Sequence
  Description of Artificial Sequence: Synthetic oligonucleotide
caucgcugugccagcacuc

SEQ ID NO: 2286721 - RNA, 19 nt, Artificial Sequence
  Description of Artificial Sequence: Synthetic oligonucleotide
cuguuaacauuguugcuau

SEQ ID NO: 2286722 - RNA, 19 nt, Artificial Sequence
  Description of Artificial Sequence: Synthetic oligonucleotide
ccucauguucacaaaagaa

SEQ ID NO: 2286723 - RNA, 19 nt, Artificial Sequence
  Description of Artificial Sequence: Synthetic oligonucleotide
gaagugggaagaggucgac

SEQ ID NO: 2286724 - RNA, 19 nt, Artificial Sequence
  Description of Artificial Sequence: Synthetic oligonucleotide
acguaggcaaagccuccca

SEQ ID NO: 2286725 - RNA, 19 nt, Artificial Sequence
  Description of Artificial Sequence: Synthetic oligonucleotide
ucgagcgggcugcgaaccc

SEQ ID NO: 2286726 - RNA, 19 nt, Artificial Sequence
  Description of Artificial Sequence: Synthetic oligonucleotide
guugguagaccaugaaauu

SEQ ID NO: 2286727 - RNA, 19 nt, Artificial Sequence
  Description of Artificial Sequence: Synthetic oligonucleotide
caccacuuucugucauggc

SEQ ID NO: 2286728 - RNA, 19 nt, Artificial Sequence
  Description of Artificial Sequence: Synthetic oligonucleotide
ucccgcaaacugacagcca

SEQ ID NO: 2286729 - RNA, 19 nt, Artificial Sequence
  Description of Artificial Sequence: Synthetic oligonucleotide
gccgaugggacguaggcaa

SEQ ID NO: 2286730 - RNA, 19 nt, Artificial Sequence
  Description of Artificial Sequence: Synthetic oligonucleotide
gcugcgaacccacacucca

SEQ ID NO: 2286731 - RNA, 19 nt, Artificial Sequence
  Description of Artificial Sequence: Synthetic oligonucleotide
uacccggccuugcuuugcu

SEQ ID NO: 2286732 - RNA, 19 nt, Artificial Sequence
  Description of Artificial Sequence: Synthetic oligonucleotide
acuucgggcugaaucgcug

SEQ ID NO: 2286733 - RNA, 19 nt, Artificial Sequence
  Description of Artificial Sequence: Synthetic oligonucleotide
accacauuucugguauuau

SEQ ID NO: 2286734 - RNA, 19 nt, Artificial Sequence
  Description of Artificial Sequence: Synthetic oligonucleotide
cacuggggccacagcuucg

SEQ ID NO: 2286735 - RNA, 19 nt, Artificial Sequence
  Description of Artificial Sequence: Synthetic oligonucleotide
gagagauuuuagcgagucu

SEQ ID NO: 2286736 - RNA, 19 nt, Artificial Sequence
  Description of Artificial Sequence: Synthetic oligonucleotide
gcucacggucgucagggag

SEQ ID NO: 2286737 - RNA, 19 nt, Artificial Sequence
  Description of Artificial Sequence: Synthetic oligonucleotide
gggacguaggcaaagccuc

SEQ ID NO: 2286738 - RNA, 19 nt, Artificial Sequence
  Description of Artificial Sequence: Synthetic oligonucleotide
acgacuagcggcagccaug

SEQ ID NO: 2286739 - RNA, 19 nt, Artificial Sequence
  Description of Artificial Sequence: Synthetic oligonucleotide
ucacggucgucagggagaa

SEQ ID NO: 2286740 - RNA, 19 nt, Artificial Sequence
  Description of Artificial Sequence: Synthetic oligonucleotide
aggguuccgguuggugaac

SEQ ID NO: 2286741 - RNA, 19 nt, Artificial Sequence
  Description of Artificial Sequence: Synthetic oligonucleotide
gcuaugaagcuuucagucu

SEQ ID NO: 2286742 - RNA, 19 nt, Artificial Sequence
  Description of Artificial Sequence: Synthetic oligonucleotide
gggagaacgacuagcggca

SEQ ID NO: 2286743 - RNA, 19 nt, Artificial Sequence
  Description of Artificial Sequence: Synthetic oligonucleotide
gugccagaacucacgguug

SEQ ID NO: 2286744 - RNA, 19 nt, Artificial Sequence
  Description of Artificial Sequence: Synthetic oligonucleotide
cacucguccuauacucuca

SEQ ID NO: 2286745 - RNA, 19 nt, Artificial Sequence
  Description of Artificial Sequence: Synthetic oligonucleotide
gcccuugauuaaaagaaca

SEQ ID NO: 2286746 - RNA, 19 nt, Artificial Sequence
  Description of Artificial Sequence: Synthetic oligonucleotide
uggcgaggaacuggucgag

SEQ ID NO: 2286747 - RNA, 19 nt, Artificial Sequence
  Description of Artificial Sequence: Synthetic oligonucleotide
acgguugggccacacugua

SEQ ID NO: 2286748 - RNA, 19 nt, Artificial Sequence
  Description of Artificial Sequence: Synthetic oligonucleotide
ccuauacucucacaagcca

SEQ ID NO: 2286749 - RNA, 19 nt, Artificial Sequence
  Description of Artificial Sequence: Synthetic oligonucleotide
ccagaacucacgguugggc

SEQ ID NO: 2286750 - RNA, 19 nt, Artificial Sequence
  Description of Artificial Sequence: Synthetic oligonucleotide
cuuucugucauggcauucu

SEQ ID NO: 2286751 - RNA, 19 nt, Artificial Sequence
  Description of Artificial Sequence: Synthetic oligonucleotide
cguccuauacucucacaag

SEQ ID NO: 2286752 - RNA, 19 nt, Artificial Sequence
  Description of Artificial Sequence: Synthetic oligonucleotide
ucgcugugccagcacucgu

SEQ ID NO: 2286753 - RNA, 19 nt, Artificial Sequence
  Description of Artificial Sequence: Synthetic oligonucleotide
agauucuccgaggcuccug

SEQ ID NO: 2286754 - RNA, 19 nt, Artificial Sequence
  Description of Artificial Sequence: Synthetic oligonucleotide
aucgccgaugggacguagg

SEQ ID NO: 2286755 - RNA, 19 nt, Artificial Sequence
  Description of Artificial Sequence: Synthetic oligonucleotide
gucgagcgggcugcgaacc

SEQ ID NO: 2286756 - RNA, 19 nt, Artificial Sequence
  Description of Artificial Sequence: Synthetic oligonucleotide
ccgguuggugaacacuggg

SEQ ID NO: 2286757 - RNA, 19 nt, Artificial Sequence
  Description of Artificial Sequence: Synthetic oligonucleotide
agucugguucucccugcaa

SEQ ID NO: 2286758 - RNA, 19 nt, Artificial Sequence
  Description of Artificial Sequence: Synthetic oligonucleotide
acacuguagcccagccccg

SEQ ID NO: 2286759 - RNA, 19 nt, Artificial Sequence
  Description of Artificial Sequence: Synthetic oligonucleotide
ccuugauuaaaagaacaaa

SEQ ID NO: 2286760 - RNA, 19 nt, Artificial Sequence
  Description of Artificial Sequence: Synthetic oligonucleotide
cuuaaguacuccucauguu

SEQ ID NO: 2286761 - RNA, 19 nt, Artificial Sequence
  Description of Artificial Sequence: Synthetic oligonucleotide
cgguuggugaacacugggg

SEQ ID NO: 2286762 - RNA, 19 nt, Artificial Sequence
  Description of Artificial Sequence: Synthetic oligonucleotide
cagccccguucuuuccugg

SEQ ID NO: 2286763 - RNA, 19 nt, Artificial Sequence
  Description of Artificial Sequence: Synthetic oligonucleotide
cuguagcccagccccguuc

SEQ ID NO: 2286764 - RNA, 19 nt, Artificial Sequence
  Description of Artificial Sequence: Synthetic oligonucleotide
gaaucgcuggcgaggaacu

SEQ ID NO: 2286765 - RNA, 19 nt, Artificial Sequence
  Description of Artificial Sequence: Synthetic oligonucleotide
gcuucucuuaaguacuccu

SEQ ID NO: 2286766 - RNA, 19 nt, Artificial Sequence
  Description of Artificial Sequence: Synthetic oligonucleotide
gccagcacucguccuauac

SEQ ID NO: 2286767 - RNA, 19 nt, Artificial Sequence
  Description of Artificial Sequence: Synthetic oligonucleotide
gauuccgaggguuccgguu

SEQ ID NO: 2286768 - RNA, 19 nt, Artificial Sequence
  Description of Artificial Sequence: Synthetic oligonucleotide
cuaccccuaagagcuccag

SEQ ID NO: 2286769 - RNA, 19 nt, Artificial Sequence
  Description of Artificial Sequence: Synthetic oligonucleotide
acucacgguugggccacac

SEQ ID NO: 2286770 - RNA, 19 nt, Artificial Sequence
  Description of Artificial Sequence: Synthetic oligonucleotide
gcacucguccuauacucuc

SEQ ID NO: 2286771 - RNA, 19 nt, Artificial Sequence
  Description of Artificial Sequence: Synthetic oligonucleotide
uagauucuccgaggcuccu

SEQ ID NO: 2286772 - RNA, 19 nt, Artificial Sequence
  Description of Artificial Sequence: Synthetic oligonucleotide
gguguucaaccagugcuuc

SEQ ID NO: 2286773 - RNA, 19 nt, Artificial Sequence
  Description of Artificial Sequence: Synthetic oligonucleotide
uagcgagucugaggaugcc

SEQ ID NO: 2286774 - RNA, 19 nt, Artificial Sequence
  Description of Artificial Sequence: Synthetic oligonucleotide
cgacuuuaaauagcucucc

SEQ ID NO: 2286775 - RNA, 19 nt, Artificial Sequence
  Description of Artificial Sequence: Synthetic oligonucleotide
cuccgaggcuccugaagca

SEQ ID NO: 2286776 - RNA, 19 nt, Artificial Sequence
  Description of Artificial Sequence: Synthetic oligonucleotide
acccggccuugcuuugcuc

SEQ ID NO: 2286777 - RNA, 19 nt, Artificial Sequence
  Description of Artificial Sequence: Synthetic oligonucleotide
ugcucacggucgucaggga

SEQ ID NO: 2286778 - RNA, 19 nt, Artificial Sequence
  Description of Artificial Sequence: Synthetic oligonucleotide
gcugaagcgccaucgccga

SEQ ID NO: 2286779 - RNA, 19 nt, Artificial Sequence
  Description of Artificial Sequence: Synthetic oligonucleotide
cucgcaaccugugccagaa

SEQ ID NO: 2286780 - RNA, 19 nt, Artificial Sequence
  Description of Artificial Sequence: Synthetic oligonucleotide
cuaugugaugcugagucuu

SEQ ID NO: 2286781 - RNA, 19 nt, Artificial Sequence
  Description of Artificial Sequence: Synthetic oligonucleotide
auucuccgaggcuccugaa

SEQ ID NO: 2286782 - RNA, 19 nt, Artificial Sequence
  Description of Artificial Sequence: Synthetic oligonucleotide
augugaugcugagucuuua

SEQ ID NO: 2286783 - RNA, 19 nt, Artificial Sequence
  Description of Artificial Sequence: Synthetic oligonucleotide
cucguccuauacucucaca

SEQ ID NO: 2286784 - RNA, 19 nt, Artificial Sequence
  Description of Artificial Sequence: Synthetic oligonucleotide
gggcugcgaacccacacuc

SEQ ID NO: 2286785 - RNA, 19 nt, Artificial Sequence
  Description of Artificial Sequence: Synthetic oligonucleotide
gucgucagggagaacgacu

SEQ ID NO: 2286786 - RNA, 19 nt, Artificial Sequence
  Description of Artificial Sequence: Synthetic oligonucleotide
ucgcaaccugugccagaac

SEQ ID NO: 2286787 - RNA, 19 nt, Artificial Sequence
  Description of Artificial Sequence: Synthetic oligonucleotide
ccagacccgcggcugaagc

SEQ ID NO: 2286788 - RNA, 19 nt, Artificial Sequence
  Description of Artificial Sequence: Synthetic oligonucleotide
cuuuccuggcuaccccuaa

SEQ ID NO: 2286789 - RNA, 19 nt, Artificial Sequence
  Description of Artificial Sequence: Synthetic oligonucleotide
gggcugaaucgcuggcgag

SEQ ID NO: 2286790 - RNA, 19 nt, Artificial Sequence
  Description of Artificial Sequence: Synthetic oligonucleotide
ccagauuccgaggguuccg

SEQ ID NO: 2286791 - RNA, 19 nt, Artificial Sequence
  Description of Artificial Sequence: Synthetic oligonucleotide
cugguauuauaaagguguu

SEQ ID NO: 2286792 - RNA, 19 nt, Artificial Sequence
  Description of Artificial Sequence: Synthetic oligonucleotide
gucugaggaugccucccaa

SEQ ID NO: 2286793 - RNA, 19 nt, Artificial Sequence
  Description of Artificial Sequence: Synthetic oligonucleotide
cguaggcaaagccucccag

SEQ ID NO: 2286794 - RNA, 19 nt, Artificial Sequence
  Description of Artificial Sequence: Synthetic oligonucleotide
gcugaaucgcuggcgagga

SEQ ID NO: 2286795 - RNA, 19 nt, Artificial Sequence
  Description of Artificial Sequence: Synthetic oligonucleotide
gcaaccugugccagaacuc

SEQ ID NO: 2286796 - RNA, 19 nt, Artificial Sequence
  Description of Artificial Sequence: Synthetic oligonucleotide
guuccgguuggugaacacu

SEQ ID NO: 2286797 - RNA, 19 nt, Artificial Sequence
  Description of Artificial Sequence: Synthetic oligonucleotide
gcauucuggagagauuuua

SEQ ID NO: 2286798 - RNA, 19 nt, Artificial Sequence
  Description of Artificial Sequence: Synthetic oligonucleotide
ggaguagcaagugaugauu

SEQ ID NO: 2286799 - RNA, 19 nt, Artificial Sequence
  Description of Artificial Sequence: Synthetic oligonucleotide
gguuccgguuggugaacac

SEQ ID NO: 2286800 - RNA, 19 nt, Artificial Sequence
  Description of Artificial Sequence: Synthetic oligonucleotide
uagcccagccccguucuuu

SEQ ID NO: 2286801 - RNA, 19 nt, Artificial Sequence
  Description of Artificial Sequence: Synthetic oligonucleotide
guguucaaccagugcuucu

SEQ ID NO: 2286802 - RNA, 19 nt, Artificial Sequence
  Description of Artificial Sequence: Synthetic oligonucleotide
ggucgagcgggcugcgaac

SEQ ID NO: 2286803 - RNA, 19 nt, Artificial Sequence
  Description of Artificial Sequence: Synthetic oligonucleotide
cauuguugcuaugaagcuu

SEQ ID NO: 2286804 - RNA, 19 nt, Artificial Sequence
  Description of Artificial Sequence: Synthetic oligonucleotide
gccagaacucacgguuggg

SEQ ID NO: 2286805 - RNA, 19 nt, Artificial Sequence
  Description of Artificial Sequence: Synthetic oligonucleotide
cacuccagcuucccgcaaa

SEQ ID NO: 2286806 - RNA, 19 nt, Artificial Sequence
  Description of Artificial Sequence: Synthetic oligonucleotide
ccaaguuuagcccuugauu

SEQ ID NO: 2286807 - RNA, 19 nt, Artificial Sequence
  Description of Artificial Sequence: Synthetic oligonucleotide
cauuuccagacccgcggcu

SEQ ID NO: 2286808 - RNA, 19 nt, Artificial Sequence
  Description of Artificial Sequence: Synthetic oligonucleotide
cacgguugggccacacugu

SEQ ID NO: 2286809 - RNA, 19 nt, Artificial Sequence
  Description of Artificial Sequence: Synthetic oligonucleotide
caucgccgaugggacguag

SEQ ID NO: 2286810 - RNA, 19 nt, Artificial Sequence
  Description of Artificial Sequence: Synthetic oligonucleotide
cccguucuuuccuggcuac

SEQ ID NO: 2286811 - RNA, 19 nt, Artificial Sequence
  Description of Artificial Sequence: Synthetic oligonucleotide
ggucgacuuuaaauagcuc

SEQ ID NO: 2286812 - RNA, 19 nt, Artificial Sequence
  Description of Artificial Sequence: Synthetic oligonucleotide
ggucgucagggagaacgac

SEQ ID NO: 2286813 - RNA, 19 nt, Artificial Sequence
  Description of Artificial Sequence: Synthetic oligonucleotide
uagcggcagccauguuaac

SEQ ID NO: 2286814 - RNA, 19 nt, Artificial Sequence
  Description of Artificial Sequence: Synthetic oligonucleotide
ccacuucgggcugaaucgc

SEQ ID NO: 2286815 - RNA, 19 nt, Artificial Sequence
  Description of Artificial Sequence: Synthetic oligonucleotide
gguucucccugcaaacucu

SEQ ID NO: 2286816 - RNA, 19 nt, Artificial Sequence
  Description of Artificial Sequence: Synthetic oligonucleotide
aacucacgguugggccaca

SEQ ID NO: 2286817 - RNA, 19 nt, Artificial Sequence
  Description of Artificial Sequence: Synthetic oligonucleotide
ggcgaggaacuggucgagc

SEQ ID NO: 2286818 - RNA, 19 nt, Artificial Sequence
  Description of Artificial Sequence: Synthetic oligonucleotide
ggcugcgaacccacacucc

SEQ ID NO: 2286819 - RNA, 19 nt, Artificial Sequence
  Description of Artificial Sequence: Synthetic oligonucleotide
guagaccaugaaauugauu

SEQ ID NO: 2286820 - RNA, 19 nt, Artificial Sequence
  Description of Artificial Sequence: Synthetic oligonucleotide
ccagccccguucuuuccug

SEQ ID NO: 2286821 - RNA, 19 nt, Artificial Sequence
  Description of Artificial Sequence: Synthetic oligonucleotide
cacuucgggcugaaucgcu

SEQ ID NO: 2286822 - RNA, 19 nt, Artificial Sequence
  Description of Artificial Sequence: Synthetic oligonucleotide
cccggccuugcuuugcuca

SEQ ID NO: 2286823 - RNA, 19 nt, Artificial Sequence
  Description of Artificial Sequence: Synthetic oligonucleotide
gcaucgcugugccagcacu

SEQ ID NO: 2286824 - RNA, 19 nt, Artificial Sequence
  Description of Artificial Sequence: Synthetic oligonucleotide
agcuucccgcaaacugaca

SEQ ID NO: 2286825 - RNA, 19 nt, Artificial Sequence
  Description of Artificial Sequence: Synthetic oligonucleotide
ccggccuugcuuugcucac

SEQ ID NO: 2286826 - RNA, 19 nt, Artificial Sequence
  Description of Artificial Sequence: Synthetic oligonucleotide
gaguugguugguagaccau

SEQ ID NO: 2286827 - RNA, 19 nt, Artificial Sequence
  Description of Artificial Sequence: Synthetic oligonucleotide
cgaugggacguaggcaaag

SEQ ID NO: 2286828 - RNA, 19 nt, Artificial Sequence
  Description of Artificial Sequence: Synthetic oligonucleotide
cugaaucgcuggcgaggaa

SEQ ID NO: 2286829 - RNA, 19 nt, Artificial Sequence
  Description of Artificial Sequence: Synthetic oligonucleotide
cucacgguugggccacacu

SEQ ID NO: 2286830 - RNA, 19 nt, Artificial Sequence
  Description of Artificial Sequence: Synthetic oligonucleotide
ggguuccgguuggugaaca

SEQ ID NO: 2286831 - RNA, 19 nt, Artificial Sequence
  Description of Artificial Sequence: Synthetic oligonucleotide
ccguucuuuccuggcuacc

SEQ ID NO: 2286832 - RNA, 19 nt, Artificial Sequence
  Description of Artificial Sequence: Synthetic oligonucleotide
cgcaaccugugccagaacu

SEQ ID NO: 2286833 - RNA, 19 nt, Artificial Sequence
  Description of Artificial Sequence: Synthetic oligonucleotide
cccgcaaacugacagccau

SEQ ID NO: 2286834 - RNA, 19 nt, Artificial Sequence
  Description of Artificial Sequence: Synthetic oligonucleotide
gccaucgccgaugggacgu

SEQ ID NO: 2286835 - RNA, 19 nt, Artificial Sequence
  Description of Artificial Sequence: Synthetic oligonucleotide
agcgggcugcgaacccaca

SEQ ID NO: 2286836 - RNA, 19 nt, Artificial Sequence
  Description of Artificial Sequence: Synthetic oligonucleotide
gugccagcacucguccuau

SEQ ID NO: 2286837 - RNA, 19 nt, Artificial Sequence
  Description of Artificial Sequence: Synthetic oligonucleotide
cacuguagcccagccccgu

SEQ ID NO: 2286838 - RNA, 19 nt, Artificial Sequence
  Description of Artificial Sequence: Synthetic oligonucleotide
gccccguucuuuccuggcu

SEQ ID NO: 2286839 - RNA, 19 nt, Artificial Sequence
  Description of Artificial Sequence: Synthetic oligonucleotide
ccccguucuuuccuggcua

SEQ ID NO: 2286840 - RNA, 19 nt, Artificial Sequence
  Description of Artificial Sequence: Synthetic oligonucleotide
cacggucgucagggagaac

SEQ ID NO: 2286841 - RNA, 19 nt, Artificial Sequence
  Description of Artificial Sequence: Synthetic oligonucleotide
ggaugccucccaaggaguu

SEQ ID NO: 2286842 - RNA, 19 nt, Artificial Sequence
  Description of Artificial Sequence: Synthetic oligonucleotide
cuggucgagcgggcugcga

SEQ ID NO: 2286843 - RNA, 19 nt, Artificial Sequence
  Description of Artificial Sequence: Synthetic oligonucleotide
cggucgucagggagaacga

SEQ ID NO: 2286844 - RNA, 19 nt, Artificial Sequence
  Description of Artificial Sequence: Synthetic oligonucleotide
ccgaugggacguaggcaaa

SEQ ID NO: 2286845 - RNA, 19 nt, Artificial Sequence
  Description of Artificial Sequence: Synthetic oligonucleotide
guagcccagccccguucuu

SEQ ID NO: 2286846 - RNA, 19 nt, Artificial Sequence
  Description of Artificial Sequence: Synthetic oligonucleotide
cagcuucguuuuccuuagu

SEQ ID NO: 2286847 - RNA, 19 nt, Artificial Sequence
  Description of Artificial Sequence: Synthetic oligonucleotide
gacuagcggcagccauguu

SEQ ID NO: 2286848 - RNA, 19 nt, Artificial Sequence
  Description of Artificial Sequence: Synthetic oligonucleotide
cccaguacccggccuugcu

SEQ ID NO: 2286849 - RNA, 19 nt, Artificial Sequence
  Description of Artificial Sequence: Synthetic oligonucleotide
ccacaccacuuucugucau

SEQ ID NO: 2286850 - RNA, 19 nt, Artificial Sequence
  Description of Artificial Sequence: Synthetic oligonucleotide
gccuugcuuugcucacggu

SEQ ID NO: 2286851 - RNA, 19 nt, Artificial Sequence
  Description of Artificial Sequence: Synthetic oligonucleotide
ccaguacccggccuugcuu

SEQ ID NO: 2286852 - RNA, 19 nt, Artificial Sequence
  Description of Artificial Sequence: Synthetic oligonucleotide
cgccgaugggacguaggca

SEQ ID NO: 2286853 - RNA, 19 nt, Artificial Sequence
  Description of Artificial Sequence: Synthetic oligonucleotide
ccccuaagagcuccagauu

SEQ ID NO: 2286854 - RNA, 19 nt, Artificial Sequence
  Description of Artificial Sequence: Synthetic oligonucleotide
cgacuagcggcagccaugu

SEQ ID NO: 2286855 - RNA, 19 nt, Artificial Sequence
  Description of Artificial Sequence: Synthetic oligonucleotide
cgggcugcgaacccacacu

SEQ ID NO: 2286856 - RNA, 19 nt, Artificial Sequence
  Description of Artificial Sequence: Synthetic oligonucleotide
ccucccaguacccggccuu

SEQ ID NO: 2286857 - RNA, 19 nt, Artificial Sequence
  Description of Artificial Sequence: Synthetic oligonucleotide
cgcuggcgaggaacugguc

SEQ ID NO: 2286858 - RNA, 19 nt, Artificial Sequence
  Description of Artificial Sequence: Synthetic oligonucleotide
ccgcggcugaagcgccauc

SEQ ID NO: 2286859 - RNA, 19 nt, Artificial Sequence
  Description of Artificial Sequence: Synthetic oligonucleotide
ccaucgccgaugggacgua

SEQ ID NO: 2286860 - RNA, 19 nt, Artificial Sequence
  Description of Artificial Sequence: Synthetic oligonucleotide
cccgcggcugaagcgccau

SEQ ID NO: 2286861 - RNA, 19 nt, Artificial Sequence
  Description of Artificial Sequence: Synthetic oligonucleotide
agaaagacgagccagaccg

SEQ ID NO: 2286862 - RNA, 19 nt, Artificial Sequence
  Description of Artificial Sequence: Synthetic oligonucleotide
uaguccauuaucuugaagc

SEQ ID NO: 2286863 - RNA, 19 nt, Artificial Sequence
  Description of Artificial Sequence: Synthetic oligonucleotide
aagguguacaucuggcucc

SEQ ID NO: 2286864 - RNA, 19 nt, Artificial Sequence
  Description of Artificial Sequence: Synthetic oligonucleotide
auggcuguagaauagagag

SEQ ID NO: 2286865 - RNA, 19 nt, Artificial Sequence
  Description of Artificial Sequence: Synthetic oligonucleotide
uuuaguauuugcaaaggcu

SEQ ID NO: 2286866 - RNA, 19 nt, Artificial Sequence
  Description of Artificial Sequence: Synthetic oligonucleotide
ugugcuucauuguuuaugg

SEQ ID NO: 2286867 - RNA, 19 nt, Artificial Sequence
  Description of Artificial Sequence: Synthetic oligonucleotide
aauagagagccuucugugg

SEQ ID NO: 2286868 - RNA, 19 nt, Artificial Sequence
  Description of Artificial Sequence: Synthetic oligonucleotide
uguagcaccaaacagucac

SEQ ID NO: 2286869 - RNA, 19 nt, Artificial Sequence
  Description of Artificial Sequence: Synthetic oligonucleotide
gaaggagaaggcuucaagg

SEQ ID NO: 2286870 - RNA, 19 nt, Artificial Sequence
  Description of Artificial Sequence: Synthetic oligonucleotide
uugugcaugaucuauguug

SEQ ID NO: 2286871 - RNA, 19 nt, Artificial Sequence
  Description of Artificial Sequence: Synthetic oligonucleotide
uggauugacaucaggaggc

SEQ ID NO: 2286872 - RNA, 19 nt, Artificial Sequence
  Description of Artificial Sequence: Synthetic oligonucleotide
uccauuaucuugaagcucu

SEQ ID NO: 2286873 - RNA, 19 nt, Artificial Sequence
  Description of Artificial Sequence: Synthetic oligonucleotide
ucugaggcaagacaucagg

SEQ ID NO: 2286874 - RNA, 19 nt, Artificial Sequence
  Description of Artificial Sequence: Synthetic oligonucleotide
ugaucuauguuguggauug

SEQ ID NO: 2286875 - RNA, 19 nt, Artificial Sequence
  Description of Artificial Sequence: Synthetic oligonucleotide
uuaacaaaccuguaagacu

SEQ ID NO: 2286876 - RNA, 19 nt, Artificial Sequence
  Description of Artificial Sequence: Synthetic oligonucleotide
ugcaacuucaagcuuuucc

SEQ ID NO: 2286877 - RNA, 19 nt, Artificial Sequence
  Description of Artificial Sequence: Synthetic oligonucleotide
auagaagccaggacgaugc

SEQ ID NO: 2286878 - RNA, 19 nt, Artificial Sequence
  Description of Artificial Sequence: Synthetic oligonucleotide
guugcagagucuuacacag

SEQ ID NO: 2286879 - RNA, 19 nt, Artificial Sequence
  Description of Artificial Sequence: Synthetic oligonucleotide
gaggcaagacaucaggacg

SEQ ID NO: 2286880 - RNA, 19 nt, Artificial Sequence
  Description of Artificial Sequence: Synthetic oligonucleotide
uguuuaugggcucucguug

SEQ ID NO: 2286881 - RNA, 19 nt, Artificial Sequence
  Description of Artificial Sequence: Synthetic oligonucleotide
aacuucaagcuuuuccaag

SEQ ID NO: 2286882 - RNA, 19 nt, Artificial Sequence
  Description of Artificial Sequence: Synthetic oligonucleotide
acagucacguugcagaguc

SEQ ID NO: 2286883 - RNA, 19 nt, Artificial Sequence
  Description of Artificial Sequence: Synthetic oligonucleotide
ugguaaguaaugcaggagu

SEQ ID NO: 2286884 - RNA, 19 nt, Artificial Sequence
  Description of Artificial Sequence: Synthetic oligonucleotide
cagcauagaagccaggacg

SEQ ID NO: 2286885 - RNA, 19 nt, Artificial Sequence
  Description of Artificial Sequence: Synthetic oligonucleotide
agugcucuaacuucuuaac

SEQ ID NO: 2286886 - RNA, 19 nt, Artificial Sequence
  Description of Artificial Sequence: Synthetic oligonucleotide
uuguggauugacaucagga

SEQ ID NO: 2286887 - RNA, 19 nt, Artificial Sequence
  Description of Artificial Sequence: Synthetic oligonucleotide
caaugaugccaauauaaag

SEQ ID NO: 2286888 - RNA, 19 nt, Artificial Sequence
  Description of Artificial Sequence: Synthetic oligonucleotide
ugcaugaucuauguugugg

SEQ ID NO: 2286889 - RNA, 19 nt, Artificial Sequence
  Description of Artificial Sequence: Synthetic oligonucleotide
uaaguaaugcaggaguugc

SEQ ID NO: 2286890 - RNA, 19 nt, Artificial Sequence
  Description of Artificial Sequence: Synthetic oligonucleotide
gccaauauaaagcaggagc

SEQ ID NO: 2286891 - RNA, 19 nt, Artificial Sequence
  Description of Artificial Sequence: Synthetic oligonucleotide
ugaacucaaauuuaguauu

SEQ ID NO: 2286892 - RNA, 19 nt, Artificial Sequence
  Description of Artificial Sequence: Synthetic oligonucleotide
uuguaggaaguccaggucu

SEQ ID NO: 2286893 - RNA, 19 nt, Artificial Sequence
  Description of Artificial Sequence: Synthetic oligonucleotide
ugugcaugaucuauguugu

SEQ ID NO: 2286894 - RNA, 19 nt, Artificial Sequence
  Description of Artificial Sequence: Synthetic oligonucleotide
agugccaccccgucgacgc

SEQ ID NO: 2286895 - RNA, 19 nt, Artificial Sequence
  Description of Artificial Sequence: Synthetic oligonucleotide
agaauagagagccuucugu

SEQ ID NO: 2286896 - RNA, 19 nt, Artificial Sequence
  Description of Artificial Sequence: Synthetic oligonucleotide
aagaccgucagggauaucu

SEQ ID NO: 2286897 - RNA, 19 nt, Artificial Sequence
  Description of Artificial Sequence: Synthetic oligonucleotide
uacuguguccccaucaugu

SEQ ID NO: 2286898 - RNA, 19 nt, Artificial Sequence
  Description of Artificial Sequence: Synthetic oligonucleotide
ucuuaacaaaccuguaaga

SEQ ID NO: 2286899 - RNA, 19 nt, Artificial Sequence
  Description of Artificial Sequence: Synthetic oligonucleotide
aaacagucacguugcagag

SEQ ID NO: 2286900 - RNA, 19 nt, Artificial Sequence
  Description of Artificial Sequence: Synthetic oligonucleotide
guggauugacaucaggagg

SEQ ID NO: 2286901 - RNA, 19 nt, Artificial Sequence
  Description of Artificial Sequence: Synthetic oligonucleotide
cuguguugcacaugaagcg

SEQ ID NO: 2286902 - RNA, 19 nt, Artificial Sequence
  Description of Artificial Sequence: Synthetic oligonucleotide
ucuuguaggaaguccaggu

SEQ ID NO: 2286903 - RNA, 19 nt, Artificial Sequence
  Description of Artificial Sequence: Synthetic oligonucleotide
agacgagccagaccgaaac

SEQ ID NO: 2286904 - RNA, 19 nt, Artificial Sequence
  Description of Artificial Sequence: Synthetic oligonucleotide
uguuauuccgggcagggau

SEQ ID NO: 2286905 - RNA, 19 nt, Artificial Sequence
  Description of Artificial Sequence: Synthetic oligonucleotide
ugcucuaacuucuuaacaa

SEQ ID NO: 2286906 - RNA, 19 nt, Artificial Sequence
  Description of Artificial Sequence: Synthetic oligonucleotide
ugaacucggacucugcaac

SEQ ID NO: 2286907 - RNA, 19 nt, Artificial Sequence
  Description of Artificial Sequence: Synthetic oligonucleotide
aguaaugcaggaguugccg

SEQ ID NO: 2286908 - RNA, 19 nt, Artificial Sequence
  Description of Artificial Sequence: Synthetic oligonucleotide
uuuguuauuccgggcaggg

SEQ ID NO: 2286909 - RNA, 19 nt, Artificial Sequence
  Description of Artificial Sequence: Synthetic oligonucleotide
uuuaaagguggggagaagu

SEQ ID NO: 2286910 - RNA, 19 nt, Artificial Sequence
  Description of Artificial Sequence: Synthetic oligonucleotide
gaggcuauaguccauuauc

SEQ ID NO: 2286911 - RNA, 19 nt, Artificial Sequence
  Description of Artificial Sequence: Synthetic oligonucleotide
ugcguguugugcuucauug

SEQ ID NO: 2286912 - RNA, 19 nt, Artificial Sequence
  Description of Artificial Sequence: Synthetic oligonucleotide
ccaauauaaagcaggagcc

SEQ ID NO: 2286913 - RNA, 19 nt, Artificial Sequence
  Description of Artificial Sequence: Synthetic oligonucleotide
cagaauaucaaugaugcca

SEQ ID NO: 2286914 - RNA, 19 nt, Artificial Sequence
  Description of Artificial Sequence: Synthetic oligonucleotide
gaaccguucagcauagaag

SEQ ID NO: 2286915 - RNA, 19 nt, Artificial Sequence
  Description of Artificial Sequence: Synthetic oligonucleotide
uuuuggaaggagaaggcuu

SEQ ID NO: 2286916 - RNA, 19 nt, Artificial Sequence
  Description of Artificial Sequence: Synthetic oligonucleotide
caaacagucacguugcaga

SEQ ID NO: 2286917 - RNA, 19 nt, Artificial Sequence
  Description of Artificial Sequence: Synthetic oligonucleotide
uuccccuuuguuauuccgg

SEQ ID NO: 2286918 - RNA, 19 nt, Artificial Sequence
  Description of Artificial Sequence: Synthetic oligonucleotide
caucaggaggcuauagucc

SEQ ID NO: 2286919 - RNA, 19 nt, Artificial Sequence
  Description of Artificial Sequence: Synthetic oligonucleotide
aaagcgauaguagagucuu

SEQ ID NO: 2286920 - RNA, 19 nt, Artificial Sequence
  Description of Artificial Sequence: Synthetic oligonucleotide
cuauaguccauuaucuuga

SEQ ID NO: 2286921 - RNA, 19 nt, Artificial Sequence
  Description of Artificial Sequence: Synthetic oligonucleotide
aacuacaggugagaaacug

SEQ ID NO: 2286922 - RNA, 19 nt, Artificial Sequence
  Description of Artificial Sequence: Synthetic oligonucleotide
ucauguaccagugcuuucc

SEQ ID NO: 2286923 - RNA, 19 nt, Artificial Sequence
  Description of Artificial Sequence: Synthetic oligonucleotide
ugauacuguguccccauca

SEQ ID NO: 2286924 - RNA, 19 nt, Artificial Sequence
  Description of Artificial Sequence: Synthetic oligonucleotide
ugccgcuggggccugaucg

SEQ ID NO: 2286925 - RNA, 19 nt, Artificial Sequence
  Description of Artificial Sequence: Synthetic oligonucleotide
aaguaaugcaggaguugcc

SEQ ID NO: 2286926 - RNA, 19 nt, Artificial Sequence
  Description of Artificial Sequence: Synthetic oligonucleotide
uguagaauagagagccuuc

SEQ ID NO: 2286927 - RNA, 19 nt, Artificial Sequence
  Description of Artificial Sequence: Synthetic oligonucleotide
cucuguguuccccagagac

SEQ ID NO: 2286928 - RNA, 19 nt, Artificial Sequence
  Description of Artificial Sequence: Synthetic oligonucleotide
acguugcagagucuuacac

SEQ ID NO: 2286929 - RNA, 19 nt, Artificial Sequence
  Description of Artificial Sequence: Synthetic oligonucleotide
uccccuuuguuauuccggg

SEQ ID NO: 2286930 - RNA, 19 nt, Artificial Sequence
  Description of Artificial Sequence: Synthetic oligonucleotide
cacaugaagcgcuggaacc

SEQ ID NO: 2286931 - RNA, 19 nt, Artificial Sequence
  Description of Artificial Sequence: Synthetic oligonucleotide
aucaaugaugccaauauaa

SEQ ID NO: 2286932 - RNA, 19 nt, Artificial Sequence
  Description of Artificial Sequence: Synthetic oligonucleotide
aauaucaaugaugccaaua

SEQ ID NO: 2286933 - RNA, 19 nt, Artificial Sequence
  Description of Artificial Sequence: Synthetic oligonucleotide
cuguguuccccagagaccg

SEQ ID NO: 2286934 - RNA, 19 nt, Artificial Sequence
  Description of Artificial Sequence: Synthetic oligonucleotide
gacgccucgcccuggaugg

SEQ ID NO: 2286935 - RNA, 19 nt, Artificial Sequence
  Description of Artificial Sequence: Synthetic oligonucleotide
uuuccccuuuguuauuccg

SEQ ID NO: 2286936 - RNA, 19 nt, Artificial Sequence
  Description of Artificial Sequence: Synthetic oligonucleotide
uacaugucagcaucuaaaa

SEQ ID NO: 2286937 - RNA, 19 nt, Artificial Sequence
  Description of Artificial Sequence: Synthetic oligonucleotide
aggcaagacaucaggacgc

SEQ ID NO: 2286938 - RNA, 19 nt, Artificial Sequence
  Description of Artificial Sequence: Synthetic oligonucleotide
gcuauaguccauuaucuug

SEQ ID NO: 2286939 - RNA, 19 nt, Artificial Sequence
  Description of Artificial Sequence: Synthetic oligonucleotide
cagagucuuacacagagca

SEQ ID NO: 2286940 - RNA, 19 nt, Artificial Sequence
  Description of Artificial Sequence: Synthetic oligonucleotide
uagaauagagagccuucug

SEQ ID NO: 2286941 - RNA, 19 nt, Artificial Sequence
  Description of Artificial Sequence: Synthetic oligonucleotide
ucaaagcgauaguagaguc

SEQ ID NO: 2286942 - RNA, 19 nt, Artificial Sequence
  Description of Artificial Sequence: Synthetic oligonucleotide
uugguugucacuugugcuc

SEQ ID NO: 2286943 - RNA, 19 nt, Artificial Sequence
  Description of Artificial Sequence: Synthetic oligonucleotide
aguagagucuuguuuuagu

SEQ ID NO: 2286944 - RNA, 19 nt, Artificial Sequence
  Description of Artificial Sequence: Synthetic oligonucleotide
uauguuguggauugacauc

SEQ ID NO: 2286945 - RNA, 19 nt, Artificial Sequence
  Description of Artificial Sequence: Synthetic oligonucleotide
uguggggcuggucuucgcg

SEQ ID NO: 2286946 - RNA, 19 nt, Artificial Sequence
  Description of Artificial Sequence: Synthetic oligonucleotide
ucuuacacagagcacugua

SEQ ID NO: 2286947 - RNA, 19 nt, Artificial Sequence
  Description of Artificial Sequence: Synthetic oligonucleotide
ucuguguuccccagagacc

SEQ ID NO: 2286948 - RNA, 19 nt, Artificial Sequence
  Description of Artificial Sequence: Synthetic oligonucleotide
ucuucgcgugucaacugcg

SEQ ID NO: 2286949 - RNA, 19 nt, Artificial Sequence
  Description of Artificial Sequence: Synthetic oligonucleotide
aucuauguuguggauugac

SEQ ID NO: 2286950 - RNA, 19 nt, Artificial Sequence
  Description of Artificial Sequence: Synthetic oligonucleotide
caccaaacagucacguugc

SEQ ID NO: 2286951 - RNA, 19 nt, Artificial Sequence
  Description of Artificial Sequence: Synthetic oligonucleotide
aucaggaggcuauagucca

SEQ ID NO: 2286952 - RNA, 19 nt, Artificial Sequence
  Description of Artificial Sequence: Synthetic oligonucleotide
uuuuagucuucugaggcuc

SEQ ID NO: 2286953 - RNA, 19 nt, Artificial Sequence
  Description of Artificial Sequence: Synthetic oligonucleotide
gaggcucacugcucaaugg

SEQ ID NO: 2286954 - RNA, 19 nt, Artificial Sequence
  Description of Artificial Sequence: Synthetic oligonucleotide
ugaggcucacugcucaaug

SEQ ID NO: 2286955 - RNA, 19 nt, Artificial Sequence
  Description of Artificial Sequence: Synthetic oligonucleotide
agcucuguagcaccaaaca

SEQ ID NO: 2286956 - RNA, 19 nt, Artificial Sequence
  Description of Artificial Sequence: Synthetic oligonucleotide
acaugaagcgcuggaaccg

SEQ ID NO: 2286957 - RNA, 19 nt, Artificial Sequence
  Description of Artificial Sequence: Synthetic oligonucleotide
uguacaugucagcaucuaa

SEQ ID NO: 2286958 - RNA, 19 nt, Artificial Sequence
  Description of Artificial Sequence: Synthetic oligonucleotide
caggacgaugcacugauac

SEQ ID NO: 2286959 - RNA, 19 nt, Artificial Sequence
  Description of Artificial Sequence: Synthetic oligonucleotide
uguugugcuucauuguuua

SEQ ID NO: 2286960 - RNA, 19 nt, Artificial Sequence
  Description of Artificial Sequence: Synthetic oligonucleotide
ucaaugggugaacucggac

SEQ ID NO: 2286961 - RNA, 19 nt, Artificial Sequence
  Description of Artificial Sequence: Synthetic oligonucleotide
ggacucugcaacuucaagc

SEQ ID NO: 2286962 - RNA, 19 nt, Artificial Sequence
  Description of Artificial Sequence: Synthetic oligonucleotide
ccaacuacaggugagaaac

SEQ ID NO: 2286963 - RNA, 19 nt, Artificial Sequence
  Description of Artificial Sequence: Synthetic oligonucleotide
auaucuuguaggaagucca

SEQ ID NO: 2286964 - RNA, 19 nt, Artificial Sequence
  Description of Artificial Sequence: Synthetic oligonucleotide
agaauaucaaugaugccaa

SEQ ID NO: 2286965 - RNA, 19 nt, Artificial Sequence
  Description of Artificial Sequence: Synthetic oligonucleotide
gcaccaaacagucacguug

SEQ ID NO: 2286966 - RNA, 19 nt, Artificial Sequence
  Description of Artificial Sequence: Synthetic oligonucleotide
aagcucuguagcaccaaac

SEQ ID NO: 2286967 - RNA, 19 nt, Artificial Sequence
  Description of Artificial Sequence: Synthetic oligonucleotide
uuaaagguggggagaaguu

SEQ ID NO: 2286968 - RNA, 19 nt, Artificial Sequence
  Description of Artificial Sequence: Synthetic oligonucleotide
uguacaucuggcuccacuu

SEQ ID NO: 2286969 - RNA, 19 nt, Artificial Sequence
  Description of Artificial Sequence: Synthetic oligonucleotide
agcgcuggaaccguucagc

SEQ ID NO: 2286970 - RNA, 19 nt, Artificial Sequence
  Description of Artificial Sequence: Synthetic oligonucleotide
auuguuuaugggcucucgu

SEQ ID NO: 2286971 - RNA, 19 nt, Artificial Sequence
  Description of Artificial Sequence: Synthetic oligonucleotide
ucuuuaaagguggggagaa

SEQ ID NO: 2286972 - RNA, 19 nt, Artificial Sequence
  Description of Artificial Sequence: Synthetic oligonucleotide
auuccauggcuguagaaua

SEQ ID NO: 2286973 - RNA, 19 nt, Artificial Sequence
  Description of Artificial Sequence: Synthetic oligonucleotide
aucaaagcgauaguagagu

SEQ ID NO: 2286974 - RNA, 19 nt, Artificial Sequence
  Description of Artificial Sequence: Synthetic oligonucleotide
gagaaagacgagccagacc

SEQ ID NO: 2286975 - RNA, 19 nt, Artificial Sequence
  Description of Artificial Sequence: Synthetic oligonucleotide
uuuaugggcucucguugug

SEQ ID NO: 2286976 - RNA, 19 nt, Artificial Sequence
  Description of Artificial Sequence: Synthetic oligonucleotide
uaaugcaggaguugccgcu

SEQ ID NO: 2286977 - RNA, 19 nt, Artificial Sequence
  Description of Artificial Sequence: Synthetic oligonucleotide
aucgccgagagaaagacga

SEQ ID NO: 2286978 - RNA, 19 nt, Artificial Sequence
  Description of Artificial Sequence: Synthetic oligonucleotide
ucguugugcaugaucuaug

SEQ ID NO: 2286979 - RNA, 19 nt, Artificial Sequence
  Description of Artificial Sequence: Synthetic oligonucleotide
acgcccaagguguacaucu

SEQ ID NO: 2286980 - RNA, 19 nt, Artificial Sequence
  Description of Artificial Sequence: Synthetic oligonucleotide
aaccuguaagacugcagaa

SEQ ID NO: 2286981 - RNA, 19 nt, Artificial Sequence
  Description of Artificial Sequence: Synthetic oligonucleotide
aggucuuuaaaggugggga

SEQ ID NO: 2286982 - RNA, 19 nt, Artificial Sequence
  Description of Artificial Sequence: Synthetic oligonucleotide
aaaggcucuccaacuacag

SEQ ID NO: 2286983 - RNA, 19 nt, Artificial Sequence
  Description of Artificial Sequence: Synthetic oligonucleotide
auggcugguaaguaaugca

SEQ ID NO: 2286984 - RNA, 19 nt, Artificial Sequence
  Description of Artificial Sequence: Synthetic oligonucleotide
uuuagucuucugaggcuca

SEQ ID NO: 2286985 - RNA, 19 nt, Artificial Sequence
  Description of Artificial Sequence: Synthetic oligonucleotide
caucuugggaucaaagcga

SEQ ID NO: 2286986 - RNA, 19 nt, Artificial Sequence
  Description of Artificial Sequence: Synthetic oligonucleotide
ucuugaagcucuguagcac

SEQ ID NO: 2286987 - RNA, 19 nt, Artificial Sequence
  Description of Artificial Sequence: Synthetic oligonucleotide
uugcaaaggcucuccaacu

SEQ ID NO: 2286988 - RNA, 19 nt, Artificial Sequence
  Description of Artificial Sequence: Synthetic oligonucleotide
uggcuguagaauagagagc

SEQ ID NO: 2286989 - RNA, 19 nt, Artificial Sequence
  Description of Artificial Sequence: Synthetic oligonucleotide
cuucuuaacaaaccuguaa

SEQ ID NO: 2286990 - RNA, 19 nt, Artificial Sequence
  Description of Artificial Sequence: Synthetic oligonucleotide
ggaaucuucuugaacacug

SEQ ID NO: 2286991 - RNA, 19 nt, Artificial Sequence
  Description of Artificial Sequence: Synthetic oligonucleotide
guaaugcaggaguugccgc

SEQ ID NO: 2286992 - RNA, 19 nt, Artificial Sequence
  Description of Artificial Sequence: Synthetic oligonucleotide
guaaguaaugcaggaguug

SEQ ID NO: 2286993 - RNA, 19 nt, Artificial Sequence
  Description of Artificial Sequence: Synthetic oligonucleotide
uuguuuaugggcucucguu

SEQ ID NO: 2286994 - RNA, 19 nt, Artificial Sequence
  Description of Artificial Sequence: Synthetic oligonucleotide
caucaggacgcccaaggug

SEQ ID NO: 2286995 - RNA, 19 nt, Artificial Sequence
  Description of Artificial Sequence: Synthetic oligonucleotide
ugucacuugugcucugugu

SEQ ID NO: 2286996 - RNA, 19 nt, Artificial Sequence
  Description of Artificial Sequence: Synthetic oligonucleotide
ggaucaaagcgauaguaga

SEQ ID NO: 2286997 - RNA, 19 nt, Artificial Sequence
  Description of Artificial Sequence: Synthetic oligonucleotide
ugaucgccgagagaaagac

SEQ ID NO: 2286998 - RNA, 19 nt, Artificial Sequence
  Description of Artificial Sequence: Synthetic oligonucleotide
auuuccuccaaagguggag

SEQ ID NO: 2286999 - RNA, 19 nt, Artificial Sequence
  Description of Artificial Sequence: Synthetic oligonucleotide
uaugggcucucguugugca

SEQ ID NO: 2287000 - RNA, 19 nt, Artificial Sequence
  Description of Artificial Sequence: Synthetic oligonucleotide
aucaggacgcccaaggugu

SEQ ID NO: 2287001 - RNA, 19 nt, Artificial Sequence
  Description of Artificial Sequence: Synthetic oligonucleotide
aaugcaggaguugccgcug

SEQ ID NO: 2287002 - RNA, 19 nt, Artificial Sequence
  Description of Artificial Sequence: Synthetic oligonucleotide
uccccaucauguaccagug

SEQ ID NO: 2287003 - RNA, 19 nt, Artificial Sequence
  Description of Artificial Sequence: Synthetic oligonucleotide
uguuguggauugacaucag

SEQ ID NO: 2287004 - RNA, 19 nt, Artificial Sequence
  Description of Artificial Sequence: Synthetic oligonucleotide
cuuguaggaaguccagguc

SEQ ID NO: 2287005 - RNA, 19 nt, Artificial Sequence
  Description of Artificial Sequence: Synthetic oligonucleotide
gagaccgauggcugguaag

SEQ ID NO: 2287006 - RNA, 19 nt, Artificial Sequence
  Description of Artificial Sequence: Synthetic oligonucleotide
uguaggaaguccaggucuu

SEQ ID NO: 2287007 - RNA, 19 nt, Artificial Sequence
  Description of Artificial Sequence: Synthetic oligonucleotide
cucuccaacuacaggugag

SEQ ID NO: 2287008 - RNA, 19 nt, Artificial Sequence
  Description of Artificial Sequence: Synthetic oligonucleotide
gagucuuacacagagcacu

SEQ ID NO: 2287009 - RNA, 19 nt, Artificial Sequence
  Description of Artificial Sequence: Synthetic oligonucleotide
ugcaaaggcucuccaacua

SEQ ID NO: 2287010 - RNA, 19 nt, Artificial Sequence
  Description of Artificial Sequence: Synthetic oligonucleotide
agucugaggcaagacauca

SEQ ID NO: 2287011 - RNA, 19 nt, Artificial Sequence
  Description of Artificial Sequence: Synthetic oligonucleotide
acacagagcacuguacaug

SEQ ID NO: 2287012 - RNA, 19 nt, Artificial Sequence
  Description of Artificial Sequence: Synthetic oligonucleotide
aaaagaccgucagggauau

SEQ ID NO: 2287013 - RNA, 19 nt, Artificial Sequence
  Description of Artificial Sequence: Synthetic oligonucleotide
gagugcucuaacuucuuaa

SEQ ID NO: 2287014 - RNA, 19 nt, Artificial Sequence
  Description of Artificial Sequence: Synthetic oligonucleotide
ugggaucaaagcgauagua

SEQ ID NO: 2287015 - RNA, 19 nt, Artificial Sequence
  Description of Artificial Sequence: Synthetic oligonucleotide
auugacaucaggaggcuau

SEQ ID NO: 2287016 - RNA, 19 nt, Artificial Sequence
  Description of Artificial Sequence: Synthetic oligonucleotide
uucgcgugucaacugcgug

SEQ ID NO: 2287017 - RNA, 19 nt, Artificial Sequence
  Description of Artificial Sequence: Synthetic oligonucleotide
ugccaauauaaagcaggag

SEQ ID NO: 2287018 - RNA, 19 nt, Artificial Sequence
  Description of Artificial Sequence: Synthetic oligonucleotide
ucacguugcagagucuuac

SEQ ID NO: 2287019 - RNA, 19 nt, Artificial Sequence
  Description of Artificial Sequence: Synthetic oligonucleotide
agagucuuacacagagcac

SEQ ID NO: 2287020 - RNA, 19 nt, Artificial Sequence
  Description of Artificial Sequence: Synthetic oligonucleotide
agcauagaagccaggacga

SEQ ID NO: 2287021 - RNA, 19 nt, Artificial Sequence
  Description of Artificial Sequence: Synthetic oligonucleotide
agcgauaguagagucuugu

SEQ ID NO: 2287022 - RNA, 19 nt, Artificial Sequence
  Description of Artificial Sequence: Synthetic oligonucleotide
ucgcgugucaacugcgugu

SEQ ID NO: 2287023 - RNA, 19 nt, Artificial Sequence
  Description of Artificial Sequence: Synthetic oligonucleotide
ggacgaugcacugauacug

SEQ ID NO: 2287024 - RNA, 19 nt, Artificial Sequence
  Description of Artificial Sequence: Synthetic oligonucleotide
cauagaagccaggacgaug

SEQ ID NO: 2287025 - RNA, 19 nt, Artificial Sequence
  Description of Artificial Sequence: Synthetic oligonucleotide
cauuguuuaugggcucucg

SEQ ID NO: 2287026 - RNA, 19 nt, Artificial Sequence
  Description of Artificial Sequence: Synthetic oligonucleotide
uggucuucgcgugucaacu

SEQ ID NO: 2287027 - RNA, 19 nt, Artificial Sequence
  Description of Artificial Sequence: Synthetic oligonucleotide
auacuguguccccaucaug

SEQ ID NO: 2287028 - RNA, 19 nt, Artificial Sequence
  Description of Artificial Sequence: Synthetic oligonucleotide
uuauuccgggcagggaugc

SEQ ID NO: 2287029 - RNA, 19 nt, Artificial Sequence
  Description of Artificial Sequence: Synthetic oligonucleotide
aaagacgagccagaccgaa

SEQ ID NO: 2287030 - RNA, 19 nt, Artificial Sequence
  Description of Artificial Sequence: Synthetic oligonucleotide
uugucacuugugcucugug

SEQ ID NO: 2287031 - RNA, 19 nt, Artificial Sequence
  Description of Artificial Sequence: Synthetic oligonucleotide
ucuccaacuacaggugaga

SEQ ID NO: 2287032 - RNA, 19 nt, Artificial Sequence
  Description of Artificial Sequence: Synthetic oligonucleotide
aggcuauaguccauuaucu

SEQ ID NO: 2287033 - RNA, 19 nt, Artificial Sequence
  Description of Artificial Sequence: Synthetic oligonucleotide
ugucaacugcguguugugc

SEQ ID NO: 2287034 - RNA, 19 nt, Artificial Sequence
  Description of Artificial Sequence: Synthetic oligonucleotide
cugguaaguaaugcaggag

SEQ ID NO: 2287035 - RNA, 19 nt, Artificial Sequence
  Description of Artificial Sequence: Synthetic oligonucleotide
uuaugggcucucguugugc

SEQ ID NO: 2287036 - RNA, 19 nt, Artificial Sequence
  Description of Artificial Sequence: Synthetic oligonucleotide
cagagcacuguacauguca

SEQ ID NO: 2287037 - RNA, 19 nt, Artificial Sequence
  Description of Artificial Sequence: Synthetic oligonucleotide
guagcaccaaacagucacg

SEQ ID NO: 2287038 - RNA, 19 nt, Artificial Sequence
  Description of Artificial Sequence: Synthetic oligonucleotide
aggacgaugcacugauacu

SEQ ID NO: 2287039 - RNA, 19 nt, Artificial Sequence
  Description of Artificial Sequence: Synthetic oligonucleotide
ugacaucaggaggcuauag

SEQ ID NO: 2287040 - RNA, 19 nt, Artificial Sequence
  Description of Artificial Sequence: Synthetic oligonucleotide
cucuguagcaccaaacagu

SEQ ID NO: 2287041 - RNA, 19 nt, Artificial Sequence
  Description of Artificial Sequence: Synthetic oligonucleotide
gucuucgcgugucaacugc

SEQ ID NO: 2287042 - RNA, 19 nt, Artificial Sequence
  Description of Artificial Sequence: Synthetic oligonucleotide
cauggcuguagaauagaga

SEQ ID NO: 2287043 - RNA, 19 nt, Artificial Sequence
  Description of Artificial Sequence: Synthetic oligonucleotide
acugauacuguguccccau

SEQ ID NO: 2287044 - RNA, 19 nt, Artificial Sequence
  Description of Artificial Sequence: Synthetic oligonucleotide
uccccagagaccgauggcu

SEQ ID NO: 2287045 - RNA, 19 nt, Artificial Sequence
  Description of Artificial Sequence: Synthetic oligonucleotide
gggaucaaagcgauaguag

SEQ ID NO: 2287046 - RNA, 19 nt, Artificial Sequence
  Description of Artificial Sequence: Synthetic oligonucleotide
ucugcaacuucaagcuuuu

SEQ ID NO: 2287047 - RNA, 19 nt, Artificial Sequence
  Description of Artificial Sequence: Synthetic oligonucleotide
cacuugugcucuguguucc

SEQ ID NO: 2287048 - RNA, 19 nt, Artificial Sequence
  Description of Artificial Sequence: Synthetic oligonucleotide
cuuuuccaaggcugaacuc

SEQ ID NO: 2287049 - RNA, 19 nt, Artificial Sequence
  Description of Artificial Sequence: Synthetic oligonucleotide
aacugcguguugugcuuca

SEQ ID NO: 2287050 - RNA, 19 nt, Artificial Sequence
  Description of Artificial Sequence: Synthetic oligonucleotide
cuggaaccguucagcauag

SEQ ID NO: 2287051 - RNA, 19 nt, Artificial Sequence
  Description of Artificial Sequence: Synthetic oligonucleotide
acaucaggacgcccaaggu

SEQ ID NO: 2287052 - RNA, 19 nt, Artificial Sequence
  Description of Artificial Sequence: Synthetic oligonucleotide
gugcucuaacuucuuaaca

SEQ ID NO: 2287053 - RNA, 19 nt, Artificial Sequence
  Description of Artificial Sequence: Synthetic oligonucleotide
ugguugucacuugugcucu

SEQ ID NO: 2287054 - RNA, 19 nt, Artificial Sequence
  Description of Artificial Sequence: Synthetic oligonucleotide
gaagcgcuggaaccguuca

SEQ ID NO: 2287055 - RNA, 19 nt, Artificial Sequence
  Description of Artificial Sequence: Synthetic oligonucleotide
gauuccauggcuguagaau

SEQ ID NO: 2287056 - RNA, 19 nt, Artificial Sequence
  Description of Artificial Sequence: Synthetic oligonucleotide
gaucgccgagagaaagacg

SEQ ID NO: 2287057 - RNA, 19 nt, Artificial Sequence
  Description of Artificial Sequence: Synthetic oligonucleotide
caggucuuuaaaggugggg

SEQ ID NO: 2287058 - RNA, 19 nt, Artificial Sequence
  Description of Artificial Sequence: Synthetic oligonucleotide
guuauuccgggcagggaug

SEQ ID NO: 2287059 - RNA, 19 nt, Artificial Sequence
  Description of Artificial Sequence: Synthetic oligonucleotide
agaccgauggcugguaagu

SEQ ID NO: 2287060 - RNA, 19 nt, Artificial Sequence
  Description of Artificial Sequence: Synthetic oligonucleotide
acgaugcacugauacugug

SEQ ID NO: 2287061 - RNA, 19 nt, Artificial Sequence
  Description of Artificial Sequence: Synthetic oligonucleotide
cuguguccccaucauguac

SEQ ID NO: 2287062 - RNA, 19 nt, Artificial Sequence
  Description of Artificial Sequence: Synthetic oligonucleotide
ucaacugcguguugugcuu

SEQ ID NO: 2287063 - RNA, 19 nt, Artificial Sequence
  Description of Artificial Sequence: Synthetic oligonucleotide
accccgucgacgccucgcc

SEQ ID NO: 2287064 - RNA, 19 nt, Artificial Sequence
  Description of Artificial Sequence: Synthetic oligonucleotide
accgauggcugguaaguaa

SEQ ID NO: 2287065 - RNA, 19 nt, Artificial Sequence
  Description of Artificial Sequence: Synthetic oligonucleotide
agaaggcuucaagggaauc

SEQ ID NO: 2287066 - RNA, 19 nt, Artificial Sequence
  Description of Artificial Sequence: Synthetic oligonucleotide
ggcugguaaguaaugcagg

SEQ ID NO: 2287067 - RNA, 19 nt, Artificial Sequence
  Description of Artificial Sequence: Synthetic oligonucleotide
augaucuauguuguggauu

SEQ ID NO: 2287068 - RNA, 19 nt, Artificial Sequence
  Description of Artificial Sequence: Synthetic oligonucleotide
acugcucaaugggugaacu

SEQ ID NO: 2287069 - RNA, 19 nt, Artificial Sequence
  Description of Artificial Sequence: Synthetic oligonucleotide
ccuugguugucacuugugc

SEQ ID NO: 2287070 - RNA, 19 nt, Artificial Sequence
  Description of Artificial Sequence: Synthetic oligonucleotide
uccgccuugguugucacuu

SEQ ID NO: 2287071 - RNA, 19 nt, Artificial Sequence
  Description of Artificial Sequence: Synthetic oligonucleotide
gaagcucuguagcaccaaa

SEQ ID NO: 2287072 - RNA, 19 nt, Artificial Sequence
  Description of Artificial Sequence: Synthetic oligonucleotide
ucgccgagagaaagacgag

SEQ ID NO: 2287073 - RNA, 19 nt, Artificial Sequence
  Description of Artificial Sequence: Synthetic oligonucleotide
accuguaagacugcagaau

SEQ ID NO: 2287074 - RNA, 19 nt, Artificial Sequence
  Description of Artificial Sequence: Synthetic oligonucleotide
caaugggugaacucggacu

SEQ ID NO: 2287075 - RNA, 19 nt, Artificial Sequence
  Description of Artificial Sequence: Synthetic oligonucleotide
gucuuuaaagguggggaga

SEQ ID NO: 2287076 - RNA, 19 nt, Artificial Sequence
  Description of Artificial Sequence: Synthetic oligonucleotide
caagagugcucuaacuucu

SEQ ID NO: 2287077 - RNA, 19 nt, Artificial Sequence
  Description of Artificial Sequence: Synthetic oligonucleotide
ugggugaacucggacucug

SEQ ID NO: 2287078 - RNA, 19 nt, Artificial Sequence
  Description of Artificial Sequence: Synthetic oligonucleotide
gugucaacugcguguugug

SEQ ID NO: 2287079 - RNA, 19 nt, Artificial Sequence
  Description of Artificial Sequence: Synthetic oligonucleotide
gauacuguguccccaucau

SEQ ID NO: 2287080 - RNA, 19 nt, Artificial Sequence
  Description of Artificial Sequence: Synthetic oligonucleotide
uuccuccaaagguggaguc

SEQ ID NO: 2287081 - RNA, 19 nt, Artificial Sequence
  Description of Artificial Sequence: Synthetic oligonucleotide
cuuuaaagguggggagaag

SEQ ID NO: 2287082 - RNA, 19 nt, Artificial Sequence
  Description of Artificial Sequence: Synthetic oligonucleotide
cucacugcucaauggguga

SEQ ID NO: 2287083 - RNA, 19 nt, Artificial Sequence
  Description of Artificial Sequence: Synthetic oligonucleotide
cacagugccaccccgucga

SEQ ID NO: 2287084 - RNA, 19 nt, Artificial Sequence
  Description of Artificial Sequence: Synthetic oligonucleotide
cuugugcucuguguucccc

SEQ ID NO: 2287085 - RNA, 19 nt, Artificial Sequence
  Description of Artificial Sequence: Synthetic oligonucleotide
guuuaugggcucucguugu

SEQ ID NO: 2287086 - RNA, 19 nt, Artificial Sequence
  Description of Artificial Sequence: Synthetic oligonucleotide
cuggucuucgcgugucaac

SEQ ID NO: 2287087 - RNA, 19 nt, Artificial Sequence
  Description of Artificial Sequence: Synthetic oligonucleotide
uggggcuggucuucgcgug

SEQ ID NO: 2287088 - RNA, 19 nt, Artificial Sequence
  Description of Artificial Sequence: Synthetic oligonucleotide
accgucagggauaucuugu

SEQ ID NO: 2287089 - RNA, 19 nt, Artificial Sequence
  Description of Artificial Sequence: Synthetic oligonucleotide
gccgagagaaagacgagcc

SEQ ID NO: 2287090 - RNA, 19 nt, Artificial Sequence
  Description of Artificial Sequence: Synthetic oligonucleotide
ucggacucugcaacuucaa

SEQ ID NO: 2287091 - RNA, 19 nt, Artificial Sequence
  Description of Artificial Sequence: Synthetic oligonucleotide
gcuggaaccguucagcaua

SEQ ID NO: 2287092 - RNA, 19 nt, Artificial Sequence
  Description of Artificial Sequence: Synthetic oligonucleotide
cacagagcacuguacaugu

SEQ ID NO: 2287093 - RNA, 19 nt, Artificial Sequence
  Description of Artificial Sequence: Synthetic oligonucleotide
ggaaccguucagcauagaa

SEQ ID NO: 2287094 - RNA, 19 nt, Artificial Sequence
  Description of Artificial Sequence: Synthetic oligonucleotide
agagugcucuaacuucuua

SEQ ID NO: 2287095 - RNA, 19 nt, Artificial Sequence
  Description of Artificial Sequence: Synthetic oligonucleotide
gcaaaggcucuccaacuac

SEQ ID NO: 2287096 - RNA, 19 nt, Artificial Sequence
  Description of Artificial Sequence: Synthetic oligonucleotide
agucacguugcagagucuu

SEQ ID NO: 2287097 - RNA, 19 nt, Artificial Sequence
  Description of Artificial Sequence: Synthetic oligonucleotide
uuguuauuccgggcaggga

SEQ ID NO: 2287098 - RNA, 19 nt, Artificial Sequence
  Description of Artificial Sequence: Synthetic oligonucleotide
ucauuguuuaugggcucuc

SEQ ID NO: 2287099 - RNA, 19 nt, Artificial Sequence
  Description of Artificial Sequence: Synthetic oligonucleotide
gcucaaugggugaacucgg

SEQ ID NO: 2287100 - RNA, 19 nt, Artificial Sequence
  Description of Artificial Sequence: Synthetic oligonucleotide
cucggacucugcaacuuca

SEQ ID NO: 2287101 - RNA, 19 nt, Artificial Sequence
  Description of Artificial Sequence: Synthetic oligonucleotide
aacucggacucugcaacuu

SEQ ID NO: 2287102 - RNA, 19 nt, Artificial Sequence
  Description of Artificial Sequence: Synthetic oligonucleotide
cugaucgccgagagaaaga

SEQ ID NO: 2287103 - RNA, 19 nt, Artificial Sequence
  Description of Artificial Sequence: Synthetic oligonucleotide
caaagcgauaguagagucu

SEQ ID NO: 2287104 - RNA, 19 nt, Artificial Sequence
  Description of Artificial Sequence: Synthetic oligonucleotide
guagaauagagagccuucu

SEQ ID NO: 2287105 - RNA, 19 nt, Artificial Sequence
  Description of Artificial Sequence: Synthetic oligonucleotide
uguguuccccagagaccga

SEQ ID NO: 2287106 - RNA, 19 nt, Artificial Sequence
  Description of Artificial Sequence: Synthetic oligonucleotide
cugcucaaugggugaacuc

SEQ ID NO: 2287107 - RNA, 19 nt, Artificial Sequence
  Description of Artificial Sequence: Synthetic oligonucleotide
agagaccgauggcugguaa

SEQ ID NO: 2287108 - RNA, 19 nt, Artificial Sequence
  Description of Artificial Sequence: Synthetic oligonucleotide
ggccugaucgccgagagaa

SEQ ID NO: 2287109 - RNA, 19 nt, Artificial Sequence
  Description of Artificial Sequence: Synthetic oligonucleotide
cgagagaaagacgagccag

SEQ ID NO: 2287110 - RNA, 19 nt, Artificial Sequence
  Description of Artificial Sequence: Synthetic oligonucleotide
acuuccgccuugguuguca

SEQ ID NO: 2287111 - RNA, 19 nt, Artificial Sequence
  Description of Artificial Sequence: Synthetic oligonucleotide
gucugaggcaagacaucag

SEQ ID NO: 2287112 - RNA, 19 nt, Artificial Sequence
  Description of Artificial Sequence: Synthetic oligonucleotide
ucacugcucaaugggugaa

SEQ ID NO: 2287113 - RNA, 19 nt, Artificial Sequence
  Description of Artificial Sequence: Synthetic oligonucleotide
acgagccagaccgaaacuu

SEQ ID NO: 2287114 - RNA, 19 nt, Artificial Sequence
  Description of Artificial Sequence: Synthetic oligonucleotide
gucacuugugcucuguguu

SEQ ID NO: 2287115 - RNA, 19 nt, Artificial Sequence
  Description of Artificial Sequence: Synthetic oligonucleotide
cucaaugggugaacucgga

SEQ ID NO: 2287116 - RNA, 19 nt, Artificial Sequence
  Description of Artificial Sequence: Synthetic oligonucleotide
gugcaugaucuauguugug

SEQ ID NO: 2287117 - RNA, 19 nt, Artificial Sequence
  Description of Artificial Sequence: Synthetic oligonucleotide
ggagaaggcuucaagggaa

SEQ ID NO: 2287118 - RNA, 19 nt, Artificial Sequence
  Description of Artificial Sequence: Synthetic oligonucleotide
aagcgauaguagagucuug

SEQ ID NO: 2287119 - RNA, 19 nt, Artificial Sequence
  Description of Artificial Sequence: Synthetic oligonucleotide
caauauaaagcaggagccu

SEQ ID NO: 2287120 - RNA, 19 nt, Artificial Sequence
  Description of Artificial Sequence: Synthetic oligonucleotide
ucgcccuggauggauucca

SEQ ID NO: 2287121 - RNA, 19 nt, Artificial Sequence
  Description of Artificial Sequence: Synthetic oligonucleotide
cucugcaacuucaagcuuu

SEQ ID NO: 2287122 - RNA, 19 nt, Artificial Sequence
  Description of Artificial Sequence: Synthetic oligonucleotide
ccugaucgccgagagaaag

SEQ ID NO: 2287123 - RNA, 19 nt, Artificial Sequence
  Description of Artificial Sequence: Synthetic oligonucleotide
cacguugcagagucuuaca

SEQ ID NO: 2287124 - RNA, 19 nt, Artificial Sequence
  Description of Artificial Sequence: Synthetic oligonucleotide
uugacaucaggaggcuaua

SEQ ID NO: 2287125 - RNA, 19 nt, Artificial Sequence
  Description of Artificial Sequence: Synthetic oligonucleotide
acuucuuaacaaaccugua

SEQ ID NO: 2287126 - RNA, 19 nt, Artificial Sequence
  Description of Artificial Sequence: Synthetic oligonucleotide
aggacgcccaagguguaca

SEQ ID NO: 2287127 - RNA, 19 nt, Artificial Sequence
  Description of Artificial Sequence: Synthetic oligonucleotide
aggaggcuauaguccauua

SEQ ID NO: 2287128 - RNA, 19 nt, Artificial Sequence
  Description of Artificial Sequence: Synthetic oligonucleotide
cugauacuguguccccauc

SEQ ID NO: 2287129 - RNA, 19 nt, Artificial Sequence
  Description of Artificial Sequence: Synthetic oligonucleotide
uguccccaucauguaccag

SEQ ID NO: 2287130 - RNA, 19 nt, Artificial Sequence
  Description of Artificial Sequence: Synthetic oligonucleotide
acagagcacuguacauguc

SEQ ID NO: 2287131 - RNA, 19 nt, Artificial Sequence
  Description of Artificial Sequence: Synthetic oligonucleotide
gaacucggacucugcaacu

SEQ ID NO: 2287132 - RNA, 19 nt, Artificial Sequence
  Description of Artificial Sequence: Synthetic oligonucleotide
ccuguaagacugcagaaua

SEQ ID NO: 2287133 - RNA, 19 nt, Artificial Sequence
  Description of Artificial Sequence: Synthetic oligonucleotide
cuggauggauuccauggcu

SEQ ID NO: 2287134 - RNA, 19 nt, Artificial Sequence
  Description of Artificial Sequence: Synthetic oligonucleotide
cuuccgccuugguugucac

SEQ ID NO: 2287135 - RNA, 19 nt, Artificial Sequence
  Description of Artificial Sequence: Synthetic oligonucleotide
gaaagacgagccagaccga

SEQ ID NO: 2287136 - RNA, 19 nt, Artificial Sequence
  Description of Artificial Sequence: Synthetic oligonucleotide
gauggauuccauggcugua

SEQ ID NO: 2287137 - RNA, 19 nt, Artificial Sequence
  Description of Artificial Sequence: Synthetic oligonucleotide
ggaaguccaggucuuuaaa

SEQ ID NO: 2287138 - RNA, 19 nt, Artificial Sequence
  Description of Artificial Sequence: Synthetic oligonucleotide
agguguacaucuggcucca

SEQ ID NO: 2287139 - RNA, 19 nt, Artificial Sequence
  Description of Artificial Sequence: Synthetic oligonucleotide
ggucuucgcgugucaacug

SEQ ID NO: 2287140 - RNA, 19 nt, Artificial Sequence
  Description of Artificial Sequence: Synthetic oligonucleotide
aaagaccgucagggauauc

SEQ ID NO: 2287141 - RNA, 19 nt, Artificial Sequence
  Description of Artificial Sequence: Synthetic oligonucleotide
agcaggagccuuuccccuu

SEQ ID NO: 2287142 - RNA, 19 nt, Artificial Sequence
  Description of Artificial Sequence: Synthetic oligonucleotide
ggggccugaucgccgagag

SEQ ID NO: 2287143 - RNA, 19 nt, Artificial Sequence
  Description of Artificial Sequence: Synthetic oligonucleotide
gacgaugcacugauacugu

SEQ ID NO: 2287144 - RNA, 19 nt, Artificial Sequence
  Description of Artificial Sequence: Synthetic oligonucleotide
aggagccuuuccccuuugu

SEQ ID NO: 2287145 - RNA, 19 nt, Artificial Sequence
  Description of Artificial Sequence: Synthetic oligonucleotide
ucaggacgcccaaggugua

SEQ ID NO: 2287146 - RNA, 19 nt, Artificial Sequence
  Description of Artificial Sequence: Synthetic oligonucleotide
ggauaucuuguaggaaguc

SEQ ID NO: 2287147 - RNA, 19 nt, Artificial Sequence
  Description of Artificial Sequence: Synthetic oligonucleotide
cuguaagacugcagaauau

SEQ ID NO: 2287148 - RNA, 19 nt, Artificial Sequence
  Description of Artificial Sequence: Synthetic oligonucleotide
uauuccgggcagggaugcc

SEQ ID NO: 2287149 - RNA, 19 nt, Artificial Sequence
  Description of Artificial Sequence: Synthetic oligonucleotide
ggugagaaacuggggccag

SEQ ID NO: 2287150 - RNA, 19 nt, Artificial Sequence
  Description of Artificial Sequence: Synthetic oligonucleotide
gcacugauacugugucccc

SEQ ID NO: 2287151 - RNA, 19 nt, Artificial Sequence
  Description of Artificial Sequence: Synthetic oligonucleotide
gcucucguugugcaugauc

SEQ ID NO: 2287152 - RNA, 19 nt, Artificial Sequence
  Description of Artificial Sequence: Synthetic oligonucleotide
cacugcucaaugggugaac

SEQ ID NO: 2287153 - RNA, 19 nt, Artificial Sequence
  Description of Artificial Sequence: Synthetic oligonucleotide
cucgcccuggauggauucc

SEQ ID NO: 2287154 - RNA, 19 nt, Artificial Sequence
  Description of Artificial Sequence: Synthetic oligonucleotide
uggggccugaucgccgaga

SEQ ID NO: 2287155 - RNA, 19 nt, Artificial Sequence
  Description of Artificial Sequence: Synthetic oligonucleotide
ggcaagacaucaggacgcc

SEQ ID NO: 2287156 - RNA, 19 nt, Artificial Sequence
  Description of Artificial Sequence: Synthetic oligonucleotide
augggugaacucggacucu

SEQ ID NO: 2287157 - RNA, 19 nt, Artificial Sequence
  Description of Artificial Sequence: Synthetic oligonucleotide
cagugccaccccgucgacg

SEQ ID NO: 2287158 - RNA, 19 nt, Artificial Sequence
  Description of Artificial Sequence: Synthetic oligonucleotide
uuccgccuugguugucacu

SEQ ID NO: 2287159 - RNA, 19 nt, Artificial Sequence
  Description of Artificial Sequence: Synthetic oligonucleotide
cuguagaauagagagccuu

SEQ ID NO: 2287160 - RNA, 19 nt, Artificial Sequence
  Description of Artificial Sequence: Synthetic oligonucleotide
ggauggauuccauggcugu

SEQ ID NO: 2287161 - RNA, 19 nt, Artificial Sequence
  Description of Artificial Sequence: Synthetic oligonucleotide
gggcugacaucuugggauc

SEQ ID NO: 2287162 - RNA, 19 nt, Artificial Sequence
  Description of Artificial Sequence: Synthetic oligonucleotide
augggcucucguugugcau

SEQ ID NO: 2287163 - RNA, 19 nt, Artificial Sequence
  Description of Artificial Sequence: Synthetic oligonucleotide
caugaucuauguuguggau

SEQ ID NO: 2287164 - RNA, 19 nt, Artificial Sequence
  Description of Artificial Sequence: Synthetic oligonucleotide
caggaacaggugagccuuc

SEQ ID NO: 2287165 - RNA, 19 nt, Artificial Sequence
  Description of Artificial Sequence: Synthetic oligonucleotide
gacgcccaagguguacauc

SEQ ID NO: 2287166 - RNA, 19 nt, Artificial Sequence
  Description of Artificial Sequence: Synthetic oligonucleotide
cccaucauguaccagugcu

SEQ ID NO: 2287167 - RNA, 19 nt, Artificial Sequence
  Description of Artificial Sequence: Synthetic oligonucleotide
cuccaacuacaggugagaa

SEQ ID NO: 2287168 - RNA, 19 nt, Artificial Sequence
  Description of Artificial Sequence: Synthetic oligonucleotide
ggcuccacuuccgccuugg

SEQ ID NO: 2287169 - RNA, 19 nt, Artificial Sequence
  Description of Artificial Sequence: Synthetic oligonucleotide
gcagggaugccacccaugu

SEQ ID NO: 2287170 - RNA, 19 nt, Artificial Sequence
  Description of Artificial Sequence: Synthetic oligonucleotide
cucguugugcaugaucuau

SEQ ID NO: 2287171 - RNA, 19 nt, Artificial Sequence
  Description of Artificial Sequence: Synthetic oligonucleotide
cguugcagagucuuacaca

SEQ ID NO: 2287172 - RNA, 19 nt, Artificial Sequence
  Description of Artificial Sequence: Synthetic oligonucleotide
gguaaguaaugcaggaguu

SEQ ID NO: 2287173 - RNA, 19 nt, Artificial Sequence
  Description of Artificial Sequence: Synthetic oligonucleotide
ggauuccauggcuguagaa

SEQ ID NO: 2287174 - RNA, 19 nt, Artificial Sequence
  Description of Artificial Sequence: Synthetic oligonucleotide
ccccuuuguuauuccgggc

SEQ ID NO: 2287175 - RNA, 19 nt, Artificial Sequence
  Description of Artificial Sequence: Synthetic oligonucleotide
cagggauaucuuguaggaa

SEQ ID NO: 2287176 - RNA, 19 nt, Artificial Sequence
  Description of Artificial Sequence: Synthetic oligonucleotide
gggauaucuuguaggaagu

SEQ ID NO: 2287177 - RNA, 19 nt, Artificial Sequence
  Description of Artificial Sequence: Synthetic oligonucleotide
caacuacaggugagaaacu

SEQ ID NO: 2287178 - RNA, 19 nt, Artificial Sequence
  Description of Artificial Sequence: Synthetic oligonucleotide
gaccgauggcugguaagua

SEQ ID NO: 2287179 - RNA, 19 nt, Artificial Sequence
  Description of Artificial Sequence: Synthetic oligonucleotide
caggacgcccaagguguac

SEQ ID NO: 2287180 - RNA, 19 nt, Artificial Sequence
  Description of Artificial Sequence: Synthetic oligonucleotide
caccccgucgacgccucgc

SEQ ID NO: 2287181 - RNA, 19 nt, Artificial Sequence
  Description of Artificial Sequence: Synthetic oligonucleotide
agaccgucagggauaucuu

SEQ ID NO: 2287182 - RNA, 19 nt, Artificial Sequence
  Description of Artificial Sequence: Synthetic oligonucleotide
ggugagccuucacugauuu

SEQ ID NO: 2287183 - RNA, 19 nt, Artificial Sequence
  Description of Artificial Sequence: Synthetic oligonucleotide
gcaagacaucaggacgccc

SEQ ID NO: 2287184 - RNA, 19 nt, Artificial Sequence
  Description of Artificial Sequence: Synthetic oligonucleotide
gagaaggcuucaagggaau

SEQ ID NO: 2287185 - RNA, 19 nt, Artificial Sequence
  Description of Artificial Sequence: Synthetic oligonucleotide
cuucgcgugucaacugcgu

SEQ ID NO: 2287186 - RNA, 19 nt, Artificial Sequence
  Description of Artificial Sequence: Synthetic oligonucleotide
caggagccuuuccccuuug

SEQ ID NO: 2287187 - RNA, 19 nt, Artificial Sequence
  Description of Artificial Sequence: Synthetic oligonucleotide
uggaaccguucagcauaga

SEQ ID NO: 2287188 - RNA, 19 nt, Artificial Sequence
  Description of Artificial Sequence: Synthetic oligonucleotide
gccgcuggggccugaucgc

SEQ ID NO: 2287189 - RNA, 19 nt, Artificial Sequence
  Description of Artificial Sequence: Synthetic oligonucleotide
gcgcuggaaccguucagca

SEQ ID NO: 2287190 - RNA, 19 nt, Artificial Sequence
  Description of Artificial Sequence: Synthetic oligonucleotide
ggcuauaguccauuaucuu

SEQ ID NO: 2287191 - RNA, 19 nt, Artificial Sequence
  Description of Artificial Sequence: Synthetic oligonucleotide
guugugcuucauuguuuau

SEQ ID NO: 2287192 - RNA, 19 nt, Artificial Sequence
  Description of Artificial Sequence: Synthetic oligonucleotide
caggugagccuucacugau

SEQ ID NO: 2287193 - RNA, 19 nt, Artificial Sequence
  Description of Artificial Sequence: Synthetic oligonucleotide
ucgacgccucgcccuggau

SEQ ID NO: 2287194 - RNA, 19 nt, Artificial Sequence
  Description of Artificial Sequence: Synthetic oligonucleotide
ggaggcuauaguccauuau

SEQ ID NO: 2287195 - RNA, 19 nt, Artificial Sequence
  Description of Artificial Sequence: Synthetic oligonucleotide
cgccgagagaaagacgagc

SEQ ID NO: 2287196 - RNA, 19 nt, Artificial Sequence
  Description of Artificial Sequence: Synthetic oligonucleotide
gucgacgccucgcccugga

SEQ ID NO: 2287197 - RNA, 19 nt, Artificial Sequence
  Description of Artificial Sequence: Synthetic oligonucleotide
cuggggccugaucgccgag

SEQ ID NO: 2287198 - RNA, 19 nt, Artificial Sequence
  Description of Artificial Sequence: Synthetic oligonucleotide
acugcguguugugcuucau

SEQ ID NO: 2287199 - RNA, 19 nt, Artificial Sequence
  Description of Artificial Sequence: Synthetic oligonucleotide
gagccagaccgaaacuuuu

SEQ ID NO: 2287200 - RNA, 19 nt, Artificial Sequence
  Description of Artificial Sequence: Synthetic oligonucleotide
aggugagccuucacugauu

SEQ ID NO: 2287201 - RNA, 19 nt, Artificial Sequence
  Description of Artificial Sequence: Synthetic oligonucleotide
gucacguugcagagucuua

SEQ ID NO: 2287202 - RNA, 19 nt, Artificial Sequence
  Description of Artificial Sequence: Synthetic oligonucleotide
cugcaacuucaagcuuuuc

SEQ ID NO: 2287203 - RNA, 19 nt, Artificial Sequence
  Description of Artificial Sequence: Synthetic oligonucleotide
ccgagagaaagacgagcca

SEQ ID NO: 2287204 - RNA, 19 nt, Artificial Sequence
  Description of Artificial Sequence: Synthetic oligonucleotide
ccccaucauguaccagugc

SEQ ID NO: 2287205 - RNA, 19 nt, Artificial Sequence
  Description of Artificial Sequence: Synthetic oligonucleotide
gggaaucuucuugaacacu

SEQ ID NO: 2287206 - RNA, 19 nt, Artificial Sequence
  Description of Artificial Sequence: Synthetic oligonucleotide
ggaguugccgcuggggccu

SEQ ID NO: 2287207 - RNA, 19 nt, Artificial Sequence
  Description of Artificial Sequence: Synthetic oligonucleotide
gcuggggccugaucgccga

SEQ ID NO: 2287208 - RNA, 19 nt, Artificial Sequence
  Description of Artificial Sequence: Synthetic oligonucleotide
augaagcgcuggaaccguu

SEQ ID NO: 2287209 - RNA, 19 nt, Artificial Sequence
  Description of Artificial Sequence: Synthetic oligonucleotide
ccucgcccuggauggauuc

SEQ ID NO: 2287210 - RNA, 19 nt, Artificial Sequence
  Description of Artificial Sequence: Synthetic oligonucleotide
acacuguguugcacaugaa

SEQ ID NO: 2287211 - RNA, 19 nt, Artificial Sequence
  Description of Artificial Sequence: Synthetic oligonucleotide
cgacgccucgcccuggaug

SEQ ID NO: 2287212 - RNA, 19 nt, Artificial Sequence
  Description of Artificial Sequence: Synthetic oligonucleotide
gcguguugugcuucauugu

SEQ ID NO: 2287213 - RNA, 19 nt, Artificial Sequence
  Description of Artificial Sequence: Synthetic oligonucleotide
ggauugacaucaggaggcu

SEQ ID NO: 2287214 - RNA, 19 nt, Artificial Sequence
  Description of Artificial Sequence: Synthetic oligonucleotide
ccaaggcugaacucaaauu

SEQ ID NO: 2287215 - RNA, 19 nt, Artificial Sequence
  Description of Artificial Sequence: Synthetic oligonucleotide
cguugugcaugaucuaugu

SEQ ID NO: 2287216 - RNA, 19 nt, Artificial Sequence
  Description of Artificial Sequence: Synthetic oligonucleotide
ccgauggcugguaaguaau

SEQ ID NO: 2287217 - RNA, 19 nt, Artificial Sequence
  Description of Artificial Sequence: Synthetic oligonucleotide
gcgugucaacugcguguug

SEQ ID NO: 2287218 - RNA, 19 nt, Artificial Sequence
  Description of Artificial Sequence: Synthetic oligonucleotide
gcuggucuucgcgugucaa

SEQ ID NO: 2287219 - RNA, 19 nt, Artificial Sequence
  Description of Artificial Sequence: Synthetic oligonucleotide
ccgucagggauaucuugua

SEQ ID NO: 2287220 - RNA, 19 nt, Artificial Sequence
  Description of Artificial Sequence: Synthetic oligonucleotide
cugcguguugugcuucauu

SEQ ID NO: 2287221 - RNA, 19 nt, Artificial Sequence
  Description of Artificial Sequence: Synthetic oligonucleotide
cugaggcucacugcucaau

SEQ ID NO: 2287222 - RNA, 19 nt, Artificial Sequence
  Description of Artificial Sequence: Synthetic oligonucleotide
cagagaccgauggcuggua

SEQ ID NO: 2287223 - RNA, 19 nt, Artificial Sequence
  Description of Artificial Sequence: Synthetic oligonucleotide
caggaggcuauaguccauu

SEQ ID NO: 2287224 - RNA, 19 nt, Artificial Sequence
  Description of Artificial Sequence: Synthetic oligonucleotide
ccgucgacgccucgcccug

SEQ ID NO: 2287225 - RNA, 19 nt, Artificial Sequence
  Description of Artificial Sequence: Synthetic oligonucleotide
gggaugccacccauguggu

SEQ ID NO: 2287226 - RNA, 19 nt, Artificial Sequence
  Description of Artificial Sequence: Synthetic oligonucleotide
gguccucagucuccacagu

SEQ ID NO: 2287227 - RNA, 19 nt, Artificial Sequence
  Description of Artificial Sequence: Synthetic oligonucleotide
gggccugaucgccgagaga

SEQ ID NO: 2287228 - RNA, 19 nt, Artificial Sequence
  Description of Artificial Sequence: Synthetic oligonucleotide
cagucacguugcagagucu

SEQ ID NO: 2287229 - RNA, 19 nt, Artificial Sequence
  Description of Artificial Sequence: Synthetic oligonucleotide
cacuuccgccuugguuguc

SEQ ID NO: 2287230 - RNA, 19 nt, Artificial Sequence
  Description of Artificial Sequence: Synthetic oligonucleotide
gguguacaucuggcuccac

SEQ ID NO: 2287231 - RNA, 19 nt, Artificial Sequence
  Description of Artificial Sequence: Synthetic oligonucleotide
cgugucaacugcguguugu

SEQ ID NO: 2287232 - RNA, 19 nt, Artificial Sequence
  Description of Artificial Sequence: Synthetic oligonucleotide
gcuuuccaagagugcucua

SEQ ID NO: 2287233 - RNA, 19 nt, Artificial Sequence
  Description of Artificial Sequence: Synthetic oligonucleotide
aguugccgcuggggccuga

SEQ ID NO: 2287234 - RNA, 19 nt, Artificial Sequence
  Description of Artificial Sequence: Synthetic oligonucleotide
ccccgucgacgccucgccc

SEQ ID NO: 2287235 - RNA, 19 nt, Artificial Sequence
  Description of Artificial Sequence: Synthetic oligonucleotide
ggacgcccaagguguacau

SEQ ID NO: 2287236 - RNA, 19 nt, Artificial Sequence
  Description of Artificial Sequence: Synthetic oligonucleotide
ggggcuggucuucgcgugu

SEQ ID NO: 2287237 - RNA, 19 nt, Artificial Sequence
  Description of Artificial Sequence: Synthetic oligonucleotide
gcauagaagccaggacgau

SEQ ID NO: 2287238 - RNA, 19 nt, Artificial Sequence
  Description of Artificial Sequence: Synthetic oligonucleotide
cccgucgacgccucgcccu

SEQ ID NO: 2287239 - RNA, 19 nt, Artificial Sequence
  Description of Artificial Sequence: Synthetic oligonucleotide
ccagagaccgauggcuggu

SEQ ID NO: 2287240 - RNA, 19 nt, Artificial Sequence
  Description of Artificial Sequence: Synthetic oligonucleotide
guugccgcuggggccugau

SEQ ID NO: 2287241 - RNA, 19 nt, Artificial Sequence
  Description of Artificial Sequence: Synthetic oligonucleotide
cgagccagaccgaaacuuu

SEQ ID NO: 2287242 - RNA, 19 nt, Artificial Sequence
  Description of Artificial Sequence: Synthetic oligonucleotide
cgucgacgccucgcccugg

SEQ ID NO: 2287243 - RNA, 19 nt, Artificial Sequence
  Description of Artificial Sequence: Synthetic oligonucleotide
cgccuugguugucacuugu

SEQ ID NO: 2287244 - RNA, 19 nt, Artificial Sequence
  Description of Artificial Sequence: Synthetic oligonucleotide
cgcgugucaacugcguguu

SEQ ID NO: 2287245 - RNA, 19 nt, Artificial Sequence
  Description of Artificial Sequence: Synthetic oligonucleotide
ggcucucguugugcaugau

SEQ ID NO: 2287246 - RNA, 19 nt, Artificial Sequence
  Description of Artificial Sequence: Synthetic oligonucleotide
cgccucgcccuggauggau

SEQ ID NO: 2287247 - RNA, 19 nt, Artificial Sequence
  Description of Artificial Sequence: Synthetic oligonucleotide
aaucagaagaaacauuggg

SEQ ID NO: 2287248 - RNA, 19 nt, Artificial Sequence
  Description of Artificial Sequence: Synthetic oligonucleotide
aagagaaggaaacaugacg

SEQ ID NO: 2287249 - RNA, 19 nt, Artificial Sequence
  Description of Artificial Sequence: Synthetic oligonucleotide
gaaacauuggggcagaggg

SEQ ID NO: 2287250 - RNA, 19 nt, Artificial Sequence
  Description of Artificial Sequence: Synthetic oligonucleotide
uacaacuuuaguaagacga

SEQ ID NO: 2287251 - RNA, 19 nt, Artificial Sequence
  Description of Artificial Sequence: Synthetic oligonucleotide
ucuaugaagaagcagacga

SEQ ID NO: 2287252 - RNA, 19 nt, Artificial Sequence
  Description of Artificial Sequence: Synthetic oligonucleotide
aacuuaaauaaagacacac

SEQ ID NO: 2287253 - RNA, 19 nt, Artificial Sequence
  Description of Artificial Sequence: Synthetic oligonucleotide
ucagaagaaacauuggggc

SEQ ID NO: 2287254 - RNA, 19 nt, Artificial Sequence
  Description of Artificial Sequence: Synthetic oligonucleotide
aacacugaggccccaaugg

SEQ ID NO: 2287255 - RNA, 19 nt, Artificial Sequence
  Description of Artificial Sequence: Synthetic oligonucleotide
aguaagacgaggcagcccg

SEQ ID NO: 2287256 - RNA, 19 nt, Artificial Sequence
  Description of Artificial Sequence: Synthetic oligonucleotide
uuaaauaaagacacacaca

SEQ ID NO: 2287257 - RNA, 19 nt, Artificial Sequence
  Description of Artificial Sequence: Synthetic oligonucleotide
cuuaauacaacuuuaguaa

SEQ ID NO: 2287258 - RNA, 19 nt, Artificial Sequence
  Description of Artificial Sequence: Synthetic oligonucleotide
uuuaguaagacgaggcagc

SEQ ID NO: 2287259 - RNA, 19 nt, Artificial Sequence
  Description of Artificial Sequence: Synthetic oligonucleotide
uggaguacgagcucgaaag

SEQ ID NO: 2287260 - RNA, 19 nt, Artificial Sequence
  Description of Artificial Sequence: Synthetic oligonucleotide
uuaauacaacuuuaguaag

SEQ ID NO: 2287261 - RNA, 19 nt, Artificial Sequence
  Description of Artificial Sequence: Synthetic oligonucleotide
aauagguauggcuggcugg

SEQ ID NO: 2287262 - RNA, 19 nt, Artificial Sequence
  Description of Artificial Sequence: Synthetic oligonucleotide
uuugcaaccucacagcaca

SEQ ID NO: 2287263 - RNA, 19 nt, Artificial Sequence
  Description of Artificial Sequence: Synthetic oligonucleotide
uccauuacauggcagaaga

SEQ ID NO: 2287264 - RNA, 19 nt, Artificial Sequence
  Description of Artificial Sequence: Synthetic oligonucleotide
acuauacuccccauuaucc

SEQ ID NO: 2287265 - RNA, 19 nt, Artificial Sequence
  Description of Artificial Sequence: Synthetic oligonucleotide
aaccauuuuaccuguguug

SEQ ID NO: 2287266 - RNA, 19 nt, Artificial Sequence
  Description of Artificial Sequence: Synthetic oligonucleotide
aaucucuguacagaucccc

SEQ ID NO: 2287267 - RNA, 19 nt, Artificial Sequence
  Description of Artificial Sequence: Synthetic oligonucleotide
aaggaaacaugacgugagc

SEQ ID NO: 2287268 - RNA, 19 nt, Artificial Sequence
  Description of Artificial Sequence: Synthetic oligonucleotide
auuacauggcagaagaggg

SEQ ID NO: 2287269 - RNA, 19 nt, Artificial Sequence
  Description of Artificial Sequence: Synthetic oligonucleotide
aaaacacugagacagcauu

SEQ ID NO: 2287270 - RNA, 19 nt, Artificial Sequence
  Description of Artificial Sequence: Synthetic oligonucleotide
aacuuaauacaacuuuagu

SEQ ID NO: 2287271 - RNA, 19 nt, Artificial Sequence
  Description of Artificial Sequence: Synthetic oligonucleotide
uguugaaccagggagcagg

SEQ ID NO: 2287272 - RNA, 19 nt, Artificial Sequence
  Description of Artificial Sequence: Synthetic oligonucleotide
aagcagacgaggcaauagg

SEQ ID NO: 2287273 - RNA, 19 nt, Artificial Sequence
  Description of Artificial Sequence: Synthetic oligonucleotide
uggugauccaugaaggcag

SEQ ID NO: 2287274 - RNA, 19 nt, Artificial Sequence
  Description of Artificial Sequence: Synthetic oligonucleotide
  modified_base (9)..(9): a, c, u, g, unknown or other
aguccagcnguuugcaacc

SEQ ID NO: 2287275 - RNA, 19 nt, Artificial Sequence
  Description of Artificial Sequence: Synthetic oligonucleotide
ugagacagcauuaguggag

SEQ ID NO: 2287276 - RNA, 19 nt, Artificial Sequence
  Description of Artificial Sequence: Synthetic oligonucleotide
cauuacauggcagaagagg

SEQ ID NO: 2287277 - RNA, 19 nt, Artificial Sequence
  Description of Artificial Sequence: Synthetic oligonucleotide
cacauccuccauuacaugg

SEQ ID NO: 2287278 - RNA, 19 nt, Artificial Sequence
  Description of Artificial Sequence: Synthetic oligonucleotide
cacggagacaacuuaauac

SEQ ID NO: 2287279 - RNA, 19 nt, Artificial Sequence
  Description of Artificial Sequence: Synthetic oligonucleotide
aaaucagaagaaacauugg

SEQ ID NO: 2287280 - RNA, 19 nt, Artificial Sequence
  Description of Artificial Sequence: Synthetic oligonucleotide
acccucaacacugaggccc

SEQ ID NO: 2287281 - RNA, 19 nt, Artificial Sequence
  Description of Artificial Sequence: Synthetic oligonucleotide
uauacuccccauuaucccc

SEQ ID NO: 2287282 - RNA, 19 nt, Artificial Sequence
  Description of Artificial Sequence: Synthetic oligonucleotide
ucgaaagagagagagaaaa

SEQ ID NO: 2287283 - RNA, 19 nt, Artificial Sequence
  Description of Artificial Sequence: Synthetic oligonucleotide
acggagacaacuuaauaca

SEQ ID NO: 2287284 - RNA, 19 nt, Artificial Sequence
  Description of Artificial Sequence: Synthetic oligonucleotide
auuaguggaggugagaggu

SEQ ID NO: 2287285 - RNA, 19 nt, Artificial Sequence
  Description of Artificial Sequence: Synthetic oligonucleotide
uaagcagcuccccucaccc

SEQ ID NO: 2287286 - RNA, 19 nt, Artificial Sequence
  Description of Artificial Sequence: Synthetic oligonucleotide
agaagaaacauuggggcag

SEQ ID NO: 2287287 - RNA, 19 nt, Artificial Sequence
  Description of Artificial Sequence: Synthetic oligonucleotide
ugaagaagcagacgaggca

SEQ ID NO: 2287288 - RNA, 19 nt, Artificial Sequence
  Description of Artificial Sequence: Synthetic oligonucleotide
agggcaaccauuuuaccug

SEQ ID NO: 2287289 - RNA, 19 nt, Artificial Sequence
  Description of Artificial Sequence: Synthetic oligonucleotide
gaggcaauagguauggcug

SEQ ID NO: 2287290 - RNA, 19 nt, Artificial Sequence
  Description of Artificial Sequence: Synthetic oligonucleotide
cuuuaguaagacgaggcag

SEQ ID NO: 2287291 - RNA, 19 nt, Artificial Sequence
  Description of Artificial Sequence: Synthetic oligonucleotide
aacacugagacagcauuag

SEQ ID NO: 2287292 - RNA, 19 nt, Artificial Sequence
  Description of Artificial Sequence: Synthetic oligonucleotide
agagaaggaaacaugacgu

SEQ ID NO: 2287293 - RNA, 19 nt, Artificial Sequence
  Description of Artificial Sequence: Synthetic oligonucleotide
gaaggaaacaugacgugag

SEQ ID NO: 2287294 - RNA, 19 nt, Artificial Sequence
  Description of Artificial Sequence: Synthetic oligonucleotide
gagucuaugaagaagcaga

SEQ ID NO: 2287295 - RNA, 19 nt, Artificial Sequence
  Description of Artificial Sequence: Synthetic oligonucleotide
uguacagauccccgguggg

SEQ ID NO: 2287296 - RNA, 19 nt, Artificial Sequence
  Description of Artificial Sequence: Synthetic oligonucleotide
acgagcucgaaagagagag

SEQ ID NO: 2287297 - RNA, 19 nt, Artificial Sequence
  Description of Artificial Sequence: Synthetic oligonucleotide
cacugagacagcauuagug

SEQ ID NO: 2287298 - RNA, 19 nt, Artificial Sequence
  Description of Artificial Sequence: Synthetic oligonucleotide
aaggagaacgaggggaggg

SEQ ID NO: 2287299 - RNA, 19 nt, Artificial Sequence
  Description of Artificial Sequence: Synthetic oligonucleotide
cuauacuccccauuauccc

SEQ ID NO: 2287300 - RNA, 19 nt, Artificial Sequence
  Description of Artificial Sequence: Synthetic oligonucleotide
  modified_base (3)..(3): a, c, u, g, unknown or other
gcnguuugcaaccucacag

SEQ ID NO: 2287301 - RNA, 19 nt, Artificial Sequence
  Description of Artificial Sequence: Synthetic oligonucleotide
acacugaggccccaauggc

SEQ ID NO: 2287302 - RNA, 19 nt, Artificial Sequence
  Description of Artificial Sequence: Synthetic oligonucleotide
aagacgaggcagcccggcc

SEQ ID NO: 2287303 - RNA, 19 nt, Artificial Sequence
  Description of Artificial Sequence: Synthetic oligonucleotide
ucucuguacagauccccgg

SEQ ID NO: 2287304 - RNA, 19 nt, Artificial Sequence
  Description of Artificial Sequence: Synthetic oligonucleotide
  modified_base (10)..(10): a, c, u, g, unknown or other
caguccagcnguuugcaac

SEQ ID NO: 2287305 - RNA, 19 nt, Artificial Sequence
  Description of Artificial Sequence: Synthetic oligonucleotide
uggcugggcaacaagaguc

SEQ ID NO: 2287306 - RNA, 19 nt, Artificial Sequence
  Description of Artificial Sequence: Synthetic oligonucleotide
acuuuaguaagacgaggca

SEQ ID NO: 2287307 - RNA, 19 nt, Artificial Sequence
  Description of Artificial Sequence: Synthetic oligonucleotide
  modified_base (13)..(13): a, c, u, g, unknown or other
ugacaguccagcnguuugc

SEQ ID NO: 2287308 - RNA, 19 nt, Artificial Sequence
  Description of Artificial Sequence: Synthetic oligonucleotide
acauccuccauuacauggc

SEQ ID NO: 2287309 - RNA, 19 nt, Artificial Sequence
  Description of Artificial Sequence: Synthetic oligonucleotide
uccuccauuacauggcaga

SEQ ID NO: 2287310 - RNA, 19 nt, Artificial Sequence
  Description of Artificial Sequence: Synthetic oligonucleotide
gagaaggaaacaugacgug

SEQ ID NO: 2287311 - RNA, 19 nt, Artificial Sequence
  Description of Artificial Sequence: Synthetic oligonucleotide
gacgaggcaauagguaugg

SEQ ID NO: 2287312 - RNA, 19 nt, Artificial Sequence
  Description of Artificial Sequence: Synthetic oligonucleotide
auuauccccucugagaaca

SEQ ID NO: 2287313 - RNA, 19 nt, Artificial Sequence
  Description of Artificial Sequence: Synthetic oligonucleotide
gauaggccagcacgcaggg

SEQ ID NO: 2287314 - RNA, 19 nt, Artificial Sequence
  Description of Artificial Sequence: Synthetic oligonucleotide
  modified_base (2)..(2): a, c, u, g, unknown or other
cnguuugcaaccucacagc

SEQ ID NO: 2287315 - RNA, 19 nt, Artificial Sequence
  Description of Artificial Sequence: Synthetic oligonucleotide
aggcaauagguauggcugg

SEQ ID NO: 2287316 - RNA, 19 nt, Artificial Sequence
  Description of Artificial Sequence: Synthetic oligonucleotide
uccuccacuauacucccca

SEQ ID NO: 2287317 - RNA, 19 nt, Artificial Sequence
  Description of Artificial Sequence: Synthetic oligonucleotide
  modified_base (14)..(14): a, c, u, g, unknown or other
cugacaguccagcnguuug

SEQ ID NO: 2287318 - RNA, 19 nt, Artificial Sequence
  Description of Artificial Sequence: Synthetic oligonucleotide
ugagagguggacacagaac

SEQ ID NO: 2287319 - RNA, 19 nt, Artificial Sequence
  Description of Artificial Sequence: Synthetic oligonucleotide
cauuaguggaggugagagg

SEQ ID NO: 2287320 - RNA, 19 nt, Artificial Sequence
  Description of Artificial Sequence: Synthetic oligonucleotide
caacuuuaguaagacgagg

SEQ ID NO: 2287321 - RNA, 19 nt, Artificial Sequence
  Description of Artificial Sequence: Synthetic oligonucleotide
cauuuuaccuguguugaac

SEQ ID NO: 2287322 - RNA, 19 nt, Artificial Sequence
  Description of Artificial Sequence: Synthetic oligonucleotide
cucacccucaacacugagg

SEQ ID NO: 2287323 - RNA, 19 nt, Artificial Sequence
  Description of Artificial Sequence: Synthetic oligonucleotide
agaaggaaacaugacguga

SEQ ID NO: 2287324 - RNA, 19 nt, Artificial Sequence
  Description of Artificial Sequence: Synthetic oligonucleotide
uguggcgcuggucuggcug

SEQ ID NO: 2287325 - RNA, 19 nt, Artificial Sequence
  Description of Artificial Sequence: Synthetic oligonucleotide
uuaguaagacgaggcagcc

SEQ ID NO: 2287326 - RNA, 19 nt, Artificial Sequence
  Description of Artificial Sequence: Synthetic oligonucleotide
gaagcagacgaggcaauag

SEQ ID NO: 2287327 - RNA, 19 nt, Artificial Sequence
  Description of Artificial Sequence: Synthetic oligonucleotide
gaguacgagcucgaaagag

SEQ ID NO: 2287328 - RNA, 19 nt, Artificial Sequence
  Description of Artificial Sequence: Synthetic oligonucleotide
cuguacagauccccggugg

SEQ ID NO: 2287329 - RNA, 19 nt, Artificial Sequence
  Description of Artificial Sequence: Synthetic oligonucleotide
agaaacauuggggcagagg

SEQ ID NO: 2287330 - RNA, 19 nt, Artificial Sequence
  Description of Artificial Sequence: Synthetic oligonucleotide
augggauaggccagcacgc

SEQ ID NO: 2287331 - RNA, 19 nt, Artificial Sequence
  Description of Artificial Sequence: Synthetic oligonucleotide
agcuggugauccaugaagg

SEQ ID NO: 2287332 - RNA, 19 nt, Artificial Sequence
  Description of Artificial Sequence: Synthetic oligonucleotide
ugacgugagcuggugaucc

SEQ ID NO: 2287333 - RNA, 19 nt, Artificial Sequence
  Description of Artificial Sequence: Synthetic oligonucleotide
agagucuaugaagaagcag

SEQ ID NO: 2287334 - RNA, 19 nt, Artificial Sequence
  Description of Artificial Sequence: Synthetic oligonucleotide
gggugaaaagaaaagggag

SEQ ID NO: 2287335 - RNA, 19 nt, Artificial Sequence
  Description of Artificial Sequence: Synthetic oligonucleotide
agacgaggcagcccggccg

SEQ ID NO: 2287336 - RNA, 19 nt, Artificial Sequence
  Description of Artificial Sequence: Synthetic oligonucleotide
gaagaagcagacgaggcaa

SEQ ID NO: 2287337 - RNA, 19 nt, Artificial Sequence
  Description of Artificial Sequence: Synthetic oligonucleotide
gacacagaaccuguagccc

SEQ ID NO: 2287338 - RNA, 19 nt, Artificial Sequence
  Description of Artificial Sequence: Synthetic oligonucleotide
guacgagcucgaaagagag

SEQ ID NO: 2287339 - RNA, 19 nt, Artificial Sequence
  Description of Artificial Sequence: Synthetic oligonucleotide
agcagcuccccucacccuc

SEQ ID NO: 2287340 - RNA, 19 nt, Artificial Sequence
  Description of Artificial Sequence: Synthetic oligonucleotide
guggacacagaaccuguag

SEQ ID NO: 2287341 - RNA, 19 nt, Artificial Sequence
  Description of Artificial Sequence: Synthetic oligonucleotide
ucuggaagaaaagcagccu

SEQ ID NO: 2287342 - RNA, 19 nt, Artificial Sequence
  Description of Artificial Sequence: Synthetic oligonucleotide
agggugaaaagaaaaggga

SEQ ID NO: 2287343 - RNA, 19 nt, Artificial Sequence
  Description of Artificial Sequence: Synthetic oligonucleotide
cacuauacuccccauuauc

SEQ ID NO: 2287344 - RNA, 19 nt, Artificial Sequence
  Description of Artificial Sequence: Synthetic oligonucleotide
caauagguauggcuggcug

SEQ ID NO: 2287345 - RNA, 19 nt, Artificial Sequence
  Description of Artificial Sequence: Synthetic oligonucleotide
gcaaccucacagcacaucc

SEQ ID NO: 2287346 - RNA, 19 nt, Artificial Sequence
  Description of Artificial Sequence: Synthetic oligonucleotide
acaacuuaauacaacuuua

SEQ ID NO: 2287347 - RNA, 19 nt, Artificial Sequence
  Description of Artificial Sequence: Synthetic oligonucleotide
gacagcauuaguggaggug

SEQ ID NO: 2287348 - RNA, 19 nt, Artificial Sequence
  Description of Artificial Sequence: Synthetic oligonucleotide
gucuaugaagaagcagacg

SEQ ID NO: 2287349 - RNA, 19 nt, Artificial Sequence
  Description of Artificial Sequence: Synthetic oligonucleotide
agaacgaggggaggggagg

SEQ ID NO: 2287350 - RNA, 19 nt, Artificial Sequence
  Description of Artificial Sequence: Synthetic oligonucleotide
gcauuaguggaggugagag

SEQ ID NO: 2287351 - RNA, 19 nt, Artificial Sequence
  Description of Artificial Sequence: Synthetic oligonucleotide
aacaugacgugagcuggug

SEQ ID NO: 2287352 - RNA, 19 nt, Artificial Sequence
  Description of Artificial Sequence: Synthetic oligonucleotide
  modified_base (4)..(4): a, c, u, g, unknown or other
agcnguuugcaaccucaca

SEQ ID NO: 2287353 - RNA, 19 nt, Artificial Sequence
  Description of Artificial Sequence: Synthetic oligonucleotide
aucucuguacagauccccg

SEQ ID NO: 2287354 - RNA, 19 nt, Artificial Sequence
  Description of Artificial Sequence: Synthetic oligonucleotide
ggcacagucuuuaagcagc

SEQ ID NO: 2287355 - RNA, 19 nt, Artificial Sequence
  Description of Artificial Sequence: Synthetic oligonucleotide
ggugaaaagaaaagggaga

SEQ ID NO: 2287356 - RNA, 19 nt, Artificial Sequence
  Description of Artificial Sequence: Synthetic oligonucleotide
ugaacggccugucuucuuu

SEQ ID NO: 2287357 - RNA, 19 nt, Artificial Sequence
  Description of Artificial Sequence: Synthetic oligonucleotide
aagagucuaugaagaagca

SEQ ID NO: 2287358 - RNA, 19 nt, Artificial Sequence
  Description of Artificial Sequence: Synthetic oligonucleotide
aguacgagcucgaaagaga

SEQ ID NO: 2287359 - RNA, 19 nt, Artificial Sequence
  Description of Artificial Sequence: Synthetic oligonucleotide
gacgaggcagcccggccgg

SEQ ID NO: 2287360 - RNA, 19 nt, Artificial Sequence
  Description of Artificial Sequence: Synthetic oligonucleotide
acagcacauccuccauuac

SEQ ID NO: 2287361 - RNA, 19 nt, Artificial Sequence
  Description of Artificial Sequence: Synthetic oligonucleotide
auagguauggcuggcuggu

SEQ ID NO: 2287362 - RNA, 19 nt, Artificial Sequence
  Description of Artificial Sequence: Synthetic oligonucleotide
aaacauuggggcagaggga

SEQ ID NO: 2287363 - RNA, 19 nt, Artificial Sequence
  Description of Artificial Sequence: Synthetic oligonucleotide
agcccggccggcauggucc

SEQ ID NO: 2287364 - RNA, 19 nt, Artificial Sequence
  Description of Artificial Sequence: Synthetic oligonucleotide
agggagggcaaccauuuua

SEQ ID NO: 2287365 - RNA, 19 nt, Artificial Sequence
  Description of Artificial Sequence: Synthetic oligonucleotide
aggagaacgaggggagggg

SEQ ID NO: 2287366 - RNA, 19 nt, Artificial Sequence
  Description of Artificial Sequence: Synthetic oligonucleotide
guugaaccagggagcaggg

SEQ ID NO: 2287367 - RNA, 19 nt, Artificial Sequence
  Description of Artificial Sequence: Synthetic oligonucleotide
ucaacacugaggccccaau

SEQ ID NO: 2287368 - RNA, 19 nt, Artificial Sequence
  Description of Artificial Sequence: Synthetic oligonucleotide
gaacgaggggaggggaggg

SEQ ID NO: 2287369 - RNA, 19 nt, Artificial Sequence
  Description of Artificial Sequence: Synthetic oligonucleotide
uacgagcucgaaagagaga

SEQ ID NO: 2287370 - RNA, 19 nt, Artificial Sequence
  Description of Artificial Sequence: Synthetic oligonucleotide
cauuauccccucugagaac

SEQ ID NO: 2287371 - RNA, 19 nt, Artificial Sequence
  Description of Artificial Sequence: Synthetic oligonucleotide
ggcaacaagagucuaugaa

SEQ ID NO: 2287372 - RNA, 19 nt, Artificial Sequence
  Description of Artificial Sequence: Synthetic oligonucleotide
  modified_base (18)..(18): a, c, u, g, unknown or other
cagccugacaguccagcng

SEQ ID NO: 2287373 - RNA, 19 nt, Artificial Sequence
  Description of Artificial Sequence: Synthetic oligonucleotide
caacacugaggccccaaug

SEQ ID NO: 2287374 - RNA, 19 nt, Artificial Sequence
  Description of Artificial Sequence: Synthetic oligonucleotide
cugagacagcauuagugga

SEQ ID NO: 2287375 - RNA, 19 nt, Artificial Sequence
  Description of Artificial Sequence: Synthetic oligonucleotide
uggucuggcugugugggug

SEQ ID NO: 2287376 - RNA, 19 nt, Artificial Sequence
  Description of Artificial Sequence: Synthetic oligonucleotide
  modified_base (7)..(7): a, c, u, g, unknown or other
uccagcnguuugcaaccuc

SEQ ID NO: 2287377 - RNA, 19 nt, Artificial Sequence
  Description of Artificial Sequence: Synthetic oligonucleotide
gugcuggaguacgagcucg

SEQ ID NO: 2287378 - RNA, 19 nt, Artificial Sequence
  Description of Artificial Sequence: Synthetic oligonucleotide
uacagauccccggugggaa

SEQ ID NO: 2287379 - RNA, 19 nt, Artificial Sequence
  Description of Artificial Sequence: Synthetic oligonucleotide
uaagacgaggcagcccggc

SEQ ID NO: 2287380 - RNA, 19 nt, Artificial Sequence
  Description of Artificial Sequence: Synthetic oligonucleotide
gagaacgaggggaggggag

SEQ ID NO: 2287381 - RNA, 19 nt, Artificial Sequence
  Description of Artificial Sequence: Synthetic oligonucleotide
acacggagacaacuuaaua

SEQ ID NO: 2287382 - RNA, 19 nt, Artificial Sequence
  Description of Artificial Sequence: Synthetic oligonucleotide
gcucgaaagagagagagaa

SEQ ID NO: 2287383 - RNA, 19 nt, Artificial Sequence
  Description of Artificial Sequence: Synthetic oligonucleotide
acaugacgugagcugguga

SEQ ID NO: 2287384 - RNA, 19 nt, Artificial Sequence
  Description of Artificial Sequence: Synthetic oligonucleotide
cuccauuacauggcagaag

SEQ ID NO: 2287385 - RNA, 19 nt, Artificial Sequence
  Description of Artificial Sequence: Synthetic oligonucleotide
uaguaagacgaggcagccc

SEQ ID NO: 2287386 - RNA, 19 nt, Artificial Sequence
  Description of Artificial Sequence: Synthetic oligonucleotide
aggugcuggaguacgagcu

SEQ ID NO: 2287387 - RNA, 19 nt, Artificial Sequence
  Description of Artificial Sequence: Synthetic oligonucleotide
gaagaaacauuggggcaga

SEQ ID NO: 2287388 - RNA, 19 nt, Artificial Sequence
  Description of Artificial Sequence: Synthetic oligonucleotide
ucacagcacauccuccauu

SEQ ID NO: 2287389 - RNA, 19 nt, Artificial Sequence
  Description of Artificial Sequence: Synthetic oligonucleotide
ggcgggugcgggcugaacg

SEQ ID NO: 2287390 - RNA, 19 nt, Artificial Sequence
  Description of Artificial Sequence: Synthetic oligonucleotide
augacgugagcuggugauc

SEQ ID NO: 2287391 - RNA, 19 nt, Artificial Sequence
  Description of Artificial Sequence: Synthetic oligonucleotide
uauggcuggcuggugcccc

SEQ ID NO: 2287392 - RNA, 19 nt, Artificial Sequence
  Description of Artificial Sequence: Synthetic oligonucleotide
agcagacgaggcaauaggu

SEQ ID NO: 2287393 - RNA, 19 nt, Artificial Sequence
  Description of Artificial Sequence: Synthetic oligonucleotide
uccccucacccucaacacu

SEQ ID NO: 2287394 - RNA, 19 nt, Artificial Sequence
  Description of Artificial Sequence: Synthetic oligonucleotide
gaggggagggugaaaagaa

SEQ ID NO: 2287395 - RNA, 19 nt, Artificial Sequence
  Description of Artificial Sequence: Synthetic oligonucleotide
cuggugauccaugaaggca

SEQ ID NO: 2287396 - RNA, 19 nt, Artificial Sequence
  Description of Artificial Sequence: Synthetic oligonucleotide
guuugcaaccucacagcac

SEQ ID NO: 2287397 - RNA, 19 nt, Artificial Sequence
  Description of Artificial Sequence: Synthetic oligonucleotide
cagcacauccuccauuaca

SEQ ID NO: 2287398 - RNA, 19 nt, Artificial Sequence
  Description of Artificial Sequence: Synthetic oligonucleotide
agacgaggcaauagguaug

SEQ ID NO: 2287399 - RNA, 19 nt, Artificial Sequence
  Description of Artificial Sequence: Synthetic oligonucleotide
gcuggucuggcuguguggg

SEQ ID NO: 2287400 - RNA, 19 nt, Artificial Sequence
  Description of Artificial Sequence: Synthetic oligonucleotide
cagcauuaguggaggugag

SEQ ID NO: 2287401 - RNA, 19 nt, Artificial Sequence
  Description of Artificial Sequence: Synthetic oligonucleotide
gugagcuggugauccauga

SEQ ID NO: 2287402 - RNA, 19 nt, Artificial Sequence
  Description of Artificial Sequence: Synthetic oligonucleotide
  modified_base (5)..(5): a, c, u, g, unknown or other
cagcnguuugcaaccucac

SEQ ID NO: 2287403 - RNA, 19 nt, Artificial Sequence
  Description of Artificial Sequence: Synthetic oligonucleotide
  modified_base (12)..(12): a, c, u, g, unknown or other
gacaguccagcnguuugca

SEQ ID NO: 2287404 - RNA, 19 nt, Artificial Sequence
  Description of Artificial Sequence: Synthetic oligonucleotide
gauccccggugggaaacgg

SEQ ID NO: 2287405 - RNA, 19 nt, Artificial Sequence
  Description of Artificial Sequence: Synthetic oligonucleotide
ccauuauccccucugagaa

SEQ ID NO: 2287406 - RNA, 19 nt, Artificial Sequence
  Description of Artificial Sequence: Synthetic oligonucleotide
aagaagcagacgaggcaau

SEQ ID NO: 2287407 - RNA, 19 nt, Artificial Sequence
  Description of Artificial Sequence: Synthetic oligonucleotide
cagacgaggcaauagguau

SEQ ID NO: 2287408 - RNA, 19 nt, Artificial Sequence
  Description of Artificial Sequence: Synthetic oligonucleotide
aggaagggagggcaaccau

SEQ ID NO: 2287409 - RNA, 19 nt, Artificial Sequence
  Description of Artificial Sequence: Synthetic oligonucleotide
agcauuaguggaggugaga

SEQ ID NO: 2287410 - RNA, 19 nt, Artificial Sequence
  Description of Artificial Sequence: Synthetic oligonucleotide
ugggauaggccagcacgca

SEQ ID NO: 2287411 - RNA, 19 nt, Artificial Sequence
  Description of Artificial Sequence: Synthetic oligonucleotide
gggagggcaaccauuuuac

SEQ ID NO: 2287412 - RNA, 19 nt, Artificial Sequence
  Description of Artificial Sequence: Synthetic oligonucleotide
gcauuucuggggugagggg

SEQ ID NO: 2287413 - RNA, 19 nt, Artificial Sequence
  Description of Artificial Sequence: Synthetic oligonucleotide
gggauaggccagcacgcag

SEQ ID NO: 2287414 - RNA, 19 nt, Artificial Sequence
  Description of Artificial Sequence: Synthetic oligonucleotide
uuauccccucugagaacaa

SEQ ID NO: 2287415 - RNA, 19 nt, Artificial Sequence
  Description of Artificial Sequence: Synthetic oligonucleotide
ugcaaccucacagcacauc

SEQ ID NO: 2287416 - RNA, 19 nt, Artificial Sequence
  Description of Artificial Sequence: Synthetic oligonucleotide
agauccccggugggaaacg

SEQ ID NO: 2287417 - RNA, 19 nt, Artificial Sequence
  Description of Artificial Sequence: Synthetic oligonucleotide
guaagacgaggcagcccgg

SEQ ID NO: 2287418 - RNA, 19 nt, Artificial Sequence
  Description of Artificial Sequence: Synthetic oligonucleotide
acgaggcaauagguauggc

SEQ ID NO: 2287419 - RNA, 19 nt, Artificial Sequence
  Description of Artificial Sequence: Synthetic oligonucleotide
caugacgugagcuggugau

SEQ ID NO: 2287420 - RNA, 19 nt, Artificial Sequence
  Description of Artificial Sequence: Synthetic oligonucleotide
ggagggcaaccauuuuacc

SEQ ID NO: 2287421 - RNA, 19 nt, Artificial Sequence
  Description of Artificial Sequence: Synthetic oligonucleotide
cucgaaagagagagagaaa

SEQ ID NO: 2287422 - RNA, 19 nt, Artificial Sequence
  Description of Artificial Sequence: Synthetic oligonucleotide
ccccucacccucaacacug

SEQ ID NO: 2287423 - RNA, 19 nt, Artificial Sequence
  Description of Artificial Sequence: Synthetic oligonucleotide
auccccucugagaacaaaa

SEQ ID NO: 2287424 - RNA, 19 nt, Artificial Sequence
  Description of Artificial Sequence: Synthetic oligonucleotide
ccauuacauggcagaagag

SEQ ID NO: 2287425 - RNA, 19 nt, Artificial Sequence
  Description of Artificial Sequence: Synthetic oligonucleotide
cauggucccgcgaaggccu

SEQ ID NO: 2287426 - RNA, 19 nt, Artificial Sequence
  Description of Artificial Sequence: Synthetic oligonucleotide
cacccucaacacugaggcc

SEQ ID NO: 2287427 - RNA, 19 nt, Artificial Sequence
  Description of Artificial Sequence: Synthetic oligonucleotide
cccauuauccccucugaga

SEQ ID NO: 2287428 - RNA, 19 nt, Artificial Sequence
  Description of Artificial Sequence: Synthetic oligonucleotide
agguggacacagaaccugu

SEQ ID NO: 2287429 - RNA, 19 nt, Artificial Sequence
  Description of Artificial Sequence: Synthetic oligonucleotide
gcggggaggcaucuggaag

SEQ ID NO: 2287430 - RNA, 19 nt, Artificial Sequence
  Description of Artificial Sequence: Synthetic oligonucleotide
auccuccauuacauggcag

SEQ ID NO: 2287431 - RNA, 19 nt, Artificial Sequence
  Description of Artificial Sequence: Synthetic oligonucleotide
cauuucuggggugaggggu

SEQ ID NO: 2287432 - RNA, 19 nt, Artificial Sequence
  Description of Artificial Sequence: Synthetic oligonucleotide
  modified_base (6)..(6): a, c, u, g, unknown or other
ccagcnguuugcaaccuca

SEQ ID NO: 2287433 - RNA, 19 nt, Artificial Sequence
  Description of Artificial Sequence: Synthetic oligonucleotide
uugcaaccucacagcacau

SEQ ID NO: 2287434 - RNA, 19 nt, Artificial Sequence
  Description of Artificial Sequence: Synthetic oligonucleotide
cuggaguacgagcucgaaa

SEQ ID NO: 2287435 - RNA, 19 nt, Artificial Sequence
  Description of Artificial Sequence: Synthetic oligonucleotide
gaagggagggcaaccauuu

SEQ ID NO: 2287436 - RNA, 19 nt, Artificial Sequence
  Description of Artificial Sequence: Synthetic oligonucleotide
guggaggugagagguggac

SEQ ID NO: 2287437 - RNA, 19 nt, Artificial Sequence
  Description of Artificial Sequence: Synthetic oligonucleotide
cagauccccggugggaaac

SEQ ID NO: 2287438 - RNA, 19 nt, Artificial Sequence
  Description of Artificial Sequence: Synthetic oligonucleotide
gaagggacacggagacaac

SEQ ID NO: 2287439 - RNA, 19 nt, Artificial Sequence
  Description of Artificial Sequence: Synthetic oligonucleotide
ggcaauagguauggcuggc

SEQ ID NO: 2287440 - RNA, 19 nt, Artificial Sequence
  Description of Artificial Sequence: Synthetic oligonucleotide
ggcugaacggccugucuuc

SEQ ID NO: 2287441 - RNA, 19 nt, Artificial Sequence
  Description of Artificial Sequence: Synthetic oligonucleotide
gacgugagcuggugaucca

SEQ ID NO: 2287442 - RNA, 19 nt, Artificial Sequence
  Description of Artificial Sequence: Synthetic oligonucleotide
guacagauccccgguggga

SEQ ID NO: 2287443 - RNA, 19 nt, Artificial Sequence
  Description of Artificial Sequence: Synthetic oligonucleotide
ggaguacgagcucgaaaga

SEQ ID NO: 2287444 - RNA, 19 nt, Artificial Sequence
  Description of Artificial Sequence: Synthetic oligonucleotide
agaagcagacgaggcaaua

SEQ ID NO: 2287445 - RNA, 19 nt, Artificial Sequence
  Description of Artificial Sequence: Synthetic oligonucleotide
guauggcuggcuggugccc

SEQ ID NO: 2287446 - RNA, 19 nt, Artificial Sequence
  Description of Artificial Sequence: Synthetic oligonucleotide
agcucgaaagagagagaga

SEQ ID NO: 2287447 - RNA, 19 nt, Artificial Sequence
  Description of Artificial Sequence: Synthetic oligonucleotide
agugcgguguggcgcuggu

SEQ ID NO: 2287448 - RNA, 19 nt, Artificial Sequence
  Description of Artificial Sequence: Synthetic oligonucleotide
guguugaaccagggagcag

SEQ ID NO: 2287449 - RNA, 19 nt, Artificial Sequence
  Description of Artificial Sequence: Synthetic oligonucleotide
gacacggagacaacuuaau

SEQ ID NO: 2287450 - RNA, 19 nt, Artificial Sequence
  Description of Artificial Sequence: Synthetic oligonucleotide
ugcaggcgggugcgggcug

SEQ ID NO: 2287451 - RNA, 19 nt, Artificial Sequence
  Description of Artificial Sequence: Synthetic oligonucleotide
cucuguacagauccccggu

SEQ ID NO: 2287452 - RNA, 19 nt, Artificial Sequence
  Description of Artificial Sequence: Synthetic oligonucleotide
agggacacggagacaacuu

SEQ ID NO: 2287453 - RNA, 19 nt, Artificial Sequence
  Description of Artificial Sequence: Synthetic oligonucleotide
caaccauuuuaccuguguu

SEQ ID NO: 2287454 - RNA, 19 nt, Artificial Sequence
  Description of Artificial Sequence: Synthetic oligonucleotide
cacugaggccccaauggcu

SEQ ID NO: 2287455 - RNA, 19 nt, Artificial Sequence
  Description of Artificial Sequence: Synthetic oligonucleotide
cagcacgcagggucaggug

SEQ ID NO: 2287456 - RNA, 19 nt, Artificial Sequence
  Description of Artificial Sequence: Synthetic oligonucleotide
gcaaccauuuuaccugugu

SEQ ID NO: 2287457 - RNA, 19 nt, Artificial Sequence
  Description of Artificial Sequence: Synthetic oligonucleotide
acuccccauuauccccucu

SEQ ID NO: 2287458 - RNA, 19 nt, Artificial Sequence
  Description of Artificial Sequence: Synthetic oligonucleotide
cggccugucuucuuucugc

SEQ ID NO: 2287459 - RNA, 19 nt, Artificial Sequence
  Description of Artificial Sequence: Synthetic oligonucleotide
uacuccccauuauccccuc

SEQ ID NO: 2287460 - RNA, 19 nt, Artificial Sequence
  Description of Artificial Sequence: Synthetic oligonucleotide
ccucagugcgguguggcgc

SEQ ID NO: 2287461 - RNA, 19 nt, Artificial Sequence
  Description of Artificial Sequence: Synthetic oligonucleotide
acgugagcuggugauccau

SEQ ID NO: 2287462 - RNA, 19 nt, Artificial Sequence
  Description of Artificial Sequence: Synthetic oligonucleotide
cccucaacacugaggcccc

SEQ ID NO: 2287463 - RNA, 19 nt, Artificial Sequence
  Description of Artificial Sequence: Synthetic oligonucleotide
gaggccccaauggcugggc

SEQ ID NO: 2287464 - RNA, 19 nt, Artificial Sequence
  Description of Artificial Sequence: Synthetic oligonucleotide
cuggcucuuccuggagccc

SEQ ID NO: 2287465 - RNA, 19 nt, Artificial Sequence
  Description of Artificial Sequence: Synthetic oligonucleotide
gggcaacaagagucuauga

SEQ ID NO: 2287466 - RNA, 19 nt, Artificial Sequence
  Description of Artificial Sequence: Synthetic oligonucleotide
ggucccgcgaaggccuugg

SEQ ID NO: 2287467 - RNA, 19 nt, Artificial Sequence
  Description of Artificial Sequence: Synthetic oligonucleotide
gggacacggagacaacuua

SEQ ID NO: 2287468 - RNA, 19 nt, Artificial Sequence
  Description of Artificial Sequence: Synthetic oligonucleotide
aggccccaauggcugggca

SEQ ID NO: 2287469 - RNA, 19 nt, Artificial Sequence
  Description of Artificial Sequence: Synthetic oligonucleotide
gcuggcauuucugggguga

SEQ ID NO: 2287470 - RNA, 19 nt, Artificial Sequence
  Description of Artificial Sequence: Synthetic oligonucleotide
cacagucuuuaagcagcuc

SEQ ID NO: 2287471 - RNA, 19 nt, Artificial Sequence
  Description of Artificial Sequence: Synthetic oligonucleotide
caaccucacagcacauccu

SEQ ID NO: 2287472 - RNA, 19 nt, Artificial Sequence
  Description of Artificial Sequence: Synthetic oligonucleotide
cucagugcgguguggcgcu

SEQ ID NO: 2287473 - RNA, 19 nt, Artificial Sequence
  Description of Artificial Sequence: Synthetic oligonucleotide
gguaggaugcuggcucuuc

SEQ ID NO: 2287474 - RNA, 19 nt, Artificial Sequence
  Description of Artificial Sequence: Synthetic oligonucleotide
cagugcgguguggcgcugg

SEQ ID NO: 2287475 - RNA, 19 nt, Artificial Sequence
  Description of Artificial Sequence: Synthetic oligonucleotide
ggagaacgaggggagggga

SEQ ID NO: 2287476 - RNA, 19 nt, Artificial Sequence
  Description of Artificial Sequence: Synthetic oligonucleotide
ccgcccuccuccacuauac

SEQ ID NO: 2287477 - RNA, 19 nt, Artificial Sequence
  Description of Artificial Sequence: Synthetic oligonucleotide
ggcagcccggccggcaugg

SEQ ID NO: 2287478 - RNA, 19 nt, Artificial Sequence
  Description of Artificial Sequence: Synthetic oligonucleotide
gcagacgaggcaauaggua

SEQ ID NO: 2287479 - RNA, 19 nt, Artificial Sequence
  Description of Artificial Sequence: Synthetic oligonucleotide
gugcgggcugaacggccug

SEQ ID NO: 2287480 - RNA, 19 nt, Artificial Sequence
  Description of Artificial Sequence: Synthetic oligonucleotide
aggcagcccggccggcaug

SEQ ID NO: 2287481 - RNA, 19 nt, Artificial Sequence
  Description of Artificial Sequence: Synthetic oligonucleotide
gguguggcgcuggucuggc

SEQ ID NO: 2287482 - RNA, 19 nt, Artificial Sequence
  Description of Artificial Sequence: Synthetic oligonucleotide
ggugauccaugaaggcaga

SEQ ID NO: 2287483 - RNA, 19 nt, Artificial Sequence
  Description of Artificial Sequence: Synthetic oligonucleotide
gcgcuggucuggcugugug

SEQ ID NO: 2287484 - RNA, 19 nt, Artificial Sequence
  Description of Artificial Sequence: Synthetic oligonucleotide
cccgcgaaggccuuggagu

SEQ ID NO: 2287485 - RNA, 19 nt, Artificial Sequence
  Description of Artificial Sequence: Synthetic oligonucleotide
guggcgcuggucuggcugu

SEQ ID NO: 2287486 - RNA, 19 nt, Artificial Sequence
  Description of Artificial Sequence: Synthetic oligonucleotide
gccggcauggucccgcgaa

SEQ ID NO: 2287487 - RNA, 19 nt, Artificial Sequence
  Description of Artificial Sequence: Synthetic oligonucleotide
cucaacacugaggccccaa

SEQ ID NO: 2287488 - RNA, 19 nt, Artificial Sequence
  Description of Artificial Sequence: Synthetic oligonucleotide
cgaggcaauagguauggcu

SEQ ID NO: 2287489 - RNA, 19 nt, Artificial Sequence
  Description of Artificial Sequence: Synthetic oligonucleotide
cgcuggucuggcugugugg

SEQ ID NO: 2287490 - RNA, 19 nt, Artificial Sequence
  Description of Artificial Sequence: Synthetic oligonucleotide
aggcgggugcgggcugaac

SEQ ID NO: 2287491 - RNA, 19 nt, Artificial Sequence
  Description of Artificial Sequence: Synthetic oligonucleotide
uggucccgcgaaggccuug

SEQ ID NO: 2287492 - RNA, 19 nt, Artificial Sequence
  Description of Artificial Sequence: Synthetic oligonucleotide
gggcaaccauuuuaccugu

SEQ ID NO: 2287493 - RNA, 19 nt, Artificial Sequence
  Description of Artificial Sequence: Synthetic oligonucleotide
ggcaaccauuuuaccugug

SEQ ID NO: 2287494 - RNA, 19 nt, Artificial Sequence
  Description of Artificial Sequence: Synthetic oligonucleotide
cagcccggccggcaugguc

SEQ ID NO: 2287495 - RNA, 19 nt, Artificial Sequence
  Description of Artificial Sequence: Synthetic oligonucleotide
aggcggggaggcaucugga

SEQ ID NO: 2287496 - RNA, 19 nt, Artificial Sequence
  Description of Artificial Sequence: Synthetic oligonucleotide
ccauuuuaccuguguugaa

SEQ ID NO: 2287497 - RNA, 19 nt, Artificial Sequence
  Description of Artificial Sequence: Synthetic oligonucleotide
gguggggcacagucuuuaa

SEQ ID NO: 2287498 - RNA, 19 nt, Artificial Sequence
  Description of Artificial Sequence: Synthetic oligonucleotide
cucacagcacauccuccau

SEQ ID NO: 2287499 - RNA, 19 nt, Artificial Sequence
  Description of Artificial Sequence: Synthetic oligonucleotide
gggugcgggcugaacggcc

SEQ ID NO: 2287500 - RNA, 19 nt, Artificial Sequence
  Description of Artificial Sequence: Synthetic oligonucleotide
ggcggggaggcaucuggaa

SEQ ID NO: 2287501 - RNA, 19 nt, Artificial Sequence
  Description of Artificial Sequence: Synthetic oligonucleotide
ggcgcuggcuggcauuucu

SEQ ID NO: 2287502 - RNA, 19 nt, Artificial Sequence
  Description of Artificial Sequence: Synthetic oligonucleotide
cuccacuauacuccccauu

SEQ ID NO: 2287503 - RNA, 19 nt, Artificial Sequence
  Description of Artificial Sequence: Synthetic oligonucleotide
ccggcauggucccgcgaag

SEQ ID NO: 2287504 - RNA, 19 nt, Artificial Sequence
  Description of Artificial Sequence: Synthetic oligonucleotide
gggguaggaugcuggcucu

SEQ ID NO: 2287505 - RNA, 19 nt, Artificial Sequence
  Description of Artificial Sequence: Synthetic oligonucleotide
ccuccauuacauggcagaa

SEQ ID NO: 2287506 - RNA, 19 nt, Artificial Sequence
  Description of Artificial Sequence: Synthetic oligonucleotide
gggcugaacggccugucuu

SEQ ID NO: 2287507 - RNA, 19 nt, Artificial Sequence
  Description of Artificial Sequence: Synthetic oligonucleotide
ggcugggcaacaagagucu

SEQ ID NO: 2287508 - RNA, 19 nt, Artificial Sequence
  Description of Artificial Sequence: Synthetic oligonucleotide
ggggaggcaucuggaagaa

SEQ ID NO: 2287509 - RNA, 19 nt, Artificial Sequence
  Description of Artificial Sequence: Synthetic oligonucleotide
cggcauggucccgcgaagg

SEQ ID NO: 2287510 - RNA, 19 nt, Artificial Sequence
  Description of Artificial Sequence: Synthetic oligonucleotide
gucccgcgaaggccuugga

SEQ ID NO: 2287511 - RNA, 19 nt, Artificial Sequence
  Description of Artificial Sequence: Synthetic oligonucleotide
  modified_base (8)..(8): a, c, u, g, unknown or other
guccagcnguuugcaaccu

SEQ ID NO: 2287512 - RNA, 19 nt, Artificial Sequence
  Description of Artificial Sequence: Synthetic oligonucleotide
gcuggaguacgagcucgaa

SEQ ID NO: 2287513 - RNA, 19 nt, Artificial Sequence
  Description of Artificial Sequence: Synthetic oligonucleotide
uggcgcuggcuggcauuuc

SEQ ID NO: 2287514 - RNA, 19 nt, Artificial Sequence
  Description of Artificial Sequence: Synthetic oligonucleotide
cgagcucgaaagagagaga

SEQ ID NO: 2287515 - RNA, 19 nt, Artificial Sequence
  Description of Artificial Sequence: Synthetic oligonucleotide
ccggccggcauggucccgc

SEQ ID NO: 2287516 - RNA, 19 nt, Artificial Sequence
  Description of Artificial Sequence: Synthetic oligonucleotide
gcugaacggccugucuucu

SEQ ID NO: 2287517 - RNA, 19 nt, Artificial Sequence
  Description of Artificial Sequence: Synthetic oligonucleotide
gugcgguguggcgcugguc

SEQ ID NO: 2287518 - RNA, 19 nt, Artificial Sequence
  Description of Artificial Sequence: Synthetic oligonucleotide
ggugcgggcugaacggccu

SEQ ID NO: 2287519 - RNA, 19 nt, Artificial Sequence
  Description of Artificial Sequence: Synthetic oligonucleotide
cugaacggccugucuucuu

SEQ ID NO: 2287520 - RNA, 19 nt, Artificial Sequence
  Description of Artificial Sequence: Synthetic oligonucleotide
guggcgcuggcuggcauuu

SEQ ID NO: 2287521 - RNA, 19 nt, Artificial Sequence
  Description of Artificial Sequence: Synthetic oligonucleotide
cugcaggcgggugcgggcu

SEQ ID NO: 2287522 - RNA, 19 nt, Artificial Sequence
  Description of Artificial Sequence: Synthetic oligonucleotide
ccacuauacuccccauuau

SEQ ID NO: 2287523 - RNA, 19 nt, Artificial Sequence
  Description of Artificial Sequence: Synthetic oligonucleotide
auggucccgcgaaggccuu

SEQ ID NO: 2287524 - RNA, 19 nt, Artificial Sequence
  Description of Artificial Sequence: Synthetic oligonucleotide
cgggugcgggcugaacggc

SEQ ID NO: 2287525 - RNA, 19 nt, Artificial Sequence
  Description of Artificial Sequence: Synthetic oligonucleotide
ccagcacgcagggucaggu

SEQ ID NO: 2287526 - RNA, 19 nt, Artificial Sequence
  Description of Artificial Sequence: Synthetic oligonucleotide
guguggcgcuggucuggcu

SEQ ID NO: 2287527 - RNA, 19 nt, Artificial Sequence
  Description of Artificial Sequence: Synthetic oligonucleotide
cggccggcauggucccgcg

SEQ ID NO: 2287528 - RNA, 19 nt, Artificial Sequence
  Description of Artificial Sequence: Synthetic oligonucleotide
ggccggcauggucccgcga

SEQ ID NO: 2287529 - RNA, 19 nt, Artificial Sequence
  Description of Artificial Sequence: Synthetic oligonucleotide
cccgcccuccuccacuaua

SEQ ID NO: 2287530 - RNA, 19 nt, Artificial Sequence
  Description of Artificial Sequence: Synthetic oligonucleotide
ccccaauggcugggcaaca

SEQ ID NO: 2287531 - RNA, 19 nt, Artificial Sequence
  Description of Artificial Sequence: Synthetic oligonucleotide
ccuccacuauacuccccau

SEQ ID NO: 2287532 - RNA, 19 nt, Artificial Sequence
  Description of Artificial Sequence: Synthetic oligonucleotide
  modified_base (15)..(15): a, c, u, g, unknown or other
ccugacaguccagcnguuu

SEQ ID NO: 2287533 - RNA, 19 nt, Artificial Sequence
  Description of Artificial Sequence: Synthetic oligonucleotide
  modified_base (16)..(16): a, c, u, g, unknown or other
gccugacaguccagcnguu

SEQ ID NO: 2287534 - RNA, 19 nt, Artificial Sequence
  Description of Artificial Sequence: Synthetic oligonucleotide
ccucaacacugaggcccca

SEQ ID NO: 2287535 - RNA, 19 nt, Artificial Sequence
  Description of Artificial Sequence: Synthetic oligonucleotide
ggguaggaugcuggcucuu

SEQ ID NO: 2287536 - RNA, 19 nt, Artificial Sequence
  Description of Artificial Sequence: Synthetic oligonucleotide
gcagcccggccggcauggu

SEQ ID NO: 2287537 - RNA, 19 nt, Artificial Sequence
  Description of Artificial Sequence: Synthetic oligonucleotide
ccccgcccuccuccacuau

SEQ ID NO: 2287538 - RNA, 19 nt, Artificial Sequence
  Description of Artificial Sequence: Synthetic oligonucleotide
  modified_base (1)..(1): a, c, u, g, unknown or other
nguuugcaaccucacagca

SEQ ID NO: 2287539 - RNA, 19 nt, Artificial Sequence
  Description of Artificial Sequence: Synthetic oligonucleotide
aacauaaauaaccaauggg

SEQ ID NO: 2287540 - RNA, 19 nt, Artificial Sequence
  Description of Artificial Sequence: Synthetic oligonucleotide
uuaagaguggaccaggugg

SEQ ID NO: 2287541 - RNA, 19 nt, Artificial Sequence
  Description of Artificial Sequence: Synthetic oligonucleotide
acauaaauaaccaaugggc

SEQ ID NO: 2287542 - RNA, 19 nt, Artificial Sequence
  Description of Artificial Sequence: Synthetic oligonucleotide
ugaugugucauuaacaugu

SEQ ID NO: 2287543 - RNA, 19 nt, Artificial Sequence
  Description of Artificial Sequence: Synthetic oligonucleotide
cuuguuuaauccaagacag

SEQ ID NO: 2287544 - RNA, 19 nt, Artificial Sequence
  Description of Artificial Sequence: Synthetic oligonucleotide
aguauagacucccaaauuc

SEQ ID NO: 2287545 - RNA, 19 nt, Artificial Sequence
  Description of Artificial Sequence: Synthetic oligonucleotide
ucuuguuuaauccaagaca

SEQ ID NO: 2287546 - RNA, 19 nt, Artificial Sequence
  Description of Artificial Sequence: Synthetic oligonucleotide
agugcuaacaccuaggcca

SEQ ID NO: 2287547 - RNA, 19 nt, Artificial Sequence
  Description of Artificial Sequence: Synthetic oligonucleotide
acugacuagauucuagacc

SEQ ID NO: 2287548 - RNA, 19 nt, Artificial Sequence
  Description of Artificial Sequence: Synthetic oligonucleotide
aaaacguauccuuggcugc

SEQ ID NO: 2287549 - RNA, 19 nt, Artificial Sequence
  Description of Artificial Sequence: Synthetic oligonucleotide
ugaacauaaauaaccaaug

SEQ ID NO: 2287550 - RNA, 19 nt, Artificial Sequence
  Description of Artificial Sequence: Synthetic oligonucleotide
cagauaauaauuacugugg

SEQ ID NO: 2287551 - RNA, 19 nt, Artificial Sequence
  Description of Artificial Sequence: Synthetic oligonucleotide
uccuuuauguaccagauaa

SEQ ID NO: 2287552 - RNA, 19 nt, Artificial Sequence
  Description of Artificial Sequence: Synthetic oligonucleotide
cauaaauaaccaaugggcc

SEQ ID NO: 2287553 - RNA, 19 nt, Artificial Sequence
  Description of Artificial Sequence: Synthetic oligonucleotide
aacuucaggacacaaggag

SEQ ID NO: 2287554 - RNA, 19 nt, Artificial Sequence
  Description of Artificial Sequence: Synthetic oligonucleotide
uaccagauaauaauuacug

SEQ ID NO: 2287555 - RNA, 19 nt, Artificial Sequence
  Description of Artificial Sequence: Synthetic oligonucleotide
ucuaguugaguauagacuc

SEQ ID NO: 2287556 - RNA, 19 nt, Artificial Sequence
  Description of Artificial Sequence: Synthetic oligonucleotide
agauucuagaccuucagug

SEQ ID NO: 2287557 - RNA, 19 nt, Artificial Sequence
  Description of Artificial Sequence: Synthetic oligonucleotide
ucugaaaacguauccuugg

SEQ ID NO: 2287558 - RNA, 19 nt, Artificial Sequence
  Description of Artificial Sequence: Synthetic oligonucleotide
uauucuuguacuguugugg

SEQ ID NO: 2287559 - RNA, 19 nt, Artificial Sequence
  Description of Artificial Sequence: Synthetic oligonucleotide
agauaauaauuacuguggg

SEQ ID NO: 2287560 - RNA, 19 nt, Artificial Sequence
  Description of Artificial Sequence: Synthetic oligonucleotide
gaaaacguauccuuggcug

SEQ ID NO: 2287561 - RNA, 19 nt, Artificial Sequence
  Description of Artificial Sequence: Synthetic oligonucleotide
uaaccaaugggccacaggu

SEQ ID NO: 2287562 - RNA, 19 nt, Artificial Sequence
  Description of Artificial Sequence: Synthetic oligonucleotide
ucuagcaaggucuucagcu

SEQ ID NO: 2287563 - RNA, 19 nt, Artificial Sequence
  Description of Artificial Sequence: Synthetic oligonucleotide
gaugacaaguucuucauca

SEQ ID NO: 2287564 - RNA, 19 nt, Artificial Sequence
  Description of Artificial Sequence: Synthetic oligonucleotide
acauugaugugucauuaac

SEQ ID NO: 2287565 - RNA, 19 nt, Artificial Sequence
  Description of Artificial Sequence: Synthetic oligonucleotide
uguggaaggaucccuauca

SEQ ID NO: 2287566 - RNA, 19 nt, Artificial Sequence
  Description of Artificial Sequence: Synthetic oligonucleotide
uaggcuuucuccuugaccu

SEQ ID NO: 2287567 - RNA, 19 nt, Artificial Sequence
  Description of Artificial Sequence: Synthetic oligonucleotide
uguuuaauccaagacagga

SEQ ID NO: 2287568 - RNA, 19 nt, Artificial Sequence
  Description of Artificial Sequence: Synthetic oligonucleotide
agaacaucugcucuccaac

SEQ ID NO: 2287569 - RNA, 19 nt, Artificial Sequence
  Description of Artificial Sequence: Synthetic oligonucleotide
auuaacaugucuugguuga

SEQ ID NO: 2287570 - RNA, 19 nt, Artificial Sequence
  Description of Artificial Sequence: Synthetic oligonucleotide
  modified_base (2)..(2): a, c, u, g, unknown or other
gnguaaaagucacuugucc

SEQ ID NO: 2287571 - RNA, 19 nt, Artificial Sequence
  Description of Artificial Sequence: Synthetic oligonucleotide
uacaucugaaaacguaucc

SEQ ID NO: 2287572 - RNA, 19 nt, Artificial Sequence
  Description of Artificial Sequence: Synthetic oligonucleotide
gaaagcuacaucugaaaac

SEQ ID NO: 2287573 - RNA, 19 nt, Artificial Sequence
  Description of Artificial Sequence: Synthetic oligonucleotide
auaaauaaccaaugggcca

SEQ ID NO: 2287574 - RNA, 19 nt, Artificial Sequence
  Description of Artificial Sequence: Synthetic oligonucleotide
aaggaucccuaucaccggc

SEQ ID NO: 2287575 - RNA, 19 nt, Artificial Sequence
  Description of Artificial Sequence: Synthetic oligonucleotide
agcauaggagccuuuguac

SEQ ID NO: 2287576 - RNA, 19 nt, Artificial Sequence
  Description of Artificial Sequence: Synthetic oligonucleotide
  modified_base (8)..(8): a, c, u, g, unknown or other
cuaacugnguaaaagucac

SEQ ID NO: 2287577 - RNA, 19 nt, Artificial Sequence
  Description of Artificial Sequence: Synthetic oligonucleotide
agcauggcuacauugaugu

SEQ ID NO: 2287578 - RNA, 19 nt, Artificial Sequence
  Description of Artificial Sequence: Synthetic oligonucleotide
  modified_base (10)..(10): a, c, u, g, unknown or other
uccuaacugnguaaaaguc

SEQ ID NO: 2287579 - RNA, 19 nt, Artificial Sequence
  Description of Artificial Sequence: Synthetic oligonucleotide
ucucuuuggacuccugggg

SEQ ID NO: 2287580 - RNA, 19 nt, Artificial Sequence
  Description of Artificial Sequence: Synthetic oligonucleotide
auuacuguggguuguggag

SEQ ID NO: 2287581 - RNA, 19 nt, Artificial Sequence
  Description of Artificial Sequence: Synthetic oligonucleotide
auaauaauuacuguggguu

SEQ ID NO: 2287582 - RNA, 19 nt, Artificial Sequence
  Description of Artificial Sequence: Synthetic oligonucleotide
gauucuagaccuucagugc

SEQ ID NO: 2287583 - RNA, 19 nt, Artificial Sequence
  Description of Artificial Sequence: Synthetic oligonucleotide
uguaccagauaauaauuac

SEQ ID NO: 2287584 - RNA, 19 nt, Artificial Sequence
  Description of Artificial Sequence: Synthetic oligonucleotide
ugugucauuaacaugucuu

SEQ ID NO: 2287585 - RNA, 19 nt, Artificial Sequence
  Description of Artificial Sequence: Synthetic oligonucleotide
agaccuucagugcuaacac

SEQ ID NO: 2287586 - RNA, 19 nt, Artificial Sequence
  Description of Artificial Sequence: Synthetic oligonucleotide
ugaguauagacucccaaau

SEQ ID NO: 2287587 - RNA, 19 nt, Artificial Sequence
  Description of Artificial Sequence: Synthetic oligonucleotide
ugaggcuucaggcaaguca

SEQ ID NO: 2287588 - RNA, 19 nt, Artificial Sequence
  Description of Artificial Sequence: Synthetic oligonucleotide
uaauaauuacuguggguug

SEQ ID NO: 2287589 - RNA, 19 nt, Artificial Sequence
  Description of Artificial Sequence: Synthetic oligonucleotide
acugcuggcuuuugaaagc

SEQ ID NO: 2287590 - RNA, 19 nt, Artificial Sequence
  Description of Artificial Sequence: Synthetic oligonucleotide
ugaaagcuacaucugaaaa

SEQ ID NO: 2287591 - RNA, 19 nt, Artificial Sequence
  Description of Artificial Sequence: Synthetic oligonucleotide
uuaagggguguucagcagc

SEQ ID NO: 2287592 - RNA, 19 nt, Artificial Sequence
  Description of Artificial Sequence: Synthetic oligonucleotide
uccaagacaggauaucuga

SEQ ID NO: 2287593 - RNA, 19 nt, Artificial Sequence
  Description of Artificial Sequence: Synthetic oligonucleotide
ucucuaguugaguauagac

SEQ ID NO: 2287594 - RNA, 19 nt, Artificial Sequence
  Description of Artificial Sequence: Synthetic oligonucleotide
ugagacucuugccacaaug

SEQ ID NO: 2287595 - RNA, 19 nt, Artificial Sequence
  Description of Artificial Sequence: Synthetic oligonucleotide
caaagcacaagcaugucuc

SEQ ID NO: 2287596 - RNA, 19 nt, Artificial Sequence
  Description of Artificial Sequence: Synthetic oligonucleotide
aaguggguagcuuccuaac

SEQ ID NO: 2287597 - RNA, 19 nt, Artificial Sequence
  Description of Artificial Sequence: Synthetic oligonucleotide
uuccaaagcacaagcaugu

SEQ ID NO: 2287598 - RNA, 19 nt, Artificial Sequence
  Description of Artificial Sequence: Synthetic oligonucleotide
aauaauuacuguggguugu

SEQ ID NO: 2287599 - RNA, 19 nt, Artificial Sequence
  Description of Artificial Sequence: Synthetic oligonucleotide
uaaauaaccaaugggccac

SEQ ID NO: 2287600 - RNA, 19 nt, Artificial Sequence
  Description of Artificial Sequence: Synthetic oligonucleotide
  modified_base (11)..(11): a, c, u, g, unknown or other
uuccuaacugnguaaaagu

SEQ ID NO: 2287601 - RNA, 19 nt, Artificial Sequence
  Description of Artificial Sequence: Synthetic oligonucleotide
acaaugguggcaugagaac

SEQ ID NO: 2287602 - RNA, 19 nt, Artificial Sequence
  Description of Artificial Sequence: Synthetic oligonucleotide
caugggugcacacugcugg

SEQ ID NO: 2287603 - RNA, 19 nt, Artificial Sequence
  Description of Artificial Sequence: Synthetic oligonucleotide
uauguaccagauaauaauu

SEQ ID NO: 2287604 - RNA, 19 nt, Artificial Sequence
  Description of Artificial Sequence: Synthetic oligonucleotide
agcucauucucuuuggacu

SEQ ID NO: 2287605 - RNA, 19 nt, Artificial Sequence
  Description of Artificial Sequence: Synthetic oligonucleotide
uccaaaaggugucaugggu

SEQ ID NO: 2287606 - RNA, 19 nt, Artificial Sequence
  Description of Artificial Sequence: Synthetic oligonucleotide
uauagacucccaaauuccu

SEQ ID NO: 2287607 - RNA, 19 nt, Artificial Sequence
  Description of Artificial Sequence: Synthetic oligonucleotide
cuuccaaagcacaagcaug

SEQ ID NO: 2287608 - RNA, 19 nt, Artificial Sequence
  Description of Artificial Sequence: Synthetic oligonucleotide
ugaaaacguauccuuggcu

SEQ ID NO: 2287609 - RNA, 19 nt, Artificial Sequence
  Description of Artificial Sequence: Synthetic oligonucleotide
uuguuuaauccaagacagg

SEQ ID NO: 2287610 - RNA, 19 nt, Artificial Sequence
  Description of Artificial Sequence: Synthetic oligonucleotide
ggaaaggcagguuaagggg

SEQ ID NO: 2287611 - RNA, 19 nt, Artificial Sequence
  Description of Artificial Sequence: Synthetic oligonucleotide
uguacuguuguggacuucc

SEQ ID NO: 2287612 - RNA, 19 nt, Artificial Sequence
  Description of Artificial Sequence: Synthetic oligonucleotide
cauuaacaugucuugguug

SEQ ID NO: 2287613 - RNA, 19 nt, Artificial Sequence
  Description of Artificial Sequence: Synthetic oligonucleotide
gcugugaacauaaauaacc

SEQ ID NO: 2287614 - RNA, 19 nt, Artificial Sequence
  Description of Artificial Sequence: Synthetic oligonucleotide
ugaccuucugcucugcugu

SEQ ID NO: 2287615 - RNA, 19 nt, Artificial Sequence
  Description of Artificial Sequence: Synthetic oligonucleotide
  modified_base (3)..(3): a, c, u, g, unknown or other
ugnguaaaagucacuuguc

SEQ ID NO: 2287616 - RNA, 19 nt, Artificial Sequence
  Description of Artificial Sequence: Synthetic oligonucleotide
agucacuuguccuucugag

SEQ ID NO: 2287617 - RNA, 19 nt, Artificial Sequence
  Description of Artificial Sequence: Synthetic oligonucleotide
uggaacuucaggacacaag

SEQ ID NO: 2287618 - RNA, 19 nt, Artificial Sequence
  Description of Artificial Sequence: Synthetic oligonucleotide
uguuguggacuuccaaagc

SEQ ID NO: 2287619 - RNA, 19 nt, Artificial Sequence
  Description of Artificial Sequence: Synthetic oligonucleotide
auucuagaccuucagugcu

SEQ ID NO: 2287620 - RNA, 19 nt, Artificial Sequence
  Description of Artificial Sequence: Synthetic oligonucleotide
ccagauaauaauuacugug

SEQ ID NO: 2287621 - RNA, 19 nt, Artificial Sequence
  Description of Artificial Sequence: Synthetic oligonucleotide
uuuccagggccguuaagag

SEQ ID NO: 2287622 - RNA, 19 nt, Artificial Sequence
  Description of Artificial Sequence: Synthetic oligonucleotide
agcacaagcaugucucuag

SEQ ID NO: 2287623 - RNA, 19 nt, Artificial Sequence
  Description of Artificial Sequence: Synthetic oligonucleotide
  modified_base (6)..(6): a, c, u, g, unknown or other
aacugnguaaaagucacuu

SEQ ID NO: 2287624 - RNA, 19 nt, Artificial Sequence
  Description of Artificial Sequence: Synthetic oligonucleotide
ugugaacauaaauaaccaa

SEQ ID NO: 2287625 - RNA, 19 nt, Artificial Sequence
  Description of Artificial Sequence: Synthetic oligonucleotide
  modified_base (5)..(5): a, c, u, g, unknown or other
acugnguaaaagucacuug

SEQ ID NO: 2287626 - RNA, 19 nt, Artificial Sequence
  Description of Artificial Sequence: Synthetic oligonucleotide
  modified_base (12)..(12): a, c, u, g, unknown or other
cuuccuaacugnguaaaag

SEQ ID NO: 2287627 - RNA, 19 nt, Artificial Sequence
  Description of Artificial Sequence: Synthetic oligonucleotide
cuguuguggacuuccaaag

SEQ ID NO: 2287628 - RNA, 19 nt, Artificial Sequence
  Description of Artificial Sequence: Synthetic oligonucleotide
cucuuguuuaauccaagac

SEQ ID NO: 2287629 - RNA, 19 nt, Artificial Sequence
  Description of Artificial Sequence: Synthetic oligonucleotide
ccaaauuccuuuauguacc

SEQ ID NO: 2287630 - RNA, 19 nt, Artificial Sequence
  Description of Artificial Sequence: Synthetic oligonucleotide
uguagcggaagcuccuucc

SEQ ID NO: 2287631 - RNA, 19 nt, Artificial Sequence
  Description of Artificial Sequence: Synthetic oligonucleotide
auucuuguacuguugugga

SEQ ID NO: 2287632 - RNA, 19 nt, Artificial Sequence
  Description of Artificial Sequence: Synthetic oligonucleotide
uagauucuagaccuucagu

SEQ ID NO: 2287633 - RNA, 19 nt, Artificial Sequence
  Description of Artificial Sequence: Synthetic oligonucleotide
accaaugggccacaggucu

SEQ ID NO: 2287634 - RNA, 19 nt, Artificial Sequence
  Description of Artificial Sequence: Synthetic oligonucleotide
ugcucugcugugaacauaa

SEQ ID NO: 2287635 - RNA, 19 nt, Artificial Sequence
  Description of Artificial Sequence: Synthetic oligonucleotide
augagaacaucugcucucc

SEQ ID NO: 2287636 - RNA, 19 nt, Artificial Sequence
  Description of Artificial Sequence: Synthetic oligonucleotide
uugaaagcuacaucugaaa

SEQ ID NO: 2287637 - RNA, 19 nt, Artificial Sequence
  Description of Artificial Sequence: Synthetic oligonucleotide
uggcaugagaacaucugcu

SEQ ID NO: 2287638 - RNA, 19 nt, Artificial Sequence
  Description of Artificial Sequence: Synthetic oligonucleotide
cuugguugagacucuugcc

SEQ ID NO: 2287639 - RNA, 19 nt, Artificial Sequence
  Description of Artificial Sequence: Synthetic oligonucleotide
guauagacucccaaauucc

SEQ ID NO: 2287640 - RNA, 19 nt, Artificial Sequence
  Description of Artificial Sequence: Synthetic oligonucleotide
gaaggaucccuaucaccgg

SEQ ID NO: 2287641 - RNA, 19 nt, Artificial Sequence
  Description of Artificial Sequence: Synthetic oligonucleotide
uuccccauaccacugacua

SEQ ID NO: 2287642 - RNA, 19 nt, Artificial Sequence
  Description of Artificial Sequence: Synthetic oligonucleotide
auaaccaaugggccacagg

SEQ ID NO: 2287643 - RNA, 19 nt, Artificial Sequence
  Description of Artificial Sequence: Synthetic oligonucleotide
uuuguacagcucauucucu

SEQ ID NO: 2287644 - RNA, 19 nt, Artificial Sequence
  Description of Artificial Sequence: Synthetic oligonucleotide
cuucaucagcauaggagcc

SEQ ID NO: 2287645 - RNA, 19 nt, Artificial Sequence
  Description of Artificial Sequence: Synthetic oligonucleotide
uguucagcagcauggcuac

SEQ ID NO: 2287646 - RNA, 19 nt, Artificial Sequence
  Description of Artificial Sequence: Synthetic oligonucleotide
uggaaggaucccuaucacc

SEQ ID NO: 2287647 - RNA, 19 nt, Artificial Sequence
  Description of Artificial Sequence: Synthetic oligonucleotide
uuaugaggugguguuugcg

SEQ ID NO: 2287648 - RNA, 19 nt, Artificial Sequence
  Description of Artificial Sequence: Synthetic oligonucleotide
cugacuagauucuagaccu

SEQ ID NO: 2287649 - RNA, 19 nt, Artificial Sequence
  Description of Artificial Sequence: Synthetic oligonucleotide
cauugaugugucauuaaca

SEQ ID NO: 2287650 - RNA, 19 nt, Artificial Sequence
  Description of Artificial Sequence: Synthetic oligonucleotide
auaggagccuuuguacagc

SEQ ID NO: 2287651 - RNA, 19 nt, Artificial Sequence
  Description of Artificial Sequence: Synthetic oligonucleotide
guuguggacuuccaaagca

SEQ ID NO: 2287652 - RNA, 19 nt, Artificial Sequence
  Description of Artificial Sequence: Synthetic oligonucleotide
accagauaauaauuacugu

SEQ ID NO: 2287653 - RNA, 19 nt, Artificial Sequence
  Description of Artificial Sequence: Synthetic oligonucleotide
uuuaugaggugguguuugc

SEQ ID NO: 2287654 - RNA, 19 nt, Artificial Sequence
  Description of Artificial Sequence: Synthetic oligonucleotide
uccaaccugaggcucuucc

SEQ ID NO: 2287655 - RNA, 19 nt, Artificial Sequence
  Description of Artificial Sequence: Synthetic oligonucleotide
uuguggacuuccaaagcac

SEQ ID NO: 2287656 - RNA, 19 nt, Artificial Sequence
  Description of Artificial Sequence: Synthetic oligonucleotide
gauaauaauuacugugggu

SEQ ID NO: 2287657 - RNA, 19 nt, Artificial Sequence
  Description of Artificial Sequence: Synthetic oligonucleotide
caugagaacaucugcucuc

SEQ ID NO: 2287658 - RNA, 19 nt, Artificial Sequence
  Description of Artificial Sequence: Synthetic oligonucleotide
  modified_base (16)..(16): a, c, u, g, unknown or other
guagcuuccuaacugngua

SEQ ID NO: 2287659 - RNA, 19 nt, Artificial Sequence
  Description of Artificial Sequence: Synthetic oligonucleotide
uccucuuguuuaauccaag

SEQ ID NO: 2287660 - RNA, 19 nt, Artificial Sequence
  Description of Artificial Sequence: Synthetic oligonucleotide
cugaaaacguauccuuggc

SEQ ID NO: 2287661 - RNA, 19 nt, Artificial Sequence
  Description of Artificial Sequence: Synthetic oligonucleotide
ugugcguccaaaagguguc

SEQ ID NO: 2287662 - RNA, 19 nt, Artificial Sequence
  Description of Artificial Sequence: Synthetic oligonucleotide
uaguugaguauagacuccc

SEQ ID NO: 2287663 - RNA, 19 nt, Artificial Sequence
  Description of Artificial Sequence: Synthetic oligonucleotide
uaauuacuguggguugugg

SEQ ID NO: 2287664 - RNA, 19 nt, Artificial Sequence
  Description of Artificial Sequence: Synthetic oligonucleotide
cuuuaugaggugguguuug

SEQ ID NO: 2287665 - RNA, 19 nt, Artificial Sequence
  Description of Artificial Sequence: Synthetic oligonucleotide
gucacuuguccuucugagg

SEQ ID NO: 2287666 - RNA, 19 nt, Artificial Sequence
  Description of Artificial Sequence: Synthetic oligonucleotide
  modified_base (19)..(19): a, c, u, g, unknown or other
uggguagcuuccuaacugn

SEQ ID NO: 2287667 - RNA, 19 nt, Artificial Sequence
  Description of Artificial Sequence: Synthetic oligonucleotide
  modified_base (7)..(7): a, c, u, g, unknown or other
uaacugnguaaaagucacu

SEQ ID NO: 2287668 - RNA, 19 nt, Artificial Sequence
  Description of Artificial Sequence: Synthetic oligonucleotide
uggacuuccaaagcacaag

SEQ ID NO: 2287669 - RNA, 19 nt, Artificial Sequence
  Description of Artificial Sequence: Synthetic oligonucleotide
uugaccuucugcucugcug

SEQ ID NO: 2287670 - RNA, 19 nt, Artificial Sequence
  Description of Artificial Sequence: Synthetic oligonucleotide
acaucugaaaacguauccu

SEQ ID NO: 2287671 - RNA, 19 nt, Artificial Sequence
  Description of Artificial Sequence: Synthetic oligonucleotide
  modified_base (4)..(4): a, c, u, g, unknown or other
cugnguaaaagucacuugu

SEQ ID NO: 2287672 - RNA, 19 nt, Artificial Sequence
  Description of Artificial Sequence: Synthetic oligonucleotide
guaggcuuucuccuugacc

SEQ ID NO: 2287673 - RNA, 19 nt, Artificial Sequence
  Description of Artificial Sequence: Synthetic oligonucleotide
guuaagaguggaccaggug

SEQ ID NO: 2287674 - RNA, 19 nt, Artificial Sequence
  Description of Artificial Sequence: Synthetic oligonucleotide
ugcuuuaugaggugguguu

SEQ ID NO: 2287675 - RNA, 19 nt, Artificial Sequence
  Description of Artificial Sequence: Synthetic oligonucleotide
gacucuugccacaauggug

SEQ ID NO: 2287676 - RNA, 19 nt, Artificial Sequence
  Description of Artificial Sequence: Synthetic oligonucleotide
ugguugagacucuugccac

SEQ ID NO: 2287677 - RNA, 19 nt, Artificial Sequence
  Description of Artificial Sequence: Synthetic oligonucleotide
aauaaccaaugggccacag

SEQ ID NO: 2287678 - RNA, 19 nt, Artificial Sequence
  Description of Artificial Sequence: Synthetic oligonucleotide
caagcaugucucuaguuga

SEQ ID NO: 2287679 - RNA, 19 nt, Artificial Sequence
  Description of Artificial Sequence: Synthetic oligonucleotide
guauucuuguacuguugug

SEQ ID NO: 2287680 - RNA, 19 nt, Artificial Sequence
  Description of Artificial Sequence: Synthetic oligonucleotide
ugaugacaaguucuucauc

SEQ ID NO: 2287681 - RNA, 19 nt, Artificial Sequence
  Description of Artificial Sequence: Synthetic oligonucleotide
augggugcacacugcuggc

SEQ ID NO: 2287682 - RNA, 19 nt, Artificial Sequence
  Description of Artificial Sequence: Synthetic oligonucleotide
cacugacuagauucuagac

SEQ ID NO: 2287683 - RNA, 19 nt, Artificial Sequence
  Description of Artificial Sequence: Synthetic oligonucleotide
cuuuauguaccagauaaua

SEQ ID NO: 2287684 - RNA, 19 nt, Artificial Sequence
  Description of Artificial Sequence: Synthetic oligonucleotide
aaccaaugggccacagguc

SEQ ID NO: 2287685 - RNA, 19 nt, Artificial Sequence
  Description of Artificial Sequence: Synthetic oligonucleotide
uaacaugucuugguugaga

SEQ ID NO: 2287686 - RNA, 19 nt, Artificial Sequence
  Description of Artificial Sequence: Synthetic oligonucleotide
acagugcagacacuggaaa

SEQ ID NO: 2287687 - RNA, 19 nt, Artificial Sequence
  Description of Artificial Sequence: Synthetic oligonucleotide
guggcugugcguccaaaag

SEQ ID NO: 2287688 - RNA, 19 nt, Artificial Sequence
  Description of Artificial Sequence: Synthetic oligonucleotide
gaaguggguagcuuccuaa

SEQ ID NO: 2287689 - RNA, 19 nt, Artificial Sequence
  Description of Artificial Sequence: Synthetic oligonucleotide
aaacguauccuuggcugcu

SEQ ID NO: 2287690 - RNA, 19 nt, Artificial Sequence
  Description of Artificial Sequence: Synthetic oligonucleotide
uucugaggcuucaggcaag

SEQ ID NO: 2287691 - RNA, 19 nt, Artificial Sequence
  Description of Artificial Sequence: Synthetic oligonucleotide
accggcacagccuccacug

SEQ ID NO: 2287692 - RNA, 19 nt, Artificial Sequence
  Description of Artificial Sequence: Synthetic oligonucleotide
aagcaugucucuaguugag

SEQ ID NO: 2287693 - RNA, 19 nt, Artificial Sequence
  Description of Artificial Sequence: Synthetic oligonucleotide
aaugggccacaggucuacc

SEQ ID NO: 2287694 - RNA, 19 nt, Artificial Sequence
  Description of Artificial Sequence: Synthetic oligonucleotide
uuaacaugucuugguugag

SEQ ID NO: 2287695 - RNA, 19 nt, Artificial Sequence
  Description of Artificial Sequence: Synthetic oligonucleotide
cuaacaccuaggccagagg

SEQ ID NO: 2287696 - RNA, 19 nt, Artificial Sequence
  Description of Artificial Sequence: Synthetic oligonucleotide
aucugaaaacguauccuug

SEQ ID NO: 2287697 - RNA, 19 nt, Artificial Sequence
  Description of Artificial Sequence: Synthetic oligonucleotide
gaccuucagugcuaacacc

SEQ ID NO: 2287698 - RNA, 19 nt, Artificial Sequence
  Description of Artificial Sequence: Synthetic oligonucleotide
gugaccgguccgcaggugg

SEQ ID NO: 2287699 - RNA, 19 nt, Artificial Sequence
  Description of Artificial Sequence: Synthetic oligonucleotide
uaauccaagacaggauauc

SEQ ID NO: 2287700 - RNA, 19 nt, Artificial Sequence
  Description of Artificial Sequence: Synthetic oligonucleotide
uccacugugaccgguccgc

SEQ ID NO: 2287701 - RNA, 19 nt, Artificial Sequence
  Description of Artificial Sequence: Synthetic oligonucleotide
uuccccuuccccauaccac

SEQ ID NO: 2287702 - RNA, 19 nt, Artificial Sequence
  Description of Artificial Sequence: Synthetic oligonucleotide
cucuaguugaguauagacu

SEQ ID NO: 2287703 - RNA, 19 nt, Artificial Sequence
  Description of Artificial Sequence: Synthetic oligonucleotide
aaaggcgacuggaacuuca

SEQ ID NO: 2287704 - RNA, 19 nt, Artificial Sequence
  Description of Artificial Sequence: Synthetic oligonucleotide
augugucauuaacaugucu

SEQ ID NO: 2287705 - RNA, 19 nt, Artificial Sequence
  Description of Artificial Sequence: Synthetic oligonucleotide
guugaguauagacucccaa

SEQ ID NO: 2287706 - RNA, 19 nt, Artificial Sequence
  Description of Artificial Sequence: Synthetic oligonucleotide
ggagccuuuguacagcuca

SEQ ID NO: 2287707 - RNA, 19 nt, Artificial Sequence
  Description of Artificial Sequence: Synthetic oligonucleotide
cuaucaccggcacagccuc

SEQ ID NO: 2287708 - RNA, 19 nt, Artificial Sequence
  Description of Artificial Sequence: Synthetic oligonucleotide
uggcuuuugaaagcuacau

SEQ ID NO: 2287709 - RNA, 19 nt, Artificial Sequence
  Description of Artificial Sequence: Synthetic oligonucleotide
uuggcugcuugugguaggg

SEQ ID NO: 2287710 - RNA, 19 nt, Artificial Sequence
  Description of Artificial Sequence: Synthetic oligonucleotide
agggguguucagcagcaug

SEQ ID NO: 2287711 - RNA, 19 nt, Artificial Sequence
  Description of Artificial Sequence: Synthetic oligonucleotide
ccaaaaggugucaugggug

SEQ ID NO: 2287712 - RNA, 19 nt, Artificial Sequence
  Description of Artificial Sequence: Synthetic oligonucleotide
ugggccacaggucuaccaa

SEQ ID NO: 2287713 - RNA, 19 nt, Artificial Sequence
  Description of Artificial Sequence: Synthetic oligonucleotide
gagaacaucugcucuccaa

SEQ ID NO: 2287714 - RNA, 19 nt, Artificial Sequence
  Description of Artificial Sequence: Synthetic oligonucleotide
accuaggccagagguuucc

SEQ ID NO: 2287715 - RNA, 19 nt, Artificial Sequence
  Description of Artificial Sequence: Synthetic oligonucleotide
  modified_base (9)..(9): a, c, u, g, unknown or other
ccuaacugnguaaaaguca

SEQ ID NO: 2287716 - RNA, 19 nt, Artificial Sequence
  Description of Artificial Sequence: Synthetic oligonucleotide
uaggagccuuuguacagcu

SEQ ID NO: 2287717 - RNA, 19 nt, Artificial Sequence
  Description of Artificial Sequence: Synthetic oligonucleotide
cuaggccagagguuuccag

SEQ ID NO: 2287718 - RNA, 19 nt, Artificial Sequence
  Description of Artificial Sequence: Synthetic oligonucleotide
caaccugaggcucuuccuc

SEQ ID NO: 2287719 - RNA, 19 nt, Artificial Sequence
  Description of Artificial Sequence: Synthetic oligonucleotide
guaaaagucacuuguccuu

SEQ ID NO: 2287720 - RNA, 19 nt, Artificial Sequence
  Description of Artificial Sequence: Synthetic oligonucleotide
accacugacuagauucuag

SEQ ID NO: 2287721 - RNA, 19 nt, Artificial Sequence
  Description of Artificial Sequence: Synthetic oligonucleotide
uucuagaccuucagugcua

SEQ ID NO: 2287722 - RNA, 19 nt, Artificial Sequence
  Description of Artificial Sequence: Synthetic oligonucleotide
agaguggaccagguggguc

SEQ ID NO: 2287723 - RNA, 19 nt, Artificial Sequence
  Description of Artificial Sequence: Synthetic oligonucleotide
gguggaaguggguagcuuc

SEQ ID NO: 2287724 - RNA, 19 nt, Artificial Sequence
  Description of Artificial Sequence: Synthetic oligonucleotide
aggcgacuggaacuucagg

SEQ ID NO: 2287725 - RNA, 19 nt, Artificial Sequence
  Description of Artificial Sequence: Synthetic oligonucleotide
uccuugaccuucugcucug

SEQ ID NO: 2287726 - RNA, 19 nt, Artificial Sequence
  Description of Artificial Sequence: Synthetic oligonucleotide
  modified_base (14)..(14): a, c, u, g, unknown or other
agcuuccuaacugnguaaa

SEQ ID NO: 2287727 - RNA, 19 nt, Artificial Sequence
  Description of Artificial Sequence: Synthetic oligonucleotide
acaugucuugguugagacu

SEQ ID NO: 2287728 - RNA, 19 nt, Artificial Sequence
  Description of Artificial Sequence: Synthetic oligonucleotide
aaggcgacuggaacuucag

SEQ ID NO: 2287729 - RNA, 19 nt, Artificial Sequence
  Description of Artificial Sequence: Synthetic oligonucleotide
uucagcagcauggcuacau

SEQ ID NO: 2287730 - RNA, 19 nt, Artificial Sequence
  Description of Artificial Sequence: Synthetic oligonucleotide
acuagauucuagaccuuca

SEQ ID NO: 2287731 - RNA, 19 nt, Artificial Sequence
  Description of Artificial Sequence: Synthetic oligonucleotide
aggugucaugggugcacac

SEQ ID NO: 2287732 - RNA, 19 nt, Artificial Sequence
  Description of Artificial Sequence: Synthetic oligonucleotide
ugggucugguggcugugug

SEQ ID NO: 2287733 - RNA, 19 nt, Artificial Sequence
  Description of Artificial Sequence: Synthetic oligonucleotide
auguaccagauaauaauua

SEQ ID NO: 2287734 - RNA, 19 nt, Artificial Sequence
  Description of Artificial Sequence: Synthetic oligonucleotide
uucaggcaagucaguggcu

SEQ ID NO: 2287735 - RNA, 19 nt, Artificial Sequence
  Description of Artificial Sequence: Synthetic oligonucleotide
aaggugucaugggugcaca

SEQ ID NO: 2287736 - RNA, 19 nt, Artificial Sequence
  Description of Artificial Sequence: Synthetic oligonucleotide
ucuagaccuucagugcuaa

SEQ ID NO: 2287737 - RNA, 19 nt, Artificial Sequence
  Description of Artificial Sequence: Synthetic oligonucleotide
cguccaaaaggugucaugg

SEQ ID NO: 2287738 - RNA, 19 nt, Artificial Sequence
  Description of Artificial Sequence: Synthetic oligonucleotide
gacuuccaaagcacaagca

SEQ ID NO: 2287739 - RNA, 19 nt, Artificial Sequence
  Description of Artificial Sequence: Synthetic oligonucleotide
guggaaguggguagcuucc

SEQ ID NO: 2287740 - RNA, 19 nt, Artificial Sequence
  Description of Artificial Sequence: Synthetic oligonucleotide
auccaagacaggauaucug

SEQ ID NO: 2287741 - RNA, 19 nt, Artificial Sequence
  Description of Artificial Sequence: Synthetic oligonucleotide
uuguagcggaagcuccuuc

SEQ ID NO: 2287742 - RNA, 19 nt, Artificial Sequence
  Description of Artificial Sequence: Synthetic oligonucleotide
gaacaucugcucuccaacu

SEQ ID NO: 2287743 - RNA, 19 nt, Artificial Sequence
  Description of Artificial Sequence: Synthetic oligonucleotide
ggcaugagaacaucugcuc

SEQ ID NO: 2287744 - RNA, 19 nt, Artificial Sequence
  Description of Artificial Sequence: Synthetic oligonucleotide
  modified_base (15)..(15): a, c, u, g, unknown or other
uagcuuccuaacugnguaa

SEQ ID NO: 2287745 - RNA, 19 nt, Artificial Sequence
  Description of Artificial Sequence: Synthetic oligonucleotide
guaccagauaauaauuacu

SEQ ID NO: 2287746 - RNA, 19 nt, Artificial Sequence
  Description of Artificial Sequence: Synthetic oligonucleotide
auaccacugacuagauucu

SEQ ID NO: 2287747 - RNA, 19 nt, Artificial Sequence
  Description of Artificial Sequence: Synthetic oligonucleotide
acaccuaggccagagguuu

SEQ ID NO: 2287748 - RNA, 19 nt, Artificial Sequence
  Description of Artificial Sequence: Synthetic oligonucleotide
accccuccauuccccuucc

SEQ ID NO: 2287749 - RNA, 19 nt, Artificial Sequence
  Description of Artificial Sequence: Synthetic oligonucleotide
uguggagcuuguaggcuuu

SEQ ID NO: 2287750 - RNA, 19 nt, Artificial Sequence
  Description of Artificial Sequence: Synthetic oligonucleotide
augucucuaguugaguaua

SEQ ID NO: 2287751 - RNA, 19 nt, Artificial Sequence
  Description of Artificial Sequence: Synthetic oligonucleotide
cauggcuacauugaugugu

SEQ ID NO: 2287752 - RNA, 19 nt, Artificial Sequence
  Description of Artificial Sequence: Synthetic oligonucleotide
gguggcaugagaacaucug

SEQ ID NO: 2287753 - RNA, 19 nt, Artificial Sequence
  Description of Artificial Sequence: Synthetic oligonucleotide
gaguggaccaggugggucu

SEQ ID NO: 2287754 - RNA, 19 nt, Artificial Sequence
  Description of Artificial Sequence: Synthetic oligonucleotide
gcgacuggaacuucaggac

SEQ ID NO: 2287755 - RNA, 19 nt, Artificial Sequence
  Description of Artificial Sequence: Synthetic oligonucleotide
aacaccuaggccagagguu

SEQ ID NO: 2287756 - RNA, 19 nt, Artificial Sequence
  Description of Artificial Sequence: Synthetic oligonucleotide
ugaccgguccgcagguggu

SEQ ID NO: 2287757 - RNA, 19 nt, Artificial Sequence
  Description of Artificial Sequence: Synthetic oligonucleotide
agcuacaucugaaaacgua

SEQ ID NO: 2287758 - RNA, 19 nt, Artificial Sequence
  Description of Artificial Sequence: Synthetic oligonucleotide
accgguccgcagguggucc

SEQ ID NO: 2287759 - RNA, 19 nt, Artificial Sequence
  Description of Artificial Sequence: Synthetic oligonucleotide
cacaaggaggcucuagcaa

SEQ ID NO: 2287760 - RNA, 19 nt, Artificial Sequence
  Description of Artificial Sequence: Synthetic oligonucleotide
acguauccuuggcugcuug

SEQ ID NO: 2287761 - RNA, 19 nt, Artificial Sequence
  Description of Artificial Sequence: Synthetic oligonucleotide
ggcuuuugaaagcuacauc

SEQ ID NO: 2287762 - RNA, 19 nt, Artificial Sequence
  Description of Artificial Sequence: Synthetic oligonucleotide
guagcggaagcuccuucca

SEQ ID NO: 2287763 - RNA, 19 nt, Artificial Sequence
  Description of Artificial Sequence: Synthetic oligonucleotide
gugcuaacaccuaggccag

SEQ ID NO: 2287764 - RNA, 19 nt, Artificial Sequence
  Description of Artificial Sequence: Synthetic oligonucleotide
cuacauugaugugucauua

SEQ ID NO: 2287765 - RNA, 19 nt, Artificial Sequence
  Description of Artificial Sequence: Synthetic oligonucleotide
ucugaggcuucaggcaagu

SEQ ID NO: 2287766 - RNA, 19 nt, Artificial Sequence
  Description of Artificial Sequence: Synthetic oligonucleotide
gcuaacaccuaggccagag

SEQ ID NO: 2287767 - RNA, 19 nt, Artificial Sequence
  Description of Artificial Sequence: Synthetic oligonucleotide
aagaguggaccaggugggu

SEQ ID NO: 2287768 - RNA, 19 nt, Artificial Sequence
  Description of Artificial Sequence: Synthetic oligonucleotide
gaguauagacucccaaauu

SEQ ID NO: 2287769 - RNA, 19 nt, Artificial Sequence
  Description of Artificial Sequence: Synthetic oligonucleotide
agggccguuaagaguggac

SEQ ID NO: 2287770 - RNA, 19 nt, Artificial Sequence
  Description of Artificial Sequence: Synthetic oligonucleotide
cuguggguuguggagcuug

SEQ ID NO: 2287771 - RNA, 19 nt, Artificial Sequence
  Description of Artificial Sequence: Synthetic oligonucleotide
uaucaccggcacagccucc

SEQ ID NO: 2287772 - RNA, 19 nt, Artificial Sequence
  Description of Artificial Sequence: Synthetic oligonucleotide
ccagagguuuccagggccg

SEQ ID NO: 2287773 - RNA, 19 nt, Artificial Sequence
  Description of Artificial Sequence: Synthetic oligonucleotide
gggccguuaagaguggacc

SEQ ID NO: 2287774 - RNA, 19 nt, Artificial Sequence
  Description of Artificial Sequence: Synthetic oligonucleotide
gaaaaggcgacuggaacuu

SEQ ID NO: 2287775 - RNA, 19 nt, Artificial Sequence
  Description of Artificial Sequence: Synthetic oligonucleotide
cugugcguccaaaaggugu

SEQ ID NO: 2287776 - RNA, 19 nt, Artificial Sequence
  Description of Artificial Sequence: Synthetic oligonucleotide
caucugaaaacguauccuu

SEQ ID NO: 2287777 - RNA, 19 nt, Artificial Sequence
  Description of Artificial Sequence: Synthetic oligonucleotide
gcuggcuuuugaaagcuac

SEQ ID NO: 2287778 - RNA, 19 nt, Artificial Sequence
  Description of Artificial Sequence: Synthetic oligonucleotide
gaccuucugcucugcugug

SEQ ID NO: 2287779 - RNA, 19 nt, Artificial Sequence
  Description of Artificial Sequence: Synthetic oligonucleotide
cacagugcagacacuggaa

SEQ ID NO: 2287780 - RNA, 19 nt, Artificial Sequence
  Description of Artificial Sequence: Synthetic oligonucleotide
caaugggccacaggucuac

SEQ ID NO: 2287781 - RNA, 19 nt, Artificial Sequence
  Description of Artificial Sequence: Synthetic oligonucleotide
cagcauaggagccuuugua

SEQ ID NO: 2287782 - RNA, 19 nt, Artificial Sequence
  Description of Artificial Sequence: Synthetic oligonucleotide
gggucugguggcugugugg

SEQ ID NO: 2287783 - RNA, 19 nt, Artificial Sequence
  Description of Artificial Sequence: Synthetic oligonucleotide
guugagacucuugccacaa

SEQ ID NO: 2287784 - RNA, 19 nt, Artificial Sequence
  Description of Artificial Sequence: Synthetic oligonucleotide
acagugcgcagggguaggg

SEQ ID NO: 2287785 - RNA, 19 nt, Artificial Sequence
  Description of Artificial Sequence: Synthetic oligonucleotide
aggcaagucaguggcugug

SEQ ID NO: 2287786 - RNA, 19 nt, Artificial Sequence
  Description of Artificial Sequence: Synthetic oligonucleotide
aguugaguauagacuccca

SEQ ID NO: 2287787 - RNA, 19 nt, Artificial Sequence
  Description of Artificial Sequence: Synthetic oligonucleotide
uugagacucuugccacaau

SEQ ID NO: 2287788 - RNA, 19 nt, Artificial Sequence
  Description of Artificial Sequence: Synthetic oligonucleotide
caccccuccauuccccuuc

SEQ ID NO: 2287789 - RNA, 19 nt, Artificial Sequence
  Description of Artificial Sequence: Synthetic oligonucleotide
cauuccccuuccccauacc

SEQ ID NO: 2287790 - RNA, 19 nt, Artificial Sequence
  Description of Artificial Sequence: Synthetic oligonucleotide
ggaggcucuagcaaggucu

SEQ ID NO: 2287791 - RNA, 19 nt, Artificial Sequence
  Description of Artificial Sequence: Synthetic oligonucleotide
ggugcuuuaugagguggug

SEQ ID NO: 2287792 - RNA, 19 nt, Artificial Sequence
  Description of Artificial Sequence: Synthetic oligonucleotide
acuggaacuucaggacaca

SEQ ID NO: 2287793 - RNA, 19 nt, Artificial Sequence
  Description of Artificial Sequence: Synthetic oligonucleotide
aucaccggcacagccucca

SEQ ID NO: 2287794 - RNA, 19 nt, Artificial Sequence
  Description of Artificial Sequence: Synthetic oligonucleotide
ugcuggcuuuugaaagcua

SEQ ID NO: 2287795 - RNA, 19 nt, Artificial Sequence
  Description of Artificial Sequence: Synthetic oligonucleotide
uggcugcuugugguagggg

SEQ ID NO: 2287796 - RNA, 19 nt, Artificial Sequence
  Description of Artificial Sequence: Synthetic oligonucleotide
ggccguuaagaguggacca

SEQ ID NO: 2287797 - RNA, 19 nt, Artificial Sequence
  Description of Artificial Sequence: Synthetic oligonucleotide
cuagaccuucagugcuaac

SEQ ID NO: 2287798 - RNA, 19 nt, Artificial Sequence
  Description of Artificial Sequence: Synthetic oligonucleotide
cuccuuccacacagugcgc

SEQ ID NO: 2287799 - RNA, 19 nt, Artificial Sequence
  Description of Artificial Sequence: Synthetic oligonucleotide
ugcguccaaaaggugucau

SEQ ID NO: 2287800 - RNA, 19 nt, Artificial Sequence
  Description of Artificial Sequence: Synthetic oligonucleotide
gccguuaagaguggaccag

SEQ ID NO: 2287801 - RNA, 19 nt, Artificial Sequence
  Description of Artificial Sequence: Synthetic oligonucleotide
aggugggucugguggcugu

SEQ ID NO: 2287802 - RNA, 19 nt, Artificial Sequence
  Description of Artificial Sequence: Synthetic oligonucleotide
ugggugcacacugcuggcu

SEQ ID NO: 2287803 - RNA, 19 nt, Artificial Sequence
  Description of Artificial Sequence: Synthetic oligonucleotide
gguugagacucuugccaca

SEQ ID NO: 2287804 - RNA, 19 nt, Artificial Sequence
  Description of Artificial Sequence: Synthetic oligonucleotide
cacagugcgcagggguagg

SEQ ID NO: 2287805 - RNA, 19 nt, Artificial Sequence
  Description of Artificial Sequence: Synthetic oligonucleotide
uggcuacauugauguguca

SEQ ID NO: 2287806 - RNA, 19 nt, Artificial Sequence
  Description of Artificial Sequence: Synthetic oligonucleotide
gucaugggugcacacugcu

SEQ ID NO: 2287807 - RNA, 19 nt, Artificial Sequence
  Description of Artificial Sequence: Synthetic oligonucleotide
aacguauccuuggcugcuu

SEQ ID NO: 2287808 - RNA, 19 nt, Artificial Sequence
  Description of Artificial Sequence: Synthetic oligonucleotide
cccuaucaccggcacagcc

SEQ ID NO: 2287809 - RNA, 19 nt, Artificial Sequence
  Description of Artificial Sequence: Synthetic oligonucleotide
ugucuugguugagacucuu

SEQ ID NO: 2287810 - RNA, 19 nt, Artificial Sequence
  Description of Artificial Sequence: Synthetic oligonucleotide
  modified_base (18)..(18): a, c, u, g, unknown or other
ggguagcuuccuaacugng

SEQ ID NO: 2287811 - RNA, 19 nt, Artificial Sequence
  Description of Artificial Sequence: Synthetic oligonucleotide
agguuuccagggccguuaa

SEQ ID NO: 2287812 - RNA, 19 nt, Artificial Sequence
  Description of Artificial Sequence: Synthetic oligonucleotide
guggacuuccaaagcacaa

SEQ ID NO: 2287813 - RNA, 19 nt, Artificial Sequence
  Description of Artificial Sequence: Synthetic oligonucleotide
gagguuuccagggccguua

SEQ ID NO: 2287814 - RNA, 19 nt, Artificial Sequence
  Description of Artificial Sequence: Synthetic oligonucleotide
gcaugagaacaucugcucu

SEQ ID NO: 2287815 - RNA, 19 nt, Artificial Sequence
  Description of Artificial Sequence: Synthetic oligonucleotide
uaccacugacuagauucua

SEQ ID NO: 2287816 - RNA, 19 nt, Artificial Sequence
  Description of Artificial Sequence: Synthetic oligonucleotide
gcuacaucugaaaacguau

SEQ ID NO: 2287817 - RNA, 19 nt, Artificial Sequence
  Description of Artificial Sequence: Synthetic oligonucleotide
ccguuaagaguggaccagg

SEQ ID NO: 2287818 - RNA, 19 nt, Artificial Sequence
  Description of Artificial Sequence: Synthetic oligonucleotide
gcguccaaaaggugucaug

SEQ ID NO: 2287819 - RNA, 19 nt, Artificial Sequence
  Description of Artificial Sequence: Synthetic oligonucleotide
ccucuuguuuaauccaaga

SEQ ID NO: 2287820 - RNA, 19 nt, Artificial Sequence
  Description of Artificial Sequence: Synthetic oligonucleotide
ggaucccuaucaccggcac

SEQ ID NO: 2287821 - RNA, 19 nt, Artificial Sequence
  Description of Artificial Sequence: Synthetic oligonucleotide
cuguguggaaggaucccua

SEQ ID NO: 2287822 - RNA, 19 nt, Artificial Sequence
  Description of Artificial Sequence: Synthetic oligonucleotide
gcggaagcuccuuccacac

SEQ ID NO: 2287823 - RNA, 19 nt, Artificial Sequence
  Description of Artificial Sequence: Synthetic oligonucleotide
ugugaccgguccgcaggug

SEQ ID NO: 2287824 - RNA, 19 nt, Artificial Sequence
  Description of Artificial Sequence: Synthetic oligonucleotide
ggacacaaggaggcucuag

SEQ ID NO: 2287825 - RNA, 19 nt, Artificial Sequence
  Description of Artificial Sequence: Synthetic oligonucleotide
aggaucccuaucaccggca

SEQ ID NO: 2287826 - RNA, 19 nt, Artificial Sequence
  Description of Artificial Sequence: Synthetic oligonucleotide
cagugcgcagggguagggc

SEQ ID NO: 2287827 - RNA, 19 nt, Artificial Sequence
  Description of Artificial Sequence: Synthetic oligonucleotide
gguuuccagggccguuaag

SEQ ID NO: 2287828 - RNA, 19 nt, Artificial Sequence
  Description of Artificial Sequence: Synthetic oligonucleotide
ccuccauuccccuucccca

SEQ ID NO: 2287829 - RNA, 19 nt, Artificial Sequence
  Description of Artificial Sequence: Synthetic oligonucleotide
uuguacuguuguggacuuc

SEQ ID NO: 2287830 - RNA, 19 nt, Artificial Sequence
  Description of Artificial Sequence: Synthetic oligonucleotide
ccccauaccacugacuaga

SEQ ID NO: 2287831 - RNA, 19 nt, Artificial Sequence
  Description of Artificial Sequence: Synthetic oligonucleotide
gugcuuuaugagguggugu

SEQ ID NO: 2287832 - RNA, 19 nt, Artificial Sequence
  Description of Artificial Sequence: Synthetic oligonucleotide
caccuaggccagagguuuc

SEQ ID NO: 2287833 - RNA, 19 nt, Artificial Sequence
  Description of Artificial Sequence: Synthetic oligonucleotide
gucaguggcugugcgucca

SEQ ID NO: 2287834 - RNA, 19 nt, Artificial Sequence
  Description of Artificial Sequence: Synthetic oligonucleotide
ggguguucagcagcauggc

SEQ ID NO: 2287835 - RNA, 19 nt, Artificial Sequence
  Description of Artificial Sequence: Synthetic oligonucleotide
caagucaguggcugugcgu

SEQ ID NO: 2287836 - RNA, 19 nt, Artificial Sequence
  Description of Artificial Sequence: Synthetic oligonucleotide
aagggguguucagcagcau

SEQ ID NO: 2287837 - RNA, 19 nt, Artificial Sequence
  Description of Artificial Sequence: Synthetic oligonucleotide
ggcugugcguccaaaaggu

SEQ ID NO: 2287838 - RNA, 19 nt, Artificial Sequence
  Description of Artificial Sequence: Synthetic oligonucleotide
gcuacauugaugugucauu

SEQ ID NO: 2287839 - RNA, 19 nt, Artificial Sequence
  Description of Artificial Sequence: Synthetic oligonucleotide
ccuuuguacagcucauucu

SEQ ID NO: 2287840 - RNA, 19 nt, Artificial Sequence
  Description of Artificial Sequence: Synthetic oligonucleotide
ugcuaacaccuaggccaga

SEQ ID NO: 2287841 - RNA, 19 nt, Artificial Sequence
  Description of Artificial Sequence: Synthetic oligonucleotide
ccauuccccuuccccauac

SEQ ID NO: 2287842 - RNA, 19 nt, Artificial Sequence
  Description of Artificial Sequence: Synthetic oligonucleotide
gguguucagcagcauggcu

SEQ ID NO: 2287843 - RNA, 19 nt, Artificial Sequence
  Description of Artificial Sequence: Synthetic oligonucleotide
ggcagguuaagggguguuc

SEQ ID NO: 2287844 - RNA, 19 nt, Artificial Sequence
  Description of Artificial Sequence: Synthetic oligonucleotide
ggcuacauugaugugucau

SEQ ID NO: 2287845 - RNA, 19 nt, Artificial Sequence
  Description of Artificial Sequence: Synthetic oligonucleotide
  modified_base (17)..(17): a, c, u, g, unknown or other
gguagcuuccuaacugngu

SEQ ID NO: 2287846 - RNA, 19 nt, Artificial Sequence
  Description of Artificial Sequence: Synthetic oligonucleotide
ggaaguggguagcuuccua

SEQ ID NO: 2287847 - RNA, 19 nt, Artificial Sequence
  Description of Artificial Sequence: Synthetic oligonucleotide
gggacuccaaccugaggcu

SEQ ID NO: 2287848 - RNA, 19 nt, Artificial Sequence
  Description of Artificial Sequence: Synthetic oligonucleotide
gacacuggaaaggcagguu

SEQ ID NO: 2287849 - RNA, 19 nt, Artificial Sequence
  Description of Artificial Sequence: Synthetic oligonucleotide
gcugugcguccaaaaggug

SEQ ID NO: 2287850 - RNA, 19 nt, Artificial Sequence
  Description of Artificial Sequence: Synthetic oligonucleotide
ggacuccaaccugaggcuc

SEQ ID NO: 2287851 - RNA, 19 nt, Artificial Sequence
  Description of Artificial Sequence: Synthetic oligonucleotide
gugcguccaaaagguguca

SEQ ID NO: 2287852 - RNA, 19 nt, Artificial Sequence
  Description of Artificial Sequence: Synthetic oligonucleotide
cacaagcaugucucuaguu

SEQ ID NO: 2287853 - RNA, 19 nt, Artificial Sequence
  Description of Artificial Sequence: Synthetic oligonucleotide
ccuaucaccggcacagccu

SEQ ID NO: 2287854 - RNA, 19 nt, Artificial Sequence
  Description of Artificial Sequence: Synthetic oligonucleotide
gaagcuccuuccacacagu

SEQ ID NO: 2287855 - RNA, 19 nt, Artificial Sequence
  Description of Artificial Sequence: Synthetic oligonucleotide
cuugaccuucugcucugcu

SEQ ID NO: 2287856 - RNA, 19 nt, Artificial Sequence
  Description of Artificial Sequence: Synthetic oligonucleotide
gaccgguccgcaggugguc

SEQ ID NO: 2287857 - RNA, 19 nt, Artificial Sequence
  Description of Artificial Sequence: Synthetic oligonucleotide
acuccaaccugaggcucuu

SEQ ID NO: 2287858 - RNA, 19 nt, Artificial Sequence
  Description of Artificial Sequence: Synthetic oligonucleotide
cugcuggcuuuugaaagcu

SEQ ID NO: 2287859 - RNA, 19 nt, Artificial Sequence
  Description of Artificial Sequence: Synthetic oligonucleotide
cgacuggaacuucaggaca

SEQ ID NO: 2287860 - RNA, 19 nt, Artificial Sequence
  Description of Artificial Sequence: Synthetic oligonucleotide
gcacaagcaugucucuagu

SEQ ID NO: 2287861 - RNA, 19 nt, Artificial Sequence
  Description of Artificial Sequence: Synthetic oligonucleotide
gggccacaggucuaccaaa

SEQ ID NO: 2287862 - RNA, 19 nt, Artificial Sequence
  Description of Artificial Sequence: Synthetic oligonucleotide
cuccauuccccuuccccau

SEQ ID NO: 2287863 - RNA, 19 nt, Artificial Sequence
  Description of Artificial Sequence: Synthetic oligonucleotide
caggcaagucaguggcugu

SEQ ID NO: 2287864 - RNA, 19 nt, Artificial Sequence
  Description of Artificial Sequence: Synthetic oligonucleotide
ggccacaggucuaccaaaa

SEQ ID NO: 2287865 - RNA, 19 nt, Artificial Sequence
  Description of Artificial Sequence: Synthetic oligonucleotide
gagccuuuguacagcucau

SEQ ID NO: 2287866 - RNA, 19 nt, Artificial Sequence
  Description of Artificial Sequence: Synthetic oligonucleotide
aggcuucaggcaagucagu

SEQ ID NO: 2287867 - RNA, 19 nt, Artificial Sequence
  Description of Artificial Sequence: Synthetic oligonucleotide
gaggcucuagcaaggucuu

SEQ ID NO: 2287868 - RNA, 19 nt, Artificial Sequence
  Description of Artificial Sequence: Synthetic oligonucleotide
acuguggguuguggagcuu

SEQ ID NO: 2287869 - RNA, 19 nt, Artificial Sequence
  Description of Artificial Sequence: Synthetic oligonucleotide
cggcacagccuccacugug

SEQ ID NO: 2287870 - RNA, 19 nt, Artificial Sequence
  Description of Artificial Sequence: Synthetic oligonucleotide
cuccaaccugaggcucuuc

SEQ ID NO: 2287871 - RNA, 19 nt, Artificial Sequence
  Description of Artificial Sequence: Synthetic oligonucleotide
cagggccguuaagagugga

SEQ ID NO: 2287872 - RNA, 19 nt, Artificial Sequence
  Description of Artificial Sequence: Synthetic oligonucleotide
cguuaagaguggaccaggu

SEQ ID NO: 2287873 - RNA, 19 nt, Artificial Sequence
  Description of Artificial Sequence: Synthetic oligonucleotide
ggugcacacugcuggcuuu

SEQ ID NO: 2287874 - RNA, 19 nt, Artificial Sequence
  Description of Artificial Sequence: Synthetic oligonucleotide
gggugcacacugcuggcuu

SEQ ID NO: 2287875 - RNA, 19 nt, Artificial Sequence
  Description of Artificial Sequence: Synthetic oligonucleotide
ccaaugggccacaggucua

SEQ ID NO: 2287876 - RNA, 19 nt, Artificial Sequence
  Description of Artificial Sequence: Synthetic oligonucleotide
cagagguuuccagggccgu

SEQ ID NO: 2287877 - RNA, 19 nt, Artificial Sequence
  Description of Artificial Sequence: Synthetic oligonucleotide
gugggucugguggcugugu

SEQ ID NO: 2287878 - RNA, 19 nt, Artificial Sequence
  Description of Artificial Sequence: Synthetic oligonucleotide
caucagcauaggagccuuu

SEQ ID NO: 2287879 - RNA, 19 nt, Artificial Sequence
  Description of Artificial Sequence: Synthetic oligonucleotide
ccuaggccagagguuucca

SEQ ID NO: 2287880 - RNA, 19 nt, Artificial Sequence
  Description of Artificial Sequence: Synthetic oligonucleotide
ccccuccauuccccuuccc

SEQ ID NO: 2287881 - RNA, 19 nt, Artificial Sequence
  Description of Artificial Sequence: Synthetic oligonucleotide
ggaugcgcuggugcuuuau

SEQ ID NO: 2287882 - RNA, 19 nt, Artificial Sequence
  Description of Artificial Sequence: Synthetic oligonucleotide
cggaagcuccuuccacaca

SEQ ID NO: 2287883 - RNA, 19 nt, Artificial Sequence
  Description of Artificial Sequence: Synthetic oligonucleotide
cccauaccacugacuagau

SEQ ID NO: 2287884 - RNA, 19 nt, Artificial Sequence
  Description of Artificial Sequence: Synthetic oligonucleotide
ccacugugaccgguccgca

SEQ ID NO: 2287885 - RNA, 19 nt, Artificial Sequence
  Description of Artificial Sequence: Synthetic oligonucleotide
ccggcacagccuccacugu

SEQ ID NO: 2287886 - RNA, 19 nt, Artificial Sequence
  Description of Artificial Sequence: Synthetic oligonucleotide
ccgguccgcaggugguccu

SEQ ID NO: 2287887 - RNA, 19 nt, Artificial Sequence
  Description of Artificial Sequence: Synthetic oligonucleotide
gcgcagggguagggccgcu

SEQ ID NO: 2287888 - RNA, 19 nt, Artificial Sequence
  Description of Artificial Sequence: Synthetic oligonucleotide
cgguccgcaggugguccuu

SEQ ID NO: 2287889 - RNA, 19 nt, Artificial Sequence
  Description of Artificial Sequence: Synthetic oligonucleotide
  modified_base (1)..(1): a, c, u, g, unknown or other
nguaaaagucacuuguccu

SEQ ID NO: 2287890 - RNA, 19 nt, Artificial Sequence
  Description of Artificial Sequence: Synthetic oligonucleotide
uuuucaaacacuuugaagc

SEQ ID NO: 2287891 - RNA, 19 nt, Artificial Sequence
  Description of Artificial Sequence: Synthetic oligonucleotide
ugaauaaguacuuuaaggg

SEQ ID NO: 2287892 - RNA, 19 nt, Artificial Sequence
  Description of Artificial Sequence: Synthetic oligonucleotide
aacaaauugagauaauuag

SEQ ID NO: 2287893 - RNA, 19 nt, Artificial Sequence
  Description of Artificial Sequence: Synthetic oligonucleotide
  modified_base (10)..(10): a, c, u, g, unknown or other
aauucaaucncuuccgguc

SEQ ID NO: 2287894 - RNA, 19 nt, Artificial Sequence
  Description of Artificial Sequence: Synthetic oligonucleotide
aauggaaucaucaucauuc

SEQ ID NO: 2287895 - RNA, 19 nt, Artificial Sequence
  Description of Artificial Sequence: Synthetic oligonucleotide
agauuuacaaauuccuucc

SEQ ID NO: 2287896 - RNA, 19 nt, Artificial Sequence
  Description of Artificial Sequence: Synthetic oligonucleotide
uucuaauuguucauuagcg

SEQ ID NO: 2287897 - RNA, 19 nt, Artificial Sequence
  Description of Artificial Sequence: Synthetic oligonucleotide
uuuauugagaauguagucg

SEQ ID NO: 2287898 - RNA, 19 nt, Artificial Sequence
  Description of Artificial Sequence: Synthetic oligonucleotide
aguacuuuaagggagauuc

SEQ ID NO: 2287899 - RNA, 19 nt, Artificial Sequence
  Description of Artificial Sequence: Synthetic oligonucleotide
auaaugaacaaauugagau

SEQ ID NO: 2287900 - RNA, 19 nt, Artificial Sequence
  Description of Artificial Sequence: Synthetic oligonucleotide
uucauuagcgagcaaacgg

SEQ ID NO: 2287901 - RNA, 19 nt, Artificial Sequence
  Description of Artificial Sequence: Synthetic oligonucleotide
uuauugagaauguagucgg

SEQ ID NO: 2287902 - RNA, 19 nt, Artificial Sequence
  Description of Artificial Sequence: Synthetic oligonucleotide
uuuagaucauacaucauug

SEQ ID NO: 2287903 - RNA, 19 nt, Artificial Sequence
  Description of Artificial Sequence: Synthetic oligonucleotide
cugaauaaguacuuuaagg

SEQ ID NO: 2287904 - RNA, 19 nt, Artificial Sequence
  Description of Artificial Sequence: Synthetic oligonucleotide
uugcuuaugacuuuguaag

SEQ ID NO: 2287905 - RNA, 19 nt, Artificial Sequence
  Description of Artificial Sequence: Synthetic oligonucleotide
uaguaaaccauuuucaaac

SEQ ID NO: 2287906 - RNA, 19 nt, Artificial Sequence
  Description of Artificial Sequence: Synthetic oligonucleotide
gauaauuaggaucucgggc

SEQ ID NO: 2287907 - RNA, 19 nt, Artificial Sequence
  Description of Artificial Sequence: Synthetic oligonucleotide
aaucaguuuuccuugagcu

SEQ ID NO: 2287908 - RNA, 19 nt, Artificial Sequence
  Description of Artificial Sequence: Synthetic oligonucleotide
ucuuguauagccaccauca

SEQ ID NO: 2287909 - RNA, 19 nt, Artificial Sequence
  Description of Artificial Sequence: Synthetic oligonucleotide
uagaucauacaucauuggg

SEQ ID NO: 2287910 - RNA, 19 nt, Artificial Sequence
  Description of Artificial Sequence: Synthetic oligonucleotide
ugucaagucacauuccacg

SEQ ID NO: 2287911 - RNA, 19 nt, Artificial Sequence
  Description of Artificial Sequence: Synthetic oligonucleotide
uuucuaauuguucauuagc

SEQ ID NO: 2287912 - RNA, 19 nt, Artificial Sequence
  Description of Artificial Sequence: Synthetic oligonucleotide
ucauuagcgagcaaacggg

SEQ ID NO: 2287913 - RNA, 19 nt, Artificial Sequence
  Description of Artificial Sequence: Synthetic oligonucleotide
  modified_base (19)..(19): a, c, u, g, unknown or other
auauaagcaaauucaaucn

SEQ ID NO: 2287914 - RNA, 19 nt, Artificial Sequence
  Description of Artificial Sequence: Synthetic oligonucleotide
uucauuagucaccauauga

SEQ ID NO: 2287915 - RNA, 19 nt, Artificial Sequence
  Description of Artificial Sequence: Synthetic oligonucleotide
auaauuaggaucucgggca

SEQ ID NO: 2287916 - RNA, 19 nt, Artificial Sequence
  Description of Artificial Sequence: Synthetic oligonucleotide
cuaauuguucauuagcgag

SEQ ID NO: 2287917 - RNA, 19 nt, Artificial Sequence
  Description of Artificial Sequence: Synthetic oligonucleotide
auuuauugagaauguaguc

SEQ ID NO: 2287918 - RNA, 19 nt, Artificial Sequence
  Description of Artificial Sequence: Synthetic oligonucleotide
uuaggugacagauauacaa

SEQ ID NO: 2287919 - RNA, 19 nt, Artificial Sequence
  Description of Artificial Sequence: Synthetic oligonucleotide
uacugauuuauugagaaug

SEQ ID NO: 2287920 - RNA, 19 nt, Artificial Sequence
  Description of Artificial Sequence: Synthetic oligonucleotide
aaaucuagauuccggcuuc

SEQ ID NO: 2287921 - RNA, 19 nt, Artificial Sequence
  Description of Artificial Sequence: Synthetic oligonucleotide
ucugaauaaguacuuuaag

SEQ ID NO: 2287922 - RNA, 19 nt, Artificial Sequence
  Description of Artificial Sequence: Synthetic oligonucleotide
uuucuacugauuuauugag

SEQ ID NO: 2287923 - RNA, 19 nt, Artificial Sequence
  Description of Artificial Sequence: Synthetic oligonucleotide
uuugcaaaauaauggcagg

SEQ ID NO: 2287924 - RNA, 19 nt, Artificial Sequence
  Description of Artificial Sequence: Synthetic oligonucleotide
uuuccagauauucaggacu

SEQ ID NO: 2287925 - RNA, 19 nt, Artificial Sequence
  Description of Artificial Sequence: Synthetic oligonucleotide
uguaguuucuucuaaugcu

SEQ ID NO: 2287926 - RNA, 19 nt, Artificial Sequence
  Description of Artificial Sequence: Synthetic oligonucleotide
aacauacucucuuguauag

SEQ ID NO: 2287927 - RNA, 19 nt, Artificial Sequence
  Description of Artificial Sequence: Synthetic oligonucleotide
ugcuuggaaaucuagauuc

SEQ ID NO: 2287928 - RNA, 19 nt, Artificial Sequence
  Description of Artificial Sequence: Synthetic oligonucleotide
cuaaucacaacauacucuc

SEQ ID NO: 2287929 - RNA, 19 nt, Artificial Sequence
  Description of Artificial Sequence: Synthetic oligonucleotide
uaauaaguugcugaaaugu

SEQ ID NO: 2287930 - RNA, 19 nt, Artificial Sequence
  Description of Artificial Sequence: Synthetic oligonucleotide
agcaaacgggcguagaccc

SEQ ID NO: 2287931 - RNA, 19 nt, Artificial Sequence
  Description of Artificial Sequence: Synthetic oligonucleotide
aaaaccucugcgaaacgcc

SEQ ID NO: 2287932 - RNA, 19 nt, Artificial Sequence
  Description of Artificial Sequence: Synthetic oligonucleotide
ugcauaguaaaccauuuuc

SEQ ID NO: 2287933 - RNA, 19 nt, Artificial Sequence
  Description of Artificial Sequence: Synthetic oligonucleotide
ucuacugauuuauugagaa

SEQ ID NO: 2287934 - RNA, 19 nt, Artificial Sequence
  Description of Artificial Sequence: Synthetic oligonucleotide
uaauuguucauuagcgagc

SEQ ID NO: 2287935 - RNA, 19 nt, Artificial Sequence
  Description of Artificial Sequence: Synthetic oligonucleotide
  modified_base (18)..(18): a, c, u, g, unknown or other
uauaagcaaauucaaucnc

SEQ ID NO: 2287936 - RNA, 19 nt, Artificial Sequence
  Description of Artificial Sequence: Synthetic oligonucleotide
caaauugagauaauuagga

SEQ ID NO: 2287937 - RNA, 19 nt, Artificial Sequence
  Description of Artificial Sequence: Synthetic oligonucleotide
auauucaggacuguggagg

SEQ ID NO: 2287938 - RNA, 19 nt, Artificial Sequence
  Description of Artificial Sequence: Synthetic oligonucleotide
uagauuucggcuauuaaau

SEQ ID NO: 2287939 - RNA, 19 nt, Artificial Sequence
  Description of Artificial Sequence: Synthetic oligonucleotide
uuaagggagauucauuagu

SEQ ID NO: 2287940 - RNA, 19 nt, Artificial Sequence
  Description of Artificial Sequence: Synthetic oligonucleotide
uuagaucauacaucauugg

SEQ ID NO: 2287941 - RNA, 19 nt, Artificial Sequence
  Description of Artificial Sequence: Synthetic oligonucleotide
agggagauucauuagucac

SEQ ID NO: 2287942 - RNA, 19 nt, Artificial Sequence
  Description of Artificial Sequence: Synthetic oligonucleotide
uuuaacucccuaaucacaa

SEQ ID NO: 2287943 - RNA, 19 nt, Artificial Sequence
  Description of Artificial Sequence: Synthetic oligonucleotide
uccuacuacauuugcauag

SEQ ID NO: 2287944 - RNA, 19 nt, Artificial Sequence
  Description of Artificial Sequence: Synthetic oligonucleotide
ucauuagucaccauaugaa

SEQ ID NO: 2287945 - RNA, 19 nt, Artificial Sequence
  Description of Artificial Sequence: Synthetic oligonucleotide
agugcauugagaaaggcag

SEQ ID NO: 2287946 - RNA, 19 nt, Artificial Sequence
  Description of Artificial Sequence: Synthetic oligonucleotide
uuacuauucuccauuacaa

SEQ ID NO: 2287947 - RNA, 19 nt, Artificial Sequence
  Description of Artificial Sequence: Synthetic oligonucleotide
caucauucuccgaauaugg

SEQ ID NO: 2287948 - RNA, 19 nt, Artificial Sequence
  Description of Artificial Sequence: Synthetic oligonucleotide
agauaauuaggaucucggg

SEQ ID NO: 2287949 - RNA, 19 nt, Artificial Sequence
  Description of Artificial Sequence: Synthetic oligonucleotide
accauaugaaaaccucugc

SEQ ID NO: 2287950 - RNA, 19 nt, Artificial Sequence
  Description of Artificial Sequence: Synthetic oligonucleotide
gagauaauuaggaucucgg

SEQ ID NO: 2287951 - RNA, 19 nt, Artificial Sequence
  Description of Artificial Sequence: Synthetic oligonucleotide
  modified_base (11)..(11): a, c, u, g, unknown or other
aaauucaaucncuuccggu

SEQ ID NO: 2287952 - RNA, 19 nt, Artificial Sequence
  Description of Artificial Sequence: Synthetic oligonucleotide
uuuuaacucccuaaucaca

SEQ ID NO: 2287953 - RNA, 19 nt, Artificial Sequence
  Description of Artificial Sequence: Synthetic oligonucleotide
ucauucacuagauuucggc

SEQ ID NO: 2287954 - RNA, 19 nt, Artificial Sequence
  Description of Artificial Sequence: Synthetic oligonucleotide
uaugauaugucaagucaca

SEQ ID NO: 2287955 - RNA, 19 nt, Artificial Sequence
  Description of Artificial Sequence: Synthetic oligonucleotide
uggaauuuuaucaccauuu

SEQ ID NO: 2287956 - RNA, 19 nt, Artificial Sequence
  Description of Artificial Sequence: Synthetic oligonucleotide
uaugucaagucacauucca

SEQ ID NO: 2287957 - RNA, 19 nt, Artificial Sequence
  Description of Artificial Sequence: Synthetic oligonucleotide
augaaaaccucugcgaaac

SEQ ID NO: 2287958 - RNA, 19 nt, Artificial Sequence
  Description of Artificial Sequence: Synthetic oligonucleotide
aauaaugaacaaauugaga

SEQ ID NO: 2287959 - RNA, 19 nt, Artificial Sequence
  Description of Artificial Sequence: Synthetic oligonucleotide
uaauuggaauuuuaucacc

SEQ ID NO: 2287960 - RNA, 19 nt, Artificial Sequence
  Description of Artificial Sequence: Synthetic oligonucleotide
ugagauaauuaggaucucg

SEQ ID NO: 2287961 - RNA, 19 nt, Artificial Sequence
  Description of Artificial Sequence: Synthetic oligonucleotide
gauuucggcuauuaaauuc

SEQ ID NO: 2287962 - RNA, 19 nt, Artificial Sequence
  Description of Artificial Sequence: Synthetic oligonucleotide
ucuaauuguucauuagcga

SEQ ID NO: 2287963 - RNA, 19 nt, Artificial Sequence
  Description of Artificial Sequence: Synthetic oligonucleotide
uaaucaguuuuccuugagc

SEQ ID NO: 2287964 - RNA, 19 nt, Artificial Sequence
  Description of Artificial Sequence: Synthetic oligonucleotide
ucggaauagagauuuacaa

SEQ ID NO: 2287965 - RNA, 19 nt, Artificial Sequence
  Description of Artificial Sequence: Synthetic oligonucleotide
ugacuuuguaaguaauaag

SEQ ID NO: 2287966 - RNA, 19 nt, Artificial Sequence
  Description of Artificial Sequence: Synthetic oligonucleotide
auagcuuugcaaaauaaug

SEQ ID NO: 2287967 - RNA, 19 nt, Artificial Sequence
  Description of Artificial Sequence: Synthetic oligonucleotide
ugugauuugugucuacuuc

SEQ ID NO: 2287968 - RNA, 19 nt, Artificial Sequence
  Description of Artificial Sequence: Synthetic oligonucleotide
cagauauucaggacugugg

SEQ ID NO: 2287969 - RNA, 19 nt, Artificial Sequence
  Description of Artificial Sequence: Synthetic oligonucleotide
aauuggaauuuuaucacca

SEQ ID NO: 2287970 - RNA, 19 nt, Artificial Sequence
  Description of Artificial Sequence: Synthetic oligonucleotide
agggguagcuuacacauag

SEQ ID NO: 2287971 - RNA, 19 nt, Artificial Sequence
  Description of Artificial Sequence: Synthetic oligonucleotide
gugacagauauacaagugc

SEQ ID NO: 2287972 - RNA, 19 nt, Artificial Sequence
  Description of Artificial Sequence: Synthetic oligonucleotide
auguagucggaauagagau

SEQ ID NO: 2287973 - RNA, 19 nt, Artificial Sequence
  Description of Artificial Sequence: Synthetic oligonucleotide
uaaugcuuggaaaucuaga

SEQ ID NO: 2287974 - RNA, 19 nt, Artificial Sequence
  Description of Artificial Sequence: Synthetic oligonucleotide
uguucauuagcgagcaaac

SEQ ID NO: 2287975 - RNA, 19 nt, Artificial Sequence
  Description of Artificial Sequence: Synthetic oligonucleotide
aauuguucauuagcgagca

SEQ ID NO: 2287976 - RNA, 19 nt, Artificial Sequence
  Description of Artificial Sequence: Synthetic oligonucleotide
  modified_base (4)..(4): a, c, u, g, unknown or other
aucncuuccggucugaaua

SEQ ID NO: 2287977 - RNA, 19 nt, Artificial Sequence
  Description of Artificial Sequence: Synthetic oligonucleotide
auauucuguaguuucuucu

SEQ ID NO: 2287978 - RNA, 19 nt, Artificial Sequence
  Description of Artificial Sequence: Synthetic oligonucleotide
caucauauucuguaguuuc

SEQ ID NO: 2287979 - RNA, 19 nt, Artificial Sequence
  Description of Artificial Sequence: Synthetic oligonucleotide
uaacucccuaaucacaaca

SEQ ID NO: 2287980 - RNA, 19 nt, Artificial Sequence
  Description of Artificial Sequence: Synthetic oligonucleotide
uccggucugaauaaguacu

SEQ ID NO: 2287981 - RNA, 19 nt, Artificial Sequence
  Description of Artificial Sequence: Synthetic oligonucleotide
ucugcacuauauuuagacc

SEQ ID NO: 2287982 - RNA, 19 nt, Artificial Sequence
  Description of Artificial Sequence: Synthetic oligonucleotide
gagaauguagucggaauag

SEQ ID NO: 2287983 - RNA, 19 nt, Artificial Sequence
  Description of Artificial Sequence: Synthetic oligonucleotide
uaagggagauucauuaguc

SEQ ID NO: 2287984 - RNA, 19 nt, Artificial Sequence
  Description of Artificial Sequence: Synthetic oligonucleotide
acuauucuccauuacaaua

SEQ ID NO: 2287985 - RNA, 19 nt, Artificial Sequence
  Description of Artificial Sequence: Synthetic oligonucleotide
gaauguagucggaauagag

SEQ ID NO: 2287986 - RNA, 19 nt, Artificial Sequence
  Description of Artificial Sequence: Synthetic oligonucleotide
guuucuaauuguucauuag

SEQ ID NO: 2287987 - RNA, 19 nt, Artificial Sequence
  Description of Artificial Sequence: Synthetic oligonucleotide
cagauauacaagugcauug

SEQ ID NO: 2287988 - RNA, 19 nt, Artificial Sequence
  Description of Artificial Sequence: Synthetic oligonucleotide
cucccuaaucacaacauac

SEQ ID NO: 2287989 - RNA, 19 nt, Artificial Sequence
  Description of Artificial Sequence: Synthetic oligonucleotide
gucugcacuauauuuagac

SEQ ID NO: 2287990 - RNA, 19 nt, Artificial Sequence
  Description of Artificial Sequence: Synthetic oligonucleotide
uuguaaguaauaaguugcu

SEQ ID NO: 2287991 - RNA, 19 nt, Artificial Sequence
  Description of Artificial Sequence: Synthetic oligonucleotide
auaguaaaccauuuucaaa

SEQ ID NO: 2287992 - RNA, 19 nt, Artificial Sequence
  Description of Artificial Sequence: Synthetic oligonucleotide
ugagaauguagucggaaua

SEQ ID NO: 2287993 - RNA, 19 nt, Artificial Sequence
  Description of Artificial Sequence: Synthetic oligonucleotide
auaugaaaaccucugcgaa

SEQ ID NO: 2287994 - RNA, 19 nt, Artificial Sequence
  Description of Artificial Sequence: Synthetic oligonucleotide
cugcacuauauuuagacca

SEQ ID NO: 2287995 - RNA, 19 nt, Artificial Sequence
  Description of Artificial Sequence: Synthetic oligonucleotide
uggucugcacuauauuuag

SEQ ID NO: 2287996 - RNA, 19 nt, Artificial Sequence
  Description of Artificial Sequence: Synthetic oligonucleotide
auuaggaucucgggcauac

SEQ ID NO: 2287997 - RNA, 19 nt, Artificial Sequence
  Description of Artificial Sequence: Synthetic oligonucleotide
ugcaaaauaauggcagggc

SEQ ID NO: 2287998 - RNA, 19 nt, Artificial Sequence
  Description of Artificial Sequence: Synthetic oligonucleotide
acaacauacucucuuguau

SEQ ID NO: 2287999 - RNA, 19 nt, Artificial Sequence
  Description of Artificial Sequence: Synthetic oligonucleotide
aagggagauucauuaguca

SEQ ID NO: 2288000 - RNA, 19 nt, Artificial Sequence
  Description of Artificial Sequence: Synthetic oligonucleotide
uacuacauuugcauaguaa

SEQ ID NO: 2288001 - RNA, 19 nt, Artificial Sequence
  Description of Artificial Sequence: Synthetic oligonucleotide
cacuauauuuagaccaaag

SEQ ID NO: 2288002 - RNA, 19 nt, Artificial Sequence
  Description of Artificial Sequence: Synthetic oligonucleotide
agauucauuagucaccaua

SEQ ID NO: 2288003 - RNA, 19 nt, Artificial Sequence
  Description of Artificial Sequence: Synthetic oligonucleotide
acaucauuggguuaccaaa

SEQ ID NO: 2288004 - RNA, 19 nt, Artificial Sequence
  Description of Artificial Sequence: Synthetic oligonucleotide
uuugcauaguaaaccauuu

SEQ ID NO: 2288005 - RNA, 19 nt, Artificial Sequence
  Description of Artificial Sequence: Synthetic oligonucleotide
uuagcgagcaaacgggcgu

SEQ ID NO: 2288006 - RNA, 19 nt, Artificial Sequence
  Description of Artificial Sequence: Synthetic oligonucleotide
cauugagaaaggcaguuuc

SEQ ID NO: 2288007 - RNA, 19 nt, Artificial Sequence
  Description of Artificial Sequence: Synthetic oligonucleotide
ugugauaucuuuucuucua

SEQ ID NO: 2288008 - RNA, 19 nt, Artificial Sequence
  Description of Artificial Sequence: Synthetic oligonucleotide
uuuagaccaaagucuaauc

SEQ ID NO: 2288009 - RNA, 19 nt, Artificial Sequence
  Description of Artificial Sequence: Synthetic oligonucleotide
ucccuaaucacaacauacu

SEQ ID NO: 2288010 - RNA, 19 nt, Artificial Sequence
  Description of Artificial Sequence: Synthetic oligonucleotide
cuagauuucggcuauuaaa

SEQ ID NO: 2288011 - RNA, 19 nt, Artificial Sequence
  Description of Artificial Sequence: Synthetic oligonucleotide
  modified_base (12)..(12): a, c, u, g, unknown or other
caaauucaaucncuuccgg

SEQ ID NO: 2288012 - RNA, 19 nt, Artificial Sequence
  Description of Artificial Sequence: Synthetic oligonucleotide
agucggaauagagauuuac

SEQ ID NO: 2288013 - RNA, 19 nt, Artificial Sequence
  Description of Artificial Sequence: Synthetic oligonucleotide
uguaaguaauaaguugcug

SEQ ID NO: 2288014 - RNA, 19 nt, Artificial Sequence
  Description of Artificial Sequence: Synthetic oligonucleotide
gaaaaccucugcgaaacgc

SEQ ID NO: 2288015 - RNA, 19 nt, Artificial Sequence
  Description of Artificial Sequence: Synthetic oligonucleotide
uucuacugauuuauugaga

SEQ ID NO: 2288016 - RNA, 19 nt, Artificial Sequence
  Description of Artificial Sequence: Synthetic oligonucleotide
uccgaauauggucugcacu

SEQ ID NO: 2288017 - RNA, 19 nt, Artificial Sequence
  Description of Artificial Sequence: Synthetic oligonucleotide
  modified_base (9)..(9): a, c, u, g, unknown or other
auucaaucncuuccggucu

SEQ ID NO: 2288018 - RNA, 19 nt, Artificial Sequence
  Description of Artificial Sequence: Synthetic oligonucleotide
cuuuaagggagauucauua

SEQ ID NO: 2288019 - RNA, 19 nt, Artificial Sequence
  Description of Artificial Sequence: Synthetic oligonucleotide
aauauggucugcacuauau

SEQ ID NO: 2288020 - RNA, 19 nt, Artificial Sequence
  Description of Artificial Sequence: Synthetic oligonucleotide
ugcgaaacgccuugaacug

SEQ ID NO: 2288021 - RNA, 19 nt, Artificial Sequence
  Description of Artificial Sequence: Synthetic oligonucleotide
caucauucacuagauuucg

SEQ ID NO: 2288022 - RNA, 19 nt, Artificial Sequence
  Description of Artificial Sequence: Synthetic oligonucleotide
agaucauacaucauugggu

SEQ ID NO: 2288023 - RNA, 19 nt, Artificial Sequence
  Description of Artificial Sequence: Synthetic oligonucleotide
aaaagaucugucugugaua

SEQ ID NO: 2288024 - RNA, 19 nt, Artificial Sequence
  Description of Artificial Sequence: Synthetic oligonucleotide
aauaauggcagggccauuu

SEQ ID NO: 2288025 - RNA, 19 nt, Artificial Sequence
  Description of Artificial Sequence: Synthetic oligonucleotide
uuguucauuagcgagcaaa

SEQ ID NO: 2288026 - RNA, 19 nt, Artificial Sequence
  Description of Artificial Sequence: Synthetic oligonucleotide
aaucuagauuccggcuucc

SEQ ID NO: 2288027 - RNA, 19 nt, Artificial Sequence
  Description of Artificial Sequence: Synthetic oligonucleotide
ucugcgaaacgccuugaac

SEQ ID NO: 2288028 - RNA, 19 nt, Artificial Sequence
  Description of Artificial Sequence: Synthetic oligonucleotide
ugaaaaccucugcgaaacg

SEQ ID NO: 2288029 - RNA, 19 nt, Artificial Sequence
  Description of Artificial Sequence: Synthetic oligonucleotide
uaaauucauugcuuaugac

SEQ ID NO: 2288030 - RNA, 19 nt, Artificial Sequence
  Description of Artificial Sequence: Synthetic oligonucleotide
agguaugggcucuucaucu

SEQ ID NO: 2288031 - RNA, 19 nt, Artificial Sequence
  Description of Artificial Sequence: Synthetic oligonucleotide
uaauggcagggccauuucc

SEQ ID NO: 2288032 - RNA, 19 nt, Artificial Sequence
  Description of Artificial Sequence: Synthetic oligonucleotide
ucuagauuccggcuuccac

SEQ ID NO: 2288033 - RNA, 19 nt, Artificial Sequence
  Description of Artificial Sequence: Synthetic oligonucleotide
ucgggcauacacacuauga

SEQ ID NO: 2288034 - RNA, 19 nt, Artificial Sequence
  Description of Artificial Sequence: Synthetic oligonucleotide
agauauacaagugcauuga

SEQ ID NO: 2288035 - RNA, 19 nt, Artificial Sequence
  Description of Artificial Sequence: Synthetic oligonucleotide
ucacaacauacucucuugu

SEQ ID NO: 2288036 - RNA, 19 nt, Artificial Sequence
  Description of Artificial Sequence: Synthetic oligonucleotide
ucuaaucaguuuuccuuga

SEQ ID NO: 2288037 - RNA, 19 nt, Artificial Sequence
  Description of Artificial Sequence: Synthetic oligonucleotide
ugucaauucacuggacuca

SEQ ID NO: 2288038 - RNA, 19 nt, Artificial Sequence
  Description of Artificial Sequence: Synthetic oligonucleotide
  modified_base (17)..(17): a, c, u, g, unknown or other
auaagcaaauucaaucncu

SEQ ID NO: 2288039 - RNA, 19 nt, Artificial Sequence
  Description of Artificial Sequence: Synthetic oligonucleotide
uucauugcuuaugacuuug

SEQ ID NO: 2288040 - RNA, 19 nt, Artificial Sequence
  Description of Artificial Sequence: Synthetic oligonucleotide
uucuaaugcuuggaaaucu

SEQ ID NO: 2288041 - RNA, 19 nt, Artificial Sequence
  Description of Artificial Sequence: Synthetic oligonucleotide
auguuuccaucauucuccg

SEQ ID NO: 2288042 - RNA, 19 nt, Artificial Sequence
  Description of Artificial Sequence: Synthetic oligonucleotide
  modified_base (13)..(13): a, c, u, g, unknown or other
gcaaauucaaucncuuccg

SEQ ID NO: 2288043 - RNA, 19 nt, Artificial Sequence
  Description of Artificial Sequence: Synthetic oligonucleotide
ugcacuauauuuagaccaa

SEQ ID NO: 2288044 - RNA, 19 nt, Artificial Sequence
  Description of Artificial Sequence: Synthetic oligonucleotide
guagcuuacacauagcuuu

SEQ ID NO: 2288045 - RNA, 19 nt, Artificial Sequence
  Description of Artificial Sequence: Synthetic oligonucleotide
auuucggcuauuaaauuca

SEQ ID NO: 2288046 - RNA, 19 nt, Artificial Sequence
  Description of Artificial Sequence: Synthetic oligonucleotide
uacacauagcuuugcaaaa

SEQ ID NO: 2288047 - RNA, 19 nt, Artificial Sequence
  Description of Artificial Sequence: Synthetic oligonucleotide
uucacuagauuucggcuau

SEQ ID NO: 2288048 - RNA, 19 nt, Artificial Sequence
  Description of Artificial Sequence: Synthetic oligonucleotide
ccauaugaaaaccucugcg

SEQ ID NO: 2288049 - RNA, 19 nt, Artificial Sequence
  Description of Artificial Sequence: Synthetic oligonucleotide
aauaaguugcugaaauguu

SEQ ID NO: 2288050 - RNA, 19 nt, Artificial Sequence
  Description of Artificial Sequence: Synthetic oligonucleotide
uccggcuuccacauauaag

SEQ ID NO: 2288051 - RNA, 19 nt, Artificial Sequence
  Description of Artificial Sequence: Synthetic oligonucleotide
auucacuagauuucggcua

SEQ ID NO: 2288052 - RNA, 19 nt, Artificial Sequence
  Description of Artificial Sequence: Synthetic oligonucleotide
agucacuucaucaggaccu

SEQ ID NO: 2288053 - RNA, 19 nt, Artificial Sequence
  Description of Artificial Sequence: Synthetic oligonucleotide
cauuagcgagcaaacgggc

SEQ ID NO: 2288054 - RNA, 19 nt, Artificial Sequence
  Description of Artificial Sequence: Synthetic oligonucleotide
uuggaauuuuaucaccauu

SEQ ID NO: 2288055 - RNA, 19 nt, Artificial Sequence
  Description of Artificial Sequence: Synthetic oligonucleotide
auaugucaagucacauucc

SEQ ID NO: 2288056 - RNA, 19 nt, Artificial Sequence
  Description of Artificial Sequence: Synthetic oligonucleotide
aauucacuggacucaggua

SEQ ID NO: 2288057 - RNA, 19 nt, Artificial Sequence
  Description of Artificial Sequence: Synthetic oligonucleotide
acauacucucuuguauagc

SEQ ID NO: 2288058 - RNA, 19 nt, Artificial Sequence
  Description of Artificial Sequence: Synthetic oligonucleotide
uugagaauguagucggaau

SEQ ID NO: 2288059 - RNA, 19 nt, Artificial Sequence
  Description of Artificial Sequence: Synthetic oligonucleotide
aagugcauugagaaaggca

SEQ ID NO: 2288060 - RNA, 19 nt, Artificial Sequence
  Description of Artificial Sequence: Synthetic oligonucleotide
ugauaugucaagucacauu

SEQ ID NO: 2288061 - RNA, 19 nt, Artificial Sequence
  Description of Artificial Sequence: Synthetic oligonucleotide
ggaauagagauuuacaaau

SEQ ID NO: 2288062 - RNA, 19 nt, Artificial Sequence
  Description of Artificial Sequence: Synthetic oligonucleotide
uccacguuaggugacagau

SEQ ID NO: 2288063 - RNA, 19 nt, Artificial Sequence
  Description of Artificial Sequence: Synthetic oligonucleotide
auucauuagucaccauaug

SEQ ID NO: 2288064 - RNA, 19 nt, Artificial Sequence
  Description of Artificial Sequence: Synthetic oligonucleotide
cacuaugauaugucaaguc

SEQ ID NO: 2288065 - RNA, 19 nt, Artificial Sequence
  Description of Artificial Sequence: Synthetic oligonucleotide
acuguggagguuacuauuc

SEQ ID NO: 2288066 - RNA, 19 nt, Artificial Sequence
  Description of Artificial Sequence: Synthetic oligonucleotide
auaauggcagggccauuuc

SEQ ID NO: 2288067 - RNA, 19 nt, Artificial Sequence
  Description of Artificial Sequence: Synthetic oligonucleotide
uccaucauucuccgaauau

SEQ ID NO: 2288068 - RNA, 19 nt, Artificial Sequence
  Description of Artificial Sequence: Synthetic oligonucleotide
guggagguuacuauucucc

SEQ ID NO: 2288069 - RNA, 19 nt, Artificial Sequence
  Description of Artificial Sequence: Synthetic oligonucleotide
agucacauuccacguuagg

SEQ ID NO: 2288070 - RNA, 19 nt, Artificial Sequence
  Description of Artificial Sequence: Synthetic oligonucleotide
guucauuagcgagcaaacg

SEQ ID NO: 2288071 - RNA, 19 nt, Artificial Sequence
  Description of Artificial Sequence: Synthetic oligonucleotide
  modified_base (8)..(8): a, c, u, g, unknown or other
uucaaucncuuccggucug

SEQ ID NO: 2288072 - RNA, 19 nt, Artificial Sequence
  Description of Artificial Sequence: Synthetic oligonucleotide
gcguagacccuucuaaugg

SEQ ID NO: 2288073 - RNA, 19 nt, Artificial Sequence
  Description of Artificial Sequence: Synthetic oligonucleotide
uauuuagaccaaagucuaa

SEQ ID NO: 2288074 - RNA, 19 nt, Artificial Sequence
  Description of Artificial Sequence: Synthetic oligonucleotide
uauugagaauguagucgga

SEQ ID NO: 2288075 - RNA, 19 nt, Artificial Sequence
  Description of Artificial Sequence: Synthetic oligonucleotide
uagcuuacacauagcuuug

SEQ ID NO: 2288076 - RNA, 19 nt, Artificial Sequence
  Description of Artificial Sequence: Synthetic oligonucleotide
gaucauacaucauuggguu

SEQ ID NO: 2288077 - RNA, 19 nt, Artificial Sequence
  Description of Artificial Sequence: Synthetic oligonucleotide
gugucaauucacuggacuc

SEQ ID NO: 2288078 - RNA, 19 nt, Artificial Sequence
  Description of Artificial Sequence: Synthetic oligonucleotide
auuagcgagcaaacgggcg

SEQ ID NO: 2288079 - RNA, 19 nt, Artificial Sequence
  Description of Artificial Sequence: Synthetic oligonucleotide
uuccggucugaauaaguac

SEQ ID NO: 2288080 - RNA, 19 nt, Artificial Sequence
  Description of Artificial Sequence: Synthetic oligonucleotide
uacuauucuccauuacaau

SEQ ID NO: 2288081 - RNA, 19 nt, Artificial Sequence
  Description of Artificial Sequence: Synthetic oligonucleotide
cuaaucaguuuuccuugag

SEQ ID NO: 2288082 - RNA, 19 nt, Artificial Sequence
  Description of Artificial Sequence: Synthetic oligonucleotide
ugcuuaugacuuuguaagu

SEQ ID NO: 2288083 - RNA, 19 nt, Artificial Sequence
  Description of Artificial Sequence: Synthetic oligonucleotide
auauuuagaccaaagucua

SEQ ID NO: 2288084 - RNA, 19 nt, Artificial Sequence
  Description of Artificial Sequence: Synthetic oligonucleotide
auggaaucaucaucauuca

SEQ ID NO: 2288085 - RNA, 19 nt, Artificial Sequence
  Description of Artificial Sequence: Synthetic oligonucleotide
auuggaauuuuaucaccau

SEQ ID NO: 2288086 - RNA, 19 nt, Artificial Sequence
  Description of Artificial Sequence: Synthetic oligonucleotide
  modified_base (5)..(5): a, c, u, g, unknown or other
aaucncuuccggucugaau

SEQ ID NO: 2288087 - RNA, 19 nt, Artificial Sequence
  Description of Artificial Sequence: Synthetic oligonucleotide
acugauuuauugagaaugu

SEQ ID NO: 2288088 - RNA, 19 nt, Artificial Sequence
  Description of Artificial Sequence: Synthetic oligonucleotide
uuacaaauuccuuccuguu

SEQ ID NO: 2288089 - RNA, 19 nt, Artificial Sequence
  Description of Artificial Sequence: Synthetic oligonucleotide
uaauuaggaucucgggcau

SEQ ID NO: 2288090 - RNA, 19 nt, Artificial Sequence
  Description of Artificial Sequence: Synthetic oligonucleotide
cagucacuucaucaggacc

SEQ ID NO: 2288091 - RNA, 19 nt, Artificial Sequence
  Description of Artificial Sequence: Synthetic oligonucleotide
ugcaagggguagcuuacac

SEQ ID NO: 2288092 - RNA, 19 nt, Artificial Sequence
  Description of Artificial Sequence: Synthetic oligonucleotide
acagauauacaagugcauu

SEQ ID NO: 2288093 - RNA, 19 nt, Artificial Sequence
  Description of Artificial Sequence: Synthetic oligonucleotide
cauuagucaccauaugaaa

SEQ ID NO: 2288094 - RNA, 19 nt, Artificial Sequence
  Description of Artificial Sequence: Synthetic oligonucleotide
gauucauuagucaccauau

SEQ ID NO: 2288095 - RNA, 19 nt, Artificial Sequence
  Description of Artificial Sequence: Synthetic oligonucleotide
uagauuccggcuuccacau

SEQ ID NO: 2288096 - RNA, 19 nt, Artificial Sequence
  Description of Artificial Sequence: Synthetic oligonucleotide
acuagauuucggcuauuaa

SEQ ID NO: 2288097 - RNA, 19 nt, Artificial Sequence
  Description of Artificial Sequence: Synthetic oligonucleotide
uguggagguuacuauucuc

SEQ ID NO: 2288098 - RNA, 19 nt, Artificial Sequence
  Description of Artificial Sequence: Synthetic oligonucleotide
cuuacacauagcuuugcaa

SEQ ID NO: 2288099 - RNA, 19 nt, Artificial Sequence
  Description of Artificial Sequence: Synthetic oligonucleotide
cucuuguauagccaccauc

SEQ ID NO: 2288100 - RNA, 19 nt, Artificial Sequence
  Description of Artificial Sequence: Synthetic oligonucleotide
cacauuccacguuagguga

SEQ ID NO: 2288101 - RNA, 19 nt, Artificial Sequence
  Description of Artificial Sequence: Synthetic oligonucleotide
gagcaaacgggcguagacc

SEQ ID NO: 2288102 - RNA, 19 nt, Artificial Sequence
  Description of Artificial Sequence: Synthetic oligonucleotide
uugcauaguaaaccauuuu

SEQ ID NO: 2288103 - RNA, 19 nt, Artificial Sequence
  Description of Artificial Sequence: Synthetic oligonucleotide
gaaaucuagauuccggcuu

SEQ ID NO: 2288104 - RNA, 19 nt, Artificial Sequence
  Description of Artificial Sequence: Synthetic oligonucleotide
augucaagucacauuccac

SEQ ID NO: 2288105 - RNA, 19 nt, Artificial Sequence
  Description of Artificial Sequence: Synthetic oligonucleotide
cuuuagaucauacaucauu

SEQ ID NO: 2288106 - RNA, 19 nt, Artificial Sequence
  Description of Artificial Sequence: Synthetic oligonucleotide
cucauugugauuugugucu

SEQ ID NO: 2288107 - RNA, 19 nt, Artificial Sequence
  Description of Artificial Sequence: Synthetic oligonucleotide
auugagaauguagucggaa

SEQ ID NO: 2288108 - RNA, 19 nt, Artificial Sequence
  Description of Artificial Sequence: Synthetic oligonucleotide
acauauaagcaaauucaau

SEQ ID NO: 2288109 - RNA, 19 nt, Artificial Sequence
  Description of Artificial Sequence: Synthetic oligonucleotide
auaaguugcugaaauguuu

SEQ ID NO: 2288110 - RNA, 19 nt, Artificial Sequence
  Description of Artificial Sequence: Synthetic oligonucleotide
uuuccaucauucuccgaau

SEQ ID NO: 2288111 - RNA, 19 nt, Artificial Sequence
  Description of Artificial Sequence: Synthetic oligonucleotide
gucaauucacuggacucag

SEQ ID NO: 2288112 - RNA, 19 nt, Artificial Sequence
  Description of Artificial Sequence: Synthetic oligonucleotide
  modified_base (3)..(3): a, c, u, g, unknown or other
ucncuuccggucugaauaa

SEQ ID NO: 2288113 - RNA, 19 nt, Artificial Sequence
  Description of Artificial Sequence: Synthetic oligonucleotide
uucuucuauccucucccaa

SEQ ID NO: 2288114 - RNA, 19 nt, Artificial Sequence
  Description of Artificial Sequence: Synthetic oligonucleotide
uguagucggaauagagauu

SEQ ID NO: 2288115 - RNA, 19 nt, Artificial Sequence
  Description of Artificial Sequence: Synthetic oligonucleotide
ugucuacuuccccuccuac

SEQ ID NO: 2288116 - RNA, 19 nt, Artificial Sequence
  Description of Artificial Sequence: Synthetic oligonucleotide
aaaccucugcgaaacgccu

SEQ ID NO: 2288117 - RNA, 19 nt, Artificial Sequence
  Description of Artificial Sequence: Synthetic oligonucleotide
agauuucggcuauuaaauu

SEQ ID NO: 2288118 - RNA, 19 nt, Artificial Sequence
  Description of Artificial Sequence: Synthetic oligonucleotide
cugcgaaacgccuugaacu

SEQ ID NO: 2288119 - RNA, 19 nt, Artificial Sequence
  Description of Artificial Sequence: Synthetic oligonucleotide
ucuccgaauauggucugca

SEQ ID NO: 2288120 - RNA, 19 nt, Artificial Sequence
  Description of Artificial Sequence: Synthetic oligonucleotide
uucaggacuguggagguua

SEQ ID NO: 2288121 - RNA, 19 nt, Artificial Sequence
  Description of Artificial Sequence: Synthetic oligonucleotide
augcuuggaaaucuagauu

SEQ ID NO: 2288122 - RNA, 19 nt, Artificial Sequence
  Description of Artificial Sequence: Synthetic oligonucleotide
acacuaugauaugucaagu

SEQ ID NO: 2288123 - RNA, 19 nt, Artificial Sequence
  Description of Artificial Sequence: Synthetic oligonucleotide
aacucccuaaucacaacau

SEQ ID NO: 2288124 - RNA, 19 nt, Artificial Sequence
  Description of Artificial Sequence: Synthetic oligonucleotide
ugcauugagaaaggcaguu

SEQ ID NO: 2288125 - RNA, 19 nt, Artificial Sequence
  Description of Artificial Sequence: Synthetic oligonucleotide
accucugcgaaacgccuug

SEQ ID NO: 2288126 - RNA, 19 nt, Artificial Sequence
  Description of Artificial Sequence: Synthetic oligonucleotide
agcugcaagggguagcuua

SEQ ID NO: 2288127 - RNA, 19 nt, Artificial Sequence
  Description of Artificial Sequence: Synthetic oligonucleotide
aucauucacuagauuucgg

SEQ ID NO: 2288128 - RNA, 19 nt, Artificial Sequence
  Description of Artificial Sequence: Synthetic oligonucleotide
auucuccgaauauggucug

SEQ ID NO: 2288129 - RNA, 19 nt, Artificial Sequence
  Description of Artificial Sequence: Synthetic oligonucleotide
uagacccuucuaauggcau

SEQ ID NO: 2288130 - RNA, 19 nt, Artificial Sequence
  Description of Artificial Sequence: Synthetic oligonucleotide
gauuccggcuuccacauau

SEQ ID NO: 2288131 - RNA, 19 nt, Artificial Sequence
  Description of Artificial Sequence: Synthetic oligonucleotide
  modified_base (7)..(7): a, c, u, g, unknown or other
ucaaucncuuccggucuga

SEQ ID NO: 2288132 - RNA, 19 nt, Artificial Sequence
  Description of Artificial Sequence: Synthetic oligonucleotide
agaauguagucggaauaga

SEQ ID NO: 2288133 - RNA, 19 nt, Artificial Sequence
  Description of Artificial Sequence: Synthetic oligonucleotide
cguuaggugacagauauac

SEQ ID NO: 2288134 - RNA, 19 nt, Artificial Sequence
  Description of Artificial Sequence: Synthetic oligonucleotide
uuccggcuuccacauauaa

SEQ ID NO: 2288135 - RNA, 19 nt, Artificial Sequence
  Description of Artificial Sequence: Synthetic oligonucleotide
caacauacucucuuguaua

SEQ ID NO: 2288136 - RNA, 19 nt, Artificial Sequence
  Description of Artificial Sequence: Synthetic oligonucleotide
gacccuucuaauggcauca

SEQ ID NO: 2288137 - RNA, 19 nt, Artificial Sequence
  Description of Artificial Sequence: Synthetic oligonucleotide
uccccuccuacuacauuug

SEQ ID NO: 2288138 - RNA, 19 nt, Artificial Sequence
  Description of Artificial Sequence: Synthetic oligonucleotide
ccauuuccagauauucagg

SEQ ID NO: 2288139 - RNA, 19 nt, Artificial Sequence
  Description of Artificial Sequence: Synthetic oligonucleotide
caagggguagcuuacacau

SEQ ID NO: 2288140 - RNA, 19 nt, Artificial Sequence
  Description of Artificial Sequence: Synthetic oligonucleotide
ggugacagauauacaagug

SEQ ID NO: 2288141 - RNA, 19 nt, Artificial Sequence
  Description of Artificial Sequence: Synthetic oligonucleotide
caagucacauuccacguua

SEQ ID NO: 2288142 - RNA, 19 nt, Artificial Sequence
  Description of Artificial Sequence: Synthetic oligonucleotide
gucggaauagagauuuaca

SEQ ID NO: 2288143 - RNA, 19 nt, Artificial Sequence
  Description of Artificial Sequence: Synthetic oligonucleotide
aggcaguuucuaauuguuc

SEQ ID NO: 2288144 - RNA, 19 nt, Artificial Sequence
  Description of Artificial Sequence: Synthetic oligonucleotide
gagguuacuauucuccauu

SEQ ID NO: 2288145 - RNA, 19 nt, Artificial Sequence
  Description of Artificial Sequence: Synthetic oligonucleotide
gggagauucauuagucacc

SEQ ID NO: 2288146 - RNA, 19 nt, Artificial Sequence
  Description of Artificial Sequence: Synthetic oligonucleotide
ggagauucauuagucacca

SEQ ID NO: 2288147 - RNA, 19 nt, Artificial Sequence
  Description of Artificial Sequence: Synthetic oligonucleotide
cauugugauuugugucuac

SEQ ID NO: 2288148 - RNA, 19 nt, Artificial Sequence
  Description of Artificial Sequence: Synthetic oligonucleotide
cauucacuagauuucggcu

SEQ ID NO: 2288149 - RNA, 19 nt, Artificial Sequence
  Description of Artificial Sequence: Synthetic oligonucleotide
uaaguacuuuaagggagau

SEQ ID NO: 2288150 - RNA, 19 nt, Artificial Sequence
  Description of Artificial Sequence: Synthetic oligonucleotide
acauuccacguuaggugac

SEQ ID NO: 2288151 - RNA, 19 nt, Artificial Sequence
  Description of Artificial Sequence: Synthetic oligonucleotide
augauaugucaagucacau

SEQ ID NO: 2288152 - RNA, 19 nt, Artificial Sequence
  Description of Artificial Sequence: Synthetic oligonucleotide
cauacaucauuggguuacc

SEQ ID NO: 2288153 - RNA, 19 nt, Artificial Sequence
  Description of Artificial Sequence: Synthetic oligonucleotide
agguuacuauucuccauua

SEQ ID NO: 2288154 - RNA, 19 nt, Artificial Sequence
  Description of Artificial Sequence: Synthetic oligonucleotide
cacguuaggugacagauau

SEQ ID NO: 2288155 - RNA, 19 nt, Artificial Sequence
  Description of Artificial Sequence: Synthetic oligonucleotide
ggcguagacccuucuaaug

SEQ ID NO: 2288156 - RNA, 19 nt, Artificial Sequence
  Description of Artificial Sequence: Synthetic oligonucleotide
guagucggaauagagauuu

SEQ ID NO: 2288157 - RNA, 19 nt, Artificial Sequence
  Description of Artificial Sequence: Synthetic oligonucleotide
acucccuaaucacaacaua

SEQ ID NO: 2288158 - RNA, 19 nt, Artificial Sequence
  Description of Artificial Sequence: Synthetic oligonucleotide
cuacuuccccuccuacuac

SEQ ID NO: 2288159 - RNA, 19 nt, Artificial Sequence
  Description of Artificial Sequence: Synthetic oligonucleotide
ccucauugugauuuguguc

SEQ ID NO: 2288160 - RNA, 19 nt, Artificial Sequence
  Description of Artificial Sequence: Synthetic oligonucleotide
cuuccggucugaauaagua

SEQ ID NO: 2288161 - RNA, 19 nt, Artificial Sequence
  Description of Artificial Sequence: Synthetic oligonucleotide
uuccacguuaggugacaga

SEQ ID NO: 2288162 - RNA, 19 nt, Artificial Sequence
  Description of Artificial Sequence: Synthetic oligonucleotide
gucacauuccacguuaggu

SEQ ID NO: 2288163 - RNA, 19 nt, Artificial Sequence
  Description of Artificial Sequence: Synthetic oligonucleotide
cuccgaauauggucugcac

SEQ ID NO: 2288164 - RNA, 19 nt, Artificial Sequence
  Description of Artificial Sequence: Synthetic oligonucleotide
auuccacguuaggugacag

SEQ ID NO: 2288165 - RNA, 19 nt, Artificial Sequence
  Description of Artificial Sequence: Synthetic oligonucleotide
auggucugcacuauauuua

SEQ ID NO: 2288166 - RNA, 19 nt, Artificial Sequence
  Description of Artificial Sequence: Synthetic oligonucleotide
aucauucuccgaauauggu

SEQ ID NO: 2288167 - RNA, 19 nt, Artificial Sequence
  Description of Artificial Sequence: Synthetic oligonucleotide
ggucugaauaaguacuuua

SEQ ID NO: 2288168 - RNA, 19 nt, Artificial Sequence
  Description of Artificial Sequence: Synthetic oligonucleotide
uguuuccaucauucuccga

SEQ ID NO: 2288169 - RNA, 19 nt, Artificial Sequence
  Description of Artificial Sequence: Synthetic oligonucleotide
cucgggcauacacacuaug

SEQ ID NO: 2288170 - RNA, 19 nt, Artificial Sequence
  Description of Artificial Sequence: Synthetic oligonucleotide
gguuacuauucuccauuac

SEQ ID NO: 2288171 - RNA, 19 nt, Artificial Sequence
  Description of Artificial Sequence: Synthetic oligonucleotide
gucaagucacauuccacgu

SEQ ID NO: 2288172 - RNA, 19 nt, Artificial Sequence
  Description of Artificial Sequence: Synthetic oligonucleotide
cccaaaagcuccugcagug

SEQ ID NO: 2288173 - RNA, 19 nt, Artificial Sequence
  Description of Artificial Sequence: Synthetic oligonucleotide
cccuaaucacaacauacuc

SEQ ID NO: 2288174 - RNA, 19 nt, Artificial Sequence
  Description of Artificial Sequence: Synthetic oligonucleotide
aggaucucgggcauacaca

SEQ ID NO: 2288175 - RNA, 19 nt, Artificial Sequence
  Description of Artificial Sequence: Synthetic oligonucleotide
agcuccugcagugucaauu

SEQ ID NO: 2288176 - RNA, 19 nt, Artificial Sequence
  Description of Artificial Sequence: Synthetic oligonucleotide
acuuuaagggagauucauu

SEQ ID NO: 2288177 - RNA, 19 nt, Artificial Sequence
  Description of Artificial Sequence: Synthetic oligonucleotide
ccuucuaauggcaucaaua

SEQ ID NO: 2288178 - RNA, 19 nt, Artificial Sequence
  Description of Artificial Sequence: Synthetic oligonucleotide
cacaacauacucucuugua

SEQ ID NO: 2288179 - RNA, 19 nt, Artificial Sequence
  Description of Artificial Sequence: Synthetic oligonucleotide
aacgggcguagacccuucu

SEQ ID NO: 2288180 - RNA, 19 nt, Artificial Sequence
  Description of Artificial Sequence: Synthetic oligonucleotide
gcuuugcaaaauaauggca

SEQ ID NO: 2288181 - RNA, 19 nt, Artificial Sequence
  Description of Artificial Sequence: Synthetic oligonucleotide
gaauagagauuuacaaauu

SEQ ID NO: 2288182 - RNA, 19 nt, Artificial Sequence
  Description of Artificial Sequence: Synthetic oligonucleotide
auacaucauuggguuacca

SEQ ID NO: 2288183 - RNA, 19 nt, Artificial Sequence
  Description of Artificial Sequence: Synthetic oligonucleotide
aaacgggcguagacccuuc

SEQ ID NO: 2288184 - RNA, 19 nt, Artificial Sequence
  Description of Artificial Sequence: Synthetic oligonucleotide
aauuaggaucucgggcaua

SEQ ID NO: 2288185 - RNA, 19 nt, Artificial Sequence
  Description of Artificial Sequence: Synthetic oligonucleotide
guuaggugacagauauaca

SEQ ID NO: 2288186 - RNA, 19 nt, Artificial Sequence
  Description of Artificial Sequence: Synthetic oligonucleotide
uugagauaauuaggaucuc

SEQ ID NO: 2288187 - RNA, 19 nt, Artificial Sequence
  Description of Artificial Sequence: Synthetic oligonucleotide
ccaucauucuccgaauaug

SEQ ID NO: 2288188 - RNA, 19 nt, Artificial Sequence
  Description of Artificial Sequence: Synthetic oligonucleotide
cauugcuuaugacuuugua

SEQ ID NO: 2288189 - RNA, 19 nt, Artificial Sequence
  Description of Artificial Sequence: Synthetic oligonucleotide
ucucgggcauacacacuau

SEQ ID NO: 2288190 - RNA, 19 nt, Artificial Sequence
  Description of Artificial Sequence: Synthetic oligonucleotide
gacuguggagguuacuauu

SEQ ID NO: 2288191 - RNA, 19 nt, Artificial Sequence
  Description of Artificial Sequence: Synthetic oligonucleotide
guacuuuaagggagauuca

SEQ ID NO: 2288192 - RNA, 19 nt, Artificial Sequence
  Description of Artificial Sequence: Synthetic oligonucleotide
gggcauacacacuaugaua

SEQ ID NO: 2288193 - RNA, 19 nt, Artificial Sequence
  Description of Artificial Sequence: Synthetic oligonucleotide
gcaagggguagcuuacaca

SEQ ID NO: 2288194 - RNA, 19 nt, Artificial Sequence
  Description of Artificial Sequence: Synthetic oligonucleotide
gcuuaugacuuuguaagua

SEQ ID NO: 2288195 - RNA, 19 nt, Artificial Sequence
  Description of Artificial Sequence: Synthetic oligonucleotide
cguagacccuucuaauggc

SEQ ID NO: 2288196 - RNA, 19 nt, Artificial Sequence
  Description of Artificial Sequence: Synthetic oligonucleotide
ccagauauucaggacugug

SEQ ID NO: 2288197 - RNA, 19 nt, Artificial Sequence
  Description of Artificial Sequence: Synthetic oligonucleotide
ccgaauauggucugcacua

SEQ ID NO: 2288198 - RNA, 19 nt, Artificial Sequence
  Description of Artificial Sequence: Synthetic oligonucleotide
uagucggaauagagauuua

SEQ ID NO: 2288199 - RNA, 19 nt, Artificial Sequence
  Description of Artificial Sequence: Synthetic oligonucleotide
gcaacaauggaaucaucau

SEQ ID NO: 2288200 - RNA, 19 nt, Artificial Sequence
  Description of Artificial Sequence: Synthetic oligonucleotide
aucuagauuccggcuucca

SEQ ID NO: 2288201 - RNA, 19 nt, Artificial Sequence
  Description of Artificial Sequence: Synthetic oligonucleotide
augaacaaauugagauaau

SEQ ID NO: 2288202 - RNA, 19 nt, Artificial Sequence
  Description of Artificial Sequence: Synthetic oligonucleotide
cuccuacuacauuugcaua

SEQ ID NO: 2288203 - RNA, 19 nt, Artificial Sequence
  Description of Artificial Sequence: Synthetic oligonucleotide
  modified_base (2)..(2): a, c, u, g, unknown or other
cncuuccggucugaauaag

SEQ ID NO: 2288204 - RNA, 19 nt, Artificial Sequence
  Description of Artificial Sequence: Synthetic oligonucleotide
gucuacuuccccuccuacu

SEQ ID NO: 2288205 - RNA, 19 nt, Artificial Sequence
  Description of Artificial Sequence: Synthetic oligonucleotide
cuacuacauuugcauagua

SEQ ID NO: 2288206 - RNA, 19 nt, Artificial Sequence
  Description of Artificial Sequence: Synthetic oligonucleotide
caccaucauauucuguagu

SEQ ID NO: 2288207 - RNA, 19 nt, Artificial Sequence
  Description of Artificial Sequence: Synthetic oligonucleotide
cauuccacguuaggugaca

SEQ ID NO: 2288208 - RNA, 19 nt, Artificial Sequence
  Description of Artificial Sequence: Synthetic oligonucleotide
cggaauagagauuuacaaa

SEQ ID NO: 2288209 - RNA, 19 nt, Artificial Sequence
  Description of Artificial Sequence: Synthetic oligonucleotide
cuacugauuuauugagaau

SEQ ID NO: 2288210 - RNA, 19 nt, Artificial Sequence
  Description of Artificial Sequence: Synthetic oligonucleotide
aagggguagcuuacacaua

SEQ ID NO: 2288211 - RNA, 19 nt, Artificial Sequence
  Description of Artificial Sequence: Synthetic oligonucleotide
gcugcaagggguagcuuac

SEQ ID NO: 2288212 - RNA, 19 nt, Artificial Sequence
  Description of Artificial Sequence: Synthetic oligonucleotide
cgagcaaacgggcguagac

SEQ ID NO: 2288213 - RNA, 19 nt, Artificial Sequence
  Description of Artificial Sequence: Synthetic oligonucleotide
cacuagauuucggcuauua

SEQ ID NO: 2288214 - RNA, 19 nt, Artificial Sequence
  Description of Artificial Sequence: Synthetic oligonucleotide
cuguggagguuacuauucu

SEQ ID NO: 2288215 - RNA, 19 nt, Artificial Sequence
  Description of Artificial Sequence: Synthetic oligonucleotide
acgggcguagacccuucua

SEQ ID NO: 2288216 - RNA, 19 nt, Artificial Sequence
  Description of Artificial Sequence: Synthetic oligonucleotide
cuuguauagccaccaucau

SEQ ID NO: 2288217 - RNA, 19 nt, Artificial Sequence
  Description of Artificial Sequence: Synthetic oligonucleotide
cucugcgaaacgccuugaa

SEQ ID NO: 2288218 - RNA, 19 nt, Artificial Sequence
  Description of Artificial Sequence: Synthetic oligonucleotide
acuuccccuccuacuacau

SEQ ID NO: 2288219 - RNA, 19 nt, Artificial Sequence
  Description of Artificial Sequence: Synthetic oligonucleotide
agauuccggcuuccacaua

SEQ ID NO: 2288220 - RNA, 19 nt, Artificial Sequence
  Description of Artificial Sequence: Synthetic oligonucleotide
ucacuagauuucggcuauu

SEQ ID NO: 2288221 - RNA, 19 nt, Artificial Sequence
  Description of Artificial Sequence: Synthetic oligonucleotide
ccccuccuacuacauuugc

SEQ ID NO: 2288222 - RNA, 19 nt, Artificial Sequence
  Description of Artificial Sequence: Synthetic oligonucleotide
gggguagcuuacacauagc

SEQ ID NO: 2288223 - RNA, 19 nt, Artificial Sequence
  Description of Artificial Sequence: Synthetic oligonucleotide
gugcauugagaaaggcagu

SEQ ID NO: 2288224 - RNA, 19 nt, Artificial Sequence
  Description of Artificial Sequence: Synthetic oligonucleotide
agggccauuuccagauauu

SEQ ID NO: 2288225 - RNA, 19 nt, Artificial Sequence
  Description of Artificial Sequence: Synthetic oligonucleotide
ggacuguggagguuacuau

SEQ ID NO: 2288226 - RNA, 19 nt, Artificial Sequence
  Description of Artificial Sequence: Synthetic oligonucleotide
ccauuacaauaaugaacaa

SEQ ID NO: 2288227 - RNA, 19 nt, Artificial Sequence
  Description of Artificial Sequence: Synthetic oligonucleotide
acccuucuaauggcaucaa

SEQ ID NO: 2288228 - RNA, 19 nt, Artificial Sequence
  Description of Artificial Sequence: Synthetic oligonucleotide
  modified_base (6)..(6): a, c, u, g, unknown or other
caaucncuuccggucugaa

SEQ ID NO: 2288229 - RNA, 19 nt, Artificial Sequence
  Description of Artificial Sequence: Synthetic oligonucleotide
auuccggcuuccacauaua

SEQ ID NO: 2288230 - RNA, 19 nt, Artificial Sequence
  Description of Artificial Sequence: Synthetic oligonucleotide
cugcaagggguagcuuaca

SEQ ID NO: 2288231 - RNA, 19 nt, Artificial Sequence
  Description of Artificial Sequence: Synthetic oligonucleotide
acguuaggugacagauaua

SEQ ID NO: 2288232 - RNA, 19 nt, Artificial Sequence
  Description of Artificial Sequence: Synthetic oligonucleotide
gguaugggcucuucaucuu

SEQ ID NO: 2288233 - RNA, 19 nt, Artificial Sequence
  Description of Artificial Sequence: Synthetic oligonucleotide
caaacgggcguagacccuu

SEQ ID NO: 2288234 - RNA, 19 nt, Artificial Sequence
  Description of Artificial Sequence: Synthetic oligonucleotide
gaaacgccuugaacuguuu

SEQ ID NO: 2288235 - RNA, 19 nt, Artificial Sequence
  Description of Artificial Sequence: Synthetic oligonucleotide
gggcguagacccuucuaau

SEQ ID NO: 2288236 - RNA, 19 nt, Artificial Sequence
  Description of Artificial Sequence: Synthetic oligonucleotide
ccuacuacauuugcauagu

SEQ ID NO: 2288237 - RNA, 19 nt, Artificial Sequence
  Description of Artificial Sequence: Synthetic oligonucleotide
cgggcguagacccuucuaa

SEQ ID NO: 2288238 - RNA, 19 nt, Artificial Sequence
  Description of Artificial Sequence: Synthetic oligonucleotide
ccacguuaggugacagaua

SEQ ID NO: 2288239 - RNA, 19 nt, Artificial Sequence
  Description of Artificial Sequence: Synthetic oligonucleotide
ccuuuagaucauacaucau

SEQ ID NO: 2288240 - RNA, 19 nt, Artificial Sequence
  Description of Artificial Sequence: Synthetic oligonucleotide
cgggcauacacacuaugau

SEQ ID NO: 2288241 - RNA, 19 nt, Artificial Sequence
  Description of Artificial Sequence: Synthetic oligonucleotide
gcgaaacgccuugaacugu

SEQ ID NO: 2288242 - RNA, 19 nt, Artificial Sequence
  Description of Artificial Sequence: Synthetic oligonucleotide
ccggucugaauaaguacuu

SEQ ID NO: 2288243 - RNA, 19 nt, Artificial Sequence
  Description of Artificial Sequence: Synthetic oligonucleotide
gcaaacgggcguagacccu

SEQ ID NO: 2288244 - RNA, 19 nt, Artificial Sequence
  Description of Artificial Sequence: Synthetic oligonucleotide
cgaauauggucugcacuau

SEQ ID NO: 2288245 - RNA, 19 nt, Artificial Sequence
  Description of Artificial Sequence: Synthetic oligonucleotide
  modified_base (1)..(1): a, c, u, g, unknown or other
ncuuccggucugaauaagu

SEQ ID NO: 2288246 - RNA, 19 nt, Artificial Sequence
  Description of Artificial Sequence: Synthetic oligonucleotide
aaaaucuaaccacagaugc

SEQ ID NO: 2288247 - RNA, 19 nt, Artificial Sequence
  Description of Artificial Sequence: Synthetic oligonucleotide
auaauaugaacacuuaccc

SEQ ID NO: 2288248 - RNA, 19 nt, Artificial Sequence
  Description of Artificial Sequence: Synthetic oligonucleotide
ucuuuuaauaauaugaaca

SEQ ID NO: 2288249 - RNA, 19 nt, Artificial Sequence
  Description of Artificial Sequence: Synthetic oligonucleotide
aaaacuuauacucgaacag

SEQ ID NO: 2288250 - RNA, 19 nt, Artificial Sequence
  Description of Artificial Sequence: Synthetic oligonucleotide
uccuuuauuauaauuauac

SEQ ID NO: 2288251 - RNA, 19 nt, Artificial Sequence
  Description of Artificial Sequence: Synthetic oligonucleotide
aggguauucacucuggggc

SEQ ID NO: 2288252 - RNA, 19 nt, Artificial Sequence
  Description of Artificial Sequence: Synthetic oligonucleotide
agcaauguaaaccuguggg

SEQ ID NO: 2288253 - RNA, 19 nt, Artificial Sequence
  Description of Artificial Sequence: Synthetic oligonucleotide
uaaaccugugggaagaagg

SEQ ID NO: 2288254 - RNA, 19 nt, Artificial Sequence
  Description of Artificial Sequence: Synthetic oligonucleotide
aagucuuuuaauaauauga

SEQ ID NO: 2288255 - RNA, 19 nt, Artificial Sequence
  Description of Artificial Sequence: Synthetic oligonucleotide
caugguuuucugaagaugg

SEQ ID NO: 2288256 - RNA, 19 nt, Artificial Sequence
  Description of Artificial Sequence: Synthetic oligonucleotide
gaugcaauccgacucagag

SEQ ID NO: 2288257 - RNA, 19 nt, Artificial Sequence
  Description of Artificial Sequence: Synthetic oligonucleotide
aaacgccacaaacagcagc

SEQ ID NO: 2288258 - RNA, 19 nt, Artificial Sequence
  Description of Artificial Sequence: Synthetic oligonucleotide
uuugguauuucuaguuugg

SEQ ID NO: 2288259 - RNA, 19 nt, Artificial Sequence
  Description of Artificial Sequence: Synthetic oligonucleotide
uuguccaacuacaagacug

SEQ ID NO: 2288260 - RNA, 19 nt, Artificial Sequence
  Description of Artificial Sequence: Synthetic oligonucleotide
acacaugggaaucuguggc

SEQ ID NO: 2288261 - RNA, 19 nt, Artificial Sequence
  Description of Artificial Sequence: Synthetic oligonucleotide
uaaaaucuaaccacagaug

SEQ ID NO: 2288262 - RNA, 19 nt, Artificial Sequence
  Description of Artificial Sequence: Synthetic oligonucleotide
gauaauuguuccaaauagg

SEQ ID NO: 2288263 - RNA, 19 nt, Artificial Sequence
  Description of Artificial Sequence: Synthetic oligonucleotide
aauguaaaccugugggaag

SEQ ID NO: 2288264 - RNA, 19 nt, Artificial Sequence
  Description of Artificial Sequence: Synthetic oligonucleotide
uacauguugacacuguacu

SEQ ID NO: 2288265 - RNA, 19 nt, Artificial Sequence
  Description of Artificial Sequence: Synthetic oligonucleotide
uccacaaucaauagaugcc

SEQ ID NO: 2288266 - RNA, 19 nt, Artificial Sequence
  Description of Artificial Sequence: Synthetic oligonucleotide
acuacaagacugcagagug

SEQ ID NO: 2288267 - RNA, 19 nt, Artificial Sequence
  Description of Artificial Sequence: Synthetic oligonucleotide
uacaagaugaagccuacca

SEQ ID NO: 2288268 - RNA, 19 nt, Artificial Sequence
  Description of Artificial Sequence: Synthetic oligonucleotide
uaauuguuccaaauaggcc

SEQ ID NO: 2288269 - RNA, 19 nt, Artificial Sequence
  Description of Artificial Sequence: Synthetic oligonucleotide
aaguugucgaucccgaugu

SEQ ID NO: 2288270 - RNA, 19 nt, Artificial Sequence
  Description of Artificial Sequence: Synthetic oligonucleotide
uguacugaggagcugucag

SEQ ID NO: 2288271 - RNA, 19 nt, Artificial Sequence
  Description of Artificial Sequence: Synthetic oligonucleotide
uugucgaucccgauguugg

SEQ ID NO: 2288272 - RNA, 19 nt, Artificial Sequence
  Description of Artificial Sequence: Synthetic oligonucleotide
acaugcagagggcaaacgc

SEQ ID NO: 2288273 - RNA, 19 nt, Artificial Sequence
  Description of Artificial Sequence: Synthetic oligonucleotide
uauauuccacaaucaauag

SEQ ID NO: 2288274 - RNA, 19 nt, Artificial Sequence
  Description of Artificial Sequence: Synthetic oligonucleotide
ugaggcuacauguugacac

SEQ ID NO: 2288275 - RNA, 19 nt, Artificial Sequence
  Description of Artificial Sequence: Synthetic oligonucleotide
gaacaguacaagaugaagc

SEQ ID NO: 2288276 - RNA, 19 nt, Artificial Sequence
  Description of Artificial Sequence: Synthetic oligonucleotide
uaauaugaacacuuacccc

SEQ ID NO: 2288277 - RNA, 19 nt, Artificial Sequence
  Description of Artificial Sequence: Synthetic oligonucleotide
agaaacacuacccuugggu

SEQ ID NO: 2288278 - RNA, 19 nt, Artificial Sequence
  Description of Artificial Sequence: Synthetic oligonucleotide
ucuaaaaucuaaccacaga

SEQ ID NO: 2288279 - RNA, 19 nt, Artificial Sequence
  Description of Artificial Sequence: Synthetic oligonucleotide
uucuaaaaucuaaccacag

SEQ ID NO: 2288280 - RNA, 19 nt, Artificial Sequence
  Description of Artificial Sequence: Synthetic oligonucleotide
uacaagacugcagaguggg

SEQ ID NO: 2288281 - RNA, 19 nt, Artificial Sequence
  Description of Artificial Sequence: Synthetic oligonucleotide
ugguacucaacacacagaa

SEQ ID NO: 2288282 - RNA, 19 nt, Artificial Sequence
  Description of Artificial Sequence: Synthetic oligonucleotide
uuuacaugguuuucugaag

SEQ ID NO: 2288283 - RNA, 19 nt, Artificial Sequence
  Description of Artificial Sequence: Synthetic oligonucleotide
auuuacaugguuuucugaa

SEQ ID NO: 2288284 - RNA, 19 nt, Artificial Sequence
  Description of Artificial Sequence: Synthetic oligonucleotide
guauuucuaguuuggaacc

SEQ ID NO: 2288285 - RNA, 19 nt, Artificial Sequence
  Description of Artificial Sequence: Synthetic oligonucleotide
acucagaggguauucacuc

SEQ ID NO: 2288286 - RNA, 19 nt, Artificial Sequence
  Description of Artificial Sequence: Synthetic oligonucleotide
gguauuucuaguuuggaac

SEQ ID NO: 2288287 - RNA, 19 nt, Artificial Sequence
  Description of Artificial Sequence: Synthetic oligonucleotide
augacugugaaugacagga

SEQ ID NO: 2288288 - RNA, 19 nt, Artificial Sequence
  Description of Artificial Sequence: Synthetic oligonucleotide
aaucuaaccacagaugcaa

SEQ ID NO: 2288289 - RNA, 19 nt, Artificial Sequence
  Description of Artificial Sequence: Synthetic oligonucleotide
acagucuagauuccaggac

SEQ ID NO: 2288290 - RNA, 19 nt, Artificial Sequence
  Description of Artificial Sequence: Synthetic oligonucleotide
ucuaguuuggaaccauugu

SEQ ID NO: 2288291 - RNA, 19 nt, Artificial Sequence
  Description of Artificial Sequence: Synthetic oligonucleotide
uuaauaauaugaacacuua

SEQ ID NO: 2288292 - RNA, 19 nt, Artificial Sequence
  Description of Artificial Sequence: Synthetic oligonucleotide
uucuaguuuggaaccauug

SEQ ID NO: 2288293 - RNA, 19 nt, Artificial Sequence
  Description of Artificial Sequence: Synthetic oligonucleotide
uuaaucaccagcggcauga

SEQ ID NO: 2288294 - RNA, 19 nt, Artificial Sequence
  Description of Artificial Sequence: Synthetic oligonucleotide
aaucaauagaugccacuga

SEQ ID NO: 2288295 - RNA, 19 nt, Artificial Sequence
  Description of Artificial Sequence: Synthetic oligonucleotide
aaccauuguucaguggccc

SEQ ID NO: 2288296 - RNA, 19 nt, Artificial Sequence
  Description of Artificial Sequence: Synthetic oligonucleotide
ugggaacaguacaagauga

SEQ ID NO: 2288297 - RNA, 19 nt, Artificial Sequence
  Description of Artificial Sequence: Synthetic oligonucleotide
ugucaggaugcccagguug

SEQ ID NO: 2288298 - RNA, 19 nt, Artificial Sequence
  Description of Artificial Sequence: Synthetic oligonucleotide
uaguuuggaaccauuguuc

SEQ ID NO: 2288299 - RNA, 19 nt, Artificial Sequence
  Description of Artificial Sequence: Synthetic oligonucleotide
gugaccuuaaucaccagcg

SEQ ID NO: 2288300 - RNA, 19 nt, Artificial Sequence
  Description of Artificial Sequence: Synthetic oligonucleotide
aaacuuauacucgaacaga

SEQ ID NO: 2288301 - RNA, 19 nt, Artificial Sequence
  Description of Artificial Sequence: Synthetic oligonucleotide
ugucuccucagauacgucc

SEQ ID NO: 2288302 - RNA, 19 nt, Artificial Sequence
  Description of Artificial Sequence: Synthetic oligonucleotide
acucaacacacagaaacac

SEQ ID NO: 2288303 - RNA, 19 nt, Artificial Sequence
  Description of Artificial Sequence: Synthetic oligonucleotide
aaacacuacccuugggucu

SEQ ID NO: 2288304 - RNA, 19 nt, Artificial Sequence
  Description of Artificial Sequence: Synthetic oligonucleotide
cuaaccacagaugcaaucc

SEQ ID NO: 2288305 - RNA, 19 nt, Artificial Sequence
  Description of Artificial Sequence: Synthetic oligonucleotide
agugggucgucugagacac

SEQ ID NO: 2288306 - RNA, 19 nt, Artificial Sequence
  Description of Artificial Sequence: Synthetic oligonucleotide
uuuggaaccauuguucagu

SEQ ID NO: 2288307 - RNA, 19 nt, Artificial Sequence
  Description of Artificial Sequence: Synthetic oligonucleotide
ggaaccauuguucaguggc

SEQ ID NO: 2288308 - RNA, 19 nt, Artificial Sequence
  Description of Artificial Sequence: Synthetic oligonucleotide
cuuugguauuucuaguuug

SEQ ID NO: 2288309 - RNA, 19 nt, Artificial Sequence
  Description of Artificial Sequence: Synthetic oligonucleotide
uguggcuuguccaacuaca

SEQ ID NO: 2288310 - RNA, 19 nt, Artificial Sequence
  Description of Artificial Sequence: Synthetic oligonucleotide
uguccaacuacaagacugc

SEQ ID NO: 2288311 - RNA, 19 nt, Artificial Sequence
  Description of Artificial Sequence: Synthetic oligonucleotide
uuacgcugaggcuacaugu

SEQ ID NO: 2288312 - RNA, 19 nt, Artificial Sequence
  Description of Artificial Sequence: Synthetic oligonucleotide
gaaacacuacccuuggguc

SEQ ID NO: 2288313 - RNA, 19 nt, Artificial Sequence
  Description of Artificial Sequence: Synthetic oligonucleotide
auagaugccacugauaauu

SEQ ID NO: 2288314 - RNA, 19 nt, Artificial Sequence
  Description of Artificial Sequence: Synthetic oligonucleotide
cuuauacucgaacagaaaa

SEQ ID NO: 2288315 - RNA, 19 nt, Artificial Sequence
  Description of Artificial Sequence: Synthetic oligonucleotide
agugaauccuggcaauguc

SEQ ID NO: 2288316 - RNA, 19 nt, Artificial Sequence
  Description of Artificial Sequence: Synthetic oligonucleotide
gaagaaggaagacacuguc

SEQ ID NO: 2288317 - RNA, 19 nt, Artificial Sequence
  Description of Artificial Sequence: Synthetic oligonucleotide
gaagacacuguccucuuac

SEQ ID NO: 2288318 - RNA, 19 nt, Artificial Sequence
  Description of Artificial Sequence: Synthetic oligonucleotide
caugcagagggcaaacgcc

SEQ ID NO: 2288319 - RNA, 19 nt, Artificial Sequence
  Description of Artificial Sequence: Synthetic oligonucleotide
gaggguauucacucugggg

SEQ ID NO: 2288320 - RNA, 19 nt, Artificial Sequence
  Description of Artificial Sequence: Synthetic oligonucleotide
uacucaacacacagaaaca

SEQ ID NO: 2288321 - RNA, 19 nt, Artificial Sequence
  Description of Artificial Sequence: Synthetic oligonucleotide
acuggugaccuuaaucacc

SEQ ID NO: 2288322 - RNA, 19 nt, Artificial Sequence
  Description of Artificial Sequence: Synthetic oligonucleotide
aguuuggaaccauuguuca

SEQ ID NO: 2288323 - RNA, 19 nt, Artificial Sequence
  Description of Artificial Sequence: Synthetic oligonucleotide
gaccuuaaucaccagcggc

SEQ ID NO: 2288324 - RNA, 19 nt, Artificial Sequence
  Description of Artificial Sequence: Synthetic oligonucleotide
caauagaugccacugauaa

SEQ ID NO: 2288325 - RNA, 19 nt, Artificial Sequence
  Description of Artificial Sequence: Synthetic oligonucleotide
ccucuuacagucuagauuc

SEQ ID NO: 2288326 - RNA, 19 nt, Artificial Sequence
  Description of Artificial Sequence: Synthetic oligonucleotide
gacugugaaugacaggaug

SEQ ID NO: 2288327 - RNA, 19 nt, Artificial Sequence
  Description of Artificial Sequence: Synthetic oligonucleotide
ugacacuguacugaggagc

SEQ ID NO: 2288328 - RNA, 19 nt, Artificial Sequence
  Description of Artificial Sequence: Synthetic oligonucleotide
acugauaauuguuccaaau

SEQ ID NO: 2288329 - RNA, 19 nt, Artificial Sequence
  Description of Artificial Sequence: Synthetic oligonucleotide
gaacacuuaccccaaguuc

SEQ ID NO: 2288330 - RNA, 19 nt, Artificial Sequence
  Description of Artificial Sequence: Synthetic oligonucleotide
gauguagagcccugaaaac

SEQ ID NO: 2288331 - RNA, 19 nt, Artificial Sequence
  Description of Artificial Sequence: Synthetic oligonucleotide
gauuccaggacuccagcac

SEQ ID NO: 2288332 - RNA, 19 nt, Artificial Sequence
  Description of Artificial Sequence: Synthetic oligonucleotide
aauucuccagucccaguga

SEQ ID NO: 2288333 - RNA, 19 nt, Artificial Sequence
  Description of Artificial Sequence: Synthetic oligonucleotide
aggaugcccagguugacag

SEQ ID NO: 2288334 - RNA, 19 nt, Artificial Sequence
  Description of Artificial Sequence: Synthetic oligonucleotide
caaucaauagaugccacug

SEQ ID NO: 2288335 - RNA, 19 nt, Artificial Sequence
  Description of Artificial Sequence: Synthetic oligonucleotide
aacuacaagacugcagagu

SEQ ID NO: 2288336 - RNA, 19 nt, Artificial Sequence
  Description of Artificial Sequence: Synthetic oligonucleotide
cuagauuccaggacuccag

SEQ ID NO: 2288337 - RNA, 19 nt, Artificial Sequence
  Description of Artificial Sequence: Synthetic oligonucleotide
caauucuccagucccagug

SEQ ID NO: 2288338 - RNA, 19 nt, Artificial Sequence
  Description of Artificial Sequence: Synthetic oligonucleotide
cuaaaaucuaaccacagau

SEQ ID NO: 2288339 - RNA, 19 nt, Artificial Sequence
  Description of Artificial Sequence: Synthetic oligonucleotide
ucugcugugcguguuuggg

SEQ ID NO: 2288340 - RNA, 19 nt, Artificial Sequence
  Description of Artificial Sequence: Synthetic oligonucleotide
uccucuuacagucuagauu

SEQ ID NO: 2288341 - RNA, 19 nt, Artificial Sequence
  Description of Artificial Sequence: Synthetic oligonucleotide
aacuuauacucgaacagaa

SEQ ID NO: 2288342 - RNA, 19 nt, Artificial Sequence
  Description of Artificial Sequence: Synthetic oligonucleotide
ugaacacuuaccccaaguu

SEQ ID NO: 2288343 - RNA, 19 nt, Artificial Sequence
  Description of Artificial Sequence: Synthetic oligonucleotide
acaaucaauagaugccacu

SEQ ID NO: 2288344 - RNA, 19 nt, Artificial Sequence
  Description of Artificial Sequence: Synthetic oligonucleotide
uccaaauaggcccaccauu

SEQ ID NO: 2288345 - RNA, 19 nt, Artificial Sequence
  Description of Artificial Sequence: Synthetic oligonucleotide
agguacugguacucaacac

SEQ ID NO: 2288346 - RNA, 19 nt, Artificial Sequence
  Description of Artificial Sequence: Synthetic oligonucleotide
ucgucugagacaccgcucu

SEQ ID NO: 2288347 - RNA, 19 nt, Artificial Sequence
  Description of Artificial Sequence: Synthetic oligonucleotide
ugguauuucuaguuuggaa

SEQ ID NO: 2288348 - RNA, 19 nt, Artificial Sequence
  Description of Artificial Sequence: Synthetic oligonucleotide
uuuucugaagauggcauuc

SEQ ID NO: 2288349 - RNA, 19 nt, Artificial Sequence
  Description of Artificial Sequence: Synthetic oligonucleotide
gugggaacaguacaagaug

SEQ ID NO: 2288350 - RNA, 19 nt, Artificial Sequence
  Description of Artificial Sequence: Synthetic oligonucleotide
ucuaaccacagaugcaauc

SEQ ID NO: 2288351 - RNA, 19 nt, Artificial Sequence
  Description of Artificial Sequence: Synthetic oligonucleotide
gauguugguuggacgaggg

SEQ ID NO: 2288352 - RNA, 19 nt, Artificial Sequence
  Description of Artificial Sequence: Synthetic oligonucleotide
uggcaauguccuuauauuc

SEQ ID NO: 2288353 - RNA, 19 nt, Artificial Sequence
  Description of Artificial Sequence: Synthetic oligonucleotide
ucgaucccgauguugguug

SEQ ID NO: 2288354 - RNA, 19 nt, Artificial Sequence
  Description of Artificial Sequence: Synthetic oligonucleotide
uguugacacuguacugagg

SEQ ID NO: 2288355 - RNA, 19 nt, Artificial Sequence
  Description of Artificial Sequence: Synthetic oligonucleotide
aaaucuaaccacagaugca

SEQ ID NO: 2288356 - RNA, 19 nt, Artificial Sequence
  Description of Artificial Sequence: Synthetic oligonucleotide
aaaggcuguagaggucagc

SEQ ID NO: 2288357 - RNA, 19 nt, Artificial Sequence
  Description of Artificial Sequence: Synthetic oligonucleotide
agucccagugaauccuggc

SEQ ID NO: 2288358 - RNA, 19 nt, Artificial Sequence
  Description of Artificial Sequence: Synthetic oligonucleotide
accugacacugacagguac

SEQ ID NO: 2288359 - RNA, 19 nt, Artificial Sequence
  Description of Artificial Sequence: Synthetic oligonucleotide
ugggucgucugagacaccg

SEQ ID NO: 2288360 - RNA, 19 nt, Artificial Sequence
  Description of Artificial Sequence: Synthetic oligonucleotide
ugacauuacgcugaggcua

SEQ ID NO: 2288361 - RNA, 19 nt, Artificial Sequence
  Description of Artificial Sequence: Synthetic oligonucleotide
agaggguauucacucuggg

SEQ ID NO: 2288362 - RNA, 19 nt, Artificial Sequence
  Description of Artificial Sequence: Synthetic oligonucleotide
aacaugcagagggcaaacg

SEQ ID NO: 2288363 - RNA, 19 nt, Artificial Sequence
  Description of Artificial Sequence: Synthetic oligonucleotide
ugccacugauaauuguucc

SEQ ID NO: 2288364 - RNA, 19 nt, Artificial Sequence
  Description of Artificial Sequence: Synthetic oligonucleotide
auuacgcugaggcuacaug

SEQ ID NO: 2288365 - RNA, 19 nt, Artificial Sequence
  Description of Artificial Sequence: Synthetic oligonucleotide
aacacuacccuugggucug

SEQ ID NO: 2288366 - RNA, 19 nt, Artificial Sequence
  Description of Artificial Sequence: Synthetic oligonucleotide
aggucagcugucaggaugc

SEQ ID NO: 2288367 - RNA, 19 nt, Artificial Sequence
  Description of Artificial Sequence: Synthetic oligonucleotide
agucuuuuaauaauaugaa

SEQ ID NO: 2288368 - RNA, 19 nt, Artificial Sequence
  Description of Artificial Sequence: Synthetic oligonucleotide
uggcuuguccaacuacaag

SEQ ID NO: 2288369 - RNA, 19 nt, Artificial Sequence
  Description of Artificial Sequence: Synthetic oligonucleotide
cuacaagacugcagagugg

SEQ ID NO: 2288370 - RNA, 19 nt, Artificial Sequence
  Description of Artificial Sequence: Synthetic oligonucleotide
uaugaacacuuaccccaag

SEQ ID NO: 2288371 - RNA, 19 nt, Artificial Sequence
  Description of Artificial Sequence: Synthetic oligonucleotide
aguacaagaugaagccuac

SEQ ID NO: 2288372 - RNA, 19 nt, Artificial Sequence
  Description of Artificial Sequence: Synthetic oligonucleotide
uguccuuauauuccacaau

SEQ ID NO: 2288373 - RNA, 19 nt, Artificial Sequence
  Description of Artificial Sequence: Synthetic oligonucleotide
uauuucuaguuuggaacca

SEQ ID NO: 2288374 - RNA, 19 nt, Artificial Sequence
  Description of Artificial Sequence: Synthetic oligonucleotide
cuuggagcaauguaaaccu

SEQ ID NO: 2288375 - RNA, 19 nt, Artificial Sequence
  Description of Artificial Sequence: Synthetic oligonucleotide
ugguuuucugaagauggca

SEQ ID NO: 2288376 - RNA, 19 nt, Artificial Sequence
  Description of Artificial Sequence: Synthetic oligonucleotide
ucccaaguugucgaucccg

SEQ ID NO: 2288377 - RNA, 19 nt, Artificial Sequence
  Description of Artificial Sequence: Synthetic oligonucleotide
ucccagugaauccuggcaa

SEQ ID NO: 2288378 - RNA, 19 nt, Artificial Sequence
  Description of Artificial Sequence: Synthetic oligonucleotide
ggagcugucagaaaccuug

SEQ ID NO: 2288379 - RNA, 19 nt, Artificial Sequence
  Description of Artificial Sequence: Synthetic oligonucleotide
guuuggaaccauuguucag

SEQ ID NO: 2288380 - RNA, 19 nt, Artificial Sequence
  Description of Artificial Sequence: Synthetic oligonucleotide
auguagagcccugaaaacu

SEQ ID NO: 2288381 - RNA, 19 nt, Artificial Sequence
  Description of Artificial Sequence: Synthetic oligonucleotide
uugacacuguacugaggag

SEQ ID NO: 2288382 - RNA, 19 nt, Artificial Sequence
  Description of Artificial Sequence: Synthetic oligonucleotide
gguacugguacucaacaca

SEQ ID NO: 2288383 - RNA, 19 nt, Artificial Sequence
  Description of Artificial Sequence: Synthetic oligonucleotide
uguuugggugggaacagua

SEQ ID NO: 2288384 - RNA, 19 nt, Artificial Sequence
  Description of Artificial Sequence: Synthetic oligonucleotide
caaauaggcccaccauucc

SEQ ID NO: 2288385 - RNA, 19 nt, Artificial Sequence
  Description of Artificial Sequence: Synthetic oligonucleotide
cuucagucccaaguugucg

SEQ ID NO: 2288386 - RNA, 19 nt, Artificial Sequence
  Description of Artificial Sequence: Synthetic oligonucleotide
cauguugacacuguacuga

SEQ ID NO: 2288387 - RNA, 19 nt, Artificial Sequence
  Description of Artificial Sequence: Synthetic oligonucleotide
auguccuuauauuccacaa

SEQ ID NO: 2288388 - RNA, 19 nt, Artificial Sequence
  Description of Artificial Sequence: Synthetic oligonucleotide
ugacagaaguggcacuggu

SEQ ID NO: 2288389 - RNA, 19 nt, Artificial Sequence
  Description of Artificial Sequence: Synthetic oligonucleotide
agcuguacaggcaaaacau

SEQ ID NO: 2288390 - RNA, 19 nt, Artificial Sequence
  Description of Artificial Sequence: Synthetic oligonucleotide
ucaccagcggcaugaagcu

SEQ ID NO: 2288391 - RNA, 19 nt, Artificial Sequence
  Description of Artificial Sequence: Synthetic oligonucleotide
gacacugacagguacuggu

SEQ ID NO: 2288392 - RNA, 19 nt, Artificial Sequence
  Description of Artificial Sequence: Synthetic oligonucleotide
ugcccagguugacagaagu

SEQ ID NO: 2288393 - RNA, 19 nt, Artificial Sequence
  Description of Artificial Sequence: Synthetic oligonucleotide
uggaaccauuguucagugg

SEQ ID NO: 2288394 - RNA, 19 nt, Artificial Sequence
  Description of Artificial Sequence: Synthetic oligonucleotide
caacuacaagacugcagag

SEQ ID NO: 2288395 - RNA, 19 nt, Artificial Sequence
  Description of Artificial Sequence: Synthetic oligonucleotide
uuggagcaauguaaaccug

SEQ ID NO: 2288396 - RNA, 19 nt, Artificial Sequence
  Description of Artificial Sequence: Synthetic oligonucleotide
auucugguggcugacauua

SEQ ID NO: 2288397 - RNA, 19 nt, Artificial Sequence
  Description of Artificial Sequence: Synthetic oligonucleotide
gcaaacgccacaaacagca

SEQ ID NO: 2288398 - RNA, 19 nt, Artificial Sequence
  Description of Artificial Sequence: Synthetic oligonucleotide
uugacagaaguggcacugg

SEQ ID NO: 2288399 - RNA, 19 nt, Artificial Sequence
  Description of Artificial Sequence: Synthetic oligonucleotide
ugcagagugggucgucuga

SEQ ID NO: 2288400 - RNA, 19 nt, Artificial Sequence
  Description of Artificial Sequence: Synthetic oligonucleotide
gggcaaacgccacaaacag

SEQ ID NO: 2288401 - RNA, 19 nt, Artificial Sequence
  Description of Artificial Sequence: Synthetic oligonucleotide
ucccgauguugguuggacg

SEQ ID NO: 2288402 - RNA, 19 nt, Artificial Sequence
  Description of Artificial Sequence: Synthetic oligonucleotide
cagaggguauucacucugg

SEQ ID NO: 2288403 - RNA, 19 nt, Artificial Sequence
  Description of Artificial Sequence: Synthetic oligonucleotide
guacugguacucaacacac

SEQ ID NO: 2288404 - RNA, 19 nt, Artificial Sequence
  Description of Artificial Sequence: Synthetic oligonucleotide
guuccaaauaggcccacca

SEQ ID NO: 2288405 - RNA, 19 nt, Artificial Sequence
  Description of Artificial Sequence: Synthetic oligonucleotide
cacaaucaauagaugccac

SEQ ID NO: 2288406 - RNA, 19 nt, Artificial Sequence
  Description of Artificial Sequence: Synthetic oligonucleotide
gaaccauuguucaguggcc

SEQ ID NO: 2288407 - RNA, 19 nt, Artificial Sequence
  Description of Artificial Sequence: Synthetic oligonucleotide
ggugaccuuaaucaccagc

SEQ ID NO: 2288408 - RNA, 19 nt, Artificial Sequence
  Description of Artificial Sequence: Synthetic oligonucleotide
cuggugaccuuaaucacca

SEQ ID NO: 2288409 - RNA, 19 nt, Artificial Sequence
  Description of Artificial Sequence: Synthetic oligonucleotide
cugauaauuguuccaaaua

SEQ ID NO: 2288410 - RNA, 19 nt, Artificial Sequence
  Description of Artificial Sequence: Synthetic oligonucleotide
auguaaaccugugggaaga

SEQ ID NO: 2288411 - RNA, 19 nt, Artificial Sequence
  Description of Artificial Sequence: Synthetic oligonucleotide
agucuagauuccaggacuc

SEQ ID NO: 2288412 - RNA, 19 nt, Artificial Sequence
  Description of Artificial Sequence: Synthetic oligonucleotide
caugaagcuguacaggcaa

SEQ ID NO: 2288413 - RNA, 19 nt, Artificial Sequence
  Description of Artificial Sequence: Synthetic oligonucleotide
auguugguuggacgagggg

SEQ ID NO: 2288414 - RNA, 19 nt, Artificial Sequence
  Description of Artificial Sequence: Synthetic oligonucleotide
uugguauuucuaguuugga

SEQ ID NO: 2288415 - RNA, 19 nt, Artificial Sequence
  Description of Artificial Sequence: Synthetic oligonucleotide
ggcgacacugcuuucuugc

SEQ ID NO: 2288416 - RNA, 19 nt, Artificial Sequence
  Description of Artificial Sequence: Synthetic oligonucleotide
ugguggcugacauuacgcu

SEQ ID NO: 2288417 - RNA, 19 nt, Artificial Sequence
  Description of Artificial Sequence: Synthetic oligonucleotide
cccuuucuaaaaucuaacc

SEQ ID NO: 2288418 - RNA, 19 nt, Artificial Sequence
  Description of Artificial Sequence: Synthetic oligonucleotide
uuucuaguuuggaaccauu

SEQ ID NO: 2288419 - RNA, 19 nt, Artificial Sequence
  Description of Artificial Sequence: Synthetic oligonucleotide
cccugaaaacuuauacucg

SEQ ID NO: 2288420 - RNA, 19 nt, Artificial Sequence
  Description of Artificial Sequence: Synthetic oligonucleotide
augaugacugugaaugaca

SEQ ID NO: 2288421 - RNA, 19 nt, Artificial Sequence
  Description of Artificial Sequence: Synthetic oligonucleotide
gacauuacgcugaggcuac

SEQ ID NO: 2288422 - RNA, 19 nt, Artificial Sequence
  Description of Artificial Sequence: Synthetic oligonucleotide
uguccucuuacagucuaga

SEQ ID NO: 2288423 - RNA, 19 nt, Artificial Sequence
  Description of Artificial Sequence: Synthetic oligonucleotide
agaaaaggcuguagagguc

SEQ ID NO: 2288424 - RNA, 19 nt, Artificial Sequence
  Description of Artificial Sequence: Synthetic oligonucleotide
ccaaauaggcccaccauuc

SEQ ID NO: 2288425 - RNA, 19 nt, Artificial Sequence
  Description of Artificial Sequence: Synthetic oligonucleotide
caguacaagaugaagccua

SEQ ID NO: 2288426 - RNA, 19 nt, Artificial Sequence
  Description of Artificial Sequence: Synthetic oligonucleotide
agggcaaacgccacaaaca

SEQ ID NO: 2288427 - RNA, 19 nt, Artificial Sequence
  Description of Artificial Sequence: Synthetic oligonucleotide
augacaggauguagagccc

SEQ ID NO: 2288428 - RNA, 19 nt, Artificial Sequence
  Description of Artificial Sequence: Synthetic oligonucleotide
aauaggcccaccauuccua

SEQ ID NO: 2288429 - RNA, 19 nt, Artificial Sequence
  Description of Artificial Sequence: Synthetic oligonucleotide
aggcccaccauuccuaaaa

SEQ ID NO: 2288430 - RNA, 19 nt, Artificial Sequence
  Description of Artificial Sequence: Synthetic oligonucleotide
auacguccuuggcaguguc

SEQ ID NO: 2288431 - RNA, 19 nt, Artificial Sequence
  Description of Artificial Sequence: Synthetic oligonucleotide
agcaccugacacugacagg

SEQ ID NO: 2288432 - RNA, 19 nt, Artificial Sequence
  Description of Artificial Sequence: Synthetic oligonucleotide
agaugccacugauaauugu

SEQ ID NO: 2288433 - RNA, 19 nt, Artificial Sequence
  Description of Artificial Sequence: Synthetic oligonucleotide
ugggugggaacaguacaag

SEQ ID NO: 2288434 - RNA, 19 nt, Artificial Sequence
  Description of Artificial Sequence: Synthetic oligonucleotide
aggauguagagcccugaaa

SEQ ID NO: 2288435 - RNA, 19 nt, Artificial Sequence
  Description of Artificial Sequence: Synthetic oligonucleotide
acaguacaagaugaagccu

SEQ ID NO: 2288436 - RNA, 19 nt, Artificial Sequence
  Description of Artificial Sequence: Synthetic oligonucleotide
ugacaggauguagagcccu

SEQ ID NO: 2288437 - RNA, 19 nt, Artificial Sequence
  Description of Artificial Sequence: Synthetic oligonucleotide
acuacccuugggucugcuc

SEQ ID NO: 2288438 - RNA, 19 nt, Artificial Sequence
  Description of Artificial Sequence: Synthetic oligonucleotide
guugucgaucccgauguug

SEQ ID NO: 2288439 - RNA, 19 nt, Artificial Sequence
  Description of Artificial Sequence: Synthetic oligonucleotide
gaugucuccucagauacgu

SEQ ID NO: 2288440 - RNA, 19 nt, Artificial Sequence
  Description of Artificial Sequence: Synthetic oligonucleotide
aaccacagaugcaauccga

SEQ ID NO: 2288441 - RNA, 19 nt, Artificial Sequence
  Description of Artificial Sequence: Synthetic oligonucleotide
uugccggcucugcugugcg

SEQ ID NO: 2288442 - RNA, 19 nt, Artificial Sequence
  Description of Artificial Sequence: Synthetic oligonucleotide
agauacguccuuggcagug

SEQ ID NO: 2288443 - RNA, 19 nt, Artificial Sequence
  Description of Artificial Sequence: Synthetic oligonucleotide
aucccgauguugguuggac

SEQ ID NO: 2288444 - RNA, 19 nt, Artificial Sequence
  Description of Artificial Sequence: Synthetic oligonucleotide
cucuuacagucuagauucc

SEQ ID NO: 2288445 - RNA, 19 nt, Artificial Sequence
  Description of Artificial Sequence: Synthetic oligonucleotide
guaaaccugugggaagaag

SEQ ID NO: 2288446 - RNA, 19 nt, Artificial Sequence
  Description of Artificial Sequence: Synthetic oligonucleotide
ugacugugaaugacaggau

SEQ ID NO: 2288447 - RNA, 19 nt, Artificial Sequence
  Description of Artificial Sequence: Synthetic oligonucleotide
uagagcccugaaaacuuau

SEQ ID NO: 2288448 - RNA, 19 nt, Artificial Sequence
  Description of Artificial Sequence: Synthetic oligonucleotide
uacgcugaggcuacauguu

SEQ ID NO: 2288449 - RNA, 19 nt, Artificial Sequence
  Description of Artificial Sequence: Synthetic oligonucleotide
gguggcugacauuacgcug

SEQ ID NO: 2288450 - RNA, 19 nt, Artificial Sequence
  Description of Artificial Sequence: Synthetic oligonucleotide
gcaauguaaaccuguggga

SEQ ID NO: 2288451 - RNA, 19 nt, Artificial Sequence
  Description of Artificial Sequence: Synthetic oligonucleotide
cagaaacacuacccuuggg

SEQ ID NO: 2288452 - RNA, 19 nt, Artificial Sequence
  Description of Artificial Sequence: Synthetic oligonucleotide
ucuccucuggugacacaug

SEQ ID NO: 2288453 - RNA, 19 nt, Artificial Sequence
  Description of Artificial Sequence: Synthetic oligonucleotide
accauuguucaguggcccu

SEQ ID NO: 2288454 - RNA, 19 nt, Artificial Sequence
  Description of Artificial Sequence: Synthetic oligonucleotide
guggcugacauuacgcuga

SEQ ID NO: 2288455 - RNA, 19 nt, Artificial Sequence
  Description of Artificial Sequence: Synthetic oligonucleotide
uguuccaaauaggcccacc

SEQ ID NO: 2288456 - RNA, 19 nt, Artificial Sequence
  Description of Artificial Sequence: Synthetic oligonucleotide
acuguccucuuacagucua

SEQ ID NO: 2288457 - RNA, 19 nt, Artificial Sequence
  Description of Artificial Sequence: Synthetic oligonucleotide
ugcguguuugggugggaac

SEQ ID NO: 2288458 - RNA, 19 nt, Artificial Sequence
  Description of Artificial Sequence: Synthetic oligonucleotide
ucugcucuacuuugguauu

SEQ ID NO: 2288459 - RNA, 19 nt, Artificial Sequence
  Description of Artificial Sequence: Synthetic oligonucleotide
ccugaaaacuuauacucga

SEQ ID NO: 2288460 - RNA, 19 nt, Artificial Sequence
  Description of Artificial Sequence: Synthetic oligonucleotide
ugaagccuaccaugaugac

SEQ ID NO: 2288461 - RNA, 19 nt, Artificial Sequence
  Description of Artificial Sequence: Synthetic oligonucleotide
auuucuaguuuggaaccau

SEQ ID NO: 2288462 - RNA, 19 nt, Artificial Sequence
  Description of Artificial Sequence: Synthetic oligonucleotide
uggcugacauuacgcugag

SEQ ID NO: 2288463 - RNA, 19 nt, Artificial Sequence
  Description of Artificial Sequence: Synthetic oligonucleotide
gucccagugaauccuggca

SEQ ID NO: 2288464 - RNA, 19 nt, Artificial Sequence
  Description of Artificial Sequence: Synthetic oligonucleotide
gcggcaugaagcuguacag

SEQ ID NO: 2288465 - RNA, 19 nt, Artificial Sequence
  Description of Artificial Sequence: Synthetic oligonucleotide
uacguccuuggcaguguca

SEQ ID NO: 2288466 - RNA, 19 nt, Artificial Sequence
  Description of Artificial Sequence: Synthetic oligonucleotide
cagguugacagaaguggca

SEQ ID NO: 2288467 - RNA, 19 nt, Artificial Sequence
  Description of Artificial Sequence: Synthetic oligonucleotide
uaccccaaguuccuuuauu

SEQ ID NO: 2288468 - RNA, 19 nt, Artificial Sequence
  Description of Artificial Sequence: Synthetic oligonucleotide
cuaguuuggaaccauuguu

SEQ ID NO: 2288469 - RNA, 19 nt, Artificial Sequence
  Description of Artificial Sequence: Synthetic oligonucleotide
cagucccagugaauccugg

SEQ ID NO: 2288470 - RNA, 19 nt, Artificial Sequence
  Description of Artificial Sequence: Synthetic oligonucleotide
cagucuagauuccaggacu

SEQ ID NO: 2288471 - RNA, 19 nt, Artificial Sequence
  Description of Artificial Sequence: Synthetic oligonucleotide
augcagagggcaaacgcca

SEQ ID NO: 2288472 - RNA, 19 nt, Artificial Sequence
  Description of Artificial Sequence: Synthetic oligonucleotide
guacugaggagcugucaga

SEQ ID NO: 2288473 - RNA, 19 nt, Artificial Sequence
  Description of Artificial Sequence: Synthetic oligonucleotide
ugcucuacuuugguauuuc

SEQ ID NO: 2288474 - RNA, 19 nt, Artificial Sequence
  Description of Artificial Sequence: Synthetic oligonucleotide
ccuaccaugaugacuguga

SEQ ID NO: 2288475 - RNA, 19 nt, Artificial Sequence
  Description of Artificial Sequence: Synthetic oligonucleotide
gggaaucuguggcuugucc

SEQ ID NO: 2288476 - RNA, 19 nt, Artificial Sequence
  Description of Artificial Sequence: Synthetic oligonucleotide
gaagccuaccaugaugacu

SEQ ID NO: 2288477 - RNA, 19 nt, Artificial Sequence
  Description of Artificial Sequence: Synthetic oligonucleotide
uggcccuuucuaaaaucua

SEQ ID NO: 2288478 - RNA, 19 nt, Artificial Sequence
  Description of Artificial Sequence: Synthetic oligonucleotide
gacacuguacugaggagcu

SEQ ID NO: 2288479 - RNA, 19 nt, Artificial Sequence
  Description of Artificial Sequence: Synthetic oligonucleotide
ugucgaucccgauguuggu

SEQ ID NO: 2288480 - RNA, 19 nt, Artificial Sequence
  Description of Artificial Sequence: Synthetic oligonucleotide
uguaaaccugugggaagaa

SEQ ID NO: 2288481 - RNA, 19 nt, Artificial Sequence
  Description of Artificial Sequence: Synthetic oligonucleotide
acuuauacucgaacagaaa

SEQ ID NO: 2288482 - RNA, 19 nt, Artificial Sequence
  Description of Artificial Sequence: Synthetic oligonucleotide
acuguacugaggagcuguc

SEQ ID NO: 2288483 - RNA, 19 nt, Artificial Sequence
  Description of Artificial Sequence: Synthetic oligonucleotide
aggcuacauguugacacug

SEQ ID NO: 2288484 - RNA, 19 nt, Artificial Sequence
  Description of Artificial Sequence: Synthetic oligonucleotide
auaggcccaccauuccuaa

SEQ ID NO: 2288485 - RNA, 19 nt, Artificial Sequence
  Description of Artificial Sequence: Synthetic oligonucleotide
uucuccagucccagugaau

SEQ ID NO: 2288486 - RNA, 19 nt, Artificial Sequence
  Description of Artificial Sequence: Synthetic oligonucleotide
cugguacucaacacacaga

SEQ ID NO: 2288487 - RNA, 19 nt, Artificial Sequence
  Description of Artificial Sequence: Synthetic oligonucleotide
auaugaacacuuaccccaa

SEQ ID NO: 2288488 - RNA, 19 nt, Artificial Sequence
  Description of Artificial Sequence: Synthetic oligonucleotide
aauccgacucagaggguau

SEQ ID NO: 2288489 - RNA, 19 nt, Artificial Sequence
  Description of Artificial Sequence: Synthetic oligonucleotide
gucuagauuccaggacucc

SEQ ID NO: 2288490 - RNA, 19 nt, Artificial Sequence
  Description of Artificial Sequence: Synthetic oligonucleotide
acgccacaaacagcagcgc

SEQ ID NO: 2288491 - RNA, 19 nt, Artificial Sequence
  Description of Artificial Sequence: Synthetic oligonucleotide
guacaagaugaagccuacc

SEQ ID NO: 2288492 - RNA, 19 nt, Artificial Sequence
  Description of Artificial Sequence: Synthetic oligonucleotide
cuacccuugggucugcucu

SEQ ID NO: 2288493 - RNA, 19 nt, Artificial Sequence
  Description of Artificial Sequence: Synthetic oligonucleotide
aguggcacuggugaccuua

SEQ ID NO: 2288494 - RNA, 19 nt, Artificial Sequence
  Description of Artificial Sequence: Synthetic oligonucleotide
uucugguggcugacauuac

SEQ ID NO: 2288495 - RNA, 19 nt, Artificial Sequence
  Description of Artificial Sequence: Synthetic oligonucleotide
cuacuuugguauuucuagu

SEQ ID NO: 2288496 - RNA, 19 nt, Artificial Sequence
  Description of Artificial Sequence: Synthetic oligonucleotide
uggugacacaugggaaucu

SEQ ID NO: 2288497 - RNA, 19 nt, Artificial Sequence
  Description of Artificial Sequence: Synthetic oligonucleotide
cuugccggcucugcugugc

SEQ ID NO: 2288498 - RNA, 19 nt, Artificial Sequence
  Description of Artificial Sequence: Synthetic oligonucleotide
gccaaagaaaaggcuguag

SEQ ID NO: 2288499 - RNA, 19 nt, Artificial Sequence
  Description of Artificial Sequence: Synthetic oligonucleotide
cuaccaugaugacugugaa

SEQ ID NO: 2288500 - RNA, 19 nt, Artificial Sequence
  Description of Artificial Sequence: Synthetic oligonucleotide
augggaaucuguggcuugu

SEQ ID NO: 2288501 - RNA, 19 nt, Artificial Sequence
  Description of Artificial Sequence: Synthetic oligonucleotide
cagaaaccuuggagcaaug

SEQ ID NO: 2288502 - RNA, 19 nt, Artificial Sequence
  Description of Artificial Sequence: Synthetic oligonucleotide
cagaugcaauccgacucag

SEQ ID NO: 2288503 - RNA, 19 nt, Artificial Sequence
  Description of Artificial Sequence: Synthetic oligonucleotide
gacucagaggguauucacu

SEQ ID NO: 2288504 - RNA, 19 nt, Artificial Sequence
  Description of Artificial Sequence: Synthetic oligonucleotide
acaggauguagagcccuga

SEQ ID NO: 2288505 - RNA, 19 nt, Artificial Sequence
  Description of Artificial Sequence: Synthetic oligonucleotide
cugugcguguuuggguggg

SEQ ID NO: 2288506 - RNA, 19 nt, Artificial Sequence
  Description of Artificial Sequence: Synthetic oligonucleotide
gcugugcguguuugggugg

SEQ ID NO: 2288507 - RNA, 19 nt, Artificial Sequence
  Description of Artificial Sequence: Synthetic oligonucleotide
gccacugauaauuguucca

SEQ ID NO: 2288508 - RNA, 19 nt, Artificial Sequence
  Description of Artificial Sequence: Synthetic oligonucleotide
acaugggaaucuguggcuu

SEQ ID NO: 2288509 - RNA, 19 nt, Artificial Sequence
  Description of Artificial Sequence: Synthetic oligonucleotide
acacuuaccccaaguuccu

SEQ ID NO: 2288510 - RNA, 19 nt, Artificial Sequence
  Description of Artificial Sequence: Synthetic oligonucleotide
gcugaggcuacauguugac

SEQ ID NO: 2288511 - RNA, 19 nt, Artificial Sequence
  Description of Artificial Sequence: Synthetic oligonucleotide
caugaguucaaagucuuuu

SEQ ID NO: 2288512 - RNA, 19 nt, Artificial Sequence
  Description of Artificial Sequence: Synthetic oligonucleotide
ggacuccagcaccugacac

SEQ ID NO: 2288513 - RNA, 19 nt, Artificial Sequence
  Description of Artificial Sequence: Synthetic oligonucleotide
cagcagcgcaauucuccag

SEQ ID NO: 2288514 - RNA, 19 nt, Artificial Sequence
  Description of Artificial Sequence: Synthetic oligonucleotide
agacaccgcucuccucaag

SEQ ID NO: 2288515 - RNA, 19 nt, Artificial Sequence
  Description of Artificial Sequence: Synthetic oligonucleotide
cuggcaauguccuuauauu

SEQ ID NO: 2288516 - RNA, 19 nt, Artificial Sequence
  Description of Artificial Sequence: Synthetic oligonucleotide
ggggcugaugucuccucag

SEQ ID NO: 2288517 - RNA, 19 nt, Artificial Sequence
  Description of Artificial Sequence: Synthetic oligonucleotide
uacccuugggucugcucua

SEQ ID NO: 2288518 - RNA, 19 nt, Artificial Sequence
  Description of Artificial Sequence: Synthetic oligonucleotide
cugacauuacgcugaggcu

SEQ ID NO: 2288519 - RNA, 19 nt, Artificial Sequence
  Description of Artificial Sequence: Synthetic oligonucleotide
gucccaaguugucgauccc

SEQ ID NO: 2288520 - RNA, 19 nt, Artificial Sequence
  Description of Artificial Sequence: Synthetic oligonucleotide
gggugggaacaguacaaga

SEQ ID NO: 2288521 - RNA, 19 nt, Artificial Sequence
  Description of Artificial Sequence: Synthetic oligonucleotide
ccucagauacguccuuggc

SEQ ID NO: 2288522 - RNA, 19 nt, Artificial Sequence
  Description of Artificial Sequence: Synthetic oligonucleotide
gcaccugacacugacaggu

SEQ ID NO: 2288523 - RNA, 19 nt, Artificial Sequence
  Description of Artificial Sequence: Synthetic oligonucleotide
augucuccucagauacguc

SEQ ID NO: 2288524 - RNA, 19 nt, Artificial Sequence
  Description of Artificial Sequence: Synthetic oligonucleotide
gcccuuucuaaaaucuaac

SEQ ID NO: 2288525 - RNA, 19 nt, Artificial Sequence
  Description of Artificial Sequence: Synthetic oligonucleotide
cccgauguugguuggacga

SEQ ID NO: 2288526 - RNA, 19 nt, Artificial Sequence
  Description of Artificial Sequence: Synthetic oligonucleotide
uuguuccaaauaggcccac

SEQ ID NO: 2288527 - RNA, 19 nt, Artificial Sequence
  Description of Artificial Sequence: Synthetic oligonucleotide
ggcaaacgccacaaacagc

SEQ ID NO: 2288528 - RNA, 19 nt, Artificial Sequence
  Description of Artificial Sequence: Synthetic oligonucleotide
ucuugccggcucugcugug

SEQ ID NO: 2288529 - RNA, 19 nt, Artificial Sequence
  Description of Artificial Sequence: Synthetic oligonucleotide
agaggucagcugucaggau

SEQ ID NO: 2288530 - RNA, 19 nt, Artificial Sequence
  Description of Artificial Sequence: Synthetic oligonucleotide
cacaugggaaucuguggcu

SEQ ID NO: 2288531 - RNA, 19 nt, Artificial Sequence
  Description of Artificial Sequence: Synthetic oligonucleotide
uaaucaccagcggcaugaa

SEQ ID NO: 2288532 - RNA, 19 nt, Artificial Sequence
  Description of Artificial Sequence: Synthetic oligonucleotide
acacuacccuugggucugc

SEQ ID NO: 2288533 - RNA, 19 nt, Artificial Sequence
  Description of Artificial Sequence: Synthetic oligonucleotide
ggugggaacaguacaagau

SEQ ID NO: 2288534 - RNA, 19 nt, Artificial Sequence
  Description of Artificial Sequence: Synthetic oligonucleotide
gauacguccuuggcagugu

SEQ ID NO: 2288535 - RNA, 19 nt, Artificial Sequence
  Description of Artificial Sequence: Synthetic oligonucleotide
gcgacacugcuuucuugcc

SEQ ID NO: 2288536 - RNA, 19 nt, Artificial Sequence
  Description of Artificial Sequence: Synthetic oligonucleotide
gucagaaaccuuggagcaa

SEQ ID NO: 2288537 - RNA, 19 nt, Artificial Sequence
  Description of Artificial Sequence: Synthetic oligonucleotide
uaggcccaccauuccuaaa

SEQ ID NO: 2288538 - RNA, 19 nt, Artificial Sequence
  Description of Artificial Sequence: Synthetic oligonucleotide
gcuacauguugacacugua

SEQ ID NO: 2288539 - RNA, 19 nt, Artificial Sequence
  Description of Artificial Sequence: Synthetic oligonucleotide
agaugcaauccgacucaga

SEQ ID NO: 2288540 - RNA, 19 nt, Artificial Sequence
  Description of Artificial Sequence: Synthetic oligonucleotide
cccaaguuccuuuauuaua

SEQ ID NO: 2288541 - RNA, 19 nt, Artificial Sequence
  Description of Artificial Sequence: Synthetic oligonucleotide
cacuguacugaggagcugu

SEQ ID NO: 2288542 - RNA, 19 nt, Artificial Sequence
  Description of Artificial Sequence: Synthetic oligonucleotide
ugggaaucuguggcuuguc

SEQ ID NO: 2288543 - RNA, 19 nt, Artificial Sequence
  Description of Artificial Sequence: Synthetic oligonucleotide
caggauguagagcccugaa

SEQ ID NO: 2288544 - RNA, 19 nt, Artificial Sequence
  Description of Artificial Sequence: Synthetic oligonucleotide
gagacaccgcucuccucaa

SEQ ID NO: 2288545 - RNA, 19 nt, Artificial Sequence
  Description of Artificial Sequence: Synthetic oligonucleotide
gcguguuugggugggaaca

SEQ ID NO: 2288546 - RNA, 19 nt, Artificial Sequence
  Description of Artificial Sequence: Synthetic oligonucleotide
agagcccugaaaacuuaua

SEQ ID NO: 2288547 - RNA, 19 nt, Artificial Sequence
  Description of Artificial Sequence: Synthetic oligonucleotide
acacuguacugaggagcug

SEQ ID NO: 2288548 - RNA, 19 nt, Artificial Sequence
  Description of Artificial Sequence: Synthetic oligonucleotide
cucagaggguauucacucu

SEQ ID NO: 2288549 - RNA, 19 nt, Artificial Sequence
  Description of Artificial Sequence: Synthetic oligonucleotide
ugugcguguuuggguggga

SEQ ID NO: 2288550 - RNA, 19 nt, Artificial Sequence
  Description of Artificial Sequence: Synthetic oligonucleotide
ggucgucugagacaccgcu

SEQ ID NO: 2288551 - RNA, 19 nt, Artificial Sequence
  Description of Artificial Sequence: Synthetic oligonucleotide
aguugucgaucccgauguu

SEQ ID NO: 2288552 - RNA, 19 nt, Artificial Sequence
  Description of Artificial Sequence: Synthetic oligonucleotide
gucgucugagacaccgcuc

SEQ ID NO: 2288553 - RNA, 19 nt, Artificial Sequence
  Description of Artificial Sequence: Synthetic oligonucleotide
cugaggcuacauguugaca

SEQ ID NO: 2288554 - RNA, 19 nt, Artificial Sequence
  Description of Artificial Sequence: Synthetic oligonucleotide
ggguauucacucuggggcu

SEQ ID NO: 2288555 - RNA, 19 nt, Artificial Sequence
  Description of Artificial Sequence: Synthetic oligonucleotide
cuugggucugcucuacuuu

SEQ ID NO: 2288556 - RNA, 19 nt, Artificial Sequence
  Description of Artificial Sequence: Synthetic oligonucleotide
cgacucagaggguauucac

SEQ ID NO: 2288557 - RNA, 19 nt, Artificial Sequence
  Description of Artificial Sequence: Synthetic oligonucleotide
uauucacucuggggcugau

SEQ ID NO: 2288558 - RNA, 19 nt, Artificial Sequence
  Description of Artificial Sequence: Synthetic oligonucleotide
guccucuuacagucuagau

SEQ ID NO: 2288559 - RNA, 19 nt, Artificial Sequence
  Description of Artificial Sequence: Synthetic oligonucleotide
cgauguugguuggacgagg

SEQ ID NO: 2288560 - RNA, 19 nt, Artificial Sequence
  Description of Artificial Sequence: Synthetic oligonucleotide
gggaacaguacaagaugaa

SEQ ID NO: 2288561 - RNA, 19 nt, Artificial Sequence
  Description of Artificial Sequence: Synthetic oligonucleotide
gcucugcucuccucuggug

SEQ ID NO: 2288562 - RNA, 19 nt, Artificial Sequence
  Description of Artificial Sequence: Synthetic oligonucleotide
uccuggcaauguccuuaua

SEQ ID NO: 2288563 - RNA, 19 nt, Artificial Sequence
  Description of Artificial Sequence: Synthetic oligonucleotide
ggucugcucuacuuuggua

SEQ ID NO: 2288564 - RNA, 19 nt, Artificial Sequence
  Description of Artificial Sequence: Synthetic oligonucleotide
gggcgacacugcuuucuug

SEQ ID NO: 2288565 - RNA, 19 nt, Artificial Sequence
  Description of Artificial Sequence: Synthetic oligonucleotide
cccaaguugucgaucccga

SEQ ID NO: 2288566 - RNA, 19 nt, Artificial Sequence
  Description of Artificial Sequence: Synthetic oligonucleotide
gguugacagaaguggcacu

SEQ ID NO: 2288567 - RNA, 19 nt, Artificial Sequence
  Description of Artificial Sequence: Synthetic oligonucleotide
gguacucaacacacagaaa

SEQ ID NO: 2288568 - RNA, 19 nt, Artificial Sequence
  Description of Artificial Sequence: Synthetic oligonucleotide
gacugcagagugggucguc

SEQ ID NO: 2288569 - RNA, 19 nt, Artificial Sequence
  Description of Artificial Sequence: Synthetic oligonucleotide
aaguggcacuggugaccuu

SEQ ID NO: 2288570 - RNA, 19 nt, Artificial Sequence
  Description of Artificial Sequence: Synthetic oligonucleotide
ccgauguugguuggacgag

SEQ ID NO: 2288571 - RNA, 19 nt, Artificial Sequence
  Description of Artificial Sequence: Synthetic oligonucleotide
ugccggcucugcugugcgu

SEQ ID NO: 2288572 - RNA, 19 nt, Artificial Sequence
  Description of Artificial Sequence: Synthetic oligonucleotide
acauuacgcugaggcuaca

SEQ ID NO: 2288573 - RNA, 19 nt, Artificial Sequence
  Description of Artificial Sequence: Synthetic oligonucleotide
gcauucugguggcugacau

SEQ ID NO: 2288574 - RNA, 19 nt, Artificial Sequence
  Description of Artificial Sequence: Synthetic oligonucleotide
caccagcggcaugaagcug

SEQ ID NO: 2288575 - RNA, 19 nt, Artificial Sequence
  Description of Artificial Sequence: Synthetic oligonucleotide
cgcaauucuccagucccag

SEQ ID NO: 2288576 - RNA, 19 nt, Artificial Sequence
  Description of Artificial Sequence: Synthetic oligonucleotide
auccgacucagaggguauu

SEQ ID NO: 2288577 - RNA, 19 nt, Artificial Sequence
  Description of Artificial Sequence: Synthetic oligonucleotide
cgaucccgauguugguugg

SEQ ID NO: 2288578 - RNA, 19 nt, Artificial Sequence
  Description of Artificial Sequence: Synthetic oligonucleotide
gugcguguuugggugggaa

SEQ ID NO: 2288579 - RNA, 19 nt, Artificial Sequence
  Description of Artificial Sequence: Synthetic oligonucleotide
aggagcugucagaaaccuu

SEQ ID NO: 2288580 - RNA, 19 nt, Artificial Sequence
  Description of Artificial Sequence: Synthetic oligonucleotide
ggcugaugucuccucagau

SEQ ID NO: 2288581 - RNA, 19 nt, Artificial Sequence
  Description of Artificial Sequence: Synthetic oligonucleotide
gcucuacuuugguauuucu

SEQ ID NO: 2288582 - RNA, 19 nt, Artificial Sequence
  Description of Artificial Sequence: Synthetic oligonucleotide
cauucugguggcugacauu

SEQ ID NO: 2288583 - RNA, 19 nt, Artificial Sequence
  Description of Artificial Sequence: Synthetic oligonucleotide
caccugacacugacaggua

SEQ ID NO: 2288584 - RNA, 19 nt, Artificial Sequence
  Description of Artificial Sequence: Synthetic oligonucleotide
cacuguccucuuacagucu

SEQ ID NO: 2288585 - RNA, 19 nt, Artificial Sequence
  Description of Artificial Sequence: Synthetic oligonucleotide
gucgaucccgauguugguu

SEQ ID NO: 2288586 - RNA, 19 nt, Artificial Sequence
  Description of Artificial Sequence: Synthetic oligonucleotide
cagauacguccuuggcagu

SEQ ID NO: 2288587 - RNA, 19 nt, Artificial Sequence
  Description of Artificial Sequence: Synthetic oligonucleotide
caguggcccuuucuaaaau

SEQ ID NO: 2288588 - RNA, 19 nt, Artificial Sequence
  Description of Artificial Sequence: Synthetic oligonucleotide
ggucagcugucaggaugcc

SEQ ID NO: 2288589 - RNA, 19 nt, Artificial Sequence
  Description of Artificial Sequence: Synthetic oligonucleotide
gcaauucuccagucccagu

SEQ ID NO: 2288590 - RNA, 19 nt, Artificial Sequence
  Description of Artificial Sequence: Synthetic oligonucleotide
cauuacgcugaggcuacau

SEQ ID NO: 2288591 - RNA, 19 nt, Artificial Sequence
  Description of Artificial Sequence: Synthetic oligonucleotide
gggucgucugagacaccgc

SEQ ID NO: 2288592 - RNA, 19 nt, Artificial Sequence
  Description of Artificial Sequence: Synthetic oligonucleotide
ccacagaugcaauccgacu

SEQ ID NO: 2288593 - RNA, 19 nt, Artificial Sequence
  Description of Artificial Sequence: Synthetic oligonucleotide
gcgcaauucuccaguccca

SEQ ID NO: 2288594 - RNA, 19 nt, Artificial Sequence
  Description of Artificial Sequence: Synthetic oligonucleotide
cauuguucaguggcccuuu

SEQ ID NO: 2288595 - RNA, 19 nt, Artificial Sequence
  Description of Artificial Sequence: Synthetic oligonucleotide
gugggucgucugagacacc

SEQ ID NO: 2288596 - RNA, 19 nt, Artificial Sequence
  Description of Artificial Sequence: Synthetic oligonucleotide
cugcucuacuuugguauuu

SEQ ID NO: 2288597 - RNA, 19 nt, Artificial Sequence
  Description of Artificial Sequence: Synthetic oligonucleotide
ccuugggucugcucuacuu

SEQ ID NO: 2288598 - RNA, 19 nt, Artificial Sequence
  Description of Artificial Sequence: Synthetic oligonucleotide
ccuuaaucaccagcggcau

SEQ ID NO: 2288599 - RNA, 19 nt, Artificial Sequence
  Description of Artificial Sequence: Synthetic oligonucleotide
ccucaagcuucagucccaa

SEQ ID NO: 2288600 - RNA, 19 nt, Artificial Sequence
  Description of Artificial Sequence: Synthetic oligonucleotide
ggggcgacacugcuuucuu

SEQ ID NO: 2288601 - RNA, 19 nt, Artificial Sequence
  Description of Artificial Sequence: Synthetic oligonucleotide
ccaaguugucgaucccgau

SEQ ID NO: 2288602 - RNA, 19 nt, Artificial Sequence
  Description of Artificial Sequence: Synthetic oligonucleotide
cacuuaccccaaguuccuu

SEQ ID NO: 2288603 - RNA, 19 nt, Artificial Sequence
  Description of Artificial Sequence: Synthetic oligonucleotide
ccagcggcaugaagcugua

SEQ ID NO: 2288604 - RNA, 19 nt, Artificial Sequence
  Description of Artificial Sequence: Synthetic oligonucleotide
ccauuguucaguggcccuu

SEQ ID NO: 2288605 - RNA, 19 nt, Artificial Sequence
  Description of Artificial Sequence: Synthetic oligonucleotide
cacuacccuugggucugcu

SEQ ID NO: 2288606 - RNA, 19 nt, Artificial Sequence
  Description of Artificial Sequence: Synthetic oligonucleotide
ccggcucugcugugcgugu

SEQ ID NO: 2288607 - RNA, 19 nt, Artificial Sequence
  Description of Artificial Sequence: Synthetic oligonucleotide
cccuugggucugcucuacu

SEQ ID NO: 2288608 - RNA, 19 nt, Artificial Sequence
  Description of Artificial Sequence: Synthetic oligonucleotide
acgaucuugcgguagaggc

SEQ ID NO: 2288609 - RNA, 19 nt, Artificial Sequence
  Description of Artificial Sequence: Synthetic oligonucleotide
ugggacaucaccauggcug

SEQ ID NO: 2288610 - RNA, 19 nt, Artificial Sequence
  Description of Artificial Sequence: Synthetic oligonucleotide
aggcuuguaacucggaggc

SEQ ID NO: 2288611 - RNA, 19 nt, Artificial Sequence
  Description of Artificial Sequence: Synthetic oligonucleotide
aggaacagaggcuuguaac

SEQ ID NO: 2288612 - RNA, 19 nt, Artificial Sequence
  Description of Artificial Sequence: Synthetic oligonucleotide
aaaagccccgcagucaggc

SEQ ID NO: 2288613 - RNA, 19 nt, Artificial Sequence
  Description of Artificial Sequence: Synthetic oligonucleotide
gauggagacaggcaggcgc

SEQ ID NO: 2288614 - RNA, 19 nt, Artificial Sequence
  Description of Artificial Sequence: Synthetic oligonucleotide
gaggcuuguaacucggagg

SEQ ID NO: 2288615 - RNA, 19 nt, Artificial Sequence
  Description of Artificial Sequence: Synthetic oligonucleotide
gaucuugcgguagaggccg

SEQ ID NO: 2288616 - RNA, 19 nt, Artificial Sequence
  Description of Artificial Sequence: Synthetic oligonucleotide
acgaugagaccccagauga

SEQ ID NO: 2288617 - RNA, 19 nt, Artificial Sequence
  Description of Artificial Sequence: Synthetic oligonucleotide
gugaggaacguguaggugc

SEQ ID NO: 2288618 - RNA, 19 nt, Artificial Sequence
  Description of Artificial Sequence: Synthetic oligonucleotide
aagggcgugacgaucuugc

SEQ ID NO: 2288619 - RNA, 19 nt, Artificial Sequence
  Description of Artificial Sequence: Synthetic oligonucleotide
aucaccauggcugcggcgc

SEQ ID NO: 2288620 - RNA, 19 nt, Artificial Sequence
  Description of Artificial Sequence: Synthetic oligonucleotide
cucuauacggcuguagucc

SEQ ID NO: 2288621 - RNA, 19 nt, Artificial Sequence
  Description of Artificial Sequence: Synthetic oligonucleotide
agcaccucgcuguagggcg

SEQ ID NO: 2288622 - RNA, 19 nt, Artificial Sequence
  Description of Artificial Sequence: Synthetic oligonucleotide
caggcuaggaguucgcccg

SEQ ID NO: 2288623 - RNA, 19 nt, Artificial Sequence
  Description of Artificial Sequence: Synthetic oligonucleotide
agcacggcggcuuagacau

SEQ ID NO: 2288624 - RNA, 19 nt, Artificial Sequence
  Description of Artificial Sequence: Synthetic oligonucleotide
gucgcggcggcucagaaag

SEQ ID NO: 2288625 - RNA, 19 nt, Artificial Sequence
  Description of Artificial Sequence: Synthetic oligonucleotide
gaugagaccccagaugagc

SEQ ID NO: 2288626 - RNA, 19 nt, Artificial Sequence
  Description of Artificial Sequence: Synthetic oligonucleotide
ugaggaacguguaggugcc

SEQ ID NO: 2288627 - RNA, 19 nt, Artificial Sequence
  Description of Artificial Sequence: Synthetic oligonucleotide
gacgaugagaccccagaug

SEQ ID NO: 2288628 - RNA, 19 nt, Artificial Sequence
  Description of Artificial Sequence: Synthetic oligonucleotide
agaggcuuguaacucggag

SEQ ID NO: 2288629 - RNA, 19 nt, Artificial Sequence
  Description of Artificial Sequence: Synthetic oligonucleotide
cagaugagccagaagccgg

SEQ ID NO: 2288630 - RNA, 19 nt, Artificial Sequence
  Description of Artificial Sequence: Synthetic oligonucleotide
aggaguucgcccguggggc

SEQ ID NO: 2288631 - RNA, 19 nt, Artificial Sequence
  Description of Artificial Sequence: Synthetic oligonucleotide
uccgacuccgcuuggcgcg

SEQ ID NO: 2288632 - RNA, 19 nt, Artificial Sequence
  Description of Artificial Sequence: Synthetic oligonucleotide
gagcaggacgaugagaccc

SEQ ID NO: 2288633 - RNA, 19 nt, Artificial Sequence
  Description of Artificial Sequence: Synthetic oligonucleotide
uguccgacuccgcuuggcg

SEQ ID NO: 2288634 - RNA, 19 nt, Artificial Sequence
  Description of Artificial Sequence: Synthetic oligonucleotide
aacguguaggugcccuggg

SEQ ID NO: 2288635 - RNA, 19 nt, Artificial Sequence
  Description of Artificial Sequence: Synthetic oligonucleotide
ucaggcuaggaguucgccc

SEQ ID NO: 2288636 - RNA, 19 nt, Artificial Sequence
  Description of Artificial Sequence: Synthetic oligonucleotide
augagaccccagaugagcc

SEQ ID NO: 2288637 - RNA, 19 nt, Artificial Sequence
  Description of Artificial Sequence: Synthetic oligonucleotide
ugagcgugcgcgugcacgg

SEQ ID NO: 2288638 - RNA, 19 nt, Artificial Sequence
  Description of Artificial Sequence: Synthetic oligonucleotide
uauacggcuguaguccucc

SEQ ID NO: 2288639 - RNA, 19 nt, Artificial Sequence
  Description of Artificial Sequence: Synthetic oligonucleotide
uccgugagcaccucgcugu

SEQ ID NO: 2288640 - RNA, 19 nt, Artificial Sequence
  Description of Artificial Sequence: Synthetic oligonucleotide
agucgcuccuccuggcgcc

SEQ ID NO: 2288641 - RNA, 19 nt, Artificial Sequence
  Description of Artificial Sequence: Synthetic oligonucleotide
aagccggcgaagcacguga

SEQ ID NO: 2288642 - RNA, 19 nt, Artificial Sequence
  Description of Artificial Sequence: Synthetic oligonucleotide
ucuauacggcuguaguccu

SEQ ID NO: 2288643 - RNA, 19 nt, Artificial Sequence
  Description of Artificial Sequence: Synthetic oligonucleotide
acauguccgacuccgcuug

SEQ ID NO: 2288644 - RNA, 19 nt, Artificial Sequence
  Description of Artificial Sequence: Synthetic oligonucleotide
caagcuccaugcuccaggg

SEQ ID NO: 2288645 - RNA, 19 nt, Artificial Sequence
  Description of Artificial Sequence: Synthetic oligonucleotide
aagcacgugaggaacgugu

SEQ ID NO: 2288646 - RNA, 19 nt, Artificial Sequence
  Description of Artificial Sequence: Synthetic oligonucleotide
cagaagccggcgaagcacg

SEQ ID NO: 2288647 - RNA, 19 nt, Artificial Sequence
  Description of Artificial Sequence: Synthetic oligonucleotide
auggagacaggcaggcgcc

SEQ ID NO: 2288648 - RNA, 19 nt, Artificial Sequence
  Description of Artificial Sequence: Synthetic oligonucleotide
uacggcuguaguccuccgg

SEQ ID NO: 2288649 - RNA, 19 nt, Artificial Sequence
  Description of Artificial Sequence: Synthetic oligonucleotide
ugagcaccucgcuguaggg

SEQ ID NO: 2288650 - RNA, 19 nt, Artificial Sequence
  Description of Artificial Sequence: Synthetic oligonucleotide
aggacgaugagaccccaga

SEQ ID NO: 2288651 - RNA, 19 nt, Artificial Sequence
  Description of Artificial Sequence: Synthetic oligonucleotide
cuuguaacucggaggcggc

SEQ ID NO: 2288652 - RNA, 19 nt, Artificial Sequence
  Description of Artificial Sequence: Synthetic oligonucleotide
agacauguccgacuccgcu

SEQ ID NO: 2288653 - RNA, 19 nt, Artificial Sequence
  Description of Artificial Sequence: Synthetic oligonucleotide
uguaacucggaggcggcug

SEQ ID NO: 2288654 - RNA, 19 nt, Artificial Sequence
  Description of Artificial Sequence: Synthetic oligonucleotide
gcuuguaacucggaggcgg

SEQ ID NO: 2288655 - RNA, 19 nt, Artificial Sequence
  Description of Artificial Sequence: Synthetic oligonucleotide
gacgaucuugcgguagagg

SEQ ID NO: 2288656 - RNA, 19 nt, Artificial Sequence
  Description of Artificial Sequence: Synthetic oligonucleotide
cuccggaacaaggggaugg

SEQ ID NO: 2288657 - RNA, 19 nt, Artificial Sequence
  Description of Artificial Sequence: Synthetic oligonucleotide
caaggggauggagacaggc

SEQ ID NO: 2288658 - RNA, 19 nt, Artificial Sequence
  Description of Artificial Sequence: Synthetic oligonucleotide
agaaagggcgugacgaucu

SEQ ID NO: 2288659 - RNA, 19 nt, Artificial Sequence
  Description of Artificial Sequence: Synthetic oligonucleotide
gaacagaggcuuguaacuc

SEQ ID NO: 2288660 - RNA, 19 nt, Artificial Sequence
  Description of Artificial Sequence: Synthetic oligonucleotide
gugcgagugagcgugcgcg

SEQ ID NO: 2288661 - RNA, 19 nt, Artificial Sequence
  Description of Artificial Sequence: Synthetic oligonucleotide
acggcuguaguccuccgga

SEQ ID NO: 2288662 - RNA, 19 nt, Artificial Sequence
  Description of Artificial Sequence: Synthetic oligonucleotide
uccagcuggggaagacccg

SEQ ID NO: 2288663 - RNA, 19 nt, Artificial Sequence
  Description of Artificial Sequence: Synthetic oligonucleotide
agcaggacgaugagacccc

SEQ ID NO: 2288664 - RNA, 19 nt, Artificial Sequence
  Description of Artificial Sequence: Synthetic oligonucleotide
cagagggcggggcagggcg

SEQ ID NO: 2288665 - RNA, 19 nt, Artificial Sequence
  Description of Artificial Sequence: Synthetic oligonucleotide
cuuagacauguccgacucc

SEQ ID NO: 2288666 - RNA, 19 nt, Artificial Sequence
  Description of Artificial Sequence: Synthetic oligonucleotide
ugcacgggcgccuccagac

SEQ ID NO: 2288667 - RNA, 19 nt, Artificial Sequence
  Description of Artificial Sequence: Synthetic oligonucleotide
acagaggcuuguaacucgg

SEQ ID NO: 2288668 - RNA, 19 nt, Artificial Sequence
  Description of Artificial Sequence: Synthetic oligonucleotide
agccagaagccggcgaagc

SEQ ID NO: 2288669 - RNA, 19 nt, Artificial Sequence
  Description of Artificial Sequence: Synthetic oligonucleotide
gagaccccagaugagccag

SEQ ID NO: 2288670 - RNA, 19 nt, Artificial Sequence
  Description of Artificial Sequence: Synthetic oligonucleotide
uccuggcgccguuugaggc

SEQ ID NO: 2288671 - RNA, 19 nt, Artificial Sequence
  Description of Artificial Sequence: Synthetic oligonucleotide
ugcagcgccgaaguguagc

SEQ ID NO: 2288672 - RNA, 19 nt, Artificial Sequence
  Description of Artificial Sequence: Synthetic oligonucleotide
caggcgccaagcuccaugc

SEQ ID NO: 2288673 - RNA, 19 nt, Artificial Sequence
  Description of Artificial Sequence: Synthetic oligonucleotide
ucagaaagggcgugacgau

SEQ ID NO: 2288674 - RNA, 19 nt, Artificial Sequence
  Description of Artificial Sequence: Synthetic oligonucleotide
guaacucggaggcggcugc

SEQ ID NO: 2288675 - RNA, 19 nt, Artificial Sequence
  Description of Artificial Sequence: Synthetic oligonucleotide
guagccccgguccaggaac

SEQ ID NO: 2288676 - RNA, 19 nt, Artificial Sequence
  Description of Artificial Sequence: Synthetic oligonucleotide
uagcacggcggcuuagaca

SEQ ID NO: 2288677 - RNA, 19 nt, Artificial Sequence
  Description of Artificial Sequence: Synthetic oligonucleotide
acgugaggaacguguaggu

SEQ ID NO: 2288678 - RNA, 19 nt, Artificial Sequence
  Description of Artificial Sequence: Synthetic oligonucleotide
cagugcgugauggugcggg

SEQ ID NO: 2288679 - RNA, 19 nt, Artificial Sequence
  Description of Artificial Sequence: Synthetic oligonucleotide
agcgugcgcgugcacgggc

SEQ ID NO: 2288680 - RNA, 19 nt, Artificial Sequence
  Description of Artificial Sequence: Synthetic oligonucleotide
agcgggugcacgugcaugu

SEQ ID NO: 2288681 - RNA, 19 nt, Artificial Sequence
  Description of Artificial Sequence: Synthetic oligonucleotide
uagacauguccgacuccgc

SEQ ID NO: 2288682 - RNA, 19 nt, Artificial Sequence
  Description of Artificial Sequence: Synthetic oligonucleotide
gaaguguagccccggucca

SEQ ID NO: 2288683 - RNA, 19 nt, Artificial Sequence
  Description of Artificial Sequence: Synthetic oligonucleotide
gcugcugagcucugagucg

SEQ ID NO: 2288684 - RNA, 19 nt, Artificial Sequence
  Description of Artificial Sequence: Synthetic oligonucleotide
uguaguccuccggaacaag

SEQ ID NO: 2288685 - RNA, 19 nt, Artificial Sequence
  Description of Artificial Sequence: Synthetic oligonucleotide
gauggugcgggugcgcgug

SEQ ID NO: 2288686 - RNA, 19 nt, Artificial Sequence
  Description of Artificial Sequence: Synthetic oligonucleotide
aaguguagccccgguccag

SEQ ID NO: 2288687 - RNA, 19 nt, Artificial Sequence
  Description of Artificial Sequence: Synthetic oligonucleotide
gagggugcggcagugcgug

SEQ ID NO: 2288688 - RNA, 19 nt, Artificial Sequence
  Description of Artificial Sequence: Synthetic oligonucleotide
aagccccgcagucaggcua

SEQ ID NO: 2288689 - RNA, 19 nt, Artificial Sequence
  Description of Artificial Sequence: Synthetic oligonucleotide
gcuuagacauguccgacuc

SEQ ID NO: 2288690 - RNA, 19 nt, Artificial Sequence
  Description of Artificial Sequence: Synthetic oligonucleotide
cugcggucagccugcaggc

SEQ ID NO: 2288691 - RNA, 19 nt, Artificial Sequence
  Description of Artificial Sequence: Synthetic oligonucleotide
agaggugcgguggcggagg

SEQ ID NO: 2288692 - RNA, 19 nt, Artificial Sequence
  Description of Artificial Sequence: Synthetic oligonucleotide
gugagcgugcgcgugcacg

SEQ ID NO: 2288693 - RNA, 19 nt, Artificial Sequence
  Description of Artificial Sequence: Synthetic oligonucleotide
cacgggcgccuccagacgg

SEQ ID NO: 2288694 - RNA, 19 nt, Artificial Sequence
  Description of Artificial Sequence: Synthetic oligonucleotide
ugacgaucuugcgguagag

SEQ ID NO: 2288695 - RNA, 19 nt, Artificial Sequence
  Description of Artificial Sequence: Synthetic oligonucleotide
cuccagacggcugcggugc

SEQ ID NO: 2288696 - RNA, 19 nt, Artificial Sequence
  Description of Artificial Sequence: Synthetic oligonucleotide
uguaggugcccugggacau

SEQ ID NO: 2288697 - RNA, 19 nt, Artificial Sequence
  Description of Artificial Sequence: Synthetic oligonucleotide
uguccgugagcaccucgcu

SEQ ID NO: 2288698 - RNA, 19 nt, Artificial Sequence
  Description of Artificial Sequence: Synthetic oligonucleotide
ugcgcgugcggcugcgcgg

SEQ ID NO: 2288699 - RNA, 19 nt, Artificial Sequence
  Description of Artificial Sequence: Synthetic oligonucleotide
ccaagcuccaugcuccagg

SEQ ID NO: 2288700 - RNA, 19 nt, Artificial Sequence
  Description of Artificial Sequence: Synthetic oligonucleotide
gggcgugacgaucuugcgg

SEQ ID NO: 2288701 - RNA, 19 nt, Artificial Sequence
  Description of Artificial Sequence: Synthetic oligonucleotide
aaagccccgcagucaggcu

SEQ ID NO: 2288702 - RNA, 19 nt, Artificial Sequence
  Description of Artificial Sequence: Synthetic oligonucleotide
aacucggaggcggcugcuc

SEQ ID NO: 2288703 - RNA, 19 nt, Artificial Sequence
  Description of Artificial Sequence: Synthetic oligonucleotide
cuccuggcgccguuugagg

SEQ ID NO: 2288704 - RNA, 19 nt, Artificial Sequence
  Description of Artificial Sequence: Synthetic oligonucleotide
ggcagugcgugauggugcg

SEQ ID NO: 2288705 - RNA, 19 nt, Artificial Sequence
  Description of Artificial Sequence: Synthetic oligonucleotide
aggugcagcgccgaagugu

SEQ ID NO: 2288706 - RNA, 19 nt, Artificial Sequence
  Description of Artificial Sequence: Synthetic oligonucleotide
cucgcuguagggcggcggc

SEQ ID NO: 2288707 - RNA, 19 nt, Artificial Sequence
  Description of Artificial Sequence: Synthetic oligonucleotide
ggaacagaggcuuguaacu

SEQ ID NO: 2288708 - RNA, 19 nt, Artificial Sequence
  Description of Artificial Sequence: Synthetic oligonucleotide
uguagccccgguccaggaa

SEQ ID NO: 2288709 - RNA, 19 nt, Artificial Sequence
  Description of Artificial Sequence: Synthetic oligonucleotide
auguccgacuccgcuuggc

SEQ ID NO: 2288710 - RNA, 19 nt, Artificial Sequence
  Description of Artificial Sequence: Synthetic oligonucleotide
agucaggcuaggaguucgc

SEQ ID NO: 2288711 - RNA, 19 nt, Artificial Sequence
  Description of Artificial Sequence: Synthetic oligonucleotide
aggcggcacggagaggugc

SEQ ID NO: 2288712 - RNA, 19 nt, Artificial Sequence
  Description of Artificial Sequence: Synthetic oligonucleotide
cagucgcuccuccuggcgc

SEQ ID NO: 2288713 - RNA, 19 nt, Artificial Sequence
  Description of Artificial Sequence: Synthetic oligonucleotide
caucaccauggcugcggcg

SEQ ID NO: 2288714 - RNA, 19 nt, Artificial Sequence
  Description of Artificial Sequence: Synthetic oligonucleotide
ccagaugagccagaagccg

SEQ ID NO: 2288715 - RNA, 19 nt, Artificial Sequence
  Description of Artificial Sequence: Synthetic oligonucleotide
uagaggccgcgaguguccg

SEQ ID NO: 2288716 - RNA, 19 nt, Artificial Sequence
  Description of Artificial Sequence: Synthetic oligonucleotide
guccgacuccgcuuggcgc

SEQ ID NO: 2288717 - RNA, 19 nt, Artificial Sequence
  Description of Artificial Sequence: Synthetic oligonucleotide
guguaggugcccugggaca

SEQ ID NO: 2288718 - RNA, 19 nt, Artificial Sequence
  Description of Artificial Sequence: Synthetic oligonucleotide
ggcgcggguagcuccaggg

SEQ ID NO: 2288719 - RNA, 19 nt, Artificial Sequence
  Description of Artificial Sequence: Synthetic oligonucleotide
auacggcuguaguccuccg

SEQ ID NO: 2288720 - RNA, 19 nt, Artificial Sequence
  Description of Artificial Sequence: Synthetic oligonucleotide
guagaggccgcgagugucc

SEQ ID NO: 2288721 - RNA, 19 nt, Artificial Sequence
  Description of Artificial Sequence: Synthetic oligonucleotide
agggcucgcagguucugcu

SEQ ID NO: 2288722 - RNA, 19 nt, Artificial Sequence
  Description of Artificial Sequence: Synthetic oligonucleotide
cucagucgcuccuccuggc

SEQ ID NO: 2288723 - RNA, 19 nt, Artificial Sequence
  Description of Artificial Sequence: Synthetic oligonucleotide
gugacgaucuugcgguaga

SEQ ID NO: 2288724 - RNA, 19 nt, Artificial Sequence
  Description of Artificial Sequence: Synthetic oligonucleotide
gcuggggaagacccggcgg

SEQ ID NO: 2288725 - RNA, 19 nt, Artificial Sequence
  Description of Artificial Sequence: Synthetic oligonucleotide
uccagacggcugcggugcg

SEQ ID NO: 2288726 - RNA, 19 nt, Artificial Sequence
  Description of Artificial Sequence: Synthetic oligonucleotide
ugcaguccaagggaagcau

SEQ ID NO: 2288727 - RNA, 19 nt, Artificial Sequence
  Description of Artificial Sequence: Synthetic oligonucleotide
agacccggcggcugcgguc

SEQ ID NO: 2288728 - RNA, 19 nt, Artificial Sequence
  Description of Artificial Sequence: Synthetic oligonucleotide
aggaacguguaggugcccu

SEQ ID NO: 2288729 - RNA, 19 nt, Artificial Sequence
  Description of Artificial Sequence: Synthetic oligonucleotide
uagcuccagggccgaggcg

SEQ ID NO: 2288730 - RNA, 19 nt, Artificial Sequence
  Description of Artificial Sequence: Synthetic oligonucleotide
guagcacggcggcuuagac

SEQ ID NO: 2288731 - RNA, 19 nt, Artificial Sequence
  Description of Artificial Sequence: Synthetic oligonucleotide
gugcacgugcaugugcgag

SEQ ID NO: 2288732 - RNA, 19 nt, Artificial Sequence
  Description of Artificial Sequence: Synthetic oligonucleotide
aagacccggcggcugcggu

SEQ ID NO: 2288733 - RNA, 19 nt, Artificial Sequence
  Description of Artificial Sequence: Synthetic oligonucleotide
cuggggaggugcagcgccg

SEQ ID NO: 2288734 - RNA, 19 nt, Artificial Sequence
  Description of Artificial Sequence: Synthetic oligonucleotide
guccgugagcaccucgcug

SEQ ID NO: 2288735 - RNA, 19 nt, Artificial Sequence
  Description of Artificial Sequence: Synthetic oligonucleotide
agugagcgugcgcgugcac

SEQ ID NO: 2288736 - RNA, 19 nt, Artificial Sequence
  Description of Artificial Sequence: Synthetic oligonucleotide
cagaaagggcgugacgauc

SEQ ID NO: 2288737 - RNA, 19 nt, Artificial Sequence
  Description of Artificial Sequence: Synthetic oligonucleotide
gaagcacgugaggaacgug

SEQ ID NO: 2288738 - RNA, 19 nt, Artificial Sequence
  Description of Artificial Sequence: Synthetic oligonucleotide
cugagucgguccagcuggg

SEQ ID NO: 2288739 - RNA, 19 nt, Artificial Sequence
  Description of Artificial Sequence: Synthetic oligonucleotide
cuccgcuuggcgcggguag

SEQ ID NO: 2288740 - RNA, 19 nt, Artificial Sequence
  Description of Artificial Sequence: Synthetic oligonucleotide
ccaagggaagcauuuaaaa

SEQ ID NO: 2288741 - RNA, 19 nt, Artificial Sequence
  Description of Artificial Sequence: Synthetic oligonucleotide
uaggugcccugggacauca

SEQ ID NO: 2288742 - RNA, 19 nt, Artificial Sequence
  Description of Artificial Sequence: Synthetic oligonucleotide
cuauacggcuguaguccuc

SEQ ID NO: 2288743 - RNA, 19 nt, Artificial Sequence
  Description of Artificial Sequence: Synthetic oligonucleotide
cauggcugcggcgcaggcg

SEQ ID NO: 2288744 - RNA, 19 nt, Artificial Sequence
  Description of Artificial Sequence: Synthetic oligonucleotide
guguccgugagcaccucgc

SEQ ID NO: 2288745 - RNA, 19 nt, Artificial Sequence
  Description of Artificial Sequence: Synthetic oligonucleotide
ggugcgguggcggagggug

SEQ ID NO: 2288746 - RNA, 19 nt, Artificial Sequence
  Description of Artificial Sequence: Synthetic oligonucleotide
ggcgugacgaucuugcggu

SEQ ID NO: 2288747 - RNA, 19 nt, Artificial Sequence
  Description of Artificial Sequence: Synthetic oligonucleotide
gcuaggaguucgcccgugg

SEQ ID NO: 2288748 - RNA, 19 nt, Artificial Sequence
  Description of Artificial Sequence: Synthetic oligonucleotide
cuggcgccguuugaggcgg

SEQ ID NO: 2288749 - RNA, 19 nt, Artificial Sequence
  Description of Artificial Sequence: Synthetic oligonucleotide
cuucuccgcgcugucgcgg

SEQ ID NO: 2288750 - RNA, 19 nt, Artificial Sequence
  Description of Artificial Sequence: Synthetic oligonucleotide
ugauggugcgggugcgcgu

SEQ ID NO: 2288751 - RNA, 19 nt, Artificial Sequence
  Description of Artificial Sequence: Synthetic oligonucleotide
ccucuauacggcuguaguc

SEQ ID NO: 2288752 - RNA, 19 nt, Artificial Sequence
  Description of Artificial Sequence: Synthetic oligonucleotide
gcgaguguccgugagcacc

SEQ ID NO: 2288753 - RNA, 19 nt, Artificial Sequence
  Description of Artificial Sequence: Synthetic oligonucleotide
uagccccgguccaggaaca

SEQ ID NO: 2288754 - RNA, 19 nt, Artificial Sequence
  Description of Artificial Sequence: Synthetic oligonucleotide
gaagacccggcggcugcgg

SEQ ID NO: 2288755 - RNA, 19 nt, Artificial Sequence
  Description of Artificial Sequence: Synthetic oligonucleotide
cacggagaggugcgguggc

SEQ ID NO: 2288756 - RNA, 19 nt, Artificial Sequence
  Description of Artificial Sequence: Synthetic oligonucleotide
uuguaacucggaggcggcu

SEQ ID NO: 2288757 - RNA, 19 nt, Artificial Sequence
  Description of Artificial Sequence: Synthetic oligonucleotide
agugcgugauggugcgggu

SEQ ID NO: 2288758 - RNA, 19 nt, Artificial Sequence
  Description of Artificial Sequence: Synthetic oligonucleotide
gucaggcuaggaguucgcc

SEQ ID NO: 2288759 - RNA, 19 nt, Artificial Sequence
  Description of Artificial Sequence: Synthetic oligonucleotide
uggcgcggguagcuccagg

SEQ ID NO: 2288760 - RNA, 19 nt, Artificial Sequence
  Description of Artificial Sequence: Synthetic oligonucleotide
gaagccggcgaagcacgug

SEQ ID NO: 2288761 - RNA, 19 nt, Artificial Sequence
  Description of Artificial Sequence: Synthetic oligonucleotide
gaggugcagcgccgaagug

SEQ ID NO: 2288762 - RNA, 19 nt, Artificial Sequence
  Description of Artificial Sequence: Synthetic oligonucleotide
ugucgcggcggcucagaaa

SEQ ID NO: 2288763 - RNA, 19 nt, Artificial Sequence
  Description of Artificial Sequence: Synthetic oligonucleotide
caggacgaugagaccccag

SEQ ID NO: 2288764 - RNA, 19 nt, Artificial Sequence
  Description of Artificial Sequence: Synthetic oligonucleotide
gcacgugaggaacguguag

SEQ ID NO: 2288765 - RNA, 19 nt, Artificial Sequence
  Description of Artificial Sequence: Synthetic oligonucleotide
ucgcuguagggcggcggcg

SEQ ID NO: 2288766 - RNA, 19 nt, Artificial Sequence
  Description of Artificial Sequence: Synthetic oligonucleotide
gccgaggcggcacggagag

SEQ ID NO: 2288767 - RNA, 19 nt, Artificial Sequence
  Description of Artificial Sequence: Synthetic oligonucleotide
aggggcucgcggcugcuga

SEQ ID NO: 2288768 - RNA, 19 nt, Artificial Sequence
  Description of Artificial Sequence: Synthetic oligonucleotide
guuugaggcggcggcgcag

SEQ ID NO: 2288769 - RNA, 19 nt, Artificial Sequence
  Description of Artificial Sequence: Synthetic oligonucleotide
uguagggcggcggcggcuc

SEQ ID NO: 2288770 - RNA, 19 nt, Artificial Sequence
  Description of Artificial Sequence: Synthetic oligonucleotide
gugcccugggacaucacca

SEQ ID NO: 2288771 - RNA, 19 nt, Artificial Sequence
  Description of Artificial Sequence: Synthetic oligonucleotide
ucgcggcggcucagaaagg

SEQ ID NO: 2288772 - RNA, 19 nt, Artificial Sequence
  Description of Artificial Sequence: Synthetic oligonucleotide
ggcgccaagcuccaugcuc

SEQ ID NO: 2288773 - RNA, 19 nt, Artificial Sequence
  Description of Artificial Sequence: Synthetic oligonucleotide
acggagaggugcgguggcg

SEQ ID NO: 2288774 - RNA, 19 nt, Artificial Sequence
  Description of Artificial Sequence: Synthetic oligonucleotide
gcagcgccgaaguguagcc

SEQ ID NO: 2288775 - RNA, 19 nt, Artificial Sequence
  Description of Artificial Sequence: Synthetic oligonucleotide
guccuccggaacaagggga

SEQ ID NO: 2288776 - RNA, 19 nt, Artificial Sequence
  Description of Artificial Sequence: Synthetic oligonucleotide
gcuuggcgcggguagcucc

SEQ ID NO: 2288777 - RNA, 19 nt, Artificial Sequence
  Description of Artificial Sequence: Synthetic oligonucleotide
cgaucuugcgguagaggcc

SEQ ID NO: 2288778 - RNA, 19 nt, Artificial Sequence
  Description of Artificial Sequence: Synthetic oligonucleotide
gaguucgcccguggggccc

SEQ ID NO: 2288779 - RNA, 19 nt, Artificial Sequence
  Description of Artificial Sequence: Synthetic oligonucleotide
uccgcuuggcgcggguagc

SEQ ID NO: 2288780 - RNA, 19 nt, Artificial Sequence
  Description of Artificial Sequence: Synthetic oligonucleotide
ucagcaccgccuccucgua

SEQ ID NO: 2288781 - RNA, 19 nt, Artificial Sequence
  Description of Artificial Sequence: Synthetic oligonucleotide
gcaggcgccaagcuccaug

SEQ ID NO: 2288782 - RNA, 19 nt, Artificial Sequence
  Description of Artificial Sequence: Synthetic oligonucleotide
gcgaagcacgugaggaacg

SEQ ID NO: 2288783 - RNA, 19 nt, Artificial Sequence
  Description of Artificial Sequence: Synthetic oligonucleotide
gcgccaagcuccaugcucc

SEQ ID NO: 2288784 - RNA, 19 nt, Artificial Sequence
  Description of Artificial Sequence: Synthetic oligonucleotide
cagcagcgggugcacgugc

SEQ ID NO: 2288785 - RNA, 19 nt, Artificial Sequence
  Description of Artificial Sequence: Synthetic oligonucleotide
agacggcugcggugcggcg

SEQ ID NO: 2288786 - RNA, 19 nt, Artificial Sequence
  Description of Artificial Sequence: Synthetic oligonucleotide
ggcacggagaggugcggug

SEQ ID NO: 2288787 - RNA, 19 nt, Artificial Sequence
  Description of Artificial Sequence: Synthetic oligonucleotide
cuuggcgcggguagcucca

SEQ ID NO: 2288788 - RNA, 19 nt, Artificial Sequence
  Description of Artificial Sequence: Synthetic oligonucleotide
agccccggagggcuuccag

SEQ ID NO: 2288789 - RNA, 19 nt, Artificial Sequence
  Description of Artificial Sequence: Synthetic oligonucleotide
gggcccguggugcagcagc

SEQ ID NO: 2288790 - RNA, 19 nt, Artificial Sequence
  Description of Artificial Sequence: Synthetic oligonucleotide
gggaagacccggcggcugc

SEQ ID NO: 2288791 - RNA, 19 nt, Artificial Sequence
  Description of Artificial Sequence: Synthetic oligonucleotide
ucggaggcggcugcuccug

SEQ ID NO: 2288792 - RNA, 19 nt, Artificial Sequence
  Description of Artificial Sequence: Synthetic oligonucleotide
gcacggagaggugcggugg

SEQ ID NO: 2288793 - RNA, 19 nt, Artificial Sequence
  Description of Artificial Sequence: Synthetic oligonucleotide
ucgcagguucugcucccuc

SEQ ID NO: 2288794 - RNA, 19 nt, Artificial Sequence
  Description of Artificial Sequence: Synthetic oligonucleotide
acaaggggauggagacagg

SEQ ID NO: 2288795 - RNA, 19 nt, Artificial Sequence
  Description of Artificial Sequence: Synthetic oligonucleotide
gcggcuuagacauguccga

SEQ ID NO: 2288796 - RNA, 19 nt, Artificial Sequence
  Description of Artificial Sequence: Synthetic oligonucleotide
gcggguagcuccagggccg

SEQ ID NO: 2288797 - RNA, 19 nt, Artificial Sequence
  Description of Artificial Sequence: Synthetic oligonucleotide
aguucgcccguggggcccg

SEQ ID NO: 2288798 - RNA, 19 nt, Artificial Sequence
  Description of Artificial Sequence: Synthetic oligonucleotide
ccugggacaucaccauggc

SEQ ID NO: 2288799 - RNA, 19 nt, Artificial Sequence
  Description of Artificial Sequence: Synthetic oligonucleotide
caggcggcggguccucggc

SEQ ID NO: 2288800 - RNA, 19 nt, Artificial Sequence
  Description of Artificial Sequence: Synthetic oligonucleotide
ucguagcacggcggcuuag

SEQ ID NO: 2288801 - RNA, 19 nt, Artificial Sequence
  Description of Artificial Sequence: Synthetic oligonucleotide
gagcgugcgcgugcacggg

SEQ ID NO: 2288802 - RNA, 19 nt, Artificial Sequence
  Description of Artificial Sequence: Synthetic oligonucleotide
gcuucuccgcgcugucgcg

SEQ ID NO: 2288803 - RNA, 19 nt, Artificial Sequence
  Description of Artificial Sequence: Synthetic oligonucleotide
uggggaagacccggcggcu

SEQ ID NO: 2288804 - RNA, 19 nt, Artificial Sequence
  Description of Artificial Sequence: Synthetic oligonucleotide
gcgguagaggccgcgagug

SEQ ID NO: 2288805 - RNA, 19 nt, Artificial Sequence
  Description of Artificial Sequence: Synthetic oligonucleotide
aggcuaggaguucgcccgu

SEQ ID NO: 2288806 - RNA, 19 nt, Artificial Sequence
  Description of Artificial Sequence: Synthetic oligonucleotide
agccccgcagucaggcuag

SEQ ID NO: 2288807 - RNA, 19 nt, Artificial Sequence
  Description of Artificial Sequence: Synthetic oligonucleotide
ugcgcgggcccguggugca

SEQ ID NO: 2288808 - RNA, 19 nt, Artificial Sequence
  Description of Artificial Sequence: Synthetic oligonucleotide
ggaguucgcccguggggcc

SEQ ID NO: 2288809 - RNA, 19 nt, Artificial Sequence
  Description of Artificial Sequence: Synthetic oligonucleotide
cagcaccgccuccucguag

SEQ ID NO: 2288810 - RNA, 19 nt, Artificial Sequence
  Description of Artificial Sequence: Synthetic oligonucleotide
gaggaacguguaggugccc

SEQ ID NO: 2288811 - RNA, 19 nt, Artificial Sequence
  Description of Artificial Sequence: Synthetic oligonucleotide
ggauggagacaggcaggcg

SEQ ID NO: 2288812 - RNA, 19 nt, Artificial Sequence
  Description of Artificial Sequence: Synthetic oligonucleotide
uggcggagggugcggcagu

SEQ ID NO: 2288813 - RNA, 19 nt, Artificial Sequence
  Description of Artificial Sequence: Synthetic oligonucleotide
ggcuuguaacucggaggcg

SEQ ID NO: 2288814 - RNA, 19 nt, Artificial Sequence
  Description of Artificial Sequence: Synthetic oligonucleotide
aucuugcgguagaggccgc

SEQ ID NO: 2288815 - RNA, 19 nt, Artificial Sequence
  Description of Artificial Sequence: Synthetic oligonucleotide
cagggcucgcagguucugc

SEQ ID NO: 2288816 - RNA, 19 nt, Artificial Sequence
  Description of Artificial Sequence: Synthetic oligonucleotide
acgggcgccuccagacggc

SEQ ID NO: 2288817 - RNA, 19 nt, Artificial Sequence
  Description of Artificial Sequence: Synthetic oligonucleotide
gacccggcggcugcgguca

SEQ ID NO: 2288818 - RNA, 19 nt, Artificial Sequence
  Description of Artificial Sequence: Synthetic oligonucleotide
cugcaguccaagggaagca

SEQ ID NO: 2288819 - RNA, 19 nt, Artificial Sequence
  Description of Artificial Sequence: Synthetic oligonucleotide
uaacucggaggcggcugcu

SEQ ID NO: 2288820 - RNA, 19 nt, Artificial Sequence
  Description of Artificial Sequence: Synthetic oligonucleotide
gcacgugcaugugcgagug

SEQ ID NO: 2288821 - RNA, 19 nt, Artificial Sequence
  Description of Artificial Sequence: Synthetic oligonucleotide
cugcgcgggcccguggugc

SEQ ID NO: 2288822 - RNA, 19 nt, Artificial Sequence
  Description of Artificial Sequence: Synthetic oligonucleotide
gagugagcgugcgcgugca

SEQ ID NO: 2288823 - RNA, 19 nt, Artificial Sequence
  Description of Artificial Sequence: Synthetic oligonucleotide
uggggaggugcagcgccga

SEQ ID NO: 2288824 - RNA, 19 nt, Artificial Sequence
  Description of Artificial Sequence: Synthetic oligonucleotide
gacaggcaggcgccaagcu

SEQ ID NO: 2288825 - RNA, 19 nt, Artificial Sequence
  Description of Artificial Sequence: Synthetic oligonucleotide
gccggcgaagcacgugagg

SEQ ID NO: 2288826 - RNA, 19 nt, Artificial Sequence
  Description of Artificial Sequence: Synthetic oligonucleotide
cagcgccgaaguguagccc

SEQ ID NO: 2288827 - RNA, 19 nt, Artificial Sequence
  Description of Artificial Sequence: Synthetic oligonucleotide
guagggcggcggcggcucg

SEQ ID NO: 2288828 - RNA, 19 nt, Artificial Sequence
  Description of Artificial Sequence: Synthetic oligonucleotide
agcacgugaggaacgugua

SEQ ID NO: 2288829 - RNA, 19 nt, Artificial Sequence
  Description of Artificial Sequence: Synthetic oligonucleotide
ggcuuagacauguccgacu

SEQ ID NO: 2288830 - RNA, 19 nt, Artificial Sequence
  Description of Artificial Sequence: Synthetic oligonucleotide
guggugcagcagcgggugc

SEQ ID NO: 2288831 - RNA, 19 nt, Artificial Sequence
  Description of Artificial Sequence: Synthetic oligonucleotide
ugcgcgugcacgggcgccu

SEQ ID NO: 2288832 - RNA, 19 nt, Artificial Sequence
  Description of Artificial Sequence: Synthetic oligonucleotide
ugcggcggcggcggcggcg

SEQ ID NO: 2288833 - RNA, 19 nt, Artificial Sequence
  Description of Artificial Sequence: Synthetic oligonucleotide
cagcgggugcacgugcaug

SEQ ID NO: 2288834 - RNA, 19 nt, Artificial Sequence
  Description of Artificial Sequence: Synthetic oligonucleotide
gcggcagugcgugauggug

SEQ ID NO: 2288835 - RNA, 19 nt, Artificial Sequence
  Description of Artificial Sequence: Synthetic oligonucleotide
agcagcagagcaggacgau

SEQ ID NO: 2288836 - RNA, 19 nt, Artificial Sequence
  Description of Artificial Sequence: Synthetic oligonucleotide
cagaggcuuguaacucgga

SEQ ID NO: 2288837 - RNA, 19 nt, Artificial Sequence
  Description of Artificial Sequence: Synthetic oligonucleotide
cuugcgguagaggccgcga

SEQ ID NO: 2288838 - RNA, 19 nt, Artificial Sequence
  Description of Artificial Sequence: Synthetic oligonucleotide
cgcggguagcuccagggcc

SEQ ID NO: 2288839 - RNA, 19 nt, Artificial Sequence
  Description of Artificial Sequence: Synthetic oligonucleotide
ggaagacccggcggcugcg

SEQ ID NO: 2288840 - RNA, 19 nt, Artificial Sequence
  Description of Artificial Sequence: Synthetic oligonucleotide
ggcucagaaagggcgugac

SEQ ID NO: 2288841 - RNA, 19 nt, Artificial Sequence
  Description of Artificial Sequence: Synthetic oligonucleotide
gaccccagaugagccagaa

SEQ ID NO: 2288842 - RNA, 19 nt, Artificial Sequence
  Description of Artificial Sequence: Synthetic oligonucleotide
gcacgggcgccuccagacg

SEQ ID NO: 2288843 - RNA, 19 nt, Artificial Sequence
  Description of Artificial Sequence: Synthetic oligonucleotide
cggcagugcgugauggugc

SEQ ID NO: 2288844 - RNA, 19 nt, Artificial Sequence
  Description of Artificial Sequence: Synthetic oligonucleotide
gcccguggggcccgggacg

SEQ ID NO: 2288845 - RNA, 19 nt, Artificial Sequence
  Description of Artificial Sequence: Synthetic oligonucleotide
gccguuugaggcggcggcg

SEQ ID NO: 2288846 - RNA, 19 nt, Artificial Sequence
  Description of Artificial Sequence: Synthetic oligonucleotide
cgggcgccccucuauacgg

SEQ ID NO: 2288847 - RNA, 19 nt, Artificial Sequence
  Description of Artificial Sequence: Synthetic oligonucleotide
aggcgccaagcuccaugcu

SEQ ID NO: 2288848 - RNA, 19 nt, Artificial Sequence
  Description of Artificial Sequence: Synthetic oligonucleotide
agcagcgggugcacgugca

SEQ ID NO: 2288849 - RNA, 19 nt, Artificial Sequence
  Description of Artificial Sequence: Synthetic oligonucleotide
uuggcgcggguagcuccag

SEQ ID NO: 2288850 - RNA, 19 nt, Artificial Sequence
  Description of Artificial Sequence: Synthetic oligonucleotide
ggugcagcgccgaagugua

SEQ ID NO: 2288851 - RNA, 19 nt, Artificial Sequence
  Description of Artificial Sequence: Synthetic oligonucleotide
ccgggcgccccucuauacg

SEQ ID NO: 2288852 - RNA, 19 nt, Artificial Sequence
  Description of Artificial Sequence: Synthetic oligonucleotide
cucgcggcugcugagcucu

SEQ ID NO: 2288853 - RNA, 19 nt, Artificial Sequence
  Description of Artificial Sequence: Synthetic oligonucleotide
agaagccggcgaagcacgu

SEQ ID NO: 2288854 - RNA, 19 nt, Artificial Sequence
  Description of Artificial Sequence: Synthetic oligonucleotide
cccugcaguccaagggaag

SEQ ID NO: 2288855 - RNA, 19 nt, Artificial Sequence
  Description of Artificial Sequence: Synthetic oligonucleotide
cgaugagaccccagaugag

SEQ ID NO: 2288856 - RNA, 19 nt, Artificial Sequence
  Description of Artificial Sequence: Synthetic oligonucleotide
gccccggagggcuuccagc

SEQ ID NO: 2288857 - RNA, 19 nt, Artificial Sequence
  Description of Artificial Sequence: Synthetic oligonucleotide
gaggcggcacggagaggug

SEQ ID NO: 2288858 - RNA, 19 nt, Artificial Sequence
  Description of Artificial Sequence: Synthetic oligonucleotide
agccggcgaagcacgugag

SEQ ID NO: 2288859 - RNA, 19 nt, Artificial Sequence
  Description of Artificial Sequence: Synthetic oligonucleotide
caccucgcuguagggcggc

SEQ ID NO: 2288860 - RNA, 19 nt, Artificial Sequence
  Description of Artificial Sequence: Synthetic oligonucleotide
gccgcgaguguccgugagc

SEQ ID NO: 2288861 - RNA, 19 nt, Artificial Sequence
  Description of Artificial Sequence: Synthetic oligonucleotide
gcaggcggcggguccucgg

SEQ ID NO: 2288862 - RNA, 19 nt, Artificial Sequence
  Description of Artificial Sequence: Synthetic oligonucleotide
ggcccguggugcagcagcg

SEQ ID NO: 2288863 - RNA, 19 nt, Artificial Sequence
  Description of Artificial Sequence: Synthetic oligonucleotide
ggugcacgugcaugugcga

SEQ ID NO: 2288864 - RNA, 19 nt, Artificial Sequence
  Description of Artificial Sequence: Synthetic oligonucleotide
ccgaaguguagccccgguc

SEQ ID NO: 2288865 - RNA, 19 nt, Artificial Sequence
  Description of Artificial Sequence: Synthetic oligonucleotide
accucgcuguagggcggcg

SEQ ID NO: 2288866 - RNA, 19 nt, Artificial Sequence
  Description of Artificial Sequence: Synthetic oligonucleotide
gcggcgccagccccggagg

SEQ ID NO: 2288867 - RNA, 19 nt, Artificial Sequence
  Description of Artificial Sequence: Synthetic oligonucleotide
gcgcggguagcuccagggc

SEQ ID NO: 2288868 - RNA, 19 nt, Artificial Sequence
  Description of Artificial Sequence: Synthetic oligonucleotide
ggccgcgaguguccgugag

SEQ ID NO: 2288869 - RNA, 19 nt, Artificial Sequence
  Description of Artificial Sequence: Synthetic oligonucleotide
gugcacgggcgccuccaga

SEQ ID NO: 2288870 - RNA, 19 nt, Artificial Sequence
  Description of Artificial Sequence: Synthetic oligonucleotide
gaaagggcgugacgaucuu

SEQ ID NO: 2288871 - RNA, 19 nt, Artificial Sequence
  Description of Artificial Sequence: Synthetic oligonucleotide
cugcggugcggcggcggcg

SEQ ID NO: 2288872 - RNA, 19 nt, Artificial Sequence
  Description of Artificial Sequence: Synthetic oligonucleotide
cugggacaucaccauggcu

SEQ ID NO: 2288873 - RNA, 19 nt, Artificial Sequence
  Description of Artificial Sequence: Synthetic oligonucleotide
cgugacgaucuugcgguag

SEQ ID NO: 2288874 - RNA, 19 nt, Artificial Sequence
  Description of Artificial Sequence: Synthetic oligonucleotide
cacggcggcuuagacaugu

SEQ ID NO: 2288875 - RNA, 19 nt, Artificial Sequence
  Description of Artificial Sequence: Synthetic oligonucleotide
ggggcucgcggcugcugag

SEQ ID NO: 2288876 - RNA, 19 nt, Artificial Sequence
  Description of Artificial Sequence: Synthetic oligonucleotide
cagggccgaggcggcacgg

SEQ ID NO: 2288877 - RNA, 19 nt, Artificial Sequence
  Description of Artificial Sequence: Synthetic oligonucleotide
gcaccucgcuguagggcgg

SEQ ID NO: 2288878 - RNA, 19 nt, Artificial Sequence
  Description of Artificial Sequence: Synthetic oligonucleotide
aggccgcgaguguccguga

SEQ ID NO: 2288879 - RNA, 19 nt, Artificial Sequence
  Description of Artificial Sequence: Synthetic oligonucleotide
guaggugcccugggacauc

SEQ ID NO: 2288880 - RNA, 19 nt, Artificial Sequence
  Description of Artificial Sequence: Synthetic oligonucleotide
gcgugcgcgugcacgggcg

SEQ ID NO: 2288881 - RNA, 19 nt, Artificial Sequence
  Description of Artificial Sequence: Synthetic oligonucleotide
gcgugauggugcgggugcg

SEQ ID NO: 2288882 - RNA, 19 nt, Artificial Sequence
  Description of Artificial Sequence: Synthetic oligonucleotide
caccgccuccucguagcac

SEQ ID NO: 2288883 - RNA, 19 nt, Artificial Sequence
  Description of Artificial Sequence: Synthetic oligonucleotide
agggugcggcagugcguga

SEQ ID NO: 2288884 - RNA, 19 nt, Artificial Sequence
  Description of Artificial Sequence: Synthetic oligonucleotide
ccguuugaggcggcggcgc

SEQ ID NO: 2288885 - RNA, 19 nt, Artificial Sequence
  Description of Artificial Sequence: Synthetic oligonucleotide
agaccccagaugagccaga

SEQ ID NO: 2288886 - RNA, 19 nt, Artificial Sequence
  Description of Artificial Sequence: Synthetic oligonucleotide
gugcgcgugcacgggcgcc

SEQ ID NO: 2288887 - RNA, 19 nt, Artificial Sequence
  Description of Artificial Sequence: Synthetic oligonucleotide
cgcggcggcucagaaaggg

SEQ ID NO: 2288888 - RNA, 19 nt, Artificial Sequence
  Description of Artificial Sequence: Synthetic oligonucleotide
ucgcggcugcugagcucug

SEQ ID NO: 2288889 - RNA, 19 nt, Artificial Sequence
  Description of Artificial Sequence: Synthetic oligonucleotide
uucgcccguggggcccggg

SEQ ID NO: 2288890 - RNA, 19 nt, Artificial Sequence
  Description of Artificial Sequence: Synthetic oligonucleotide
guggggcccgggacgccgg

SEQ ID NO: 2288891 - RNA, 19 nt, Artificial Sequence
  Description of Artificial Sequence: Synthetic oligonucleotide
gcgcaggaagcugcagaag

SEQ ID NO: 2288892 - RNA, 19 nt, Artificial Sequence
  Description of Artificial Sequence: Synthetic oligonucleotide
ggcgccguuugaggcggcg

SEQ ID NO: 2288893 - RNA, 19 nt, Artificial Sequence
  Description of Artificial Sequence: Synthetic oligonucleotide
cgccguuugaggcggcggc

SEQ ID NO: 2288894 - RNA, 19 nt, Artificial Sequence
  Description of Artificial Sequence: Synthetic oligonucleotide
gcgcgugcggcugcgcggg

SEQ ID NO: 2288895 - RNA, 19 nt, Artificial Sequence
  Description of Artificial Sequence: Synthetic oligonucleotide
cccucuauacggcuguagu

SEQ ID NO: 2288896 - RNA, 19 nt, Artificial Sequence
  Description of Artificial Sequence: Synthetic oligonucleotide
gcggcucagaaagggcgug

SEQ ID NO: 2288897 - RNA, 19 nt, Artificial Sequence
  Description of Artificial Sequence: Synthetic oligonucleotide
ccgcgaguguccgugagca

SEQ ID NO: 2288898 - RNA, 19 nt, Artificial Sequence
  Description of Artificial Sequence: Synthetic oligonucleotide
cucguagcacggcggcuua

SEQ ID NO: 2288899 - RNA, 19 nt, Artificial Sequence
  Description of Artificial Sequence: Synthetic oligonucleotide
cgggugcacgugcaugugc

SEQ ID NO: 2288900 - RNA, 19 nt, Artificial Sequence
  Description of Artificial Sequence: Synthetic oligonucleotide
uggcgccguuugaggcggc

SEQ ID NO: 2288901 - RNA, 19 nt, Artificial Sequence
  Description of Artificial Sequence: Synthetic oligonucleotide
gcgccguuugaggcggcgg

SEQ ID NO: 2288902 - RNA, 19 nt, Artificial Sequence
  Description of Artificial Sequence: Synthetic oligonucleotide
gcgccgaaguguagccccg

SEQ ID NO: 2288903 - RNA, 19 nt, Artificial Sequence
  Description of Artificial Sequence: Synthetic oligonucleotide
gccaagcuccaugcuccag

SEQ ID NO: 2288904 - RNA, 19 nt, Artificial Sequence
  Description of Artificial Sequence: Synthetic oligonucleotide
gugcagcgccgaaguguag

SEQ ID NO: 2288905 - RNA, 19 nt, Artificial Sequence
  Description of Artificial Sequence: Synthetic oligonucleotide
cggagaggugcgguggcgg

SEQ ID NO: 2288906 - RNA, 19 nt, Artificial Sequence
  Description of Artificial Sequence: Synthetic oligonucleotide
ggcuaggaguucgcccgug

SEQ ID NO: 2288907 - RNA, 19 nt, Artificial Sequence
  Description of Artificial Sequence: Synthetic oligonucleotide
gcggcggcucagaaagggc

SEQ ID NO: 2288908 - RNA, 19 nt, Artificial Sequence
  Description of Artificial Sequence: Synthetic oligonucleotide
ccccucuauacggcuguag

SEQ ID NO: 2288909 - RNA, 19 nt, Artificial Sequence
  Description of Artificial Sequence: Synthetic oligonucleotide
ccucgcuguagggcggcgg

SEQ ID NO: 2288910 - RNA, 19 nt, Artificial Sequence
  Description of Artificial Sequence: Synthetic oligonucleotide
gcagugcgugauggugcgg

SEQ ID NO: 2288911 - RNA, 19 nt, Artificial Sequence
  Description of Artificial Sequence: Synthetic oligonucleotide
agggccgaggcggcacgga

SEQ ID NO: 2288912 - RNA, 19 nt, Artificial Sequence
  Description of Artificial Sequence: Synthetic oligonucleotide
acuccgcuuggcgcgggua

SEQ ID NO: 2288913 - RNA, 19 nt, Artificial Sequence
  Description of Artificial Sequence: Synthetic oligonucleotide
cacgugcaugugcgaguga

SEQ ID NO: 2288914 - RNA, 19 nt, Artificial Sequence
  Description of Artificial Sequence: Synthetic oligonucleotide
gccgggcgccccucuauac

SEQ ID NO: 2288915 - RNA, 19 nt, Artificial Sequence
  Description of Artificial Sequence: Synthetic oligonucleotide
cgcuguagggcggcggcgg

SEQ ID NO: 2288916 - RNA, 19 nt, Artificial Sequence
  Description of Artificial Sequence: Synthetic oligonucleotide
cugucgcggcggcucagaa

SEQ ID NO: 2288917 - RNA, 19 nt, Artificial Sequence
  Description of Artificial Sequence: Synthetic oligonucleotide
gcugcgcgggcccguggug

SEQ ID NO: 2288918 - RNA, 19 nt, Artificial Sequence
  Description of Artificial Sequence: Synthetic oligonucleotide
gggcucgcggcugcugagc

SEQ ID NO: 2288919 - RNA, 19 nt, Artificial Sequence
  Description of Artificial Sequence: Synthetic oligonucleotide
ggcugcggucagccugcag

SEQ ID NO: 2288920 - RNA, 19 nt, Artificial Sequence
  Description of Artificial Sequence: Synthetic oligonucleotide
caggggcucgcggcugcug

SEQ ID NO: 2288921 - RNA, 19 nt, Artificial Sequence
  Description of Artificial Sequence: Synthetic oligonucleotide
ggcgccagccccggagggc

SEQ ID NO: 2288922 - RNA, 19 nt, Artificial Sequence
  Description of Artificial Sequence: Synthetic oligonucleotide
gacgccgggcgccccucua

SEQ ID NO: 2288923 - RNA, 19 nt, Artificial Sequence
  Description of Artificial Sequence: Synthetic oligonucleotide
gcccguggugcagcagcgg

SEQ ID NO: 2288924 - RNA, 19 nt, Artificial Sequence
  Description of Artificial Sequence: Synthetic oligonucleotide
ggccgcggggcgcugggga

SEQ ID NO: 2288925 - RNA, 19 nt, Artificial Sequence
  Description of Artificial Sequence: Synthetic oligonucleotide
cggcuuagacauguccgac

SEQ ID NO: 2288926 - RNA, 19 nt, Artificial Sequence
  Description of Artificial Sequence: Synthetic oligonucleotide
gacuccgcuuggcgcgggu

SEQ ID NO: 2288927 - RNA, 19 nt, Artificial Sequence
  Description of Artificial Sequence: Synthetic oligonucleotide
gggcgccccucuauacggc

SEQ ID NO: 2288928 - RNA, 19 nt, Artificial Sequence
  Description of Artificial Sequence: Synthetic oligonucleotide
gcaggacgaugagacccca

SEQ ID NO: 2288929 - RNA, 19 nt, Artificial Sequence
  Description of Artificial Sequence: Synthetic oligonucleotide
gcaccgccuccucguagca

SEQ ID NO: 2288930 - RNA, 19 nt, Artificial Sequence
  Description of Artificial Sequence: Synthetic oligonucleotide
ggcgccccucuauacggcu

SEQ ID NO: 2288931 - RNA, 19 nt, Artificial Sequence
  Description of Artificial Sequence: Synthetic oligonucleotide
gcgggugcacgugcaugug

SEQ ID NO: 2288932 - RNA, 19 nt, Artificial Sequence
  Description of Artificial Sequence: Synthetic oligonucleotide
gcgccccucuauacggcug

SEQ ID NO: 2288933 - RNA, 19 nt, Artificial Sequence
  Description of Artificial Sequence: Synthetic oligonucleotide
gcggcggcgcaggaagcug

SEQ ID NO: 2288934 - RNA, 19 nt, Artificial Sequence
  Description of Artificial Sequence: Synthetic oligonucleotide
ccgacuccgcuuggcgcgg

SEQ ID NO: 2288935 - RNA, 19 nt, Artificial Sequence
  Description of Artificial Sequence: Synthetic oligonucleotide
guucgcccguggggcccgg

SEQ ID NO: 2288936 - RNA, 19 nt, Artificial Sequence
  Description of Artificial Sequence: Synthetic oligonucleotide
cgugagcaccucgcuguag

SEQ ID NO: 2288937 - RNA, 19 nt, Artificial Sequence
  Description of Artificial Sequence: Synthetic oligonucleotide
gcggagggugcggcagugc

SEQ ID NO: 2288938 - RNA, 19 nt, Artificial Sequence
  Description of Artificial Sequence: Synthetic oligonucleotide
cgaggcggcacggagaggu

SEQ ID NO: 2288939 - RNA, 19 nt, Artificial Sequence
  Description of Artificial Sequence: Synthetic oligonucleotide
cgugcgcgugcacgggcgc

SEQ ID NO: 2288940 - RNA, 19 nt, Artificial Sequence
  Description of Artificial Sequence: Synthetic oligonucleotide
gcugucgcggcggcucaga

SEQ ID NO: 2288941 - RNA, 19 nt, Artificial Sequence
  Description of Artificial Sequence: Synthetic oligonucleotide
cgaguguccgugagcaccu

SEQ ID NO: 2288942 - RNA, 19 nt, Artificial Sequence
  Description of Artificial Sequence: Synthetic oligonucleotide
gcgugcgcgugcggcugcg

SEQ ID NO: 2288943 - RNA, 19 nt, Artificial Sequence
  Description of Artificial Sequence: Synthetic oligonucleotide
ggguagcuccagggccgag

SEQ ID NO: 2288944 - RNA, 19 nt, Artificial Sequence
  Description of Artificial Sequence: Synthetic oligonucleotide
ggggaggugcagcgccgaa

SEQ ID NO: 2288945 - RNA, 19 nt, Artificial Sequence
  Description of Artificial Sequence: Synthetic oligonucleotide
ggagggugcggcagugcgu

SEQ ID NO: 2288946 - RNA, 19 nt, Artificial Sequence
  Description of Artificial Sequence: Synthetic oligonucleotide
gcggcggcucggccaucag

SEQ ID NO: 2288947 - RNA, 19 nt, Artificial Sequence
  Description of Artificial Sequence: Synthetic oligonucleotide
cguagcacggcggcuuaga

SEQ ID NO: 2288948 - RNA, 19 nt, Artificial Sequence
  Description of Artificial Sequence: Synthetic oligonucleotide
cgcgcugucgcggcggcuc

SEQ ID NO: 2288949 - RNA, 19 nt, Artificial Sequence
  Description of Artificial Sequence: Synthetic oligonucleotide
gccccgguccaggaacaga

SEQ ID NO: 2288950 - RNA, 19 nt, Artificial Sequence
  Description of Artificial Sequence: Synthetic oligonucleotide
gcggcggcggcggcggcgc

SEQ ID NO: 2288951 - RNA, 19 nt, Artificial Sequence
  Description of Artificial Sequence: Synthetic oligonucleotide
cgcgaguguccgugagcac

SEQ ID NO: 2288952 - RNA, 19 nt, Artificial Sequence
  Description of Artificial Sequence: Synthetic oligonucleotide
cguuugaggcggcggcgca

SEQ ID NO: 2288953 - RNA, 19 nt, Artificial Sequence
  Description of Artificial Sequence: Synthetic oligonucleotide
cggcgaagcacgugaggaa

SEQ ID NO: 2288954 - RNA, 19 nt, Artificial Sequence
  Description of Artificial Sequence: Synthetic oligonucleotide
ccagccccggagggcuucc

SEQ ID NO: 2288955 - RNA, 19 nt, Artificial Sequence
  Description of Artificial Sequence: Synthetic oligonucleotide
gcgcugucgcggcggcuca

SEQ ID NO: 2288956 - RNA, 19 nt, Artificial Sequence
  Description of Artificial Sequence: Synthetic oligonucleotide
gcgugacgaucuugcggua

SEQ ID NO: 2288957 - RNA, 19 nt, Artificial Sequence
  Description of Artificial Sequence: Synthetic oligonucleotide
gugcggcggcggcggcggc

SEQ ID NO: 2288958 - RNA, 19 nt, Artificial Sequence
  Description of Artificial Sequence: Synthetic oligonucleotide
cgguccagcuggggaagac

SEQ ID NO: 2288959 - RNA, 19 nt, Artificial Sequence
  Description of Artificial Sequence: Synthetic oligonucleotide
ccguggugcagcagcgggu

SEQ ID NO: 2288960 - RNA, 19 nt, Artificial Sequence
  Description of Artificial Sequence: Synthetic oligonucleotide
gcagcgggugcacgugcau

SEQ ID NO: 2288961 - RNA, 19 nt, Artificial Sequence
  Description of Artificial Sequence: Synthetic oligonucleotide
gccccgcagucaggcuagg

SEQ ID NO: 2288962 - RNA, 19 nt, Artificial Sequence
  Description of Artificial Sequence: Synthetic oligonucleotide
cgaagcacgugaggaacgu

SEQ ID NO: 2288963 - RNA, 19 nt, Artificial Sequence
  Description of Artificial Sequence: Synthetic oligonucleotide
cccgggacgccgggcgccc

SEQ ID NO: 2288964 - RNA, 19 nt, Artificial Sequence
  Description of Artificial Sequence: Synthetic oligonucleotide
gcacggcggcuuagacaug

SEQ ID NO: 2288965 - RNA, 19 nt, Artificial Sequence
  Description of Artificial Sequence: Synthetic oligonucleotide
ccgaggcggcacggagagg

SEQ ID NO: 2288966 - RNA, 19 nt, Artificial Sequence
  Description of Artificial Sequence: Synthetic oligonucleotide
cgcgugcgcgugcggcugc

SEQ ID NO: 2288967 - RNA, 19 nt, Artificial Sequence
  Description of Artificial Sequence: Synthetic oligonucleotide
gcggcugcgcgggcccgug

SEQ ID NO: 2288968 - RNA, 19 nt, Artificial Sequence
  Description of Artificial Sequence: Synthetic oligonucleotide
cgccaagcuccaugcucca

SEQ ID NO: 2288969 - RNA, 19 nt, Artificial Sequence
  Description of Artificial Sequence: Synthetic oligonucleotide
cgcgugcacgggcgccucc

SEQ ID NO: 2288970 - RNA, 19 nt, Artificial Sequence
  Description of Artificial Sequence: Synthetic oligonucleotide
cagccccggagggcuucca

SEQ ID NO: 2288971 - RNA, 19 nt, Artificial Sequence
  Description of Artificial Sequence: Synthetic oligonucleotide
gcgcgggcccguggugcag

SEQ ID NO: 2288972 - RNA, 19 nt, Artificial Sequence
  Description of Artificial Sequence: Synthetic oligonucleotide
gggacgccgggcgccccuc

SEQ ID NO: 2288973 - RNA, 19 nt, Artificial Sequence
  Description of Artificial Sequence: Synthetic oligonucleotide
ccgugagcaccucgcugua

SEQ ID NO: 2288974 - RNA, 19 nt, Artificial Sequence
  Description of Artificial Sequence: Synthetic oligonucleotide
cggcucagaaagggcguga

SEQ ID NO: 2288975 - RNA, 19 nt, Artificial Sequence
  Description of Artificial Sequence: Synthetic oligonucleotide
cgcuuggcgcggguagcuc

SEQ ID NO: 2288976 - RNA, 19 nt, Artificial Sequence
  Description of Artificial Sequence: Synthetic oligonucleotide
cgccccucuauacggcugu

SEQ ID NO: 2288977 - RNA, 19 nt, Artificial Sequence
  Description of Artificial Sequence: Synthetic oligonucleotide
ccccgcagucaggcuagga

SEQ ID NO: 2288978 - RNA, 19 nt, Artificial Sequence
  Description of Artificial Sequence: Synthetic oligonucleotide
gccccucuauacggcugua

SEQ ID NO: 2288979 - RNA, 19 nt, Artificial Sequence
  Description of Artificial Sequence: Synthetic oligonucleotide
cgguagaggccgcgagugu

SEQ ID NO: 2288980 - RNA, 19 nt, Artificial Sequence
  Description of Artificial Sequence: Synthetic oligonucleotide
ccgcuuggcgcggguagcu

SEQ ID NO: 2288981 - RNA, 19 nt, Artificial Sequence
  Description of Artificial Sequence: Synthetic oligonucleotide
cggguagcuccagggccga

SEQ ID NO: 2288982 - RNA, 19 nt, Artificial Sequence
  Description of Artificial Sequence: Synthetic oligonucleotide
cgggcccguggugcagcag

SEQ ID NO: 2288983 - RNA, 19 nt, Artificial Sequence
  Description of Artificial Sequence: Synthetic oligonucleotide
cgcggcugcugagcucuga

SEQ ID NO: 2288984 - RNA, 19 nt, Artificial Sequence
  Description of Artificial Sequence: Synthetic oligonucleotide
cgccgggcgccccucuaua

SEQ ID NO: 2288985 - RNA, 19 nt, Artificial Sequence
  Description of Artificial Sequence: Synthetic oligonucleotide
ggcaggcgccaagcuccau

SEQ ID NO: 2288986 - RNA, 19 nt, Artificial Sequence
  Description of Artificial Sequence: Synthetic oligonucleotide
cggcacggagaggugcggu

SEQ ID NO: 2288987 - RNA, 19 nt, Artificial Sequence
  Description of Artificial Sequence: Synthetic oligonucleotide
cggcggguccucggcagcu

SEQ ID NO: 2288988 - RNA, 19 nt, Artificial Sequence
  Description of Artificial Sequence: Synthetic oligonucleotide
cggcggcggcggcggcgcc

SEQ ID NO: 2288989 - RNA, 19 nt, Artificial Sequence
  Description of Artificial Sequence: Synthetic oligonucleotide
cgcggggcgcuggggaggu

SEQ ID NO: 2288990 - RNA, 19 nt, Artificial Sequence
  Description of Artificial Sequence: Synthetic oligonucleotide
ccgcgcugucgcggcggcu

SEQ ID NO: 2288991 - RNA, 19 nt, Artificial Sequence
  Description of Artificial Sequence: Synthetic oligonucleotide
cggcggcggcucggccauc

SEQ ID NO: 2288992 - RNA, 19 nt, Artificial Sequence
  Description of Artificial Sequence: Synthetic oligonucleotide
aucuaaaucaauuacaugc

SEQ ID NO: 2288993 - RNA, 19 nt, Artificial Sequence
  Description of Artificial Sequence: Synthetic oligonucleotide
aaacuuugcacucagaaac

SEQ ID NO: 2288994 - RNA, 19 nt, Artificial Sequence
  Description of Artificial Sequence: Synthetic oligonucleotide
uuuguaaaauaucauaugg

SEQ ID NO: 2288995 - RNA, 19 nt, Artificial Sequence
  Description of Artificial Sequence: Synthetic oligonucleotide
aaacaaauuguauuauugc

SEQ ID NO: 2288996 - RNA, 19 nt, Artificial Sequence
  Description of Artificial Sequence: Synthetic oligonucleotide
aucaauuacaugcagauuc

SEQ ID NO: 2288997 - RNA, 19 nt, Artificial Sequence
  Description of Artificial Sequence: Synthetic oligonucleotide
uuuauuauggauuauuucu

SEQ ID NO: 2288998 - RNA, 19 nt, Artificial Sequence
  Description of Artificial Sequence: Synthetic oligonucleotide
acugaaaaugagcagaccc

SEQ ID NO: 2288999 - RNA, 19 nt, Artificial Sequence
  Description of Artificial Sequence: Synthetic oligonucleotide
uaaaauaucauauggguga

SEQ ID NO: 2289000 - RNA, 19 nt, Artificial Sequence
  Description of Artificial Sequence: Synthetic oligonucleotide
auugcagugaccucaaagc

SEQ ID NO: 2289001 - RNA, 19 nt, Artificial Sequence
  Description of Artificial Sequence: Synthetic oligonucleotide
uuaauugucuacaauuucc

SEQ ID NO: 2289002 - RNA, 19 nt, Artificial Sequence
  Description of Artificial Sequence: Synthetic oligonucleotide
uuguaaaauaucauauggg

SEQ ID NO: 2289003 - RNA, 19 nt, Artificial Sequence
  Description of Artificial Sequence: Synthetic oligonucleotide
aaaaugagcagacccuggc

SEQ ID NO: 2289004 - RNA, 19 nt, Artificial Sequence
  Description of Artificial Sequence: Synthetic oligonucleotide
uaucauaugggugacaggg

SEQ ID NO: 2289005 - RNA, 19 nt, Artificial Sequence
  Description of Artificial Sequence: Synthetic oligonucleotide
uguaaaauaucauaugggu

SEQ ID NO: 2289006 - RNA, 19 nt, Artificial Sequence
  Description of Artificial Sequence: Synthetic oligonucleotide
ucuauuugcucauacagcc

SEQ ID NO: 2289007 - RNA, 19 nt, Artificial Sequence
  Description of Artificial Sequence: Synthetic oligonucleotide
uuugcacucagaaacgugg

SEQ ID NO: 2289008 - RNA, 19 nt, Artificial Sequence
  Description of Artificial Sequence: Synthetic oligonucleotide
aaaagcaugucauuugaug

SEQ ID NO: 2289009 - RNA, 19 nt, Artificial Sequence
  Description of Artificial Sequence: Synthetic oligonucleotide
uuguauuauugccagaaag

SEQ ID NO: 2289010 - RNA, 19 nt, Artificial Sequence
  Description of Artificial Sequence: Synthetic oligonucleotide
aauaucauaugggugacag

SEQ ID NO: 2289011 - RNA, 19 nt, Artificial Sequence
  Description of Artificial Sequence: Synthetic oligonucleotide
uuuuauggcagucaugucu

SEQ ID NO: 2289012 - RNA, 19 nt, Artificial Sequence
  Description of Artificial Sequence: Synthetic oligonucleotide
uuuguguauguuaaauggg

SEQ ID NO: 2289013 - RNA, 19 nt, Artificial Sequence
  Description of Artificial Sequence: Synthetic oligonucleotide
acugaugcaaauuuacuuc

SEQ ID NO: 2289014 - RNA, 19 nt, Artificial Sequence
  Description of Artificial Sequence: Synthetic oligonucleotide
ucacuuuuguaaaauauca

SEQ ID NO: 2289015 - RNA, 19 nt, Artificial Sequence
  Description of Artificial Sequence: Synthetic oligonucleotide
aauugcagugaccucaaag

SEQ ID NO: 2289016 - RNA, 19 nt, Artificial Sequence
  Description of Artificial Sequence: Synthetic oligonucleotide
uguauuauugccagaaagu

SEQ ID NO: 2289017 - RNA, 19 nt, Artificial Sequence
  Description of Artificial Sequence: Synthetic oligonucleotide
ugaaguaaaagcaugucau

SEQ ID NO: 2289018 - RNA, 19 nt, Artificial Sequence
  Description of Artificial Sequence: Synthetic oligonucleotide
aaucaacauccacacuucc

SEQ ID NO: 2289019 - RNA, 19 nt, Artificial Sequence
  Description of Artificial Sequence: Synthetic oligonucleotide
agacuuuacucuuugcugg

SEQ ID NO: 2289020 - RNA, 19 nt, Artificial Sequence
  Description of Artificial Sequence: Synthetic oligonucleotide
acaacaugacuuuuguaac

SEQ ID NO: 2289021 - RNA, 19 nt, Artificial Sequence
  Description of Artificial Sequence: Synthetic oligonucleotide
uauggauuauuucuccucc

SEQ ID NO: 2289022 - RNA, 19 nt, Artificial Sequence
  Description of Artificial Sequence: Synthetic oligonucleotide
caaauuguauuauugccag

SEQ ID NO: 2289023 - RNA, 19 nt, Artificial Sequence
  Description of Artificial Sequence: Synthetic oligonucleotide
ugucauuccaguccuaagc

SEQ ID NO: 2289024 - RNA, 19 nt, Artificial Sequence
  Description of Artificial Sequence: Synthetic oligonucleotide
uuuauggcagucaugucug

SEQ ID NO: 2289025 - RNA, 19 nt, Artificial Sequence
  Description of Artificial Sequence: Synthetic oligonucleotide
ucaucuaaaucaauuacau

SEQ ID NO: 2289026 - RNA, 19 nt, Artificial Sequence
  Description of Artificial Sequence: Synthetic oligonucleotide
aacauccacacuuccauug

SEQ ID NO: 2289027 - RNA, 19 nt, Artificial Sequence
  Description of Artificial Sequence: Synthetic oligonucleotide
uuuaccaccuucuggagca

SEQ ID NO: 2289028 - RNA, 19 nt, Artificial Sequence
  Description of Artificial Sequence: Synthetic oligonucleotide
aaaauaucauaugggugac

SEQ ID NO: 2289029 - RNA, 19 nt, Artificial Sequence
  Description of Artificial Sequence: Synthetic oligonucleotide
uuaaaugggucacaacaug

SEQ ID NO: 2289030 - RNA, 19 nt, Artificial Sequence
  Description of Artificial Sequence: Synthetic oligonucleotide
aauuguauuauugccagaa

SEQ ID NO: 2289031 - RNA, 19 nt, Artificial Sequence
  Description of Artificial Sequence: Synthetic oligonucleotide
uauuauggauuauuucucc

SEQ ID NO: 2289032 - RNA, 19 nt, Artificial Sequence
  Description of Artificial Sequence: Synthetic oligonucleotide
aaauucuguuugcuuuccc

SEQ ID NO: 2289033 - RNA, 19 nt, Artificial Sequence
  Description of Artificial Sequence: Synthetic oligonucleotide
uuauuauggauuauuucuc

SEQ ID NO: 2289034 - RNA, 19 nt, Artificial Sequence
  Description of Artificial Sequence: Synthetic oligonucleotide
ucauaugggugacagggag

SEQ ID NO: 2289035 - RNA, 19 nt, Artificial Sequence
  Description of Artificial Sequence: Synthetic oligonucleotide
ugaucuggguacauuuugg

SEQ ID NO: 2289036 - RNA, 19 nt, Artificial Sequence
  Description of Artificial Sequence: Synthetic oligonucleotide
uuguguauguuaaaugggu

SEQ ID NO: 2289037 - RNA, 19 nt, Artificial Sequence
  Description of Artificial Sequence: Synthetic oligonucleotide
uuugccagcauguuuauua

SEQ ID NO: 2289038 - RNA, 19 nt, Artificial Sequence
  Description of Artificial Sequence: Synthetic oligonucleotide
uauuauugccagaaagugu

SEQ ID NO: 2289039 - RNA, 19 nt, Artificial Sequence
  Description of Artificial Sequence: Synthetic oligonucleotide
cuaagcugaaguaaaagca

SEQ ID NO: 2289040 - RNA, 19 nt, Artificial Sequence
  Description of Artificial Sequence: Synthetic oligonucleotide
caucaaggcagucacagag

SEQ ID NO: 2289041 - RNA, 19 nt, Artificial Sequence
  Description of Artificial Sequence: Synthetic oligonucleotide
uuuacuucccagaaugguc

SEQ ID NO: 2289042 - RNA, 19 nt, Artificial Sequence
  Description of Artificial Sequence: Synthetic oligonucleotide
ugucauuugaugacaacuc

SEQ ID NO: 2289043 - RNA, 19 nt, Artificial Sequence
  Description of Artificial Sequence: Synthetic oligonucleotide
uuugguagagccacaggug

SEQ ID NO: 2289044 - RNA, 19 nt, Artificial Sequence
  Description of Artificial Sequence: Synthetic oligonucleotide
ugcaaauuuacuucccaga

SEQ ID NO: 2289045 - RNA, 19 nt, Artificial Sequence
  Description of Artificial Sequence: Synthetic oligonucleotide
guagaagcaucccaggcag

SEQ ID NO: 2289046 - RNA, 19 nt, Artificial Sequence
  Description of Artificial Sequence: Synthetic oligonucleotide
gaucuggguacauuuuggg

SEQ ID NO: 2289047 - RNA, 19 nt, Artificial Sequence
  Description of Artificial Sequence: Synthetic oligonucleotide
auaacuugucugucagagc

SEQ ID NO: 2289048 - RNA, 19 nt, Artificial Sequence
  Description of Artificial Sequence: Synthetic oligonucleotide
ugaccucaaagcuuuagca

SEQ ID NO: 2289049 - RNA, 19 nt, Artificial Sequence
  Description of Artificial Sequence: Synthetic oligonucleotide
uugucugucagagccagcg

SEQ ID NO: 2289050 - RNA, 19 nt, Artificial Sequence
  Description of Artificial Sequence: Synthetic oligonucleotide
gaaaccuguguuccgagug

SEQ ID NO: 2289051 - RNA, 19 nt, Artificial Sequence
  Description of Artificial Sequence: Synthetic oligonucleotide
caucaucuaaaucaauuac

SEQ ID NO: 2289052 - RNA, 19 nt, Artificial Sequence
  Description of Artificial Sequence: Synthetic oligonucleotide
uugugaauugcagugaccu

SEQ ID NO: 2289053 - RNA, 19 nt, Artificial Sequence
  Description of Artificial Sequence: Synthetic oligonucleotide
gucaucggaaucaacaucc

SEQ ID NO: 2289054 - RNA, 19 nt, Artificial Sequence
  Description of Artificial Sequence: Synthetic oligonucleotide
guaaaauaucauaugggug

SEQ ID NO: 2289055 - RNA, 19 nt, Artificial Sequence
  Description of Artificial Sequence: Synthetic oligonucleotide
aauuuacuucccagaaugg

SEQ ID NO: 2289056 - RNA, 19 nt, Artificial Sequence
  Description of Artificial Sequence: Synthetic oligonucleotide
agaaagugucauuccaguc

SEQ ID NO: 2289057 - RNA, 19 nt, Artificial Sequence
  Description of Artificial Sequence: Synthetic oligonucleotide
cacaacaugacuuuuguaa

SEQ ID NO: 2289058 - RNA, 19 nt, Artificial Sequence
  Description of Artificial Sequence: Synthetic oligonucleotide
aucacuuuuguaaaauauc

SEQ ID NO: 2289059 - RNA, 19 nt, Artificial Sequence
  Description of Artificial Sequence: Synthetic oligonucleotide
uugggcaaagcuuccaacc

SEQ ID NO: 2289060 - RNA, 19 nt, Artificial Sequence
  Description of Artificial Sequence: Synthetic oligonucleotide
guauuauugccagaaagug

SEQ ID NO: 2289061 - RNA, 19 nt, Artificial Sequence
  Description of Artificial Sequence: Synthetic oligonucleotide
uuuuaccaccuucuggagc

SEQ ID NO: 2289062 - RNA, 19 nt, Artificial Sequence
  Description of Artificial Sequence: Synthetic oligonucleotide
uggcugaucacuuuuguaa

SEQ ID NO: 2289063 - RNA, 19 nt, Artificial Sequence
  Description of Artificial Sequence: Synthetic oligonucleotide
cuaaaucaauuacaugcag

SEQ ID NO: 2289064 - RNA, 19 nt, Artificial Sequence
  Description of Artificial Sequence: Synthetic oligonucleotide
ucggaaucaacauccacac

SEQ ID NO: 2289065 - RNA, 19 nt, Artificial Sequence
  Description of Artificial Sequence: Synthetic oligonucleotide
uccuucaauuucuauuugc

SEQ ID NO: 2289066 - RNA, 19 nt, Artificial Sequence
  Description of Artificial Sequence: Synthetic oligonucleotide
uaacagaccauaugcuuug

SEQ ID NO: 2289067 - RNA, 19 nt, Artificial Sequence
  Description of Artificial Sequence: Synthetic oligonucleotide
aagguuuuauggcagucau

SEQ ID NO: 2289068 - RNA, 19 nt, Artificial Sequence
  Description of Artificial Sequence: Synthetic oligonucleotide
uuauggauuauuucuccuc

SEQ ID NO: 2289069 - RNA, 19 nt, Artificial Sequence
  Description of Artificial Sequence: Synthetic oligonucleotide
gaguguagaagguuuuaug

SEQ ID NO: 2289070 - RNA, 19 nt, Artificial Sequence
  Description of Artificial Sequence: Synthetic oligonucleotide
cucaaaucugucaauauaa

SEQ ID NO: 2289071 - RNA, 19 nt, Artificial Sequence
  Description of Artificial Sequence: Synthetic oligonucleotide
uuuacaugauggaaacaaa

SEQ ID NO: 2289072 - RNA, 19 nt, Artificial Sequence
  Description of Artificial Sequence: Synthetic oligonucleotide
uguguauguuaaauggguc

SEQ ID NO: 2289073 - RNA, 19 nt, Artificial Sequence
  Description of Artificial Sequence: Synthetic oligonucleotide
uguauguuaaaugggucac

SEQ ID NO: 2289074 - RNA, 19 nt, Artificial Sequence
  Description of Artificial Sequence: Synthetic oligonucleotide
uauuucuccuccuucaauu

SEQ ID NO: 2289075 - RNA, 19 nt, Artificial Sequence
  Description of Artificial Sequence: Synthetic oligonucleotide
aaaugagcagacccuggcu

SEQ ID NO: 2289076 - RNA, 19 nt, Artificial Sequence
  Description of Artificial Sequence: Synthetic oligonucleotide
ucaaaucugucaauauaaa

SEQ ID NO: 2289077 - RNA, 19 nt, Artificial Sequence
  Description of Artificial Sequence: Synthetic oligonucleotide
augcaaauuuacuucccag

SEQ ID NO: 2289078 - RNA, 19 nt, Artificial Sequence
  Description of Artificial Sequence: Synthetic oligonucleotide
accucaaagcuuuagcagu

SEQ ID NO: 2289079 - RNA, 19 nt, Artificial Sequence
  Description of Artificial Sequence: Synthetic oligonucleotide
ucauacagccacuugcggu

SEQ ID NO: 2289080 - RNA, 19 nt, Artificial Sequence
  Description of Artificial Sequence: Synthetic oligonucleotide
uuugugaauugcagugacc

SEQ ID NO: 2289081 - RNA, 19 nt, Artificial Sequence
  Description of Artificial Sequence: Synthetic oligonucleotide
aacucuugcaaagucuuga

SEQ ID NO: 2289082 - RNA, 19 nt, Artificial Sequence
  Description of Artificial Sequence: Synthetic oligonucleotide
guuaauugucuacaauuuc

SEQ ID NO: 2289083 - RNA, 19 nt, Artificial Sequence
  Description of Artificial Sequence: Synthetic oligonucleotide
guaaaagcaugucauuuga

SEQ ID NO: 2289084 - RNA, 19 nt, Artificial Sequence
  Description of Artificial Sequence: Synthetic oligonucleotide
uuacgacugaugcaaauuu

SEQ ID NO: 2289085 - RNA, 19 nt, Artificial Sequence
  Description of Artificial Sequence: Synthetic oligonucleotide
uccaguccuaagcugaagu

SEQ ID NO: 2289086 - RNA, 19 nt, Artificial Sequence
  Description of Artificial Sequence: Synthetic oligonucleotide
agagccagcgcuugaguuc

SEQ ID NO: 2289087 - RNA, 19 nt, Artificial Sequence
  Description of Artificial Sequence: Synthetic oligonucleotide
ucaaagcuuuagcaguucu

SEQ ID NO: 2289088 - RNA, 19 nt, Artificial Sequence
  Description of Artificial Sequence: Synthetic oligonucleotide
aucaucuaaaucaauuaca

SEQ ID NO: 2289089 - RNA, 19 nt, Artificial Sequence
  Description of Artificial Sequence: Synthetic oligonucleotide
acgacugaugcaaauuuac

SEQ ID NO: 2289090 - RNA, 19 nt, Artificial Sequence
  Description of Artificial Sequence: Synthetic oligonucleotide
uuugcuggccaguuauuug

SEQ ID NO: 2289091 - RNA, 19 nt, Artificial Sequence
  Description of Artificial Sequence: Synthetic oligonucleotide
gucgcagcggcauucagcc

SEQ ID NO: 2289092 - RNA, 19 nt, Artificial Sequence
  Description of Artificial Sequence: Synthetic oligonucleotide
cuacaauuuccauuuacga

SEQ ID NO: 2289093 - RNA, 19 nt, Artificial Sequence
  Description of Artificial Sequence: Synthetic oligonucleotide
ugaugaucuggguacauuu

SEQ ID NO: 2289094 - RNA, 19 nt, Artificial Sequence
  Description of Artificial Sequence: Synthetic oligonucleotide
aaauuguauuauugccaga

SEQ ID NO: 2289095 - RNA, 19 nt, Artificial Sequence
  Description of Artificial Sequence: Synthetic oligonucleotide
ccuaagcugaaguaaaagc

SEQ ID NO: 2289096 - RNA, 19 nt, Artificial Sequence
  Description of Artificial Sequence: Synthetic oligonucleotide
guguauguuaaauggguca

SEQ ID NO: 2289097 - RNA, 19 nt, Artificial Sequence
  Description of Artificial Sequence: Synthetic oligonucleotide
uccauuuacgacugaugca

SEQ ID NO: 2289098 - RNA, 19 nt, Artificial Sequence
  Description of Artificial Sequence: Synthetic oligonucleotide
uccuaagcugaaguaaaag

SEQ ID NO: 2289099 - RNA, 19 nt, Artificial Sequence
  Description of Artificial Sequence: Synthetic oligonucleotide
cauacagccacuugcgguc

SEQ ID NO: 2289100 - RNA, 19 nt, Artificial Sequence
  Description of Artificial Sequence: Synthetic oligonucleotide
ucauuugaugacaacucuu

SEQ ID NO: 2289101 - RNA, 19 nt, Artificial Sequence
  Description of Artificial Sequence: Synthetic oligonucleotide
aaaccuguguuccgagugu

SEQ ID NO: 2289102 - RNA, 19 nt, Artificial Sequence
  Description of Artificial Sequence: Synthetic oligonucleotide
auaucauaugggugacagg

SEQ ID NO: 2289103 - RNA, 19 nt, Artificial Sequence
  Description of Artificial Sequence: Synthetic oligonucleotide
ugggcaaagcuuccaacca

SEQ ID NO: 2289104 - RNA, 19 nt, Artificial Sequence
  Description of Artificial Sequence: Synthetic oligonucleotide
cugaaguaaaagcauguca

SEQ ID NO: 2289105 - RNA, 19 nt, Artificial Sequence
  Description of Artificial Sequence: Synthetic oligonucleotide
guguuccgaguguagaagg

SEQ ID NO: 2289106 - RNA, 19 nt, Artificial Sequence
  Description of Artificial Sequence: Synthetic oligonucleotide
caauuuccauuuacgacug

SEQ ID NO: 2289107 - RNA, 19 nt, Artificial Sequence
  Description of Artificial Sequence: Synthetic oligonucleotide
ucagaaacguggcaucauc

SEQ ID NO: 2289108 - RNA, 19 nt, Artificial Sequence
  Description of Artificial Sequence: Synthetic oligonucleotide
aucggaaucaacauccaca

SEQ ID NO: 2289109 - RNA, 19 nt, Artificial Sequence
  Description of Artificial Sequence: Synthetic oligonucleotide
aagcaucccaggcaguccu

SEQ ID NO: 2289110 - RNA, 19 nt, Artificial Sequence
  Description of Artificial Sequence: Synthetic oligonucleotide
cuuugcugcacuuucaucu

SEQ ID NO: 2289111 - RNA, 19 nt, Artificial Sequence
  Description of Artificial Sequence: Synthetic oligonucleotide
guuugugaauugcagugac

SEQ ID NO: 2289112 - RNA, 19 nt, Artificial Sequence
  Description of Artificial Sequence: Synthetic oligonucleotide
ucguagacuuuacucuuug

SEQ ID NO: 2289113 - RNA, 19 nt, Artificial Sequence
  Description of Artificial Sequence: Synthetic oligonucleotide
ugggauaacuugucuguca

SEQ ID NO: 2289114 - RNA, 19 nt, Artificial Sequence
  Description of Artificial Sequence: Synthetic oligonucleotide
ugguagagccacagguggg

SEQ ID NO: 2289115 - RNA, 19 nt, Artificial Sequence
  Description of Artificial Sequence: Synthetic oligonucleotide
cugcucacuucuuugcugc

SEQ ID NO: 2289116 - RNA, 19 nt, Artificial Sequence
  Description of Artificial Sequence: Synthetic oligonucleotide
ugacaacucuugcaaaguc

SEQ ID NO: 2289117 - RNA, 19 nt, Artificial Sequence
  Description of Artificial Sequence: Synthetic oligonucleotide
gccagcauguuuauuaugg

SEQ ID NO: 2289118 - RNA, 19 nt, Artificial Sequence
  Description of Artificial Sequence: Synthetic oligonucleotide
ucauuccaguccuaagcug

SEQ ID NO: 2289119 - RNA, 19 nt, Artificial Sequence
  Description of Artificial Sequence: Synthetic oligonucleotide
ucggguuuccgucucuggc

SEQ ID NO: 2289120 - RNA, 19 nt, Artificial Sequence
  Description of Artificial Sequence: Synthetic oligonucleotide
uuggugagcuuccuuuucu

SEQ ID NO: 2289121 - RNA, 19 nt, Artificial Sequence
  Description of Artificial Sequence: Synthetic oligonucleotide
uuugggcaaagcuuccaac

SEQ ID NO: 2289122 - RNA, 19 nt, Artificial Sequence
  Description of Artificial Sequence: Synthetic oligonucleotide
aucuuugcuggccaguuau

SEQ ID NO: 2289123 - RNA, 19 nt, Artificial Sequence
  Description of Artificial Sequence: Synthetic oligonucleotide
ggguuugugaauugcagug

SEQ ID NO: 2289124 - RNA, 19 nt, Artificial Sequence
  Description of Artificial Sequence: Synthetic oligonucleotide
auuuacuucccagaauggu

SEQ ID NO: 2289125 - RNA, 19 nt, Artificial Sequence
  Description of Artificial Sequence: Synthetic oligonucleotide
uaaaagcaugucauuugau

SEQ ID NO: 2289126 - RNA, 19 nt, Artificial Sequence
  Description of Artificial Sequence: Synthetic oligonucleotide
gugaccucaaagcuuuagc

SEQ ID NO: 2289127 - RNA, 19 nt, Artificial Sequence
  Description of Artificial Sequence: Synthetic oligonucleotide
ugcugcacuuucaucuuug

SEQ ID NO: 2289128 - RNA, 19 nt, Artificial Sequence
  Description of Artificial Sequence: Synthetic oligonucleotide
ucuguuugcuuucccgggu

SEQ ID NO: 2289129 - RNA, 19 nt, Artificial Sequence
  Description of Artificial Sequence: Synthetic oligonucleotide
aacguggcaucaucuaaau

SEQ ID NO: 2289130 - RNA, 19 nt, Artificial Sequence
  Description of Artificial Sequence: Synthetic oligonucleotide
ugaucacuuuuguaaaaua

SEQ ID NO: 2289131 - RNA, 19 nt, Artificial Sequence
  Description of Artificial Sequence: Synthetic oligonucleotide
uuacucuuugcugggauaa

SEQ ID NO: 2289132 - RNA, 19 nt, Artificial Sequence
  Description of Artificial Sequence: Synthetic oligonucleotide
uggagcaaauucuguuugc

SEQ ID NO: 2289133 - RNA, 19 nt, Artificial Sequence
  Description of Artificial Sequence: Synthetic oligonucleotide
acugcucacuucuuugcug

SEQ ID NO: 2289134 - RNA, 19 nt, Artificial Sequence
  Description of Artificial Sequence: Synthetic oligonucleotide
gugaauugcagugaccuca

SEQ ID NO: 2289135 - RNA, 19 nt, Artificial Sequence
  Description of Artificial Sequence: Synthetic oligonucleotide
cuggagcaaauucuguuug

SEQ ID NO: 2289136 - RNA, 19 nt, Artificial Sequence
  Description of Artificial Sequence: Synthetic oligonucleotide
aguuaauugucuacaauuu

SEQ ID NO: 2289137 - RNA, 19 nt, Artificial Sequence
  Description of Artificial Sequence: Synthetic oligonucleotide
uuucaucuuugcuggccag

SEQ ID NO: 2289138 - RNA, 19 nt, Artificial Sequence
  Description of Artificial Sequence: Synthetic oligonucleotide
uggccaguuauuuggcuga

SEQ ID NO: 2289139 - RNA, 19 nt, Artificial Sequence
  Description of Artificial Sequence: Synthetic oligonucleotide
uuuacgacugaugcaaauu

SEQ ID NO: 2289140 - RNA, 19 nt, Artificial Sequence
  Description of Artificial Sequence: Synthetic oligonucleotide
uucuggagcaaauucuguu

SEQ ID NO: 2289141 - RNA, 19 nt, Artificial Sequence
  Description of Artificial Sequence: Synthetic oligonucleotide
gauaacagaccauaugcuu

SEQ ID NO: 2289142 - RNA, 19 nt, Artificial Sequence
  Description of Artificial Sequence: Synthetic oligonucleotide
cguggcaucaucuaaauca

SEQ ID NO: 2289143 - RNA, 19 nt, Artificial Sequence
  Description of Artificial Sequence: Synthetic oligonucleotide
agcauguuuauuauggauu

SEQ ID NO: 2289144 - RNA, 19 nt, Artificial Sequence
  Description of Artificial Sequence: Synthetic oligonucleotide
augacuuuuguaacuccuc

SEQ ID NO: 2289145 - RNA, 19 nt, Artificial Sequence
  Description of Artificial Sequence: Synthetic oligonucleotide
cauaugcuuugccagcaug

SEQ ID NO: 2289146 - RNA, 19 nt, Artificial Sequence
  Description of Artificial Sequence: Synthetic oligonucleotide
auuuacgacugaugcaaau

SEQ ID NO: 2289147 - RNA, 19 nt, Artificial Sequence
  Description of Artificial Sequence: Synthetic oligonucleotide
ugaguucuuggugagcuuc

SEQ ID NO: 2289148 - RNA, 19 nt, Artificial Sequence
  Description of Artificial Sequence: Synthetic oligonucleotide
ugcagugaccucaaagcuu

SEQ ID NO: 2289149 - RNA, 19 nt, Artificial Sequence
  Description of Artificial Sequence: Synthetic oligonucleotide
ugucguagacuuuacucuu

SEQ ID NO: 2289150 - RNA, 19 nt, Artificial Sequence
  Description of Artificial Sequence: Synthetic oligonucleotide
ugccacugaaaaugagcag

SEQ ID NO: 2289151 - RNA, 19 nt, Artificial Sequence
  Description of Artificial Sequence: Synthetic oligonucleotide
auuguauuauugccagaaa

SEQ ID NO: 2289152 - RNA, 19 nt, Artificial Sequence
  Description of Artificial Sequence: Synthetic oligonucleotide
cucauacagccacuugcgg

SEQ ID NO: 2289153 - RNA, 19 nt, Artificial Sequence
  Description of Artificial Sequence: Synthetic oligonucleotide
aaacguggcaucaucuaaa

SEQ ID NO: 2289154 - RNA, 19 nt, Artificial Sequence
  Description of Artificial Sequence: Synthetic oligonucleotide
gaaucaacauccacacuuc

SEQ ID NO: 2289155 - RNA, 19 nt, Artificial Sequence
  Description of Artificial Sequence: Synthetic oligonucleotide
cauuugguagagccacagg

SEQ ID NO: 2289156 - RNA, 19 nt, Artificial Sequence
  Description of Artificial Sequence: Synthetic oligonucleotide
uggauuauuucuccuccuu

SEQ ID NO: 2289157 - RNA, 19 nt, Artificial Sequence
  Description of Artificial Sequence: Synthetic oligonucleotide
uacgacugaugcaaauuua

SEQ ID NO: 2289158 - RNA, 19 nt, Artificial Sequence
  Description of Artificial Sequence: Synthetic oligonucleotide
agaauggucacugcucacu

SEQ ID NO: 2289159 - RNA, 19 nt, Artificial Sequence
  Description of Artificial Sequence: Synthetic oligonucleotide
uuccgaguguagaagguuu

SEQ ID NO: 2289160 - RNA, 19 nt, Artificial Sequence
  Description of Artificial Sequence: Synthetic oligonucleotide
ucaucggaaucaacaucca

SEQ ID NO: 2289161 - RNA, 19 nt, Artificial Sequence
  Description of Artificial Sequence: Synthetic oligonucleotide
acuugucugucagagccag

SEQ ID NO: 2289162 - RNA, 19 nt, Artificial Sequence
  Description of Artificial Sequence: Synthetic oligonucleotide
auaugggugacagggagau

SEQ ID NO: 2289163 - RNA, 19 nt, Artificial Sequence
  Description of Artificial Sequence: Synthetic oligonucleotide
aaauaucauaugggugaca

SEQ ID NO: 2289164 - RNA, 19 nt, Artificial Sequence
  Description of Artificial Sequence: Synthetic oligonucleotide
auaugcuuugccagcaugu

SEQ ID NO: 2289165 - RNA, 19 nt, Artificial Sequence
  Description of Artificial Sequence: Synthetic oligonucleotide
aaucaauuacaugcagauu

SEQ ID NO: 2289166 - RNA, 19 nt, Artificial Sequence
  Description of Artificial Sequence: Synthetic oligonucleotide
ggaaucaacauccacacuu

SEQ ID NO: 2289167 - RNA, 19 nt, Artificial Sequence
  Description of Artificial Sequence: Synthetic oligonucleotide
ugaaaccuguguuccgagu

SEQ ID NO: 2289168 - RNA, 19 nt, Artificial Sequence
  Description of Artificial Sequence: Synthetic oligonucleotide
agaaacguggcaucaucua

SEQ ID NO: 2289169 - RNA, 19 nt, Artificial Sequence
  Description of Artificial Sequence: Synthetic oligonucleotide
ucucuggcggucaucggaa

SEQ ID NO: 2289170 - RNA, 19 nt, Artificial Sequence
  Description of Artificial Sequence: Synthetic oligonucleotide
caaagucuugaaaccugug

SEQ ID NO: 2289171 - RNA, 19 nt, Artificial Sequence
  Description of Artificial Sequence: Synthetic oligonucleotide
acaggcguagaagcauccc

SEQ ID NO: 2289172 - RNA, 19 nt, Artificial Sequence
  Description of Artificial Sequence: Synthetic oligonucleotide
gaucacuuuuguaaaauau

SEQ ID NO: 2289173 - RNA, 19 nt, Artificial Sequence
  Description of Artificial Sequence: Synthetic oligonucleotide
agugaccucaaagcuuuag

SEQ ID NO: 2289174 - RNA, 19 nt, Artificial Sequence
  Description of Artificial Sequence: Synthetic oligonucleotide
ugugaauugcagugaccuc

SEQ ID NO: 2289175 - RNA, 19 nt, Artificial Sequence
  Description of Artificial Sequence: Synthetic oligonucleotide
gacuuuuguaacuccucaa

SEQ ID NO: 2289176 - RNA, 19 nt, Artificial Sequence
  Description of Artificial Sequence: Synthetic oligonucleotide
ugcuuucccggguuuguga

SEQ ID NO: 2289177 - RNA, 19 nt, Artificial Sequence
  Description of Artificial Sequence: Synthetic oligonucleotide
aauuuccauuuacgacuga

SEQ ID NO: 2289178 - RNA, 19 nt, Artificial Sequence
  Description of Artificial Sequence: Synthetic oligonucleotide
ucuuugcugcacuuucauc

SEQ ID NO: 2289179 - RNA, 19 nt, Artificial Sequence
  Description of Artificial Sequence: Synthetic oligonucleotide
ugcuggccaguuauuuggc

SEQ ID NO: 2289180 - RNA, 19 nt, Artificial Sequence
  Description of Artificial Sequence: Synthetic oligonucleotide
agcugaaguaaaagcaugu

SEQ ID NO: 2289181 - RNA, 19 nt, Artificial Sequence
  Description of Artificial Sequence: Synthetic oligonucleotide
agggagauaacagaccaua

SEQ ID NO: 2289182 - RNA, 19 nt, Artificial Sequence
  Description of Artificial Sequence: Synthetic oligonucleotide
gcaaauuuacuucccagaa

SEQ ID NO: 2289183 - RNA, 19 nt, Artificial Sequence
  Description of Artificial Sequence: Synthetic oligonucleotide
uuccaaccaggaaccagcu

SEQ ID NO: 2289184 - RNA, 19 nt, Artificial Sequence
  Description of Artificial Sequence: Synthetic oligonucleotide
augacaacucuugcaaagu

SEQ ID NO: 2289185 - RNA, 19 nt, Artificial Sequence
  Description of Artificial Sequence: Synthetic oligonucleotide
uuauuuggcugaucacuuu

SEQ ID NO: 2289186 - RNA, 19 nt, Artificial Sequence
  Description of Artificial Sequence: Synthetic oligonucleotide
caguuauuuggcugaucac

SEQ ID NO: 2289187 - RNA, 19 nt, Artificial Sequence
  Description of Artificial Sequence: Synthetic oligonucleotide
acguggcaucaucuaaauc

SEQ ID NO: 2289188 - RNA, 19 nt, Artificial Sequence
  Description of Artificial Sequence: Synthetic oligonucleotide
caucggaaucaacauccac

SEQ ID NO: 2289189 - RNA, 19 nt, Artificial Sequence
  Description of Artificial Sequence: Synthetic oligonucleotide
ccccacauuugguagagcc

SEQ ID NO: 2289190 - RNA, 19 nt, Artificial Sequence
  Description of Artificial Sequence: Synthetic oligonucleotide
uuggcugaucacuuuugua

SEQ ID NO: 2289191 - RNA, 19 nt, Artificial Sequence
  Description of Artificial Sequence: Synthetic oligonucleotide
uuugcuuucccggguuugu

SEQ ID NO: 2289192 - RNA, 19 nt, Artificial Sequence
  Description of Artificial Sequence: Synthetic oligonucleotide
cugaaaaugagcagacccu

SEQ ID NO: 2289193 - RNA, 19 nt, Artificial Sequence
  Description of Artificial Sequence: Synthetic oligonucleotide
ucugucagagccagcgcuu

SEQ ID NO: 2289194 - RNA, 19 nt, Artificial Sequence
  Description of Artificial Sequence: Synthetic oligonucleotide
uugccagcauguuuauuau

SEQ ID NO: 2289195 - RNA, 19 nt, Artificial Sequence
  Description of Artificial Sequence: Synthetic oligonucleotide
gcucauacagccacuugcg

SEQ ID NO: 2289196 - RNA, 19 nt, Artificial Sequence
  Description of Artificial Sequence: Synthetic oligonucleotide
acaacucuugcaaagucuu

SEQ ID NO: 2289197 - RNA, 19 nt, Artificial Sequence
  Description of Artificial Sequence: Synthetic oligonucleotide
augggucacaacaugacuu

SEQ ID NO: 2289198 - RNA, 19 nt, Artificial Sequence
  Description of Artificial Sequence: Synthetic oligonucleotide
gaaccagcugucuuccaaa

SEQ ID NO: 2289199 - RNA, 19 nt, Artificial Sequence
  Description of Artificial Sequence: Synthetic oligonucleotide
uccaaccaggaaccagcug

SEQ ID NO: 2289200 - RNA, 19 nt, Artificial Sequence
  Description of Artificial Sequence: Synthetic oligonucleotide
aguccuaagcugaaguaaa

SEQ ID NO: 2289201 - RNA, 19 nt, Artificial Sequence
  Description of Artificial Sequence: Synthetic oligonucleotide
aggcguagaagcaucccag

SEQ ID NO: 2289202 - RNA, 19 nt, Artificial Sequence
  Description of Artificial Sequence: Synthetic oligonucleotide
acuuugcacucagaaacgu

SEQ ID NO: 2289203 - RNA, 19 nt, Artificial Sequence
  Description of Artificial Sequence: Synthetic oligonucleotide
cuauuugcucauacagcca

SEQ ID NO: 2289204 - RNA, 19 nt, Artificial Sequence
  Description of Artificial Sequence: Synthetic oligonucleotide
ucacaacaugacuuuugua

SEQ ID NO: 2289205 - RNA, 19 nt, Artificial Sequence
  Description of Artificial Sequence: Synthetic oligonucleotide
ucuggcggucaucggaauc

SEQ ID NO: 2289206 - RNA, 19 nt, Artificial Sequence
  Description of Artificial Sequence: Synthetic oligonucleotide
gucauuccaguccuaagcu

SEQ ID NO: 2289207 - RNA, 19 nt, Artificial Sequence
  Description of Artificial Sequence: Synthetic oligonucleotide
gucauuugaugacaacucu

SEQ ID NO: 2289208 - RNA, 19 nt, Artificial Sequence
  Description of Artificial Sequence: Synthetic oligonucleotide
acaggugggacaggcguag

SEQ ID NO: 2289209 - RNA, 19 nt, Artificial Sequence
  Description of Artificial Sequence: Synthetic oligonucleotide
gcauguuuauuauggauua

SEQ ID NO: 2289210 - RNA, 19 nt, Artificial Sequence
  Description of Artificial Sequence: Synthetic oligonucleotide
gucacaacaugacuuuugu

SEQ ID NO: 2289211 - RNA, 19 nt, Artificial Sequence
  Description of Artificial Sequence: Synthetic oligonucleotide
gcaucaucuaaaucaauua

SEQ ID NO: 2289212 - RNA, 19 nt, Artificial Sequence
  Description of Artificial Sequence: Synthetic oligonucleotide
uucaucuuugcuggccagu

SEQ ID NO: 2289213 - RNA, 19 nt, Artificial Sequence
  Description of Artificial Sequence: Synthetic oligonucleotide
ggguuuccgucucuggcgg

SEQ ID NO: 2289214 - RNA, 19 nt, Artificial Sequence
  Description of Artificial Sequence: Synthetic oligonucleotide
ggcguagaagcaucccagg

SEQ ID NO: 2289215 - RNA, 19 nt, Artificial Sequence
  Description of Artificial Sequence: Synthetic oligonucleotide
uccgaguguagaagguuuu

SEQ ID NO: 2289216 - RNA, 19 nt, Artificial Sequence
  Description of Artificial Sequence: Synthetic oligonucleotide
gacaggcguagaagcaucc

SEQ ID NO: 2289217 - RNA, 19 nt, Artificial Sequence
  Description of Artificial Sequence: Synthetic oligonucleotide
gucucuggcggucaucgga

SEQ ID NO: 2289218 - RNA, 19 nt, Artificial Sequence
  Description of Artificial Sequence: Synthetic oligonucleotide
cucggguuuccgucucugg

SEQ ID NO: 2289219 - RNA, 19 nt, Artificial Sequence
  Description of Artificial Sequence: Synthetic oligonucleotide
cauaugggugacagggaga

SEQ ID NO: 2289220 - RNA, 19 nt, Artificial Sequence
  Description of Artificial Sequence: Synthetic oligonucleotide
cacugaaaaugagcagacc

SEQ ID NO: 2289221 - RNA, 19 nt, Artificial Sequence
  Description of Artificial Sequence: Synthetic oligonucleotide
caggaaccagcugucuucc

SEQ ID NO: 2289222 - RNA, 19 nt, Artificial Sequence
  Description of Artificial Sequence: Synthetic oligonucleotide
gguacauuuugggcaaagc

SEQ ID NO: 2289223 - RNA, 19 nt, Artificial Sequence
  Description of Artificial Sequence: Synthetic oligonucleotide
uaugcuuugccagcauguu

SEQ ID NO: 2289224 - RNA, 19 nt, Artificial Sequence
  Description of Artificial Sequence: Synthetic oligonucleotide
guuaaaugggucacaacau

SEQ ID NO: 2289225 - RNA, 19 nt, Artificial Sequence
  Description of Artificial Sequence: Synthetic oligonucleotide
guuuuauggcagucauguc

SEQ ID NO: 2289226 - RNA, 19 nt, Artificial Sequence
  Description of Artificial Sequence: Synthetic oligonucleotide
uguuugcuuucccggguuu

SEQ ID NO: 2289227 - RNA, 19 nt, Artificial Sequence
  Description of Artificial Sequence: Synthetic oligonucleotide
acuccucaaaucugucaau

SEQ ID NO: 2289228 - RNA, 19 nt, Artificial Sequence
  Description of Artificial Sequence: Synthetic oligonucleotide
ugggugacagggagauaac

SEQ ID NO: 2289229 - RNA, 19 nt, Artificial Sequence
  Description of Artificial Sequence: Synthetic oligonucleotide
ggucaucggaaucaacauc

SEQ ID NO: 2289230 - RNA, 19 nt, Artificial Sequence
  Description of Artificial Sequence: Synthetic oligonucleotide
ccaaacuuugcacucagaa

SEQ ID NO: 2289231 - RNA, 19 nt, Artificial Sequence
  Description of Artificial Sequence: Synthetic oligonucleotide
ggugggacaggcguagaag

SEQ ID NO: 2289232 - RNA, 19 nt, Artificial Sequence
  Description of Artificial Sequence: Synthetic oligonucleotide
ggucacaacaugacuuuug

SEQ ID NO: 2289233 - RNA, 19 nt, Artificial Sequence
  Description of Artificial Sequence: Synthetic oligonucleotide
ccacugaaaaugagcagac

SEQ ID NO: 2289234 - RNA, 19 nt, Artificial Sequence
  Description of Artificial Sequence: Synthetic oligonucleotide
uugaugaucuggguacauu

SEQ ID NO: 2289235 - RNA, 19 nt, Artificial Sequence
  Description of Artificial Sequence: Synthetic oligonucleotide
guauguuaaaugggucaca

SEQ ID NO: 2289236 - RNA, 19 nt, Artificial Sequence
  Description of Artificial Sequence: Synthetic oligonucleotide
augcuuugccagcauguuu

SEQ ID NO: 2289237 - RNA, 19 nt, Artificial Sequence
  Description of Artificial Sequence: Synthetic oligonucleotide
ccacauuugguagagccac

SEQ ID NO: 2289238 - RNA, 19 nt, Artificial Sequence
  Description of Artificial Sequence: Synthetic oligonucleotide
ucuuugcuggccaguuauu

SEQ ID NO: 2289239 - RNA, 19 nt, Artificial Sequence
  Description of Artificial Sequence: Synthetic oligonucleotide
caggcguagaagcauccca

SEQ ID NO: 2289240 - RNA, 19 nt, Artificial Sequence
  Description of Artificial Sequence: Synthetic oligonucleotide
gcguagaagcaucccaggc

SEQ ID NO: 2289241 - RNA, 19 nt, Artificial Sequence
  Description of Artificial Sequence: Synthetic oligonucleotide
agccccacauuugguagag

SEQ ID NO: 2289242 - RNA, 19 nt, Artificial Sequence
  Description of Artificial Sequence: Synthetic oligonucleotide
ccauuuacgacugaugcaa

SEQ ID NO: 2289243 - RNA, 19 nt, Artificial Sequence
  Description of Artificial Sequence: Synthetic oligonucleotide
ucccggguuugugaauugc

SEQ ID NO: 2289244 - RNA, 19 nt, Artificial Sequence
  Description of Artificial Sequence: Synthetic oligonucleotide
acuuuacucuuugcuggga

SEQ ID NO: 2289245 - RNA, 19 nt, Artificial Sequence
  Description of Artificial Sequence: Synthetic oligonucleotide
ccggguuugugaauugcag

SEQ ID NO: 2289246 - RNA, 19 nt, Artificial Sequence
  Description of Artificial Sequence: Synthetic oligonucleotide
auugaugaucuggguacau

SEQ ID NO: 2289247 - RNA, 19 nt, Artificial Sequence
  Description of Artificial Sequence: Synthetic oligonucleotide
cuggcggucaucggaauca

SEQ ID NO: 2289248 - RNA, 19 nt, Artificial Sequence
  Description of Artificial Sequence: Synthetic oligonucleotide
uuuccgucucuggcgguca

SEQ ID NO: 2289249 - RNA, 19 nt, Artificial Sequence
  Description of Artificial Sequence: Synthetic oligonucleotide
aaccuguguuccgagugua

SEQ ID NO: 2289250 - RNA, 19 nt, Artificial Sequence
  Description of Artificial Sequence: Synthetic oligonucleotide
cacuuuuguaaaauaucau

SEQ ID NO: 2289251 - RNA, 19 nt, Artificial Sequence
  Description of Artificial Sequence: Synthetic oligonucleotide
cagaaacguggcaucaucu

SEQ ID NO: 2289252 - RNA, 19 nt, Artificial Sequence
  Description of Artificial Sequence: Synthetic oligonucleotide
caguccuaagcugaaguaa

SEQ ID NO: 2289253 - RNA, 19 nt, Artificial Sequence
  Description of Artificial Sequence: Synthetic oligonucleotide
cucaaagcuuuagcaguuc

SEQ ID NO: 2289254 - RNA, 19 nt, Artificial Sequence
  Description of Artificial Sequence: Synthetic oligonucleotide
ggcugaucacuuuuguaaa

SEQ ID NO: 2289255 - RNA, 19 nt, Artificial Sequence
  Description of Artificial Sequence: Synthetic oligonucleotide
uacucuuugcugggauaac

SEQ ID NO: 2289256 - RNA, 19 nt, Artificial Sequence
  Description of Artificial Sequence: Synthetic oligonucleotide
cucuugcaaagucuugaaa

SEQ ID NO: 2289257 - RNA, 19 nt, Artificial Sequence
  Description of Artificial Sequence: Synthetic oligonucleotide
cccagaauggucacugcuc

SEQ ID NO: 2289258 - RNA, 19 nt, Artificial Sequence
  Description of Artificial Sequence: Synthetic oligonucleotide
agguuuuauggcagucaug

SEQ ID NO: 2289259 - RNA, 19 nt, Artificial Sequence
  Description of Artificial Sequence: Synthetic oligonucleotide
guuauuuggcugaucacuu

SEQ ID NO: 2289260 - RNA, 19 nt, Artificial Sequence
  Description of Artificial Sequence: Synthetic oligonucleotide
gguuugugaauugcaguga

SEQ ID NO: 2289261 - RNA, 19 nt, Artificial Sequence
  Description of Artificial Sequence: Synthetic oligonucleotide
auuugcucauacagccacu

SEQ ID NO: 2289262 - RNA, 19 nt, Artificial Sequence
  Description of Artificial Sequence: Synthetic oligonucleotide
uugaguucuuggugagcuu

SEQ ID NO: 2289263 - RNA, 19 nt, Artificial Sequence
  Description of Artificial Sequence: Synthetic oligonucleotide
gcugaaguaaaagcauguc

SEQ ID NO: 2289264 - RNA, 19 nt, Artificial Sequence
  Description of Artificial Sequence: Synthetic oligonucleotide
uggcugucguagacuuuac

SEQ ID NO: 2289265 - RNA, 19 nt, Artificial Sequence
  Description of Artificial Sequence: Synthetic oligonucleotide
gcagucacagagauccaug

SEQ ID NO: 2289266 - RNA, 19 nt, Artificial Sequence
  Description of Artificial Sequence: Synthetic oligonucleotide
cauuuacgacugaugcaaa

SEQ ID NO: 2289267 - RNA, 19 nt, Artificial Sequence
  Description of Artificial Sequence: Synthetic oligonucleotide
cagcauguuuauuauggau

SEQ ID NO: 2289268 - RNA, 19 nt, Artificial Sequence
  Description of Artificial Sequence: Synthetic oligonucleotide
cacuugcggucgcagcggc

SEQ ID NO: 2289269 - RNA, 19 nt, Artificial Sequence
  Description of Artificial Sequence: Synthetic oligonucleotide
cauugaugaucuggguaca

SEQ ID NO: 2289270 - RNA, 19 nt, Artificial Sequence
  Description of Artificial Sequence: Synthetic oligonucleotide
ccagcgcuugaguucuugg

SEQ ID NO: 2289271 - RNA, 19 nt, Artificial Sequence
  Description of Artificial Sequence: Synthetic oligonucleotide
ccagaauggucacugcuca

SEQ ID NO: 2289272 - RNA, 19 nt, Artificial Sequence
  Description of Artificial Sequence: Synthetic oligonucleotide
cuggcugucguagacuuua

SEQ ID NO: 2289273 - RNA, 19 nt, Artificial Sequence
  Description of Artificial Sequence: Synthetic oligonucleotide
cugucagagccagcgcuug

SEQ ID NO: 2289274 - RNA, 19 nt, Artificial Sequence
  Description of Artificial Sequence: Synthetic oligonucleotide
cgcagcggcauucagcccc

SEQ ID NO: 2289275 - RNA, 19 nt, Artificial Sequence
  Description of Artificial Sequence: Synthetic oligonucleotide
gcugaucacuuuuguaaaa

SEQ ID NO: 2289276 - RNA, 19 nt, Artificial Sequence
  Description of Artificial Sequence: Synthetic oligonucleotide
acuucccagaauggucacu

SEQ ID NO: 2289277 - RNA, 19 nt, Artificial Sequence
  Description of Artificial Sequence: Synthetic oligonucleotide
ggauaacuugucugucaga

SEQ ID NO: 2289278 - RNA, 19 nt, Artificial Sequence
  Description of Artificial Sequence: Synthetic oligonucleotide
cuuuacucuuugcugggau

SEQ ID NO: 2289279 - RNA, 19 nt, Artificial Sequence
  Description of Artificial Sequence: Synthetic oligonucleotide
guuuccgucucuggcgguc

SEQ ID NO: 2289280 - RNA, 19 nt, Artificial Sequence
  Description of Artificial Sequence: Synthetic oligonucleotide
agcggcauucagccccaca

SEQ ID NO: 2289281 - RNA, 19 nt, Artificial Sequence
  Description of Artificial Sequence: Synthetic oligonucleotide
ggguacauuuugggcaaag

SEQ ID NO: 2289282 - RNA, 19 nt, Artificial Sequence
  Description of Artificial Sequence: Synthetic oligonucleotide
ggucgcagcggcauucagc

SEQ ID NO: 2289283 - RNA, 19 nt, Artificial Sequence
  Description of Artificial Sequence: Synthetic oligonucleotide
guagagccacaggugggac

SEQ ID NO: 2289284 - RNA, 19 nt, Artificial Sequence
  Description of Artificial Sequence: Synthetic oligonucleotide
auucagccccacauuuggu

SEQ ID NO: 2289285 - RNA, 19 nt, Artificial Sequence
  Description of Artificial Sequence: Synthetic oligonucleotide
gaugaucuggguacauuuu

SEQ ID NO: 2289286 - RNA, 19 nt, Artificial Sequence
  Description of Artificial Sequence: Synthetic oligonucleotide
ccgucucuggcggucaucg

SEQ ID NO: 2289287 - RNA, 19 nt, Artificial Sequence
  Description of Artificial Sequence: Synthetic oligonucleotide
ccucaaaucugucaauaua

SEQ ID NO: 2289288 - RNA, 19 nt, Artificial Sequence
  Description of Artificial Sequence: Synthetic oligonucleotide
cguagaagcaucccaggca

SEQ ID NO: 2289289 - RNA, 19 nt, Artificial Sequence
  Description of Artificial Sequence: Synthetic oligonucleotide
gagccagcgcuugaguucu

SEQ ID NO: 2289290 - RNA, 19 nt, Artificial Sequence
  Description of Artificial Sequence: Synthetic oligonucleotide
ccaugccacugaaaaugag

SEQ ID NO: 2289291 - RNA, 19 nt, Artificial Sequence
  Description of Artificial Sequence: Synthetic oligonucleotide
gcauucagccccacauuug

SEQ ID NO: 2289292 - RNA, 19 nt, Artificial Sequence
  Description of Artificial Sequence: Synthetic oligonucleotide
guccuaagcugaaguaaaa

SEQ ID NO: 2289293 - RNA, 19 nt, Artificial Sequence
  Description of Artificial Sequence: Synthetic oligonucleotide
ucgcagcggcauucagccc

SEQ ID NO: 2289294 - RNA, 19 nt, Artificial Sequence
  Description of Artificial Sequence: Synthetic oligonucleotide
gcuuucccggguuugugaa

SEQ ID NO: 2289295 - RNA, 19 nt, Artificial Sequence
  Description of Artificial Sequence: Synthetic oligonucleotide
cagccccacauuugguaga

SEQ ID NO: 2289296 - RNA, 19 nt, Artificial Sequence
  Description of Artificial Sequence: Synthetic oligonucleotide
ggcauucagccccacauuu

SEQ ID NO: 2289297 - RNA, 19 nt, Artificial Sequence
  Description of Artificial Sequence: Synthetic oligonucleotide
cugcacuuucaucuuugcu

SEQ ID NO: 2289298 - RNA, 19 nt, Artificial Sequence
  Description of Artificial Sequence: Synthetic oligonucleotide
uuccgucucuggcggucau

SEQ ID NO: 2289299 - RNA, 19 nt, Artificial Sequence
  Description of Artificial Sequence: Synthetic oligonucleotide
ggacaggcguagaagcauc

SEQ ID NO: 2289300 - RNA, 19 nt, Artificial Sequence
  Description of Artificial Sequence: Synthetic oligonucleotide
cacaggugggacaggcgua

SEQ ID NO: 2289301 - RNA, 19 nt, Artificial Sequence
  Description of Artificial Sequence: Synthetic oligonucleotide
agcuuccaaccaggaacca

SEQ ID NO: 2289302 - RNA, 19 nt, Artificial Sequence
  Description of Artificial Sequence: Synthetic oligonucleotide
uggcggucaucggaaucaa

SEQ ID NO: 2289303 - RNA, 19 nt, Artificial Sequence
  Description of Artificial Sequence: Synthetic oligonucleotide
gcaaagcuuccaaccagga

SEQ ID NO: 2289304 - RNA, 19 nt, Artificial Sequence
  Description of Artificial Sequence: Synthetic oligonucleotide
cuuugcuggccaguuauuu

SEQ ID NO: 2289305 - RNA, 19 nt, Artificial Sequence
  Description of Artificial Sequence: Synthetic oligonucleotide
caucuuugcuggccaguua

SEQ ID NO: 2289306 - RNA, 19 nt, Artificial Sequence
  Description of Artificial Sequence: Synthetic oligonucleotide
gcucacuucuuugcugcac

SEQ ID NO: 2289307 - RNA, 19 nt, Artificial Sequence
  Description of Artificial Sequence: Synthetic oligonucleotide
gcagugaccucaaagcuuu

SEQ ID NO: 2289308 - RNA, 19 nt, Artificial Sequence
  Description of Artificial Sequence: Synthetic oligonucleotide
ccacuugcggucgcagcgg

SEQ ID NO: 2289309 - RNA, 19 nt, Artificial Sequence
  Description of Artificial Sequence: Synthetic oligonucleotide
uccgucucuggcggucauc

SEQ ID NO: 2289310 - RNA, 19 nt, Artificial Sequence
  Description of Artificial Sequence: Synthetic oligonucleotide
ccaguccuaagcugaagua

SEQ ID NO: 2289311 - RNA, 19 nt, Artificial Sequence
  Description of Artificial Sequence: Synthetic oligonucleotide
guuccgaguguagaagguu

SEQ ID NO: 2289312 - RNA, 19 nt, Artificial Sequence
  Description of Artificial Sequence: Synthetic oligonucleotide
cccggguuugugaauugca

SEQ ID NO: 2289313 - RNA, 19 nt, Artificial Sequence
  Description of Artificial Sequence: Synthetic oligonucleotide
cagagccagcgcuugaguu

SEQ ID NO: 2289314 - RNA, 19 nt, Artificial Sequence
  Description of Artificial Sequence: Synthetic oligonucleotide
gcacucagaaacguggcau

SEQ ID NO: 2289315 - RNA, 19 nt, Artificial Sequence
  Description of Artificial Sequence: Synthetic oligonucleotide
caacauccacacuuccauu

SEQ ID NO: 2289316 - RNA, 19 nt, Artificial Sequence
  Description of Artificial Sequence: Synthetic oligonucleotide
cagggagauaacagaccau

SEQ ID NO: 2289317 - RNA, 19 nt, Artificial Sequence
  Description of Artificial Sequence: Synthetic oligonucleotide
acuugcggucgcagcggca

SEQ ID NO: 2289318 - RNA, 19 nt, Artificial Sequence
  Description of Artificial Sequence: Synthetic oligonucleotide
cagcugucuuccaaacuuu

SEQ ID NO: 2289319 - RNA, 19 nt, Artificial Sequence
  Description of Artificial Sequence: Synthetic oligonucleotide
gccagcgcuugaguucuug

SEQ ID NO: 2289320 - RNA, 19 nt, Artificial Sequence
  Description of Artificial Sequence: Synthetic oligonucleotide
gucguagacuuuacucuuu

SEQ ID NO: 2289321 - RNA, 19 nt, Artificial Sequence
  Description of Artificial Sequence: Synthetic oligonucleotide
gcuggccaguuauuuggcu

SEQ ID NO: 2289322 - RNA, 19 nt, Artificial Sequence
  Description of Artificial Sequence: Synthetic oligonucleotide
cucagaaacguggcaucau

SEQ ID NO: 2289323 - RNA, 19 nt, Artificial Sequence
  Description of Artificial Sequence: Synthetic oligonucleotide
cugccucggguuuccgucu

SEQ ID NO: 2289324 - RNA, 19 nt, Artificial Sequence
  Description of Artificial Sequence: Synthetic oligonucleotide
gggacaggcguagaagcau

SEQ ID NO: 2289325 - RNA, 19 nt, Artificial Sequence
  Description of Artificial Sequence: Synthetic oligonucleotide
cgacugaugcaaauuuacu

SEQ ID NO: 2289326 - RNA, 19 nt, Artificial Sequence
  Description of Artificial Sequence: Synthetic oligonucleotide
ccucaaagcuuuagcaguu

SEQ ID NO: 2289327 - RNA, 19 nt, Artificial Sequence
  Description of Artificial Sequence: Synthetic oligonucleotide
ggcggucaucggaaucaac

SEQ ID NO: 2289328 - RNA, 19 nt, Artificial Sequence
  Description of Artificial Sequence: Synthetic oligonucleotide
ccucggguuuccgucucug

SEQ ID NO: 2289329 - RNA, 19 nt, Artificial Sequence
  Description of Artificial Sequence: Synthetic oligonucleotide
cgucucuggcggucaucgg

SEQ ID NO: 2289330 - RNA, 19 nt, Artificial Sequence
  Description of Artificial Sequence: Synthetic oligonucleotide
cacuucuuugcugcacuuu

SEQ ID NO: 2289331 - RNA, 19 nt, Artificial Sequence
  Description of Artificial Sequence: Synthetic oligonucleotide
cggguuugugaauugcagu

SEQ ID NO: 2289332 - RNA, 19 nt, Artificial Sequence
  Description of Artificial Sequence: Synthetic oligonucleotide
cagugaccucaaagcuuua

SEQ ID NO: 2289333 - RNA, 19 nt, Artificial Sequence
  Description of Artificial Sequence: Synthetic oligonucleotide
gcagcggcauucagcccca

SEQ ID NO: 2289334 - RNA, 19 nt, Artificial Sequence
  Description of Artificial Sequence: Synthetic oligonucleotide
cucuggcggucaucggaau

SEQ ID NO: 2289335 - RNA, 19 nt, Artificial Sequence
  Description of Artificial Sequence: Synthetic oligonucleotide
cggucaucggaaucaacau

SEQ ID NO: 2289336 - RNA, 19 nt, Artificial Sequence
  Description of Artificial Sequence: Synthetic oligonucleotide
ccgaguguagaagguuuua

SEQ ID NO: 2289337 - RNA, 19 nt, Artificial Sequence
  Description of Artificial Sequence: Synthetic oligonucleotide
ccacacuuccauugaugau

SEQ ID NO: 2289338 - RNA, 19 nt, Artificial Sequence
  Description of Artificial Sequence: Synthetic oligonucleotide
gcagacccuggcugucgua

SEQ ID NO: 2289339 - RNA, 19 nt, Artificial Sequence
  Description of Artificial Sequence: Synthetic oligonucleotide
gcggucgcagcggcauuca

SEQ ID NO: 2289340 - RNA, 19 nt, Artificial Sequence
  Description of Artificial Sequence: Synthetic oligonucleotide
cggucgcagcggcauucag

SEQ ID NO: 2289341 - RNA, 19 nt, Artificial Sequence
  Description of Artificial Sequence: Synthetic oligonucleotide
ccauaugcuuugccagcau

SEQ ID NO: 2289342 - RNA, 19 nt, Artificial Sequence
  Description of Artificial Sequence: Synthetic oligonucleotide
cggaaucaacauccacacu

SEQ ID NO: 2289343 - RNA, 19 nt, Artificial Sequence
  Description of Artificial Sequence: Synthetic oligonucleotide
ccuggcugucguagacuuu

SEQ ID NO: 2289344 - RNA, 19 nt, Artificial Sequence
  Description of Artificial Sequence: Synthetic oligonucleotide
uuuugcuagagucaaagcu

SEQ ID NO: 2289345 - RNA, 19 nt, Artificial Sequence
  Description of Artificial Sequence: Synthetic oligonucleotide
ucaauuauggucuguacca

SEQ ID NO: 2289346 - RNA, 19 nt, Artificial Sequence
  Description of Artificial Sequence: Synthetic oligonucleotide
uuugcuagagucaaagcug

SEQ ID NO: 2289347 - RNA, 19 nt, Artificial Sequence
  Description of Artificial Sequence: Synthetic oligonucleotide
aaugauaacuccacguugg

SEQ ID NO: 2289348 - RNA, 19 nt, Artificial Sequence
  Description of Artificial Sequence: Synthetic oligonucleotide
aguuuugagaguuuauuag

SEQ ID NO: 2289349 - RNA, 19 nt, Artificial Sequence
  Description of Artificial Sequence: Synthetic oligonucleotide
uuuugagaguuuauuaggc

SEQ ID NO: 2289350 - RNA, 19 nt, Artificial Sequence
  Description of Artificial Sequence: Synthetic oligonucleotide
uugaaagugccuaagagau

SEQ ID NO: 2289351 - RNA, 19 nt, Artificial Sequence
  Description of Artificial Sequence: Synthetic oligonucleotide
agcuuguccaaccugaccg

SEQ ID NO: 2289352 - RNA, 19 nt, Artificial Sequence
  Description of Artificial Sequence: Synthetic oligonucleotide
auuaaugauaacuccacgu

SEQ ID NO: 2289353 - RNA, 19 nt, Artificial Sequence
  Description of Artificial Sequence: Synthetic oligonucleotide
uauuacugcgaccaggccc

SEQ ID NO: 2289354 - RNA, 19 nt, Artificial Sequence
  Description of Artificial Sequence: Synthetic oligonucleotide
guuacaaaauggcuguucg

SEQ ID NO: 2289355 - RNA, 19 nt, Artificial Sequence
  Description of Artificial Sequence: Synthetic oligonucleotide
guuuugagaguuuauuagg

SEQ ID NO: 2289356 - RNA, 19 nt, Artificial Sequence
  Description of Artificial Sequence: Synthetic oligonucleotide
agcaauugucaucacacgg

SEQ ID NO: 2289357 - RNA, 19 nt, Artificial Sequence
  Description of Artificial Sequence: Synthetic oligonucleotide
aggcggaugacauugaaag

SEQ ID NO: 2289358 - RNA, 19 nt, Artificial Sequence
  Description of Artificial Sequence: Synthetic oligonucleotide
uaugagcguauucagcagg

SEQ ID NO: 2289359 - RNA, 19 nt, Artificial Sequence
  Description of Artificial Sequence: Synthetic oligonucleotide
uggcaaacaaaccuggagc

SEQ ID NO: 2289360 - RNA, 19 nt, Artificial Sequence
  Description of Artificial Sequence: Synthetic oligonucleotide
uaaugauaacuccacguug

SEQ ID NO: 2289361 - RNA, 19 nt, Artificial Sequence
  Description of Artificial Sequence: Synthetic oligonucleotide
auugaaagugccuaagaga

SEQ ID NO: 2289362 - RNA, 19 nt, Artificial Sequence
  Description of Artificial Sequence: Synthetic oligonucleotide
uauggucuguaccauauga

SEQ ID NO: 2289363 - RNA, 19 nt, Artificial Sequence
  Description of Artificial Sequence: Synthetic oligonucleotide
ugucaugcccacuauaccc

SEQ ID NO: 2289364 - RNA, 19 nt, Artificial Sequence
  Description of Artificial Sequence: Synthetic oligonucleotide
agaagcacagcuguggccc

SEQ ID NO: 2289365 - RNA, 19 nt, Artificial Sequence
  Description of Artificial Sequence: Synthetic oligonucleotide
ugucccaccagucuuucgg

SEQ ID NO: 2289366 - RNA, 19 nt, Artificial Sequence
  Description of Artificial Sequence: Synthetic oligonucleotide
uuauuaggcacagagggug

SEQ ID NO: 2289367 - RNA, 19 nt, Artificial Sequence
  Description of Artificial Sequence: Synthetic oligonucleotide
ucagaggucacguuggcug

SEQ ID NO: 2289368 - RNA, 19 nt, Artificial Sequence
  Description of Artificial Sequence: Synthetic oligonucleotide
uugacagccacaucuacgc

SEQ ID NO: 2289369 - RNA, 19 nt, Artificial Sequence
  Description of Artificial Sequence: Synthetic oligonucleotide
agaguuacaaaauggcugu

SEQ ID NO: 2289370 - RNA, 19 nt, Artificial Sequence
  Description of Artificial Sequence: Synthetic oligonucleotide
uaagagauucacauugaga

SEQ ID NO: 2289371 - RNA, 19 nt, Artificial Sequence
  Description of Artificial Sequence: Synthetic oligonucleotide
caaacaagcagcucucucc

SEQ ID NO: 2289372 - RNA, 19 nt, Artificial Sequence
  Description of Artificial Sequence: Synthetic oligonucleotide
ucuuuugcuagagucaaag

SEQ ID NO: 2289373 - RNA, 19 nt, Artificial Sequence
  Description of Artificial Sequence: Synthetic oligonucleotide
agcagaguuacaaaauggc

SEQ ID NO: 2289374 - RNA, 19 nt, Artificial Sequence
  Description of Artificial Sequence: Synthetic oligonucleotide
cucaauuauggucuguacc

SEQ ID NO: 2289375 - RNA, 19 nt, Artificial Sequence
  Description of Artificial Sequence: Synthetic oligonucleotide
uuaaugauaacuccacguu

SEQ ID NO: 2289376 - RNA, 19 nt, Artificial Sequence
  Description of Artificial Sequence: Synthetic oligonucleotide
uugagaguuuauuaggcac

SEQ ID NO: 2289377 - RNA, 19 nt, Artificial Sequence
  Description of Artificial Sequence: Synthetic oligonucleotide
cauugaaagugccuaagag

SEQ ID NO: 2289378 - RNA, 19 nt, Artificial Sequence
  Description of Artificial Sequence: Synthetic oligonucleotide
gguuguaugucuuaauugc

SEQ ID NO: 2289379 - RNA, 19 nt, Artificial Sequence
  Description of Artificial Sequence: Synthetic oligonucleotide
ugagaguuuauuaggcaca

SEQ ID NO: 2289380 - RNA, 19 nt, Artificial Sequence
  Description of Artificial Sequence: Synthetic oligonucleotide
uaugucuuaauugccacug

SEQ ID NO: 2289381 - RNA, 19 nt, Artificial Sequence
  Description of Artificial Sequence: Synthetic oligonucleotide
cacacuggcaguauuaaug

SEQ ID NO: 2289382 - RNA, 19 nt, Artificial Sequence
  Description of Artificial Sequence: Synthetic oligonucleotide
aauaccugcacaguugaca

SEQ ID NO: 2289383 - RNA, 19 nt, Artificial Sequence
  Description of Artificial Sequence: Synthetic oligonucleotide
uucauucuggcccaucuca

SEQ ID NO: 2289384 - RNA, 19 nt, Artificial Sequence
  Description of Artificial Sequence: Synthetic oligonucleotide
auugagaacccgcuggaag

SEQ ID NO: 2289385 - RNA, 19 nt, Artificial Sequence
  Description of Artificial Sequence: Synthetic oligonucleotide
aaguuuugagaguuuauua

SEQ ID NO: 2289386 - RNA, 19 nt, Artificial Sequence
  Description of Artificial Sequence: Synthetic oligonucleotide
uuguaugucuuaauugcca

SEQ ID NO: 2289387 - RNA, 19 nt, Artificial Sequence
  Description of Artificial Sequence: Synthetic oligonucleotide
agaguaugcagcuugucca

SEQ ID NO: 2289388 - RNA, 19 nt, Artificial Sequence
  Description of Artificial Sequence: Synthetic oligonucleotide
ugguuguaugucuuaauug

SEQ ID NO: 2289389 - RNA, 19 nt, Artificial Sequence
  Description of Artificial Sequence: Synthetic oligonucleotide
ucgaauggccccaucaagc

SEQ ID NO: 2289390 - RNA, 19 nt, Artificial Sequence
  Description of Artificial Sequence: Synthetic oligonucleotide
aaacaagcagcucucuccu

SEQ ID NO: 2289391 - RNA, 19 nt, Artificial Sequence
  Description of Artificial Sequence: Synthetic oligonucleotide
ucuuaauugccacugcaau

SEQ ID NO: 2289392 - RNA, 19 nt, Artificial Sequence
  Description of Artificial Sequence: Synthetic oligonucleotide
gacagccacaucuacgcgg

SEQ ID NO: 2289393 - RNA, 19 nt, Artificial Sequence
  Description of Artificial Sequence: Synthetic oligonucleotide
uuugagaguuuauuaggca

SEQ ID NO: 2289394 - RNA, 19 nt, Artificial Sequence
  Description of Artificial Sequence: Synthetic oligonucleotide
cagaucucgagcaaugggc

SEQ ID NO: 2289395 - RNA, 19 nt, Artificial Sequence
  Description of Artificial Sequence: Synthetic oligonucleotide
cauaugagcguauucagca

SEQ ID NO: 2289396 - RNA, 19 nt, Artificial Sequence
  Description of Artificial Sequence: Synthetic oligonucleotide
cacauugagaacccgcugg

SEQ ID NO: 2289397 - RNA, 19 nt, Artificial Sequence
  Description of Artificial Sequence: Synthetic oligonucleotide
caagguaugggccugguuc

SEQ ID NO: 2289398 - RNA, 19 nt, Artificial Sequence
  Description of Artificial Sequence: Synthetic oligonucleotide
ugcuuguacauccuucuca

SEQ ID NO: 2289399 - RNA, 19 nt, Artificial Sequence
  Description of Artificial Sequence: Synthetic oligonucleotide
uucacauugagaacccgcu

SEQ ID NO: 2289400 - RNA, 19 nt, Artificial Sequence
  Description of Artificial Sequence: Synthetic oligonucleotide
agugucaugcccacuauac

SEQ ID NO: 2289401 - RNA, 19 nt, Artificial Sequence
  Description of Artificial Sequence: Synthetic oligonucleotide
ugucuuaauugccacugca

SEQ ID NO: 2289402 - RNA, 19 nt, Artificial Sequence
  Description of Artificial Sequence: Synthetic oligonucleotide
gauaacuccacguuggccu

SEQ ID NO: 2289403 - RNA, 19 nt, Artificial Sequence
  Description of Artificial Sequence: Synthetic oligonucleotide
uugcuagagucaaagcugc

SEQ ID NO: 2289404 - RNA, 19 nt, Artificial Sequence
  Description of Artificial Sequence: Synthetic oligonucleotide
auucacauugagaacccgc

SEQ ID NO: 2289405 - RNA, 19 nt, Artificial Sequence
  Description of Artificial Sequence: Synthetic oligonucleotide
uaccauaugagcguauuca

SEQ ID NO: 2289406 - RNA, 19 nt, Artificial Sequence
  Description of Artificial Sequence: Synthetic oligonucleotide
uguaugucuuaauugccac

SEQ ID NO: 2289407 - RNA, 19 nt, Artificial Sequence
  Description of Artificial Sequence: Synthetic oligonucleotide
uucaagcugaaaagaagcu

SEQ ID NO: 2289408 - RNA, 19 nt, Artificial Sequence
  Description of Artificial Sequence: Synthetic oligonucleotide
uccuccaguuauuacugcg

SEQ ID NO: 2289409 - RNA, 19 nt, Artificial Sequence
  Description of Artificial Sequence: Synthetic oligonucleotide
ucacacggaugccuaaggg

SEQ ID NO: 2289410 - RNA, 19 nt, Artificial Sequence
  Description of Artificial Sequence: Synthetic oligonucleotide
cuagagucaaagcugcuug

SEQ ID NO: 2289411 - RNA, 19 nt, Artificial Sequence
  Description of Artificial Sequence: Synthetic oligonucleotide
aguuauuacugcgaccagg

SEQ ID NO: 2289412 - RNA, 19 nt, Artificial Sequence
  Description of Artificial Sequence: Synthetic oligonucleotide
uggguucucaauuaugguc

SEQ ID NO: 2289413 - RNA, 19 nt, Artificial Sequence
  Description of Artificial Sequence: Synthetic oligonucleotide
accauaugagcguauucag

SEQ ID NO: 2289414 - RNA, 19 nt, Artificial Sequence
  Description of Artificial Sequence: Synthetic oligonucleotide
aagaauggguucucaauua

SEQ ID NO: 2289415 - RNA, 19 nt, Artificial Sequence
  Description of Artificial Sequence: Synthetic oligonucleotide
guuauuacugcgaccaggc

SEQ ID NO: 2289416 - RNA, 19 nt, Artificial Sequence
  Description of Artificial Sequence: Synthetic oligonucleotide
aguuuauuaggcacagagg

SEQ ID NO: 2289417 - RNA, 19 nt, Artificial Sequence
  Description of Artificial Sequence: Synthetic oligonucleotide
caaaccuggagcaauuguc

SEQ ID NO: 2289418 - RNA, 19 nt, Artificial Sequence
  Description of Artificial Sequence: Synthetic oligonucleotide
cagaguaugcagcuugucc

SEQ ID NO: 2289419 - RNA, 19 nt, Artificial Sequence
  Description of Artificial Sequence: Synthetic oligonucleotide
caaccugaccgucaaaggc

SEQ ID NO: 2289420 - RNA, 19 nt, Artificial Sequence
  Description of Artificial Sequence: Synthetic oligonucleotide
uugguuguaugucuuaauu

SEQ ID NO: 2289421 - RNA, 19 nt, Artificial Sequence
  Description of Artificial Sequence: Synthetic oligonucleotide
ucaagaauggguucucaau

SEQ ID NO: 2289422 - RNA, 19 nt, Artificial Sequence
  Description of Artificial Sequence: Synthetic oligonucleotide
aguuacaaaauggcuguuc

SEQ ID NO: 2289423 - RNA, 19 nt, Artificial Sequence
  Description of Artificial Sequence: Synthetic oligonucleotide
gccuaagagauucacauug

SEQ ID NO: 2289424 - RNA, 19 nt, Artificial Sequence
  Description of Artificial Sequence: Synthetic oligonucleotide
aguuagguagguccagaag

SEQ ID NO: 2289425 - RNA, 19 nt, Artificial Sequence
  Description of Artificial Sequence: Synthetic oligonucleotide
ucaaggcugcauucgaaug

SEQ ID NO: 2289426 - RNA, 19 nt, Artificial Sequence
  Description of Artificial Sequence: Synthetic oligonucleotide
aagugccuaagagauucac

SEQ ID NO: 2289427 - RNA, 19 nt, Artificial Sequence
  Description of Artificial Sequence: Synthetic oligonucleotide
guauuaaugauaacuccac

SEQ ID NO: 2289428 - RNA, 19 nt, Artificial Sequence
  Description of Artificial Sequence: Synthetic oligonucleotide
guggcaaacaaaccuggag

SEQ ID NO: 2289429 - RNA, 19 nt, Artificial Sequence
  Description of Artificial Sequence: Synthetic oligonucleotide
uuaaguuuugagaguuuau

SEQ ID NO: 2289430 - RNA, 19 nt, Artificial Sequence
  Description of Artificial Sequence: Synthetic oligonucleotide
cuucucagaggucacguug

SEQ ID NO: 2289431 - RNA, 19 nt, Artificial Sequence
  Description of Artificial Sequence: Synthetic oligonucleotide
uaaguuuugagaguuuauu

SEQ ID NO: 2289432 - RNA, 19 nt, Artificial Sequence
  Description of Artificial Sequence: Synthetic oligonucleotide
uacgcggccaaacuuuucu

SEQ ID NO: 2289433 - RNA, 19 nt, Artificial Sequence
  Description of Artificial Sequence: Synthetic oligonucleotide
auaugagcguauucagcag

SEQ ID NO: 2289434 - RNA, 19 nt, Artificial Sequence
  Description of Artificial Sequence: Synthetic oligonucleotide
aauuauggucuguaccaua

SEQ ID NO: 2289435 - RNA, 19 nt, Artificial Sequence
  Description of Artificial Sequence: Synthetic oligonucleotide
cuuuugcuagagucaaagc

SEQ ID NO: 2289436 - RNA, 19 nt, Artificial Sequence
  Description of Artificial Sequence: Synthetic oligonucleotide
uggagcaauugucaucaca

SEQ ID NO: 2289437 - RNA, 19 nt, Artificial Sequence
  Description of Artificial Sequence: Synthetic oligonucleotide
guugacagccacaucuacg

SEQ ID NO: 2289438 - RNA, 19 nt, Artificial Sequence
  Description of Artificial Sequence: Synthetic oligonucleotide
gaauggccccaucaagccg

SEQ ID NO: 2289439 - RNA, 19 nt, Artificial Sequence
  Description of Artificial Sequence: Synthetic oligonucleotide
aucacacggaugccuaagg

SEQ ID NO: 2289440 - RNA, 19 nt, Artificial Sequence
  Description of Artificial Sequence: Synthetic oligonucleotide
gacauugaaagugccuaag

SEQ ID NO: 2289441 - RNA, 19 nt, Artificial Sequence
  Description of Artificial Sequence: Synthetic oligonucleotide
acauugaaagugccuaaga

SEQ ID NO: 2289442 - RNA, 19 nt, Artificial Sequence
  Description of Artificial Sequence: Synthetic oligonucleotide
uaugcagcuuguccaaccu

SEQ ID NO: 2289443 - RNA, 19 nt, Artificial Sequence
  Description of Artificial Sequence: Synthetic oligonucleotide
cagucuuucggccguagcc

SEQ ID NO: 2289444 - RNA, 19 nt, Artificial Sequence
  Description of Artificial Sequence: Synthetic oligonucleotide
caucucaccagcgaccagg

SEQ ID NO: 2289445 - RNA, 19 nt, Artificial Sequence
  Description of Artificial Sequence: Synthetic oligonucleotide
uggaagggugguaagcagu

SEQ ID NO: 2289446 - RNA, 19 nt, Artificial Sequence
  Description of Artificial Sequence: Synthetic oligonucleotide
auaacuccacguuggccuc

SEQ ID NO: 2289447 - RNA, 19 nt, Artificial Sequence
  Description of Artificial Sequence: Synthetic oligonucleotide
aauugccacugcaauaccu

SEQ ID NO: 2289448 - RNA, 19 nt, Artificial Sequence
  Description of Artificial Sequence: Synthetic oligonucleotide
uuauuacugcgaccaggcc

SEQ ID NO: 2289449 - RNA, 19 nt, Artificial Sequence
  Description of Artificial Sequence: Synthetic oligonucleotide
guuguaugucuuaauugcc

SEQ ID NO: 2289450 - RNA, 19 nt, Artificial Sequence
  Description of Artificial Sequence: Synthetic oligonucleotide
cuggcaguauuaaugauaa

SEQ ID NO: 2289451 - RNA, 19 nt, Artificial Sequence
  Description of Artificial Sequence: Synthetic oligonucleotide
uucaagaauggguucucaa

SEQ ID NO: 2289452 - RNA, 19 nt, Artificial Sequence
  Description of Artificial Sequence: Synthetic oligonucleotide
ucucuccuaacuucuuggc

SEQ ID NO: 2289453 - RNA, 19 nt, Artificial Sequence
  Description of Artificial Sequence: Synthetic oligonucleotide
ucucaauuauggucuguac

SEQ ID NO: 2289454 - RNA, 19 nt, Artificial Sequence
  Description of Artificial Sequence: Synthetic oligonucleotide
acacggaugccuaagggag

SEQ ID NO: 2289455 - RNA, 19 nt, Artificial Sequence
  Description of Artificial Sequence: Synthetic oligonucleotide
acaaaccuggagcaauugu

SEQ ID NO: 2289456 - RNA, 19 nt, Artificial Sequence
  Description of Artificial Sequence: Synthetic oligonucleotide
uggccaagaaguucuguac

SEQ ID NO: 2289457 - RNA, 19 nt, Artificial Sequence
  Description of Artificial Sequence: Synthetic oligonucleotide
cuaagggagccagaucucg

SEQ ID NO: 2289458 - RNA, 19 nt, Artificial Sequence
  Description of Artificial Sequence: Synthetic oligonucleotide
uccaguuauuacugcgacc

SEQ ID NO: 2289459 - RNA, 19 nt, Artificial Sequence
  Description of Artificial Sequence: Synthetic oligonucleotide
aaauggcuguucgguuucc

SEQ ID NO: 2289460 - RNA, 19 nt, Artificial Sequence
  Description of Artificial Sequence: Synthetic oligonucleotide
ggagcaauugucaucacac

SEQ ID NO: 2289461 - RNA, 19 nt, Artificial Sequence
  Description of Artificial Sequence: Synthetic oligonucleotide
auuacugcgaccaggcccu

SEQ ID NO: 2289462 - RNA, 19 nt, Artificial Sequence
  Description of Artificial Sequence: Synthetic oligonucleotide
uucaaggcugcauucgaau

SEQ ID NO: 2289463 - RNA, 19 nt, Artificial Sequence
  Description of Artificial Sequence: Synthetic oligonucleotide
aggcccuucacgcuccgac

SEQ ID NO: 2289464 - RNA, 19 nt, Artificial Sequence
  Description of Artificial Sequence: Synthetic oligonucleotide
ugauaacuccacguuggcc

SEQ ID NO: 2289465 - RNA, 19 nt, Artificial Sequence
  Description of Artificial Sequence: Synthetic oligonucleotide
ucaccagcgaccaggcgga

SEQ ID NO: 2289466 - RNA, 19 nt, Artificial Sequence
  Description of Artificial Sequence: Synthetic oligonucleotide
uuuugguuguaugucuuaa

SEQ ID NO: 2289467 - RNA, 19 nt, Artificial Sequence
  Description of Artificial Sequence: Synthetic oligonucleotide
ugcgaccaggcccuucacg

SEQ ID NO: 2289468 - RNA, 19 nt, Artificial Sequence
  Description of Artificial Sequence: Synthetic oligonucleotide
ucuuuugguuguaugucuu

SEQ ID NO: 2289469 - RNA, 19 nt, Artificial Sequence
  Description of Artificial Sequence: Synthetic oligonucleotide
guaugcagcuuguccaacc

SEQ ID NO: 2289470 - RNA, 19 nt, Artificial Sequence
  Description of Artificial Sequence: Synthetic oligonucleotide
acaucuacgcggccaaacu

SEQ ID NO: 2289471 - RNA, 19 nt, Artificial Sequence
  Description of Artificial Sequence: Synthetic oligonucleotide
ucgagcaaugggcaguguc

SEQ ID NO: 2289472 - RNA, 19 nt, Artificial Sequence
  Description of Artificial Sequence: Synthetic oligonucleotide
gaucucgagcaaugggcag

SEQ ID NO: 2289473 - RNA, 19 nt, Artificial Sequence
  Description of Artificial Sequence: Synthetic oligonucleotide
cugaccgucaaaggcagcc

SEQ ID NO: 2289474 - RNA, 19 nt, Artificial Sequence
  Description of Artificial Sequence: Synthetic oligonucleotide
cucuccauucaagaauggg

SEQ ID NO: 2289475 - RNA, 19 nt, Artificial Sequence
  Description of Artificial Sequence: Synthetic oligonucleotide
uccauucaagaauggguuc

SEQ ID NO: 2289476 - RNA, 19 nt, Artificial Sequence
  Description of Artificial Sequence: Synthetic oligonucleotide
ucaccuagucggcugggga

SEQ ID NO: 2289477 - RNA, 19 nt, Artificial Sequence
  Description of Artificial Sequence: Synthetic oligonucleotide
uuccucuuuugguuguaug

SEQ ID NO: 2289478 - RNA, 19 nt, Artificial Sequence
  Description of Artificial Sequence: Synthetic oligonucleotide
ugacauugaaagugccuaa

SEQ ID NO: 2289479 - RNA, 19 nt, Artificial Sequence
  Description of Artificial Sequence: Synthetic oligonucleotide
auuauggucuguaccauau

SEQ ID NO: 2289480 - RNA, 19 nt, Artificial Sequence
  Description of Artificial Sequence: Synthetic oligonucleotide
gagcguauucagcaggguc

SEQ ID NO: 2289481 - RNA, 19 nt, Artificial Sequence
  Description of Artificial Sequence: Synthetic oligonucleotide
cauucuggcccaucucacc

SEQ ID NO: 2289482 - RNA, 19 nt, Artificial Sequence
  Description of Artificial Sequence: Synthetic oligonucleotide
acuuucucuggaagggugg

SEQ ID NO: 2289483 - RNA, 19 nt, Artificial Sequence
  Description of Artificial Sequence: Synthetic oligonucleotide
gcaguauuaaugauaacuc

SEQ ID NO: 2289484 - RNA, 19 nt, Artificial Sequence
  Description of Artificial Sequence: Synthetic oligonucleotide
auugccacugcaauaccug

SEQ ID NO: 2289485 - RNA, 19 nt, Artificial Sequence
  Description of Artificial Sequence: Synthetic oligonucleotide
aagcagugggguggcaaac

SEQ ID NO: 2289486 - RNA, 19 nt, Artificial Sequence
  Description of Artificial Sequence: Synthetic oligonucleotide
uucucuggaagggugguaa

SEQ ID NO: 2289487 - RNA, 19 nt, Artificial Sequence
  Description of Artificial Sequence: Synthetic oligonucleotide
aacuccacguuggccuccc

SEQ ID NO: 2289488 - RNA, 19 nt, Artificial Sequence
  Description of Artificial Sequence: Synthetic oligonucleotide
uagagucaaagcugcuugu

SEQ ID NO: 2289489 - RNA, 19 nt, Artificial Sequence
  Description of Artificial Sequence: Synthetic oligonucleotide
uggucugguucauucuggc

SEQ ID NO: 2289490 - RNA, 19 nt, Artificial Sequence
  Description of Artificial Sequence: Synthetic oligonucleotide
auuaggcacagagggugac

SEQ ID NO: 2289491 - RNA, 19 nt, Artificial Sequence
  Description of Artificial Sequence: Synthetic oligonucleotide
ucuuucggccguagccagg

SEQ ID NO: 2289492 - RNA, 19 nt, Artificial Sequence
  Description of Artificial Sequence: Synthetic oligonucleotide
aauugucaucacacggaug

SEQ ID NO: 2289493 - RNA, 19 nt, Artificial Sequence
  Description of Artificial Sequence: Synthetic oligonucleotide
ggcaguauuaaugauaacu

SEQ ID NO: 2289494 - RNA, 19 nt, Artificial Sequence
  Description of Artificial Sequence: Synthetic oligonucleotide
cuccaguuauuacugcgac

SEQ ID NO: 2289495 - RNA, 19 nt, Artificial Sequence
  Description of Artificial Sequence: Synthetic oligonucleotide
augagcguauucagcaggg

SEQ ID NO: 2289496 - RNA, 19 nt, Artificial Sequence
  Description of Artificial Sequence: Synthetic oligonucleotide
cacagagggugacuggagc

SEQ ID NO: 2289497 - RNA, 19 nt, Artificial Sequence
  Description of Artificial Sequence: Synthetic oligonucleotide
ugaccucuccauucaagaa

SEQ ID NO: 2289498 - RNA, 19 nt, Artificial Sequence
  Description of Artificial Sequence: Synthetic oligonucleotide
cauucgaauggccccauca

SEQ ID NO: 2289499 - RNA, 19 nt, Artificial Sequence
  Description of Artificial Sequence: Synthetic oligonucleotide
auggguucucaauuauggu

SEQ ID NO: 2289500 - RNA, 19 nt, Artificial Sequence
  Description of Artificial Sequence: Synthetic oligonucleotide
cacgccgcagccaucuugc

SEQ ID NO: 2289501 - RNA, 19 nt, Artificial Sequence
  Description of Artificial Sequence: Synthetic oligonucleotide
ggcaaacaaaccuggagca

SEQ ID NO: 2289502 - RNA, 19 nt, Artificial Sequence
  Description of Artificial Sequence: Synthetic oligonucleotide
accucuccauucaagaaug

SEQ ID NO: 2289503 - RNA, 19 nt, Artificial Sequence
  Description of Artificial Sequence: Synthetic oligonucleotide
uucggccguagccaggcca

SEQ ID NO: 2289504 - RNA, 19 nt, Artificial Sequence
  Description of Artificial Sequence: Synthetic oligonucleotide
uguccaaccugaccgucaa

SEQ ID NO: 2289505 - RNA, 19 nt, Artificial Sequence
  Description of Artificial Sequence: Synthetic oligonucleotide
acccuucaaggcugcauuc

SEQ ID NO: 2289506 - RNA, 19 nt, Artificial Sequence
  Description of Artificial Sequence: Synthetic oligonucleotide
ucacgcuccgacacgccgc

SEQ ID NO: 2289507 - RNA, 19 nt, Artificial Sequence
  Description of Artificial Sequence: Synthetic oligonucleotide
cuccuaacuucuuggcuug

SEQ ID NO: 2289508 - RNA, 19 nt, Artificial Sequence
  Description of Artificial Sequence: Synthetic oligonucleotide
ucucagaggucacguuggc

SEQ ID NO: 2289509 - RNA, 19 nt, Artificial Sequence
  Description of Artificial Sequence: Synthetic oligonucleotide
aguaugcagcuuguccaac

SEQ ID NO: 2289510 - RNA, 19 nt, Artificial Sequence
  Description of Artificial Sequence: Synthetic oligonucleotide
gugucaugcccacuauacc

SEQ ID NO: 2289511 - RNA, 19 nt, Artificial Sequence
  Description of Artificial Sequence: Synthetic oligonucleotide
acguuggccucccuggucu

SEQ ID NO: 2289512 - RNA, 19 nt, Artificial Sequence
  Description of Artificial Sequence: Synthetic oligonucleotide
gcugcauucgaauggcccc

SEQ ID NO: 2289513 - RNA, 19 nt, Artificial Sequence
  Description of Artificial Sequence: Synthetic oligonucleotide
agucuuucggccguagcca

SEQ ID NO: 2289514 - RNA, 19 nt, Artificial Sequence
  Description of Artificial Sequence: Synthetic oligonucleotide
gugccuaagagauucacau

SEQ ID NO: 2289515 - RNA, 19 nt, Artificial Sequence
  Description of Artificial Sequence: Synthetic oligonucleotide
aagccggaugaccucucca

SEQ ID NO: 2289516 - RNA, 19 nt, Artificial Sequence
  Description of Artificial Sequence: Synthetic oligonucleotide
gaagggugguaagcagugg

SEQ ID NO: 2289517 - RNA, 19 nt, Artificial Sequence
  Description of Artificial Sequence: Synthetic oligonucleotide
cacacggaugccuaaggga

SEQ ID NO: 2289518 - RNA, 19 nt, Artificial Sequence
  Description of Artificial Sequence: Synthetic oligonucleotide
acuggcaguauuaaugaua

SEQ ID NO: 2289519 - RNA, 19 nt, Artificial Sequence
  Description of Artificial Sequence: Synthetic oligonucleotide
cuuucggccguagccaggc

SEQ ID NO: 2289520 - RNA, 19 nt, Artificial Sequence
  Description of Artificial Sequence: Synthetic oligonucleotide
aucucaccagcgaccaggc

SEQ ID NO: 2289521 - RNA, 19 nt, Artificial Sequence
  Description of Artificial Sequence: Synthetic oligonucleotide
uccgacacgccgcagccau

SEQ ID NO: 2289522 - RNA, 19 nt, Artificial Sequence
  Description of Artificial Sequence: Synthetic oligonucleotide
agaucucgagcaaugggca

SEQ ID NO: 2289523 - RNA, 19 nt, Artificial Sequence
  Description of Artificial Sequence: Synthetic oligonucleotide
ucccuggucugguucauuc

SEQ ID NO: 2289524 - RNA, 19 nt, Artificial Sequence
  Description of Artificial Sequence: Synthetic oligonucleotide
gaccgucaaaggcagccac

SEQ ID NO: 2289525 - RNA, 19 nt, Artificial Sequence
  Description of Artificial Sequence: Synthetic oligonucleotide
aggucacguuggcuggggc

SEQ ID NO: 2289526 - RNA, 19 nt, Artificial Sequence
  Description of Artificial Sequence: Synthetic oligonucleotide
aagcugaaaagaagcuggu

SEQ ID NO: 2289527 - RNA, 19 nt, Artificial Sequence
  Description of Artificial Sequence: Synthetic oligonucleotide
ccauaugagcguauucagc

SEQ ID NO: 2289528 - RNA, 19 nt, Artificial Sequence
  Description of Artificial Sequence: Synthetic oligonucleotide
ucucgagcaaugggcagug

SEQ ID NO: 2289529 - RNA, 19 nt, Artificial Sequence
  Description of Artificial Sequence: Synthetic oligonucleotide
agggugguaagcagugggg

SEQ ID NO: 2289530 - RNA, 19 nt, Artificial Sequence
  Description of Artificial Sequence: Synthetic oligonucleotide
guacauccuucucagaggu

SEQ ID NO: 2289531 - RNA, 19 nt, Artificial Sequence
  Description of Artificial Sequence: Synthetic oligonucleotide
ccaguuauuacugcgacca

SEQ ID NO: 2289532 - RNA, 19 nt, Artificial Sequence
  Description of Artificial Sequence: Synthetic oligonucleotide
gaguuagguagguccagaa

SEQ ID NO: 2289533 - RNA, 19 nt, Artificial Sequence
  Description of Artificial Sequence: Synthetic oligonucleotide
ggccaaacuuuucuuuugc

SEQ ID NO: 2289534 - RNA, 19 nt, Artificial Sequence
  Description of Artificial Sequence: Synthetic oligonucleotide
gaguaugcagcuuguccaa

SEQ ID NO: 2289535 - RNA, 19 nt, Artificial Sequence
  Description of Artificial Sequence: Synthetic oligonucleotide
ucuacgcggccaaacuuuu

SEQ ID NO: 2289536 - RNA, 19 nt, Artificial Sequence
  Description of Artificial Sequence: Synthetic oligonucleotide
ggugguaagcaguggggug

SEQ ID NO: 2289537 - RNA, 19 nt, Artificial Sequence
  Description of Artificial Sequence: Synthetic oligonucleotide
cacggaugccuaagggagc

SEQ ID NO: 2289538 - RNA, 19 nt, Artificial Sequence
  Description of Artificial Sequence: Synthetic oligonucleotide
agugccuaagagauucaca

SEQ ID NO: 2289539 - RNA, 19 nt, Artificial Sequence
  Description of Artificial Sequence: Synthetic oligonucleotide
ccccgaguuagguaggucc

SEQ ID NO: 2289540 - RNA, 19 nt, Artificial Sequence
  Description of Artificial Sequence: Synthetic oligonucleotide
gaagcacagcuguggcccc

SEQ ID NO: 2289541 - RNA, 19 nt, Artificial Sequence
  Description of Artificial Sequence: Synthetic oligonucleotide
gaccucuccauucaagaau

SEQ ID NO: 2289542 - RNA, 19 nt, Artificial Sequence
  Description of Artificial Sequence: Synthetic oligonucleotide
gcgaccaggcccuucacgc

SEQ ID NO: 2289543 - RNA, 19 nt, Artificial Sequence
  Description of Artificial Sequence: Synthetic oligonucleotide
ccagaucucgagcaauggg

SEQ ID NO: 2289544 - RNA, 19 nt, Artificial Sequence
  Description of Artificial Sequence: Synthetic oligonucleotide
cagcuuguccaaccugacc

SEQ ID NO: 2289545 - RNA, 19 nt, Artificial Sequence
  Description of Artificial Sequence: Synthetic oligonucleotide
caucacacggaugccuaag

SEQ ID NO: 2289546 - RNA, 19 nt, Artificial Sequence
  Description of Artificial Sequence: Synthetic oligonucleotide
auucaagaauggguucuca

SEQ ID NO: 2289547 - RNA, 19 nt, Artificial Sequence
  Description of Artificial Sequence: Synthetic oligonucleotide
aucaagccggaugaccucu

SEQ ID NO: 2289548 - RNA, 19 nt, Artificial Sequence
  Description of Artificial Sequence: Synthetic oligonucleotide
ugcuagagucaaagcugcu

SEQ ID NO: 2289549 - RNA, 19 nt, Artificial Sequence
  Description of Artificial Sequence: Synthetic oligonucleotide
aucucgagcaaugggcagu

SEQ ID NO: 2289550 - RNA, 19 nt, Artificial Sequence
  Description of Artificial Sequence: Synthetic oligonucleotide
ucaucacacggaugccuaa

SEQ ID NO: 2289551 - RNA, 19 nt, Artificial Sequence
  Description of Artificial Sequence: Synthetic oligonucleotide
aaagugccuaagagauuca

SEQ ID NO: 2289552 - RNA, 19 nt, Artificial Sequence
  Description of Artificial Sequence: Synthetic oligonucleotide
gcaauugucaucacacgga

SEQ ID NO: 2289553 - RNA, 19 nt, Artificial Sequence
  Description of Artificial Sequence: Synthetic oligonucleotide
accuagucggcuggggaag

SEQ ID NO: 2289554 - RNA, 19 nt, Artificial Sequence
  Description of Artificial Sequence: Synthetic oligonucleotide
uccuaacuucuuggcuugg

SEQ ID NO: 2289555 - RNA, 19 nt, Artificial Sequence
  Description of Artificial Sequence: Synthetic oligonucleotide
ugccuaagagauucacauu

SEQ ID NO: 2289556 - RNA, 19 nt, Artificial Sequence
  Description of Artificial Sequence: Synthetic oligonucleotide
ucggccguagccaggccaa

SEQ ID NO: 2289557 - RNA, 19 nt, Artificial Sequence
  Description of Artificial Sequence: Synthetic oligonucleotide
cacaucuacgcggccaaac

SEQ ID NO: 2289558 - RNA, 19 nt, Artificial Sequence
  Description of Artificial Sequence: Synthetic oligonucleotide
cagcuguggccccuugucc

SEQ ID NO: 2289559 - RNA, 19 nt, Artificial Sequence
  Description of Artificial Sequence: Synthetic oligonucleotide
uagguagguccagaagcac

SEQ ID NO: 2289560 - RNA, 19 nt, Artificial Sequence
  Description of Artificial Sequence: Synthetic oligonucleotide
caagaauggguucucaauu

SEQ ID NO: 2289561 - RNA, 19 nt, Artificial Sequence
  Description of Artificial Sequence: Synthetic oligonucleotide
gagaacccgcuggaagucc

SEQ ID NO: 2289562 - RNA, 19 nt, Artificial Sequence
  Description of Artificial Sequence: Synthetic oligonucleotide
cuggcccaucucaccagcg

SEQ ID NO: 2289563 - RNA, 19 nt, Artificial Sequence
  Description of Artificial Sequence: Synthetic oligonucleotide
caauaccugcacaguugac

SEQ ID NO: 2289564 - RNA, 19 nt, Artificial Sequence
  Description of Artificial Sequence: Synthetic oligonucleotide
caguuauuacugcgaccag

SEQ ID NO: 2289565 - RNA, 19 nt, Artificial Sequence
  Description of Artificial Sequence: Synthetic oligonucleotide
agguagguccagaagcaca

SEQ ID NO: 2289566 - RNA, 19 nt, Artificial Sequence
  Description of Artificial Sequence: Synthetic oligonucleotide
cuccauucaagaauggguu

SEQ ID NO: 2289567 - RNA, 19 nt, Artificial Sequence
  Description of Artificial Sequence: Synthetic oligonucleotide
ggguggcaaacaaaccugg

SEQ ID NO: 2289568 - RNA, 19 nt, Artificial Sequence
  Description of Artificial Sequence: Synthetic oligonucleotide
caucaagccggaugaccuc

SEQ ID NO: 2289569 - RNA, 19 nt, Artificial Sequence
  Description of Artificial Sequence: Synthetic oligonucleotide
accugaccgucaaaggcag

SEQ ID NO: 2289570 - RNA, 19 nt, Artificial Sequence
  Description of Artificial Sequence: Synthetic oligonucleotide
gcuggggaagggcaccugg

SEQ ID NO: 2289571 - RNA, 19 nt, Artificial Sequence
  Description of Artificial Sequence: Synthetic oligonucleotide
cuguucgguuuccuucaag

SEQ ID NO: 2289572 - RNA, 19 nt, Artificial Sequence
  Description of Artificial Sequence: Synthetic oligonucleotide
ugaccgucaaaggcagcca

SEQ ID NO: 2289573 - RNA, 19 nt, Artificial Sequence
  Description of Artificial Sequence: Synthetic oligonucleotide
caagccggaugaccucucc

SEQ ID NO: 2289574 - RNA, 19 nt, Artificial Sequence
  Description of Artificial Sequence: Synthetic oligonucleotide
ggccugguuccucuuuugg

SEQ ID NO: 2289575 - RNA, 19 nt, Artificial Sequence
  Description of Artificial Sequence: Synthetic oligonucleotide
cggaugacauugaaagugc

SEQ ID NO: 2289576 - RNA, 19 nt, Artificial Sequence
  Description of Artificial Sequence: Synthetic oligonucleotide
cuggaaguccuccaaggua

SEQ ID NO: 2289577 - RNA, 19 nt, Artificial Sequence
  Description of Artificial Sequence: Synthetic oligonucleotide
uacauccuucucagagguc

SEQ ID NO: 2289578 - RNA, 19 nt, Artificial Sequence
  Description of Artificial Sequence: Synthetic oligonucleotide
gguucucaauuauggucug

SEQ ID NO: 2289579 - RNA, 19 nt, Artificial Sequence
  Description of Artificial Sequence: Synthetic oligonucleotide
ugguaagcagugggguggc

SEQ ID NO: 2289580 - RNA, 19 nt, Artificial Sequence
  Description of Artificial Sequence: Synthetic oligonucleotide
cugaaaagaagcugguguu

SEQ ID NO: 2289581 - RNA, 19 nt, Artificial Sequence
  Description of Artificial Sequence: Synthetic oligonucleotide
guaugucuuaauugccacu

SEQ ID NO: 2289582 - RNA, 19 nt, Artificial Sequence
  Description of Artificial Sequence: Synthetic oligonucleotide
ggucugguucauucuggcc

SEQ ID NO: 2289583 - RNA, 19 nt, Artificial Sequence
  Description of Artificial Sequence: Synthetic oligonucleotide
ggcugcauucgaauggccc

SEQ ID NO: 2289584 - RNA, 19 nt, Artificial Sequence
  Description of Artificial Sequence: Synthetic oligonucleotide
ggccccaucaagccggaug

SEQ ID NO: 2289585 - RNA, 19 nt, Artificial Sequence
  Description of Artificial Sequence: Synthetic oligonucleotide
gggagccagaucucgagca

SEQ ID NO: 2289586 - RNA, 19 nt, Artificial Sequence
  Description of Artificial Sequence: Synthetic oligonucleotide
aucuacgcggccaaacuuu

SEQ ID NO: 2289587 - RNA, 19 nt, Artificial Sequence
  Description of Artificial Sequence: Synthetic oligonucleotide
augccuaagggagccagau

SEQ ID NO: 2289588 - RNA, 19 nt, Artificial Sequence
  Description of Artificial Sequence: Synthetic oligonucleotide
cuucacgcuccgacacgcc

SEQ ID NO: 2289589 - RNA, 19 nt, Artificial Sequence
  Description of Artificial Sequence: Synthetic oligonucleotide
ucaagccggaugaccucuc

SEQ ID NO: 2289590 - RNA, 19 nt, Artificial Sequence
  Description of Artificial Sequence: Synthetic oligonucleotide
gucaccuagucggcugggg

SEQ ID NO: 2289591 - RNA, 19 nt, Artificial Sequence
  Description of Artificial Sequence: Synthetic oligonucleotide
cuccacguuggccucccug

SEQ ID NO: 2289592 - RNA, 19 nt, Artificial Sequence
  Description of Artificial Sequence: Synthetic oligonucleotide
ggguucucaauuauggucu

SEQ ID NO: 2289593 - RNA, 19 nt, Artificial Sequence
  Description of Artificial Sequence: Synthetic oligonucleotide
cgaauggccccaucaagcc

SEQ ID NO: 2289594 - RNA, 19 nt, Artificial Sequence
  Description of Artificial Sequence: Synthetic oligonucleotide
cugcuuguacauccuucuc

SEQ ID NO: 2289595 - RNA, 19 nt, Artificial Sequence
  Description of Artificial Sequence: Synthetic oligonucleotide
gggucaccuagucggcugg

SEQ ID NO: 2289596 - RNA, 19 nt, Artificial Sequence
  Description of Artificial Sequence: Synthetic oligonucleotide
cuagucggcuggggaaggg

SEQ ID NO: 2289597 - RNA, 19 nt, Artificial Sequence
  Description of Artificial Sequence: Synthetic oligonucleotide
cuuguacauccuucucaga

SEQ ID NO: 2289598 - RNA, 19 nt, Artificial Sequence
  Description of Artificial Sequence: Synthetic oligonucleotide
agcagugggguggcaaaca

SEQ ID NO: 2289599 - RNA, 19 nt, Artificial Sequence
  Description of Artificial Sequence: Synthetic oligonucleotide
agaguuuauuaggcacaga

SEQ ID NO: 2289600 - RNA, 19 nt, Artificial Sequence
  Description of Artificial Sequence: Synthetic oligonucleotide
gccguagccaggccaaggc

SEQ ID NO: 2289601 - RNA, 19 nt, Artificial Sequence
  Description of Artificial Sequence: Synthetic oligonucleotide
ucggcuggggaagggcacc

SEQ ID NO: 2289602 - RNA, 19 nt, Artificial Sequence
  Description of Artificial Sequence: Synthetic oligonucleotide
uuucggccguagccaggcc

SEQ ID NO: 2289603 - RNA, 19 nt, Artificial Sequence
  Description of Artificial Sequence: Synthetic oligonucleotide
gccccaucaagccggauga

SEQ ID NO: 2289604 - RNA, 19 nt, Artificial Sequence
  Description of Artificial Sequence: Synthetic oligonucleotide
caauugucaucacacggau

SEQ ID NO: 2289605 - RNA, 19 nt, Artificial Sequence
  Description of Artificial Sequence: Synthetic oligonucleotide
gguucauucuggcccaucu

SEQ ID NO: 2289606 - RNA, 19 nt, Artificial Sequence
  Description of Artificial Sequence: Synthetic oligonucleotide
ugccacccuucaaggcugc

SEQ ID NO: 2289607 - RNA, 19 nt, Artificial Sequence
  Description of Artificial Sequence: Synthetic oligonucleotide
gaugccuaagggagccaga

SEQ ID NO: 2289608 - RNA, 19 nt, Artificial Sequence
  Description of Artificial Sequence: Synthetic oligonucleotide
gccagaucucgagcaaugg

SEQ ID NO: 2289609 - RNA, 19 nt, Artificial Sequence
  Description of Artificial Sequence: Synthetic oligonucleotide
ccuaagagauucacauuga

SEQ ID NO: 2289610 - RNA, 19 nt, Artificial Sequence
  Description of Artificial Sequence: Synthetic oligonucleotide
caggcggaugacauugaaa

SEQ ID NO: 2289611 - RNA, 19 nt, Artificial Sequence
  Description of Artificial Sequence: Synthetic oligonucleotide
guagguccagaagcacagc

SEQ ID NO: 2289612 - RNA, 19 nt, Artificial Sequence
  Description of Artificial Sequence: Synthetic oligonucleotide
ggucacguuggcuggggca

SEQ ID NO: 2289613 - RNA, 19 nt, Artificial Sequence
  Description of Artificial Sequence: Synthetic oligonucleotide
gucacguuggcuggggcaa

SEQ ID NO: 2289614 - RNA, 19 nt, Artificial Sequence
  Description of Artificial Sequence: Synthetic oligonucleotide
caccuagucggcuggggaa

SEQ ID NO: 2289615 - RNA, 19 nt, Artificial Sequence
  Description of Artificial Sequence: Synthetic oligonucleotide
cuacgcggccaaacuuuuc

SEQ ID NO: 2289616 - RNA, 19 nt, Artificial Sequence
  Description of Artificial Sequence: Synthetic oligonucleotide
uccugcugccacccuucaa

SEQ ID NO: 2289617 - RNA, 19 nt, Artificial Sequence
  Description of Artificial Sequence: Synthetic oligonucleotide
cacguuggccucccugguc

SEQ ID NO: 2289618 - RNA, 19 nt, Artificial Sequence
  Description of Artificial Sequence: Synthetic oligonucleotide
uccaagguaugggccuggu

SEQ ID NO: 2289619 - RNA, 19 nt, Artificial Sequence
  Description of Artificial Sequence: Synthetic oligonucleotide
gcuccgacacgccgcagcc

SEQ ID NO: 2289620 - RNA, 19 nt, Artificial Sequence
  Description of Artificial Sequence: Synthetic oligonucleotide
ccucuccauucaagaaugg

SEQ ID NO: 2289621 - RNA, 19 nt, Artificial Sequence
  Description of Artificial Sequence: Synthetic oligonucleotide
gcagaguuacaaaauggcu

SEQ ID NO: 2289622 - RNA, 19 nt, Artificial Sequence
  Description of Artificial Sequence: Synthetic oligonucleotide
ccuccaguuauuacugcga

SEQ ID NO: 2289623 - RNA, 19 nt, Artificial Sequence
  Description of Artificial Sequence: Synthetic oligonucleotide
ggccaagaaguucuguacu

SEQ ID NO: 2289624 - RNA, 19 nt, Artificial Sequence
  Description of Artificial Sequence: Synthetic oligonucleotide
ccuucacgcuccgacacgc

SEQ ID NO: 2289625 - RNA, 19 nt, Artificial Sequence
  Description of Artificial Sequence: Synthetic oligonucleotide
cuggagcaauugucaucac

SEQ ID NO: 2289626 - RNA, 19 nt, Artificial Sequence
  Description of Artificial Sequence: Synthetic oligonucleotide
cugcauucgaauggcccca

SEQ ID NO: 2289627 - RNA, 19 nt, Artificial Sequence
  Description of Artificial Sequence: Synthetic oligonucleotide
agggugacuggagcagagu

SEQ ID NO: 2289628 - RNA, 19 nt, Artificial Sequence
  Description of Artificial Sequence: Synthetic oligonucleotide
gcccuucacgcuccgacac

SEQ ID NO: 2289629 - RNA, 19 nt, Artificial Sequence
  Description of Artificial Sequence: Synthetic oligonucleotide
cgagcaaugggcaguguca

SEQ ID NO: 2289630 - RNA, 19 nt, Artificial Sequence
  Description of Artificial Sequence: Synthetic oligonucleotide
acgcggccaaacuuuucuu

SEQ ID NO: 2289631 - RNA, 19 nt, Artificial Sequence
  Description of Artificial Sequence: Synthetic oligonucleotide
ccuaagggagccagaucuc

SEQ ID NO: 2289632 - RNA, 19 nt, Artificial Sequence
  Description of Artificial Sequence: Synthetic oligonucleotide
ugcauucgaauggccccau

SEQ ID NO: 2289633 - RNA, 19 nt, Artificial Sequence
  Description of Artificial Sequence: Synthetic oligonucleotide
ccaucaagccggaugaccu

SEQ ID NO: 2289634 - RNA, 19 nt, Artificial Sequence
  Description of Artificial Sequence: Synthetic oligonucleotide
ccgucaaaggcagccacac

SEQ ID NO: 2289635 - RNA, 19 nt, Artificial Sequence
  Description of Artificial Sequence: Synthetic oligonucleotide
augggccugguuccucuuu

SEQ ID NO: 2289636 - RNA, 19 nt, Artificial Sequence
  Description of Artificial Sequence: Synthetic oligonucleotide
ugguucauucuggcccauc

SEQ ID NO: 2289637 - RNA, 19 nt, Artificial Sequence
  Description of Artificial Sequence: Synthetic oligonucleotide
accagcgaccaggcggaug

SEQ ID NO: 2289638 - RNA, 19 nt, Artificial Sequence
  Description of Artificial Sequence: Synthetic oligonucleotide
agguaugggccugguuccu

SEQ ID NO: 2289639 - RNA, 19 nt, Artificial Sequence
  Description of Artificial Sequence: Synthetic oligonucleotide
cacguuggcuggggcaaac

SEQ ID NO: 2289640 - RNA, 19 nt, Artificial Sequence
  Description of Artificial Sequence: Synthetic oligonucleotide
ccguagccaggccaaggcc

SEQ ID NO: 2289641 - RNA, 19 nt, Artificial Sequence
  Description of Artificial Sequence: Synthetic oligonucleotide
gaagggcaccuggcuggcc

SEQ ID NO: 2289642 - RNA, 19 nt, Artificial Sequence
  Description of Artificial Sequence: Synthetic oligonucleotide
ccagucuuucggccguagc

SEQ ID NO: 2289643 - RNA, 19 nt, Artificial Sequence
  Description of Artificial Sequence: Synthetic oligonucleotide
gguggcaaacaaaccugga

SEQ ID NO: 2289644 - RNA, 19 nt, Artificial Sequence
  Description of Artificial Sequence: Synthetic oligonucleotide
cagugucaugcccacuaua

SEQ ID NO: 2289645 - RNA, 19 nt, Artificial Sequence
  Description of Artificial Sequence: Synthetic oligonucleotide
gcguauucagcagggucac

SEQ ID NO: 2289646 - RNA, 19 nt, Artificial Sequence
  Description of Artificial Sequence: Synthetic oligonucleotide
ggccguagccaggccaagg

SEQ ID NO: 2289647 - RNA, 19 nt, Artificial Sequence
  Description of Artificial Sequence: Synthetic oligonucleotide
ggucaccuagucggcuggg

SEQ ID NO: 2289648 - RNA, 19 nt, Artificial Sequence
  Description of Artificial Sequence: Synthetic oligonucleotide
cacgcuccgacacgccgca

SEQ ID NO: 2289649 - RNA, 19 nt, Artificial Sequence
  Description of Artificial Sequence: Synthetic oligonucleotide
caauuauggucuguaccau

SEQ ID NO: 2289650 - RNA, 19 nt, Artificial Sequence
  Description of Artificial Sequence: Synthetic oligonucleotide
gaacccgcuggaaguccuc

SEQ ID NO: 2289651 - RNA, 19 nt, Artificial Sequence
  Description of Artificial Sequence: Synthetic oligonucleotide
cccgaguuagguaggucca

SEQ ID NO: 2289652 - RNA, 19 nt, Artificial Sequence
  Description of Artificial Sequence: Synthetic oligonucleotide
caucuacgcggccaaacuu

SEQ ID NO: 2289653 - RNA, 19 nt, Artificial Sequence
  Description of Artificial Sequence: Synthetic oligonucleotide
ggcggaugacauugaaagu

SEQ ID NO: 2289654 - RNA, 19 nt, Artificial Sequence
  Description of Artificial Sequence: Synthetic oligonucleotide
gccacaucuacgcggccaa

SEQ ID NO: 2289655 - RNA, 19 nt, Artificial Sequence
  Description of Artificial Sequence: Synthetic oligonucleotide
ccuagucggcuggggaagg

SEQ ID NO: 2289656 - RNA, 19 nt, Artificial Sequence
  Description of Artificial Sequence: Synthetic oligonucleotide
ggcccuucacgcuccgaca

SEQ ID NO: 2289657 - RNA, 19 nt, Artificial Sequence
  Description of Artificial Sequence: Synthetic oligonucleotide
gccaagaaguucuguacuu

SEQ ID NO: 2289658 - RNA, 19 nt, Artificial Sequence
  Description of Artificial Sequence: Synthetic oligonucleotide
guggccccuugucccacca

SEQ ID NO: 2289659 - RNA, 19 nt, Artificial Sequence
  Description of Artificial Sequence: Synthetic oligonucleotide
cugcgaccaggcccuucac

SEQ ID NO: 2289660 - RNA, 19 nt, Artificial Sequence
  Description of Artificial Sequence: Synthetic oligonucleotide
ccauucaagaauggguucu

SEQ ID NO: 2289661 - RNA, 19 nt, Artificial Sequence
  Description of Artificial Sequence: Synthetic oligonucleotide
uacugcgaccaggcccuuc

SEQ ID NO: 2289662 - RNA, 19 nt, Artificial Sequence
  Description of Artificial Sequence: Synthetic oligonucleotide
ccgaguuagguagguccag

SEQ ID NO: 2289663 - RNA, 19 nt, Artificial Sequence
  Description of Artificial Sequence: Synthetic oligonucleotide
gguaugggccugguuccuc

SEQ ID NO: 2289664 - RNA, 19 nt, Artificial Sequence
  Description of Artificial Sequence: Synthetic oligonucleotide
gcuuguccaaccugaccgu

SEQ ID NO: 2289665 - RNA, 19 nt, Artificial Sequence
  Description of Artificial Sequence: Synthetic oligonucleotide
cuguggccccuugucccac

SEQ ID NO: 2289666 - RNA, 19 nt, Artificial Sequence
  Description of Artificial Sequence: Synthetic oligonucleotide
ccugaccgucaaaggcagc

SEQ ID NO: 2289667 - RNA, 19 nt, Artificial Sequence
  Description of Artificial Sequence: Synthetic oligonucleotide
agcucucuccuaacuucuu

SEQ ID NO: 2289668 - RNA, 19 nt, Artificial Sequence
  Description of Artificial Sequence: Synthetic oligonucleotide
gcuagagucaaagcugcuu

SEQ ID NO: 2289669 - RNA, 19 nt, Artificial Sequence
  Description of Artificial Sequence: Synthetic oligonucleotide
cucagaggucacguuggcu

SEQ ID NO: 2289670 - RNA, 19 nt, Artificial Sequence
  Description of Artificial Sequence: Synthetic oligonucleotide
cgcuccgacacgccgcagc

SEQ ID NO: 2289671 - RNA, 19 nt, Artificial Sequence
  Description of Artificial Sequence: Synthetic oligonucleotide
ccuccaagguaugggccug

SEQ ID NO: 2289672 - RNA, 19 nt, Artificial Sequence
  Description of Artificial Sequence: Synthetic oligonucleotide
gcggccaaacuuuucuuuu

SEQ ID NO: 2289673 - RNA, 19 nt, Artificial Sequence
  Description of Artificial Sequence: Synthetic oligonucleotide
gcauucgaauggccccauc

SEQ ID NO: 2289674 - RNA, 19 nt, Artificial Sequence
  Description of Artificial Sequence: Synthetic oligonucleotide
cggaugaccucuccauuca

SEQ ID NO: 2289675 - RNA, 19 nt, Artificial Sequence
  Description of Artificial Sequence: Synthetic oligonucleotide
gcuguucgguuuccuucaa

SEQ ID NO: 2289676 - RNA, 19 nt, Artificial Sequence
  Description of Artificial Sequence: Synthetic oligonucleotide
ccaucucaccagcgaccag

SEQ ID NO: 2289677 - RNA, 19 nt, Artificial Sequence
  Description of Artificial Sequence: Synthetic oligonucleotide
ggcagccacacuggcagua

SEQ ID NO: 2289678 - RNA, 19 nt, Artificial Sequence
  Description of Artificial Sequence: Synthetic oligonucleotide
gccccuugucccaccaguc

SEQ ID NO: 2289679 - RNA, 19 nt, Artificial Sequence
  Description of Artificial Sequence: Synthetic oligonucleotide
gcgaccaggcggaugacau

SEQ ID NO: 2289680 - RNA, 19 nt, Artificial Sequence
  Description of Artificial Sequence: Synthetic oligonucleotide
ccaggcggaugacauugaa

SEQ ID NO: 2289681 - RNA, 19 nt, Artificial Sequence
  Description of Artificial Sequence: Synthetic oligonucleotide
cuccgacacgccgcagcca

SEQ ID NO: 2289682 - RNA, 19 nt, Artificial Sequence
  Description of Artificial Sequence: Synthetic oligonucleotide
gguaagcagugggguggca

SEQ ID NO: 2289683 - RNA, 19 nt, Artificial Sequence
  Description of Artificial Sequence: Synthetic oligonucleotide
cagcgaccaggcggaugac

SEQ ID NO: 2289684 - RNA, 19 nt, Artificial Sequence
  Description of Artificial Sequence: Synthetic oligonucleotide
cgaguuagguagguccaga

SEQ ID NO: 2289685 - RNA, 19 nt, Artificial Sequence
  Description of Artificial Sequence: Synthetic oligonucleotide
uuacugcgaccaggcccuu

SEQ ID NO: 2289686 - RNA, 19 nt, Artificial Sequence
  Description of Artificial Sequence: Synthetic oligonucleotide
cguauucagcagggucacc

SEQ ID NO: 2289687 - RNA, 19 nt, Artificial Sequence
  Description of Artificial Sequence: Synthetic oligonucleotide
acgcuccgacacgccgcag

SEQ ID NO: 2289688 - RNA, 19 nt, Artificial Sequence
  Description of Artificial Sequence: Synthetic oligonucleotide
uggccccaucaagccggau

SEQ ID NO: 2289689 - RNA, 19 nt, Artificial Sequence
  Description of Artificial Sequence: Synthetic oligonucleotide
ccaccagucuuucggccgu

SEQ ID NO: 2289690 - RNA, 19 nt, Artificial Sequence
  Description of Artificial Sequence: Synthetic oligonucleotide
cccuggucugguucauucu

SEQ ID NO: 2289691 - RNA, 19 nt, Artificial Sequence
  Description of Artificial Sequence: Synthetic oligonucleotide
ccccaucaagccggaugac

SEQ ID NO: 2289692 - RNA, 19 nt, Artificial Sequence
  Description of Artificial Sequence: Synthetic oligonucleotide
gacacgccgcagccaucuu

SEQ ID NO: 2289693 - RNA, 19 nt, Artificial Sequence
  Description of Artificial Sequence: Synthetic oligonucleotide
cccuugucccaccagucuu

SEQ ID NO: 2289694 - RNA, 19 nt, Artificial Sequence
  Description of Artificial Sequence: Synthetic oligonucleotide
ccccuugucccaccagucu

SEQ ID NO: 2289695 - RNA, 19 nt, Artificial Sequence
  Description of Artificial Sequence: Synthetic oligonucleotide
ccaaggcccgaagcuccuc

SEQ ID NO: 2289696 - RNA, 19 nt, Artificial Sequence
  Description of Artificial Sequence: Synthetic oligonucleotide
ccgacacgccgcagccauc

SEQ ID NO: 2289697 - RNA, 19 nt, Artificial Sequence
  Description of Artificial Sequence: Synthetic oligonucleotide
ccuggcuggccaagaaguu

SEQ ID NO: 2289698 - RNA, 19 nt, Artificial Sequence
  Description of Artificial Sequence: Synthetic oligonucleotide
cucgagcaaugggcagugu

SEQ ID NO: 2289699 - RNA, 19 nt, Artificial Sequence
  Description of Artificial Sequence: Synthetic oligonucleotide
gccacccuucaaggcugca

SEQ ID NO: 2289700 - RNA, 19 nt, Artificial Sequence
  Description of Artificial Sequence: Synthetic oligonucleotide
cgcggccaaacuuuucuuu

SEQ ID NO: 2289701 - RNA, 19 nt, Artificial Sequence
  Description of Artificial Sequence: Synthetic oligonucleotide
ccacguuggccucccuggu

SEQ ID NO: 2289702 - RNA, 19 nt, Artificial Sequence
  Description of Artificial Sequence: Synthetic oligonucleotide
cugguucauucuggcccau

SEQ ID NO: 2289703 - RNA, 19 nt, Artificial Sequence
  Description of Artificial Sequence: Synthetic oligonucleotide
cgacacgccgcagccaucu

SEQ ID NO: 2289704 - RNA, 19 nt, Artificial Sequence
  Description of Artificial Sequence: Synthetic oligonucleotide
ccacccuucaaggcugcau

SEQ ID NO: 2289705 - RNA, 19 nt, Artificial Sequence
  Description of Artificial Sequence: Synthetic oligonucleotide
ccacaucuacgcggccaaa

SEQ ID NO: 2289706 - RNA, 19 nt, Artificial Sequence
  Description of Artificial Sequence: Synthetic oligonucleotide
gggcagugucaugcccacu

SEQ ID NO: 2289707 - RNA, 19 nt, Artificial Sequence
  Description of Artificial Sequence: Synthetic oligonucleotide
cggccguagccaggccaag

SEQ ID NO: 2289708 - RNA, 19 nt, Artificial Sequence
  Description of Artificial Sequence: Synthetic oligonucleotide
cgaccaggcggaugacauu

SEQ ID NO: 2289709 - RNA, 19 nt, Artificial Sequence
  Description of Artificial Sequence: Synthetic oligonucleotide
caccagcgaccaggcggau

SEQ ID NO: 2289710 - RNA, 19 nt, Artificial Sequence
  Description of Artificial Sequence: Synthetic oligonucleotide
aaugagaaacucuugccac

SEQ ID NO: 2289711 - RNA, 19 nt, Artificial Sequence
  Description of Artificial Sequence: Synthetic oligonucleotide
aagaacaggaagcugugcc

SEQ ID NO: 2289712 - RNA, 19 nt, Artificial Sequence
  Description of Artificial Sequence: Synthetic oligonucleotide
ucuuuuaagaacaggaagc

SEQ ID NO: 2289713 - RNA, 19 nt, Artificial Sequence
  Description of Artificial Sequence: Synthetic oligonucleotide
agucacuaaaucccgaaac

SEQ ID NO: 2289714 - RNA, 19 nt, Artificial Sequence
  Description of Artificial Sequence: Synthetic oligonucleotide
gaaaaguagacauccauca

SEQ ID NO: 2289715 - RNA, 19 nt, Artificial Sequence
  Description of Artificial Sequence: Synthetic oligonucleotide
uuuuggaucccaaaccgag

SEQ ID NO: 2289716 - RNA, 19 nt, Artificial Sequence
  Description of Artificial Sequence: Synthetic oligonucleotide
gaagagaucccucugagca

SEQ ID NO: 2289717 - RNA, 19 nt, Artificial Sequence
  Description of Artificial Sequence: Synthetic oligonucleotide
agggaugucuccuaaugcc

SEQ ID NO: 2289718 - RNA, 19 nt, Artificial Sequence
  Description of Artificial Sequence: Synthetic oligonucleotide
agucgcuacagccaaaagg

SEQ ID NO: 2289719 - RNA, 19 nt, Artificial Sequence
  Description of Artificial Sequence: Synthetic oligonucleotide
uuuaugucccagaagagau

SEQ ID NO: 2289720 - RNA, 19 nt, Artificial Sequence
  Description of Artificial Sequence: Synthetic oligonucleotide
aaaucccgaaacuggcgcc

SEQ ID NO: 2289721 - RNA, 19 nt, Artificial Sequence
  Description of Artificial Sequence: Synthetic oligonucleotide
agacagaugaacugcagag

SEQ ID NO: 2289722 - RNA, 19 nt, Artificial Sequence
  Description of Artificial Sequence: Synthetic oligonucleotide
aaaguagacauccaucauu

SEQ ID NO: 2289723 - RNA, 19 nt, Artificial Sequence
  Description of Artificial Sequence: Synthetic oligonucleotide
gucgcuacagccaaaaggg

SEQ ID NO: 2289724 - RNA, 19 nt, Artificial Sequence
  Description of Artificial Sequence: Synthetic oligonucleotide
uaaaucccgaaacuggcgc

SEQ ID NO: 2289725 - RNA, 19 nt, Artificial Sequence
  Description of Artificial Sequence: Synthetic oligonucleotide
ggagauaugacccagcuca

SEQ ID NO: 2289726 - RNA, 19 nt, Artificial Sequence
  Description of Artificial Sequence: Synthetic oligonucleotide
uaugacccagcucagguca

SEQ ID NO: 2289727 - RNA, 19 nt, Artificial Sequence
  Description of Artificial Sequence: Synthetic oligonucleotide
uuggaucccaaaccgagag

SEQ ID NO: 2289728 - RNA, 19 nt, Artificial Sequence
  Description of Artificial Sequence: Synthetic oligonucleotide
cucgccacagccaaaaggc

SEQ ID NO: 2289729 - RNA, 19 nt, Artificial Sequence
  Description of Artificial Sequence: Synthetic oligonucleotide
aguucucucucuuuuaugu

SEQ ID NO: 2289730 - RNA, 19 nt, Artificial Sequence
  Description of Artificial Sequence: Synthetic oligonucleotide
acuaaaucccgaaacuggc

SEQ ID NO: 2289731 - RNA, 19 nt, Artificial Sequence
  Description of Artificial Sequence: Synthetic oligonucleotide
agccaaaagggcuucucgc

SEQ ID NO: 2289732 - RNA, 19 nt, Artificial Sequence
  Description of Artificial Sequence: Synthetic oligonucleotide
ucucagucacuaaaucccg

SEQ ID NO: 2289733 - RNA, 19 nt, Artificial Sequence
  Description of Artificial Sequence: Synthetic oligonucleotide
ugucacacucgccacagcc

SEQ ID NO: 2289734 - RNA, 19 nt, Artificial Sequence
  Description of Artificial Sequence: Synthetic oligonucleotide
agaagagaucccucugagc

SEQ ID NO: 2289735 - RNA, 19 nt, Artificial Sequence
  Description of Artificial Sequence: Synthetic oligonucleotide
acagccaaaaggccgcucg

SEQ ID NO: 2289736 - RNA, 19 nt, Artificial Sequence
  Description of Artificial Sequence: Synthetic oligonucleotide
uccaucauuucuccugucc

SEQ ID NO: 2289737 - RNA, 19 nt, Artificial Sequence
  Description of Artificial Sequence: Synthetic oligonucleotide
gagagcagcauuccgggag

SEQ ID NO: 2289738 - RNA, 19 nt, Artificial Sequence
  Description of Artificial Sequence: Synthetic oligonucleotide
cuaaaucccgaaacuggcg

SEQ ID NO: 2289739 - RNA, 19 nt, Artificial Sequence
  Description of Artificial Sequence: Synthetic oligonucleotide
ugguccagcagguaggagc

SEQ ID NO: 2289740 - RNA, 19 nt, Artificial Sequence
  Description of Artificial Sequence: Synthetic oligonucleotide
gacugaggagauaugaccc

SEQ ID NO: 2289741 - RNA, 19 nt, Artificial Sequence
  Description of Artificial Sequence: Synthetic oligonucleotide
aaaccgagagcagcauucc

SEQ ID NO: 2289742 - RNA, 19 nt, Artificial Sequence
  Description of Artificial Sequence: Synthetic oligonucleotide
aacugcagaggaaaaguag

SEQ ID NO: 2289743 - RNA, 19 nt, Artificial Sequence
  Description of Artificial Sequence: Synthetic oligonucleotide
ugugcgguuucucagucac

SEQ ID NO: 2289744 - RNA, 19 nt, Artificial Sequence
  Description of Artificial Sequence: Synthetic oligonucleotide
aagagaucccucugagcag

SEQ ID NO: 2289745 - RNA, 19 nt, Artificial Sequence
  Description of Artificial Sequence: Synthetic oligonucleotide
ucacuaaaucccgaaacug

SEQ ID NO: 2289746 - RNA, 19 nt, Artificial Sequence
  Description of Artificial Sequence: Synthetic oligonucleotide
uuuuggacugaggagauau

SEQ ID NO: 2289747 - RNA, 19 nt, Artificial Sequence
  Description of Artificial Sequence: Synthetic oligonucleotide
cuaggucugagccccagcg

SEQ ID NO: 2289748 - RNA, 19 nt, Artificial Sequence
  Description of Artificial Sequence: Synthetic oligonucleotide
ucucuuuuaugucccagaa

SEQ ID NO: 2289749 - RNA, 19 nt, Artificial Sequence
  Description of Artificial Sequence: Synthetic oligonucleotide
ucugucccgacaaugcugu

SEQ ID NO: 2289750 - RNA, 19 nt, Artificial Sequence
  Description of Artificial Sequence: Synthetic oligonucleotide
uggcuuuuggaucccaaac

SEQ ID NO: 2289751 - RNA, 19 nt, Artificial Sequence
  Description of Artificial Sequence: Synthetic oligonucleotide
caaaccgagagcagcauuc

SEQ ID NO: 2289752 - RNA, 19 nt, Artificial Sequence
  Description of Artificial Sequence: Synthetic oligonucleotide
uggggucucacucucccag

SEQ ID NO: 2289753 - RNA, 19 nt, Artificial Sequence
  Description of Artificial Sequence: Synthetic oligonucleotide
auaugacccagcucagguc

SEQ ID NO: 2289754 - RNA, 19 nt, Artificial Sequence
  Description of Artificial Sequence: Synthetic oligonucleotide
aaccgagagcagcauuccg

SEQ ID NO: 2289755 - RNA, 19 nt, Artificial Sequence
  Description of Artificial Sequence: Synthetic oligonucleotide
aaguagacauccaucauuu

SEQ ID NO: 2289756 - RNA, 19 nt, Artificial Sequence
  Description of Artificial Sequence: Synthetic oligonucleotide
cauucaggacacuugugug

SEQ ID NO: 2289757 - RNA, 19 nt, Artificial Sequence
  Description of Artificial Sequence: Synthetic oligonucleotide
uuggacugaggagauauga

SEQ ID NO: 2289758 - RNA, 19 nt, Artificial Sequence
  Description of Artificial Sequence: Synthetic oligonucleotide
uuuggaucccaaaccgaga

SEQ ID NO: 2289759 - RNA, 19 nt, Artificial Sequence
  Description of Artificial Sequence: Synthetic oligonucleotide
ugugcgaugaggugugcac

SEQ ID NO: 2289760 - RNA, 19 nt, Artificial Sequence
  Description of Artificial Sequence: Synthetic oligonucleotide
gaggugugcacgcugcuug

SEQ ID NO: 2289761 - RNA, 19 nt, Artificial Sequence
  Description of Artificial Sequence: Synthetic oligonucleotide
caaugagaaacucuugcca

SEQ ID NO: 2289762 - RNA, 19 nt, Artificial Sequence
  Description of Artificial Sequence: Synthetic oligonucleotide
uggacugaggagauaugac

SEQ ID NO: 2289763 - RNA, 19 nt, Artificial Sequence
  Description of Artificial Sequence: Synthetic oligonucleotide
uguccgucccucuuuuaag

SEQ ID NO: 2289764 - RNA, 19 nt, Artificial Sequence
  Description of Artificial Sequence: Synthetic oligonucleotide
ggacugaggagauaugacc

SEQ ID NO: 2289765 - RNA, 19 nt, Artificial Sequence
  Description of Artificial Sequence: Synthetic oligonucleotide
cucggucucagccuccucg

SEQ ID NO: 2289766 - RNA, 19 nt, Artificial Sequence
  Description of Artificial Sequence: Synthetic oligonucleotide
uaggagcgcaaugagaaac

SEQ ID NO: 2289767 - RNA, 19 nt, Artificial Sequence
  Description of Artificial Sequence: Synthetic oligonucleotide
ugugcguucgcuggugccg

SEQ ID NO: 2289768 - RNA, 19 nt, Artificial Sequence
  Description of Artificial Sequence: Synthetic oligonucleotide
ucagucacuaaaucccgaa

SEQ ID NO: 2289769 - RNA, 19 nt, Artificial Sequence
  Description of Artificial Sequence: Synthetic oligonucleotide
aaugcugucauggccucgu

SEQ ID NO: 2289770 - RNA, 19 nt, Artificial Sequence
  Description of Artificial Sequence: Synthetic oligonucleotide
agcgcuucccacauugccc

SEQ ID NO: 2289771 - RNA, 19 nt, Artificial Sequence
  Description of Artificial Sequence: Synthetic oligonucleotide
uggugacucaccccacggg

SEQ ID NO: 2289772 - RNA, 19 nt, Artificial Sequence
  Description of Artificial Sequence: Synthetic oligonucleotide
aggagauaugacccagcuc

SEQ ID NO: 2289773 - RNA, 19 nt, Artificial Sequence
  Description of Artificial Sequence: Synthetic oligonucleotide
ugacgcaccaggucagaag

SEQ ID NO: 2289774 - RNA, 19 nt, Artificial Sequence
  Description of Artificial Sequence: Synthetic oligonucleotide
ggucaucccagacagauga

SEQ ID NO: 2289775 - RNA, 19 nt, Artificial Sequence
  Description of Artificial Sequence: Synthetic oligonucleotide
ugcagaggaaaaguagaca

SEQ ID NO: 2289776 - RNA, 19 nt, Artificial Sequence
  Description of Artificial Sequence: Synthetic oligonucleotide
ugcgaugaggugugcacgc

SEQ ID NO: 2289777 - RNA, 19 nt, Artificial Sequence
  Description of Artificial Sequence: Synthetic oligonucleotide
auuccgggaguucucucuc

SEQ ID NO: 2289778 - RNA, 19 nt, Artificial Sequence
  Description of Artificial Sequence: Synthetic oligonucleotide
ugacucaccccacggguug

SEQ ID NO: 2289779 - RNA, 19 nt, Artificial Sequence
  Description of Artificial Sequence: Synthetic oligonucleotide
acggugguccagcagguag

SEQ ID NO: 2289780 - RNA, 19 nt, Artificial Sequence
  Description of Artificial Sequence: Synthetic oligonucleotide
ucgggauuccaggacacag

SEQ ID NO: 2289781 - RNA, 19 nt, Artificial Sequence
  Description of Artificial Sequence: Synthetic oligonucleotide
agaugaacugcagaggaaa

SEQ ID NO: 2289782 - RNA, 19 nt, Artificial Sequence
  Description of Artificial Sequence: Synthetic oligonucleotide
ugucuccuaaugccacagg

SEQ ID NO: 2289783 - RNA, 19 nt, Artificial Sequence
  Description of Artificial Sequence: Synthetic oligonucleotide
uuuggacugaggagauaug

SEQ ID NO: 2289784 - RNA, 19 nt, Artificial Sequence
  Description of Artificial Sequence: Synthetic oligonucleotide
cugcagaggaaaaguagac

SEQ ID NO: 2289785 - RNA, 19 nt, Artificial Sequence
  Description of Artificial Sequence: Synthetic oligonucleotide
cagaagagaucccucugag

SEQ ID NO: 2289786 - RNA, 19 nt, Artificial Sequence
  Description of Artificial Sequence: Synthetic oligonucleotide
ucacacucgccacagccaa

SEQ ID NO: 2289787 - RNA, 19 nt, Artificial Sequence
  Description of Artificial Sequence: Synthetic oligonucleotide
acugaggagauaugaccca

SEQ ID NO: 2289788 - RNA, 19 nt, Artificial Sequence
  Description of Artificial Sequence: Synthetic oligonucleotide
ucggucucagccuccucgg

SEQ ID NO: 2289789 - RNA, 19 nt, Artificial Sequence
  Description of Artificial Sequence: Synthetic oligonucleotide
uuaugucccagaagagauc

SEQ ID NO: 2289790 - RNA, 19 nt, Artificial Sequence
  Description of Artificial Sequence: Synthetic oligonucleotide
aaacuggcgccugcgagug

SEQ ID NO: 2289791 - RNA, 19 nt, Artificial Sequence
  Description of Artificial Sequence: Synthetic oligonucleotide
accgagagcagcauuccgg

SEQ ID NO: 2289792 - RNA, 19 nt, Artificial Sequence
  Description of Artificial Sequence: Synthetic oligonucleotide
gaucccucugagcaggguc

SEQ ID NO: 2289793 - RNA, 19 nt, Artificial Sequence
  Description of Artificial Sequence: Synthetic oligonucleotide
ugucccagaagagaucccu

SEQ ID NO: 2289794 - RNA, 19 nt, Artificial Sequence
  Description of Artificial Sequence: Synthetic oligonucleotide
auugcccgcagcugugcgg

SEQ ID NO: 2289795 - RNA, 19 nt, Artificial Sequence
  Description of Artificial Sequence: Synthetic oligonucleotide
agccaaaaggccgcucgcc

SEQ ID NO: 2289796 - RNA, 19 nt, Artificial Sequence
  Description of Artificial Sequence: Synthetic oligonucleotide
agauaugacccagcucagg

SEQ ID NO: 2289797 - RNA, 19 nt, Artificial Sequence
  Description of Artificial Sequence: Synthetic oligonucleotide
agaaagggaugucuccuaa

SEQ ID NO: 2289798 - RNA, 19 nt, Artificial Sequence
  Description of Artificial Sequence: Synthetic oligonucleotide
agucagucugucccgacaa

SEQ ID NO: 2289799 - RNA, 19 nt, Artificial Sequence
  Description of Artificial Sequence: Synthetic oligonucleotide
ugggcggucggccccgacg

SEQ ID NO: 2289800 - RNA, 19 nt, Artificial Sequence
  Description of Artificial Sequence: Synthetic oligonucleotide
gugcacacgacgguggucc

SEQ ID NO: 2289801 - RNA, 19 nt, Artificial Sequence
  Description of Artificial Sequence: Synthetic oligonucleotide
aaucccgaaacuggcgccu

SEQ ID NO: 2289802 - RNA, 19 nt, Artificial Sequence
  Description of Artificial Sequence: Synthetic oligonucleotide
ccaucauuucuccuguccg

SEQ ID NO: 2289803 - RNA, 19 nt, Artificial Sequence
  Description of Artificial Sequence: Synthetic oligonucleotide
ucucgcucuggcuuuugga

SEQ ID NO: 2289804 - RNA, 19 nt, Artificial Sequence
  Description of Artificial Sequence: Synthetic oligonucleotide
aggucagaagagcugcgga

SEQ ID NO: 2289805 - RNA, 19 nt, Artificial Sequence
  Description of Artificial Sequence: Synthetic oligonucleotide
ugucccgacaaugcuguca

SEQ ID NO: 2289806 - RNA, 19 nt, Artificial Sequence
  Description of Artificial Sequence: Synthetic oligonucleotide
gcugucauggccucgucug

SEQ ID NO: 2289807 - RNA, 19 nt, Artificial Sequence
  Description of Artificial Sequence: Synthetic oligonucleotide
cacggguugggccaucuug

SEQ ID NO: 2289808 - RNA, 19 nt, Artificial Sequence
  Description of Artificial Sequence: Synthetic oligonucleotide
acagucagucugucccgac

SEQ ID NO: 2289809 - RNA, 19 nt, Artificial Sequence
  Description of Artificial Sequence: Synthetic oligonucleotide
ugcgguuucucagucacua

SEQ ID NO: 2289810 - RNA, 19 nt, Artificial Sequence
  Description of Artificial Sequence: Synthetic oligonucleotide
agcgcaaugagaaacucuu

SEQ ID NO: 2289811 - RNA, 19 nt, Artificial Sequence
  Description of Artificial Sequence: Synthetic oligonucleotide
agcugcggaagcucuuguc

SEQ ID NO: 2289812 - RNA, 19 nt, Artificial Sequence
  Description of Artificial Sequence: Synthetic oligonucleotide
gaugucuccuaaugccaca

SEQ ID NO: 2289813 - RNA, 19 nt, Artificial Sequence
  Description of Artificial Sequence: Synthetic oligonucleotide
gucacuaaaucccgaaacu

SEQ ID NO: 2289814 - RNA, 19 nt, Artificial Sequence
  Description of Artificial Sequence: Synthetic oligonucleotide
gguaggagcgcaaugagaa

SEQ ID NO: 2289815 - RNA, 19 nt, Artificial Sequence
  Description of Artificial Sequence: Synthetic oligonucleotide
agagcagcauuccgggagu

SEQ ID NO: 2289816 - RNA, 19 nt, Artificial Sequence
  Description of Artificial Sequence: Synthetic oligonucleotide
acuggcgccugcgaguggg

SEQ ID NO: 2289817 - RNA, 19 nt, Artificial Sequence
  Description of Artificial Sequence: Synthetic oligonucleotide
ucgccacagccaaaaggcc

SEQ ID NO: 2289818 - RNA, 19 nt, Artificial Sequence
  Description of Artificial Sequence: Synthetic oligonucleotide
cuuuuggaucccaaaccga

SEQ ID NO: 2289819 - RNA, 19 nt, Artificial Sequence
  Description of Artificial Sequence: Synthetic oligonucleotide
agcagguaggagcgcaaug

SEQ ID NO: 2289820 - RNA, 19 nt, Artificial Sequence
  Description of Artificial Sequence: Synthetic oligonucleotide
acccagcucaggucauccc

SEQ ID NO: 2289821 - RNA, 19 nt, Artificial Sequence
  Description of Artificial Sequence: Synthetic oligonucleotide
augucuccuaaugccacag

SEQ ID NO: 2289822 - RNA, 19 nt, Artificial Sequence
  Description of Artificial Sequence: Synthetic oligonucleotide
cccucuuuuaagaacagga

SEQ ID NO: 2289823 - RNA, 19 nt, Artificial Sequence
  Description of Artificial Sequence: Synthetic oligonucleotide
gagauaugacccagcucag

SEQ ID NO: 2289824 - RNA, 19 nt, Artificial Sequence
  Description of Artificial Sequence: Synthetic oligonucleotide
cucucuuuuaugucccaga

SEQ ID NO: 2289825 - RNA, 19 nt, Artificial Sequence
  Description of Artificial Sequence: Synthetic oligonucleotide
cgcaaugagaaacucuugc

SEQ ID NO: 2289826 - RNA, 19 nt, Artificial Sequence
  Description of Artificial Sequence: Synthetic oligonucleotide
acauugcccgcagcugugc

SEQ ID NO: 2289827 - RNA, 19 nt, Artificial Sequence
  Description of Artificial Sequence: Synthetic oligonucleotide
agccccauucuucucggga

SEQ ID NO: 2289828 - RNA, 19 nt, Artificial Sequence
  Description of Artificial Sequence: Synthetic oligonucleotide
gaaacuggcgccugcgagu

SEQ ID NO: 2289829 - RNA, 19 nt, Artificial Sequence
  Description of Artificial Sequence: Synthetic oligonucleotide
cccgacaaugcugucaugg

SEQ ID NO: 2289830 - RNA, 19 nt, Artificial Sequence
  Description of Artificial Sequence: Synthetic oligonucleotide
uccuaaugccacagguuuu

SEQ ID NO: 2289831 - RNA, 19 nt, Artificial Sequence
  Description of Artificial Sequence: Synthetic oligonucleotide
gugugcacgcugcuugaag

SEQ ID NO: 2289832 - RNA, 19 nt, Artificial Sequence
  Description of Artificial Sequence: Synthetic oligonucleotide
cugucauggccucgucugg

SEQ ID NO: 2289833 - RNA, 19 nt, Artificial Sequence
  Description of Artificial Sequence: Synthetic oligonucleotide
gugcgaugaggugugcacg

SEQ ID NO: 2289834 - RNA, 19 nt, Artificial Sequence
  Description of Artificial Sequence: Synthetic oligonucleotide
aggacacagucacuucaca

SEQ ID NO: 2289835 - RNA, 19 nt, Artificial Sequence
  Description of Artificial Sequence: Synthetic oligonucleotide
ucgcucuggcuuuuggauc

SEQ ID NO: 2289836 - RNA, 19 nt, Artificial Sequence
  Description of Artificial Sequence: Synthetic oligonucleotide
cagcugugcgguuucucag

SEQ ID NO: 2289837 - RNA, 19 nt, Artificial Sequence
  Description of Artificial Sequence: Synthetic oligonucleotide
gcgcuucccacauugcccg

SEQ ID NO: 2289838 - RNA, 19 nt, Artificial Sequence
  Description of Artificial Sequence: Synthetic oligonucleotide
uccgucccucuuuuaagaa

SEQ ID NO: 2289839 - RNA, 19 nt, Artificial Sequence
  Description of Artificial Sequence: Synthetic oligonucleotide
caccaggucagaagagcug

SEQ ID NO: 2289840 - RNA, 19 nt, Artificial Sequence
  Description of Artificial Sequence: Synthetic oligonucleotide
uucgcuggugccgggcuag

SEQ ID NO: 2289841 - RNA, 19 nt, Artificial Sequence
  Description of Artificial Sequence: Synthetic oligonucleotide
gggauuccaggacacaguc

SEQ ID NO: 2289842 - RNA, 19 nt, Artificial Sequence
  Description of Artificial Sequence: Synthetic oligonucleotide
gugcacacccuggugacgc

SEQ ID NO: 2289843 - RNA, 19 nt, Artificial Sequence
  Description of Artificial Sequence: Synthetic oligonucleotide
acucagcacaggagaaggg

SEQ ID NO: 2289844 - RNA, 19 nt, Artificial Sequence
  Description of Artificial Sequence: Synthetic oligonucleotide
cacacccuggugacgcacc

SEQ ID NO: 2289845 - RNA, 19 nt, Artificial Sequence
  Description of Artificial Sequence: Synthetic oligonucleotide
guccgucccucuuuuaaga

SEQ ID NO: 2289846 - RNA, 19 nt, Artificial Sequence
  Description of Artificial Sequence: Synthetic oligonucleotide
cacacgacggugguccagc

SEQ ID NO: 2289847 - RNA, 19 nt, Artificial Sequence
  Description of Artificial Sequence: Synthetic oligonucleotide
cacauugcccgcagcugug

SEQ ID NO: 2289848 - RNA, 19 nt, Artificial Sequence
  Description of Artificial Sequence: Synthetic oligonucleotide
ccaaaaggccgcucgcccg

SEQ ID NO: 2289849 - RNA, 19 nt, Artificial Sequence
  Description of Artificial Sequence: Synthetic oligonucleotide
caugcaggcucuggugugc

SEQ ID NO: 2289850 - RNA, 19 nt, Artificial Sequence
  Description of Artificial Sequence: Synthetic oligonucleotide
cagagcuguccucgguggg

SEQ ID NO: 2289851 - RNA, 19 nt, Artificial Sequence
  Description of Artificial Sequence: Synthetic oligonucleotide
gcugcggaagcucuuguca

SEQ ID NO: 2289852 - RNA, 19 nt, Artificial Sequence
  Description of Artificial Sequence: Synthetic oligonucleotide
acagucgcuacagccaaaa

SEQ ID NO: 2289853 - RNA, 19 nt, Artificial Sequence
  Description of Artificial Sequence: Synthetic oligonucleotide
aacuggcgccugcgagugg

SEQ ID NO: 2289854 - RNA, 19 nt, Artificial Sequence
  Description of Artificial Sequence: Synthetic oligonucleotide
ugcgagugggcggucggcc

SEQ ID NO: 2289855 - RNA, 19 nt, Artificial Sequence
  Description of Artificial Sequence: Synthetic oligonucleotide
ugagccccagcggaagcgc

SEQ ID NO: 2289856 - RNA, 19 nt, Artificial Sequence
  Description of Artificial Sequence: Synthetic oligonucleotide
cagccaaaaggccgcucgc

SEQ ID NO: 2289857 - RNA, 19 nt, Artificial Sequence
  Description of Artificial Sequence: Synthetic oligonucleotide
agcagcauuccgggaguuc

SEQ ID NO: 2289858 - RNA, 19 nt, Artificial Sequence
  Description of Artificial Sequence: Synthetic oligonucleotide
cgacgcgucaccaccagcg

SEQ ID NO: 2289859 - RNA, 19 nt, Artificial Sequence
  Description of Artificial Sequence: Synthetic oligonucleotide
guugggccaucuuggcaug

SEQ ID NO: 2289860 - RNA, 19 nt, Artificial Sequence
  Description of Artificial Sequence: Synthetic oligonucleotide
gccaaaaggccgcucgccc

SEQ ID NO: 2289861 - RNA, 19 nt, Artificial Sequence
  Description of Artificial Sequence: Synthetic oligonucleotide
ucgccugugugcacacccu

SEQ ID NO: 2289862 - RNA, 19 nt, Artificial Sequence
  Description of Artificial Sequence: Synthetic oligonucleotide
cucagucacuaaaucccga

SEQ ID NO: 2289863 - RNA, 19 nt, Artificial Sequence
  Description of Artificial Sequence: Synthetic oligonucleotide
ucccgaaacuggcgccugc

SEQ ID NO: 2289864 - RNA, 19 nt, Artificial Sequence
  Description of Artificial Sequence: Synthetic oligonucleotide
agcauuccgggaguucucu

SEQ ID NO: 2289865 - RNA, 19 nt, Artificial Sequence
  Description of Artificial Sequence: Synthetic oligonucleotide
gccgggcuaggucugagcc

SEQ ID NO: 2289866 - RNA, 19 nt, Artificial Sequence
  Description of Artificial Sequence: Synthetic oligonucleotide
gacucaccccacggguugg

SEQ ID NO: 2289867 - RNA, 19 nt, Artificial Sequence
  Description of Artificial Sequence: Synthetic oligonucleotide
uugcccgcagcugugcggu

SEQ ID NO: 2289868 - RNA, 19 nt, Artificial Sequence
  Description of Artificial Sequence: Synthetic oligonucleotide
uuccgggaguucucucucu

SEQ ID NO: 2289869 - RNA, 19 nt, Artificial Sequence
  Description of Artificial Sequence: Synthetic oligonucleotide
gagaucccucugagcaggg

SEQ ID NO: 2289870 - RNA, 19 nt, Artificial Sequence
  Description of Artificial Sequence: Synthetic oligonucleotide
cuccuaaugccacagguuu

SEQ ID NO: 2289871 - RNA, 19 nt, Artificial Sequence
  Description of Artificial Sequence: Synthetic oligonucleotide
uccucgguggggucucacu

SEQ ID NO: 2289872 - RNA, 19 nt, Artificial Sequence
  Description of Artificial Sequence: Synthetic oligonucleotide
uucccacauugcccgcagc

SEQ ID NO: 2289873 - RNA, 19 nt, Artificial Sequence
  Description of Artificial Sequence: Synthetic oligonucleotide
agguaggagcgcaaugaga

SEQ ID NO: 2289874 - RNA, 19 nt, Artificial Sequence
  Description of Artificial Sequence: Synthetic oligonucleotide
acacucgccacagccaaaa

SEQ ID NO: 2289875 - RNA, 19 nt, Artificial Sequence
  Description of Artificial Sequence: Synthetic oligonucleotide
cacagucacuucacaguca

SEQ ID NO: 2289876 - RNA, 19 nt, Artificial Sequence
  Description of Artificial Sequence: Synthetic oligonucleotide
gaaagggaugucuccuaau

SEQ ID NO: 2289877 - RNA, 19 nt, Artificial Sequence
  Description of Artificial Sequence: Synthetic oligonucleotide
acacccuggugacgcacca

SEQ ID NO: 2289878 - RNA, 19 nt, Artificial Sequence
  Description of Artificial Sequence: Synthetic oligonucleotide
ccgacaaugcugucauggc

SEQ ID NO: 2289879 - RNA, 19 nt, Artificial Sequence
  Description of Artificial Sequence: Synthetic oligonucleotide
uucucgccugugugcacac

SEQ ID NO: 2289880 - RNA, 19 nt, Artificial Sequence
  Description of Artificial Sequence: Synthetic oligonucleotide
caaugcugucauggccucg

SEQ ID NO: 2289881 - RNA, 19 nt, Artificial Sequence
  Description of Artificial Sequence: Synthetic oligonucleotide
cuguccgucccucuuuuaa

SEQ ID NO: 2289882 - RNA, 19 nt, Artificial Sequence
  Description of Artificial Sequence: Synthetic oligonucleotide
gguugggccaucuuggcau

SEQ ID NO: 2289883 - RNA, 19 nt, Artificial Sequence
  Description of Artificial Sequence: Synthetic oligonucleotide
aaaaggccgcucgcccgug

SEQ ID NO: 2289884 - RNA, 19 nt, Artificial Sequence
  Description of Artificial Sequence: Synthetic oligonucleotide
caucauuucuccuguccgu

SEQ ID NO: 2289885 - RNA, 19 nt, Artificial Sequence
  Description of Artificial Sequence: Synthetic oligonucleotide
cagaugaacugcagaggaa

SEQ ID NO: 2289886 - RNA, 19 nt, Artificial Sequence
  Description of Artificial Sequence: Synthetic oligonucleotide
augcugucauggccucguc

SEQ ID NO: 2289887 - RNA, 19 nt, Artificial Sequence
  Description of Artificial Sequence: Synthetic oligonucleotide
ugccgggcuaggucugagc

SEQ ID NO: 2289888 - RNA, 19 nt, Artificial Sequence
  Description of Artificial Sequence: Synthetic oligonucleotide
ggaugucuccuaaugccac

SEQ ID NO: 2289889 - RNA, 19 nt, Artificial Sequence
  Description of Artificial Sequence: Synthetic oligonucleotide
ggucucacucucccagacc

SEQ ID NO: 2289890 - RNA, 19 nt, Artificial Sequence
  Description of Artificial Sequence: Synthetic oligonucleotide
gugcguucgcuggugccgg

SEQ ID NO: 2289891 - RNA, 19 nt, Artificial Sequence
  Description of Artificial Sequence: Synthetic oligonucleotide
cauuccgggaguucucucu

SEQ ID NO: 2289892 - RNA, 19 nt, Artificial Sequence
  Description of Artificial Sequence: Synthetic oligonucleotide
ccucuuuuaagaacaggaa

SEQ ID NO: 2289893 - RNA, 19 nt, Artificial Sequence
  Description of Artificial Sequence: Synthetic oligonucleotide
guaggagcgcaaugagaaa

SEQ ID NO: 2289894 - RNA, 19 nt, Artificial Sequence
  Description of Artificial Sequence: Synthetic oligonucleotide
cagucacuaaaucccgaaa

SEQ ID NO: 2289895 - RNA, 19 nt, Artificial Sequence
  Description of Artificial Sequence: Synthetic oligonucleotide
cacgacggugguccagcag

SEQ ID NO: 2289896 - RNA, 19 nt, Artificial Sequence
  Description of Artificial Sequence: Synthetic oligonucleotide
ugcguucgcuggugccggg

SEQ ID NO: 2289897 - RNA, 19 nt, Artificial Sequence
  Description of Artificial Sequence: Synthetic oligonucleotide
ugaggugugcacgcugcuu

SEQ ID NO: 2289898 - RNA, 19 nt, Artificial Sequence
  Description of Artificial Sequence: Synthetic oligonucleotide
cagucagucugucccgaca

SEQ ID NO: 2289899 - RNA, 19 nt, Artificial Sequence
  Description of Artificial Sequence: Synthetic oligonucleotide
cuacagccaaaagggcuuc

SEQ ID NO: 2289900 - RNA, 19 nt, Artificial Sequence
  Description of Artificial Sequence: Synthetic oligonucleotide
gagcaggguccagggagcc

SEQ ID NO: 2289901 - RNA, 19 nt, Artificial Sequence
  Description of Artificial Sequence: Synthetic oligonucleotide
gggaugucuccuaaugcca

SEQ ID NO: 2289902 - RNA, 19 nt, Artificial Sequence
  Description of Artificial Sequence: Synthetic oligonucleotide
ggugacucaccccacgggu

SEQ ID NO: 2289903 - RNA, 19 nt, Artificial Sequence
  Description of Artificial Sequence: Synthetic oligonucleotide
caccccacggguugggcca

SEQ ID NO: 2289904 - RNA, 19 nt, Artificial Sequence
  Description of Artificial Sequence: Synthetic oligonucleotide
cucgcucuggcuuuuggau

SEQ ID NO: 2289905 - RNA, 19 nt, Artificial Sequence
  Description of Artificial Sequence: Synthetic oligonucleotide
ugcacacccuggugacgca

SEQ ID NO: 2289906 - RNA, 19 nt, Artificial Sequence
  Description of Artificial Sequence: Synthetic oligonucleotide
ggcgccugcgagugggcgg

SEQ ID NO: 2289907 - RNA, 19 nt, Artificial Sequence
  Description of Artificial Sequence: Synthetic oligonucleotide
ccaggucagaagagcugcg

SEQ ID NO: 2289908 - RNA, 19 nt, Artificial Sequence
  Description of Artificial Sequence: Synthetic oligonucleotide
ucggccccgacgcgucacc

SEQ ID NO: 2289909 - RNA, 19 nt, Artificial Sequence
  Description of Artificial Sequence: Synthetic oligonucleotide
ccacuggugacucacccca

SEQ ID NO: 2289910 - RNA, 19 nt, Artificial Sequence
  Description of Artificial Sequence: Synthetic oligonucleotide
ugcaggcucuggugugcga

SEQ ID NO: 2289911 - RNA, 19 nt, Artificial Sequence
  Description of Artificial Sequence: Synthetic oligonucleotide
gagugggcggucggccccg

SEQ ID NO: 2289912 - RNA, 19 nt, Artificial Sequence
  Description of Artificial Sequence: Synthetic oligonucleotide
cacucgccacagccaaaag

SEQ ID NO: 2289913 - RNA, 19 nt, Artificial Sequence
  Description of Artificial Sequence: Synthetic oligonucleotide
gagcgcaaugagaaacucu

SEQ ID NO: 2289914 - RNA, 19 nt, Artificial Sequence
  Description of Artificial Sequence: Synthetic oligonucleotide
caggucaucccagacagau

SEQ ID NO: 2289915 - RNA, 19 nt, Artificial Sequence
  Description of Artificial Sequence: Synthetic oligonucleotide
agguaggcgcugcggcuga

SEQ ID NO: 2289916 - RNA, 19 nt, Artificial Sequence
  Description of Artificial Sequence: Synthetic oligonucleotide
ccgucccucuuuuaagaac

SEQ ID NO: 2289917 - RNA, 19 nt, Artificial Sequence
  Description of Artificial Sequence: Synthetic oligonucleotide
acacgacggugguccagca

SEQ ID NO: 2289918 - RNA, 19 nt, Artificial Sequence
  Description of Artificial Sequence: Synthetic oligonucleotide
ucccgacaaugcugucaug

SEQ ID NO: 2289919 - RNA, 19 nt, Artificial Sequence
  Description of Artificial Sequence: Synthetic oligonucleotide
ucucagccuccucgggauu

SEQ ID NO: 2289920 - RNA, 19 nt, Artificial Sequence
  Description of Artificial Sequence: Synthetic oligonucleotide
ggaguucucucucuuuuau

SEQ ID NO: 2289921 - RNA, 19 nt, Artificial Sequence
  Description of Artificial Sequence: Synthetic oligonucleotide
gcugugcgguuucucaguc

SEQ ID NO: 2289922 - RNA, 19 nt, Artificial Sequence
  Description of Artificial Sequence: Synthetic oligonucleotide
gcgcccagagcuguccucg

SEQ ID NO: 2289923 - RNA, 19 nt, Artificial Sequence
  Description of Artificial Sequence: Synthetic oligonucleotide
gcuaggucugagccccagc

SEQ ID NO: 2289924 - RNA, 19 nt, Artificial Sequence
  Description of Artificial Sequence: Synthetic oligonucleotide
ucuuggcaugcaggcucug

SEQ ID NO: 2289925 - RNA, 19 nt, Artificial Sequence
  Description of Artificial Sequence: Synthetic oligonucleotide
cagaccucggucucagccu

SEQ ID NO: 2289926 - RNA, 19 nt, Artificial Sequence
  Description of Artificial Sequence: Synthetic oligonucleotide
cugugcgguuucucaguca

SEQ ID NO: 2289927 - RNA, 19 nt, Artificial Sequence
  Description of Artificial Sequence: Synthetic oligonucleotide
aucccgaaacuggcgccug

SEQ ID NO: 2289928 - RNA, 19 nt, Artificial Sequence
  Description of Artificial Sequence: Synthetic oligonucleotide
ggagcgcaaugagaaacuc

SEQ ID NO: 2289929 - RNA, 19 nt, Artificial Sequence
  Description of Artificial Sequence: Synthetic oligonucleotide
cggugguccagcagguagg

SEQ ID NO: 2289930 - RNA, 19 nt, Artificial Sequence
  Description of Artificial Sequence: Synthetic oligonucleotide
ugacccagcucaggucauc

SEQ ID NO: 2289931 - RNA, 19 nt, Artificial Sequence
  Description of Artificial Sequence: Synthetic oligonucleotide
agaucccucugagcagggu

SEQ ID NO: 2289932 - RNA, 19 nt, Artificial Sequence
  Description of Artificial Sequence: Synthetic oligonucleotide
gugugcgaugaggugugca

SEQ ID NO: 2289933 - RNA, 19 nt, Artificial Sequence
  Description of Artificial Sequence: Synthetic oligonucleotide
gguggucagccagguaggc

SEQ ID NO: 2289934 - RNA, 19 nt, Artificial Sequence
  Description of Artificial Sequence: Synthetic oligonucleotide
ggguugggccaucuuggca

SEQ ID NO: 2289935 - RNA, 19 nt, Artificial Sequence
  Description of Artificial Sequence: Synthetic oligonucleotide
caaaaggccgcucgcccgu

SEQ ID NO: 2289936 - RNA, 19 nt, Artificial Sequence
  Description of Artificial Sequence: Synthetic oligonucleotide
cgggcuaggucugagcccc

SEQ ID NO: 2289937 - RNA, 19 nt, Artificial Sequence
  Description of Artificial Sequence: Synthetic oligonucleotide
caccagcgcgcccagagcu

SEQ ID NO: 2289938 - RNA, 19 nt, Artificial Sequence
  Description of Artificial Sequence: Synthetic oligonucleotide
cuggcgccugcgagugggc

SEQ ID NO: 2289939 - RNA, 19 nt, Artificial Sequence
  Description of Artificial Sequence: Synthetic oligonucleotide
cugcgagugggcggucggc

SEQ ID NO: 2289940 - RNA, 19 nt, Artificial Sequence
  Description of Artificial Sequence: Synthetic oligonucleotide
gaccucggucucagccucc

SEQ ID NO: 2289941 - RNA, 19 nt, Artificial Sequence
  Description of Artificial Sequence: Synthetic oligonucleotide
ccgggcuaggucugagccc

SEQ ID NO: 2289942 - RNA, 19 nt, Artificial Sequence
  Description of Artificial Sequence: Synthetic oligonucleotide
ccugcgagugggcggucgg

SEQ ID NO: 2289943 - RNA, 19 nt, Artificial Sequence
  Description of Artificial Sequence: Synthetic oligonucleotide
cccgaaacuggcgccugcg

SEQ ID NO: 2289944 - RNA, 19 nt, Artificial Sequence
  Description of Artificial Sequence: Synthetic oligonucleotide
gggagcucucucgcucugg

SEQ ID NO: 2289945 - RNA, 19 nt, Artificial Sequence
  Description of Artificial Sequence: Synthetic oligonucleotide
gcgagugggcggucggccc

SEQ ID NO: 2289946 - RNA, 19 nt, Artificial Sequence
  Description of Artificial Sequence: Synthetic oligonucleotide
accagcgcgcccagagcug

SEQ ID NO: 2289947 - RNA, 19 nt, Artificial Sequence
  Description of Artificial Sequence: Synthetic oligonucleotide
cacagccaaaaggccgcuc

SEQ ID NO: 2289948 - RNA, 19 nt, Artificial Sequence
  Description of Artificial Sequence: Synthetic oligonucleotide
gugacgcaccaggucagaa

SEQ ID NO: 2289949 - RNA, 19 nt, Artificial Sequence
  Description of Artificial Sequence: Synthetic oligonucleotide
gucagccagguaggcgcug

SEQ ID NO: 2289950 - RNA, 19 nt, Artificial Sequence
  Description of Artificial Sequence: Synthetic oligonucleotide
cugucccgacaaugcuguc

SEQ ID NO: 2289951 - RNA, 19 nt, Artificial Sequence
  Description of Artificial Sequence: Synthetic oligonucleotide
ggcuaggucugagccccag

SEQ ID NO: 2289952 - RNA, 19 nt, Artificial Sequence
  Description of Artificial Sequence: Synthetic oligonucleotide
cucgggauuccaggacaca

SEQ ID NO: 2289953 - RNA, 19 nt, Artificial Sequence
  Description of Artificial Sequence: Synthetic oligonucleotide
guucgcuggugccgggcua

SEQ ID NO: 2289954 - RNA, 19 nt, Artificial Sequence
  Description of Artificial Sequence: Synthetic oligonucleotide
gugccgggcuaggucugag

SEQ ID NO: 2289955 - RNA, 19 nt, Artificial Sequence
  Description of Artificial Sequence: Synthetic oligonucleotide
cagcacaggagaagggcuu

SEQ ID NO: 2289956 - RNA, 19 nt, Artificial Sequence
  Description of Artificial Sequence: Synthetic oligonucleotide
ggggagcucucucgcucug

SEQ ID NO: 2289957 - RNA, 19 nt, Artificial Sequence
  Description of Artificial Sequence: Synthetic oligonucleotide
cgguuucucagucacuaaa

SEQ ID NO: 2289958 - RNA, 19 nt, Artificial Sequence
  Description of Artificial Sequence: Synthetic oligonucleotide
cacagucgcuacagccaaa

SEQ ID NO: 2289959 - RNA, 19 nt, Artificial Sequence
  Description of Artificial Sequence: Synthetic oligonucleotide
cacacucgccacagccaaa

SEQ ID NO: 2289960 - RNA, 19 nt, Artificial Sequence
  Description of Artificial Sequence: Synthetic oligonucleotide
gcaccaggucagaagagcu

SEQ ID NO: 2289961 - RNA, 19 nt, Artificial Sequence
  Description of Artificial Sequence: Synthetic oligonucleotide
cggguugggccaucuuggc

SEQ ID NO: 2289962 - RNA, 19 nt, Artificial Sequence
  Description of Artificial Sequence: Synthetic oligonucleotide
gcgguuucucagucacuaa

SEQ ID NO: 2289963 - RNA, 19 nt, Artificial Sequence
  Description of Artificial Sequence: Synthetic oligonucleotide
gacggugguccagcaggua

SEQ ID NO: 2289964 - RNA, 19 nt, Artificial Sequence
  Description of Artificial Sequence: Synthetic oligonucleotide
cgagugggcggucggcccc

SEQ ID NO: 2289965 - RNA, 19 nt, Artificial Sequence
  Description of Artificial Sequence: Synthetic oligonucleotide
cccagcggaagcgcuuccc

SEQ ID NO: 2289966 - RNA, 19 nt, Artificial Sequence
  Description of Artificial Sequence: Synthetic oligonucleotide
gucggccccgacgcgucac

SEQ ID NO: 2289967 - RNA, 19 nt, Artificial Sequence
  Description of Artificial Sequence: Synthetic oligonucleotide
ccgacgcgucaccaccagc

SEQ ID NO: 2289968 - RNA, 19 nt, Artificial Sequence
  Description of Artificial Sequence: Synthetic oligonucleotide
cccgacgcgucaccaccag

SEQ ID NO: 2289969 - RNA, 19 nt, Artificial Sequence
  Description of Artificial Sequence: Synthetic oligonucleotide
ggccccgacgcgucaccac

SEQ ID NO: 2289970 - RNA, 19 nt, Artificial Sequence
  Description of Artificial Sequence: Synthetic oligonucleotide
gugacucaccccacggguu

SEQ ID NO: 2289971 - RNA, 19 nt, Artificial Sequence
  Description of Artificial Sequence: Synthetic oligonucleotide
cagcgcgcccagagcuguc

SEQ ID NO: 2289972 - RNA, 19 nt, Artificial Sequence
  Description of Artificial Sequence: Synthetic oligonucleotide
cggucucagccuccucggg

SEQ ID NO: 2289973 - RNA, 19 nt, Artificial Sequence
  Description of Artificial Sequence: Synthetic oligonucleotide
gcguucgcuggugccgggc

SEQ ID NO: 2289974 - RNA, 19 nt, Artificial Sequence
  Description of Artificial Sequence: Synthetic oligonucleotide
ccgaaacuggcgccugcga

SEQ ID NO: 2289975 - RNA, 19 nt, Artificial Sequence
  Description of Artificial Sequence: Synthetic oligonucleotide
cgccugugugcacacccug

SEQ ID NO: 2289976 - RNA, 19 nt, Artificial Sequence
  Description of Artificial Sequence: Synthetic oligonucleotide
gccccagcggaagcgcuuc

SEQ ID NO: 2289977 - RNA, 19 nt, Artificial Sequence
  Description of Artificial Sequence: Synthetic oligonucleotide
ugcccgcagcugugcgguu

SEQ ID NO: 2289978 - RNA, 19 nt, Artificial Sequence
  Description of Artificial Sequence: Synthetic oligonucleotide
ggugccgggcuaggucuga

SEQ ID NO: 2289979 - RNA, 19 nt, Artificial Sequence
  Description of Artificial Sequence: Synthetic oligonucleotide
gugcgguuucucagucacu

SEQ ID NO: 2289980 - RNA, 19 nt, Artificial Sequence
  Description of Artificial Sequence: Synthetic oligonucleotide
agugggcggucggccccga

SEQ ID NO: 2289981 - RNA, 19 nt, Artificial Sequence
  Description of Artificial Sequence: Synthetic oligonucleotide
ggucggccccgacgcguca

SEQ ID NO: 2289982 - RNA, 19 nt, Artificial Sequence
  Description of Artificial Sequence: Synthetic oligonucleotide
cgcucgcccgugugcacac

SEQ ID NO: 2289983 - RNA, 19 nt, Artificial Sequence
  Description of Artificial Sequence: Synthetic oligonucleotide
ccaaaccgagagcagcauu

SEQ ID NO: 2289984 - RNA, 19 nt, Artificial Sequence
  Description of Artificial Sequence: Synthetic oligonucleotide
ggucagccagguaggcgcu

SEQ ID NO: 2289985 - RNA, 19 nt, Artificial Sequence
  Description of Artificial Sequence: Synthetic oligonucleotide
cgggauuccaggacacagu

SEQ ID NO: 2289986 - RNA, 19 nt, Artificial Sequence
  Description of Artificial Sequence: Synthetic oligonucleotide
ccccgacgcgucaccacca

SEQ ID NO: 2289987 - RNA, 19 nt, Artificial Sequence
  Description of Artificial Sequence: Synthetic oligonucleotide
ccucggucucagccuccuc

SEQ ID NO: 2289988 - RNA, 19 nt, Artificial Sequence
  Description of Artificial Sequence: Synthetic oligonucleotide
cgcgcccagagcuguccuc

SEQ ID NO: 2289989 - RNA, 19 nt, Artificial Sequence
  Description of Artificial Sequence: Synthetic oligonucleotide
ccuguccgucccucuuuua

SEQ ID NO: 2289990 - RNA, 19 nt, Artificial Sequence
  Description of Artificial Sequence: Synthetic oligonucleotide
gcgccugcgagugggcggu

SEQ ID NO: 2289991 - RNA, 19 nt, Artificial Sequence
  Description of Artificial Sequence: Synthetic oligonucleotide
gguaggcgcugcggcugaa

SEQ ID NO: 2289992 - RNA, 19 nt, Artificial Sequence
  Description of Artificial Sequence: Synthetic oligonucleotide
gcggucggccccgacgcgu

SEQ ID NO: 2289993 - RNA, 19 nt, Artificial Sequence
  Description of Artificial Sequence: Synthetic oligonucleotide
gcgcgcccagagcuguccu

SEQ ID NO: 2289994 - RNA, 19 nt, Artificial Sequence
  Description of Artificial Sequence: Synthetic oligonucleotide
gggcuaggucugagcccca

SEQ ID NO: 2289995 - RNA, 19 nt, Artificial Sequence
  Description of Artificial Sequence: Synthetic oligonucleotide
ccgggaguucucucucuuu

SEQ ID NO: 2289996 - RNA, 19 nt, Artificial Sequence
  Description of Artificial Sequence: Synthetic oligonucleotide
ccagcgcgcccagagcugu

SEQ ID NO: 2289997 - RNA, 19 nt, Artificial Sequence
  Description of Artificial Sequence: Synthetic oligonucleotide
cccaaaccgagagcagcau

SEQ ID NO: 2289998 - RNA, 19 nt, Artificial Sequence
  Description of Artificial Sequence: Synthetic oligonucleotide
gcgcugcggcugaagcucu

SEQ ID NO: 2289999 - RNA, 19 nt, Artificial Sequence
  Description of Artificial Sequence: Synthetic oligonucleotide
ccacagccaaaaggccgcu

SEQ ID NO: 2290000 - RNA, 19 nt, Artificial Sequence
  Description of Artificial Sequence: Synthetic oligonucleotide
gcccgcagcugugcgguuu

SEQ ID NO: 2290001 - RNA, 19 nt, Artificial Sequence
  Description of Artificial Sequence: Synthetic oligonucleotide
cccacggguugggccaucu

SEQ ID NO: 2290002 - RNA, 19 nt, Artificial Sequence
  Description of Artificial Sequence: Synthetic oligonucleotide
ccacggguugggccaucuu

SEQ ID NO: 2290003 - RNA, 19 nt, Artificial Sequence
  Description of Artificial Sequence: Synthetic oligonucleotide
ccgcagcugugcgguuucu

SEQ ID NO: 2290004 - RNA, 19 nt, Artificial Sequence
  Description of Artificial Sequence: Synthetic oligonucleotide
cgccugcgagugggcgguc

SEQ ID NO: 2290005 - RNA, 19 nt, Artificial Sequence
  Description of Artificial Sequence: Synthetic oligonucleotide
aauuuaggcaaauucauug

SEQ ID NO: 2290006 - RNA, 19 nt, Artificial Sequence
  Description of Artificial Sequence: Synthetic oligonucleotide
aucaauguaacacuuggcc

SEQ ID NO: 2290007 - RNA, 19 nt, Artificial Sequence
  Description of Artificial Sequence: Synthetic oligonucleotide
uugagauucgucaagauca

SEQ ID NO: 2290008 - RNA, 19 nt, Artificial Sequence
  Description of Artificial Sequence: Synthetic oligonucleotide
gauggcuauaucuagaugc

SEQ ID NO: 2290009 - RNA, 19 nt, Artificial Sequence
  Description of Artificial Sequence: Synthetic oligonucleotide
aguuacagaauuuccaagc

SEQ ID NO: 2290010 - RNA, 19 nt, Artificial Sequence
  Description of Artificial Sequence: Synthetic oligonucleotide
agugaaucgaauuucuuac

SEQ ID NO: 2290011 - RNA, 19 nt, Artificial Sequence
  Description of Artificial Sequence: Synthetic oligonucleotide
ugagguaauacagaaaggg

SEQ ID NO: 2290012 - RNA, 19 nt, Artificial Sequence
  Description of Artificial Sequence: Synthetic oligonucleotide
uggacauagaauaaccagg

SEQ ID NO: 2290013 - RNA, 19 nt, Artificial Sequence
  Description of Artificial Sequence: Synthetic oligonucleotide
aauaaugccaaguuacaga

SEQ ID NO: 2290014 - RNA, 19 nt, Artificial Sequence
  Description of Artificial Sequence: Synthetic oligonucleotide
uguaguuggacauagaaua

SEQ ID NO: 2290015 - RNA, 19 nt, Artificial Sequence
  Description of Artificial Sequence: Synthetic oligonucleotide
aauaaccagguuucaauuc

SEQ ID NO: 2290016 - RNA, 19 nt, Artificial Sequence
  Description of Artificial Sequence: Synthetic oligonucleotide
aauguuucuuuucuuguag

SEQ ID NO: 2290017 - RNA, 19 nt, Artificial Sequence
  Description of Artificial Sequence: Synthetic oligonucleotide
aaucgaauuucuuacccag

SEQ ID NO: 2290018 - RNA, 19 nt, Artificial Sequence
  Description of Artificial Sequence: Synthetic oligonucleotide
aauucguuuaacuuuucca

SEQ ID NO: 2290019 - RNA, 19 nt, Artificial Sequence
  Description of Artificial Sequence: Synthetic oligonucleotide
aucuuguagauauuccucc

SEQ ID NO: 2290020 - RNA, 19 nt, Artificial Sequence
  Description of Artificial Sequence: Synthetic oligonucleotide
aaggaaguuaugcaaagcu

SEQ ID NO: 2290021 - RNA, 19 nt, Artificial Sequence
  Description of Artificial Sequence: Synthetic oligonucleotide
ucuuguagcuguaauauac

SEQ ID NO: 2290022 - RNA, 19 nt, Artificial Sequence
  Description of Artificial Sequence: Synthetic oligonucleotide
agucuuaaggaaguuaugc

SEQ ID NO: 2290023 - RNA, 19 nt, Artificial Sequence
  Description of Artificial Sequence: Synthetic oligonucleotide
auucguuuaacuuuuccag

SEQ ID NO: 2290024 - RNA, 19 nt, Artificial Sequence
  Description of Artificial Sequence: Synthetic oligonucleotide
uguuuucccaauauuagca

SEQ ID NO: 2290025 - RNA, 19 nt, Artificial Sequence
  Description of Artificial Sequence: Synthetic oligonucleotide
aacaauaucuucccuugag

SEQ ID NO: 2290026 - RNA, 19 nt, Artificial Sequence
  Description of Artificial Sequence: Synthetic oligonucleotide
uuuugagacaguauaacaa

SEQ ID NO: 2290027 - RNA, 19 nt, Artificial Sequence
  Description of Artificial Sequence: Synthetic oligonucleotide
uguaauauacccuuccuuc

SEQ ID NO: 2290028 - RNA, 19 nt, Artificial Sequence
  Description of Artificial Sequence: Synthetic oligonucleotide
aauagauguccacaguuca

SEQ ID NO: 2290029 - RNA, 19 nt, Artificial Sequence
  Description of Artificial Sequence: Synthetic oligonucleotide
ucgaauuucuuacccaggg

SEQ ID NO: 2290030 - RNA, 19 nt, Artificial Sequence
  Description of Artificial Sequence: Synthetic oligonucleotide
ugguuuacggaccuugugg

SEQ ID NO: 2290031 - RNA, 19 nt, Artificial Sequence
  Description of Artificial Sequence: Synthetic oligonucleotide
agcaauaaugccaaguuac

SEQ ID NO: 2290032 - RNA, 19 nt, Artificial Sequence
  Description of Artificial Sequence: Synthetic oligonucleotide
aaugccaaguuacagaauu

SEQ ID NO: 2290033 - RNA, 19 nt, Artificial Sequence
  Description of Artificial Sequence: Synthetic oligonucleotide
auguuuucccaauauuagc

SEQ ID NO: 2290034 - RNA, 19 nt, Artificial Sequence
  Description of Artificial Sequence: Synthetic oligonucleotide
agcuauuacuuguugcugc

SEQ ID NO: 2290035 - RNA, 19 nt, Artificial Sequence
  Description of Artificial Sequence: Synthetic oligonucleotide
cuuuguuuguggaaggagg

SEQ ID NO: 2290036 - RNA, 19 nt, Artificial Sequence
  Description of Artificial Sequence: Synthetic oligonucleotide
agaaauuugauuuccuccu

SEQ ID NO: 2290037 - RNA, 19 nt, Artificial Sequence
  Description of Artificial Sequence: Synthetic oligonucleotide
auaacaauaucuucccuug

SEQ ID NO: 2290038 - RNA, 19 nt, Artificial Sequence
  Description of Artificial Sequence: Synthetic oligonucleotide
uuuucuucuagcucugugc

SEQ ID NO: 2290039 - RNA, 19 nt, Artificial Sequence
  Description of Artificial Sequence: Synthetic oligonucleotide
uuuggaaucguuucuuuca

SEQ ID NO: 2290040 - RNA, 19 nt, Artificial Sequence
  Description of Artificial Sequence: Synthetic oligonucleotide
uucgucaagaucaauguaa

SEQ ID NO: 2290041 - RNA, 19 nt, Artificial Sequence
  Description of Artificial Sequence: Synthetic oligonucleotide
acaguauaacaauaucuuc

SEQ ID NO: 2290042 - RNA, 19 nt, Artificial Sequence
  Description of Artificial Sequence: Synthetic oligonucleotide
gaucuuaugagcuguuacc

SEQ ID NO: 2290043 - RNA, 19 nt, Artificial Sequence
  Description of Artificial Sequence: Synthetic oligonucleotide
aauaauaggcagcaauaau

SEQ ID NO: 2290044 - RNA, 19 nt, Artificial Sequence
  Description of Artificial Sequence: Synthetic oligonucleotide
uuuguuuguggaaggaggc

SEQ ID NO: 2290045 - RNA, 19 nt, Artificial Sequence
  Description of Artificial Sequence: Synthetic oligonucleotide
aaguuacagaauuuccaag

SEQ ID NO: 2290046 - RNA, 19 nt, Artificial Sequence
  Description of Artificial Sequence: Synthetic oligonucleotide
cuugaauagauguccacag

SEQ ID NO: 2290047 - RNA, 19 nt, Artificial Sequence
  Description of Artificial Sequence: Synthetic oligonucleotide
auaauaggcagcaauaaug

SEQ ID NO: 2290048 - RNA, 19 nt, Artificial Sequence
  Description of Artificial Sequence: Synthetic oligonucleotide
uuaggcaaauucauuguug

SEQ ID NO: 2290049 - RNA, 19 nt, Artificial Sequence
  Description of Artificial Sequence: Synthetic oligonucleotide
uguguuucaucuugcaaag

SEQ ID NO: 2290050 - RNA, 19 nt, Artificial Sequence
  Description of Artificial Sequence: Synthetic oligonucleotide
uuaaggaaguuaugcaaag

SEQ ID NO: 2290051 - RNA, 19 nt, Artificial Sequence
  Description of Artificial Sequence: Synthetic oligonucleotide
cuuaaguucuuccauguug

SEQ ID NO: 2290052 - RNA, 19 nt, Artificial Sequence
  Description of Artificial Sequence: Synthetic oligonucleotide
agcuguaauauacccuucc

SEQ ID NO: 2290053 - RNA, 19 nt, Artificial Sequence
  Description of Artificial Sequence: Synthetic oligonucleotide
ucaagaucaauguaacacu

SEQ ID NO: 2290054 - RNA, 19 nt, Artificial Sequence
  Description of Artificial Sequence: Synthetic oligonucleotide
acagaaaggguucuucagg

SEQ ID NO: 2290055 - RNA, 19 nt, Artificial Sequence
  Description of Artificial Sequence: Synthetic oligonucleotide
acaauaucuucccuugagg

SEQ ID NO: 2290056 - RNA, 19 nt, Artificial Sequence
  Description of Artificial Sequence: Synthetic oligonucleotide
caugaaccguugaagaugg

SEQ ID NO: 2290057 - RNA, 19 nt, Artificial Sequence
  Description of Artificial Sequence: Synthetic oligonucleotide
ucuuaaggaaguuaugcaa

SEQ ID NO: 2290058 - RNA, 19 nt, Artificial Sequence
  Description of Artificial Sequence: Synthetic oligonucleotide
caaggaucaaguuacuuug

SEQ ID NO: 2290059 - RNA, 19 nt, Artificial Sequence
  Description of Artificial Sequence: Synthetic oligonucleotide
ucagucuuaaggaaguuau

SEQ ID NO: 2290060 - RNA, 19 nt, Artificial Sequence
  Description of Artificial Sequence: Synthetic oligonucleotide
ucaauguaacacuuggcca

SEQ ID NO: 2290061 - RNA, 19 nt, Artificial Sequence
  Description of Artificial Sequence: Synthetic oligonucleotide
ucaucuugcaaaguuagug

SEQ ID NO: 2290062 - RNA, 19 nt, Artificial Sequence
  Description of Artificial Sequence: Synthetic oligonucleotide
aguuggacauagaauaacc

SEQ ID NO: 2290063 - RNA, 19 nt, Artificial Sequence
  Description of Artificial Sequence: Synthetic oligonucleotide
caaguuacuuuguuugugg

SEQ ID NO: 2290064 - RNA, 19 nt, Artificial Sequence
  Description of Artificial Sequence: Synthetic oligonucleotide
ugagcuauuacuuguugcu

SEQ ID NO: 2290065 - RNA, 19 nt, Artificial Sequence
  Description of Artificial Sequence: Synthetic oligonucleotide
uauaacaauaucuucccuu

SEQ ID NO: 2290066 - RNA, 19 nt, Artificial Sequence
  Description of Artificial Sequence: Synthetic oligonucleotide
uauuuccccaaacagagua

SEQ ID NO: 2290067 - RNA, 19 nt, Artificial Sequence
  Description of Artificial Sequence: Synthetic oligonucleotide
guuacuuuguuuguggaag

SEQ ID NO: 2290068 - RNA, 19 nt, Artificial Sequence
  Description of Artificial Sequence: Synthetic oligonucleotide
acauagaauaaccagguuu

SEQ ID NO: 2290069 - RNA, 19 nt, Artificial Sequence
  Description of Artificial Sequence: Synthetic oligonucleotide
agaaauuuaggcaaauuca

SEQ ID NO: 2290070 - RNA, 19 nt, Artificial Sequence
  Description of Artificial Sequence: Synthetic oligonucleotide
ugaaagaccacugaugauc

SEQ ID NO: 2290071 - RNA, 19 nt, Artificial Sequence
  Description of Artificial Sequence: Synthetic oligonucleotide
agggaaagaaauuuaggca

SEQ ID NO: 2290072 - RNA, 19 nt, Artificial Sequence
  Description of Artificial Sequence: Synthetic oligonucleotide
aaguugccuucuuugaaag

SEQ ID NO: 2290073 - RNA, 19 nt, Artificial Sequence
  Description of Artificial Sequence: Synthetic oligonucleotide
auguucaucuuguagauau

SEQ ID NO: 2290074 - RNA, 19 nt, Artificial Sequence
  Description of Artificial Sequence: Synthetic oligonucleotide
ucuagaugcuccuugaaua

SEQ ID NO: 2290075 - RNA, 19 nt, Artificial Sequence
  Description of Artificial Sequence: Synthetic oligonucleotide
ugaauagauguccacaguu

SEQ ID NO: 2290076 - RNA, 19 nt, Artificial Sequence
  Description of Artificial Sequence: Synthetic oligonucleotide
gucaagaucaauguaacac

SEQ ID NO: 2290077 - RNA, 19 nt, Artificial Sequence
  Description of Artificial Sequence: Synthetic oligonucleotide
auuagcauaauguuucuuu

SEQ ID NO: 2290078 - RNA, 19 nt, Artificial Sequence
  Description of Artificial Sequence: Synthetic oligonucleotide
caauguaacacuuggccac

SEQ ID NO: 2290079 - RNA, 19 nt, Artificial Sequence
  Description of Artificial Sequence: Synthetic oligonucleotide
cuuugaaagaccacugaug

SEQ ID NO: 2290080 - RNA, 19 nt, Artificial Sequence
  Description of Artificial Sequence: Synthetic oligonucleotide
ucuagcucugugcugagga

SEQ ID NO: 2290081 - RNA, 19 nt, Artificial Sequence
  Description of Artificial Sequence: Synthetic oligonucleotide
ugaucuuaugagcuguuac

SEQ ID NO: 2290082 - RNA, 19 nt, Artificial Sequence
  Description of Artificial Sequence: Synthetic oligonucleotide
uuguagauauuccuccagc

SEQ ID NO: 2290083 - RNA, 19 nt, Artificial Sequence
  Description of Artificial Sequence: Synthetic oligonucleotide
uuaugugcaucucuguccu

SEQ ID NO: 2290084 - RNA, 19 nt, Artificial Sequence
  Description of Artificial Sequence: Synthetic oligonucleotide
ucuucagucuuaaggaagu

SEQ ID NO: 2290085 - RNA, 19 nt, Artificial Sequence
  Description of Artificial Sequence: Synthetic oligonucleotide
uuucuucuagcucugugcu

SEQ ID NO: 2290086 - RNA, 19 nt, Artificial Sequence
  Description of Artificial Sequence: Synthetic oligonucleotide
acauacauguaguuggaca

SEQ ID NO: 2290087 - RNA, 19 nt, Artificial Sequence
  Description of Artificial Sequence: Synthetic oligonucleotide
aguuagugaaucgaauuuc

SEQ ID NO: 2290088 - RNA, 19 nt, Artificial Sequence
  Description of Artificial Sequence: Synthetic oligonucleotide
gaauuucuuacccagggaa

SEQ ID NO: 2290089 - RNA, 19 nt, Artificial Sequence
  Description of Artificial Sequence: Synthetic oligonucleotide
guccacaguucacagaugg

SEQ ID NO: 2290090 - RNA, 19 nt, Artificial Sequence
  Description of Artificial Sequence: Synthetic oligonucleotide
uauuccuccagcuuuggaa

SEQ ID NO: 2290091 - RNA, 19 nt, Artificial Sequence
  Description of Artificial Sequence: Synthetic oligonucleotide
agaauaaccagguuucaau

SEQ ID NO: 2290092 - RNA, 19 nt, Artificial Sequence
  Description of Artificial Sequence: Synthetic oligonucleotide
uauuacuuguugcugcacu

SEQ ID NO: 2290093 - RNA, 19 nt, Artificial Sequence
  Description of Artificial Sequence: Synthetic oligonucleotide
augccaaggaucaaguuac

SEQ ID NO: 2290094 - RNA, 19 nt, Artificial Sequence
  Description of Artificial Sequence: Synthetic oligonucleotide
uuguagcuguaauauaccc

SEQ ID NO: 2290095 - RNA, 19 nt, Artificial Sequence
  Description of Artificial Sequence: Synthetic oligonucleotide
ucaguaauucguuuaacuu

SEQ ID NO: 2290096 - RNA, 19 nt, Artificial Sequence
  Description of Artificial Sequence: Synthetic oligonucleotide
uguagauauuccuccagcu

SEQ ID NO: 2290097 - RNA, 19 nt, Artificial Sequence
  Description of Artificial Sequence: Synthetic oligonucleotide
uagauauuccuccagcuuu

SEQ ID NO: 2290098 - RNA, 19 nt, Artificial Sequence
  Description of Artificial Sequence: Synthetic oligonucleotide
aauauacccuuccuucacu

SEQ ID NO: 2290099 - RNA, 19 nt, Artificial Sequence
  Description of Artificial Sequence: Synthetic oligonucleotide
gauuccagcaguucccacc

SEQ ID NO: 2290100 - RNA, 19 nt, Artificial Sequence
  Description of Artificial Sequence: Synthetic oligonucleotide
uugguaauaauaggcagca

SEQ ID NO: 2290101 - RNA, 19 nt, Artificial Sequence
  Description of Artificial Sequence: Synthetic oligonucleotide
uuguccuugguuuacggac

SEQ ID NO: 2290102 - RNA, 19 nt, Artificial Sequence
  Description of Artificial Sequence: Synthetic oligonucleotide
uuggaaucguuucuuucag

SEQ ID NO: 2290103 - RNA, 19 nt, Artificial Sequence
  Description of Artificial Sequence: Synthetic oligonucleotide
gaugguauuuccccaaaca

SEQ ID NO: 2290104 - RNA, 19 nt, Artificial Sequence
  Description of Artificial Sequence: Synthetic oligonucleotide
auuuaggcaaauucauugu

SEQ ID NO: 2290105 - RNA, 19 nt, Artificial Sequence
  Description of Artificial Sequence: Synthetic oligonucleotide
ucaugaaccguugaagaug

SEQ ID NO: 2290106 - RNA, 19 nt, Artificial Sequence
  Description of Artificial Sequence: Synthetic oligonucleotide
cuuaugagcuguuaccuuc

SEQ ID NO: 2290107 - RNA, 19 nt, Artificial Sequence
  Description of Artificial Sequence: Synthetic oligonucleotide
cuuguagcuguaauauacc

SEQ ID NO: 2290108 - RNA, 19 nt, Artificial Sequence
  Description of Artificial Sequence: Synthetic oligonucleotide
aauaucuucccuugaggua

SEQ ID NO: 2290109 - RNA, 19 nt, Artificial Sequence
  Description of Artificial Sequence: Synthetic oligonucleotide
cuagaugcuccuugaauag

SEQ ID NO: 2290110 - RNA, 19 nt, Artificial Sequence
  Description of Artificial Sequence: Synthetic oligonucleotide
gguauuuccccaaacagag

SEQ ID NO: 2290111 - RNA, 19 nt, Artificial Sequence
  Description of Artificial Sequence: Synthetic oligonucleotide
uacauguaguuggacauag

SEQ ID NO: 2290112 - RNA, 19 nt, Artificial Sequence
  Description of Artificial Sequence: Synthetic oligonucleotide
uaccauaaggccagcaaac

SEQ ID NO: 2290113 - RNA, 19 nt, Artificial Sequence
  Description of Artificial Sequence: Synthetic oligonucleotide
acugauuccagcaguuccc

SEQ ID NO: 2290114 - RNA, 19 nt, Artificial Sequence
  Description of Artificial Sequence: Synthetic oligonucleotide
ugaacuguugucauccuuu

SEQ ID NO: 2290115 - RNA, 19 nt, Artificial Sequence
  Description of Artificial Sequence: Synthetic oligonucleotide
agguuucaauucuucaguc

SEQ ID NO: 2290116 - RNA, 19 nt, Artificial Sequence
  Description of Artificial Sequence: Synthetic oligonucleotide
ucauuguuguccuugguuu

SEQ ID NO: 2290117 - RNA, 19 nt, Artificial Sequence
  Description of Artificial Sequence: Synthetic oligonucleotide
cauguuggucaguaauucg

SEQ ID NO: 2290118 - RNA, 19 nt, Artificial Sequence
  Description of Artificial Sequence: Synthetic oligonucleotide
cuugcaaaguuagugaauc

SEQ ID NO: 2290119 - RNA, 19 nt, Artificial Sequence
  Description of Artificial Sequence: Synthetic oligonucleotide
uucuuugaaagaccacuga

SEQ ID NO: 2290120 - RNA, 19 nt, Artificial Sequence
  Description of Artificial Sequence: Synthetic oligonucleotide
gaaagaccacugaugaucc

SEQ ID NO: 2290121 - RNA, 19 nt, Artificial Sequence
  Description of Artificial Sequence: Synthetic oligonucleotide
ucuucuagcucugugcuga

SEQ ID NO: 2290122 - RNA, 19 nt, Artificial Sequence
  Description of Artificial Sequence: Synthetic oligonucleotide
ugcaaaguuagugaaucga

SEQ ID NO: 2290123 - RNA, 19 nt, Artificial Sequence
  Description of Artificial Sequence: Synthetic oligonucleotide
uugcaaaguuagugaaucg

SEQ ID NO: 2290124 - RNA, 19 nt, Artificial Sequence
  Description of Artificial Sequence: Synthetic oligonucleotide
uagugaaucgaauuucuua

SEQ ID NO: 2290125 - RNA, 19 nt, Artificial Sequence
  Description of Artificial Sequence: Synthetic oligonucleotide
aaauuugauuuccuccuua

SEQ ID NO: 2290126 - RNA, 19 nt, Artificial Sequence
  Description of Artificial Sequence: Synthetic oligonucleotide
uaauaauaggcagcaauaa

SEQ ID NO: 2290127 - RNA, 19 nt, Artificial Sequence
  Description of Artificial Sequence: Synthetic oligonucleotide
aaguuacuuuguuugugga

SEQ ID NO: 2290128 - RNA, 19 nt, Artificial Sequence
  Description of Artificial Sequence: Synthetic oligonucleotide
uccaguaucugaaguugcc

SEQ ID NO: 2290129 - RNA, 19 nt, Artificial Sequence
  Description of Artificial Sequence: Synthetic oligonucleotide
uguuguccuugguuuacgg

SEQ ID NO: 2290130 - RNA, 19 nt, Artificial Sequence
  Description of Artificial Sequence: Synthetic oligonucleotide
gaugccaaggaucaaguua

SEQ ID NO: 2290131 - RNA, 19 nt, Artificial Sequence
  Description of Artificial Sequence: Synthetic oligonucleotide
ucgucaagaucaauguaac

SEQ ID NO: 2290132 - RNA, 19 nt, Artificial Sequence
  Description of Artificial Sequence: Synthetic oligonucleotide
ucccaauauuagcauaaug

SEQ ID NO: 2290133 - RNA, 19 nt, Artificial Sequence
  Description of Artificial Sequence: Synthetic oligonucleotide
ucugagcuauuacuuguug

SEQ ID NO: 2290134 - RNA, 19 nt, Artificial Sequence
  Description of Artificial Sequence: Synthetic oligonucleotide
uuuaggcaaauucauuguu

SEQ ID NO: 2290135 - RNA, 19 nt, Artificial Sequence
  Description of Artificial Sequence: Synthetic oligonucleotide
uucguuuaacuuuuccagu

SEQ ID NO: 2290136 - RNA, 19 nt, Artificial Sequence
  Description of Artificial Sequence: Synthetic oligonucleotide
ucaaguuacuuuguuugug

SEQ ID NO: 2290137 - RNA, 19 nt, Artificial Sequence
  Description of Artificial Sequence: Synthetic oligonucleotide
uuuacggaccuugugguac

SEQ ID NO: 2290138 - RNA, 19 nt, Artificial Sequence
  Description of Artificial Sequence: Synthetic oligonucleotide
gaaaggguucuucagguaa

SEQ ID NO: 2290139 - RNA, 19 nt, Artificial Sequence
  Description of Artificial Sequence: Synthetic oligonucleotide
uguccuugguuuacggacc

SEQ ID NO: 2290140 - RNA, 19 nt, Artificial Sequence
  Description of Artificial Sequence: Synthetic oligonucleotide
ucuccuaauguuuucccaa

SEQ ID NO: 2290141 - RNA, 19 nt, Artificial Sequence
  Description of Artificial Sequence: Synthetic oligonucleotide
uuuuccucugagcuauuac

SEQ ID NO: 2290142 - RNA, 19 nt, Artificial Sequence
  Description of Artificial Sequence: Synthetic oligonucleotide
ucucuguccucuuugguaa

SEQ ID NO: 2290143 - RNA, 19 nt, Artificial Sequence
  Description of Artificial Sequence: Synthetic oligonucleotide
uuagcauaauguuucuuuu

SEQ ID NO: 2290144 - RNA, 19 nt, Artificial Sequence
  Description of Artificial Sequence: Synthetic oligonucleotide
guguguuucaucuugcaaa

SEQ ID NO: 2290145 - RNA, 19 nt, Artificial Sequence
  Description of Artificial Sequence: Synthetic oligonucleotide
uacuuguugcugcacuuug

SEQ ID NO: 2290146 - RNA, 19 nt, Artificial Sequence
  Description of Artificial Sequence: Synthetic oligonucleotide
guugccuucuuugaaagac

SEQ ID NO: 2290147 - RNA, 19 nt, Artificial Sequence
  Description of Artificial Sequence: Synthetic oligonucleotide
acuuugaacuguugucauc

SEQ ID NO: 2290148 - RNA, 19 nt, Artificial Sequence
  Description of Artificial Sequence: Synthetic oligonucleotide
gauccuuguucacugugug

SEQ ID NO: 2290149 - RNA, 19 nt, Artificial Sequence
  Description of Artificial Sequence: Synthetic oligonucleotide
guuacagaauuuccaagca

SEQ ID NO: 2290150 - RNA, 19 nt, Artificial Sequence
  Description of Artificial Sequence: Synthetic oligonucleotide
uguguguuucaucuugcaa

SEQ ID NO: 2290151 - RNA, 19 nt, Artificial Sequence
  Description of Artificial Sequence: Synthetic oligonucleotide
uuccaguaucugaaguugc

SEQ ID NO: 2290152 - RNA, 19 nt, Artificial Sequence
  Description of Artificial Sequence: Synthetic oligonucleotide
cuuguagauauuccuccag

SEQ ID NO: 2290153 - RNA, 19 nt, Artificial Sequence
  Description of Artificial Sequence: Synthetic oligonucleotide
gaaucgaauuucuuaccca

SEQ ID NO: 2290154 - RNA, 19 nt, Artificial Sequence
  Description of Artificial Sequence: Synthetic oligonucleotide
caauaaugccaaguuacag

SEQ ID NO: 2290155 - RNA, 19 nt, Artificial Sequence
  Description of Artificial Sequence: Synthetic oligonucleotide
caugaugccaaggaucaag

SEQ ID NO: 2290156 - RNA, 19 nt, Artificial Sequence
  Description of Artificial Sequence: Synthetic oligonucleotide
ucguuuaacuuuuccagua

SEQ ID NO: 2290157 - RNA, 19 nt, Artificial Sequence
  Description of Artificial Sequence: Synthetic oligonucleotide
ugauccuuguucacugugu

SEQ ID NO: 2290158 - RNA, 19 nt, Artificial Sequence
  Description of Artificial Sequence: Synthetic oligonucleotide
auaucuagaugcuccuuga

SEQ ID NO: 2290159 - RNA, 19 nt, Artificial Sequence
  Description of Artificial Sequence: Synthetic oligonucleotide
auaucuucccuugagguaa

SEQ ID NO: 2290160 - RNA, 19 nt, Artificial Sequence
  Description of Artificial Sequence: Synthetic oligonucleotide
augggugcccucaugaccg

SEQ ID NO: 2290161 - RNA, 19 nt, Artificial Sequence
  Description of Artificial Sequence: Synthetic oligonucleotide
aaaggguucuucagguaag

SEQ ID NO: 2290162 - RNA, 19 nt, Artificial Sequence
  Description of Artificial Sequence: Synthetic oligonucleotide
uucuuguuuuccucugagc

SEQ ID NO: 2290163 - RNA, 19 nt, Artificial Sequence
  Description of Artificial Sequence: Synthetic oligonucleotide
uugguuuacggaccuugug

SEQ ID NO: 2290164 - RNA, 19 nt, Artificial Sequence
  Description of Artificial Sequence: Synthetic oligonucleotide
aucaaguuacuuuguuugu

SEQ ID NO: 2290165 - RNA, 19 nt, Artificial Sequence
  Description of Artificial Sequence: Synthetic oligonucleotide
gaauagauguccacaguuc

SEQ ID NO: 2290166 - RNA, 19 nt, Artificial Sequence
  Description of Artificial Sequence: Synthetic oligonucleotide
uccccaaacagaguagcag

SEQ ID NO: 2290167 - RNA, 19 nt, Artificial Sequence
  Description of Artificial Sequence: Synthetic oligonucleotide
aucuuaugagcuguuaccu

SEQ ID NO: 2290168 - RNA, 19 nt, Artificial Sequence
  Description of Artificial Sequence: Synthetic oligonucleotide
gucuuaaggaaguuaugca

SEQ ID NO: 2290169 - RNA, 19 nt, Artificial Sequence
  Description of Artificial Sequence: Synthetic oligonucleotide
uggucaguaauucguuuaa

SEQ ID NO: 2290170 - RNA, 19 nt, Artificial Sequence
  Description of Artificial Sequence: Synthetic oligonucleotide
caucuugcaaaguuaguga

SEQ ID NO: 2290171 - RNA, 19 nt, Artificial Sequence
  Description of Artificial Sequence: Synthetic oligonucleotide
cauguaguuggacauagaa

SEQ ID NO: 2290172 - RNA, 19 nt, Artificial Sequence
  Description of Artificial Sequence: Synthetic oligonucleotide
ucuugcaaaguuagugaau

SEQ ID NO: 2290173 - RNA, 19 nt, Artificial Sequence
  Description of Artificial Sequence: Synthetic oligonucleotide
aguaauucguuuaacuuuu

SEQ ID NO: 2290174 - RNA, 19 nt, Artificial Sequence
  Description of Artificial Sequence: Synthetic oligonucleotide
gugaaucgaauuucuuacc

SEQ ID NO: 2290175 - RNA, 19 nt, Artificial Sequence
  Description of Artificial Sequence: Synthetic oligonucleotide
auuccagcaguucccacca

SEQ ID NO: 2290176 - RNA, 19 nt, Artificial Sequence
  Description of Artificial Sequence: Synthetic oligonucleotide
uuggucaguaauucguuua

SEQ ID NO: 2290177 - RNA, 19 nt, Artificial Sequence
  Description of Artificial Sequence: Synthetic oligonucleotide
caccaugaugccaaggauc

SEQ ID NO: 2290178 - RNA, 19 nt, Artificial Sequence
  Description of Artificial Sequence: Synthetic oligonucleotide
auagauguccacaguucac

SEQ ID NO: 2290179 - RNA, 19 nt, Artificial Sequence
  Description of Artificial Sequence: Synthetic oligonucleotide
aaauuuaggcaaauucauu

SEQ ID NO: 2290180 - RNA, 19 nt, Artificial Sequence
  Description of Artificial Sequence: Synthetic oligonucleotide
cacuguguguuucaucuug

SEQ ID NO: 2290181 - RNA, 19 nt, Artificial Sequence
  Description of Artificial Sequence: Synthetic oligonucleotide
cuccuuaaguucuuccaug

SEQ ID NO: 2290182 - RNA, 19 nt, Artificial Sequence
  Description of Artificial Sequence: Synthetic oligonucleotide
aguuacuuuguuuguggaa

SEQ ID NO: 2290183 - RNA, 19 nt, Artificial Sequence
  Description of Artificial Sequence: Synthetic oligonucleotide
aauguaacacuuggccaca

SEQ ID NO: 2290184 - RNA, 19 nt, Artificial Sequence
  Description of Artificial Sequence: Synthetic oligonucleotide
gcaguucccaccaugaugc

SEQ ID NO: 2290185 - RNA, 19 nt, Artificial Sequence
  Description of Artificial Sequence: Synthetic oligonucleotide
uggauggcuauaucuagau

SEQ ID NO: 2290186 - RNA, 19 nt, Artificial Sequence
  Description of Artificial Sequence: Synthetic oligonucleotide
auucuucagucuuaaggaa

SEQ ID NO: 2290187 - RNA, 19 nt, Artificial Sequence
  Description of Artificial Sequence: Synthetic oligonucleotide
uccagcaguucccaccaug

SEQ ID NO: 2290188 - RNA, 19 nt, Artificial Sequence
  Description of Artificial Sequence: Synthetic oligonucleotide
gaaguuaugcaaagcuuca

SEQ ID NO: 2290189 - RNA, 19 nt, Artificial Sequence
  Description of Artificial Sequence: Synthetic oligonucleotide
caucuugagauucgucaag

SEQ ID NO: 2290190 - RNA, 19 nt, Artificial Sequence
  Description of Artificial Sequence: Synthetic oligonucleotide
uguuaccuucccuccaugu

SEQ ID NO: 2290191 - RNA, 19 nt, Artificial Sequence
  Description of Artificial Sequence: Synthetic oligonucleotide
gaaauuuaggcaaauucau

SEQ ID NO: 2290192 - RNA, 19 nt, Artificial Sequence
  Description of Artificial Sequence: Synthetic oligonucleotide
ucaugaccgcucuuucucc

SEQ ID NO: 2290193 - RNA, 19 nt, Artificial Sequence
  Description of Artificial Sequence: Synthetic oligonucleotide
ucccuugagguaauacaga

SEQ ID NO: 2290194 - RNA, 19 nt, Artificial Sequence
  Description of Artificial Sequence: Synthetic oligonucleotide
agguaauacagaaaggguu

SEQ ID NO: 2290195 - RNA, 19 nt, Artificial Sequence
  Description of Artificial Sequence: Synthetic oligonucleotide
uucaucuugcaaaguuagu

SEQ ID NO: 2290196 - RNA, 19 nt, Artificial Sequence
  Description of Artificial Sequence: Synthetic oligonucleotide
uaguuggacauagaauaac

SEQ ID NO: 2290197 - RNA, 19 nt, Artificial Sequence
  Description of Artificial Sequence: Synthetic oligonucleotide
uguuuguggaaggaggcau

SEQ ID NO: 2290198 - RNA, 19 nt, Artificial Sequence
  Description of Artificial Sequence: Synthetic oligonucleotide
uuagugaaucgaauuucuu

SEQ ID NO: 2290199 - RNA, 19 nt, Artificial Sequence
  Description of Artificial Sequence: Synthetic oligonucleotide
ugagauucgucaagaucaa

SEQ ID NO: 2290200 - RNA, 19 nt, Artificial Sequence
  Description of Artificial Sequence: Synthetic oligonucleotide
ggcuauaucuagaugcucc

SEQ ID NO: 2290201 - RNA, 19 nt, Artificial Sequence
  Description of Artificial Sequence: Synthetic oligonucleotide
uucaauccagcugaguuuu

SEQ ID NO: 2290202 - RNA, 19 nt, Artificial Sequence
  Description of Artificial Sequence: Synthetic oligonucleotide
uguuggucaguaauucguu

SEQ ID NO: 2290203 - RNA, 19 nt, Artificial Sequence
  Description of Artificial Sequence: Synthetic oligonucleotide
gaccuugugguaccauaag

SEQ ID NO: 2290204 - RNA, 19 nt, Artificial Sequence
  Description of Artificial Sequence: Synthetic oligonucleotide
accaugaugccaaggauca

SEQ ID NO: 2290205 - RNA, 19 nt, Artificial Sequence
  Description of Artificial Sequence: Synthetic oligonucleotide
aagaugguauuuccccaaa

SEQ ID NO: 2290206 - RNA, 19 nt, Artificial Sequence
  Description of Artificial Sequence: Synthetic oligonucleotide
ggaaguuaugcaaagcuuc

SEQ ID NO: 2290207 - RNA, 19 nt, Artificial Sequence
  Description of Artificial Sequence: Synthetic oligonucleotide
auuacuuguugcugcacuu

SEQ ID NO: 2290208 - RNA, 19 nt, Artificial Sequence
  Description of Artificial Sequence: Synthetic oligonucleotide
uccuuguucacuguguguu

SEQ ID NO: 2290209 - RNA, 19 nt, Artificial Sequence
  Description of Artificial Sequence: Synthetic oligonucleotide
auguuggucaguaauucgu

SEQ ID NO: 2290210 - RNA, 19 nt, Artificial Sequence
  Description of Artificial Sequence: Synthetic oligonucleotide
gucaguaauucguuuaacu

SEQ ID NO: 2290211 - RNA, 19 nt, Artificial Sequence
  Description of Artificial Sequence: Synthetic oligonucleotide
aaggaggcauuucuugguu

SEQ ID NO: 2290212 - RNA, 19 nt, Artificial Sequence
  Description of Artificial Sequence: Synthetic oligonucleotide
ucuuccauguuggucagua

SEQ ID NO: 2290213 - RNA, 19 nt, Artificial Sequence
  Description of Artificial Sequence: Synthetic oligonucleotide
uaucuagaugcuccuugaa

SEQ ID NO: 2290214 - RNA, 19 nt, Artificial Sequence
  Description of Artificial Sequence: Synthetic oligonucleotide
aaccguugaagaugguauu

SEQ ID NO: 2290215 - RNA, 19 nt, Artificial Sequence
  Description of Artificial Sequence: Synthetic oligonucleotide
gacaguauaacaauaucuu

SEQ ID NO: 2290216 - RNA, 19 nt, Artificial Sequence
  Description of Artificial Sequence: Synthetic oligonucleotide
ugaaccguugaagauggua

SEQ ID NO: 2290217 - RNA, 19 nt, Artificial Sequence
  Description of Artificial Sequence: Synthetic oligonucleotide
gagcuguuaccuucccucc

SEQ ID NO: 2290218 - RNA, 19 nt, Artificial Sequence
  Description of Artificial Sequence: Synthetic oligonucleotide
uccuugaauagauguccac

SEQ ID NO: 2290219 - RNA, 19 nt, Artificial Sequence
  Description of Artificial Sequence: Synthetic oligonucleotide
uagaauaaccagguuucaa

SEQ ID NO: 2290220 - RNA, 19 nt, Artificial Sequence
  Description of Artificial Sequence: Synthetic oligonucleotide
uguccauucaugggugccc

SEQ ID NO: 2290221 - RNA, 19 nt, Artificial Sequence
  Description of Artificial Sequence: Synthetic oligonucleotide
uuucuuacccagggaaaga

SEQ ID NO: 2290222 - RNA, 19 nt, Artificial Sequence
  Description of Artificial Sequence: Synthetic oligonucleotide
ggaaucguuucuuucagaa

SEQ ID NO: 2290223 - RNA, 19 nt, Artificial Sequence
  Description of Artificial Sequence: Synthetic oligonucleotide
uuacggaccuugugguacc

SEQ ID NO: 2290224 - RNA, 19 nt, Artificial Sequence
  Description of Artificial Sequence: Synthetic oligonucleotide
auacccuuccuucacuuuu

SEQ ID NO: 2290225 - RNA, 19 nt, Artificial Sequence
  Description of Artificial Sequence: Synthetic oligonucleotide
guaccauaaggccagcaaa

SEQ ID NO: 2290226 - RNA, 19 nt, Artificial Sequence
  Description of Artificial Sequence: Synthetic oligonucleotide
uuguuguccuugguuuacg

SEQ ID NO: 2290227 - RNA, 19 nt, Artificial Sequence
  Description of Artificial Sequence: Synthetic oligonucleotide
cacuuggccacauacaugu

SEQ ID NO: 2290228 - RNA, 19 nt, Artificial Sequence
  Description of Artificial Sequence: Synthetic oligonucleotide
uuacccagggaaagaaauu

SEQ ID NO: 2290229 - RNA, 19 nt, Artificial Sequence
  Description of Artificial Sequence: Synthetic oligonucleotide
caauaucuucccuugaggu

SEQ ID NO: 2290230 - RNA, 19 nt, Artificial Sequence
  Description of Artificial Sequence: Synthetic oligonucleotide
uccaagcaucuugagauuc

SEQ ID NO: 2290231 - RNA, 19 nt, Artificial Sequence
  Description of Artificial Sequence: Synthetic oligonucleotide
uuccccaaacagaguagca

SEQ ID NO: 2290232 - RNA, 19 nt, Artificial Sequence
  Description of Artificial Sequence: Synthetic oligonucleotide
ucuuaugagcuguuaccuu

SEQ ID NO: 2290233 - RNA, 19 nt, Artificial Sequence
  Description of Artificial Sequence: Synthetic oligonucleotide
aucgaauuucuuacccagg

SEQ ID NO: 2290234 - RNA, 19 nt, Artificial Sequence
  Description of Artificial Sequence: Synthetic oligonucleotide
guuggacauagaauaacca

SEQ ID NO: 2290235 - RNA, 19 nt, Artificial Sequence
  Description of Artificial Sequence: Synthetic oligonucleotide
uuguucacuguguguuuca

SEQ ID NO: 2290236 - RNA, 19 nt, Artificial Sequence
  Description of Artificial Sequence: Synthetic oligonucleotide
aagcaucuugagauucguc

SEQ ID NO: 2290237 - RNA, 19 nt, Artificial Sequence
  Description of Artificial Sequence: Synthetic oligonucleotide
uuguugcugcacuuugaac

SEQ ID NO: 2290238 - RNA, 19 nt, Artificial Sequence
  Description of Artificial Sequence: Synthetic oligonucleotide
cacugaugauccuuguuca

SEQ ID NO: 2290239 - RNA, 19 nt, Artificial Sequence
  Description of Artificial Sequence: Synthetic oligonucleotide
uacuuuguuuguggaagga

SEQ ID NO: 2290240 - RNA, 19 nt, Artificial Sequence
  Description of Artificial Sequence: Synthetic oligonucleotide
cauacauguaguuggacau

SEQ ID NO: 2290241 - RNA, 19 nt, Artificial Sequence
  Description of Artificial Sequence: Synthetic oligonucleotide
ucuucccuugagguaauac

SEQ ID NO: 2290242 - RNA, 19 nt, Artificial Sequence
  Description of Artificial Sequence: Synthetic oligonucleotide
uccuaauguuuucccaaua

SEQ ID NO: 2290243 - RNA, 19 nt, Artificial Sequence
  Description of Artificial Sequence: Synthetic oligonucleotide
ggcaguguccauucauggg

SEQ ID NO: 2290244 - RNA, 19 nt, Artificial Sequence
  Description of Artificial Sequence: Synthetic oligonucleotide
uggaaucguuucuuucaga

SEQ ID NO: 2290245 - RNA, 19 nt, Artificial Sequence
  Description of Artificial Sequence: Synthetic oligonucleotide
gcuccuugaauagaugucc

SEQ ID NO: 2290246 - RNA, 19 nt, Artificial Sequence
  Description of Artificial Sequence: Synthetic oligonucleotide
agauauuccuccagcuuug

SEQ ID NO: 2290247 - RNA, 19 nt, Artificial Sequence
  Description of Artificial Sequence: Synthetic oligonucleotide
uuguuuguggaaggaggca

SEQ ID NO: 2290248 - RNA, 19 nt, Artificial Sequence
  Description of Artificial Sequence: Synthetic oligonucleotide
uucuuguagcuguaauaua

SEQ ID NO: 2290249 - RNA, 19 nt, Artificial Sequence
  Description of Artificial Sequence: Synthetic oligonucleotide
cugaaguugccuucuuuga

SEQ ID NO: 2290250 - RNA, 19 nt, Artificial Sequence
  Description of Artificial Sequence: Synthetic oligonucleotide
aggaucaaguuacuuuguu

SEQ ID NO: 2290251 - RNA, 19 nt, Artificial Sequence
  Description of Artificial Sequence: Synthetic oligonucleotide
auucgucaagaucaaugua

SEQ ID NO: 2290252 - RNA, 19 nt, Artificial Sequence
  Description of Artificial Sequence: Synthetic oligonucleotide
cagucuuaaggaaguuaug

SEQ ID NO: 2290253 - RNA, 19 nt, Artificial Sequence
  Description of Artificial Sequence: Synthetic oligonucleotide
auagaauaaccagguuuca

SEQ ID NO: 2290254 - RNA, 19 nt, Artificial Sequence
  Description of Artificial Sequence: Synthetic oligonucleotide
augugcaucucuguccucu

SEQ ID NO: 2290255 - RNA, 19 nt, Artificial Sequence
  Description of Artificial Sequence: Synthetic oligonucleotide
cccagggaaagaaauuuag

SEQ ID NO: 2290256 - RNA, 19 nt, Artificial Sequence
  Description of Artificial Sequence: Synthetic oligonucleotide
ucaugggugcccucaugac

SEQ ID NO: 2290257 - RNA, 19 nt, Artificial Sequence
  Description of Artificial Sequence: Synthetic oligonucleotide
accgcucuuucuccuaaug

SEQ ID NO: 2290258 - RNA, 19 nt, Artificial Sequence
  Description of Artificial Sequence: Synthetic oligonucleotide
uacccuuccuucacuuuuc

SEQ ID NO: 2290259 - RNA, 19 nt, Artificial Sequence
  Description of Artificial Sequence: Synthetic oligonucleotide
uagaugcuccuugaauaga

SEQ ID NO: 2290260 - RNA, 19 nt, Artificial Sequence
  Description of Artificial Sequence: Synthetic oligonucleotide
uguaacacuuggccacaua

SEQ ID NO: 2290261 - RNA, 19 nt, Artificial Sequence
  Description of Artificial Sequence: Synthetic oligonucleotide
gaaccguugaagaugguau

SEQ ID NO: 2290262 - RNA, 19 nt, Artificial Sequence
  Description of Artificial Sequence: Synthetic oligonucleotide
ucguuucuuucagaaauuu

SEQ ID NO: 2290263 - RNA, 19 nt, Artificial Sequence
  Description of Artificial Sequence: Synthetic oligonucleotide
cuuguugcugcacuuugaa

SEQ ID NO: 2290264 - RNA, 19 nt, Artificial Sequence
  Description of Artificial Sequence: Synthetic oligonucleotide
cuagcucugugcugaggac

SEQ ID NO: 2290265 - RNA, 19 nt, Artificial Sequence
  Description of Artificial Sequence: Synthetic oligonucleotide
uauuagcauaauguuucuu

SEQ ID NO: 2290266 - RNA, 19 nt, Artificial Sequence
  Description of Artificial Sequence: Synthetic oligonucleotide
agaugcuccuugaauagau

SEQ ID NO: 2290267 - RNA, 19 nt, Artificial Sequence
  Description of Artificial Sequence: Synthetic oligonucleotide
uguucaucuuguagauauu

SEQ ID NO: 2290268 - RNA, 19 nt, Artificial Sequence
  Description of Artificial Sequence: Synthetic oligonucleotide
cuuguuuuccucugagcua

SEQ ID NO: 2290269 - RNA, 19 nt, Artificial Sequence
  Description of Artificial Sequence: Synthetic oligonucleotide
ccaagcaucuugagauucg

SEQ ID NO: 2290270 - RNA, 19 nt, Artificial Sequence
  Description of Artificial Sequence: Synthetic oligonucleotide
uuuguggaaggaggcauuu

SEQ ID NO: 2290271 - RNA, 19 nt, Artificial Sequence
  Description of Artificial Sequence: Synthetic oligonucleotide
uauacccuuccuucacuuu

SEQ ID NO: 2290272 - RNA, 19 nt, Artificial Sequence
  Description of Artificial Sequence: Synthetic oligonucleotide
ugaccgcucuuucuccuaa

SEQ ID NO: 2290273 - RNA, 19 nt, Artificial Sequence
  Description of Artificial Sequence: Synthetic oligonucleotide
cuggauggcuauaucuaga

SEQ ID NO: 2290274 - RNA, 19 nt, Artificial Sequence
  Description of Artificial Sequence: Synthetic oligonucleotide
agaccacugaugauccuug

SEQ ID NO: 2290275 - RNA, 19 nt, Artificial Sequence
  Description of Artificial Sequence: Synthetic oligonucleotide
agcuguuaccuucccucca

SEQ ID NO: 2290276 - RNA, 19 nt, Artificial Sequence
  Description of Artificial Sequence: Synthetic oligonucleotide
aggaaguuaugcaaagcuu

SEQ ID NO: 2290277 - RNA, 19 nt, Artificial Sequence
  Description of Artificial Sequence: Synthetic oligonucleotide
guucccaccaugaugccaa

SEQ ID NO: 2290278 - RNA, 19 nt, Artificial Sequence
  Description of Artificial Sequence: Synthetic oligonucleotide
cguugaagaugguauuucc

SEQ ID NO: 2290279 - RNA, 19 nt, Artificial Sequence
  Description of Artificial Sequence: Synthetic oligonucleotide
caaagcuucaugaaccguu

SEQ ID NO: 2290280 - RNA, 19 nt, Artificial Sequence
  Description of Artificial Sequence: Synthetic oligonucleotide
uuacuuguugcugcacuuu

SEQ ID NO: 2290281 - RNA, 19 nt, Artificial Sequence
  Description of Artificial Sequence: Synthetic oligonucleotide
gguaccauaaggccagcaa

SEQ ID NO: 2290282 - RNA, 19 nt, Artificial Sequence
  Description of Artificial Sequence: Synthetic oligonucleotide
ugaugccaaggaucaaguu

SEQ ID NO: 2290283 - RNA, 19 nt, Artificial Sequence
  Description of Artificial Sequence: Synthetic oligonucleotide
guaguuggacauagaauaa

SEQ ID NO: 2290284 - RNA, 19 nt, Artificial Sequence
  Description of Artificial Sequence: Synthetic oligonucleotide
cuccuugaauagaugucca

SEQ ID NO: 2290285 - RNA, 19 nt, Artificial Sequence
  Description of Artificial Sequence: Synthetic oligonucleotide
aggguucuucagguaagag

SEQ ID NO: 2290286 - RNA, 19 nt, Artificial Sequence
  Description of Artificial Sequence: Synthetic oligonucleotide
cuauuacuuguugcugcac

SEQ ID NO: 2290287 - RNA, 19 nt, Artificial Sequence
  Description of Artificial Sequence: Synthetic oligonucleotide
uaauacagaaaggguucuu

SEQ ID NO: 2290288 - RNA, 19 nt, Artificial Sequence
  Description of Artificial Sequence: Synthetic oligonucleotide
gcuauuacuuguugcugca

SEQ ID NO: 2290289 - RNA, 19 nt, Artificial Sequence
  Description of Artificial Sequence: Synthetic oligonucleotide
cacauacauguaguuggac

SEQ ID NO: 2290290 - RNA, 19 nt, Artificial Sequence
  Description of Artificial Sequence: Synthetic oligonucleotide
gcacuuugaacuguuguca

SEQ ID NO: 2290291 - RNA, 19 nt, Artificial Sequence
  Description of Artificial Sequence: Synthetic oligonucleotide
uguucacuguguguuucau

SEQ ID NO: 2290292 - RNA, 19 nt, Artificial Sequence
  Description of Artificial Sequence: Synthetic oligonucleotide
aaacagaguagcagccauu

SEQ ID NO: 2290293 - RNA, 19 nt, Artificial Sequence
  Description of Artificial Sequence: Synthetic oligonucleotide
accacugaugauccuuguu

SEQ ID NO: 2290294 - RNA, 19 nt, Artificial Sequence
  Description of Artificial Sequence: Synthetic oligonucleotide
guauaacaauaucuucccu

SEQ ID NO: 2290295 - RNA, 19 nt, Artificial Sequence
  Description of Artificial Sequence: Synthetic oligonucleotide
gaaauuugauuuccuccuu

SEQ ID NO: 2290296 - RNA, 19 nt, Artificial Sequence
  Description of Artificial Sequence: Synthetic oligonucleotide
ucccaccaugaugccaagg

SEQ ID NO: 2290297 - RNA, 19 nt, Artificial Sequence
  Description of Artificial Sequence: Synthetic oligonucleotide
aggaggcauuucuugguuu

SEQ ID NO: 2290298 - RNA, 19 nt, Artificial Sequence
  Description of Artificial Sequence: Synthetic oligonucleotide
cugugcugaggacugaucu

SEQ ID NO: 2290299 - RNA, 19 nt, Artificial Sequence
  Description of Artificial Sequence: Synthetic oligonucleotide
guagauauuccuccagcuu

SEQ ID NO: 2290300 - RNA, 19 nt, Artificial Sequence
  Description of Artificial Sequence: Synthetic oligonucleotide
agcuggauggcuauaucua

SEQ ID NO: 2290301 - RNA, 19 nt, Artificial Sequence
  Description of Artificial Sequence: Synthetic oligonucleotide
uucccaauauuagcauaau

SEQ ID NO: 2290302 - RNA, 19 nt, Artificial Sequence
  Description of Artificial Sequence: Synthetic oligonucleotide
agcuuuggaaucguuucuu

SEQ ID NO: 2290303 - RNA, 19 nt, Artificial Sequence
  Description of Artificial Sequence: Synthetic oligonucleotide
gcaguguccauucaugggu

SEQ ID NO: 2290304 - RNA, 19 nt, Artificial Sequence
  Description of Artificial Sequence: Synthetic oligonucleotide
cuaauguuuucccaauauu

SEQ ID NO: 2290305 - RNA, 19 nt, Artificial Sequence
  Description of Artificial Sequence: Synthetic oligonucleotide
uggcuauaucuagaugcuc

SEQ ID NO: 2290306 - RNA, 19 nt, Artificial Sequence
  Description of Artificial Sequence: Synthetic oligonucleotide
acuuguugcugcacuuuga

SEQ ID NO: 2290307 - RNA, 19 nt, Artificial Sequence
  Description of Artificial Sequence: Synthetic oligonucleotide
cauuguuguccuugguuua

SEQ ID NO: 2290308 - RNA, 19 nt, Artificial Sequence
  Description of Artificial Sequence: Synthetic oligonucleotide
ggccacauacauguaguug

SEQ ID NO: 2290309 - RNA, 19 nt, Artificial Sequence
  Description of Artificial Sequence: Synthetic oligonucleotide
accguugaagaugguauuu

SEQ ID NO: 2290310 - RNA, 19 nt, Artificial Sequence
  Description of Artificial Sequence: Synthetic oligonucleotide
gguuuacggaccuuguggu

SEQ ID NO: 2290311 - RNA, 19 nt, Artificial Sequence
  Description of Artificial Sequence: Synthetic oligonucleotide
ggacauagaauaaccaggu

SEQ ID NO: 2290312 - RNA, 19 nt, Artificial Sequence
  Description of Artificial Sequence: Synthetic oligonucleotide
gaugauccuuguucacugu

SEQ ID NO: 2290313 - RNA, 19 nt, Artificial Sequence
  Description of Artificial Sequence: Synthetic oligonucleotide
gcaaaguuagugaaucgaa

SEQ ID NO: 2290314 - RNA, 19 nt, Artificial Sequence
  Description of Artificial Sequence: Synthetic oligonucleotide
ugguaccauaaggccagca

SEQ ID NO: 2290315 - RNA, 19 nt, Artificial Sequence
  Description of Artificial Sequence: Synthetic oligonucleotide
uggccacauacauguaguu

SEQ ID NO: 2290316 - RNA, 19 nt, Artificial Sequence
  Description of Artificial Sequence: Synthetic oligonucleotide
guaauacagaaaggguucu

SEQ ID NO: 2290317 - RNA, 19 nt, Artificial Sequence
  Description of Artificial Sequence: Synthetic oligonucleotide
cagcaauaaugccaaguua

SEQ ID NO: 2290318 - RNA, 19 nt, Artificial Sequence
  Description of Artificial Sequence: Synthetic oligonucleotide
gcaauaaugccaaguuaca

SEQ ID NO: 2290319 - RNA, 19 nt, Artificial Sequence
  Description of Artificial Sequence: Synthetic oligonucleotide
cuguuaccuucccuccaug

SEQ ID NO: 2290320 - RNA, 19 nt, Artificial Sequence
  Description of Artificial Sequence: Synthetic oligonucleotide
ucacuguguguuucaucuu

SEQ ID NO: 2290321 - RNA, 19 nt, Artificial Sequence
  Description of Artificial Sequence: Synthetic oligonucleotide
cuucaauccagcugaguuu

SEQ ID NO: 2290322 - RNA, 19 nt, Artificial Sequence
  Description of Artificial Sequence: Synthetic oligonucleotide
ugguaauaauaggcagcaa

SEQ ID NO: 2290323 - RNA, 19 nt, Artificial Sequence
  Description of Artificial Sequence: Synthetic oligonucleotide
aucguuucuuucagaaauu

SEQ ID NO: 2290324 - RNA, 19 nt, Artificial Sequence
  Description of Artificial Sequence: Synthetic oligonucleotide
uuguggaaggaggcauuuc

SEQ ID NO: 2290325 - RNA, 19 nt, Artificial Sequence
  Description of Artificial Sequence: Synthetic oligonucleotide
ccauguuggucaguaauuc

SEQ ID NO: 2290326 - RNA, 19 nt, Artificial Sequence
  Description of Artificial Sequence: Synthetic oligonucleotide
ccuugguuuacggaccuug

SEQ ID NO: 2290327 - RNA, 19 nt, Artificial Sequence
  Description of Artificial Sequence: Synthetic oligonucleotide
guaagagcuggauggcuau

SEQ ID NO: 2290328 - RNA, 19 nt, Artificial Sequence
  Description of Artificial Sequence: Synthetic oligonucleotide
guuuacggaccuuguggua

SEQ ID NO: 2290329 - RNA, 19 nt, Artificial Sequence
  Description of Artificial Sequence: Synthetic oligonucleotide
ccuugaauagauguccaca

SEQ ID NO: 2290330 - RNA, 19 nt, Artificial Sequence
  Description of Artificial Sequence: Synthetic oligonucleotide
uaugugcaucucuguccuc

SEQ ID NO: 2290331 - RNA, 19 nt, Artificial Sequence
  Description of Artificial Sequence: Synthetic oligonucleotide
cuguaauauacccuuccuu

SEQ ID NO: 2290332 - RNA, 19 nt, Artificial Sequence
  Description of Artificial Sequence: Synthetic oligonucleotide
gcagcaauaaugccaaguu

SEQ ID NO: 2290333 - RNA, 19 nt, Artificial Sequence
  Description of Artificial Sequence: Synthetic oligonucleotide
caaacugauuccagcaguu

SEQ ID NO: 2290334 - RNA, 19 nt, Artificial Sequence
  Description of Artificial Sequence: Synthetic oligonucleotide
gacauagaauaaccagguu

SEQ ID NO: 2290335 - RNA, 19 nt, Artificial Sequence
  Description of Artificial Sequence: Synthetic oligonucleotide
cuugguuuacggaccuugu

SEQ ID NO: 2290336 - RNA, 19 nt, Artificial Sequence
  Description of Artificial Sequence: Synthetic oligonucleotide
gcugaggacugaucuuaug

SEQ ID NO: 2290337 - RNA, 19 nt, Artificial Sequence
  Description of Artificial Sequence: Synthetic oligonucleotide
gcuauaucuagaugcuccu

SEQ ID NO: 2290338 - RNA, 19 nt, Artificial Sequence
  Description of Artificial Sequence: Synthetic oligonucleotide
cugaugauccuuguucacu

SEQ ID NO: 2290339 - RNA, 19 nt, Artificial Sequence
  Description of Artificial Sequence: Synthetic oligonucleotide
cugauuccagcaguuccca

SEQ ID NO: 2290340 - RNA, 19 nt, Artificial Sequence
  Description of Artificial Sequence: Synthetic oligonucleotide
guuggucaguaauucguuu

SEQ ID NO: 2290341 - RNA, 19 nt, Artificial Sequence
  Description of Artificial Sequence: Synthetic oligonucleotide
uaagagcuggauggcuaua

SEQ ID NO: 2290342 - RNA, 19 nt, Artificial Sequence
  Description of Artificial Sequence: Synthetic oligonucleotide
gguaagagcuggauggcua

SEQ ID NO: 2290343 - RNA, 19 nt, Artificial Sequence
  Description of Artificial Sequence: Synthetic oligonucleotide
cccuugagguaauacagaa

SEQ ID NO: 2290344 - RNA, 19 nt, Artificial Sequence
  Description of Artificial Sequence: Synthetic oligonucleotide
acauguaguuggacauaga

SEQ ID NO: 2290345 - RNA, 19 nt, Artificial Sequence
  Description of Artificial Sequence: Synthetic oligonucleotide
augaccgcucuuucuccua

SEQ ID NO: 2290346 - RNA, 19 nt, Artificial Sequence
  Description of Artificial Sequence: Synthetic oligonucleotide
uccauucaugggugcccuc

SEQ ID NO: 2290347 - RNA, 19 nt, Artificial Sequence
  Description of Artificial Sequence: Synthetic oligonucleotide
ccagcaguucccaccauga

SEQ ID NO: 2290348 - RNA, 19 nt, Artificial Sequence
  Description of Artificial Sequence: Synthetic oligonucleotide
ugggugcccucaugaccgc

SEQ ID NO: 2290349 - RNA, 19 nt, Artificial Sequence
  Description of Artificial Sequence: Synthetic oligonucleotide
ccaaggaucaaguuacuuu

SEQ ID NO: 2290350 - RNA, 19 nt, Artificial Sequence
  Description of Artificial Sequence: Synthetic oligonucleotide
cuccuaauguuuucccaau

SEQ ID NO: 2290351 - RNA, 19 nt, Artificial Sequence
  Description of Artificial Sequence: Synthetic oligonucleotide
cuguccucuuugguaauaa

SEQ ID NO: 2290352 - RNA, 19 nt, Artificial Sequence
  Description of Artificial Sequence: Synthetic oligonucleotide
ggaccuugugguaccauaa

SEQ ID NO: 2290353 - RNA, 19 nt, Artificial Sequence
  Description of Artificial Sequence: Synthetic oligonucleotide
caugaccgcucuuucuccu

SEQ ID NO: 2290354 - RNA, 19 nt, Artificial Sequence
  Description of Artificial Sequence: Synthetic oligonucleotide
cagcuuuggaaucguuucu

SEQ ID NO: 2290355 - RNA, 19 nt, Artificial Sequence
  Description of Artificial Sequence: Synthetic oligonucleotide
ccuaauguuuucccaauau

SEQ ID NO: 2290356 - RNA, 19 nt, Artificial Sequence
  Description of Artificial Sequence: Synthetic oligonucleotide
gaccacugaugauccuugu

SEQ ID NO: 2290357 - RNA, 19 nt, Artificial Sequence
  Description of Artificial Sequence: Synthetic oligonucleotide
cugaucuuaugagcuguua

SEQ ID NO: 2290358 - RNA, 19 nt, Artificial Sequence
  Description of Artificial Sequence: Synthetic oligonucleotide
auguaacacuuggccacau

SEQ ID NO: 2290359 - RNA, 19 nt, Artificial Sequence
  Description of Artificial Sequence: Synthetic oligonucleotide
cauguucaucuuguagaua

SEQ ID NO: 2290360 - RNA, 19 nt, Artificial Sequence
  Description of Artificial Sequence: Synthetic oligonucleotide
caagcaucuugagauucgu

SEQ ID NO: 2290361 - RNA, 19 nt, Artificial Sequence
  Description of Artificial Sequence: Synthetic oligonucleotide
ccuugagguaauacagaaa

SEQ ID NO: 2290362 - RNA, 19 nt, Artificial Sequence
  Description of Artificial Sequence: Synthetic oligonucleotide
cucugagcuauuacuuguu

SEQ ID NO: 2290363 - RNA, 19 nt, Artificial Sequence
  Description of Artificial Sequence: Synthetic oligonucleotide
cuucagguaagagcuggau

SEQ ID NO: 2290364 - RNA, 19 nt, Artificial Sequence
  Description of Artificial Sequence: Synthetic oligonucleotide
cgaauuucuuacccaggga

SEQ ID NO: 2290365 - RNA, 19 nt, Artificial Sequence
  Description of Artificial Sequence: Synthetic oligonucleotide
guccauucaugggugcccu

SEQ ID NO: 2290366 - RNA, 19 nt, Artificial Sequence
  Description of Artificial Sequence: Synthetic oligonucleotide
ugcccucaugaccgcucuu

SEQ ID NO: 2290367 - RNA, 19 nt, Artificial Sequence
  Description of Artificial Sequence: Synthetic oligonucleotide
gagauucgucaagaucaau

SEQ ID NO: 2290368 - RNA, 19 nt, Artificial Sequence
  Description of Artificial Sequence: Synthetic oligonucleotide
gcuguuaccuucccuccau

SEQ ID NO: 2290369 - RNA, 19 nt, Artificial Sequence
  Description of Artificial Sequence: Synthetic oligonucleotide
gccuucuuugaaagaccac

SEQ ID NO: 2290370 - RNA, 19 nt, Artificial Sequence
  Description of Artificial Sequence: Synthetic oligonucleotide
uccuugguuuacggaccuu

SEQ ID NO: 2290371 - RNA, 19 nt, Artificial Sequence
  Description of Artificial Sequence: Synthetic oligonucleotide
guggaaggaggcauuucuu

SEQ ID NO: 2290372 - RNA, 19 nt, Artificial Sequence
  Description of Artificial Sequence: Synthetic oligonucleotide
augaaccguugaagauggu

SEQ ID NO: 2290373 - RNA, 19 nt, Artificial Sequence
  Description of Artificial Sequence: Synthetic oligonucleotide
acggaccuugugguaccau

SEQ ID NO: 2290374 - RNA, 19 nt, Artificial Sequence
  Description of Artificial Sequence: Synthetic oligonucleotide
gaccgcucuuucuccuaau

SEQ ID NO: 2290375 - RNA, 19 nt, Artificial Sequence
  Description of Artificial Sequence: Synthetic oligonucleotide
ccuccuuaaguucuuccau

SEQ ID NO: 2290376 - RNA, 19 nt, Artificial Sequence
  Description of Artificial Sequence: Synthetic oligonucleotide
cuucagucuuaaggaaguu

SEQ ID NO: 2290377 - RNA, 19 nt, Artificial Sequence
  Description of Artificial Sequence: Synthetic oligonucleotide
ccucaugaccgcucuuucu

SEQ ID NO: 2290378 - RNA, 19 nt, Artificial Sequence
  Description of Artificial Sequence: Synthetic oligonucleotide
cucuguccucuuugguaau

SEQ ID NO: 2290379 - RNA, 19 nt, Artificial Sequence
  Description of Artificial Sequence: Synthetic oligonucleotide
ccgcucuuucuccuaaugu

SEQ ID NO: 2290380 - RNA, 19 nt, Artificial Sequence
  Description of Artificial Sequence: Synthetic oligonucleotide
gccaaggaucaaguuacuu

SEQ ID NO: 2290381 - RNA, 19 nt, Artificial Sequence
  Description of Artificial Sequence: Synthetic oligonucleotide
cggaccuugugguaccaua

SEQ ID NO: 2290382 - RNA, 19 nt, Artificial Sequence
  Description of Artificial Sequence: Synthetic oligonucleotide
ccuuaaguucuuccauguu

SEQ ID NO: 2290383 - RNA, 19 nt, Artificial Sequence
  Description of Artificial Sequence: Synthetic oligonucleotide
gcccucaugaccgcucuuu

SEQ ID NO: 2290384 - RNA, 19 nt, Artificial Sequence
  Description of Artificial Sequence: Synthetic oligonucleotide
gggugcccucaugaccgcu

SEQ ID NO: 2290385 - RNA, 19 nt, Artificial Sequence
  Description of Artificial Sequence: Synthetic oligonucleotide
acaaaauuuacauucaagc

SEQ ID NO: 2290386 - RNA, 19 nt, Artificial Sequence
  Description of Artificial Sequence: Synthetic oligonucleotide
uauuauaucacaauaacug

SEQ ID NO: 2290387 - RNA, 19 nt, Artificial Sequence
  Description of Artificial Sequence: Synthetic oligonucleotide
aaaauuuacauucaagcug

SEQ ID NO: 2290388 - RNA, 19 nt, Artificial Sequence
  Description of Artificial Sequence: Synthetic oligonucleotide
aaauuuuagacaucaacag

SEQ ID NO: 2290389 - RNA, 19 nt, Artificial Sequence
  Description of Artificial Sequence: Synthetic oligonucleotide
uacauuaugaaaauagcag

SEQ ID NO: 2290390 - RNA, 19 nt, Artificial Sequence
  Description of Artificial Sequence: Synthetic oligonucleotide
uuaaugaggcuuaagaaag

SEQ ID NO: 2290391 - RNA, 19 nt, Artificial Sequence
  Description of Artificial Sequence: Synthetic oligonucleotide
aauaccaacgguaaauugc

SEQ ID NO: 2290392 - RNA, 19 nt, Artificial Sequence
  Description of Artificial Sequence: Synthetic oligonucleotide
ucaauuauugccuaaacgu

SEQ ID NO: 2290393 - RNA, 19 nt, Artificial Sequence
  Description of Artificial Sequence: Synthetic oligonucleotide
ucuaauacugaaaaggcca

SEQ ID NO: 2290394 - RNA, 19 nt, Artificial Sequence
  Description of Artificial Sequence: Synthetic oligonucleotide
aaauuuacauucaagcugg

SEQ ID NO: 2290395 - RNA, 19 nt, Artificial Sequence
  Description of Artificial Sequence: Synthetic oligonucleotide
cuuucuauaaaguggauag

SEQ ID NO: 2290396 - RNA, 19 nt, Artificial Sequence
  Description of Artificial Sequence: Synthetic oligonucleotide
uaagaaacauggaagagcc

SEQ ID NO: 2290397 - RNA, 19 nt, Artificial Sequence
  Description of Artificial Sequence: Synthetic oligonucleotide
uuugaaagagauuuuaaca

SEQ ID NO: 2290398 - RNA, 19 nt, Artificial Sequence
  Description of Artificial Sequence: Synthetic oligonucleotide
uuuauuauaucacaauaac

SEQ ID NO: 2290399 - RNA, 19 nt, Artificial Sequence
  Description of Artificial Sequence: Synthetic oligonucleotide
aaauaaaugaaaacuuacg

SEQ ID NO: 2290400 - RNA, 19 nt, Artificial Sequence
  Description of Artificial Sequence: Synthetic oligonucleotide
uucaauuauugccuaaacg

SEQ ID NO: 2290401 - RNA, 19 nt, Artificial Sequence
  Description of Artificial Sequence: Synthetic oligonucleotide
uugucuaauacugaaaagg

SEQ ID NO: 2290402 - RNA, 19 nt, Artificial Sequence
  Description of Artificial Sequence: Synthetic oligonucleotide
uacuauugaaaauaaauac

SEQ ID NO: 2290403 - RNA, 19 nt, Artificial Sequence
  Description of Artificial Sequence: Synthetic oligonucleotide
aaaggacuccuguagaacg

SEQ ID NO: 2290404 - RNA, 19 nt, Artificial Sequence
  Description of Artificial Sequence: Synthetic oligonucleotide
cuuuuguucaauuauugcc

SEQ ID NO: 2290405 - RNA, 19 nt, Artificial Sequence
  Description of Artificial Sequence: Synthetic oligonucleotide
uuaacagugcauuuucucg

SEQ ID NO: 2290406 - RNA, 19 nt, Artificial Sequence
  Description of Artificial Sequence: Synthetic oligonucleotide
cuugcuuucuauaaagugg

SEQ ID NO: 2290407 - RNA, 19 nt, Artificial Sequence
  Description of Artificial Sequence: Synthetic oligonucleotide
aaaggccaagcacacagcc

SEQ ID NO: 2290408 - RNA, 19 nt, Artificial Sequence
  Description of Artificial Sequence: Synthetic oligonucleotide
uuuacugauacuuauaauu

SEQ ID NO: 2290409 - RNA, 19 nt, Artificial Sequence
  Description of Artificial Sequence: Synthetic oligonucleotide
uuuacauucaagcuggauc

SEQ ID NO: 2290410 - RNA, 19 nt, Artificial Sequence
  Description of Artificial Sequence: Synthetic oligonucleotide
uucucguucaaguaaagag

SEQ ID NO: 2290411 - RNA, 19 nt, Artificial Sequence
  Description of Artificial Sequence: Synthetic oligonucleotide
uuaguguuagaaaugugcc

SEQ ID NO: 2290412 - RNA, 19 nt, Artificial Sequence
  Description of Artificial Sequence: Synthetic oligonucleotide
aaaguggcucuuuagauga

SEQ ID NO: 2290413 - RNA, 19 nt, Artificial Sequence
  Description of Artificial Sequence: Synthetic oligonucleotide
uuaaauguaauccugucuu

SEQ ID NO: 2290414 - RNA, 19 nt, Artificial Sequence
  Description of Artificial Sequence: Synthetic oligonucleotide
auuuaugugacaggaaggc

SEQ ID NO: 2290415 - RNA, 19 nt, Artificial Sequence
  Description of Artificial Sequence: Synthetic oligonucleotide
aauuuuagacaucaacagu

SEQ ID NO: 2290416 - RNA, 19 nt, Artificial Sequence
  Description of Artificial Sequence: Synthetic oligonucleotide
uauaucacaauaacuggug

SEQ ID NO: 2290417 - RNA, 19 nt, Artificial Sequence
  Description of Artificial Sequence: Synthetic oligonucleotide
uacacuauacaaaauuuac

SEQ ID NO: 2290418 - RNA, 19 nt, Artificial Sequence
  Description of Artificial Sequence: Synthetic oligonucleotide
ugauaagaaacauggaaga

SEQ ID NO: 2290419 - RNA, 19 nt, Artificial Sequence
  Description of Artificial Sequence: Synthetic oligonucleotide
aaaaguggcucuuuagaug

SEQ ID NO: 2290420 - RNA, 19 nt, Artificial Sequence
  Description of Artificial Sequence: Synthetic oligonucleotide
auugaaagaaaaguggcuc

SEQ ID NO: 2290421 - RNA, 19 nt, Artificial Sequence
  Description of Artificial Sequence: Synthetic oligonucleotide
gauacuuauaauuauucaa

SEQ ID NO: 2290422 - RNA, 19 nt, Artificial Sequence
  Description of Artificial Sequence: Synthetic oligonucleotide
agaaacauggaagagccac

SEQ ID NO: 2290423 - RNA, 19 nt, Artificial Sequence
  Description of Artificial Sequence: Synthetic oligonucleotide
aaagagauuuuaacagugc

SEQ ID NO: 2290424 - RNA, 19 nt, Artificial Sequence
  Description of Artificial Sequence: Synthetic oligonucleotide
uccuuaaugaggcuuaaga

SEQ ID NO: 2290425 - RNA, 19 nt, Artificial Sequence
  Description of Artificial Sequence: Synthetic oligonucleotide
uuauaucacaauaacuggu

SEQ ID NO: 2290426 - RNA, 19 nt, Artificial Sequence
  Description of Artificial Sequence: Synthetic oligonucleotide
ucuuuagagagggaaaagg

SEQ ID NO: 2290427 - RNA, 19 nt, Artificial Sequence
  Description of Artificial Sequence: Synthetic oligonucleotide
uguuauuuaugugacagga

SEQ ID NO: 2290428 - RNA, 19 nt, Artificial Sequence
  Description of Artificial Sequence: Synthetic oligonucleotide
acuguuauuuaugugacag

SEQ ID NO: 2290429 - RNA, 19 nt, Artificial Sequence
  Description of Artificial Sequence: Synthetic oligonucleotide
gaaagcuuuaugcugagga

SEQ ID NO: 2290430 - RNA, 19 nt, Artificial Sequence
  Description of Artificial Sequence: Synthetic oligonucleotide
uaugcugaggaaacauucg

SEQ ID NO: 2290431 - RNA, 19 nt, Artificial Sequence
  Description of Artificial Sequence: Synthetic oligonucleotide
ugaggaaacauucggcugc

SEQ ID NO: 2290432 - RNA, 19 nt, Artificial Sequence
  Description of Artificial Sequence: Synthetic oligonucleotide
cuauaaaguggauagaaca

SEQ ID NO: 2290433 - RNA, 19 nt, Artificial Sequence
  Description of Artificial Sequence: Synthetic oligonucleotide
acaauaacuggugacuacc

SEQ ID NO: 2290434 - RNA, 19 nt, Artificial Sequence
  Description of Artificial Sequence: Synthetic oligonucleotide
aagaaaaguggcucuuuag

SEQ ID NO: 2290435 - RNA, 19 nt, Artificial Sequence
  Description of Artificial Sequence: Synthetic oligonucleotide
ucauacuuacacuauacaa

SEQ ID NO: 2290436 - RNA, 19 nt, Artificial Sequence
  Description of Artificial Sequence: Synthetic oligonucleotide
cacuaauucuuuuauuugc

SEQ ID NO: 2290437 - RNA, 19 nt, Artificial Sequence
  Description of Artificial Sequence: Synthetic oligonucleotide
aaauagcccaauuauuuau

SEQ ID NO: 2290438 - RNA, 19 nt, Artificial Sequence
  Description of Artificial Sequence: Synthetic oligonucleotide
uaaaguggauagaacacca

SEQ ID NO: 2290439 - RNA, 19 nt, Artificial Sequence
  Description of Artificial Sequence: Synthetic oligonucleotide
caaguaaagaguuucuuuc

SEQ ID NO: 2290440 - RNA, 19 nt, Artificial Sequence
  Description of Artificial Sequence: Synthetic oligonucleotide
agugcuaccaggauuggcc

SEQ ID NO: 2290441 - RNA, 19 nt, Artificial Sequence
  Description of Artificial Sequence: Synthetic oligonucleotide
agaacgauugucuaauacu

SEQ ID NO: 2290442 - RNA, 19 nt, Artificial Sequence
  Description of Artificial Sequence: Synthetic oligonucleotide
auuaaauguaauccugucu

SEQ ID NO: 2290443 - RNA, 19 nt, Artificial Sequence
  Description of Artificial Sequence: Synthetic oligonucleotide
uuucauacuuacacuauac

SEQ ID NO: 2290444 - RNA, 19 nt, Artificial Sequence
  Description of Artificial Sequence: Synthetic oligonucleotide
auaaaugaaaacuuacgua

SEQ ID NO: 2290445 - RNA, 19 nt, Artificial Sequence
  Description of Artificial Sequence: Synthetic oligonucleotide
uuaugugacaggaaggcuc

SEQ ID NO: 2290446 - RNA, 19 nt, Artificial Sequence
  Description of Artificial Sequence: Synthetic oligonucleotide
cugcaugacaucuuuagag

SEQ ID NO: 2290447 - RNA, 19 nt, Artificial Sequence
  Description of Artificial Sequence: Synthetic oligonucleotide
ucucguucaaguaaagagu

SEQ ID NO: 2290448 - RNA, 19 nt, Artificial Sequence
  Description of Artificial Sequence: Synthetic oligonucleotide
uuacugauacuuauaauua

SEQ ID NO: 2290449 - RNA, 19 nt, Artificial Sequence
  Description of Artificial Sequence: Synthetic oligonucleotide
gugauaagaaacauggaag

SEQ ID NO: 2290450 - RNA, 19 nt, Artificial Sequence
  Description of Artificial Sequence: Synthetic oligonucleotide
ucuuuuguucaauuauugc

SEQ ID NO: 2290451 - RNA, 19 nt, Artificial Sequence
  Description of Artificial Sequence: Synthetic oligonucleotide
uugcuuucuauaaagugga

SEQ ID NO: 2290452 - RNA, 19 nt, Artificial Sequence
  Description of Artificial Sequence: Synthetic oligonucleotide
aguguuagaaaugugccag

SEQ ID NO: 2290453 - RNA, 19 nt, Artificial Sequence
  Description of Artificial Sequence: Synthetic oligonucleotide
acugaucauuguuugaaag

SEQ ID NO: 2290454 - RNA, 19 nt, Artificial Sequence
  Description of Artificial Sequence: Synthetic oligonucleotide
acauuguucauguacauua

SEQ ID NO: 2290455 - RNA, 19 nt, Artificial Sequence
  Description of Artificial Sequence: Synthetic oligonucleotide
uuuagaugaacuguuauuu

SEQ ID NO: 2290456 - RNA, 19 nt, Artificial Sequence
  Description of Artificial Sequence: Synthetic oligonucleotide
uuuauugaaaauagcccaa

SEQ ID NO: 2290457 - RNA, 19 nt, Artificial Sequence
  Description of Artificial Sequence: Synthetic oligonucleotide
guuugaaagagauuuuaac

SEQ ID NO: 2290458 - RNA, 19 nt, Artificial Sequence
  Description of Artificial Sequence: Synthetic oligonucleotide
uuaugcugaggaaacauuc

SEQ ID NO: 2290459 - RNA, 19 nt, Artificial Sequence
  Description of Artificial Sequence: Synthetic oligonucleotide
auaccaacgguaaauugcc

SEQ ID NO: 2290460 - RNA, 19 nt, Artificial Sequence
  Description of Artificial Sequence: Synthetic oligonucleotide
agaaaaguggcucuuuaga

SEQ ID NO: 2290461 - RNA, 19 nt, Artificial Sequence
  Description of Artificial Sequence: Synthetic oligonucleotide
aauaacuggugacuaccug

SEQ ID NO: 2290462 - RNA, 19 nt, Artificial Sequence
  Description of Artificial Sequence: Synthetic oligonucleotide
augacaucuuuagagaggg

SEQ ID NO: 2290463 - RNA, 19 nt, Artificial Sequence
  Description of Artificial Sequence: Synthetic oligonucleotide
uccaugggugauaagaaac

SEQ ID NO: 2290464 - RNA, 19 nt, Artificial Sequence
  Description of Artificial Sequence: Synthetic oligonucleotide
ugugccaggauucuuuugu

SEQ ID NO: 2290465 - RNA, 19 nt, Artificial Sequence
  Description of Artificial Sequence: Synthetic oligonucleotide
uggaucuuuacuauugaaa

SEQ ID NO: 2290466 - RNA, 19 nt, Artificial Sequence
  Description of Artificial Sequence: Synthetic oligonucleotide
uguuauugauauugaaaga

SEQ ID NO: 2290467 - RNA, 19 nt, Artificial Sequence
  Description of Artificial Sequence: Synthetic oligonucleotide
aaaauagcccaauuauuua

SEQ ID NO: 2290468 - RNA, 19 nt, Artificial Sequence
  Description of Artificial Sequence: Synthetic oligonucleotide
gaacgauugucuaauacug

SEQ ID NO: 2290469 - RNA, 19 nt, Artificial Sequence
  Description of Artificial Sequence: Synthetic oligonucleotide
aaacauucggcugcugugg

SEQ ID NO: 2290470 - RNA, 19 nt, Artificial Sequence
  Description of Artificial Sequence: Synthetic oligonucleotide
accaggauuggccuguugg

SEQ ID NO: 2290471 - RNA, 19 nt, Artificial Sequence
  Description of Artificial Sequence: Synthetic oligonucleotide
cuacuugcuuucuauaaag

SEQ ID NO: 2290472 - RNA, 19 nt, Artificial Sequence
  Description of Artificial Sequence: Synthetic oligonucleotide
uggauagaacaccaguggc

SEQ ID NO: 2290473 - RNA, 19 nt, Artificial Sequence
  Description of Artificial Sequence: Synthetic oligonucleotide
uuuaacagugcauuuucuc

SEQ ID NO: 2290474 - RNA, 19 nt, Artificial Sequence
  Description of Artificial Sequence: Synthetic oligonucleotide
cugauacuuauaauuauuc

SEQ ID NO: 2290475 - RNA, 19 nt, Artificial Sequence
  Description of Artificial Sequence: Synthetic oligonucleotide
gacaacugaucauuguuug

SEQ ID NO: 2290476 - RNA, 19 nt, Artificial Sequence
  Description of Artificial Sequence: Synthetic oligonucleotide
gacaggaaggcucaaggug

SEQ ID NO: 2290477 - RNA, 19 nt, Artificial Sequence
  Description of Artificial Sequence: Synthetic oligonucleotide
uucauacuuacacuauaca

SEQ ID NO: 2290478 - RNA, 19 nt, Artificial Sequence
  Description of Artificial Sequence: Synthetic oligonucleotide
uuacacuauacaaaauuua

SEQ ID NO: 2290479 - RNA, 19 nt, Artificial Sequence
  Description of Artificial Sequence: Synthetic oligonucleotide
uccuguagaacgauugucu

SEQ ID NO: 2290480 - RNA, 19 nt, Artificial Sequence
  Description of Artificial Sequence: Synthetic oligonucleotide
gaaaauagcagcccuguaa

SEQ ID NO: 2290481 - RNA, 19 nt, Artificial Sequence
  Description of Artificial Sequence: Synthetic oligonucleotide
guugcguuggcugaggagg

SEQ ID NO: 2290482 - RNA, 19 nt, Artificial Sequence
  Description of Artificial Sequence: Synthetic oligonucleotide
auaacuggugacuaccugu

SEQ ID NO: 2290483 - RNA, 19 nt, Artificial Sequence
  Description of Artificial Sequence: Synthetic oligonucleotide
cuuaaugaggcuuaagaaa

SEQ ID NO: 2290484 - RNA, 19 nt, Artificial Sequence
  Description of Artificial Sequence: Synthetic oligonucleotide
uacuuauaauuauucaaaa

SEQ ID NO: 2290485 - RNA, 19 nt, Artificial Sequence
  Description of Artificial Sequence: Synthetic oligonucleotide
uuucaauuccuuuacugau

SEQ ID NO: 2290486 - RNA, 19 nt, Artificial Sequence
  Description of Artificial Sequence: Synthetic oligonucleotide
ucaacagugcugcaugaca

SEQ ID NO: 2290487 - RNA, 19 nt, Artificial Sequence
  Description of Artificial Sequence: Synthetic oligonucleotide
uuauuugcuccuuuagaac

SEQ ID NO: 2290488 - RNA, 19 nt, Artificial Sequence
  Description of Artificial Sequence: Synthetic oligonucleotide
uauuaaauguaauccuguc

SEQ ID NO: 2290489 - RNA, 19 nt, Artificial Sequence
  Description of Artificial Sequence: Synthetic oligonucleotide
auaaauaccaacgguaaau

SEQ ID NO: 2290490 - RNA, 19 nt, Artificial Sequence
  Description of Artificial Sequence: Synthetic oligonucleotide
uagaaaugugccaggauuc

SEQ ID NO: 2290491 - RNA, 19 nt, Artificial Sequence
  Description of Artificial Sequence: Synthetic oligonucleotide
gaaacauucggcugcugug

SEQ ID NO: 2290492 - RNA, 19 nt, Artificial Sequence
  Description of Artificial Sequence: Synthetic oligonucleotide
gaauccaugggugauaaga

SEQ ID NO: 2290493 - RNA, 19 nt, Artificial Sequence
  Description of Artificial Sequence: Synthetic oligonucleotide
uagaacgauugucuaauac

SEQ ID NO: 2290494 - RNA, 19 nt, Artificial Sequence
  Description of Artificial Sequence: Synthetic oligonucleotide
ugccauuaguguuagaaau

SEQ ID NO: 2290495 - RNA, 19 nt, Artificial Sequence
  Description of Artificial Sequence: Synthetic oligonucleotide
aacuuacguaggcaaaugu

SEQ ID NO: 2290496 - RNA, 19 nt, Artificial Sequence
  Description of Artificial Sequence: Synthetic oligonucleotide
ugcaugacaucuuuagaga

SEQ ID NO: 2290497 - RNA, 19 nt, Artificial Sequence
  Description of Artificial Sequence: Synthetic oligonucleotide
acguuuuauuuauuaaaug

SEQ ID NO: 2290498 - RNA, 19 nt, Artificial Sequence
  Description of Artificial Sequence: Synthetic oligonucleotide
uaucacaauaacuggugac

SEQ ID NO: 2290499 - RNA, 19 nt, Artificial Sequence
  Description of Artificial Sequence: Synthetic oligonucleotide
uugaaagaaaaguggcucu

SEQ ID NO: 2290500 - RNA, 19 nt, Artificial Sequence
  Description of Artificial Sequence: Synthetic oligonucleotide
uagaacuuccacuucuucu

SEQ ID NO: 2290501 - RNA, 19 nt, Artificial Sequence
  Description of Artificial Sequence: Synthetic oligonucleotide
uaucauugcuuguuguuga

SEQ ID NO: 2290502 - RNA, 19 nt, Artificial Sequence
  Description of Artificial Sequence: Synthetic oligonucleotide
aaagcuuuaugcugaggaa

SEQ ID NO: 2290503 - RNA, 19 nt, Artificial Sequence
  Description of Artificial Sequence: Synthetic oligonucleotide
aaugaggcuuaagaaagcu

SEQ ID NO: 2290504 - RNA, 19 nt, Artificial Sequence
  Description of Artificial Sequence: Synthetic oligonucleotide
aaagaguuucuuuccacua

SEQ ID NO: 2290505 - RNA, 19 nt, Artificial Sequence
  Description of Artificial Sequence: Synthetic oligonucleotide
uuuucauacuuacacuaua

SEQ ID NO: 2290506 - RNA, 19 nt, Artificial Sequence
  Description of Artificial Sequence: Synthetic oligonucleotide
aaagaaaaguggcucuuua

SEQ ID NO: 2290507 - RNA, 19 nt, Artificial Sequence
  Description of Artificial Sequence: Synthetic oligonucleotide
aacgguaaauugccauuag

SEQ ID NO: 2290508 - RNA, 19 nt, Artificial Sequence
  Description of Artificial Sequence: Synthetic oligonucleotide
uagaugaacuguuauuuau

SEQ ID NO: 2290509 - RNA, 19 nt, Artificial Sequence
  Description of Artificial Sequence: Synthetic oligonucleotide
gauagaacaccaguggcac

SEQ ID NO: 2290510 - RNA, 19 nt, Artificial Sequence
  Description of Artificial Sequence: Synthetic oligonucleotide
aaaacuuacguaggcaaau

SEQ ID NO: 2290511 - RNA, 19 nt, Artificial Sequence
  Description of Artificial Sequence: Synthetic oligonucleotide
agaagugcuaccaggauug

SEQ ID NO: 2290512 - RNA, 19 nt, Artificial Sequence
  Description of Artificial Sequence: Synthetic oligonucleotide
uuuuaacagugcauuuucu

SEQ ID NO: 2290513 - RNA, 19 nt, Artificial Sequence
  Description of Artificial Sequence: Synthetic oligonucleotide
uaacagugcauuuucucgu

SEQ ID NO: 2290514 - RNA, 19 nt, Artificial Sequence
  Description of Artificial Sequence: Synthetic oligonucleotide
uccuuuagaacuuccacuu

SEQ ID NO: 2290515 - RNA, 19 nt, Artificial Sequence
  Description of Artificial Sequence: Synthetic oligonucleotide
uguagaacgauugucuaau

SEQ ID NO: 2290516 - RNA, 19 nt, Artificial Sequence
  Description of Artificial Sequence: Synthetic oligonucleotide
auucaagcuggaucuuuac

SEQ ID NO: 2290517 - RNA, 19 nt, Artificial Sequence
  Description of Artificial Sequence: Synthetic oligonucleotide
cuuuagagagggaaaagga

SEQ ID NO: 2290518 - RNA, 19 nt, Artificial Sequence
  Description of Artificial Sequence: Synthetic oligonucleotide
ugacuaccuguacaggugc

SEQ ID NO: 2290519 - RNA, 19 nt, Artificial Sequence
  Description of Artificial Sequence: Synthetic oligonucleotide
aauuauugccuaaacguuu

SEQ ID NO: 2290520 - RNA, 19 nt, Artificial Sequence
  Description of Artificial Sequence: Synthetic oligonucleotide
aagaguuucuuuccacuaa

SEQ ID NO: 2290521 - RNA, 19 nt, Artificial Sequence
  Description of Artificial Sequence: Synthetic oligonucleotide
uaaugaggcuuaagaaagc

SEQ ID NO: 2290522 - RNA, 19 nt, Artificial Sequence
  Description of Artificial Sequence: Synthetic oligonucleotide
uaguguuagaaaugugcca

SEQ ID NO: 2290523 - RNA, 19 nt, Artificial Sequence
  Description of Artificial Sequence: Synthetic oligonucleotide
auacugaaaaggccaagca

SEQ ID NO: 2290524 - RNA, 19 nt, Artificial Sequence
  Description of Artificial Sequence: Synthetic oligonucleotide
uugccuaaacguuuuauuu

SEQ ID NO: 2290525 - RNA, 19 nt, Artificial Sequence
  Description of Artificial Sequence: Synthetic oligonucleotide
acagccgaagcauggcuac

SEQ ID NO: 2290526 - RNA, 19 nt, Artificial Sequence
  Description of Artificial Sequence: Synthetic oligonucleotide
aacuggugacuaccuguac

SEQ ID NO: 2290527 - RNA, 19 nt, Artificial Sequence
  Description of Artificial Sequence: Synthetic oligonucleotide
auaucacaauaacugguga

SEQ ID NO: 2290528 - RNA, 19 nt, Artificial Sequence
  Description of Artificial Sequence: Synthetic oligonucleotide
aaggugaauccauggguga

SEQ ID NO: 2290529 - RNA, 19 nt, Artificial Sequence
  Description of Artificial Sequence: Synthetic oligonucleotide
uuuucucguucaaguaaag

SEQ ID NO: 2290530 - RNA, 19 nt, Artificial Sequence
  Description of Artificial Sequence: Synthetic oligonucleotide
cuguuauuuaugugacagg

SEQ ID NO: 2290531 - RNA, 19 nt, Artificial Sequence
  Description of Artificial Sequence: Synthetic oligonucleotide
aucacaauaacuggugacu

SEQ ID NO: 2290532 - RNA, 19 nt, Artificial Sequence
  Description of Artificial Sequence: Synthetic oligonucleotide
gaugaacuguuauuuaugu

SEQ ID NO: 2290533 - RNA, 19 nt, Artificial Sequence
  Description of Artificial Sequence: Synthetic oligonucleotide
aaacauggaagagccacca

SEQ ID NO: 2290534 - RNA, 19 nt, Artificial Sequence
  Description of Artificial Sequence: Synthetic oligonucleotide
uguuguugagaagugcuac

SEQ ID NO: 2290535 - RNA, 19 nt, Artificial Sequence
  Description of Artificial Sequence: Synthetic oligonucleotide
aguggauagaacaccagug

SEQ ID NO: 2290536 - RNA, 19 nt, Artificial Sequence
  Description of Artificial Sequence: Synthetic oligonucleotide
uucaagcuggaucuuuacu

SEQ ID NO: 2290537 - RNA, 19 nt, Artificial Sequence
  Description of Artificial Sequence: Synthetic oligonucleotide
caaaauuuacauucaagcu

SEQ ID NO: 2290538 - RNA, 19 nt, Artificial Sequence
  Description of Artificial Sequence: Synthetic oligonucleotide
ggaucuuuacuauugaaaa

SEQ ID NO: 2290539 - RNA, 19 nt, Artificial Sequence
  Description of Artificial Sequence: Synthetic oligonucleotide
uuuaugcugaggaaacauu

SEQ ID NO: 2290540 - RNA, 19 nt, Artificial Sequence
  Description of Artificial Sequence: Synthetic oligonucleotide
agcccaauuauuuauuaua

SEQ ID NO: 2290541 - RNA, 19 nt, Artificial Sequence
  Description of Artificial Sequence: Synthetic oligonucleotide
aaauugccauuaguguuag

SEQ ID NO: 2290542 - RNA, 19 nt, Artificial Sequence
  Description of Artificial Sequence: Synthetic oligonucleotide
aagugcuaccaggauuggc

SEQ ID NO: 2290543 - RNA, 19 nt, Artificial Sequence
  Description of Artificial Sequence: Synthetic oligonucleotide
aaaguucugugacauuguu

SEQ ID NO: 2290544 - RNA, 19 nt, Artificial Sequence
  Description of Artificial Sequence: Synthetic oligonucleotide
gaacuguuauuuaugugac

SEQ ID NO: 2290545 - RNA, 19 nt, Artificial Sequence
  Description of Artificial Sequence: Synthetic oligonucleotide
aacuguuauuuaugugaca

SEQ ID NO: 2290546 - RNA, 19 nt, Artificial Sequence
  Description of Artificial Sequence: Synthetic oligonucleotide
uuagaugaacuguuauuua

SEQ ID NO: 2290547 - RNA, 19 nt, Artificial Sequence
  Description of Artificial Sequence: Synthetic oligonucleotide
uucaauuccuuuacugaua

SEQ ID NO: 2290548 - RNA, 19 nt, Artificial Sequence
  Description of Artificial Sequence: Synthetic oligonucleotide
cuaaacguuuuauuuauua

SEQ ID NO: 2290549 - RNA, 19 nt, Artificial Sequence
  Description of Artificial Sequence: Synthetic oligonucleotide
agcauggcuacuugcuuuc

SEQ ID NO: 2290550 - RNA, 19 nt, Artificial Sequence
  Description of Artificial Sequence: Synthetic oligonucleotide
acgauugucuaauacugaa

SEQ ID NO: 2290551 - RNA, 19 nt, Artificial Sequence
  Description of Artificial Sequence: Synthetic oligonucleotide
acguaggcaaauguuauug

SEQ ID NO: 2290552 - RNA, 19 nt, Artificial Sequence
  Description of Artificial Sequence: Synthetic oligonucleotide
gucuaauacugaaaaggcc

SEQ ID NO: 2290553 - RNA, 19 nt, Artificial Sequence
  Description of Artificial Sequence: Synthetic oligonucleotide
cuuacguaggcaaauguua

SEQ ID NO: 2290554 - RNA, 19 nt, Artificial Sequence
  Description of Artificial Sequence: Synthetic oligonucleotide
uguacaggugcacuguguu

SEQ ID NO: 2290555 - RNA, 19 nt, Artificial Sequence
  Description of Artificial Sequence: Synthetic oligonucleotide
uguaauccugucuuucaau

SEQ ID NO: 2290556 - RNA, 19 nt, Artificial Sequence
  Description of Artificial Sequence: Synthetic oligonucleotide
gacaucuuuagagagggaa

SEQ ID NO: 2290557 - RNA, 19 nt, Artificial Sequence
  Description of Artificial Sequence: Synthetic oligonucleotide
gaaaaggacuccuguagaa

SEQ ID NO: 2290558 - RNA, 19 nt, Artificial Sequence
  Description of Artificial Sequence: Synthetic oligonucleotide
ugccuaaacguuuuauuua

SEQ ID NO: 2290559 - RNA, 19 nt, Artificial Sequence
  Description of Artificial Sequence: Synthetic oligonucleotide
gacuccuguagaacgauug

SEQ ID NO: 2290560 - RNA, 19 nt, Artificial Sequence
  Description of Artificial Sequence: Synthetic oligonucleotide
cugaucauuguuugaaaga

SEQ ID NO: 2290561 - RNA, 19 nt, Artificial Sequence
  Description of Artificial Sequence: Synthetic oligonucleotide
ugugcuaucauugcuuguu

SEQ ID NO: 2290562 - RNA, 19 nt, Artificial Sequence
  Description of Artificial Sequence: Synthetic oligonucleotide
uuuagaacuuccacuucuu

SEQ ID NO: 2290563 - RNA, 19 nt, Artificial Sequence
  Description of Artificial Sequence: Synthetic oligonucleotide
gaguugggacaacugauca

SEQ ID NO: 2290564 - RNA, 19 nt, Artificial Sequence
  Description of Artificial Sequence: Synthetic oligonucleotide
gaaacauggaagagccacc

SEQ ID NO: 2290565 - RNA, 19 nt, Artificial Sequence
  Description of Artificial Sequence: Synthetic oligonucleotide
agaugaacuguuauuuaug

SEQ ID NO: 2290566 - RNA, 19 nt, Artificial Sequence
  Description of Artificial Sequence: Synthetic oligonucleotide
caaauguuauugauauuga

SEQ ID NO: 2290567 - RNA, 19 nt, Artificial Sequence
  Description of Artificial Sequence: Synthetic oligonucleotide
uaaauaccaacgguaaauu

SEQ ID NO: 2290568 - RNA, 19 nt, Artificial Sequence
  Description of Artificial Sequence: Synthetic oligonucleotide
aauccaugggugauaagaa

SEQ ID NO: 2290569 - RNA, 19 nt, Artificial Sequence
  Description of Artificial Sequence: Synthetic oligonucleotide
uugggacaacugaucauug

SEQ ID NO: 2290570 - RNA, 19 nt, Artificial Sequence
  Description of Artificial Sequence: Synthetic oligonucleotide
agcccuguaauaaauaaaa

SEQ ID NO: 2290571 - RNA, 19 nt, Artificial Sequence
  Description of Artificial Sequence: Synthetic oligonucleotide
guguuagaaaugugccagg

SEQ ID NO: 2290572 - RNA, 19 nt, Artificial Sequence
  Description of Artificial Sequence: Synthetic oligonucleotide
gaaaaguggcucuuuagau

SEQ ID NO: 2290573 - RNA, 19 nt, Artificial Sequence
  Description of Artificial Sequence: Synthetic oligonucleotide
uuucucguucaaguaaaga

SEQ ID NO: 2290574 - RNA, 19 nt, Artificial Sequence
  Description of Artificial Sequence: Synthetic oligonucleotide
cauucggcugcuguggagg

SEQ ID NO: 2290575 - RNA, 19 nt, Artificial Sequence
  Description of Artificial Sequence: Synthetic oligonucleotide
aguggcucuuuagaugaac

SEQ ID NO: 2290576 - RNA, 19 nt, Artificial Sequence
  Description of Artificial Sequence: Synthetic oligonucleotide
gcaugacaucuuuagagag

SEQ ID NO: 2290577 - RNA, 19 nt, Artificial Sequence
  Description of Artificial Sequence: Synthetic oligonucleotide
acaacugaucauuguuuga

SEQ ID NO: 2290578 - RNA, 19 nt, Artificial Sequence
  Description of Artificial Sequence: Synthetic oligonucleotide
aaggccaagcacacagccg

SEQ ID NO: 2290579 - RNA, 19 nt, Artificial Sequence
  Description of Artificial Sequence: Synthetic oligonucleotide
uaacuggugacuaccugua

SEQ ID NO: 2290580 - RNA, 19 nt, Artificial Sequence
  Description of Artificial Sequence: Synthetic oligonucleotide
uuauugaaaauagcccaau

SEQ ID NO: 2290581 - RNA, 19 nt, Artificial Sequence
  Description of Artificial Sequence: Synthetic oligonucleotide
aacauucggcugcugugga

SEQ ID NO: 2290582 - RNA, 19 nt, Artificial Sequence
  Description of Artificial Sequence: Synthetic oligonucleotide
cacaauaacuggugacuac

SEQ ID NO: 2290583 - RNA, 19 nt, Artificial Sequence
  Description of Artificial Sequence: Synthetic oligonucleotide
ugcuaucauugcuuguugu

SEQ ID NO: 2290584 - RNA, 19 nt, Artificial Sequence
  Description of Artificial Sequence: Synthetic oligonucleotide
uaaauguaauccugucuuu

SEQ ID NO: 2290585 - RNA, 19 nt, Artificial Sequence
  Description of Artificial Sequence: Synthetic oligonucleotide
acagugcauuuucucguuc

SEQ ID NO: 2290586 - RNA, 19 nt, Artificial Sequence
  Description of Artificial Sequence: Synthetic oligonucleotide
aacgauugucuaauacuga

SEQ ID NO: 2290587 - RNA, 19 nt, Artificial Sequence
  Description of Artificial Sequence: Synthetic oligonucleotide
aacagugcauuuucucguu

SEQ ID NO: 2290588 - RNA, 19 nt, Artificial Sequence
  Description of Artificial Sequence: Synthetic oligonucleotide
acgguaaauugccauuagu

SEQ ID NO: 2290589 - RNA, 19 nt, Artificial Sequence
  Description of Artificial Sequence: Synthetic oligonucleotide
aucaacagugcugcaugac

SEQ ID NO: 2290590 - RNA, 19 nt, Artificial Sequence
  Description of Artificial Sequence: Synthetic oligonucleotide
auagcccaauuauuuauua

SEQ ID NO: 2290591 - RNA, 19 nt, Artificial Sequence
  Description of Artificial Sequence: Synthetic oligonucleotide
acuaccuguacaggugcac

SEQ ID NO: 2290592 - RNA, 19 nt, Artificial Sequence
  Description of Artificial Sequence: Synthetic oligonucleotide
auggcuacuugcuuucuau

SEQ ID NO: 2290593 - RNA, 19 nt, Artificial Sequence
  Description of Artificial Sequence: Synthetic oligonucleotide
ugagaagugcuaccaggau

SEQ ID NO: 2290594 - RNA, 19 nt, Artificial Sequence
  Description of Artificial Sequence: Synthetic oligonucleotide
ugugacaggaaggcucaag

SEQ ID NO: 2290595 - RNA, 19 nt, Artificial Sequence
  Description of Artificial Sequence: Synthetic oligonucleotide
uccuuuacugauacuuaua

SEQ ID NO: 2290596 - RNA, 19 nt, Artificial Sequence
  Description of Artificial Sequence: Synthetic oligonucleotide
gguaaauugccauuagugu

SEQ ID NO: 2290597 - RNA, 19 nt, Artificial Sequence
  Description of Artificial Sequence: Synthetic oligonucleotide
auuuucucguucaaguaaa

SEQ ID NO: 2290598 - RNA, 19 nt, Artificial Sequence
  Description of Artificial Sequence: Synthetic oligonucleotide
auagcagcccuguaauaaa

SEQ ID NO: 2290599 - RNA, 19 nt, Artificial Sequence
  Description of Artificial Sequence: Synthetic oligonucleotide
agagauuuuaacagugcau

SEQ ID NO: 2290600 - RNA, 19 nt, Artificial Sequence
  Description of Artificial Sequence: Synthetic oligonucleotide
uacaggugcacuguguuuu

SEQ ID NO: 2290601 - RNA, 19 nt, Artificial Sequence
  Description of Artificial Sequence: Synthetic oligonucleotide
uauugccuaaacguuuuau

SEQ ID NO: 2290602 - RNA, 19 nt, Artificial Sequence
  Description of Artificial Sequence: Synthetic oligonucleotide
ggcacacaaggaaagauug

SEQ ID NO: 2290603 - RNA, 19 nt, Artificial Sequence
  Description of Artificial Sequence: Synthetic oligonucleotide
uacuuacacuauacaaaau

SEQ ID NO: 2290604 - RNA, 19 nt, Artificial Sequence
  Description of Artificial Sequence: Synthetic oligonucleotide
cauggaagagccaccaaaa

SEQ ID NO: 2290605 - RNA, 19 nt, Artificial Sequence
  Description of Artificial Sequence: Synthetic oligonucleotide
gagauuuuaacagugcauu

SEQ ID NO: 2290606 - RNA, 19 nt, Artificial Sequence
  Description of Artificial Sequence: Synthetic oligonucleotide
cuaauacugaaaaggccaa

SEQ ID NO: 2290607 - RNA, 19 nt, Artificial Sequence
  Description of Artificial Sequence: Synthetic oligonucleotide
ucacaauaacuggugacua

SEQ ID NO: 2290608 - RNA, 19 nt, Artificial Sequence
  Description of Artificial Sequence: Synthetic oligonucleotide
ugaaaauagcagcccugua

SEQ ID NO: 2290609 - RNA, 19 nt, Artificial Sequence
  Description of Artificial Sequence: Synthetic oligonucleotide
gcucaaggugaauccaugg

SEQ ID NO: 2290610 - RNA, 19 nt, Artificial Sequence
  Description of Artificial Sequence: Synthetic oligonucleotide
acuccuguagaacgauugu

SEQ ID NO: 2290611 - RNA, 19 nt, Artificial Sequence
  Description of Artificial Sequence: Synthetic oligonucleotide
ggcuuaagaaagcuuuaug

SEQ ID NO: 2290612 - RNA, 19 nt, Artificial Sequence
  Description of Artificial Sequence: Synthetic oligonucleotide
cgguaaauugccauuagug

SEQ ID NO: 2290613 - RNA, 19 nt, Artificial Sequence
  Description of Artificial Sequence: Synthetic oligonucleotide
ugggacaacugaucauugu

SEQ ID NO: 2290614 - RNA, 19 nt, Artificial Sequence
  Description of Artificial Sequence: Synthetic oligonucleotide
uugcguuggcugaggaggc

SEQ ID NO: 2290615 - RNA, 19 nt, Artificial Sequence
  Description of Artificial Sequence: Synthetic oligonucleotide
uagcccaauuauuuauuau

SEQ ID NO: 2290616 - RNA, 19 nt, Artificial Sequence
  Description of Artificial Sequence: Synthetic oligonucleotide
gaaaacuuacguaggcaaa

SEQ ID NO: 2290617 - RNA, 19 nt, Artificial Sequence
  Description of Artificial Sequence: Synthetic oligonucleotide
acagugcugcaugacaucu

SEQ ID NO: 2290618 - RNA, 19 nt, Artificial Sequence
  Description of Artificial Sequence: Synthetic oligonucleotide
augggugauaagaaacaug

SEQ ID NO: 2290619 - RNA, 19 nt, Artificial Sequence
  Description of Artificial Sequence: Synthetic oligonucleotide
agaaagcuuuaugcugagg

SEQ ID NO: 2290620 - RNA, 19 nt, Artificial Sequence
  Description of Artificial Sequence: Synthetic oligonucleotide
aguugggacaacugaucau

SEQ ID NO: 2290621 - RNA, 19 nt, Artificial Sequence
  Description of Artificial Sequence: Synthetic oligonucleotide
aaggacuccuguagaacga

SEQ ID NO: 2290622 - RNA, 19 nt, Artificial Sequence
  Description of Artificial Sequence: Synthetic oligonucleotide
ccacuaauucuuuuauuug

SEQ ID NO: 2290623 - RNA, 19 nt, Artificial Sequence
  Description of Artificial Sequence: Synthetic oligonucleotide
aagcuggaucuuuacuauu

SEQ ID NO: 2290624 - RNA, 19 nt, Artificial Sequence
  Description of Artificial Sequence: Synthetic oligonucleotide
uggugacuaccuguacagg

SEQ ID NO: 2290625 - RNA, 19 nt, Artificial Sequence
  Description of Artificial Sequence: Synthetic oligonucleotide
uagcagcccuguaauaaau

SEQ ID NO: 2290626 - RNA, 19 nt, Artificial Sequence
  Description of Artificial Sequence: Synthetic oligonucleotide
agggaaaaggacuccugua

SEQ ID NO: 2290627 - RNA, 19 nt, Artificial Sequence
  Description of Artificial Sequence: Synthetic oligonucleotide
uaccaacgguaaauugcca

SEQ ID NO: 2290628 - RNA, 19 nt, Artificial Sequence
  Description of Artificial Sequence: Synthetic oligonucleotide
acacagccgaagcauggcu

SEQ ID NO: 2290629 - RNA, 19 nt, Artificial Sequence
  Description of Artificial Sequence: Synthetic oligonucleotide
ggaaaaggacuccuguaga

SEQ ID NO: 2290630 - RNA, 19 nt, Artificial Sequence
  Description of Artificial Sequence: Synthetic oligonucleotide
uuccacuaauucuuuuauu

SEQ ID NO: 2290631 - RNA, 19 nt, Artificial Sequence
  Description of Artificial Sequence: Synthetic oligonucleotide
acauucggcugcuguggag

SEQ ID NO: 2290632 - RNA, 19 nt, Artificial Sequence
  Description of Artificial Sequence: Synthetic oligonucleotide
uuauugccuaaacguuuua

SEQ ID NO: 2290633 - RNA, 19 nt, Artificial Sequence
  Description of Artificial Sequence: Synthetic oligonucleotide
acuuacguaggcaaauguu

SEQ ID NO: 2290634 - RNA, 19 nt, Artificial Sequence
  Description of Artificial Sequence: Synthetic oligonucleotide
caacugaucauuguuugaa

SEQ ID NO: 2290635 - RNA, 19 nt, Artificial Sequence
  Description of Artificial Sequence: Synthetic oligonucleotide
cguuuuauuuauuaaaugu

SEQ ID NO: 2290636 - RNA, 19 nt, Artificial Sequence
  Description of Artificial Sequence: Synthetic oligonucleotide
gccaggauucuuuuguuca

SEQ ID NO: 2290637 - RNA, 19 nt, Artificial Sequence
  Description of Artificial Sequence: Synthetic oligonucleotide
auagaacaccaguggcaca

SEQ ID NO: 2290638 - RNA, 19 nt, Artificial Sequence
  Description of Artificial Sequence: Synthetic oligonucleotide
gaaagauugcuucgguuuu

SEQ ID NO: 2290639 - RNA, 19 nt, Artificial Sequence
  Description of Artificial Sequence: Synthetic oligonucleotide
gaagugcuaccaggauugg

SEQ ID NO: 2290640 - RNA, 19 nt, Artificial Sequence
  Description of Artificial Sequence: Synthetic oligonucleotide
gcugugcuaucauugcuug

SEQ ID NO: 2290641 - RNA, 19 nt, Artificial Sequence
  Description of Artificial Sequence: Synthetic oligonucleotide
ucguucaaguaaagaguuu

SEQ ID NO: 2290642 - RNA, 19 nt, Artificial Sequence
  Description of Artificial Sequence: Synthetic oligonucleotide
cuccuguagaacgauuguc

SEQ ID NO: 2290643 - RNA, 19 nt, Artificial Sequence
  Description of Artificial Sequence: Synthetic oligonucleotide
caauuauugccuaaacguu

SEQ ID NO: 2290644 - RNA, 19 nt, Artificial Sequence
  Description of Artificial Sequence: Synthetic oligonucleotide
ugacaucuuuagagaggga

SEQ ID NO: 2290645 - RNA, 19 nt, Artificial Sequence
  Description of Artificial Sequence: Synthetic oligonucleotide
gauuggccuguugggcugg

SEQ ID NO: 2290646 - RNA, 19 nt, Artificial Sequence
  Description of Artificial Sequence: Synthetic oligonucleotide
guaauccugucuuucaauu

SEQ ID NO: 2290647 - RNA, 19 nt, Artificial Sequence
  Description of Artificial Sequence: Synthetic oligonucleotide
ugcuuucuauaaaguggau

SEQ ID NO: 2290648 - RNA, 19 nt, Artificial Sequence
  Description of Artificial Sequence: Synthetic oligonucleotide
ggauagaacaccaguggca

SEQ ID NO: 2290649 - RNA, 19 nt, Artificial Sequence
  Description of Artificial Sequence: Synthetic oligonucleotide
aggcugugcuaucauugcu

SEQ ID NO: 2290650 - RNA, 19 nt, Artificial Sequence
  Description of Artificial Sequence: Synthetic oligonucleotide
aauugccauuaguguuaga

SEQ ID NO: 2290651 - RNA, 19 nt, Artificial Sequence
  Description of Artificial Sequence: Synthetic oligonucleotide
aagaaacauggaagagcca

SEQ ID NO: 2290652 - RNA, 19 nt, Artificial Sequence
  Description of Artificial Sequence: Synthetic oligonucleotide
ggaaagauugcuucgguuu

SEQ ID NO: 2290653 - RNA, 19 nt, Artificial Sequence
  Description of Artificial Sequence: Synthetic oligonucleotide
cuguagaacgauugucuaa

SEQ ID NO: 2290654 - RNA, 19 nt, Artificial Sequence
  Description of Artificial Sequence: Synthetic oligonucleotide
auuguuugaaagagauuuu

SEQ ID NO: 2290655 - RNA, 19 nt, Artificial Sequence
  Description of Artificial Sequence: Synthetic oligonucleotide
gagaagugcuaccaggauu

SEQ ID NO: 2290656 - RNA, 19 nt, Artificial Sequence
  Description of Artificial Sequence: Synthetic oligonucleotide
agagggaaaaggacuccug

SEQ ID NO: 2290657 - RNA, 19 nt, Artificial Sequence
  Description of Artificial Sequence: Synthetic oligonucleotide
gccauuaguguuagaaaug

SEQ ID NO: 2290658 - RNA, 19 nt, Artificial Sequence
  Description of Artificial Sequence: Synthetic oligonucleotide
augugccaggauucuuuug

SEQ ID NO: 2290659 - RNA, 19 nt, Artificial Sequence
  Description of Artificial Sequence: Synthetic oligonucleotide
aguggcacacaaggaaaga

SEQ ID NO: 2290660 - RNA, 19 nt, Artificial Sequence
  Description of Artificial Sequence: Synthetic oligonucleotide
ccaagcacacagccgaagc

SEQ ID NO: 2290661 - RNA, 19 nt, Artificial Sequence
  Description of Artificial Sequence: Synthetic oligonucleotide
cauucaagcuggaucuuua

SEQ ID NO: 2290662 - RNA, 19 nt, Artificial Sequence
  Description of Artificial Sequence: Synthetic oligonucleotide
cucguucaaguaaagaguu

SEQ ID NO: 2290663 - RNA, 19 nt, Artificial Sequence
  Description of Artificial Sequence: Synthetic oligonucleotide
uuuccuuaaugaggcuuaa

SEQ ID NO: 2290664 - RNA, 19 nt, Artificial Sequence
  Description of Artificial Sequence: Synthetic oligonucleotide
cuggaucuuuacuauugaa

SEQ ID NO: 2290665 - RNA, 19 nt, Artificial Sequence
  Description of Artificial Sequence: Synthetic oligonucleotide
aggcuuaagaaagcuuuau

SEQ ID NO: 2290666 - RNA, 19 nt, Artificial Sequence
  Description of Artificial Sequence: Synthetic oligonucleotide
gagguugcguuggcugagg

SEQ ID NO: 2290667 - RNA, 19 nt, Artificial Sequence
  Description of Artificial Sequence: Synthetic oligonucleotide
cacacaaggaaagauugcu

SEQ ID NO: 2290668 - RNA, 19 nt, Artificial Sequence
  Description of Artificial Sequence: Synthetic oligonucleotide
ggugacuaccuguacaggu

SEQ ID NO: 2290669 - RNA, 19 nt, Artificial Sequence
  Description of Artificial Sequence: Synthetic oligonucleotide
gguugcguuggcugaggag

SEQ ID NO: 2290670 - RNA, 19 nt, Artificial Sequence
  Description of Artificial Sequence: Synthetic oligonucleotide
uggcuacuugcuuucuaua

SEQ ID NO: 2290671 - RNA, 19 nt, Artificial Sequence
  Description of Artificial Sequence: Synthetic oligonucleotide
cucuuuagaugaacuguua

SEQ ID NO: 2290672 - RNA, 19 nt, Artificial Sequence
  Description of Artificial Sequence: Synthetic oligonucleotide
accuguacaggugcacugu

SEQ ID NO: 2290673 - RNA, 19 nt, Artificial Sequence
  Description of Artificial Sequence: Synthetic oligonucleotide
gcagcccuguaauaaauaa

SEQ ID NO: 2290674 - RNA, 19 nt, Artificial Sequence
  Description of Artificial Sequence: Synthetic oligonucleotide
agcacacagccgaagcaug

SEQ ID NO: 2290675 - RNA, 19 nt, Artificial Sequence
  Description of Artificial Sequence: Synthetic oligonucleotide
uaccaggauuggccuguug

SEQ ID NO: 2290676 - RNA, 19 nt, Artificial Sequence
  Description of Artificial Sequence: Synthetic oligonucleotide
ggaaacauucggcugcugu

SEQ ID NO: 2290677 - RNA, 19 nt, Artificial Sequence
  Description of Artificial Sequence: Synthetic oligonucleotide
caauaacuggugacuaccu

SEQ ID NO: 2290678 - RNA, 19 nt, Artificial Sequence
  Description of Artificial Sequence: Synthetic oligonucleotide
cagcccuguaauaaauaaa

SEQ ID NO: 2290679 - RNA, 19 nt, Artificial Sequence
  Description of Artificial Sequence: Synthetic oligonucleotide
guugggacaacugaucauu

SEQ ID NO: 2290680 - RNA, 19 nt, Artificial Sequence
  Description of Artificial Sequence: Synthetic oligonucleotide
cuuuaugcugaggaaacau

SEQ ID NO: 2290681 - RNA, 19 nt, Artificial Sequence
  Description of Artificial Sequence: Synthetic oligonucleotide
caagcuggaucuuuacuau

SEQ ID NO: 2290682 - RNA, 19 nt, Artificial Sequence
  Description of Artificial Sequence: Synthetic oligonucleotide
ccaugggugauaagaaaca

SEQ ID NO: 2290683 - RNA, 19 nt, Artificial Sequence
  Description of Artificial Sequence: Synthetic oligonucleotide
caacagugcugcaugacau

SEQ ID NO: 2290684 - RNA, 19 nt, Artificial Sequence
  Description of Artificial Sequence: Synthetic oligonucleotide
ccacuucuucucuuacugc

SEQ ID NO: 2290685 - RNA, 19 nt, Artificial Sequence
  Description of Artificial Sequence: Synthetic oligonucleotide
gcugcaugacaucuuuaga

SEQ ID NO: 2290686 - RNA, 19 nt, Artificial Sequence
  Description of Artificial Sequence: Synthetic oligonucleotide
aggugaauccaugggugau

SEQ ID NO: 2290687 - RNA, 19 nt, Artificial Sequence
  Description of Artificial Sequence: Synthetic oligonucleotide
aggaggcugugcuaucauu

SEQ ID NO: 2290688 - RNA, 19 nt, Artificial Sequence
  Description of Artificial Sequence: Synthetic oligonucleotide
gcuggaucuuuacuauuga

SEQ ID NO: 2290689 - RNA, 19 nt, Artificial Sequence
  Description of Artificial Sequence: Synthetic oligonucleotide
agguugcguuggcugagga

SEQ ID NO: 2290690 - RNA, 19 nt, Artificial Sequence
  Description of Artificial Sequence: Synthetic oligonucleotide
gcacacagccgaagcaugg

SEQ ID NO: 2290691 - RNA, 19 nt, Artificial Sequence
  Description of Artificial Sequence: Synthetic oligonucleotide
gagagggaaaaggacuccu

SEQ ID NO: 2290692 - RNA, 19 nt, Artificial Sequence
  Description of Artificial Sequence: Synthetic oligonucleotide
gccuaaacguuuuauuuau

SEQ ID NO: 2290693 - RNA, 19 nt, Artificial Sequence
  Description of Artificial Sequence: Synthetic oligonucleotide
guagaacgauugucuaaua

SEQ ID NO: 2290694 - RNA, 19 nt, Artificial Sequence
  Description of Artificial Sequence: Synthetic oligonucleotide
gcuuucuauaaaguggaua

SEQ ID NO: 2290695 - RNA, 19 nt, Artificial Sequence
  Description of Artificial Sequence: Synthetic oligonucleotide
augaggcuuaagaaagcuu

SEQ ID NO: 2290696 - RNA, 19 nt, Artificial Sequence
  Description of Artificial Sequence: Synthetic oligonucleotide
cauuguucauguacauuau

SEQ ID NO: 2290697 - RNA, 19 nt, Artificial Sequence
  Description of Artificial Sequence: Synthetic oligonucleotide
gcacacaaggaaagauugc

SEQ ID NO: 2290698 - RNA, 19 nt, Artificial Sequence
  Description of Artificial Sequence: Synthetic oligonucleotide
gacuaccuguacaggugca

SEQ ID NO: 2290699 - RNA, 19 nt, Artificial Sequence
  Description of Artificial Sequence: Synthetic oligonucleotide
aggacuccuguagaacgau

SEQ ID NO: 2290700 - RNA, 19 nt, Artificial Sequence
  Description of Artificial Sequence: Synthetic oligonucleotide
gcccuguaauaaauaaaac

SEQ ID NO: 2290701 - RNA, 19 nt, Artificial Sequence
  Description of Artificial Sequence: Synthetic oligonucleotide
guggcucuuuagaugaacu

SEQ ID NO: 2290702 - RNA, 19 nt, Artificial Sequence
  Description of Artificial Sequence: Synthetic oligonucleotide
agaacaccaguggcacaca

SEQ ID NO: 2290703 - RNA, 19 nt, Artificial Sequence
  Description of Artificial Sequence: Synthetic oligonucleotide
aggcucaaggugaauccau

SEQ ID NO: 2290704 - RNA, 19 nt, Artificial Sequence
  Description of Artificial Sequence: Synthetic oligonucleotide
ccuuuagaacuuccacuuc

SEQ ID NO: 2290705 - RNA, 19 nt, Artificial Sequence
  Description of Artificial Sequence: Synthetic oligonucleotide
gugcuaccaggauuggccu

SEQ ID NO: 2290706 - RNA, 19 nt, Artificial Sequence
  Description of Artificial Sequence: Synthetic oligonucleotide
cauggcuacuugcuuucua

SEQ ID NO: 2290707 - RNA, 19 nt, Artificial Sequence
  Description of Artificial Sequence: Synthetic oligonucleotide
ccaguggcacacaaggaaa

SEQ ID NO: 2290708 - RNA, 19 nt, Artificial Sequence
  Description of Artificial Sequence: Synthetic oligonucleotide
gaggaaacauucggcugcu

SEQ ID NO: 2290709 - RNA, 19 nt, Artificial Sequence
  Description of Artificial Sequence: Synthetic oligonucleotide
caugggugauaagaaacau

SEQ ID NO: 2290710 - RNA, 19 nt, Artificial Sequence
  Description of Artificial Sequence: Synthetic oligonucleotide
gcuaucauugcuuguuguu

SEQ ID NO: 2290711 - RNA, 19 nt, Artificial Sequence
  Description of Artificial Sequence: Synthetic oligonucleotide
gcccaauuauuuauuauau

SEQ ID NO: 2290712 - RNA, 19 nt, Artificial Sequence
  Description of Artificial Sequence: Synthetic oligonucleotide
gaaaugugccaggauucuu

SEQ ID NO: 2290713 - RNA, 19 nt, Artificial Sequence
  Description of Artificial Sequence: Synthetic oligonucleotide
gcuuuaugcugaggaaaca

SEQ ID NO: 2290714 - RNA, 19 nt, Artificial Sequence
  Description of Artificial Sequence: Synthetic oligonucleotide
ccuguagaacgauugucua

SEQ ID NO: 2290715 - RNA, 19 nt, Artificial Sequence
  Description of Artificial Sequence: Synthetic oligonucleotide
cuaccuguacaggugcacu

SEQ ID NO: 2290716 - RNA, 19 nt, Artificial Sequence
  Description of Artificial Sequence: Synthetic oligonucleotide
cguaggcaaauguuauuga

SEQ ID NO: 2290717 - RNA, 19 nt, Artificial Sequence
  Description of Artificial Sequence: Synthetic oligonucleotide
ggugaauccaugggugaua

SEQ ID NO: 2290718 - RNA, 19 nt, Artificial Sequence
  Description of Artificial Sequence: Synthetic oligonucleotide
guacaggugcacuguguuu

SEQ ID NO: 2290719 - RNA, 19 nt, Artificial Sequence
  Description of Artificial Sequence: Synthetic oligonucleotide
ggacaacugaucauuguuu

SEQ ID NO: 2290720 - RNA, 19 nt, Artificial Sequence
  Description of Artificial Sequence: Synthetic oligonucleotide
cgauugucuaauacugaaa

SEQ ID NO: 2290721 - RNA, 19 nt, Artificial Sequence
  Description of Artificial Sequence: Synthetic oligonucleotide
caauuccuuuacugauacu

SEQ ID NO: 2290722 - RNA, 19 nt, Artificial Sequence
  Description of Artificial Sequence: Synthetic oligonucleotide
gcguuggcugaggaggcug

SEQ ID NO: 2290723 - RNA, 19 nt, Artificial Sequence
  Description of Artificial Sequence: Synthetic oligonucleotide
gcucuuuagaugaacuguu

SEQ ID NO: 2290724 - RNA, 19 nt, Artificial Sequence
  Description of Artificial Sequence: Synthetic oligonucleotide
aggaaggcucaaggugaau

SEQ ID NO: 2290725 - RNA, 19 nt, Artificial Sequence
  Description of Artificial Sequence: Synthetic oligonucleotide
cugugcuaucauugcuugu

SEQ ID NO: 2290726 - RNA, 19 nt, Artificial Sequence
  Description of Artificial Sequence: Synthetic oligonucleotide
gcuaccaggauuggccugu

SEQ ID NO: 2290727 - RNA, 19 nt, Artificial Sequence
  Description of Artificial Sequence: Synthetic oligonucleotide
gugccaggauucuuuuguu

SEQ ID NO: 2290728 - RNA, 19 nt, Artificial Sequence
  Description of Artificial Sequence: Synthetic oligonucleotide
cugugacauuguucaugua

SEQ ID NO: 2290729 - RNA, 19 nt, Artificial Sequence
  Description of Artificial Sequence: Synthetic oligonucleotide
ggcugaggaggcugugcua

SEQ ID NO: 2290730 - RNA, 19 nt, Artificial Sequence
  Description of Artificial Sequence: Synthetic oligonucleotide
ccuaaacguuuuauuuauu

SEQ ID NO: 2290731 - RNA, 19 nt, Artificial Sequence
  Description of Artificial Sequence: Synthetic oligonucleotide
gccuguugggcugggaguu

SEQ ID NO: 2290732 - RNA, 19 nt, Artificial Sequence
  Description of Artificial Sequence: Synthetic oligonucleotide
ggccaagcacacagccgaa

SEQ ID NO: 2290733 - RNA, 19 nt, Artificial Sequence
  Description of Artificial Sequence: Synthetic oligonucleotide
cagccgaagcauggcuacu

SEQ ID NO: 2290734 - RNA, 19 nt, Artificial Sequence
  Description of Artificial Sequence: Synthetic oligonucleotide
ggacuccuguagaacgauu

SEQ ID NO: 2290735 - RNA, 19 nt, Artificial Sequence
  Description of Artificial Sequence: Synthetic oligonucleotide
gcauggcuacuugcuuucu

SEQ ID NO: 2290736 - RNA, 19 nt, Artificial Sequence
  Description of Artificial Sequence: Synthetic oligonucleotide
cuaccaggauuggccuguu

SEQ ID NO: 2290737 - RNA, 19 nt, Artificial Sequence
  Description of Artificial Sequence: Synthetic oligonucleotide
gaaguguaaagacagaggg

SEQ ID NO: 2290738 - RNA, 19 nt, Artificial Sequence
  Description of Artificial Sequence: Synthetic oligonucleotide
ucuaucaaaacacagaaau

SEQ ID NO: 2290739 - RNA, 19 nt, Artificial Sequence
  Description of Artificial Sequence: Synthetic oligonucleotide
aaagucaacauauucucag

SEQ ID NO: 2290740 - RNA, 19 nt, Artificial Sequence
  Description of Artificial Sequence: Synthetic oligonucleotide
agaaauacggcacacgcac

SEQ ID NO: 2290741 - RNA, 19 nt, Artificial Sequence
  Description of Artificial Sequence: Synthetic oligonucleotide
uucacaaagggacagagga

SEQ ID NO: 2290742 - RNA, 19 nt, Artificial Sequence
  Description of Artificial Sequence: Synthetic oligonucleotide
acagaaauacggcacacgc

SEQ ID NO: 2290743 - RNA, 19 nt, Artificial Sequence
  Description of Artificial Sequence: Synthetic oligonucleotide
cuaaaguggagcaaaaccc

SEQ ID NO: 2290744 - RNA, 19 nt, Artificial Sequence
  Description of Artificial Sequence: Synthetic oligonucleotide
aaaacccaauuccaacucc

SEQ ID NO: 2290745 - RNA, 19 nt, Artificial Sequence
  Description of Artificial Sequence: Synthetic oligonucleotide
aaaacacagaaauacggca

SEQ ID NO: 2290746 - RNA, 19 nt, Artificial Sequence
  Description of Artificial Sequence: Synthetic oligonucleotide
uuucuaucaaaacacagaa

SEQ ID NO: 2290747 - RNA, 19 nt, Artificial Sequence
  Description of Artificial Sequence: Synthetic oligonucleotide
aacauauucucaguauccc

SEQ ID NO: 2290748 - RNA, 19 nt, Artificial Sequence
  Description of Artificial Sequence: Synthetic oligonucleotide
ugacuuucuaucaaaacac

SEQ ID NO: 2290749 - RNA, 19 nt, Artificial Sequence
  Description of Artificial Sequence: Synthetic oligonucleotide
uuaaagucaacauauucuc

SEQ ID NO: 2290750 - RNA, 19 nt, Artificial Sequence
  Description of Artificial Sequence: Synthetic oligonucleotide
aaugaggugacaguuucac

SEQ ID NO: 2290751 - RNA, 19 nt, Artificial Sequence
  Description of Artificial Sequence: Synthetic oligonucleotide
  modified_base (2)..(2): a, c, u, g, unknown or other
unaggggccugcuagaagg

SEQ ID NO: 2290752 - RNA, 19 nt, Artificial Sequence
  Description of Artificial Sequence: Synthetic oligonucleotide
uggagcaaaacccaauucc

SEQ ID NO: 2290753 - RNA, 19 nt, Artificial Sequence
  Description of Artificial Sequence: Synthetic oligonucleotide
aaacagaagccccaaagga

SEQ ID NO: 2290754 - RNA, 19 nt, Artificial Sequence
  Description of Artificial Sequence: Synthetic oligonucleotide
gacaguuucacaaagggac

SEQ ID NO: 2290755 - RNA, 19 nt, Artificial Sequence
  Description of Artificial Sequence: Synthetic oligonucleotide
uguccagagacacacugcg

SEQ ID NO: 2290756 - RNA, 19 nt, Artificial Sequence
  Description of Artificial Sequence: Synthetic oligonucleotide
cagcauaaaauucugcugg

SEQ ID NO: 2290757 - RNA, 19 nt, Artificial Sequence
  Description of Artificial Sequence: Synthetic oligonucleotide
aaacacagaaauacggcac

SEQ ID NO: 2290758 - RNA, 19 nt, Artificial Sequence
  Description of Artificial Sequence: Synthetic oligonucleotide
cuauuuacagcuccgcugg

SEQ ID NO: 2290759 - RNA, 19 nt, Artificial Sequence
  Description of Artificial Sequence: Synthetic oligonucleotide
acauauucucaguaucccc

SEQ ID NO: 2290760 - RNA, 19 nt, Artificial Sequence
  Description of Artificial Sequence: Synthetic oligonucleotide
ucagguuuccacaaaugcc

SEQ ID NO: 2290761 - RNA, 19 nt, Artificial Sequence
  Description of Artificial Sequence: Synthetic oligonucleotide
ugcuucaucagcauaaaau

SEQ ID NO: 2290762 - RNA, 19 nt, Artificial Sequence
  Description of Artificial Sequence: Synthetic oligonucleotide
aacaucaaugaggugacag

SEQ ID NO: 2290763 - RNA, 19 nt, Artificial Sequence
  Description of Artificial Sequence: Synthetic oligonucleotide
auaaaauucugcuggguca

SEQ ID NO: 2290764 - RNA, 19 nt, Artificial Sequence
  Description of Artificial Sequence: Synthetic oligonucleotide
agcaaaacccaauuccaac

SEQ ID NO: 2290765 - RNA, 19 nt, Artificial Sequence
  Description of Artificial Sequence: Synthetic oligonucleotide
aaacauagcugaaauuggg

SEQ ID NO: 2290766 - RNA, 19 nt, Artificial Sequence
  Description of Artificial Sequence: Synthetic oligonucleotide
aucagcauaaaauucugcu

SEQ ID NO: 2290767 - RNA, 19 nt, Artificial Sequence
  Description of Artificial Sequence: Synthetic oligonucleotide
aaagcgcagcucuauuuac

SEQ ID NO: 2290768 - RNA, 19 nt, Artificial Sequence
  Description of Artificial Sequence: Synthetic oligonucleotide
uaaaguggagcaaaaccca

SEQ ID NO: 2290769 - RNA, 19 nt, Artificial Sequence
  Description of Artificial Sequence: Synthetic oligonucleotide
ugaggugacaguuucacaa

SEQ ID NO: 2290770 - RNA, 19 nt, Artificial Sequence
  Description of Artificial Sequence: Synthetic oligonucleotide
caaacauagcugaaauugg

SEQ ID NO: 2290771 - RNA, 19 nt, Artificial Sequence
  Description of Artificial Sequence: Synthetic oligonucleotide
gacaaauggaccuggaaca

SEQ ID NO: 2290772 - RNA, 19 nt, Artificial Sequence
  Description of Artificial Sequence: Synthetic oligonucleotide
uggaccuggaacaucaaug

SEQ ID NO: 2290773 - RNA, 19 nt, Artificial Sequence
  Description of Artificial Sequence: Synthetic oligonucleotide
aaugccacuccccacacaa

SEQ ID NO: 2290774 - RNA, 19 nt, Artificial Sequence
  Description of Artificial Sequence: Synthetic oligonucleotide
caaaccggcacaaaagcgc

SEQ ID NO: 2290775 - RNA, 19 nt, Artificial Sequence
  Description of Artificial Sequence: Synthetic oligonucleotide
aacauagcugaaauugggg

SEQ ID NO: 2290776 - RNA, 19 nt, Artificial Sequence
  Description of Artificial Sequence: Synthetic oligonucleotide
aguauccccagcuccagac

SEQ ID NO: 2290777 - RNA, 19 nt, Artificial Sequence
  Description of Artificial Sequence: Synthetic oligonucleotide
aacacagaaauacggcaca

SEQ ID NO: 2290778 - RNA, 19 nt, Artificial Sequence
  Description of Artificial Sequence: Synthetic oligonucleotide
aacacuggagaaaagaaaa

SEQ ID NO: 2290779 - RNA, 19 nt, Artificial Sequence
  Description of Artificial Sequence: Synthetic oligonucleotide
gugacuuucuaucaaaaca

SEQ ID NO: 2290780 - RNA, 19 nt, Artificial Sequence
  Description of Artificial Sequence: Synthetic oligonucleotide
ugcuagaaggguagguugg

SEQ ID NO: 2290781 - RNA, 19 nt, Artificial Sequence
  Description of Artificial Sequence: Synthetic oligonucleotide
caccauaagguucugcugg

SEQ ID NO: 2290782 - RNA, 19 nt, Artificial Sequence
  Description of Artificial Sequence: Synthetic oligonucleotide
uguaaagacagagggaaac

SEQ ID NO: 2290783 - RNA, 19 nt, Artificial Sequence
  Description of Artificial Sequence: Synthetic oligonucleotide
auucuuaaagucaacauau

SEQ ID NO: 2290784 - RNA, 19 nt, Artificial Sequence
  Description of Artificial Sequence: Synthetic oligonucleotide
cacaaagggacagaggacg

SEQ ID NO: 2290785 - RNA, 19 nt, Artificial Sequence
  Description of Artificial Sequence: Synthetic oligonucleotide
aguguaaagacagagggaa

SEQ ID NO: 2290786 - RNA, 19 nt, Artificial Sequence
  Description of Artificial Sequence: Synthetic oligonucleotide
uccagagacacacugcgcu

SEQ ID NO: 2290787 - RNA, 19 nt, Artificial Sequence
  Description of Artificial Sequence: Synthetic oligonucleotide
ugggguauaggacuucacc

SEQ ID NO: 2290788 - RNA, 19 nt, Artificial Sequence
  Description of Artificial Sequence: Synthetic oligonucleotide
uaaagacagagggaaacag

SEQ ID NO: 2290789 - RNA, 19 nt, Artificial Sequence
  Description of Artificial Sequence: Synthetic oligonucleotide
ucaucagcauaaaauucug

SEQ ID NO: 2290790 - RNA, 19 nt, Artificial Sequence
  Description of Artificial Sequence: Synthetic oligonucleotide
ucucaguauccccagcucc

SEQ ID NO: 2290791 - RNA, 19 nt, Artificial Sequence
  Description of Artificial Sequence: Synthetic oligonucleotide
uugugugugacuuucuauc

SEQ ID NO: 2290792 - RNA, 19 nt, Artificial Sequence
  Description of Artificial Sequence: Synthetic oligonucleotide
cuuaaagucaacauauucu

SEQ ID NO: 2290793 - RNA, 19 nt, Artificial Sequence
  Description of Artificial Sequence: Synthetic oligonucleotide
gcuaaaguggagcaaaacc

SEQ ID NO: 2290794 - RNA, 19 nt, Artificial Sequence
  Description of Artificial Sequence: Synthetic oligonucleotide
cuuucuaucaaaacacaga

SEQ ID NO: 2290795 - RNA, 19 nt, Artificial Sequence
  Description of Artificial Sequence: Synthetic oligonucleotide
agcauaaaauucugcuggg

SEQ ID NO: 2290796 - RNA, 19 nt, Artificial Sequence
  Description of Artificial Sequence: Synthetic oligonucleotide
aucaaaacacagaaauacg

SEQ ID NO: 2290797 - RNA, 19 nt, Artificial Sequence
  Description of Artificial Sequence: Synthetic oligonucleotide
agacacacugcgcugccgc

SEQ ID NO: 2290798 - RNA, 19 nt, Artificial Sequence
  Description of Artificial Sequence: Synthetic oligonucleotide
auacggcacacgcacaaac

SEQ ID NO: 2290799 - RNA, 19 nt, Artificial Sequence
  Description of Artificial Sequence: Synthetic oligonucleotide
aauucugcugggucaugag

SEQ ID NO: 2290800 - RNA, 19 nt, Artificial Sequence
  Description of Artificial Sequence: Synthetic oligonucleotide
aaauacggcacacgcacaa

SEQ ID NO: 2290801 - RNA, 19 nt, Artificial Sequence
  Description of Artificial Sequence: Synthetic oligonucleotide
  modified_base (6)..(6): a, c, u, g, unknown or other
cuucunaggggccugcuag

SEQ ID NO: 2290802 - RNA, 19 nt, Artificial Sequence
  Description of Artificial Sequence: Synthetic oligonucleotide
aaaagcgcagcucuauuua

SEQ ID NO: 2290803 - RNA, 19 nt, Artificial Sequence
  Description of Artificial Sequence: Synthetic oligonucleotide
  modified_base (13)..(13): a, c, u, g, unknown or other
cagaccucuucunaggggc

SEQ ID NO: 2290804 - RNA, 19 nt, Artificial Sequence
  Description of Artificial Sequence: Synthetic oligonucleotide
gaggucagcaugucaacag

SEQ ID NO: 2290805 - RNA, 19 nt, Artificial Sequence
  Description of Artificial Sequence: Synthetic oligonucleotide
aguccugguggcuaaagug

SEQ ID NO: 2290806 - RNA, 19 nt, Artificial Sequence
  Description of Artificial Sequence: Synthetic oligonucleotide
ugugacuuucuaucaaaac

SEQ ID NO: 2290807 - RNA, 19 nt, Artificial Sequence
  Description of Artificial Sequence: Synthetic oligonucleotide
ugugugugacuuucuauca

SEQ ID NO: 2290808 - RNA, 19 nt, Artificial Sequence
  Description of Artificial Sequence: Synthetic oligonucleotide
cacaaaccggcacaaaagc

SEQ ID NO: 2290809 - RNA, 19 nt, Artificial Sequence
  Description of Artificial Sequence: Synthetic oligonucleotide
aagucaacauauucucagu

SEQ ID NO: 2290810 - RNA, 19 nt, Artificial Sequence
  Description of Artificial Sequence: Synthetic oligonucleotide
aauuccaacuccccaccca

SEQ ID NO: 2290811 - RNA, 19 nt, Artificial Sequence
  Description of Artificial Sequence: Synthetic oligonucleotide
acagagggaaacagaagcc

SEQ ID NO: 2290812 - RNA, 19 nt, Artificial Sequence
  Description of Artificial Sequence: Synthetic oligonucleotide
uuuacagcuccgcuggcac

SEQ ID NO: 2290813 - RNA, 19 nt, Artificial Sequence
  Description of Artificial Sequence: Synthetic oligonucleotide
agagaaaccaggaggggac

SEQ ID NO: 2290814 - RNA, 19 nt, Artificial Sequence
  Description of Artificial Sequence: Synthetic oligonucleotide
aggccauccaucccaacac

SEQ ID NO: 2290815 - RNA, 19 nt, Artificial Sequence
  Description of Artificial Sequence: Synthetic oligonucleotide
aagacagagggaaacagaa

SEQ ID NO: 2290816 - RNA, 19 nt, Artificial Sequence
  Description of Artificial Sequence: Synthetic oligonucleotide
uccacaaaugccacucccc

SEQ ID NO: 2290817 - RNA, 19 nt, Artificial Sequence
  Description of Artificial Sequence: Synthetic oligonucleotide
ugggacaccauaagguucu

SEQ ID NO: 2290818 - RNA, 19 nt, Artificial Sequence
  Description of Artificial Sequence: Synthetic oligonucleotide
  modified_base (16)..(16): a, c, u, g, unknown or other
cuccagaccucuucunagg

SEQ ID NO: 2290819 - RNA, 19 nt, Artificial Sequence
  Description of Artificial Sequence: Synthetic oligonucleotide
auaagguucugcuggggug

SEQ ID NO: 2290820 - RNA, 19 nt, Artificial Sequence
  Description of Artificial Sequence: Synthetic oligonucleotide
acggcacacgcacaaaccg

SEQ ID NO: 2290821 - RNA, 19 nt, Artificial Sequence
  Description of Artificial Sequence: Synthetic oligonucleotide
agagggaaacagaagcccc

SEQ ID NO: 2290822 - RNA, 19 nt, Artificial Sequence
  Description of Artificial Sequence: Synthetic oligonucleotide
cauauucucaguaucccca

SEQ ID NO: 2290823 - RNA, 19 nt, Artificial Sequence
  Description of Artificial Sequence: Synthetic oligonucleotide
ucaugaggccuuguggugg

SEQ ID NO: 2290824 - RNA, 19 nt, Artificial Sequence
  Description of Artificial Sequence: Synthetic oligonucleotide
ccaaacauagcugaaauug

SEQ ID NO: 2290825 - RNA, 19 nt, Artificial Sequence
  Description of Artificial Sequence: Synthetic oligonucleotide
uuucuuuugugugugacuu

SEQ ID NO: 2290826 - RNA, 19 nt, Artificial Sequence
  Description of Artificial Sequence: Synthetic oligonucleotide
auucucaguauccccagcu

SEQ ID NO: 2290827 - RNA, 19 nt, Artificial Sequence
  Description of Artificial Sequence: Synthetic oligonucleotide
uaccccuggacccaggcca

SEQ ID NO: 2290828 - RNA, 19 nt, Artificial Sequence
  Description of Artificial Sequence: Synthetic oligonucleotide
uagaaggguagguuggcca

SEQ ID NO: 2290829 - RNA, 19 nt, Artificial Sequence
  Description of Artificial Sequence: Synthetic oligonucleotide
ugugugacuuucuaucaaa

SEQ ID NO: 2290830 - RNA, 19 nt, Artificial Sequence
  Description of Artificial Sequence: Synthetic oligonucleotide
cagguuuccacaaaugcca

SEQ ID NO: 2290831 - RNA, 19 nt, Artificial Sequence
  Description of Artificial Sequence: Synthetic oligonucleotide
agacucuugccgcuucccc

SEQ ID NO: 2290832 - RNA, 19 nt, Artificial Sequence
  Description of Artificial Sequence: Synthetic oligonucleotide
agggugggacaccauaagg

SEQ ID NO: 2290833 - RNA, 19 nt, Artificial Sequence
  Description of Artificial Sequence: Synthetic oligonucleotide
agcaugucaacagggagag

SEQ ID NO: 2290834 - RNA, 19 nt, Artificial Sequence
  Description of Artificial Sequence: Synthetic oligonucleotide
guuucacaaagggacagag

SEQ ID NO: 2290835 - RNA, 19 nt, Artificial Sequence
  Description of Artificial Sequence: Synthetic oligonucleotide
ggacaaauggaccuggaac

SEQ ID NO: 2290836 - RNA, 19 nt, Artificial Sequence
  Description of Artificial Sequence: Synthetic oligonucleotide
acaucaaugaggugacagu

SEQ ID NO: 2290837 - RNA, 19 nt, Artificial Sequence
  Description of Artificial Sequence: Synthetic oligonucleotide
uuugugugugacuuucuau

SEQ ID NO: 2290838 - RNA, 19 nt, Artificial Sequence
  Description of Artificial Sequence: Synthetic oligonucleotide
agcgcagcucuauuuacag

SEQ ID NO: 2290839 - RNA, 19 nt, Artificial Sequence
  Description of Artificial Sequence: Synthetic oligonucleotide
uucuaucaaaacacagaaa

SEQ ID NO: 2290840 - RNA, 19 nt, Artificial Sequence
  Description of Artificial Sequence: Synthetic oligonucleotide
uacggcacacgcacaaacc

SEQ ID NO: 2290841 - RNA, 19 nt, Artificial Sequence
  Description of Artificial Sequence: Synthetic oligonucleotide
ucuuuugugugugacuuuc

SEQ ID NO: 2290842 - RNA, 19 nt, Artificial Sequence
  Description of Artificial Sequence: Synthetic oligonucleotide
gacagaggacggaagaccc

SEQ ID NO: 2290843 - RNA, 19 nt, Artificial Sequence
  Description of Artificial Sequence: Synthetic oligonucleotide
acaaaccggcacaaaagcg

SEQ ID NO: 2290844 - RNA, 19 nt, Artificial Sequence
  Description of Artificial Sequence: Synthetic oligonucleotide
gggguauaggacuucaccc

SEQ ID NO: 2290845 - RNA, 19 nt, Artificial Sequence
  Description of Artificial Sequence: Synthetic oligonucleotide
gacaccauaagguucugcu

SEQ ID NO: 2290846 - RNA, 19 nt, Artificial Sequence
  Description of Artificial Sequence: Synthetic oligonucleotide
caaaacccaauuccaacuc

SEQ ID NO: 2290847 - RNA, 19 nt, Artificial Sequence
  Description of Artificial Sequence: Synthetic oligonucleotide
caggaggggacaaauggac

SEQ ID NO: 2290848 - RNA, 19 nt, Artificial Sequence
  Description of Artificial Sequence: Synthetic oligonucleotide
cugcuagaaggguagguug

SEQ ID NO: 2290849 - RNA, 19 nt, Artificial Sequence
  Description of Artificial Sequence: Synthetic oligonucleotide
agucaacauauucucagua

SEQ ID NO: 2290850 - RNA, 19 nt, Artificial Sequence
  Description of Artificial Sequence: Synthetic oligonucleotide
gagcaugugaggaggcugg

SEQ ID NO: 2290851 - RNA, 19 nt, Artificial Sequence
  Description of Artificial Sequence: Synthetic oligonucleotide
uccaacuccccacccagac

SEQ ID NO: 2290852 - RNA, 19 nt, Artificial Sequence
  Description of Artificial Sequence: Synthetic oligonucleotide
aaguguaaagacagaggga

SEQ ID NO: 2290853 - RNA, 19 nt, Artificial Sequence
  Description of Artificial Sequence: Synthetic oligonucleotide
uauucucaguauccccagc

SEQ ID NO: 2290854 - RNA, 19 nt, Artificial Sequence
  Description of Artificial Sequence: Synthetic oligonucleotide
acaucagguuuccacaaau

SEQ ID NO: 2290855 - RNA, 19 nt, Artificial Sequence
  Description of Artificial Sequence: Synthetic oligonucleotide
uaaaauucugcugggucau

SEQ ID NO: 2290856 - RNA, 19 nt, Artificial Sequence
  Description of Artificial Sequence: Synthetic oligonucleotide
aggaggucagcaugucaac

SEQ ID NO: 2290857 - RNA, 19 nt, Artificial Sequence
  Description of Artificial Sequence: Synthetic oligonucleotide
ugggucaugaggccuugug

SEQ ID NO: 2290858 - RNA, 19 nt, Artificial Sequence
  Description of Artificial Sequence: Synthetic oligonucleotide
aaagggacagaggacggaa

SEQ ID NO: 2290859 - RNA, 19 nt, Artificial Sequence
  Description of Artificial Sequence: Synthetic oligonucleotide
cacacaagccccuucccac

SEQ ID NO: 2290860 - RNA, 19 nt, Artificial Sequence
  Description of Artificial Sequence: Synthetic oligonucleotide
gaacaggaaggggagggag

SEQ ID NO: 2290861 - RNA, 19 nt, Artificial Sequence
  Description of Artificial Sequence: Synthetic oligonucleotide
gaccuggaacaucaaugag

SEQ ID NO: 2290862 - RNA, 19 nt, Artificial Sequence
  Description of Artificial Sequence: Synthetic oligonucleotide
accggcacaaaagcgcagc

SEQ ID NO: 2290863 - RNA, 19 nt, Artificial Sequence
  Description of Artificial Sequence: Synthetic oligonucleotide
caucagguuuccacaaaug

SEQ ID NO: 2290864 - RNA, 19 nt, Artificial Sequence
  Description of Artificial Sequence: Synthetic oligonucleotide
  modified_base (7)..(7): a, c, u, g, unknown or other
ucuucunaggggccugcua

SEQ ID NO: 2290865 - RNA, 19 nt, Artificial Sequence
  Description of Artificial Sequence: Synthetic oligonucleotide
ucugcugggucaugaggcc

SEQ ID NO: 2290866 - RNA, 19 nt, Artificial Sequence
  Description of Artificial Sequence: Synthetic oligonucleotide
ggguauaggacuucacccc

SEQ ID NO: 2290867 - RNA, 19 nt, Artificial Sequence
  Description of Artificial Sequence: Synthetic oligonucleotide
uccugguggcuaaagugga

SEQ ID NO: 2290868 - RNA, 19 nt, Artificial Sequence
  Description of Artificial Sequence: Synthetic oligonucleotide
acacagaaauacggcacac

SEQ ID NO: 2290869 - RNA, 19 nt, Artificial Sequence
  Description of Artificial Sequence: Synthetic oligonucleotide
aggaggggacaaauggacc

SEQ ID NO: 2290870 - RNA, 19 nt, Artificial Sequence
  Description of Artificial Sequence: Synthetic oligonucleotide
aaaccggcacaaaagcgca

SEQ ID NO: 2290871 - RNA, 19 nt, Artificial Sequence
  Description of Artificial Sequence: Synthetic oligonucleotide
gagggugggacaccauaag

SEQ ID NO: 2290872 - RNA, 19 nt, Artificial Sequence
  Description of Artificial Sequence: Synthetic oligonucleotide
ugguggcuaaaguggagca

SEQ ID NO: 2290873 - RNA, 19 nt, Artificial Sequence
  Description of Artificial Sequence: Synthetic oligonucleotide
guuugcuucaucagcauaa

SEQ ID NO: 2290874 - RNA, 19 nt, Artificial Sequence
  Description of Artificial Sequence: Synthetic oligonucleotide
cuaagcugccagcacauca

SEQ ID NO: 2290875 - RNA, 19 nt, Artificial Sequence
  Description of Artificial Sequence: Synthetic oligonucleotide
agaggaaaugaggaagaca

SEQ ID NO: 2290876 - RNA, 19 nt, Artificial Sequence
  Description of Artificial Sequence: Synthetic oligonucleotide
gguagguuggccaugccgc

SEQ ID NO: 2290877 - RNA, 19 nt, Artificial Sequence
  Description of Artificial Sequence: Synthetic oligonucleotide
ccccaaaggaacaggaagg

SEQ ID NO: 2290878 - RNA, 19 nt, Artificial Sequence
  Description of Artificial Sequence: Synthetic oligonucleotide
cacagaaauacggcacacg

SEQ ID NO: 2290879 - RNA, 19 nt, Artificial Sequence
  Description of Artificial Sequence: Synthetic oligonucleotide
uucucaguauccccagcuc

SEQ ID NO: 2290880 - RNA, 19 nt, Artificial Sequence
  Description of Artificial Sequence: Synthetic oligonucleotide
  modified_base (5)..(5): a, c, u, g, unknown or other
uucunaggggccugcuaga

SEQ ID NO: 2290881 - RNA, 19 nt, Artificial Sequence
  Description of Artificial Sequence: Synthetic oligonucleotide
uauuuacagcuccgcuggc

SEQ ID NO: 2290882 - RNA, 19 nt, Artificial Sequence
  Description of Artificial Sequence: Synthetic oligonucleotide
gccccaaaggaacaggaag

SEQ ID NO: 2290883 - RNA, 19 nt, Artificial Sequence
  Description of Artificial Sequence: Synthetic oligonucleotide
cugguggcuaaaguggagc

SEQ ID NO: 2290884 - RNA, 19 nt, Artificial Sequence
  Description of Artificial Sequence: Synthetic oligonucleotide
aaaguggagcaaaacccaa

SEQ ID NO: 2290885 - RNA, 19 nt, Artificial Sequence
  Description of Artificial Sequence: Synthetic oligonucleotide
agcucuauuuacagcuccg

SEQ ID NO: 2290886 - RNA, 19 nt, Artificial Sequence
  Description of Artificial Sequence: Synthetic oligonucleotide
agagcaugugaggaggcug

SEQ ID NO: 2290887 - RNA, 19 nt, Artificial Sequence
  Description of Artificial Sequence: Synthetic oligonucleotide
ggguagguuggccaugccg

SEQ ID NO: 2290888 - RNA, 19 nt, Artificial Sequence
  Description of Artificial Sequence: Synthetic oligonucleotide
guggggagagcaugugagg

SEQ ID NO: 2290889 - RNA, 19 nt, Artificial Sequence
  Description of Artificial Sequence: Synthetic oligonucleotide
caguuucacaaagggacag

SEQ ID NO: 2290890 - RNA, 19 nt, Artificial Sequence
  Description of Artificial Sequence: Synthetic oligonucleotide
uccccacccagacucuugc

SEQ ID NO: 2290891 - RNA, 19 nt, Artificial Sequence
  Description of Artificial Sequence: Synthetic oligonucleotide
gaggaggucagcaugucaa

SEQ ID NO: 2290892 - RNA, 19 nt, Artificial Sequence
  Description of Artificial Sequence: Synthetic oligonucleotide
ggugacaguuucacaaagg

SEQ ID NO: 2290893 - RNA, 19 nt, Artificial Sequence
  Description of Artificial Sequence: Synthetic oligonucleotide
gacuuucuaucaaaacaca

SEQ ID NO: 2290894 - RNA, 19 nt, Artificial Sequence
  Description of Artificial Sequence: Synthetic oligonucleotide
caacacuggagaaaagaaa

SEQ ID NO: 2290895 - RNA, 19 nt, Artificial Sequence
  Description of Artificial Sequence: Synthetic oligonucleotide
uguggggcacgaccugucc

SEQ ID NO: 2290896 - RNA, 19 nt, Artificial Sequence
  Description of Artificial Sequence: Synthetic oligonucleotide
guaaagacagagggaaaca

SEQ ID NO: 2290897 - RNA, 19 nt, Artificial Sequence
  Description of Artificial Sequence: Synthetic oligonucleotide
cagcaugucaacagggaga

SEQ ID NO: 2290898 - RNA, 19 nt, Artificial Sequence
  Description of Artificial Sequence: Synthetic oligonucleotide
  modified_base (3)..(3): a, c, u, g, unknown or other
cunaggggccugcuagaag

SEQ ID NO: 2290899 - RNA, 19 nt, Artificial Sequence
  Description of Artificial Sequence: Synthetic oligonucleotide
ggaccuggaacaucaauga

SEQ ID NO: 2290900 - RNA, 19 nt, Artificial Sequence
  Description of Artificial Sequence: Synthetic oligonucleotide
agaggaggucagcauguca

SEQ ID NO: 2290901 - RNA, 19 nt, Artificial Sequence
  Description of Artificial Sequence: Synthetic oligonucleotide
acccaauuccaacucccca

SEQ ID NO: 2290902 - RNA, 19 nt, Artificial Sequence
  Description of Artificial Sequence: Synthetic oligonucleotide
  modified_base (4)..(4): a, c, u, g, unknown or other
ucunaggggccugcuagaa

SEQ ID NO: 2290903 - RNA, 19 nt, Artificial Sequence
  Description of Artificial Sequence: Synthetic oligonucleotide
aaaugccacuccccacaca

SEQ ID NO: 2290904 - RNA, 19 nt, Artificial Sequence
  Description of Artificial Sequence: Synthetic oligonucleotide
  modified_base (12)..(12): a, c, u, g, unknown or other
agaccucuucunaggggcc

SEQ ID NO: 2290905 - RNA, 19 nt, Artificial Sequence
  Description of Artificial Sequence: Synthetic oligonucleotide
uugcuucaucagcauaaaa

SEQ ID NO: 2290906 - RNA, 19 nt, Artificial Sequence
  Description of Artificial Sequence: Synthetic oligonucleotide
aaaauucugcugggucaug

SEQ ID NO: 2290907 - RNA, 19 nt, Artificial Sequence
  Description of Artificial Sequence: Synthetic oligonucleotide
agaagccccaaaggaacag

SEQ ID NO: 2290908 - RNA, 19 nt, Artificial Sequence
  Description of Artificial Sequence: Synthetic oligonucleotide
ucaguauccccagcuccag

SEQ ID NO: 2290909 - RNA, 19 nt, Artificial Sequence
  Description of Artificial Sequence: Synthetic oligonucleotide
uuacagcuccgcuggcacc

SEQ ID NO: 2290910 - RNA, 19 nt, Artificial Sequence
  Description of Artificial Sequence: Synthetic oligonucleotide
agguuuccacaaaugccac

SEQ ID NO: 2290911 - RNA, 19 nt, Artificial Sequence
  Description of Artificial Sequence: Synthetic oligonucleotide
  modified_base (18)..(18): a, c, u, g, unknown or other
agcuccagaccucuucuna

SEQ ID NO: 2290912 - RNA, 19 nt, Artificial Sequence
  Description of Artificial Sequence: Synthetic oligonucleotide
guggagcaaaacccaauuc

SEQ ID NO: 2290913 - RNA, 19 nt, Artificial Sequence
  Description of Artificial Sequence: Synthetic oligonucleotide
cucaguauccccagcucca

SEQ ID NO: 2290914 - RNA, 19 nt, Artificial Sequence
  Description of Artificial Sequence: Synthetic oligonucleotide
ggucagcaugucaacaggg

SEQ ID NO: 2290915 - RNA, 19 nt, Artificial Sequence
  Description of Artificial Sequence: Synthetic oligonucleotide
cagaaauacggcacacgca

SEQ ID NO: 2290916 - RNA, 19 nt, Artificial Sequence
  Description of Artificial Sequence: Synthetic oligonucleotide
auuuacagcuccgcuggca

SEQ ID NO: 2290917 - RNA, 19 nt, Artificial Sequence
  Description of Artificial Sequence: Synthetic oligonucleotide
gagaggaaaugaggaagac

SEQ ID NO: 2290918 - RNA, 19 nt, Artificial Sequence
  Description of Artificial Sequence: Synthetic oligonucleotide
acaguuucacaaagggaca

SEQ ID NO: 2290919 - RNA, 19 nt, Artificial Sequence
  Description of Artificial Sequence: Synthetic oligonucleotide
cacuccccacacaagcccc

SEQ ID NO: 2290920 - RNA, 19 nt, Artificial Sequence
  Description of Artificial Sequence: Synthetic oligonucleotide
gaggugacaguuucacaaa

SEQ ID NO: 2290921 - RNA, 19 nt, Artificial Sequence
  Description of Artificial Sequence: Synthetic oligonucleotide
accccguuugcuucaucag

SEQ ID NO: 2290922 - RNA, 19 nt, Artificial Sequence
  Description of Artificial Sequence: Synthetic oligonucleotide
gggagagcaugugaggagg

SEQ ID NO: 2290923 - RNA, 19 nt, Artificial Sequence
  Description of Artificial Sequence: Synthetic oligonucleotide
cagagacacacugcgcugc

SEQ ID NO: 2290924 - RNA, 19 nt, Artificial Sequence
  Description of Artificial Sequence: Synthetic oligonucleotide
acaaaagcgcagcucuauu

SEQ ID NO: 2290925 - RNA, 19 nt, Artificial Sequence
  Description of Artificial Sequence: Synthetic oligonucleotide
gcacaaaccggcacaaaag

SEQ ID NO: 2290926 - RNA, 19 nt, Artificial Sequence
  Description of Artificial Sequence: Synthetic oligonucleotide
uggcuaaaguggagcaaaa

SEQ ID NO: 2290927 - RNA, 19 nt, Artificial Sequence
  Description of Artificial Sequence: Synthetic oligonucleotide
agacagagggaaacagaag

SEQ ID NO: 2290928 - RNA, 19 nt, Artificial Sequence
  Description of Artificial Sequence: Synthetic oligonucleotide
ugugaggaggcugggguau

SEQ ID NO: 2290929 - RNA, 19 nt, Artificial Sequence
  Description of Artificial Sequence: Synthetic oligonucleotide
aagcgcagcucuauuuaca

SEQ ID NO: 2290930 - RNA, 19 nt, Artificial Sequence
  Description of Artificial Sequence: Synthetic oligonucleotide
ggagcaaaacccaauucca

SEQ ID NO: 2290931 - RNA, 19 nt, Artificial Sequence
  Description of Artificial Sequence: Synthetic oligonucleotide
ggaacaucaaugaggugac

SEQ ID NO: 2290932 - RNA, 19 nt, Artificial Sequence
  Description of Artificial Sequence: Synthetic oligonucleotide
aagguucugcugggguggg

SEQ ID NO: 2290933 - RNA, 19 nt, Artificial Sequence
  Description of Artificial Sequence: Synthetic oligonucleotide
uccgcuggcaccugcccac

SEQ ID NO: 2290934 - RNA, 19 nt, Artificial Sequence
  Description of Artificial Sequence: Synthetic oligonucleotide
cacacgcacaaaccggcac

SEQ ID NO: 2290935 - RNA, 19 nt, Artificial Sequence
  Description of Artificial Sequence: Synthetic oligonucleotide
guauccccagcuccagacc

SEQ ID NO: 2290936 - RNA, 19 nt, Artificial Sequence
  Description of Artificial Sequence: Synthetic oligonucleotide
agguagcccaucuggcugu

SEQ ID NO: 2290937 - RNA, 19 nt, Artificial Sequence
  Description of Artificial Sequence: Synthetic oligonucleotide
acaaauggaccuggaacau

SEQ ID NO: 2290938 - RNA, 19 nt, Artificial Sequence
  Description of Artificial Sequence: Synthetic oligonucleotide
aaguggagcaaaacccaau

SEQ ID NO: 2290939 - RNA, 19 nt, Artificial Sequence
  Description of Artificial Sequence: Synthetic oligonucleotide
cuccucuccccgaggaccc

SEQ ID NO: 2290940 - RNA, 19 nt, Artificial Sequence
  Description of Artificial Sequence: Synthetic oligonucleotide
aguuucacaaagggacaga

SEQ ID NO: 2290941 - RNA, 19 nt, Artificial Sequence
  Description of Artificial Sequence: Synthetic oligonucleotide
gagggagcccuguggggag

SEQ ID NO: 2290942 - RNA, 19 nt, Artificial Sequence
  Description of Artificial Sequence: Synthetic oligonucleotide
ggcacaaaagcgcagcucu

SEQ ID NO: 2290943 - RNA, 19 nt, Artificial Sequence
  Description of Artificial Sequence: Synthetic oligonucleotide
ucccaacacuggagaaaag

SEQ ID NO: 2290944 - RNA, 19 nt, Artificial Sequence
  Description of Artificial Sequence: Synthetic oligonucleotide
cccaauuccaacuccccac

SEQ ID NO: 2290945 - RNA, 19 nt, Artificial Sequence
  Description of Artificial Sequence: Synthetic oligonucleotide
ggacccaggccauccaucc

SEQ ID NO: 2290946 - RNA, 19 nt, Artificial Sequence
  Description of Artificial Sequence: Synthetic oligonucleotide
aauacggcacacgcacaaa

SEQ ID NO: 2290947 - RNA, 19 nt, Artificial Sequence
  Description of Artificial Sequence: Synthetic oligonucleotide
gagggaaacagaagcccca

SEQ ID NO: 2290948 - RNA, 19 nt, Artificial Sequence
  Description of Artificial Sequence: Synthetic oligonucleotide
cauccaucccaacacugga

SEQ ID NO: 2290949 - RNA, 19 nt, Artificial Sequence
  Description of Artificial Sequence: Synthetic oligonucleotide
uggacccaggccauccauc

SEQ ID NO: 2290950 - RNA, 19 nt, Artificial Sequence
  Description of Artificial Sequence: Synthetic oligonucleotide
gaggccuugugguggggac

SEQ ID NO: 2290951 - RNA, 19 nt, Artificial Sequence
  Description of Artificial Sequence: Synthetic oligonucleotide
ccugcuguggggcacgacc

SEQ ID NO: 2290952 - RNA, 19 nt, Artificial Sequence
  Description of Artificial Sequence: Synthetic oligonucleotide
aggguagguuggccaugcc

SEQ ID NO: 2290953 - RNA, 19 nt, Artificial Sequence
  Description of Artificial Sequence: Synthetic oligonucleotide
cuugugguggggacaguga

SEQ ID NO: 2290954 - RNA, 19 nt, Artificial Sequence
  Description of Artificial Sequence: Synthetic oligonucleotide
ugccagcacaucagguuuc

SEQ ID NO: 2290955 - RNA, 19 nt, Artificial Sequence
  Description of Artificial Sequence: Synthetic oligonucleotide
guggcuaaaguggagcaaa

SEQ ID NO: 2290956 - RNA, 19 nt, Artificial Sequence
  Description of Artificial Sequence: Synthetic oligonucleotide
caccccguuugcuucauca

SEQ ID NO: 2290957 - RNA, 19 nt, Artificial Sequence
  Description of Artificial Sequence: Synthetic oligonucleotide
gagcaaaacccaauuccaa

SEQ ID NO: 2290958 - RNA, 19 nt, Artificial Sequence
  Description of Artificial Sequence: Synthetic oligonucleotide
gcaaaacccaauuccaacu

SEQ ID NO: 2290959 - RNA, 19 nt, Artificial Sequence
  Description of Artificial Sequence: Synthetic oligonucleotide
gaaggguagguuggccaug

SEQ ID NO: 2290960 - RNA, 19 nt, Artificial Sequence
  Description of Artificial Sequence: Synthetic oligonucleotide
caugugaggaggcuggggu

SEQ ID NO: 2290961 - RNA, 19 nt, Artificial Sequence
  Description of Artificial Sequence: Synthetic oligonucleotide
uucuuuugugugugacuuu

SEQ ID NO: 2290962 - RNA, 19 nt, Artificial Sequence
  Description of Artificial Sequence: Synthetic oligonucleotide
gaucgcccugcuguggggc

SEQ ID NO: 2290963 - RNA, 19 nt, Artificial Sequence
  Description of Artificial Sequence: Synthetic oligonucleotide
gaaauacggcacacgcaca

SEQ ID NO: 2290964 - RNA, 19 nt, Artificial Sequence
  Description of Artificial Sequence: Synthetic oligonucleotide
ggggagagcaugugaggag

SEQ ID NO: 2290965 - RNA, 19 nt, Artificial Sequence
  Description of Artificial Sequence: Synthetic oligonucleotide
uuccacccuaccccuggac

SEQ ID NO: 2290966 - RNA, 19 nt, Artificial Sequence
  Description of Artificial Sequence: Synthetic oligonucleotide
ggagaggaaaugaggaaga

SEQ ID NO: 2290967 - RNA, 19 nt, Artificial Sequence
  Description of Artificial Sequence: Synthetic oligonucleotide
ugcugggucaugaggccuu

SEQ ID NO: 2290968 - RNA, 19 nt, Artificial Sequence
  Description of Artificial Sequence: Synthetic oligonucleotide
gugggacaccauaagguuc

SEQ ID NO: 2290969 - RNA, 19 nt, Artificial Sequence
  Description of Artificial Sequence: Synthetic oligonucleotide
ugaggccuuguggugggga

SEQ ID NO: 2290970 - RNA, 19 nt, Artificial Sequence
  Description of Artificial Sequence: Synthetic oligonucleotide
uggccaugccgcccggcgc

SEQ ID NO: 2290971 - RNA, 19 nt, Artificial Sequence
  Description of Artificial Sequence: Synthetic oligonucleotide
cauaagguucugcuggggu

SEQ ID NO: 2290972 - RNA, 19 nt, Artificial Sequence
  Description of Artificial Sequence: Synthetic oligonucleotide
caaugaggugacaguuuca

SEQ ID NO: 2290973 - RNA, 19 nt, Artificial Sequence
  Description of Artificial Sequence: Synthetic oligonucleotide
cugggguauaggacuucac

SEQ ID NO: 2290974 - RNA, 19 nt, Artificial Sequence
  Description of Artificial Sequence: Synthetic oligonucleotide
cccacccagacucuugccg

SEQ ID NO: 2290975 - RNA, 19 nt, Artificial Sequence
  Description of Artificial Sequence: Synthetic oligonucleotide
  modified_base (10)..(10): a, c, u, g, unknown or other
accucuucunaggggccug

SEQ ID NO: 2290976 - RNA, 19 nt, Artificial Sequence
  Description of Artificial Sequence: Synthetic oligonucleotide
acccuuccacccuaccccu

SEQ ID NO: 2290977 - RNA, 19 nt, Artificial Sequence
  Description of Artificial Sequence: Synthetic oligonucleotide
ggcacacgcacaaaccggc

SEQ ID NO: 2290978 - RNA, 19 nt, Artificial Sequence
  Description of Artificial Sequence: Synthetic oligonucleotide
gacccaggccauccauccc

SEQ ID NO: 2290979 - RNA, 19 nt, Artificial Sequence
  Description of Artificial Sequence: Synthetic oligonucleotide
aaccggcacaaaagcgcag

SEQ ID NO: 2290980 - RNA, 19 nt, Artificial Sequence
  Description of Artificial Sequence: Synthetic oligonucleotide
ccaacacuggagaaaagaa

SEQ ID NO: 2290981 - RNA, 19 nt, Artificial Sequence
  Description of Artificial Sequence: Synthetic oligonucleotide
ugccgcagagggugggaca

SEQ ID NO: 2290982 - RNA, 19 nt, Artificial Sequence
  Description of Artificial Sequence: Synthetic oligonucleotide
acacacugcgcugccgcag

SEQ ID NO: 2290983 - RNA, 19 nt, Artificial Sequence
  Description of Artificial Sequence: Synthetic oligonucleotide
agcuccgcuggcaccugcc

SEQ ID NO: 2290984 - RNA, 19 nt, Artificial Sequence
  Description of Artificial Sequence: Synthetic oligonucleotide
ugccgcccggcgcugggag

SEQ ID NO: 2290985 - RNA, 19 nt, Artificial Sequence
  Description of Artificial Sequence: Synthetic oligonucleotide
cagacucuugccgcuuccc

SEQ ID NO: 2290986 - RNA, 19 nt, Artificial Sequence
  Description of Artificial Sequence: Synthetic oligonucleotide
gacacacugcgcugccgca

SEQ ID NO: 2290987 - RNA, 19 nt, Artificial Sequence
  Description of Artificial Sequence: Synthetic oligonucleotide
cuggaacaucaaugaggug

SEQ ID NO: 2290988 - RNA, 19 nt, Artificial Sequence
  Description of Artificial Sequence: Synthetic oligonucleotide
gaaaccaggaggggacaaa

SEQ ID NO: 2290989 - RNA, 19 nt, Artificial Sequence
  Description of Artificial Sequence: Synthetic oligonucleotide
gagaaaccaggaggggaca

SEQ ID NO: 2290990 - RNA, 19 nt, Artificial Sequence
  Description of Artificial Sequence: Synthetic oligonucleotide
gcucuauuuacagcuccgc

SEQ ID NO: 2290991 - RNA, 19 nt, Artificial Sequence
  Description of Artificial Sequence: Synthetic oligonucleotide
gugugacuuucuaucaaaa

SEQ ID NO: 2290992 - RNA, 19 nt, Artificial Sequence
  Description of Artificial Sequence: Synthetic oligonucleotide
cugggagguagcccaucug

SEQ ID NO: 2290993 - RNA, 19 nt, Artificial Sequence
  Description of Artificial Sequence: Synthetic oligonucleotide
caaaagcgcagcucuauuu

SEQ ID NO: 2290994 - RNA, 19 nt, Artificial Sequence
  Description of Artificial Sequence: Synthetic oligonucleotide
ccacuccccacacaagccc

SEQ ID NO: 2290995 - RNA, 19 nt, Artificial Sequence
  Description of Artificial Sequence: Synthetic oligonucleotide
cccguuugcuucaucagca

SEQ ID NO: 2290996 - RNA, 19 nt, Artificial Sequence
  Description of Artificial Sequence: Synthetic oligonucleotide
accgaucgcccugcugugg

SEQ ID NO: 2290997 - RNA, 19 nt, Artificial Sequence
  Description of Artificial Sequence: Synthetic oligonucleotide
ccccguuugcuucaucagc

SEQ ID NO: 2290998 - RNA, 19 nt, Artificial Sequence
  Description of Artificial Sequence: Synthetic oligonucleotide
ggcuaaaguggagcaaaac

SEQ ID NO: 2290999 - RNA, 19 nt, Artificial Sequence
  Description of Artificial Sequence: Synthetic oligonucleotide
cuguggggagagcauguga

SEQ ID NO: 2291000 - RNA, 19 nt, Artificial Sequence
  Description of Artificial Sequence: Synthetic oligonucleotide
agggaaacagaagccccaa

SEQ ID NO: 2291001 - RNA, 19 nt, Artificial Sequence
  Description of Artificial Sequence: Synthetic oligonucleotide
acacugcgcugccgcagag

SEQ ID NO: 2291002 - RNA, 19 nt, Artificial Sequence
  Description of Artificial Sequence: Synthetic oligonucleotide
uccccagcuccagaccucu

SEQ ID NO: 2291003 - RNA, 19 nt, Artificial Sequence
  Description of Artificial Sequence: Synthetic oligonucleotide
ccacccuuccacccuaccc

SEQ ID NO: 2291004 - RNA, 19 nt, Artificial Sequence
  Description of Artificial Sequence: Synthetic oligonucleotide
uggcaccugcccaccuggc

SEQ ID NO: 2291005 - RNA, 19 nt, Artificial Sequence
  Description of Artificial Sequence: Synthetic oligonucleotide
cuccccacccagacucuug

SEQ ID NO: 2291006 - RNA, 19 nt, Artificial Sequence
  Description of Artificial Sequence: Synthetic oligonucleotide
gcuagaaggguagguuggc

SEQ ID NO: 2291007 - RNA, 19 nt, Artificial Sequence
  Description of Artificial Sequence: Synthetic oligonucleotide
acaagccccuucccacccu

SEQ ID NO: 2291008 - RNA, 19 nt, Artificial Sequence
  Description of Artificial Sequence: Synthetic oligonucleotide
aagccccuucccacccuuc

SEQ ID NO: 2291009 - RNA, 19 nt, Artificial Sequence
  Description of Artificial Sequence: Synthetic oligonucleotide
caucaaugaggugacaguu

SEQ ID NO: 2291010 - RNA, 19 nt, Artificial Sequence
  Description of Artificial Sequence: Synthetic oligonucleotide
gggccugcuagaaggguag

SEQ ID NO: 2291011 - RNA, 19 nt, Artificial Sequence
  Description of Artificial Sequence: Synthetic oligonucleotide
gcaccgaucgcccugcugu

SEQ ID NO: 2291012 - RNA, 19 nt, Artificial Sequence
  Description of Artificial Sequence: Synthetic oligonucleotide
cuguggggcacgaccuguc

SEQ ID NO: 2291013 - RNA, 19 nt, Artificial Sequence
  Description of Artificial Sequence: Synthetic oligonucleotide
ccagagacacacugcgcug

SEQ ID NO: 2291014 - RNA, 19 nt, Artificial Sequence
  Description of Artificial Sequence: Synthetic oligonucleotide
augucaacagggagaggaa

SEQ ID NO: 2291015 - RNA, 19 nt, Artificial Sequence
  Description of Artificial Sequence: Synthetic oligonucleotide
gggagguagcccaucuggc

SEQ ID NO: 2291016 - RNA, 19 nt, Artificial Sequence
  Description of Artificial Sequence: Synthetic oligonucleotide
gggacaaauggaccuggaa

SEQ ID NO: 2291017 - RNA, 19 nt, Artificial Sequence
  Description of Artificial Sequence: Synthetic oligonucleotide
gagaggaggucagcauguc

SEQ ID NO: 2291018 - RNA, 19 nt, Artificial Sequence
  Description of Artificial Sequence: Synthetic oligonucleotide
ccccacacaagccccuucc

SEQ ID NO: 2291019 - RNA, 19 nt, Artificial Sequence
  Description of Artificial Sequence: Synthetic oligonucleotide
acaccccguuugcuucauc

SEQ ID NO: 2291020 - RNA, 19 nt, Artificial Sequence
  Description of Artificial Sequence: Synthetic oligonucleotide
gggacagaggacggaagac

SEQ ID NO: 2291021 - RNA, 19 nt, Artificial Sequence
  Description of Artificial Sequence: Synthetic oligonucleotide
gaacaucaaugaggugaca

SEQ ID NO: 2291022 - RNA, 19 nt, Artificial Sequence
  Description of Artificial Sequence: Synthetic oligonucleotide
cagagggugggacaccaua

SEQ ID NO: 2291023 - RNA, 19 nt, Artificial Sequence
  Description of Artificial Sequence: Synthetic oligonucleotide
caccgaucgcccugcugug

SEQ ID NO: 2291024 - RNA, 19 nt, Artificial Sequence
  Description of Artificial Sequence: Synthetic oligonucleotide
cccaacacuggagaaaaga

SEQ ID NO: 2291025 - RNA, 19 nt, Artificial Sequence
  Description of Artificial Sequence: Synthetic oligonucleotide
agcugccagcacaucaggu

SEQ ID NO: 2291026 - RNA, 19 nt, Artificial Sequence
  Description of Artificial Sequence: Synthetic oligonucleotide
guguaaagacagagggaaa

SEQ ID NO: 2291027 - RNA, 19 nt, Artificial Sequence
  Description of Artificial Sequence: Synthetic oligonucleotide
ccuccucuccccgaggacc

SEQ ID NO: 2291028 - RNA, 19 nt, Artificial Sequence
  Description of Artificial Sequence: Synthetic oligonucleotide
cacaucagguuuccacaaa

SEQ ID NO: 2291029 - RNA, 19 nt, Artificial Sequence
  Description of Artificial Sequence: Synthetic oligonucleotide
caugccgcccggcgcuggg

SEQ ID NO: 2291030 - RNA, 19 nt, Artificial Sequence
  Description of Artificial Sequence: Synthetic oligonucleotide
ggagagcaugugaggaggc

SEQ ID NO: 2291031 - RNA, 19 nt, Artificial Sequence
  Description of Artificial Sequence: Synthetic oligonucleotide
cacugcgcugccgcagagg

SEQ ID NO: 2291032 - RNA, 19 nt, Artificial Sequence
  Description of Artificial Sequence: Synthetic oligonucleotide
aacuccccacccagacucu

SEQ ID NO: 2291033 - RNA, 19 nt, Artificial Sequence
  Description of Artificial Sequence: Synthetic oligonucleotide
gccauccaucccaacacug

SEQ ID NO: 2291034 - RNA, 19 nt, Artificial Sequence
  Description of Artificial Sequence: Synthetic oligonucleotide
gcacaucagguuuccacaa

SEQ ID NO: 2291035 - RNA, 19 nt, Artificial Sequence
  Description of Artificial Sequence: Synthetic oligonucleotide
ggagaaguguaaagacaga

SEQ ID NO: 2291036 - RNA, 19 nt, Artificial Sequence
  Description of Artificial Sequence: Synthetic oligonucleotide
ggugggacaccauaagguu

SEQ ID NO: 2291037 - RNA, 19 nt, Artificial Sequence
  Description of Artificial Sequence: Synthetic oligonucleotide
cccaucuggcuguccagag

SEQ ID NO: 2291038 - RNA, 19 nt, Artificial Sequence
  Description of Artificial Sequence: Synthetic oligonucleotide
ccaggaggggacaaaugga

SEQ ID NO: 2291039 - RNA, 19 nt, Artificial Sequence
  Description of Artificial Sequence: Synthetic oligonucleotide
ccgaucgcccugcuguggg

SEQ ID NO: 2291040 - RNA, 19 nt, Artificial Sequence
  Description of Artificial Sequence: Synthetic oligonucleotide
gggugggacaccauaaggu

SEQ ID NO: 2291041 - RNA, 19 nt, Artificial Sequence
  Description of Artificial Sequence: Synthetic oligonucleotide
ggagguagcccaucuggcu

SEQ ID NO: 2291042 - RNA, 19 nt, Artificial Sequence
  Description of Artificial Sequence: Synthetic oligonucleotide
cgcagcucuauuuacagcu

SEQ ID NO: 2291043 - RNA, 19 nt, Artificial Sequence
  Description of Artificial Sequence: Synthetic oligonucleotide
ccuugugguggggacagug

SEQ ID NO: 2291044 - RNA, 19 nt, Artificial Sequence
  Description of Artificial Sequence: Synthetic oligonucleotide
cggcacacgcacaaaccgg

SEQ ID NO: 2291045 - RNA, 19 nt, Artificial Sequence
  Description of Artificial Sequence: Synthetic oligonucleotide
cacacugcgcugccgcaga

SEQ ID NO: 2291046 - RNA, 19 nt, Artificial Sequence
  Description of Artificial Sequence: Synthetic oligonucleotide
gcgcagcucuauuuacagc

SEQ ID NO: 2291047 - RNA, 19 nt, Artificial Sequence
  Description of Artificial Sequence: Synthetic oligonucleotide
ucccacccuuccacccuac

SEQ ID NO: 2291048 - RNA, 19 nt, Artificial Sequence
  Description of Artificial Sequence: Synthetic oligonucleotide
cccacaccccguuugcuuc

SEQ ID NO: 2291049 - RNA, 19 nt, Artificial Sequence
  Description of Artificial Sequence: Synthetic oligonucleotide
gagagcaugugaggaggcu

SEQ ID NO: 2291050 - RNA, 19 nt, Artificial Sequence
  Description of Artificial Sequence: Synthetic oligonucleotide
aggccuugugguggggaca

SEQ ID NO: 2291051 - RNA, 19 nt, Artificial Sequence
  Description of Artificial Sequence: Synthetic oligonucleotide
augccacuccccacacaag

SEQ ID NO: 2291052 - RNA, 19 nt, Artificial Sequence
  Description of Artificial Sequence: Synthetic oligonucleotide
augaggccuuguggugggg

SEQ ID NO: 2291053 - RNA, 19 nt, Artificial Sequence
  Description of Artificial Sequence: Synthetic oligonucleotide
cugcuguggggcacgaccu

SEQ ID NO: 2291054 - RNA, 19 nt, Artificial Sequence
  Description of Artificial Sequence: Synthetic oligonucleotide
gcuggcaccugcccaccug

SEQ ID NO: 2291055 - RNA, 19 nt, Artificial Sequence
  Description of Artificial Sequence: Synthetic oligonucleotide
ccagacucuugccgcuucc

SEQ ID NO: 2291056 - RNA, 19 nt, Artificial Sequence
  Description of Artificial Sequence: Synthetic oligonucleotide
cugccgcagagggugggac

SEQ ID NO: 2291057 - RNA, 19 nt, Artificial Sequence
  Description of Artificial Sequence: Synthetic oligonucleotide
agggaggggcaguccuggu

SEQ ID NO: 2291058 - RNA, 19 nt, Artificial Sequence
  Description of Artificial Sequence: Synthetic oligonucleotide
gcaguccugguggcuaaag

SEQ ID NO: 2291059 - RNA, 19 nt, Artificial Sequence
  Description of Artificial Sequence: Synthetic oligonucleotide
cugccagcacaucagguuu

SEQ ID NO: 2291060 - RNA, 19 nt, Artificial Sequence
  Description of Artificial Sequence: Synthetic oligonucleotide
  modified_base (11)..(11): a, c, u, g, unknown or other
gaccucuucunaggggccu

SEQ ID NO: 2291061 - RNA, 19 nt, Artificial Sequence
  Description of Artificial Sequence: Synthetic oligonucleotide
caguauccccagcuccaga

SEQ ID NO: 2291062 - RNA, 19 nt, Artificial Sequence
  Description of Artificial Sequence: Synthetic oligonucleotide
cuccgcuggcaccugccca

SEQ ID NO: 2291063 - RNA, 19 nt, Artificial Sequence
  Description of Artificial Sequence: Synthetic oligonucleotide
ggagaggaggucagcaugu

SEQ ID NO: 2291064 - RNA, 19 nt, Artificial Sequence
  Description of Artificial Sequence: Synthetic oligonucleotide
cccacacaagccccuuccc

SEQ ID NO: 2291065 - RNA, 19 nt, Artificial Sequence
  Description of Artificial Sequence: Synthetic oligonucleotide
acuccccacacaagccccu

SEQ ID NO: 2291066 - RNA, 19 nt, Artificial Sequence
  Description of Artificial Sequence: Synthetic oligonucleotide
cacgcacaaaccggcacaa

SEQ ID NO: 2291067 - RNA, 19 nt, Artificial Sequence
  Description of Artificial Sequence: Synthetic oligonucleotide
gcugggguauaggacuuca

SEQ ID NO: 2291068 - RNA, 19 nt, Artificial Sequence
  Description of Artificial Sequence: Synthetic oligonucleotide
cacaaaagcgcagcucuau

SEQ ID NO: 2291069 - RNA, 19 nt, Artificial Sequence
  Description of Artificial Sequence: Synthetic oligonucleotide
gguggcuaaaguggagcaa

SEQ ID NO: 2291070 - RNA, 19 nt, Artificial Sequence
  Description of Artificial Sequence: Synthetic oligonucleotide
aucuggcuguccagagaca

SEQ ID NO: 2291071 - RNA, 19 nt, Artificial Sequence
  Description of Artificial Sequence: Synthetic oligonucleotide
accugcccaccuggccagc

SEQ ID NO: 2291072 - RNA, 19 nt, Artificial Sequence
  Description of Artificial Sequence: Synthetic oligonucleotide
guagcccaucuggcugucc

SEQ ID NO: 2291073 - RNA, 19 nt, Artificial Sequence
  Description of Artificial Sequence: Synthetic oligonucleotide
cgcacaaaccggcacaaaa

SEQ ID NO: 2291074 - RNA, 19 nt, Artificial Sequence
  Description of Artificial Sequence: Synthetic oligonucleotide
guuggccaugccgcccggc

SEQ ID NO: 2291075 - RNA, 19 nt, Artificial Sequence
  Description of Artificial Sequence: Synthetic oligonucleotide
gcagcucuauuuacagcuc

SEQ ID NO: 2291076 - RNA, 19 nt, Artificial Sequence
  Description of Artificial Sequence: Synthetic oligonucleotide
gccgcagagggugggacac

SEQ ID NO: 2291077 - RNA, 19 nt, Artificial Sequence
  Description of Artificial Sequence: Synthetic oligonucleotide
ccacacaagccccuuccca

SEQ ID NO: 2291078 - RNA, 19 nt, Artificial Sequence
  Description of Artificial Sequence: Synthetic oligonucleotide
ggcaccgaucgcccugcug

SEQ ID NO: 2291079 - RNA, 19 nt, Artificial Sequence
  Description of Artificial Sequence: Synthetic oligonucleotide
guggggcacgaccuguccu

SEQ ID NO: 2291080 - RNA, 19 nt, Artificial Sequence
  Description of Artificial Sequence: Synthetic oligonucleotide
ccccuucccacccuuccac

SEQ ID NO: 2291081 - RNA, 19 nt, Artificial Sequence
  Description of Artificial Sequence: Synthetic oligonucleotide
cuucccacccuuccacccu

SEQ ID NO: 2291082 - RNA, 19 nt, Artificial Sequence
  Description of Artificial Sequence: Synthetic oligonucleotide
gcuccgcuggcaccugccc

SEQ ID NO: 2291083 - RNA, 19 nt, Artificial Sequence
  Description of Artificial Sequence: Synthetic oligonucleotide
gguuggccaugccgcccgg

SEQ ID NO: 2291084 - RNA, 19 nt, Artificial Sequence
  Description of Artificial Sequence: Synthetic oligonucleotide
ggccugcuagaaggguagg

SEQ ID NO: 2291085 - RNA, 19 nt, Artificial Sequence
  Description of Artificial Sequence: Synthetic oligonucleotide
  modified_base (9)..(9): a, c, u, g, unknown or other
ccucuucunaggggccugc

SEQ ID NO: 2291086 - RNA, 19 nt, Artificial Sequence
  Description of Artificial Sequence: Synthetic oligonucleotide
cccaugagggagcccugug

SEQ ID NO: 2291087 - RNA, 19 nt, Artificial Sequence
  Description of Artificial Sequence: Synthetic oligonucleotide
gcaugucaacagggagagg

SEQ ID NO: 2291088 - RNA, 19 nt, Artificial Sequence
  Description of Artificial Sequence: Synthetic oligonucleotide
  modified_base (19)..(19): a, c, u, g, unknown or other
cagcuccagaccucuucun

SEQ ID NO: 2291089 - RNA, 19 nt, Artificial Sequence
  Description of Artificial Sequence: Synthetic oligonucleotide
gcugggagguagcccaucu

SEQ ID NO: 2291090 - RNA, 19 nt, Artificial Sequence
  Description of Artificial Sequence: Synthetic oligonucleotide
cacccuaccccuggaccca

SEQ ID NO: 2291091 - RNA, 19 nt, Artificial Sequence
  Description of Artificial Sequence: Synthetic oligonucleotide
gcgugggagaggaggucag

SEQ ID NO: 2291092 - RNA, 19 nt, Artificial Sequence
  Description of Artificial Sequence: Synthetic oligonucleotide
ggggcaccgaucgcccugc

SEQ ID NO: 2291093 - RNA, 19 nt, Artificial Sequence
  Description of Artificial Sequence: Synthetic oligonucleotide
acgcacaaaccggcacaaa

SEQ ID NO: 2291094 - RNA, 19 nt, Artificial Sequence
  Description of Artificial Sequence: Synthetic oligonucleotide
ggggacaaauggaccugga

SEQ ID NO: 2291095 - RNA, 19 nt, Artificial Sequence
  Description of Artificial Sequence: Synthetic oligonucleotide
acccagacucuugccgcuu

SEQ ID NO: 2291096 - RNA, 19 nt, Artificial Sequence
  Description of Artificial Sequence: Synthetic oligonucleotide
ggggccugcuagaagggua

SEQ ID NO: 2291097 - RNA, 19 nt, Artificial Sequence
  Description of Artificial Sequence: Synthetic oligonucleotide
cgaucgcccugcugugggg

SEQ ID NO: 2291098 - RNA, 19 nt, Artificial Sequence
  Description of Artificial Sequence: Synthetic oligonucleotide
gggacaccauaagguucug

SEQ ID NO: 2291099 - RNA, 19 nt, Artificial Sequence
  Description of Artificial Sequence: Synthetic oligonucleotide
ggccaugccgcccggcgcu

SEQ ID NO: 2291100 - RNA, 19 nt, Artificial Sequence
  Description of Artificial Sequence: Synthetic oligonucleotide
cugcugggucaugaggccu

SEQ ID NO: 2291101 - RNA, 19 nt, Artificial Sequence
  Description of Artificial Sequence: Synthetic oligonucleotide
  modified_base (8)..(8): a, c, u, g, unknown or other
cucuucunaggggccugcu

SEQ ID NO: 2291102 - RNA, 19 nt, Artificial Sequence
  Description of Artificial Sequence: Synthetic oligonucleotide
cguuugcuucaucagcaua

SEQ ID NO: 2291103 - RNA, 19 nt, Artificial Sequence
  Description of Artificial Sequence: Synthetic oligonucleotide
cccuccucuccccgaggac

SEQ ID NO: 2291104 - RNA, 19 nt, Artificial Sequence
  Description of Artificial Sequence: Synthetic oligonucleotide
gcacaaaagcgcagcucua

SEQ ID NO: 2291105 - RNA, 19 nt, Artificial Sequence
  Description of Artificial Sequence: Synthetic oligonucleotide
ccugcuagaaggguagguu

SEQ ID NO: 2291106 - RNA, 19 nt, Artificial Sequence
  Description of Artificial Sequence: Synthetic oligonucleotide
augccgcccggcgcuggga

SEQ ID NO: 2291107 - RNA, 19 nt, Artificial Sequence
  Description of Artificial Sequence: Synthetic oligonucleotide
cggcacaaaagcgcagcuc

SEQ ID NO: 2291108 - RNA, 19 nt, Artificial Sequence
  Description of Artificial Sequence: Synthetic oligonucleotide
caagccccuucccacccuu

SEQ ID NO: 2291109 - RNA, 19 nt, Artificial Sequence
  Description of Artificial Sequence: Synthetic oligonucleotide
gccugcuagaaggguaggu

SEQ ID NO: 2291110 - RNA, 19 nt, Artificial Sequence
  Description of Artificial Sequence: Synthetic oligonucleotide
ggcccaugagggagcccug

SEQ ID NO: 2291111 - RNA, 19 nt, Artificial Sequence
  Description of Artificial Sequence: Synthetic oligonucleotide
cccuaagcugccagcacau

SEQ ID NO: 2291112 - RNA, 19 nt, Artificial Sequence
  Description of Artificial Sequence: Synthetic oligonucleotide
ccccuccucuccccgagga

SEQ ID NO: 2291113 - RNA, 19 nt, Artificial Sequence
  Description of Artificial Sequence: Synthetic oligonucleotide
gcugccgcagaggguggga

SEQ ID NO: 2291114 - RNA, 19 nt, Artificial Sequence
  Description of Artificial Sequence: Synthetic oligonucleotide
ccaacuccccacccagacu

SEQ ID NO: 2291115 - RNA, 19 nt, Artificial Sequence
  Description of Artificial Sequence: Synthetic oligonucleotide
ccccuggugcaggccagug

SEQ ID NO: 2291116 - RNA, 19 nt, Artificial Sequence
  Description of Artificial Sequence: Synthetic oligonucleotide
ccaugccgcccggcgcugg

SEQ ID NO: 2291117 - RNA, 19 nt, Artificial Sequence
  Description of Artificial Sequence: Synthetic oligonucleotide
ccgcagagggugggacacc

SEQ ID NO: 2291118 - RNA, 19 nt, Artificial Sequence
  Description of Artificial Sequence: Synthetic oligonucleotide
ccggcacaaaagcgcagcu

SEQ ID NO: 2291119 - RNA, 19 nt, Artificial Sequence
  Description of Artificial Sequence: Synthetic oligonucleotide
ggcaguccugguggcuaaa

SEQ ID NO: 2291120 - RNA, 19 nt, Artificial Sequence
  Description of Artificial Sequence: Synthetic oligonucleotide
ccguuugcuucaucagcau

SEQ ID NO: 2291121 - RNA, 19 nt, Artificial Sequence
  Description of Artificial Sequence: Synthetic oligonucleotide
ccagcacaucagguuucca

SEQ ID NO: 2291122 - RNA, 19 nt, Artificial Sequence
  Description of Artificial Sequence: Synthetic oligonucleotide
ccgcuggcaccugcccacc

SEQ ID NO: 2291123 - RNA, 19 nt, Artificial Sequence
  Description of Artificial Sequence: Synthetic oligonucleotide
cggcgcugggagguagccc

SEQ ID NO: 2291124 - RNA, 19 nt, Artificial Sequence
  Description of Artificial Sequence: Synthetic oligonucleotide
gcccaugagggagcccugu

SEQ ID NO: 2291125 - RNA, 19 nt, Artificial Sequence
  Description of Artificial Sequence: Synthetic oligonucleotide
ccccacaccccguuugcuu

SEQ ID NO: 2291126 - RNA, 19 nt, Artificial Sequence
  Description of Artificial Sequence: Synthetic oligonucleotide
cacaccccguuugcuucau

SEQ ID NO: 2291127 - RNA, 19 nt, Artificial Sequence
  Description of Artificial Sequence: Synthetic oligonucleotide
cuccccacacaagccccuu

SEQ ID NO: 2291128 - RNA, 19 nt, Artificial Sequence
  Description of Artificial Sequence: Synthetic oligonucleotide
cgcugggagguagcccauc

SEQ ID NO: 2291129 - RNA, 19 nt, Artificial Sequence
  Description of Artificial Sequence: Synthetic oligonucleotide
gcagagggugggacaccau

SEQ ID NO: 2291130 - RNA, 19 nt, Artificial Sequence
  Description of Artificial Sequence: Synthetic oligonucleotide
gggcaccgaucgcccugcu

SEQ ID NO: 2291131 - RNA, 19 nt, Artificial Sequence
  Description of Artificial Sequence: Synthetic oligonucleotide
gccuugugguggggacagu

SEQ ID NO: 2291132 - RNA, 19 nt, Artificial Sequence
  Description of Artificial Sequence: Synthetic oligonucleotide
gcgcugggagguagcccau

SEQ ID NO: 2291133 - RNA, 19 nt, Artificial Sequence
  Description of Artificial Sequence: Synthetic oligonucleotide
cgcuggcaccugcccaccu

SEQ ID NO: 2291134 - RNA, 19 nt, Artificial Sequence
  Description of Artificial Sequence: Synthetic oligonucleotide
ccccagcuccagaccucuu

SEQ ID NO: 2291135 - RNA, 19 nt, Artificial Sequence
  Description of Artificial Sequence: Synthetic oligonucleotide
aaauguuuguauuuccggg

SEQ ID NO: 2291136 - RNA, 19 nt, Artificial Sequence
  Description of Artificial Sequence: Synthetic oligonucleotide
aauguuuguauuuccgggg

SEQ ID NO: 2291137 - RNA, 19 nt, Artificial Sequence
  Description of Artificial Sequence: Synthetic oligonucleotide
uuaaauguuuguauuuccg

SEQ ID NO: 2291138 - RNA, 19 nt, Artificial Sequence
  Description of Artificial Sequence: Synthetic oligonucleotide
agugaucacacaugcaucc

SEQ ID NO: 2291139 - RNA, 19 nt, Artificial Sequence
  Description of Artificial Sequence: Synthetic oligonucleotide
uguagcuccaucuuggaag

SEQ ID NO: 2291140 - RNA, 19 nt, Artificial Sequence
  Description of Artificial Sequence: Synthetic oligonucleotide
uaaauguuuguauuuccgg

SEQ ID NO: 2291141 - RNA, 19 nt, Artificial Sequence
  Description of Artificial Sequence: Synthetic oligonucleotide
aaguggaucuucucgcagc

SEQ ID NO: 2291142 - RNA, 19 nt, Artificial Sequence
  Description of Artificial Sequence: Synthetic oligonucleotide
augaaguggaucuucucgc

SEQ ID NO: 2291143 - RNA, 19 nt, Artificial Sequence
  Description of Artificial Sequence: Synthetic oligonucleotide
ucuuaggccacuuuauucc

SEQ ID NO: 2291144 - RNA, 19 nt, Artificial Sequence
  Description of Artificial Sequence: Synthetic oligonucleotide
auuuccgggguuuauuccc

SEQ ID NO: 2291145 - RNA, 19 nt, Artificial Sequence
  Description of Artificial Sequence: Synthetic oligonucleotide
gauaacuccaucucggaac

SEQ ID NO: 2291146 - RNA, 19 nt, Artificial Sequence
  Description of Artificial Sequence: Synthetic oligonucleotide
uauuccaccuccauggucu

SEQ ID NO: 2291147 - RNA, 19 nt, Artificial Sequence
  Description of Artificial Sequence: Synthetic oligonucleotide
caagauaacuccaucucgg

SEQ ID NO: 2291148 - RNA, 19 nt, Artificial Sequence
  Description of Artificial Sequence: Synthetic oligonucleotide
ucuugugcagccuccagcg

SEQ ID NO: 2291149 - RNA, 19 nt, Artificial Sequence
  Description of Artificial Sequence: Synthetic oligonucleotide
uguaccaagcucuaagucu

SEQ ID NO: 2291150 - RNA, 19 nt, Artificial Sequence
  Description of Artificial Sequence: Synthetic oligonucleotide
agugguaacggccaguucu

SEQ ID NO: 2291151 - RNA, 19 nt, Artificial Sequence
  Description of Artificial Sequence: Synthetic oligonucleotide
aacacaagucccgcgaugg

SEQ ID NO: 2291152 - RNA, 19 nt, Artificial Sequence
  Description of Artificial Sequence: Synthetic oligonucleotide
cacgccauagaguugaggc

SEQ ID NO: 2291153 - RNA, 19 nt, Artificial Sequence
  Description of Artificial Sequence: Synthetic oligonucleotide
agcucuaagucuuaggcca

SEQ ID NO: 2291154 - RNA, 19 nt, Artificial Sequence
  Description of Artificial Sequence: Synthetic oligonucleotide
aaggacgcauuccucuggc

SEQ ID NO: 2291155 - RNA, 19 nt, Artificial Sequence
  Description of Artificial Sequence: Synthetic oligonucleotide
gaagcugccauccgcgugg

SEQ ID NO: 2291156 - RNA, 19 nt, Artificial Sequence
  Description of Artificial Sequence: Synthetic oligonucleotide
cacacaugcauccacacug

SEQ ID NO: 2291157 - RNA, 19 nt, Artificial Sequence
  Description of Artificial Sequence: Synthetic oligonucleotide
aaagccaacugagauccgg

SEQ ID NO: 2291158 - RNA, 19 nt, Artificial Sequence
  Description of Artificial Sequence: Synthetic oligonucleotide
ggcaguaaagggcagacgg

SEQ ID NO: 2291159 - RNA, 19 nt, Artificial Sequence
  Description of Artificial Sequence: Synthetic oligonucleotide
uugaggcccggucagauca

SEQ ID NO: 2291160 - RNA, 19 nt, Artificial Sequence
  Description of Artificial Sequence: Synthetic oligonucleotide
aagagaagccuccucugug

SEQ ID NO: 2291161 - RNA, 19 nt, Artificial Sequence
  Description of Artificial Sequence: Synthetic oligonucleotide
ucucggaacacaagucccg

SEQ ID NO: 2291162 - RNA, 19 nt, Artificial Sequence
  Description of Artificial Sequence: Synthetic oligonucleotide
uaagucuuaggccacuuua

SEQ ID NO: 2291163 - RNA, 19 nt, Artificial Sequence
  Description of Artificial Sequence: Synthetic oligonucleotide
cuucucgcagcuuuugucc

SEQ ID NO: 2291164 - RNA, 19 nt, Artificial Sequence
  Description of Artificial Sequence: Synthetic oligonucleotide
guucagaggucuuacuucc

SEQ ID NO: 2291165 - RNA, 19 nt, Artificial Sequence
  Description of Artificial Sequence: Synthetic oligonucleotide
caccguuuccuccagaagc

SEQ ID NO: 2291166 - RNA, 19 nt, Artificial Sequence
  Description of Artificial Sequence: Synthetic oligonucleotide
ucucgaaagagaagccucc

SEQ ID NO: 2291167 - RNA, 19 nt, Artificial Sequence
  Description of Artificial Sequence: Synthetic oligonucleotide
uuugcgugcaugagggacc

SEQ ID NO: 2291168 - RNA, 19 nt, Artificial Sequence
  Description of Artificial Sequence: Synthetic oligonucleotide
auagaguugaggcccgguc

SEQ ID NO: 2291169 - RNA, 19 nt, Artificial Sequence
  Description of Artificial Sequence: Synthetic oligonucleotide
uccucuguguuccacugcc

SEQ ID NO: 2291170 - RNA, 19 nt, Artificial Sequence
  Description of Artificial Sequence: Synthetic oligonucleotide
aagauaacuccaucucgga

SEQ ID NO: 2291171 - RNA, 19 nt, Artificial Sequence
  Description of Artificial Sequence: Synthetic oligonucleotide
caugcauccacacugccuc

SEQ ID NO: 2291172 - RNA, 19 nt, Artificial Sequence
  Description of Artificial Sequence: Synthetic oligonucleotide
acgccauagaguugaggcc

SEQ ID NO: 2291173 - RNA, 19 nt, Artificial Sequence
  Description of Artificial Sequence: Synthetic oligonucleotide
uucucgaaagagaagccuc

SEQ ID NO: 2291174 - RNA, 19 nt, Artificial Sequence
  Description of Artificial Sequence: Synthetic oligonucleotide
accacgaccgaaucguuag

SEQ ID NO: 2291175 - RNA, 19 nt, Artificial Sequence
  Description of Artificial Sequence: Synthetic oligonucleotide
auaacuccaucucggaaca

SEQ ID NO: 2291176 - RNA, 19 nt, Artificial Sequence
  Description of Artificial Sequence: Synthetic oligonucleotide
ucagaggucuuacuuccug

SEQ ID NO: 2291177 - RNA, 19 nt, Artificial Sequence
  Description of Artificial Sequence: Synthetic oligonucleotide
gguuccaggagcaaagugg

SEQ ID NO: 2291178 - RNA, 19 nt, Artificial Sequence
  Description of Artificial Sequence: Synthetic oligonucleotide
aagggcagacggcuguagg

SEQ ID NO: 2291179 - RNA, 19 nt, Artificial Sequence
  Description of Artificial Sequence: Synthetic oligonucleotide
gguuuugcgugcaugaggg

SEQ ID NO: 2291180 - RNA, 19 nt, Artificial Sequence
  Description of Artificial Sequence: Synthetic oligonucleotide
guaacggccaguucucugc

SEQ ID NO: 2291181 - RNA, 19 nt, Artificial Sequence
  Description of Artificial Sequence: Synthetic oligonucleotide
accgaaucguuaguggccc

SEQ ID NO: 2291182 - RNA, 19 nt, Artificial Sequence
  Description of Artificial Sequence: Synthetic oligonucleotide
uccagcgucauguuuggcu

SEQ ID NO: 2291183 - RNA, 19 nt, Artificial Sequence
  Description of Artificial Sequence: Synthetic oligonucleotide
aucucggaacacaaguccc

SEQ ID NO: 2291184 - RNA, 19 nt, Artificial Sequence
  Description of Artificial Sequence: Synthetic oligonucleotide
uuuugcgugcaugagggac

SEQ ID NO: 2291185 - RNA, 19 nt, Artificial Sequence
  Description of Artificial Sequence: Synthetic oligonucleotide
acgaccgaaucguuagugg

SEQ ID NO: 2291186 - RNA, 19 nt, Artificial Sequence
  Description of Artificial Sequence: Synthetic oligonucleotide
gaaguggaucuucucgcag

SEQ ID NO: 2291187 - RNA, 19 nt, Artificial Sequence
  Description of Artificial Sequence: Synthetic oligonucleotide
aguucucgaaagagaagcc

SEQ ID NO: 2291188 - RNA, 19 nt, Artificial Sequence
  Description of Artificial Sequence: Synthetic oligonucleotide
aggagcaaagugguaacgg

SEQ ID NO: 2291189 - RNA, 19 nt, Artificial Sequence
  Description of Artificial Sequence: Synthetic oligonucleotide
ucauguuuggcuggaaccu

SEQ ID NO: 2291190 - RNA, 19 nt, Artificial Sequence
  Description of Artificial Sequence: Synthetic oligonucleotide
ucccacguggccuugguac

SEQ ID NO: 2291191 - RNA, 19 nt, Artificial Sequence
  Description of Artificial Sequence: Synthetic oligonucleotide
guagcuccaucuuggaagc

SEQ ID NO: 2291192 - RNA, 19 nt, Artificial Sequence
  Description of Artificial Sequence: Synthetic oligonucleotide
auguuuguauuuccggggu

SEQ ID NO: 2291193 - RNA, 19 nt, Artificial Sequence
  Description of Artificial Sequence: Synthetic oligonucleotide
ucagugaugcucccacgug

SEQ ID NO: 2291194 - RNA, 19 nt, Artificial Sequence
  Description of Artificial Sequence: Synthetic oligonucleotide
ugaaguggaucuucucgca

SEQ ID NO: 2291195 - RNA, 19 nt, Artificial Sequence
  Description of Artificial Sequence: Synthetic oligonucleotide
ugagggacccgaaggcccg

SEQ ID NO: 2291196 - RNA, 19 nt, Artificial Sequence
  Description of Artificial Sequence: Synthetic oligonucleotide
ucuguguuccacugccugc

SEQ ID NO: 2291197 - RNA, 19 nt, Artificial Sequence
  Description of Artificial Sequence: Synthetic oligonucleotide
uccaggagcaaagugguaa

SEQ ID NO: 2291198 - RNA, 19 nt, Artificial Sequence
  Description of Artificial Sequence: Synthetic oligonucleotide
uuuauuccaccuccauggu

SEQ ID NO: 2291199 - RNA, 19 nt, Artificial Sequence
  Description of Artificial Sequence: Synthetic oligonucleotide
cagugaugcucccacgugg

SEQ ID NO: 2291200 - RNA, 19 nt, Artificial Sequence
  Description of Artificial Sequence: Synthetic oligonucleotide
agugaugcucccacguggc

SEQ ID NO: 2291201 - RNA, 19 nt, Artificial Sequence
  Description of Artificial Sequence: Synthetic oligonucleotide
uccaccacgaccgaaucgu

SEQ ID NO: 2291202 - RNA, 19 nt, Artificial Sequence
  Description of Artificial Sequence: Synthetic oligonucleotide
uaggccacuuuauuccacc

SEQ ID NO: 2291203 - RNA, 19 nt, Artificial Sequence
  Description of Artificial Sequence: Synthetic oligonucleotide
agucccgcgaugguagucc

SEQ ID NO: 2291204 - RNA, 19 nt, Artificial Sequence
  Description of Artificial Sequence: Synthetic oligonucleotide
gaucagugaugcucccacg

SEQ ID NO: 2291205 - RNA, 19 nt, Artificial Sequence
  Description of Artificial Sequence: Synthetic oligonucleotide
ucuucucgcagcuuuuguc

SEQ ID NO: 2291206 - RNA, 19 nt, Artificial Sequence
  Description of Artificial Sequence: Synthetic oligonucleotide
cagaggucuuacuuccugg

SEQ ID NO: 2291207 - RNA, 19 nt, Artificial Sequence
  Description of Artificial Sequence: Synthetic oligonucleotide
ugguagucccgguuuugcg

SEQ ID NO: 2291208 - RNA, 19 nt, Artificial Sequence
  Description of Artificial Sequence: Synthetic oligonucleotide
augagggacccgaaggccc

SEQ ID NO: 2291209 - RNA, 19 nt, Artificial Sequence
  Description of Artificial Sequence: Synthetic oligonucleotide
ucuggcaguucucgaaaga

SEQ ID NO: 2291210 - RNA, 19 nt, Artificial Sequence
  Description of Artificial Sequence: Synthetic oligonucleotide
ucuggcgcaggauacgggu

SEQ ID NO: 2291211 - RNA, 19 nt, Artificial Sequence
  Description of Artificial Sequence: Synthetic oligonucleotide
uguuccaaggacgcauucc

SEQ ID NO: 2291212 - RNA, 19 nt, Artificial Sequence
  Description of Artificial Sequence: Synthetic oligonucleotide
uuuccgggguuuauucccc

SEQ ID NO: 2291213 - RNA, 19 nt, Artificial Sequence
  Description of Artificial Sequence: Synthetic oligonucleotide
aacuccaucucggaacaca

SEQ ID NO: 2291214 - RNA, 19 nt, Artificial Sequence
  Description of Artificial Sequence: Synthetic oligonucleotide
gucuuaggccacuuuauuc

SEQ ID NO: 2291215 - RNA, 19 nt, Artificial Sequence
  Description of Artificial Sequence: Synthetic oligonucleotide
aagccaacugagauccggg

SEQ ID NO: 2291216 - RNA, 19 nt, Artificial Sequence
  Description of Artificial Sequence: Synthetic oligonucleotide
aggaccuguuccaaggacg

SEQ ID NO: 2291217 - RNA, 19 nt, Artificial Sequence
  Description of Artificial Sequence: Synthetic oligonucleotide
ugguuccaggagcaaagug

SEQ ID NO: 2291218 - RNA, 19 nt, Artificial Sequence
  Description of Artificial Sequence: Synthetic oligonucleotide
aggaucccugcagugaugg

SEQ ID NO: 2291219 - RNA, 19 nt, Artificial Sequence
  Description of Artificial Sequence: Synthetic oligonucleotide
ccaagauaacuccaucucg

SEQ ID NO: 2291220 - RNA, 19 nt, Artificial Sequence
  Description of Artificial Sequence: Synthetic oligonucleotide
uggcaguucucgaaagaga

SEQ ID NO: 2291221 - RNA, 19 nt, Artificial Sequence
  Description of Artificial Sequence: Synthetic oligonucleotide
aaucguuaguggcccgugu

SEQ ID NO: 2291222 - RNA, 19 nt, Artificial Sequence
  Description of Artificial Sequence: Synthetic oligonucleotide
aaagugguaacggccaguu

SEQ ID NO: 2291223 - RNA, 19 nt, Artificial Sequence
  Description of Artificial Sequence: Synthetic oligonucleotide
uuauuccaccuccaugguc

SEQ ID NO: 2291224 - RNA, 19 nt, Artificial Sequence
  Description of Artificial Sequence: Synthetic oligonucleotide
agugucuggcgcaggauac

SEQ ID NO: 2291225 - RNA, 19 nt, Artificial Sequence
  Description of Artificial Sequence: Synthetic oligonucleotide
agccaacugagauccgggg

SEQ ID NO: 2291226 - RNA, 19 nt, Artificial Sequence
  Description of Artificial Sequence: Synthetic oligonucleotide
agaucaaccccgcccacga

SEQ ID NO: 2291227 - RNA, 19 nt, Artificial Sequence
  Description of Artificial Sequence: Synthetic oligonucleotide
ucucggggcaggaaagcca

SEQ ID NO: 2291228 - RNA, 19 nt, Artificial Sequence
  Description of Artificial Sequence: Synthetic oligonucleotide
agaagccuccucuguguuc

SEQ ID NO: 2291229 - RNA, 19 nt, Artificial Sequence
  Description of Artificial Sequence: Synthetic oligonucleotide
guagucccgguuuugcgug

SEQ ID NO: 2291230 - RNA, 19 nt, Artificial Sequence
  Description of Artificial Sequence: Synthetic oligonucleotide
aacggccaguucucugcac

SEQ ID NO: 2291231 - RNA, 19 nt, Artificial Sequence
  Description of Artificial Sequence: Synthetic oligonucleotide
uguauccgcgcccaagaua

SEQ ID NO: 2291232 - RNA, 19 nt, Artificial Sequence
  Description of Artificial Sequence: Synthetic oligonucleotide
ggucagaucaaccccgccc

SEQ ID NO: 2291233 - RNA, 19 nt, Artificial Sequence
  Description of Artificial Sequence: Synthetic oligonucleotide
agauaacuccaucucggaa

SEQ ID NO: 2291234 - RNA, 19 nt, Artificial Sequence
  Description of Artificial Sequence: Synthetic oligonucleotide
acacaugcauccacacugc

SEQ ID NO: 2291235 - RNA, 19 nt, Artificial Sequence
  Description of Artificial Sequence: Synthetic oligonucleotide
acaagucccgcgaugguag

SEQ ID NO: 2291236 - RNA, 19 nt, Artificial Sequence
  Description of Artificial Sequence: Synthetic oligonucleotide
ucaucucaguguccgcagc

SEQ ID NO: 2291237 - RNA, 19 nt, Artificial Sequence
  Description of Artificial Sequence: Synthetic oligonucleotide
gauacgggugaccguggcc

SEQ ID NO: 2291238 - RNA, 19 nt, Artificial Sequence
  Description of Artificial Sequence: Synthetic oligonucleotide
aucucggggcaggaaagcc

SEQ ID NO: 2291239 - RNA, 19 nt, Artificial Sequence
  Description of Artificial Sequence: Synthetic oligonucleotide
gaacacaagucccgcgaug

SEQ ID NO: 2291240 - RNA, 19 nt, Artificial Sequence
  Description of Artificial Sequence: Synthetic oligonucleotide
gaccgaaucguuaguggcc

SEQ ID NO: 2291241 - RNA, 19 nt, Artificial Sequence
  Description of Artificial Sequence: Synthetic oligonucleotide
gucagaucaaccccgccca

SEQ ID NO: 2291242 - RNA, 19 nt, Artificial Sequence
  Description of Artificial Sequence: Synthetic oligonucleotide
caucucaguguccgcagcc

SEQ ID NO: 2291243 - RNA, 19 nt, Artificial Sequence
  Description of Artificial Sequence: Synthetic oligonucleotide
auacgggugaccguggcca

SEQ ID NO: 2291244 - RNA, 19 nt, Artificial Sequence
  Description of Artificial Sequence: Synthetic oligonucleotide
uuaggccacuuuauuccac

SEQ ID NO: 2291245 - RNA, 19 nt, Artificial Sequence
  Description of Artificial Sequence: Synthetic oligonucleotide
ugcaccguuuccuccagaa

SEQ ID NO: 2291246 - RNA, 19 nt, Artificial Sequence
  Description of Artificial Sequence: Synthetic oligonucleotide
gacccgaaggcccgagagg

SEQ ID NO: 2291247 - RNA, 19 nt, Artificial Sequence
  Description of Artificial Sequence: Synthetic oligonucleotide
ucgaaagagaagccuccuc

SEQ ID NO: 2291248 - RNA, 19 nt, Artificial Sequence
  Description of Artificial Sequence: Synthetic oligonucleotide
agcuuuuguccaccacgac

SEQ ID NO: 2291249 - RNA, 19 nt, Artificial Sequence
  Description of Artificial Sequence: Synthetic oligonucleotide
guauccgcgcccaagauaa

SEQ ID NO: 2291250 - RNA, 19 nt, Artificial Sequence
  Description of Artificial Sequence: Synthetic oligonucleotide
agcaucucggggcaggaaa

SEQ ID NO: 2291251 - RNA, 19 nt, Artificial Sequence
  Description of Artificial Sequence: Synthetic oligonucleotide
cuguaccaagcucuaaguc

SEQ ID NO: 2291252 - RNA, 19 nt, Artificial Sequence
  Description of Artificial Sequence: Synthetic oligonucleotide
aagucuuaggccacuuuau

SEQ ID NO: 2291253 - RNA, 19 nt, Artificial Sequence
  Description of Artificial Sequence: Synthetic oligonucleotide
cagugaucacacaugcauc

SEQ ID NO: 2291254 - RNA, 19 nt, Artificial Sequence
  Description of Artificial Sequence: Synthetic oligonucleotide
uucucgcagcuuuugucca

SEQ ID NO: 2291255 - RNA, 19 nt, Artificial Sequence
  Description of Artificial Sequence: Synthetic oligonucleotide
gucaucucaguguccgcag

SEQ ID NO: 2291256 - RNA, 19 nt, Artificial Sequence
  Description of Artificial Sequence: Synthetic oligonucleotide
uggccuugguaccggaaga

SEQ ID NO: 2291257 - RNA, 19 nt, Artificial Sequence
  Description of Artificial Sequence: Synthetic oligonucleotide
caggauacgggugaccgug

SEQ ID NO: 2291258 - RNA, 19 nt, Artificial Sequence
  Description of Artificial Sequence: Synthetic oligonucleotide
gguucagaggucuuacuuc

SEQ ID NO: 2291259 - RNA, 19 nt, Artificial Sequence
  Description of Artificial Sequence: Synthetic oligonucleotide
aaagggcagacggcuguag

SEQ ID NO: 2291260 - RNA, 19 nt, Artificial Sequence
  Description of Artificial Sequence: Synthetic oligonucleotide
ucguuaguggcccguguau

SEQ ID NO: 2291261 - RNA, 19 nt, Artificial Sequence
  Description of Artificial Sequence: Synthetic oligonucleotide
ggacgcauuccucuggcag

SEQ ID NO: 2291262 - RNA, 19 nt, Artificial Sequence
  Description of Artificial Sequence: Synthetic oligonucleotide
uggcgcaggauacggguga

SEQ ID NO: 2291263 - RNA, 19 nt, Artificial Sequence
  Description of Artificial Sequence: Synthetic oligonucleotide
gaggaccuguuccaaggac

SEQ ID NO: 2291264 - RNA, 19 nt, Artificial Sequence
  Description of Artificial Sequence: Synthetic oligonucleotide
ccaccaacagcucuugugc

SEQ ID NO: 2291265 - RNA, 19 nt, Artificial Sequence
  Description of Artificial Sequence: Synthetic oligonucleotide
gaucacacaugcauccaca

SEQ ID NO: 2291266 - RNA, 19 nt, Artificial Sequence
  Description of Artificial Sequence: Synthetic oligonucleotide
caugagggacccgaaggcc

SEQ ID NO: 2291267 - RNA, 19 nt, Artificial Sequence
  Description of Artificial Sequence: Synthetic oligonucleotide
ggcaggaaagccaacugag

SEQ ID NO: 2291268 - RNA, 19 nt, Artificial Sequence
  Description of Artificial Sequence: Synthetic oligonucleotide
ucugcaccguuuccuccag

SEQ ID NO: 2291269 - RNA, 19 nt, Artificial Sequence
  Description of Artificial Sequence: Synthetic oligonucleotide
uccucuggcaguucucgaa

SEQ ID NO: 2291270 - RNA, 19 nt, Artificial Sequence
  Description of Artificial Sequence: Synthetic oligonucleotide
uguuuguauuuccgggguu

SEQ ID NO: 2291271 - RNA, 19 nt, Artificial Sequence
  Description of Artificial Sequence: Synthetic oligonucleotide
agggcagacggcuguagga

SEQ ID NO: 2291272 - RNA, 19 nt, Artificial Sequence
  Description of Artificial Sequence: Synthetic oligonucleotide
uccgcgcccaagauaacuc

SEQ ID NO: 2291273 - RNA, 19 nt, Artificial Sequence
  Description of Artificial Sequence: Synthetic oligonucleotide
ugaccguggccacccgagg

SEQ ID NO: 2291274 - RNA, 19 nt, Artificial Sequence
  Description of Artificial Sequence: Synthetic oligonucleotide
agucuuaggccacuuuauu

SEQ ID NO: 2291275 - RNA, 19 nt, Artificial Sequence
  Description of Artificial Sequence: Synthetic oligonucleotide
uaacggccaguucucugca

SEQ ID NO: 2291276 - RNA, 19 nt, Artificial Sequence
  Description of Artificial Sequence: Synthetic oligonucleotide
acggcuguaggaaccgugg

SEQ ID NO: 2291277 - RNA, 19 nt, Artificial Sequence
  Description of Artificial Sequence: Synthetic oligonucleotide
ugcauccuguccagagccc

SEQ ID NO: 2291278 - RNA, 19 nt, Artificial Sequence
  Description of Artificial Sequence: Synthetic oligonucleotide
guaccggaagagugucugg

SEQ ID NO: 2291279 - RNA, 19 nt, Artificial Sequence
  Description of Artificial Sequence: Synthetic oligonucleotide
agaggaccuguuccaagga

SEQ ID NO: 2291280 - RNA, 19 nt, Artificial Sequence
  Description of Artificial Sequence: Synthetic oligonucleotide
acuggcuuugugggagagc

SEQ ID NO: 2291281 - RNA, 19 nt, Artificial Sequence
  Description of Artificial Sequence: Synthetic oligonucleotide
guccaccacgaccgaaucg

SEQ ID NO: 2291282 - RNA, 19 nt, Artificial Sequence
  Description of Artificial Sequence: Synthetic oligonucleotide
cuuaggccacuuuauucca

SEQ ID NO: 2291283 - RNA, 19 nt, Artificial Sequence
  Description of Artificial Sequence: Synthetic oligonucleotide
ggaaccuguccuccaacag

SEQ ID NO: 2291284 - RNA, 19 nt, Artificial Sequence
  Description of Artificial Sequence: Synthetic oligonucleotide
guuccaaggacgcauuccu

SEQ ID NO: 2291285 - RNA, 19 nt, Artificial Sequence
  Description of Artificial Sequence: Synthetic oligonucleotide
acggccaguucucugcacu

SEQ ID NO: 2291286 - RNA, 19 nt, Artificial Sequence
  Description of Artificial Sequence: Synthetic oligonucleotide
gaugguagucccgguuuug

SEQ ID NO: 2291287 - RNA, 19 nt, Artificial Sequence
  Description of Artificial Sequence: Synthetic oligonucleotide
ccuugguaccggaagagug

SEQ ID NO: 2291288 - RNA, 19 nt, Artificial Sequence
  Description of Artificial Sequence: Synthetic oligonucleotide
ucacggccgguggacagcg

SEQ ID NO: 2291289 - RNA, 19 nt, Artificial Sequence
  Description of Artificial Sequence: Synthetic oligonucleotide
aagucccgcgaugguaguc

SEQ ID NO: 2291290 - RNA, 19 nt, Artificial Sequence
  Description of Artificial Sequence: Synthetic oligonucleotide
caggagcaaagugguaacg

SEQ ID NO: 2291291 - RNA, 19 nt, Artificial Sequence
  Description of Artificial Sequence: Synthetic oligonucleotide
gaaucguuaguggcccgug

SEQ ID NO: 2291292 - RNA, 19 nt, Artificial Sequence
  Description of Artificial Sequence: Synthetic oligonucleotide
cacaugcauccacacugcc

SEQ ID NO: 2291293 - RNA, 19 nt, Artificial Sequence
  Description of Artificial Sequence: Synthetic oligonucleotide
ccaacagugccaaggcugc

SEQ ID NO: 2291294 - RNA, 19 nt, Artificial Sequence
  Description of Artificial Sequence: Synthetic oligonucleotide
cagcuuuuguccaccacga

SEQ ID NO: 2291295 - RNA, 19 nt, Artificial Sequence
  Description of Artificial Sequence: Synthetic oligonucleotide
uuccaaggacgcauuccuc

SEQ ID NO: 2291296 - RNA, 19 nt, Artificial Sequence
  Description of Artificial Sequence: Synthetic oligonucleotide
aguaaagggcagacggcug

SEQ ID NO: 2291297 - RNA, 19 nt, Artificial Sequence
  Description of Artificial Sequence: Synthetic oligonucleotide
gcaugagggacccgaaggc

SEQ ID NO: 2291298 - RNA, 19 nt, Artificial Sequence
  Description of Artificial Sequence: Synthetic oligonucleotide
gguaccggaagagugucug

SEQ ID NO: 2291299 - RNA, 19 nt, Artificial Sequence
  Description of Artificial Sequence: Synthetic oligonucleotide
cucggaacacaagucccgc

SEQ ID NO: 2291300 - RNA, 19 nt, Artificial Sequence
  Description of Artificial Sequence: Synthetic oligonucleotide
aucguuaguggcccgugua

SEQ ID NO: 2291301 - RNA, 19 nt, Artificial Sequence
  Description of Artificial Sequence: Synthetic oligonucleotide
ccacgaucagugaugcucc

SEQ ID NO: 2291302 - RNA, 19 nt, Artificial Sequence
  Description of Artificial Sequence: Synthetic oligonucleotide
uugguaccggaagaguguc

SEQ ID NO: 2291303 - RNA, 19 nt, Artificial Sequence
  Description of Artificial Sequence: Synthetic oligonucleotide
cacgaccgaaucguuagug

SEQ ID NO: 2291304 - RNA, 19 nt, Artificial Sequence
  Description of Artificial Sequence: Synthetic oligonucleotide
ucagaucaaccccgcccac

SEQ ID NO: 2291305 - RNA, 19 nt, Artificial Sequence
  Description of Artificial Sequence: Synthetic oligonucleotide
cauguuuggcuggaaccug

SEQ ID NO: 2291306 - RNA, 19 nt, Artificial Sequence
  Description of Artificial Sequence: Synthetic oligonucleotide
uaguggcccguguauccgc

SEQ ID NO: 2291307 - RNA, 19 nt, Artificial Sequence
  Description of Artificial Sequence: Synthetic oligonucleotide
agugccaaggcugcauccu

SEQ ID NO: 2291308 - RNA, 19 nt, Artificial Sequence
  Description of Artificial Sequence: Synthetic oligonucleotide
cuccaucucggaacacaag

SEQ ID NO: 2291309 - RNA, 19 nt, Artificial Sequence
  Description of Artificial Sequence: Synthetic oligonucleotide
cagaucaaccccgcccacg

SEQ ID NO: 2291310 - RNA, 19 nt, Artificial Sequence
  Description of Artificial Sequence: Synthetic oligonucleotide
gacggcuguaggaaccgug

SEQ ID NO: 2291311 - RNA, 19 nt, Artificial Sequence
  Description of Artificial Sequence: Synthetic oligonucleotide
cacccgaggcucacggccg

SEQ ID NO: 2291312 - RNA, 19 nt, Artificial Sequence
  Description of Artificial Sequence: Synthetic oligonucleotide
ggcccggucagaucaaccc

SEQ ID NO: 2291313 - RNA, 19 nt, Artificial Sequence
  Description of Artificial Sequence: Synthetic oligonucleotide
ggacccgaaggcccgagag

SEQ ID NO: 2291314 - RNA, 19 nt, Artificial Sequence
  Description of Artificial Sequence: Synthetic oligonucleotide
cagcgucauguuuggcugg

SEQ ID NO: 2291315 - RNA, 19 nt, Artificial Sequence
  Description of Artificial Sequence: Synthetic oligonucleotide
uugcgugcaugagggaccc

SEQ ID NO: 2291316 - RNA, 19 nt, Artificial Sequence
  Description of Artificial Sequence: Synthetic oligonucleotide
uguccgcagccacuccagc

SEQ ID NO: 2291317 - RNA, 19 nt, Artificial Sequence
  Description of Artificial Sequence: Synthetic oligonucleotide
ucucgcagcuuuuguccac

SEQ ID NO: 2291318 - RNA, 19 nt, Artificial Sequence
  Description of Artificial Sequence: Synthetic oligonucleotide
acaugcauccacacugccu

SEQ ID NO: 2291319 - RNA, 19 nt, Artificial Sequence
  Description of Artificial Sequence: Synthetic oligonucleotide
accguuuccuccagaagcu

SEQ ID NO: 2291320 - RNA, 19 nt, Artificial Sequence
  Description of Artificial Sequence: Synthetic oligonucleotide
cccaagauaacuccaucuc

SEQ ID NO: 2291321 - RNA, 19 nt, Artificial Sequence
  Description of Artificial Sequence: Synthetic oligonucleotide
gugcacgccauagaguuga

SEQ ID NO: 2291322 - RNA, 19 nt, Artificial Sequence
  Description of Artificial Sequence: Synthetic oligonucleotide
cuugguaccggaagagugu

SEQ ID NO: 2291323 - RNA, 19 nt, Artificial Sequence
  Description of Artificial Sequence: Synthetic oligonucleotide
cagacggcuguaggaaccg

SEQ ID NO: 2291324 - RNA, 19 nt, Artificial Sequence
  Description of Artificial Sequence: Synthetic oligonucleotide
cccuguaccaagcucuaag

SEQ ID NO: 2291325 - RNA, 19 nt, Artificial Sequence
  Description of Artificial Sequence: Synthetic oligonucleotide
gguaacggccaguucucug

SEQ ID NO: 2291326 - RNA, 19 nt, Artificial Sequence
  Description of Artificial Sequence: Synthetic oligonucleotide
gaaagccaacugagauccg

SEQ ID NO: 2291327 - RNA, 19 nt, Artificial Sequence
  Description of Artificial Sequence: Synthetic oligonucleotide
ccagcgucauguuuggcug

SEQ ID NO: 2291328 - RNA, 19 nt, Artificial Sequence
  Description of Artificial Sequence: Synthetic oligonucleotide
ucccgcgaugguagucccg

SEQ ID NO: 2291329 - RNA, 19 nt, Artificial Sequence
  Description of Artificial Sequence: Synthetic oligonucleotide
aggccacuuuauuccaccu

SEQ ID NO: 2291330 - RNA, 19 nt, Artificial Sequence
  Description of Artificial Sequence: Synthetic oligonucleotide
cccggucagaucaaccccg

SEQ ID NO: 2291331 - RNA, 19 nt, Artificial Sequence
  Description of Artificial Sequence: Synthetic oligonucleotide
uggaagcugccauccgcgu

SEQ ID NO: 2291332 - RNA, 19 nt, Artificial Sequence
  Description of Artificial Sequence: Synthetic oligonucleotide
uuccucuggcaguucucga

SEQ ID NO: 2291333 - RNA, 19 nt, Artificial Sequence
  Description of Artificial Sequence: Synthetic oligonucleotide
gugaccguggccacccgag

SEQ ID NO: 2291334 - RNA, 19 nt, Artificial Sequence
  Description of Artificial Sequence: Synthetic oligonucleotide
ugguaccggaagagugucu

SEQ ID NO: 2291335 - RNA, 19 nt, Artificial Sequence
  Description of Artificial Sequence: Synthetic oligonucleotide
gacgcauuccucuggcagu

SEQ ID NO: 2291336 - RNA, 19 nt, Artificial Sequence
  Description of Artificial Sequence: Synthetic oligonucleotide
cucgcagcuuuuguccacc

SEQ ID NO: 2291337 - RNA, 19 nt, Artificial Sequence
  Description of Artificial Sequence: Synthetic oligonucleotide
ggcaguucucgaaagagaa

SEQ ID NO: 2291338 - RNA, 19 nt, Artificial Sequence
  Description of Artificial Sequence: Synthetic oligonucleotide
caggaaagccaacugagau

SEQ ID NO: 2291339 - RNA, 19 nt, Artificial Sequence
  Description of Artificial Sequence: Synthetic oligonucleotide
ucuaagucuuaggccacuu

SEQ ID NO: 2291340 - RNA, 19 nt, Artificial Sequence
  Description of Artificial Sequence: Synthetic oligonucleotide
cccacgaucagugaugcuc

SEQ ID NO: 2291341 - RNA, 19 nt, Artificial Sequence
  Description of Artificial Sequence: Synthetic oligonucleotide
cuggaaccuguccuccaac

SEQ ID NO: 2291342 - RNA, 19 nt, Artificial Sequence
  Description of Artificial Sequence: Synthetic oligonucleotide
uggucaucucaguguccgc

SEQ ID NO: 2291343 - RNA, 19 nt, Artificial Sequence
  Description of Artificial Sequence: Synthetic oligonucleotide
uccagguucagaggucuua

SEQ ID NO: 2291344 - RNA, 19 nt, Artificial Sequence
  Description of Artificial Sequence: Synthetic oligonucleotide
cacgaucagugaugcuccc

SEQ ID NO: 2291345 - RNA, 19 nt, Artificial Sequence
  Description of Artificial Sequence: Synthetic oligonucleotide
gugccaaggcugcauccug

SEQ ID NO: 2291346 - RNA, 19 nt, Artificial Sequence
  Description of Artificial Sequence: Synthetic oligonucleotide
cuggcgcaggauacgggug

SEQ ID NO: 2291347 - RNA, 19 nt, Artificial Sequence
  Description of Artificial Sequence: Synthetic oligonucleotide
cugggcgccuguugcagug

SEQ ID NO: 2291348 - RNA, 19 nt, Artificial Sequence
  Description of Artificial Sequence: Synthetic oligonucleotide
aggcccggucagaucaacc

SEQ ID NO: 2291349 - RNA, 19 nt, Artificial Sequence
  Description of Artificial Sequence: Synthetic oligonucleotide
uggacagcgcguguagcuc

SEQ ID NO: 2291350 - RNA, 19 nt, Artificial Sequence
  Description of Artificial Sequence: Synthetic oligonucleotide
auguuuggcuggaaccugu

SEQ ID NO: 2291351 - RNA, 19 nt, Artificial Sequence
  Description of Artificial Sequence: Synthetic oligonucleotide
acacaagucccgcgauggu

SEQ ID NO: 2291352 - RNA, 19 nt, Artificial Sequence
  Description of Artificial Sequence: Synthetic oligonucleotide
uuccaccaacagcucuugu

SEQ ID NO: 2291353 - RNA, 19 nt, Artificial Sequence
  Description of Artificial Sequence: Synthetic oligonucleotide
ugcacgccauagaguugag

SEQ ID NO: 2291354 - RNA, 19 nt, Artificial Sequence
  Description of Artificial Sequence: Synthetic oligonucleotide
aguggcccguguauccgcg

SEQ ID NO: 2291355 - RNA, 19 nt, Artificial Sequence
  Description of Artificial Sequence: Synthetic oligonucleotide
uagucccgguuuugcgugc

SEQ ID NO: 2291356 - RNA, 19 nt, Artificial Sequence
  Description of Artificial Sequence: Synthetic oligonucleotide
cuuccaccaacagcucuug

SEQ ID NO: 2291357 - RNA, 19 nt, Artificial Sequence
  Description of Artificial Sequence: Synthetic oligonucleotide
auccgcgcccaagauaacu

SEQ ID NO: 2291358 - RNA, 19 nt, Artificial Sequence
  Description of Artificial Sequence: Synthetic oligonucleotide
aaccccgcccacgaucagu

SEQ ID NO: 2291359 - RNA, 19 nt, Artificial Sequence
  Description of Artificial Sequence: Synthetic oligonucleotide
aguugaggcccggucagau

SEQ ID NO: 2291360 - RNA, 19 nt, Artificial Sequence
  Description of Artificial Sequence: Synthetic oligonucleotide
cgaccgaaucguuaguggc

SEQ ID NO: 2291361 - RNA, 19 nt, Artificial Sequence
  Description of Artificial Sequence: Synthetic oligonucleotide
guucucgaaagagaagccu

SEQ ID NO: 2291362 - RNA, 19 nt, Artificial Sequence
  Description of Artificial Sequence: Synthetic oligonucleotide
agcuccacagcaguagauu

SEQ ID NO: 2291363 - RNA, 19 nt, Artificial Sequence
  Description of Artificial Sequence: Synthetic oligonucleotide
agcugugguuccaggagca

SEQ ID NO: 2291364 - RNA, 19 nt, Artificial Sequence
  Description of Artificial Sequence: Synthetic oligonucleotide
cuguuccaaggacgcauuc

SEQ ID NO: 2291365 - RNA, 19 nt, Artificial Sequence
  Description of Artificial Sequence: Synthetic oligonucleotide
ccggaagagugucuggcgc

SEQ ID NO: 2291366 - RNA, 19 nt, Artificial Sequence
  Description of Artificial Sequence: Synthetic oligonucleotide
gaggucuuacuuccugggu

SEQ ID NO: 2291367 - RNA, 19 nt, Artificial Sequence
  Description of Artificial Sequence: Synthetic oligonucleotide
cucggggcaggaaagccaa

SEQ ID NO: 2291368 - RNA, 19 nt, Artificial Sequence
  Description of Artificial Sequence: Synthetic oligonucleotide
ccaggagcaaagugguaac

SEQ ID NO: 2291369 - RNA, 19 nt, Artificial Sequence
  Description of Artificial Sequence: Synthetic oligonucleotide
gcaguaaagggcagacggc

SEQ ID NO: 2291370 - RNA, 19 nt, Artificial Sequence
  Description of Artificial Sequence: Synthetic oligonucleotide
guugaggcccggucagauc

SEQ ID NO: 2291371 - RNA, 19 nt, Artificial Sequence
  Description of Artificial Sequence: Synthetic oligonucleotide
uaccaagcucuaagucuua

SEQ ID NO: 2291372 - RNA, 19 nt, Artificial Sequence
  Description of Artificial Sequence: Synthetic oligonucleotide
aggacgcauuccucuggca

SEQ ID NO: 2291373 - RNA, 19 nt, Artificial Sequence
  Description of Artificial Sequence: Synthetic oligonucleotide
gugguaacggccaguucuc

SEQ ID NO: 2291374 - RNA, 19 nt, Artificial Sequence
  Description of Artificial Sequence: Synthetic oligonucleotide
ggacagcugugguuccagg

SEQ ID NO: 2291375 - RNA, 19 nt, Artificial Sequence
  Description of Artificial Sequence: Synthetic oligonucleotide
acgggugaccguggccacc

SEQ ID NO: 2291376 - RNA, 19 nt, Artificial Sequence
  Description of Artificial Sequence: Synthetic oligonucleotide
ggccacccgaggcucacgg

SEQ ID NO: 2291377 - RNA, 19 nt, Artificial Sequence
  Description of Artificial Sequence: Synthetic oligonucleotide
ccacccgaggcucacggcc

SEQ ID NO: 2291378 - RNA, 19 nt, Artificial Sequence
  Description of Artificial Sequence: Synthetic oligonucleotide
uaaagggcagacggcugua

SEQ ID NO: 2291379 - RNA, 19 nt, Artificial Sequence
  Description of Artificial Sequence: Synthetic oligonucleotide
acccgaggcucacggccgg

SEQ ID NO: 2291380 - RNA, 19 nt, Artificial Sequence
  Description of Artificial Sequence: Synthetic oligonucleotide
cgguuuugcgugcaugagg

SEQ ID NO: 2291381 - RNA, 19 nt, Artificial Sequence
  Description of Artificial Sequence: Synthetic oligonucleotide
ggucaucucaguguccgca

SEQ ID NO: 2291382 - RNA, 19 nt, Artificial Sequence
  Description of Artificial Sequence: Synthetic oligonucleotide
caggaucccugcagugaug

SEQ ID NO: 2291383 - RNA, 19 nt, Artificial Sequence
  Description of Artificial Sequence: Synthetic oligonucleotide
aaggcccgagaggaccugu

SEQ ID NO: 2291384 - RNA, 19 nt, Artificial Sequence
  Description of Artificial Sequence: Synthetic oligonucleotide
gcagacggcuguaggaacc

SEQ ID NO: 2291385 - RNA, 19 nt, Artificial Sequence
  Description of Artificial Sequence: Synthetic oligonucleotide
ggauacgggugaccguggc

SEQ ID NO: 2291386 - RNA, 19 nt, Artificial Sequence
  Description of Artificial Sequence: Synthetic oligonucleotide
ugguaacggccaguucucu

SEQ ID NO: 2291387 - RNA, 19 nt, Artificial Sequence
  Description of Artificial Sequence: Synthetic oligonucleotide
guggacagcgcguguagcu

SEQ ID NO: 2291388 - RNA, 19 nt, Artificial Sequence
  Description of Artificial Sequence: Synthetic oligonucleotide
gucuggcgcaggauacggg

SEQ ID NO: 2291389 - RNA, 19 nt, Artificial Sequence
  Description of Artificial Sequence: Synthetic oligonucleotide
cugggucaggacagcugug

SEQ ID NO: 2291390 - RNA, 19 nt, Artificial Sequence
  Description of Artificial Sequence: Synthetic oligonucleotide
acgaucagugaugcuccca

SEQ ID NO: 2291391 - RNA, 19 nt, Artificial Sequence
  Description of Artificial Sequence: Synthetic oligonucleotide
gaggcucacggccggugga

SEQ ID NO: 2291392 - RNA, 19 nt, Artificial Sequence
  Description of Artificial Sequence: Synthetic oligonucleotide
agcgucauguuuggcugga

SEQ ID NO: 2291393 - RNA, 19 nt, Artificial Sequence
  Description of Artificial Sequence: Synthetic oligonucleotide
uacgggugaccguggccac

SEQ ID NO: 2291394 - RNA, 19 nt, Artificial Sequence
  Description of Artificial Sequence: Synthetic oligonucleotide
caguaaagggcagacggcu

SEQ ID NO: 2291395 - RNA, 19 nt, Artificial Sequence
  Description of Artificial Sequence: Synthetic oligonucleotide
cgaucagugaugcucccac

SEQ ID NO: 2291396 - RNA, 19 nt, Artificial Sequence
  Description of Artificial Sequence: Synthetic oligonucleotide
cgcaggauacgggugaccg

SEQ ID NO: 2291397 - RNA, 19 nt, Artificial Sequence
  Description of Artificial Sequence: Synthetic oligonucleotide
gcgccuguugcagugauca

SEQ ID NO: 2291398 - RNA, 19 nt, Artificial Sequence
  Description of Artificial Sequence: Synthetic oligonucleotide
gguagucccgguuuugcgu

SEQ ID NO: 2291399 - RNA, 19 nt, Artificial Sequence
  Description of Artificial Sequence: Synthetic oligonucleotide
guuuugcgugcaugaggga

SEQ ID NO: 2291400 - RNA, 19 nt, Artificial Sequence
  Description of Artificial Sequence: Synthetic oligonucleotide
ugaggcccggucagaucaa

SEQ ID NO: 2291401 - RNA, 19 nt, Artificial Sequence
  Description of Artificial Sequence: Synthetic oligonucleotide
gcaucucggggcaggaaag

SEQ ID NO: 2291402 - RNA, 19 nt, Artificial Sequence
  Description of Artificial Sequence: Synthetic oligonucleotide
gcguggucaucucaguguc

SEQ ID NO: 2291403 - RNA, 19 nt, Artificial Sequence
  Description of Artificial Sequence: Synthetic oligonucleotide
gcaccguuuccuccagaag

SEQ ID NO: 2291404 - RNA, 19 nt, Artificial Sequence
  Description of Artificial Sequence: Synthetic oligonucleotide
ggcagacggcuguaggaac

SEQ ID NO: 2291405 - RNA, 19 nt, Artificial Sequence
  Description of Artificial Sequence: Synthetic oligonucleotide
uauccgcgcccaagauaac

SEQ ID NO: 2291406 - RNA, 19 nt, Artificial Sequence
  Description of Artificial Sequence: Synthetic oligonucleotide
ggcgaugaaguggaucuuc

SEQ ID NO: 2291407 - RNA, 19 nt, Artificial Sequence
  Description of Artificial Sequence: Synthetic oligonucleotide
gcccggucagaucaacccc

SEQ ID NO: 2291408 - RNA, 19 nt, Artificial Sequence
  Description of Artificial Sequence: Synthetic oligonucleotide
gucccgcgaugguaguccc

SEQ ID NO: 2291409 - RNA, 19 nt, Artificial Sequence
  Description of Artificial Sequence: Synthetic oligonucleotide
ggccacuuuauuccaccuc

SEQ ID NO: 2291410 - RNA, 19 nt, Artificial Sequence
  Description of Artificial Sequence: Synthetic oligonucleotide
gccuguugcagugaucaca

SEQ ID NO: 2291411 - RNA, 19 nt, Artificial Sequence
  Description of Artificial Sequence: Synthetic oligonucleotide
gggugcacgccauagaguu

SEQ ID NO: 2291412 - RNA, 19 nt, Artificial Sequence
  Description of Artificial Sequence: Synthetic oligonucleotide
uaacuccaucucggaacac

SEQ ID NO: 2291413 - RNA, 19 nt, Artificial Sequence
  Description of Artificial Sequence: Synthetic oligonucleotide
cccacguggccuugguacc

SEQ ID NO: 2291414 - RNA, 19 nt, Artificial Sequence
  Description of Artificial Sequence: Synthetic oligonucleotide
cccgcgaugguagucccgg

SEQ ID NO: 2291415 - RNA, 19 nt, Artificial Sequence
  Description of Artificial Sequence: Synthetic oligonucleotide
cgucauguuuggcuggaac

SEQ ID NO: 2291416 - RNA, 19 nt, Artificial Sequence
  Description of Artificial Sequence: Synthetic oligonucleotide
ggucacccaggaucccugc

SEQ ID NO: 2291417 - RNA, 19 nt, Artificial Sequence
  Description of Artificial Sequence: Synthetic oligonucleotide
ccgaaggcccgagaggacc

SEQ ID NO: 2291418 - RNA, 19 nt, Artificial Sequence
  Description of Artificial Sequence: Synthetic oligonucleotide
acgcauuccucuggcaguu

SEQ ID NO: 2291419 - RNA, 19 nt, Artificial Sequence
  Description of Artificial Sequence: Synthetic oligonucleotide
cacaagucccgcgauggua

SEQ ID NO: 2291420 - RNA, 19 nt, Artificial Sequence
  Description of Artificial Sequence: Synthetic oligonucleotide
gguggacagcgcguguagc

SEQ ID NO: 2291421 - RNA, 19 nt, Artificial Sequence
  Description of Artificial Sequence: Synthetic oligonucleotide
caguguccgcagccacucc

SEQ ID NO: 2291422 - RNA, 19 nt, Artificial Sequence
  Description of Artificial Sequence: Synthetic oligonucleotide
gacagcgcguguagcucca

SEQ ID NO: 2291423 - RNA, 19 nt, Artificial Sequence
  Description of Artificial Sequence: Synthetic oligonucleotide
caccacgaccgaaucguua

SEQ ID NO: 2291424 - RNA, 19 nt, Artificial Sequence
  Description of Artificial Sequence: Synthetic oligonucleotide
gagaagccuccucuguguu

SEQ ID NO: 2291425 - RNA, 19 nt, Artificial Sequence
  Description of Artificial Sequence: Synthetic oligonucleotide
gggucgauggguggaccag

SEQ ID NO: 2291426 - RNA, 19 nt, Artificial Sequence
  Description of Artificial Sequence: Synthetic oligonucleotide
cccgguuuugcgugcauga

SEQ ID NO: 2291427 - RNA, 19 nt, Artificial Sequence
  Description of Artificial Sequence: Synthetic oligonucleotide
guggcccguguauccgcgc

SEQ ID NO: 2291428 - RNA, 19 nt, Artificial Sequence
  Description of Artificial Sequence: Synthetic oligonucleotide
gaggcccggucagaucaac

SEQ ID NO: 2291429 - RNA, 19 nt, Artificial Sequence
  Description of Artificial Sequence: Synthetic oligonucleotide
cugcacuggcuuuguggga

SEQ ID NO: 2291430 - RNA, 19 nt, Artificial Sequence
  Description of Artificial Sequence: Synthetic oligonucleotide
agucccgguuuugcgugca

SEQ ID NO: 2291431 - RNA, 19 nt, Artificial Sequence
  Description of Artificial Sequence: Synthetic oligonucleotide
cucaguguccgcagccacu

SEQ ID NO: 2291432 - RNA, 19 nt, Artificial Sequence
  Description of Artificial Sequence: Synthetic oligonucleotide
ggggucgauggguggacca

SEQ ID NO: 2291433 - RNA, 19 nt, Artificial Sequence
  Description of Artificial Sequence: Synthetic oligonucleotide
ugcgugcaugagggacccg

SEQ ID NO: 2291434 - RNA, 19 nt, Artificial Sequence
  Description of Artificial Sequence: Synthetic oligonucleotide
uggccacccgaggcucacg

SEQ ID NO: 2291435 - RNA, 19 nt, Artificial Sequence
  Description of Artificial Sequence: Synthetic oligonucleotide
ccgcccacgaucagugaug

SEQ ID NO: 2291436 - RNA, 19 nt, Artificial Sequence
  Description of Artificial Sequence: Synthetic oligonucleotide
acguggccuugguaccgga

SEQ ID NO: 2291437 - RNA, 19 nt, Artificial Sequence
  Description of Artificial Sequence: Synthetic oligonucleotide
gcucuaagucuuaggccac

SEQ ID NO: 2291438 - RNA, 19 nt, Artificial Sequence
  Description of Artificial Sequence: Synthetic oligonucleotide
cagggcaguaaagggcaga

SEQ ID NO: 2291439 - RNA, 19 nt, Artificial Sequence
  Description of Artificial Sequence: Synthetic oligonucleotide
ccggucagaucaaccccgc

SEQ ID NO: 2291440 - RNA, 19 nt, Artificial Sequence
  Description of Artificial Sequence: Synthetic oligonucleotide
ccuguaccaagcucuaagu

SEQ ID NO: 2291441 - RNA, 19 nt, Artificial Sequence
  Description of Artificial Sequence: Synthetic oligonucleotide
cuuugugggagagcucagu

SEQ ID NO: 2291442 - RNA, 19 nt, Artificial Sequence
  Description of Artificial Sequence: Synthetic oligonucleotide
cuaagucuuaggccacuuu

SEQ ID NO: 2291443 - RNA, 19 nt, Artificial Sequence
  Description of Artificial Sequence: Synthetic oligonucleotide
gcuuugugggagagcucag

SEQ ID NO: 2291444 - RNA, 19 nt, Artificial Sequence
  Description of Artificial Sequence: Synthetic oligonucleotide
ccgaaucguuaguggcccg

SEQ ID NO: 2291445 - RNA, 19 nt, Artificial Sequence
  Description of Artificial Sequence: Synthetic oligonucleotide
agacggcuguaggaaccgu

SEQ ID NO: 2291446 - RNA, 19 nt, Artificial Sequence
  Description of Artificial Sequence: Synthetic oligonucleotide
ggugaccguggccacccga

SEQ ID NO: 2291447 - RNA, 19 nt, Artificial Sequence
  Description of Artificial Sequence: Synthetic oligonucleotide
cuccacagcaguagauuuu

SEQ ID NO: 2291448 - RNA, 19 nt, Artificial Sequence
  Description of Artificial Sequence: Synthetic oligonucleotide
cgcguguagcuccaucuug

SEQ ID NO: 2291449 - RNA, 19 nt, Artificial Sequence
  Description of Artificial Sequence: Synthetic oligonucleotide
gcauuccucuggcaguucu

SEQ ID NO: 2291450 - RNA, 19 nt, Artificial Sequence
  Description of Artificial Sequence: Synthetic oligonucleotide
cucgaaagagaagccuccu

SEQ ID NO: 2291451 - RNA, 19 nt, Artificial Sequence
  Description of Artificial Sequence: Synthetic oligonucleotide
cagguucagaggucuuacu

SEQ ID NO: 2291452 - RNA, 19 nt, Artificial Sequence
  Description of Artificial Sequence: Synthetic oligonucleotide
ccacuuuauuccaccucca

SEQ ID NO: 2291453 - RNA, 19 nt, Artificial Sequence
  Description of Artificial Sequence: Synthetic oligonucleotide
ggaacacaagucccgcgau

SEQ ID NO: 2291454 - RNA, 19 nt, Artificial Sequence
  Description of Artificial Sequence: Synthetic oligonucleotide
ccgcguggucaucucagug

SEQ ID NO: 2291455 - RNA, 19 nt, Artificial Sequence
  Description of Artificial Sequence: Synthetic oligonucleotide
cguguauccgcgcccaaga

SEQ ID NO: 2291456 - RNA, 19 nt, Artificial Sequence
  Description of Artificial Sequence: Synthetic oligonucleotide
cguggucaucucagugucc

SEQ ID NO: 2291457 - RNA, 19 nt, Artificial Sequence
  Description of Artificial Sequence: Synthetic oligonucleotide
cggaacacaagucccgcga

SEQ ID NO: 2291458 - RNA, 19 nt, Artificial Sequence
  Description of Artificial Sequence: Synthetic oligonucleotide
ccgguuuugcgugcaugag

SEQ ID NO: 2291459 - RNA, 19 nt, Artificial Sequence
  Description of Artificial Sequence: Synthetic oligonucleotide
guguauccgcgcccaagau

SEQ ID NO: 2291460 - RNA, 19 nt, Artificial Sequence
  Description of Artificial Sequence: Synthetic oligonucleotide
caaccccgcccacgaucag

SEQ ID NO: 2291461 - RNA, 19 nt, Artificial Sequence
  Description of Artificial Sequence: Synthetic oligonucleotide
cauagaguugaggcccggu

SEQ ID NO: 2291462 - RNA, 19 nt, Artificial Sequence
  Description of Artificial Sequence: Synthetic oligonucleotide
cggcuguaggaaccguggg

SEQ ID NO: 2291463 - RNA, 19 nt, Artificial Sequence
  Description of Artificial Sequence: Synthetic oligonucleotide
gugguuccaggagcaaagu

SEQ ID NO: 2291464 - RNA, 19 nt, Artificial Sequence
  Description of Artificial Sequence: Synthetic oligonucleotide
ccguguauccgcgcccaag

SEQ ID NO: 2291465 - RNA, 19 nt, Artificial Sequence
  Description of Artificial Sequence: Synthetic oligonucleotide
gaucaaccccgcccacgau

SEQ ID NO: 2291466 - RNA, 19 nt, Artificial Sequence
  Description of Artificial Sequence: Synthetic oligonucleotide
cguuaguggcccguguauc

SEQ ID NO: 2291467 - RNA, 19 nt, Artificial Sequence
  Description of Artificial Sequence: Synthetic oligonucleotide
cucuaagucuuaggccacu

SEQ ID NO: 2291468 - RNA, 19 nt, Artificial Sequence
  Description of Artificial Sequence: Synthetic oligonucleotide
cacggccgguggacagcgc

SEQ ID NO: 2291469 - RNA, 19 nt, Artificial Sequence
  Description of Artificial Sequence: Synthetic oligonucleotide
cuugugcagccuccagcgu

SEQ ID NO: 2291470 - RNA, 19 nt, Artificial Sequence
  Description of Artificial Sequence: Synthetic oligonucleotide
gcgaugguagucccgguuu

SEQ ID NO: 2291471 - RNA, 19 nt, Artificial Sequence
  Description of Artificial Sequence: Synthetic oligonucleotide
gccacccgaggcucacggc

SEQ ID NO: 2291472 - RNA, 19 nt, Artificial Sequence
  Description of Artificial Sequence: Synthetic oligonucleotide
caacagugccaaggcugca

SEQ ID NO: 2291473 - RNA, 19 nt, Artificial Sequence
  Description of Artificial Sequence: Synthetic oligonucleotide
gcgaugaaguggaucuucu

SEQ ID NO: 2291474 - RNA, 19 nt, Artificial Sequence
  Description of Artificial Sequence: Synthetic oligonucleotide
cgcccacgaucagugaugc

SEQ ID NO: 2291475 - RNA, 19 nt, Artificial Sequence
  Description of Artificial Sequence: Synthetic oligonucleotide
gggugaccguggccacccg

SEQ ID NO: 2291476 - RNA, 19 nt, Artificial Sequence
  Description of Artificial Sequence: Synthetic oligonucleotide
caagucccgcgaugguagu

SEQ ID NO: 2291477 - RNA, 19 nt, Artificial Sequence
  Description of Artificial Sequence: Synthetic oligonucleotide
cugccauccgcguggucau

SEQ ID NO: 2291478 - RNA, 19 nt, Artificial Sequence
  Description of Artificial Sequence: Synthetic oligonucleotide
cgguggacagcgcguguag

SEQ ID NO: 2291479 - RNA, 19 nt, Artificial Sequence
  Description of Artificial Sequence: Synthetic oligonucleotide
ggcgcaggauacgggugac

SEQ ID NO: 2291480 - RNA, 19 nt, Artificial Sequence
  Description of Artificial Sequence: Synthetic oligonucleotide
cugcaccguuuccuccaga

SEQ ID NO: 2291481 - RNA, 19 nt, Artificial Sequence
  Description of Artificial Sequence: Synthetic oligonucleotide
ugccauccgcguggucauc

SEQ ID NO: 2291482 - RNA, 19 nt, Artificial Sequence
  Description of Artificial Sequence: Synthetic oligonucleotide
cccgaaggcccgagaggac

SEQ ID NO: 2291483 - RNA, 19 nt, Artificial Sequence
  Description of Artificial Sequence: Synthetic oligonucleotide
gcaggauacgggugaccgu

SEQ ID NO: 2291484 - RNA, 19 nt, Artificial Sequence
  Description of Artificial Sequence: Synthetic oligonucleotide
cgcagcuuuuguccaccac

SEQ ID NO: 2291485 - RNA, 19 nt, Artificial Sequence
  Description of Artificial Sequence: Synthetic oligonucleotide
cgggugaccguggccaccc

SEQ ID NO: 2291486 - RNA, 19 nt, Artificial Sequence
  Description of Artificial Sequence: Synthetic oligonucleotide
cucccacguggccuuggua

SEQ ID NO: 2291487 - RNA, 19 nt, Artificial Sequence
  Description of Artificial Sequence: Synthetic oligonucleotide
ccauccgcguggucaucuc

SEQ ID NO: 2291488 - RNA, 19 nt, Artificial Sequence
  Description of Artificial Sequence: Synthetic oligonucleotide
gggacccgaaggcccgaga

SEQ ID NO: 2291489 - RNA, 19 nt, Artificial Sequence
  Description of Artificial Sequence: Synthetic oligonucleotide
gcgcaggauacgggugacc

SEQ ID NO: 2291490 - RNA, 19 nt, Artificial Sequence
  Description of Artificial Sequence: Synthetic oligonucleotide
cggucagaucaaccccgcc

SEQ ID NO: 2291491 - RNA, 19 nt, Artificial Sequence
  Description of Artificial Sequence: Synthetic oligonucleotide
cgcguggucaucucagugu

SEQ ID NO: 2291492 - RNA, 19 nt, Artificial Sequence
  Description of Artificial Sequence: Synthetic oligonucleotide
ccguuuccuccagaagcuc

SEQ ID NO: 2291493 - RNA, 19 nt, Artificial Sequence
  Description of Artificial Sequence: Synthetic oligonucleotide
aggcccgagaggaccuguu

SEQ ID NO: 2291494 - RNA, 19 nt, Artificial Sequence
  Description of Artificial Sequence: Synthetic oligonucleotide
gcccguguauccgcgccca

SEQ ID NO: 2291495 - RNA, 19 nt, Artificial Sequence
  Description of Artificial Sequence: Synthetic oligonucleotide
gccuugguaccggaagagu

SEQ ID NO: 2291496 - RNA, 19 nt, Artificial Sequence
  Description of Artificial Sequence: Synthetic oligonucleotide
gccauccgcguggucaucu

SEQ ID NO: 2291497 - RNA, 19 nt, Artificial Sequence
  Description of Artificial Sequence: Synthetic oligonucleotide
cgugcaugagggacccgaa

SEQ ID NO: 2291498 - RNA, 19 nt, Artificial Sequence
  Description of Artificial Sequence: Synthetic oligonucleotide
ccguggccacccgaggcuc

SEQ ID NO: 2291499 - RNA, 19 nt, Artificial Sequence
  Description of Artificial Sequence: Synthetic oligonucleotide
gucccgguuuugcgugcau

SEQ ID NO: 2291500 - RNA, 19 nt, Artificial Sequence
  Description of Artificial Sequence: Synthetic oligonucleotide
gcgcguguagcuccaucuu

SEQ ID NO: 2291501 - RNA, 19 nt, Artificial Sequence
  Description of Artificial Sequence: Synthetic oligonucleotide
cccgcccacgaucagugau

SEQ ID NO: 2291502 - RNA, 19 nt, Artificial Sequence
  Description of Artificial Sequence: Synthetic oligonucleotide
cguggccuugguaccggaa

SEQ ID NO: 2291503 - RNA, 19 nt, Artificial Sequence
  Description of Artificial Sequence: Synthetic oligonucleotide
gggcgccuguugcagugau

SEQ ID NO: 2291504 - RNA, 19 nt, Artificial Sequence
  Description of Artificial Sequence: Synthetic oligonucleotide
gcgucauguuuggcuggaa

SEQ ID NO: 2291505 - RNA, 19 nt, Artificial Sequence
  Description of Artificial Sequence: Synthetic oligonucleotide
cgaaucguuaguggcccgu

SEQ ID NO: 2291506 - RNA, 19 nt, Artificial Sequence
  Description of Artificial Sequence: Synthetic oligonucleotide
ccacgaccgaaucguuagu

SEQ ID NO: 2291507 - RNA, 19 nt, Artificial Sequence
  Description of Artificial Sequence: Synthetic oligonucleotide
gccgguggacagcgcgugu

SEQ ID NO: 2291508 - RNA, 19 nt, Artificial Sequence
  Description of Artificial Sequence: Synthetic oligonucleotide
gcccacgaucagugaugcu

SEQ ID NO: 2291509 - RNA, 19 nt, Artificial Sequence
  Description of Artificial Sequence: Synthetic oligonucleotide
cgcauuccucuggcaguuc

SEQ ID NO: 2291510 - RNA, 19 nt, Artificial Sequence
  Description of Artificial Sequence: Synthetic oligonucleotide
cgaugguagucccgguuuu

SEQ ID NO: 2291511 - RNA, 19 nt, Artificial Sequence
  Description of Artificial Sequence: Synthetic oligonucleotide
gggcgaugaaguggaucuu

SEQ ID NO: 2291512 - RNA, 19 nt, Artificial Sequence
  Description of Artificial Sequence: Synthetic oligonucleotide
ccccuguaccaagcucuaa

SEQ ID NO: 2291513 - RNA, 19 nt, Artificial Sequence
  Description of Artificial Sequence: Synthetic oligonucleotide
cgcgaugguagucccgguu

SEQ ID NO: 2291514 - RNA, 19 nt, Artificial Sequence
  Description of Artificial Sequence: Synthetic oligonucleotide
ccaccacgaccgaaucguu

SEQ ID NO: 2291515 - RNA, 19 nt, Artificial Sequence
  Description of Artificial Sequence: Synthetic oligonucleotide
cccguguauccgcgcccaa

SEQ ID NO: 2291516 - RNA, 19 nt, Artificial Sequence
  Description of Artificial Sequence: Synthetic oligonucleotide
ccgcgaugguagucccggu

SEQ ID NO: 2291517 - RNA, 19 nt, Artificial Sequence
  Description of Artificial Sequence: Synthetic oligonucleotide
cggccgguggacagcgcgu

SEQ ID NO: 2291518 - RNA, 19 nt, Artificial Sequence
  Description of Artificial Sequence: Synthetic oligonucleotide
cccgaggcucacggccggu

SEQ ID NO: 2291519 - RNA, 19 nt, Artificial Sequence
  Description of Artificial Sequence: Synthetic oligonucleotide
uauucuuaauccuagagcc

SEQ ID NO: 2291520 - RNA, 19 nt, Artificial Sequence
  Description of Artificial Sequence: Synthetic oligonucleotide
aaaggcacaugacaguggc

SEQ ID NO: 2291521 - RNA, 19 nt, Artificial Sequence
  Description of Artificial Sequence: Synthetic oligonucleotide
agaagcuccagccaggagc

SEQ ID NO: 2291522 - RNA, 19 nt, Artificial Sequence
  Description of Artificial Sequence: Synthetic oligonucleotide
aaaggacugacacugacug

SEQ ID NO: 2291523 - RNA, 19 nt, Artificial Sequence
  Description of Artificial Sequence: Synthetic oligonucleotide
uuauucuuaauccuagagc

SEQ ID NO: 2291524 - RNA, 19 nt, Artificial Sequence
  Description of Artificial Sequence: Synthetic oligonucleotide
aaugcauuggggccaaacg

SEQ ID NO: 2291525 - RNA, 19 nt, Artificial Sequence
  Description of Artificial Sequence: Synthetic oligonucleotide
uaggcuaaugccaggaugg

SEQ ID NO: 2291526 - RNA, 19 nt, Artificial Sequence
  Description of Artificial Sequence: Synthetic oligonucleotide
ugcaacaucaugcggaaag

SEQ ID NO: 2291527 - RNA, 19 nt, Artificial Sequence
  Description of Artificial Sequence: Synthetic oligonucleotide
aauggcauagcugauuguc

SEQ ID NO: 2291528 - RNA, 19 nt, Artificial Sequence
  Description of Artificial Sequence: Synthetic oligonucleotide
uguugauuccccaacacac

SEQ ID NO: 2291529 - RNA, 19 nt, Artificial Sequence
  Description of Artificial Sequence: Synthetic oligonucleotide
guugaaugcagguaugggg

SEQ ID NO: 2291530 - RNA, 19 nt, Artificial Sequence
  Description of Artificial Sequence: Synthetic oligonucleotide
gaaagguugguccuccugg

SEQ ID NO: 2291531 - RNA, 19 nt, Artificial Sequence
  Description of Artificial Sequence: Synthetic oligonucleotide
aaggcaaaggcacaugaca

SEQ ID NO: 2291532 - RNA, 19 nt, Artificial Sequence
  Description of Artificial Sequence: Synthetic oligonucleotide
augcauuggggccaaacgc

SEQ ID NO: 2291533 - RNA, 19 nt, Artificial Sequence
  Description of Artificial Sequence: Synthetic oligonucleotide
gaaccaacagcucugugag

SEQ ID NO: 2291534 - RNA, 19 nt, Artificial Sequence
  Description of Artificial Sequence: Synthetic oligonucleotide
acugucuauggcuaugugg

SEQ ID NO: 2291535 - RNA, 19 nt, Artificial Sequence
  Description of Artificial Sequence: Synthetic oligonucleotide
ucuucaagggguugaaugc

SEQ ID NO: 2291536 - RNA, 19 nt, Artificial Sequence
  Description of Artificial Sequence: Synthetic oligonucleotide
uaauccuagagccuagcug

SEQ ID NO: 2291537 - RNA, 19 nt, Artificial Sequence
  Description of Artificial Sequence: Synthetic oligonucleotide
ucuauggcuauguggaagc

SEQ ID NO: 2291538 - RNA, 19 nt, Artificial Sequence
  Description of Artificial Sequence: Synthetic oligonucleotide
agucaagucacccacaaua

SEQ ID NO: 2291539 - RNA, 19 nt, Artificial Sequence
  Description of Artificial Sequence: Synthetic oligonucleotide
cuauguggaagccaggcag

SEQ ID NO: 2291540 - RNA, 19 nt, Artificial Sequence
  Description of Artificial Sequence: Synthetic oligonucleotide
ugagacuuggcuuaggguu

SEQ ID NO: 2291541 - RNA, 19 nt, Artificial Sequence
  Description of Artificial Sequence: Synthetic oligonucleotide
gagcccauagagcagaagc

SEQ ID NO: 2291542 - RNA, 19 nt, Artificial Sequence
  Description of Artificial Sequence: Synthetic oligonucleotide
cauaagucaagucacccac

SEQ ID NO: 2291543 - RNA, 19 nt, Artificial Sequence
  Description of Artificial Sequence: Synthetic oligonucleotide
ucaagucacccacaauagg

SEQ ID NO: 2291544 - RNA, 19 nt, Artificial Sequence
  Description of Artificial Sequence: Synthetic oligonucleotide
caugcggaaagguuggucc

SEQ ID NO: 2291545 - RNA, 19 nt, Artificial Sequence
  Description of Artificial Sequence: Synthetic oligonucleotide
agaaccaacagcucuguga

SEQ ID NO: 2291546 - RNA, 19 nt, Artificial Sequence
  Description of Artificial Sequence: Synthetic oligonucleotide
agccuagcuaggcuaaugc

SEQ ID NO: 2291547 - RNA, 19 nt, Artificial Sequence
  Description of Artificial Sequence: Synthetic oligonucleotide
augcacauggugugggucc

SEQ ID NO: 2291548 - RNA, 19 nt, Artificial Sequence
  Description of Artificial Sequence: Synthetic oligonucleotide
gaugcguagguagaaggcg

SEQ ID NO: 2291549 - RNA, 19 nt, Artificial Sequence
  Description of Artificial Sequence: Synthetic oligonucleotide
gguaaucgagccuagcuag

SEQ ID NO: 2291550 - RNA, 19 nt, Artificial Sequence
  Description of Artificial Sequence: Synthetic oligonucleotide
aaaggcaaaggcacaugac

SEQ ID NO: 2291551 - RNA, 19 nt, Artificial Sequence
  Description of Artificial Sequence: Synthetic oligonucleotide
uguagggccuggaugagcu

SEQ ID NO: 2291552 - RNA, 19 nt, Artificial Sequence
  Description of Artificial Sequence: Synthetic oligonucleotide
cugucuauggcuaugugga

SEQ ID NO: 2291553 - RNA, 19 nt, Artificial Sequence
  Description of Artificial Sequence: Synthetic oligonucleotide
ugugcaggccuccacacac

SEQ ID NO: 2291554 - RNA, 19 nt, Artificial Sequence
  Description of Artificial Sequence: Synthetic oligonucleotide
ugggcaugcauggaggacg

SEQ ID NO: 2291555 - RNA, 19 nt, Artificial Sequence
  Description of Artificial Sequence: Synthetic oligonucleotide
ugcauuggggccaaacgcu

SEQ ID NO: 2291556 - RNA, 19 nt, Artificial Sequence
  Description of Artificial Sequence: Synthetic oligonucleotide
caucaugcggaaagguugg

SEQ ID NO: 2291557 - RNA, 19 nt, Artificial Sequence
  Description of Artificial Sequence: Synthetic oligonucleotide
gugcccucgaugcacaugg

SEQ ID NO: 2291558 - RNA, 19 nt, Artificial Sequence
  Description of Artificial Sequence: Synthetic oligonucleotide
uaagucaagucacccacaa

SEQ ID NO: 2291559 - RNA, 19 nt, Artificial Sequence
  Description of Artificial Sequence: Synthetic oligonucleotide
uucaagggguugaaugcag

SEQ ID NO: 2291560 - RNA, 19 nt, Artificial Sequence
  Description of Artificial Sequence: Synthetic oligonucleotide
uuaauccuagagccuagcu

SEQ ID NO: 2291561 - RNA, 19 nt, Artificial Sequence
  Description of Artificial Sequence: Synthetic oligonucleotide
aguucagcaaaggcaaagg

SEQ ID NO: 2291562 - RNA, 19 nt, Artificial Sequence
  Description of Artificial Sequence: Synthetic oligonucleotide
cagcacuuuggacacaggg

SEQ ID NO: 2291563 - RNA, 19 nt, Artificial Sequence
  Description of Artificial Sequence: Synthetic oligonucleotide
uugauuccccaacacacuc

SEQ ID NO: 2291564 - RNA, 19 nt, Artificial Sequence
  Description of Artificial Sequence: Synthetic oligonucleotide
aaagguugguccuccuggu

SEQ ID NO: 2291565 - RNA, 19 nt, Artificial Sequence
  Description of Artificial Sequence: Synthetic oligonucleotide
acacugacugucuauggcu

SEQ ID NO: 2291566 - RNA, 19 nt, Artificial Sequence
  Description of Artificial Sequence: Synthetic oligonucleotide
cuuggcuuaggguucucgc

SEQ ID NO: 2291567 - RNA, 19 nt, Artificial Sequence
  Description of Artificial Sequence: Synthetic oligonucleotide
guucagcaaaggcaaaggc

SEQ ID NO: 2291568 - RNA, 19 nt, Artificial Sequence
  Description of Artificial Sequence: Synthetic oligonucleotide
uuaggguucucgcaaccgu

SEQ ID NO: 2291569 - RNA, 19 nt, Artificial Sequence
  Description of Artificial Sequence: Synthetic oligonucleotide
ugauuccccaacacacucc

SEQ ID NO: 2291570 - RNA, 19 nt, Artificial Sequence
  Description of Artificial Sequence: Synthetic oligonucleotide
cuaggcuaaugccaggaug

SEQ ID NO: 2291571 - RNA, 19 nt, Artificial Sequence
  Description of Artificial Sequence: Synthetic oligonucleotide
aagguugguccuccugguc

SEQ ID NO: 2291572 - RNA, 19 nt, Artificial Sequence
  Description of Artificial Sequence: Synthetic oligonucleotide
aaucgagccuagcuaggcu

SEQ ID NO: 2291573 - RNA, 19 nt, Artificial Sequence
  Description of Artificial Sequence: Synthetic oligonucleotide
gugcccuccguccacaggg

SEQ ID NO: 2291574 - RNA, 19 nt, Artificial Sequence
  Description of Artificial Sequence: Synthetic oligonucleotide
guauggggacuccagcagg

SEQ ID NO: 2291575 - RNA, 19 nt, Artificial Sequence
  Description of Artificial Sequence: Synthetic oligonucleotide
aaggacccaaaggacugac

SEQ ID NO: 2291576 - RNA, 19 nt, Artificial Sequence
  Description of Artificial Sequence: Synthetic oligonucleotide
gaagcuccagccaggagcc

SEQ ID NO: 2291577 - RNA, 19 nt, Artificial Sequence
  Description of Artificial Sequence: Synthetic oligonucleotide
gaguucagcaaaggcaaag

SEQ ID NO: 2291578 - RNA, 19 nt, Artificial Sequence
  Description of Artificial Sequence: Synthetic oligonucleotide
uggaugcaggcagaggagg

SEQ ID NO: 2291579 - RNA, 19 nt, Artificial Sequence
  Description of Artificial Sequence: Synthetic oligonucleotide
ugcaguguacucgaagcug

SEQ ID NO: 2291580 - RNA, 19 nt, Artificial Sequence
  Description of Artificial Sequence: Synthetic oligonucleotide
gauuccccaacacacucca

SEQ ID NO: 2291581 - RNA, 19 nt, Artificial Sequence
  Description of Artificial Sequence: Synthetic oligonucleotide
aggcgugcaacaucaugcg

SEQ ID NO: 2291582 - RNA, 19 nt, Artificial Sequence
  Description of Artificial Sequence: Synthetic oligonucleotide
uuccccaacacacuccaau

SEQ ID NO: 2291583 - RNA, 19 nt, Artificial Sequence
  Description of Artificial Sequence: Synthetic oligonucleotide
uuggcuuaggguucucgca

SEQ ID NO: 2291584 - RNA, 19 nt, Artificial Sequence
  Description of Artificial Sequence: Synthetic oligonucleotide
gucaagucacccacaauag

SEQ ID NO: 2291585 - RNA, 19 nt, Artificial Sequence
  Description of Artificial Sequence: Synthetic oligonucleotide
uaggguucucgcaaccgug

SEQ ID NO: 2291586 - RNA, 19 nt, Artificial Sequence
  Description of Artificial Sequence: Synthetic oligonucleotide
uccccaacacacuccaaug

SEQ ID NO: 2291587 - RNA, 19 nt, Artificial Sequence
  Description of Artificial Sequence: Synthetic oligonucleotide
aggacgccucuguugauuc

SEQ ID NO: 2291588 - RNA, 19 nt, Artificial Sequence
  Description of Artificial Sequence: Synthetic oligonucleotide
agguauggggacuccagca

SEQ ID NO: 2291589 - RNA, 19 nt, Artificial Sequence
  Description of Artificial Sequence: Synthetic oligonucleotide
agucacccacaauagggug

SEQ ID NO: 2291590 - RNA, 19 nt, Artificial Sequence
  Description of Artificial Sequence: Synthetic oligonucleotide
uaaucgagccuagcuaggc

SEQ ID NO: 2291591 - RNA, 19 nt, Artificial Sequence
  Description of Artificial Sequence: Synthetic oligonucleotide
acuaaacauuuauucuuaa

SEQ ID NO: 2291592 - RNA, 19 nt, Artificial Sequence
  Description of Artificial Sequence: Synthetic oligonucleotide
gggaugcguagguagaagg

SEQ ID NO: 2291593 - RNA, 19 nt, Artificial Sequence
  Description of Artificial Sequence: Synthetic oligonucleotide
aagucacccacaauagggu

SEQ ID NO: 2291594 - RNA, 19 nt, Artificial Sequence
  Description of Artificial Sequence: Synthetic oligonucleotide
cuuaggguucucgcaaccg

SEQ ID NO: 2291595 - RNA, 19 nt, Artificial Sequence
  Description of Artificial Sequence: Synthetic oligonucleotide
ccuagcugcagcuagggug

SEQ ID NO: 2291596 - RNA, 19 nt, Artificial Sequence
  Description of Artificial Sequence: Synthetic oligonucleotide
ucgaugcacaugguguggg

SEQ ID NO: 2291597 - RNA, 19 nt, Artificial Sequence
  Description of Artificial Sequence: Synthetic oligonucleotide
uggcuuaggguucucgcaa

SEQ ID NO: 2291598 - RNA, 19 nt, Artificial Sequence
  Description of Artificial Sequence: Synthetic oligonucleotide
auggaggacgccucuguug

SEQ ID NO: 2291599 - RNA, 19 nt, Artificial Sequence
  Description of Artificial Sequence: Synthetic oligonucleotide
ggaugagcucuucaagggg

SEQ ID NO: 2291600 - RNA, 19 nt, Artificial Sequence
  Description of Artificial Sequence: Synthetic oligonucleotide
gucacccacaauagggugg

SEQ ID NO: 2291601 - RNA, 19 nt, Artificial Sequence
  Description of Artificial Sequence: Synthetic oligonucleotide
agguaaucgagccuagcua

SEQ ID NO: 2291602 - RNA, 19 nt, Artificial Sequence
  Description of Artificial Sequence: Synthetic oligonucleotide
uggacacagggucuccagc

SEQ ID NO: 2291603 - RNA, 19 nt, Artificial Sequence
  Description of Artificial Sequence: Synthetic oligonucleotide
caggcagguggugacaugg

SEQ ID NO: 2291604 - RNA, 19 nt, Artificial Sequence
  Description of Artificial Sequence: Synthetic oligonucleotide
caaaggcaaaggcacauga

SEQ ID NO: 2291605 - RNA, 19 nt, Artificial Sequence
  Description of Artificial Sequence: Synthetic oligonucleotide
gaagcugguguguccggcc

SEQ ID NO: 2291606 - RNA, 19 nt, Artificial Sequence
  Description of Artificial Sequence: Synthetic oligonucleotide
acagcucugugagacuugg

SEQ ID NO: 2291607 - RNA, 19 nt, Artificial Sequence
  Description of Artificial Sequence: Synthetic oligonucleotide
uuugggucagggccagucu

SEQ ID NO: 2291608 - RNA, 19 nt, Artificial Sequence
  Description of Artificial Sequence: Synthetic oligonucleotide
acaugacaguggcaggcag

SEQ ID NO: 2291609 - RNA, 19 nt, Artificial Sequence
  Description of Artificial Sequence: Synthetic oligonucleotide
gguuucagcagcacuuugg

SEQ ID NO: 2291610 - RNA, 19 nt, Artificial Sequence
  Description of Artificial Sequence: Synthetic oligonucleotide
acuguccaugcuccagaac

SEQ ID NO: 2291611 - RNA, 19 nt, Artificial Sequence
  Description of Artificial Sequence: Synthetic oligonucleotide
cacagggucuccagcauac

SEQ ID NO: 2291612 - RNA, 19 nt, Artificial Sequence
  Description of Artificial Sequence: Synthetic oligonucleotide
ugcguagguagaaggcgug

SEQ ID NO: 2291613 - RNA, 19 nt, Artificial Sequence
  Description of Artificial Sequence: Synthetic oligonucleotide
ugcagcuagggugcugugg

SEQ ID NO: 2291614 - RNA, 19 nt, Artificial Sequence
  Description of Artificial Sequence: Synthetic oligonucleotide
cagcauacuguccaugcuc

SEQ ID NO: 2291615 - RNA, 19 nt, Artificial Sequence
  Description of Artificial Sequence: Synthetic oligonucleotide
cucgaagcugguguguccg

SEQ ID NO: 2291616 - RNA, 19 nt, Artificial Sequence
  Description of Artificial Sequence: Synthetic oligonucleotide
acccacaauaggguggccg

SEQ ID NO: 2291617 - RNA, 19 nt, Artificial Sequence
  Description of Artificial Sequence: Synthetic oligonucleotide
gugacauggcagaagcucc

SEQ ID NO: 2291618 - RNA, 19 nt, Artificial Sequence
  Description of Artificial Sequence: Synthetic oligonucleotide
ucucgcaaccgugugugcc

SEQ ID NO: 2291619 - RNA, 19 nt, Artificial Sequence
  Description of Artificial Sequence: Synthetic oligonucleotide
guucucgcaaccgugugug

SEQ ID NO: 2291620 - RNA, 19 nt, Artificial Sequence
  Description of Artificial Sequence: Synthetic oligonucleotide
gguguguccggccugugag

SEQ ID NO: 2291621 - RNA, 19 nt, Artificial Sequence
  Description of Artificial Sequence: Synthetic oligonucleotide
cucgcaaccgugugugccc

SEQ ID NO: 2291622 - RNA, 19 nt, Artificial Sequence
  Description of Artificial Sequence: Synthetic oligonucleotide
uggggccaaacgcuggaug

SEQ ID NO: 2291623 - RNA, 19 nt, Artificial Sequence
  Description of Artificial Sequence: Synthetic oligonucleotide
cacacacucggccugugug

SEQ ID NO: 2291624 - RNA, 19 nt, Artificial Sequence
  Description of Artificial Sequence: Synthetic oligonucleotide
ugguuucagcagcacuuug

SEQ ID NO: 2291625 - RNA, 19 nt, Artificial Sequence
  Description of Artificial Sequence: Synthetic oligonucleotide
gguauggggacuccagcag

SEQ ID NO: 2291626 - RNA, 19 nt, Artificial Sequence
  Description of Artificial Sequence: Synthetic oligonucleotide
uguggguccgccccucugu

SEQ ID NO: 2291627 - RNA, 19 nt, Artificial Sequence
  Description of Artificial Sequence: Synthetic oligonucleotide
ugugugcccucgaugcaca

SEQ ID NO: 2291628 - RNA, 19 nt, Artificial Sequence
  Description of Artificial Sequence: Synthetic oligonucleotide
cuuaauccuagagccuagc

SEQ ID NO: 2291629 - RNA, 19 nt, Artificial Sequence
  Description of Artificial Sequence: Synthetic oligonucleotide
agggacugugcccuccguc

SEQ ID NO: 2291630 - RNA, 19 nt, Artificial Sequence
  Description of Artificial Sequence: Synthetic oligonucleotide
agugguuucagcagcacuu

SEQ ID NO: 2291631 - RNA, 19 nt, Artificial Sequence
  Description of Artificial Sequence: Synthetic oligonucleotide
guaaucgagccuagcuagg

SEQ ID NO: 2291632 - RNA, 19 nt, Artificial Sequence
  Description of Artificial Sequence: Synthetic oligonucleotide
caugcauggaggacgccuc

SEQ ID NO: 2291633 - RNA, 19 nt, Artificial Sequence
  Description of Artificial Sequence: Synthetic oligonucleotide
guagaaggcgugcaacauc

SEQ ID NO: 2291634 - RNA, 19 nt, Artificial Sequence
  Description of Artificial Sequence: Synthetic oligonucleotide
ugcacaugguguggguccg

SEQ ID NO: 2291635 - RNA, 19 nt, Artificial Sequence
  Description of Artificial Sequence: Synthetic oligonucleotide
ucugugagacuuggcuuag

SEQ ID NO: 2291636 - RNA, 19 nt, Artificial Sequence
  Description of Artificial Sequence: Synthetic oligonucleotide
gguugaaugcagguauggg

SEQ ID NO: 2291637 - RNA, 19 nt, Artificial Sequence
  Description of Artificial Sequence: Synthetic oligonucleotide
agcacuuuggacacagggu

SEQ ID NO: 2291638 - RNA, 19 nt, Artificial Sequence
  Description of Artificial Sequence: Synthetic oligonucleotide
uggagagaugggcaugcau

SEQ ID NO: 2291639 - RNA, 19 nt, Artificial Sequence
  Description of Artificial Sequence: Synthetic oligonucleotide
cagguauggggacuccagc

SEQ ID NO: 2291640 - RNA, 19 nt, Artificial Sequence
  Description of Artificial Sequence: Synthetic oligonucleotide
acuuggcuuaggguucucg

SEQ ID NO: 2291641 - RNA, 19 nt, Artificial Sequence
  Description of Artificial Sequence: Synthetic oligonucleotide
uccaugcuccagaaccaac

SEQ ID NO: 2291642 - RNA, 19 nt, Artificial Sequence
  Description of Artificial Sequence: Synthetic oligonucleotide
uggccgagggcacugcagu

SEQ ID NO: 2291643 - RNA, 19 nt, Artificial Sequence
  Description of Artificial Sequence: Synthetic oligonucleotide
gagacuuggcuuaggguuc

SEQ ID NO: 2291644 - RNA, 19 nt, Artificial Sequence
  Description of Artificial Sequence: Synthetic oligonucleotide
cuguugauuccccaacaca

SEQ ID NO: 2291645 - RNA, 19 nt, Artificial Sequence
  Description of Artificial Sequence: Synthetic oligonucleotide
gcagcuagggugcuguggc

SEQ ID NO: 2291646 - RNA, 19 nt, Artificial Sequence
  Description of Artificial Sequence: Synthetic oligonucleotide
aggcuaaugccaggauggc

SEQ ID NO: 2291647 - RNA, 19 nt, Artificial Sequence
  Description of Artificial Sequence: Synthetic oligonucleotide
uagcuaggcuaaugccagg

SEQ ID NO: 2291648 - RNA, 19 nt, Artificial Sequence
  Description of Artificial Sequence: Synthetic oligonucleotide
auucuuaauccuagagccu

SEQ ID NO: 2291649 - RNA, 19 nt, Artificial Sequence
  Description of Artificial Sequence: Synthetic oligonucleotide
gaugcacaugguguggguc

SEQ ID NO: 2291650 - RNA, 19 nt, Artificial Sequence
  Description of Artificial Sequence: Synthetic oligonucleotide
gagcagaagcagcauccac

SEQ ID NO: 2291651 - RNA, 19 nt, Artificial Sequence
  Description of Artificial Sequence: Synthetic oligonucleotide
aagggguugaaugcaggua

SEQ ID NO: 2291652 - RNA, 19 nt, Artificial Sequence
  Description of Artificial Sequence: Synthetic oligonucleotide
gauggcucuucucaggcau

SEQ ID NO: 2291653 - RNA, 19 nt, Artificial Sequence
  Description of Artificial Sequence: Synthetic oligonucleotide
ucgagccuagcuaggcuaa

SEQ ID NO: 2291654 - RNA, 19 nt, Artificial Sequence
  Description of Artificial Sequence: Synthetic oligonucleotide
augcggaaagguugguccu

SEQ ID NO: 2291655 - RNA, 19 nt, Artificial Sequence
  Description of Artificial Sequence: Synthetic oligonucleotide
guguacucgaagcuggugu

SEQ ID NO: 2291656 - RNA, 19 nt, Artificial Sequence
  Description of Artificial Sequence: Synthetic oligonucleotide
augggcaugcauggaggac

SEQ ID NO: 2291657 - RNA, 19 nt, Artificial Sequence
  Description of Artificial Sequence: Synthetic oligonucleotide
gaugagcucuucaaggggu

SEQ ID NO: 2291658 - RNA, 19 nt, Artificial Sequence
  Description of Artificial Sequence: Synthetic oligonucleotide
caaugcauuggggccaaac

SEQ ID NO: 2291659 - RNA, 19 nt, Artificial Sequence
  Description of Artificial Sequence: Synthetic oligonucleotide
agggcacugcaguguacuc

SEQ ID NO: 2291660 - RNA, 19 nt, Artificial Sequence
  Description of Artificial Sequence: Synthetic oligonucleotide
gcaacaucaugcggaaagg

SEQ ID NO: 2291661 - RNA, 19 nt, Artificial Sequence
  Description of Artificial Sequence: Synthetic oligonucleotide
ugguguguccggccuguga

SEQ ID NO: 2291662 - RNA, 19 nt, Artificial Sequence
  Description of Artificial Sequence: Synthetic oligonucleotide
cucugugagacuuggcuua

SEQ ID NO: 2291663 - RNA, 19 nt, Artificial Sequence
  Description of Artificial Sequence: Synthetic oligonucleotide
ugagcucuucaagggguug

SEQ ID NO: 2291664 - RNA, 19 nt, Artificial Sequence
  Description of Artificial Sequence: Synthetic oligonucleotide
ggguugaaugcagguaugg

SEQ ID NO: 2291665 - RNA, 19 nt, Artificial Sequence
  Description of Artificial Sequence: Synthetic oligonucleotide
agcuaggcuaaugccagga

SEQ ID NO: 2291666 - RNA, 19 nt, Artificial Sequence
  Description of Artificial Sequence: Synthetic oligonucleotide
gacauggcagaagcuccag

SEQ ID NO: 2291667 - RNA, 19 nt, Artificial Sequence
  Description of Artificial Sequence: Synthetic oligonucleotide
ccuagcuaggcuaaugcca

SEQ ID NO: 2291668 - RNA, 19 nt, Artificial Sequence
  Description of Artificial Sequence: Synthetic oligonucleotide
acugacugucuauggcuau

SEQ ID NO: 2291669 - RNA, 19 nt, Artificial Sequence
  Description of Artificial Sequence: Synthetic oligonucleotide
ucuguagggccuggaugag

SEQ ID NO: 2291670 - RNA, 19 nt, Artificial Sequence
  Description of Artificial Sequence: Synthetic oligonucleotide
guggauaggagaggcccag

SEQ ID NO: 2291671 - RNA, 19 nt, Artificial Sequence
  Description of Artificial Sequence: Synthetic oligonucleotide
uccguccacaggguuuggg

SEQ ID NO: 2291672 - RNA, 19 nt, Artificial Sequence
  Description of Artificial Sequence: Synthetic oligonucleotide
uguuccugccaauggcaua

SEQ ID NO: 2291673 - RNA, 19 nt, Artificial Sequence
  Description of Artificial Sequence: Synthetic oligonucleotide
cccauagagcagaagcagc

SEQ ID NO: 2291674 - RNA, 19 nt, Artificial Sequence
  Description of Artificial Sequence: Synthetic oligonucleotide
uguccggccugugaguggu

SEQ ID NO: 2291675 - RNA, 19 nt, Artificial Sequence
  Description of Artificial Sequence: Synthetic oligonucleotide
auaagucaagucacccaca

SEQ ID NO: 2291676 - RNA, 19 nt, Artificial Sequence
  Description of Artificial Sequence: Synthetic oligonucleotide
ggaaagguugguccuccug

SEQ ID NO: 2291677 - RNA, 19 nt, Artificial Sequence
  Description of Artificial Sequence: Synthetic oligonucleotide
cuguguggggaugcguagg

SEQ ID NO: 2291678 - RNA, 19 nt, Artificial Sequence
  Description of Artificial Sequence: Synthetic oligonucleotide
cuauggcuauguggaagcc

SEQ ID NO: 2291679 - RNA, 19 nt, Artificial Sequence
  Description of Artificial Sequence: Synthetic oligonucleotide
guagguagaaggcgugcaa

SEQ ID NO: 2291680 - RNA, 19 nt, Artificial Sequence
  Description of Artificial Sequence: Synthetic oligonucleotide
ggaugcguagguagaaggc

SEQ ID NO: 2291681 - RNA, 19 nt, Artificial Sequence
  Description of Artificial Sequence: Synthetic oligonucleotide
cuucaagggguugaaugca

SEQ ID NO: 2291682 - RNA, 19 nt, Artificial Sequence
  Description of Artificial Sequence: Synthetic oligonucleotide
ccaaacgcuggaugcaggc

SEQ ID NO: 2291683 - RNA, 19 nt, Artificial Sequence
  Description of Artificial Sequence: Synthetic oligonucleotide
cucuguugauuccccaaca

SEQ ID NO: 2291684 - RNA, 19 nt, Artificial Sequence
  Description of Artificial Sequence: Synthetic oligonucleotide
uccuagagccuagcugcag

SEQ ID NO: 2291685 - RNA, 19 nt, Artificial Sequence
  Description of Artificial Sequence: Synthetic oligonucleotide
gaggauccuaggggugugg

SEQ ID NO: 2291686 - RNA, 19 nt, Artificial Sequence
  Description of Artificial Sequence: Synthetic oligonucleotide
ccugugagugguuucagca

SEQ ID NO: 2291687 - RNA, 19 nt, Artificial Sequence
  Description of Artificial Sequence: Synthetic oligonucleotide
guuugggucagggccaguc

SEQ ID NO: 2291688 - RNA, 19 nt, Artificial Sequence
  Description of Artificial Sequence: Synthetic oligonucleotide
augcguagguagaaggcgu

SEQ ID NO: 2291689 - RNA, 19 nt, Artificial Sequence
  Description of Artificial Sequence: Synthetic oligonucleotide
aggaggauccuaggggugu

SEQ ID NO: 2291690 - RNA, 19 nt, Artificial Sequence
  Description of Artificial Sequence: Synthetic oligonucleotide
ugcagguauggggacucca

SEQ ID NO: 2291691 - RNA, 19 nt, Artificial Sequence
  Description of Artificial Sequence: Synthetic oligonucleotide
gagccuagcuaggcuaaug

SEQ ID NO: 2291692 - RNA, 19 nt, Artificial Sequence
  Description of Artificial Sequence: Synthetic oligonucleotide
agagcagaagcagcaucca

SEQ ID NO: 2291693 - RNA, 19 nt, Artificial Sequence
  Description of Artificial Sequence: Synthetic oligonucleotide
gccuagcuaggcuaaugcc

SEQ ID NO: 2291694 - RNA, 19 nt, Artificial Sequence
  Description of Artificial Sequence: Synthetic oligonucleotide
ggcacugcaguguacucga

SEQ ID NO: 2291695 - RNA, 19 nt, Artificial Sequence
  Description of Artificial Sequence: Synthetic oligonucleotide
ggggcugcagguaaucgag

SEQ ID NO: 2291696 - RNA, 19 nt, Artificial Sequence
  Description of Artificial Sequence: Synthetic oligonucleotide
cugacugucuauggcuaug

SEQ ID NO: 2291697 - RNA, 19 nt, Artificial Sequence
  Description of Artificial Sequence: Synthetic oligonucleotide
ugagugguuucagcagcac

SEQ ID NO: 2291698 - RNA, 19 nt, Artificial Sequence
  Description of Artificial Sequence: Synthetic oligonucleotide
aacgcuggaugcaggcaga

SEQ ID NO: 2291699 - RNA, 19 nt, Artificial Sequence
  Description of Artificial Sequence: Synthetic oligonucleotide
agcuagggugcuguggcca

SEQ ID NO: 2291700 - RNA, 19 nt, Artificial Sequence
  Description of Artificial Sequence: Synthetic oligonucleotide
ccuagagccuagcugcagc

SEQ ID NO: 2291701 - RNA, 19 nt, Artificial Sequence
  Description of Artificial Sequence: Synthetic oligonucleotide
aggaggugaggcccuggca

SEQ ID NO: 2291702 - RNA, 19 nt, Artificial Sequence
  Description of Artificial Sequence: Synthetic oligonucleotide
ggcgugcaacaucaugcgg

SEQ ID NO: 2291703 - RNA, 19 nt, Artificial Sequence
  Description of Artificial Sequence: Synthetic oligonucleotide
gcacaugacaguggcaggc

SEQ ID NO: 2291704 - RNA, 19 nt, Artificial Sequence
  Description of Artificial Sequence: Synthetic oligonucleotide
ugugcccucgaugcacaug

SEQ ID NO: 2291705 - RNA, 19 nt, Artificial Sequence
  Description of Artificial Sequence: Synthetic oligonucleotide
cccauaagucaagucaccc

SEQ ID NO: 2291706 - RNA, 19 nt, Artificial Sequence
  Description of Artificial Sequence: Synthetic oligonucleotide
gggcacugcaguguacucg

SEQ ID NO: 2291707 - RNA, 19 nt, Artificial Sequence
  Description of Artificial Sequence: Synthetic oligonucleotide
ccaaaggacugacacugac

SEQ ID NO: 2291708 - RNA, 19 nt, Artificial Sequence
  Description of Artificial Sequence: Synthetic oligonucleotide
uucucgcaaccgugugugc

SEQ ID NO: 2291709 - RNA, 19 nt, Artificial Sequence
  Description of Artificial Sequence: Synthetic oligonucleotide
cagguaaucgagccuagcu

SEQ ID NO: 2291710 - RNA, 19 nt, Artificial Sequence
  Description of Artificial Sequence: Synthetic oligonucleotide
ggauccuagggguguggag

SEQ ID NO: 2291711 - RNA, 19 nt, Artificial Sequence
  Description of Artificial Sequence: Synthetic oligonucleotide
ggugcuguggccauguugu

SEQ ID NO: 2291712 - RNA, 19 nt, Artificial Sequence
  Description of Artificial Sequence: Synthetic oligonucleotide
gguggugacauggcagaag

SEQ ID NO: 2291713 - RNA, 19 nt, Artificial Sequence
  Description of Artificial Sequence: Synthetic oligonucleotide
acacucggccugugugggg

SEQ ID NO: 2291714 - RNA, 19 nt, Artificial Sequence
  Description of Artificial Sequence: Synthetic oligonucleotide
uagggugcuguggccaugu

SEQ ID NO: 2291715 - RNA, 19 nt, Artificial Sequence
  Description of Artificial Sequence: Synthetic oligonucleotide
gcaggcaucaagggcaggc

SEQ ID NO: 2291716 - RNA, 19 nt, Artificial Sequence
  Description of Artificial Sequence: Synthetic oligonucleotide
gagcucuucaagggguuga

SEQ ID NO: 2291717 - RNA, 19 nt, Artificial Sequence
  Description of Artificial Sequence: Synthetic oligonucleotide
cacaugguguggguccgcc

SEQ ID NO: 2291718 - RNA, 19 nt, Artificial Sequence
  Description of Artificial Sequence: Synthetic oligonucleotide
gacccaaaggacugacacu

SEQ ID NO: 2291719 - RNA, 19 nt, Artificial Sequence
  Description of Artificial Sequence: Synthetic oligonucleotide
acgccucuguugauucccc

SEQ ID NO: 2291720 - RNA, 19 nt, Artificial Sequence
  Description of Artificial Sequence: Synthetic oligonucleotide
gcuuaggguucucgcaacc

SEQ ID NO: 2291721 - RNA, 19 nt, Artificial Sequence
  Description of Artificial Sequence: Synthetic oligonucleotide
cagccugcccauaagucaa

SEQ ID NO: 2291722 - RNA, 19 nt, Artificial Sequence
  Description of Artificial Sequence: Synthetic oligonucleotide
augcagguauggggacucc

SEQ ID NO: 2291723 - RNA, 19 nt, Artificial Sequence
  Description of Artificial Sequence: Synthetic oligonucleotide
gugugugcccucgaugcac

SEQ ID NO: 2291724 - RNA, 19 nt, Artificial Sequence
  Description of Artificial Sequence: Synthetic oligonucleotide
uggggaugcguagguagaa

SEQ ID NO: 2291725 - RNA, 19 nt, Artificial Sequence
  Description of Artificial Sequence: Synthetic oligonucleotide
gacugugcccuccguccac

SEQ ID NO: 2291726 - RNA, 19 nt, Artificial Sequence
  Description of Artificial Sequence: Synthetic oligonucleotide
cuguagggccuggaugagc

SEQ ID NO: 2291727 - RNA, 19 nt, Artificial Sequence
  Description of Artificial Sequence: Synthetic oligonucleotide
ugcggaaagguugguccuc

SEQ ID NO: 2291728 - RNA, 19 nt, Artificial Sequence
  Description of Artificial Sequence: Synthetic oligonucleotide
ccauaagucaagucaccca

SEQ ID NO: 2291729 - RNA, 19 nt, Artificial Sequence
  Description of Artificial Sequence: Synthetic oligonucleotide
ggauaggagaggcccagaa

SEQ ID NO: 2291730 - RNA, 19 nt, Artificial Sequence
  Description of Artificial Sequence: Synthetic oligonucleotide
gcuauguggaagccaggca

SEQ ID NO: 2291731 - RNA, 19 nt, Artificial Sequence
  Description of Artificial Sequence: Synthetic oligonucleotide
agacuuggcuuaggguucu

SEQ ID NO: 2291732 - RNA, 19 nt, Artificial Sequence
  Description of Artificial Sequence: Synthetic oligonucleotide
gcgugcaacaucaugcgga

SEQ ID NO: 2291733 - RNA, 19 nt, Artificial Sequence
  Description of Artificial Sequence: Synthetic oligonucleotide
cuccaaugcauuggggcca

SEQ ID NO: 2291734 - RNA, 19 nt, Artificial Sequence
  Description of Artificial Sequence: Synthetic oligonucleotide
aggguucucgcaaccgugu

SEQ ID NO: 2291735 - RNA, 19 nt, Artificial Sequence
  Description of Artificial Sequence: Synthetic oligonucleotide
gcagguauggggacuccag

SEQ ID NO: 2291736 - RNA, 19 nt, Artificial Sequence
  Description of Artificial Sequence: Synthetic oligonucleotide
guugauuccccaacacacu

SEQ ID NO: 2291737 - RNA, 19 nt, Artificial Sequence
  Description of Artificial Sequence: Synthetic oligonucleotide
gacugacacugacugucua

SEQ ID NO: 2291738 - RNA, 19 nt, Artificial Sequence
  Description of Artificial Sequence: Synthetic oligonucleotide
aggauccuaggggugugga

SEQ ID NO: 2291739 - RNA, 19 nt, Artificial Sequence
  Description of Artificial Sequence: Synthetic oligonucleotide
uggauaggagaggcccaga

SEQ ID NO: 2291740 - RNA, 19 nt, Artificial Sequence
  Description of Artificial Sequence: Synthetic oligonucleotide
cugcagguaaucgagccua

SEQ ID NO: 2291741 - RNA, 19 nt, Artificial Sequence
  Description of Artificial Sequence: Synthetic oligonucleotide
gcaaccgugugugcccucg

SEQ ID NO: 2291742 - RNA, 19 nt, Artificial Sequence
  Description of Artificial Sequence: Synthetic oligonucleotide
cuagagccuagcugcagcu

SEQ ID NO: 2291743 - RNA, 19 nt, Artificial Sequence
  Description of Artificial Sequence: Synthetic oligonucleotide
gagggcacugcaguguacu

SEQ ID NO: 2291744 - RNA, 19 nt, Artificial Sequence
  Description of Artificial Sequence: Synthetic oligonucleotide
ccuguguggggaugcguag

SEQ ID NO: 2291745 - RNA, 19 nt, Artificial Sequence
  Description of Artificial Sequence: Synthetic oligonucleotide
ugcccuccguccacagggu

SEQ ID NO: 2291746 - RNA, 19 nt, Artificial Sequence
  Description of Artificial Sequence: Synthetic oligonucleotide
ggccaaacgcuggaugcag

SEQ ID NO: 2291747 - RNA, 19 nt, Artificial Sequence
  Description of Artificial Sequence: Synthetic oligonucleotide
cuaaugccaggauggcucu

SEQ ID NO: 2291748 - RNA, 19 nt, Artificial Sequence
  Description of Artificial Sequence: Synthetic oligonucleotide
guggccgagggcacugcag

SEQ ID NO: 2291749 - RNA, 19 nt, Artificial Sequence
  Description of Artificial Sequence: Synthetic oligonucleotide
gccugugagugguuucagc

SEQ ID NO: 2291750 - RNA, 19 nt, Artificial Sequence
  Description of Artificial Sequence: Synthetic oligonucleotide
uggguccgccccucuguac

SEQ ID NO: 2291751 - RNA, 19 nt, Artificial Sequence
  Description of Artificial Sequence: Synthetic oligonucleotide
ggggaugcguagguagaag

SEQ ID NO: 2291752 - RNA, 19 nt, Artificial Sequence
  Description of Artificial Sequence: Synthetic oligonucleotide
cacuuuggacacagggucu

SEQ ID NO: 2291753 - RNA, 19 nt, Artificial Sequence
  Description of Artificial Sequence: Synthetic oligonucleotide
acgcuggaugcaggcagag

SEQ ID NO: 2291754 - RNA, 19 nt, Artificial Sequence
  Description of Artificial Sequence: Synthetic oligonucleotide
cacaugacaguggcaggca

SEQ ID NO: 2291755 - RNA, 19 nt, Artificial Sequence
  Description of Artificial Sequence: Synthetic oligonucleotide
gcccucgaugcacauggug

SEQ ID NO: 2291756 - RNA, 19 nt, Artificial Sequence
  Description of Artificial Sequence: Synthetic oligonucleotide
ggguucucgcaaccgugug

SEQ ID NO: 2291757 - RNA, 19 nt, Artificial Sequence
  Description of Artificial Sequence: Synthetic oligonucleotide
ucgcaaccgugugugcccu

SEQ ID NO: 2291758 - RNA, 19 nt, Artificial Sequence
  Description of Artificial Sequence: Synthetic oligonucleotide
caacacacuccaaugcauu

SEQ ID NO: 2291759 - RNA, 19 nt, Artificial Sequence
  Description of Artificial Sequence: Synthetic oligonucleotide
cugugcccuccguccacag

SEQ ID NO: 2291760 - RNA, 19 nt, Artificial Sequence
  Description of Artificial Sequence: Synthetic oligonucleotide
guguggguccgccccucug

SEQ ID NO: 2291761 - RNA, 19 nt, Artificial Sequence
  Description of Artificial Sequence: Synthetic oligonucleotide
aucaugcggaaagguuggu

SEQ ID NO: 2291762 - RNA, 19 nt, Artificial Sequence
  Description of Artificial Sequence: Synthetic oligonucleotide
gccaaacgcuggaugcagg

SEQ ID NO: 2291763 - RNA, 19 nt, Artificial Sequence
  Description of Artificial Sequence: Synthetic oligonucleotide
ugcccucgaugcacauggu

SEQ ID NO: 2291764 - RNA, 19 nt, Artificial Sequence
  Description of Artificial Sequence: Synthetic oligonucleotide
aggacccaaaggacugaca

SEQ ID NO: 2291765 - RNA, 19 nt, Artificial Sequence
  Description of Artificial Sequence: Synthetic oligonucleotide
gggguugaaugcagguaug

SEQ ID NO: 2291766 - RNA, 19 nt, Artificial Sequence
  Description of Artificial Sequence: Synthetic oligonucleotide
gcccauaagucaagucacc

SEQ ID NO: 2291767 - RNA, 19 nt, Artificial Sequence
  Description of Artificial Sequence: Synthetic oligonucleotide
cccacaauaggguggccga

SEQ ID NO: 2291768 - RNA, 19 nt, Artificial Sequence
  Description of Artificial Sequence: Synthetic oligonucleotide
uccuagggguguggaggga

SEQ ID NO: 2291769 - RNA, 19 nt, Artificial Sequence
  Description of Artificial Sequence: Synthetic oligonucleotide
agcaggcaucaagggcagg

SEQ ID NO: 2291770 - RNA, 19 nt, Artificial Sequence
  Description of Artificial Sequence: Synthetic oligonucleotide
uuggggccaaacgcuggau

SEQ ID NO: 2291771 - RNA, 19 nt, Artificial Sequence
  Description of Artificial Sequence: Synthetic oligonucleotide
augagcucuucaagggguu

SEQ ID NO: 2291772 - RNA, 19 nt, Artificial Sequence
  Description of Artificial Sequence: Synthetic oligonucleotide
cacucggccugugugggga

SEQ ID NO: 2291773 - RNA, 19 nt, Artificial Sequence
  Description of Artificial Sequence: Synthetic oligonucleotide
gguggauaggagaggccca

SEQ ID NO: 2291774 - RNA, 19 nt, Artificial Sequence
  Description of Artificial Sequence: Synthetic oligonucleotide
uccggccugugagugguuu

SEQ ID NO: 2291775 - RNA, 19 nt, Artificial Sequence
  Description of Artificial Sequence: Synthetic oligonucleotide
gggguguggagggacugug

SEQ ID NO: 2291776 - RNA, 19 nt, Artificial Sequence
  Description of Artificial Sequence: Synthetic oligonucleotide
gggcaugcauggaggacgc

SEQ ID NO: 2291777 - RNA, 19 nt, Artificial Sequence
  Description of Artificial Sequence: Synthetic oligonucleotide
cuagggugcuguggccaug

SEQ ID NO: 2291778 - RNA, 19 nt, Artificial Sequence
  Description of Artificial Sequence: Synthetic oligonucleotide
gcagguaaucgagccuagc

SEQ ID NO: 2291779 - RNA, 19 nt, Artificial Sequence
  Description of Artificial Sequence: Synthetic oligonucleotide
cugcagcuagggugcugug

SEQ ID NO: 2291780 - RNA, 19 nt, Artificial Sequence
  Description of Artificial Sequence: Synthetic oligonucleotide
agccugcccauaagucaag

SEQ ID NO: 2291781 - RNA, 19 nt, Artificial Sequence
  Description of Artificial Sequence: Synthetic oligonucleotide
ccuagggguguggagggac

SEQ ID NO: 2291782 - RNA, 19 nt, Artificial Sequence
  Description of Artificial Sequence: Synthetic oligonucleotide
cguccacaggguuuggguc

SEQ ID NO: 2291783 - RNA, 19 nt, Artificial Sequence
  Description of Artificial Sequence: Synthetic oligonucleotide
gguucucgcaaccgugugu

SEQ ID NO: 2291784 - RNA, 19 nt, Artificial Sequence
  Description of Artificial Sequence: Synthetic oligonucleotide
gguccgccccucuguacug

SEQ ID NO: 2291785 - RNA, 19 nt, Artificial Sequence
  Description of Artificial Sequence: Synthetic oligonucleotide
gcguagguagaaggcgugc

SEQ ID NO: 2291786 - RNA, 19 nt, Artificial Sequence
  Description of Artificial Sequence: Synthetic oligonucleotide
cuguuccugccaauggcau

SEQ ID NO: 2291787 - RNA, 19 nt, Artificial Sequence
  Description of Artificial Sequence: Synthetic oligonucleotide
gccucuguugauuccccaa

SEQ ID NO: 2291788 - RNA, 19 nt, Artificial Sequence
  Description of Artificial Sequence: Synthetic oligonucleotide
ggacugugcccuccgucca

SEQ ID NO: 2291789 - RNA, 19 nt, Artificial Sequence
  Description of Artificial Sequence: Synthetic oligonucleotide
ggaggauccuaggggugug

SEQ ID NO: 2291790 - RNA, 19 nt, Artificial Sequence
  Description of Artificial Sequence: Synthetic oligonucleotide
cuagggguguggagggacu

SEQ ID NO: 2291791 - RNA, 19 nt, Artificial Sequence
  Description of Artificial Sequence: Synthetic oligonucleotide
ggccgagggcacugcagug

SEQ ID NO: 2291792 - RNA, 19 nt, Artificial Sequence
  Description of Artificial Sequence: Synthetic oligonucleotide
ccuccguccacaggguuug

SEQ ID NO: 2291793 - RNA, 19 nt, Artificial Sequence
  Description of Artificial Sequence: Synthetic oligonucleotide
ucauggggcccaggaggau

SEQ ID NO: 2291794 - RNA, 19 nt, Artificial Sequence
  Description of Artificial Sequence: Synthetic oligonucleotide
uccgccccucuguacuguu

SEQ ID NO: 2291795 - RNA, 19 nt, Artificial Sequence
  Description of Artificial Sequence: Synthetic oligonucleotide
acucggccuguguggggau

SEQ ID NO: 2291796 - RNA, 19 nt, Artificial Sequence
  Description of Artificial Sequence: Synthetic oligonucleotide
guacucgaagcuggugugu

SEQ ID NO: 2291797 - RNA, 19 nt, Artificial Sequence
  Description of Artificial Sequence: Synthetic oligonucleotide
gcaugcauggaggacgccu

SEQ ID NO: 2291798 - RNA, 19 nt, Artificial Sequence
  Description of Artificial Sequence: Synthetic oligonucleotide
gguagaaggcgugcaacau

SEQ ID NO: 2291799 - RNA, 19 nt, Artificial Sequence
  Description of Artificial Sequence: Synthetic oligonucleotide
cagaggaggugaggcccug

SEQ ID NO: 2291800 - RNA, 19 nt, Artificial Sequence
  Description of Artificial Sequence: Synthetic oligonucleotide
ccacaauaggguggccgag

SEQ ID NO: 2291801 - RNA, 19 nt, Artificial Sequence
  Description of Artificial Sequence: Synthetic oligonucleotide
gaggacgccucuguugauu

SEQ ID NO: 2291802 - RNA, 19 nt, Artificial Sequence
  Description of Artificial Sequence: Synthetic oligonucleotide
gugaggcccuggcagaguu

SEQ ID NO: 2291803 - RNA, 19 nt, Artificial Sequence
  Description of Artificial Sequence: Synthetic oligonucleotide
cucggccuguguggggaug

SEQ ID NO: 2291804 - RNA, 19 nt, Artificial Sequence
  Description of Artificial Sequence: Synthetic oligonucleotide
ggguccgccccucuguacu

SEQ ID NO: 2291805 - RNA, 19 nt, Artificial Sequence
  Description of Artificial Sequence: Synthetic oligonucleotide
cuccguccacaggguuugg

SEQ ID NO: 2291806 - RNA, 19 nt, Artificial Sequence
  Description of Artificial Sequence: Synthetic oligonucleotide
caaccgugugugcccucga

SEQ ID NO: 2291807 - RNA, 19 nt, Artificial Sequence
  Description of Artificial Sequence: Synthetic oligonucleotide
cagucuguagggccuggau

SEQ ID NO: 2291808 - RNA, 19 nt, Artificial Sequence
  Description of Artificial Sequence: Synthetic oligonucleotide
cacccacaauaggguggcc

SEQ ID NO: 2291809 - RNA, 19 nt, Artificial Sequence
  Description of Artificial Sequence: Synthetic oligonucleotide
ccccucuguacuguuccug

SEQ ID NO: 2291810 - RNA, 19 nt, Artificial Sequence
  Description of Artificial Sequence: Synthetic oligonucleotide
ggcuaaugccaggauggcu

SEQ ID NO: 2291811 - RNA, 19 nt, Artificial Sequence
  Description of Artificial Sequence: Synthetic oligonucleotide
gccuguguggggaugcgua

SEQ ID NO: 2291812 - RNA, 19 nt, Artificial Sequence
  Description of Artificial Sequence: Synthetic oligonucleotide
gcuaggcuaaugccaggau

SEQ ID NO: 2291813 - RNA, 19 nt, Artificial Sequence
  Description of Artificial Sequence: Synthetic oligonucleotide
guguggggaugcguaggua

SEQ ID NO: 2291814 - RNA, 19 nt, Artificial Sequence
  Description of Artificial Sequence: Synthetic oligonucleotide
cccagaaggcuuccaggaa

SEQ ID NO: 2291815 - RNA, 19 nt, Artificial Sequence
  Description of Artificial Sequence: Synthetic oligonucleotide
ccugguccucagccugccc

SEQ ID NO: 2291816 - RNA, 19 nt, Artificial Sequence
  Description of Artificial Sequence: Synthetic oligonucleotide
uggggcccaggaggauccu

SEQ ID NO: 2291817 - RNA, 19 nt, Artificial Sequence
  Description of Artificial Sequence: Synthetic oligonucleotide
ccggccugugagugguuuc

SEQ ID NO: 2291818 - RNA, 19 nt, Artificial Sequence
  Description of Artificial Sequence: Synthetic oligonucleotide
ggacugacacugacugucu

SEQ ID NO: 2291819 - RNA, 19 nt, Artificial Sequence
  Description of Artificial Sequence: Synthetic oligonucleotide
ccucagccugcccauaagu

SEQ ID NO: 2291820 - RNA, 19 nt, Artificial Sequence
  Description of Artificial Sequence: Synthetic oligonucleotide
ggcaugcauggaggacgcc

SEQ ID NO: 2291821 - RNA, 19 nt, Artificial Sequence
  Description of Artificial Sequence: Synthetic oligonucleotide
gcuagggugcuguggccau

SEQ ID NO: 2291822 - RNA, 19 nt, Artificial Sequence
  Description of Artificial Sequence: Synthetic oligonucleotide
cgagggcacugcaguguac

SEQ ID NO: 2291823 - RNA, 19 nt, Artificial Sequence
  Description of Artificial Sequence: Synthetic oligonucleotide
gcugguguguccggccugu

SEQ ID NO: 2291824 - RNA, 19 nt, Artificial Sequence
  Description of Artificial Sequence: Synthetic oligonucleotide
gccgagggcacugcagugu

SEQ ID NO: 2291825 - RNA, 19 nt, Artificial Sequence
  Description of Artificial Sequence: Synthetic oligonucleotide
gccuagcugcagcuagggu

SEQ ID NO: 2291826 - RNA, 19 nt, Artificial Sequence
  Description of Artificial Sequence: Synthetic oligonucleotide
ccgagggcacugcagugua

SEQ ID NO: 2291827 - RNA, 19 nt, Artificial Sequence
  Description of Artificial Sequence: Synthetic oligonucleotide
cgugugugcccucgaugca

SEQ ID NO: 2291828 - RNA, 19 nt, Artificial Sequence
  Description of Artificial Sequence: Synthetic oligonucleotide
gguguggguccgccccucu

SEQ ID NO: 2291829 - RNA, 19 nt, Artificial Sequence
  Description of Artificial Sequence: Synthetic oligonucleotide
guccgccccucuguacugu

SEQ ID NO: 2291830 - RNA, 19 nt, Artificial Sequence
  Description of Artificial Sequence: Synthetic oligonucleotide
ccagucuguagggccugga

SEQ ID NO: 2291831 - RNA, 19 nt, Artificial Sequence
  Description of Artificial Sequence: Synthetic oligonucleotide
cggccugugagugguuuca

SEQ ID NO: 2291832 - RNA, 19 nt, Artificial Sequence
  Description of Artificial Sequence: Synthetic oligonucleotide
ggaggacgccucuguugau

SEQ ID NO: 2291833 - RNA, 19 nt, Artificial Sequence
  Description of Artificial Sequence: Synthetic oligonucleotide
cgccucuguugauucccca

SEQ ID NO: 2291834 - RNA, 19 nt, Artificial Sequence
  Description of Artificial Sequence: Synthetic oligonucleotide
cccuccguccacaggguuu

SEQ ID NO: 2291835 - RNA, 19 nt, Artificial Sequence
  Description of Artificial Sequence: Synthetic oligonucleotide
ggccuguguggggaugcgu

SEQ ID NO: 2291836 - RNA, 19 nt, Artificial Sequence
  Description of Artificial Sequence: Synthetic oligonucleotide
cggccuguguggggaugcg

SEQ ID NO: 2291837 - RNA, 19 nt, Artificial Sequence
  Description of Artificial Sequence: Synthetic oligonucleotide
cgcaaccgugugugcccuc

SEQ ID NO: 2291838 - RNA, 19 nt, Artificial Sequence
  Description of Artificial Sequence: Synthetic oligonucleotide
gcccuccguccacaggguu

SEQ ID NO: 2291839 - RNA, 19 nt, Artificial Sequence
  Description of Artificial Sequence: Synthetic oligonucleotide
cggaaagguugguccuccu

SEQ ID NO: 2291840 - RNA, 19 nt, Artificial Sequence
  Description of Artificial Sequence: Synthetic oligonucleotide
guccggccugugagugguu

SEQ ID NO: 2291841 - RNA, 19 nt, Artificial Sequence
  Description of Artificial Sequence: Synthetic oligonucleotide
cgagccuagcuaggcuaau

SEQ ID NO: 2291842 - RNA, 19 nt, Artificial Sequence
  Description of Artificial Sequence: Synthetic oligonucleotide
aauaaaacuaauucaagcc

SEQ ID NO: 2291843 - RNA, 19 nt, Artificial Sequence
  Description of Artificial Sequence: Synthetic oligonucleotide
cuuucaaucauucagaagg

SEQ ID NO: 2291844 - RNA, 19 nt, Artificial Sequence
  Description of Artificial Sequence: Synthetic oligonucleotide
uguaauaacaacuucuucc

SEQ ID NO: 2291845 - RNA, 19 nt, Artificial Sequence
  Description of Artificial Sequence: Synthetic oligonucleotide
acuaauucaagccaugccc

SEQ ID NO: 2291846 - RNA, 19 nt, Artificial Sequence
  Description of Artificial Sequence: Synthetic oligonucleotide
aaugauucaacuuuuaaau

SEQ ID NO: 2291847 - RNA, 19 nt, Artificial Sequence
  Description of Artificial Sequence: Synthetic oligonucleotide
ugugaaaaggacauggugg

SEQ ID NO: 2291848 - RNA, 19 nt, Artificial Sequence
  Description of Artificial Sequence: Synthetic oligonucleotide
aaauauaggaucccuuccc

SEQ ID NO: 2291849 - RNA, 19 nt, Artificial Sequence
  Description of Artificial Sequence: Synthetic oligonucleotide
aaaacuaacaagaugacug

SEQ ID NO: 2291850 - RNA, 19 nt, Artificial Sequence
  Description of Artificial Sequence: Synthetic oligonucleotide
guuacuuuuauuuuggaag

SEQ ID NO: 2291851 - RNA, 19 nt, Artificial Sequence
  Description of Artificial Sequence: Synthetic oligonucleotide
uuuagugagagucagcaag

SEQ ID NO: 2291852 - RNA, 19 nt, Artificial Sequence
  Description of Artificial Sequence: Synthetic oligonucleotide
aaauaaaacuaacaagaug

SEQ ID NO: 2291853 - RNA, 19 nt, Artificial Sequence
  Description of Artificial Sequence: Synthetic oligonucleotide
aguauauccacuuauaaaa

SEQ ID NO: 2291854 - RNA, 19 nt, Artificial Sequence
  Description of Artificial Sequence: Synthetic oligonucleotide
auuuacaguucuuuaaugg

SEQ ID NO: 2291855 - RNA, 19 nt, Artificial Sequence
  Description of Artificial Sequence: Synthetic oligonucleotide
aacuaauucaagccaugcc

SEQ ID NO: 2291856 - RNA, 19 nt, Artificial Sequence
  Description of Artificial Sequence: Synthetic oligonucleotide
ucuuccaugacuacgaugu

SEQ ID NO: 2291857 - RNA, 19 nt, Artificial Sequence
  Description of Artificial Sequence: Synthetic oligonucleotide
uuuauuuuggaagaaaaga

SEQ ID NO: 2291858 - RNA, 19 nt, Artificial Sequence
  Description of Artificial Sequence: Synthetic oligonucleotide
aauaacaacuucuuccaug

SEQ ID NO: 2291859 - RNA, 19 nt, Artificial Sequence
  Description of Artificial Sequence: Synthetic oligonucleotide
aacagaauggcagaaacag

SEQ ID NO: 2291860 - RNA, 19 nt, Artificial Sequence
  Description of Artificial Sequence: Synthetic oligonucleotide
auauauuuaaaguuaagaa

SEQ ID NO: 2291861 - RNA, 19 nt, Artificial Sequence
  Description of Artificial Sequence: Synthetic oligonucleotide
uuugccuuuacaauuuucc

SEQ ID NO: 2291862 - RNA, 19 nt, Artificial Sequence
  Description of Artificial Sequence: Synthetic oligonucleotide
agaaauauaggaucccuuc

SEQ ID NO: 2291863 - RNA, 19 nt, Artificial Sequence
  Description of Artificial Sequence: Synthetic oligonucleotide
uuauuuuggaagaaaagau

SEQ ID NO: 2291864 - RNA, 19 nt, Artificial Sequence
  Description of Artificial Sequence: Synthetic oligonucleotide
ucaacuuuuaaauuauccu

SEQ ID NO: 2291865 - RNA, 19 nt, Artificial Sequence
  Description of Artificial Sequence: Synthetic oligonucleotide
uguuuguggacucaggaug

SEQ ID NO: 2291866 - RNA, 19 nt, Artificial Sequence
  Description of Artificial Sequence: Synthetic oligonucleotide
auaaaacuaauucaagcca

SEQ ID NO: 2291867 - RNA, 19 nt, Artificial Sequence
  Description of Artificial Sequence: Synthetic oligonucleotide
aaacuaauucaagccaugc

SEQ ID NO: 2291868 - RNA, 19 nt, Artificial Sequence
  Description of Artificial Sequence: Synthetic oligonucleotide
aaaaguuucuuucaaucau

SEQ ID NO: 2291869 - RNA, 19 nt, Artificial Sequence
  Description of Artificial Sequence: Synthetic oligonucleotide
aacaagaugacuguuccag

SEQ ID NO: 2291870 - RNA, 19 nt, Artificial Sequence
  Description of Artificial Sequence: Synthetic oligonucleotide
uuguuugaaacacugacuc

SEQ ID NO: 2291871 - RNA, 19 nt, Artificial Sequence
  Description of Artificial Sequence: Synthetic oligonucleotide
uaacauuaagugaugcuag

SEQ ID NO: 2291872 - RNA, 19 nt, Artificial Sequence
  Description of Artificial Sequence: Synthetic oligonucleotide
cauuaagugaugcuagugg

SEQ ID NO: 2291873 - RNA, 19 nt, Artificial Sequence
  Description of Artificial Sequence: Synthetic oligonucleotide
uuccacaucucuaaaaugu

SEQ ID NO: 2291874 - RNA, 19 nt, Artificial Sequence
  Description of Artificial Sequence: Synthetic oligonucleotide
aacaacuucuuccaugacu

SEQ ID NO: 2291875 - RNA, 19 nt, Artificial Sequence
  Description of Artificial Sequence: Synthetic oligonucleotide
uaaaaguuucuuucaauca

SEQ ID NO: 2291876 - RNA, 19 nt, Artificial Sequence
  Description of Artificial Sequence: Synthetic oligonucleotide
uuaaauuauccucuuguuc

SEQ ID NO: 2291877 - RNA, 19 nt, Artificial Sequence
  Description of Artificial Sequence: Synthetic oligonucleotide
uguggacucaggaugacag

SEQ ID NO: 2291878 - RNA, 19 nt, Artificial Sequence
  Description of Artificial Sequence: Synthetic oligonucleotide
gaagaaaagauguaaaagu

SEQ ID NO: 2291879 - RNA, 19 nt, Artificial Sequence
  Description of Artificial Sequence: Synthetic oligonucleotide
uaaugauucaacuuuuaaa

SEQ ID NO: 2291880 - RNA, 19 nt, Artificial Sequence
  Description of Artificial Sequence: Synthetic oligonucleotide
agaugacuguuccagaagg

SEQ ID NO: 2291881 - RNA, 19 nt, Artificial Sequence
  Description of Artificial Sequence: Synthetic oligonucleotide
gaaaagauguaaaaguuuc

SEQ ID NO: 2291882 - RNA, 19 nt, Artificial Sequence
  Description of Artificial Sequence: Synthetic oligonucleotide
agcaagaaauauaggaucc

SEQ ID NO: 2291883 - RNA, 19 nt, Artificial Sequence
  Description of Artificial Sequence: Synthetic oligonucleotide
gagucagcaagaaauauag

SEQ ID NO: 2291884 - RNA, 19 nt, Artificial Sequence
  Description of Artificial Sequence: Synthetic oligonucleotide
aaguauauccacuuauaaa

SEQ ID NO: 2291885 - RNA, 19 nt, Artificial Sequence
  Description of Artificial Sequence: Synthetic oligonucleotide
ucguacauggcucagugca

SEQ ID NO: 2291886 - RNA, 19 nt, Artificial Sequence
  Description of Artificial Sequence: Synthetic oligonucleotide
uucuuuaauggucuuguga

SEQ ID NO: 2291887 - RNA, 19 nt, Artificial Sequence
  Description of Artificial Sequence: Synthetic oligonucleotide
auaacaacuucuuccauga

SEQ ID NO: 2291888 - RNA, 19 nt, Artificial Sequence
  Description of Artificial Sequence: Synthetic oligonucleotide
uuuacaguucuuuaauggu

SEQ ID NO: 2291889 - RNA, 19 nt, Artificial Sequence
  Description of Artificial Sequence: Synthetic oligonucleotide
caacuuuuaaauuauccuc

SEQ ID NO: 2291890 - RNA, 19 nt, Artificial Sequence
  Description of Artificial Sequence: Synthetic oligonucleotide
gaaauauaggaucccuucc

SEQ ID NO: 2291891 - RNA, 19 nt, Artificial Sequence
  Description of Artificial Sequence: Synthetic oligonucleotide
cagaauggcagaaacagac

SEQ ID NO: 2291892 - RNA, 19 nt, Artificial Sequence
  Description of Artificial Sequence: Synthetic oligonucleotide
aacuuuuaaauuauccucu

SEQ ID NO: 2291893 - RNA, 19 nt, Artificial Sequence
  Description of Artificial Sequence: Synthetic oligonucleotide
agucuagguuguuugaaac

SEQ ID NO: 2291894 - RNA, 19 nt, Artificial Sequence
  Description of Artificial Sequence: Synthetic oligonucleotide
ucagcaagaaauauaggau

SEQ ID NO: 2291895 - RNA, 19 nt, Artificial Sequence
  Description of Artificial Sequence: Synthetic oligonucleotide
aaacuaacaagaugacugu

SEQ ID NO: 2291896 - RNA, 19 nt, Artificial Sequence
  Description of Artificial Sequence: Synthetic oligonucleotide
ucuuuagugagagucagca

SEQ ID NO: 2291897 - RNA, 19 nt, Artificial Sequence
  Description of Artificial Sequence: Synthetic oligonucleotide
agcuuacuaacauuaagug

SEQ ID NO: 2291898 - RNA, 19 nt, Artificial Sequence
  Description of Artificial Sequence: Synthetic oligonucleotide
uaggaaaggaaagucacag

SEQ ID NO: 2291899 - RNA, 19 nt, Artificial Sequence
  Description of Artificial Sequence: Synthetic oligonucleotide
aauauaggaucccuucccu

SEQ ID NO: 2291900 - RNA, 19 nt, Artificial Sequence
  Description of Artificial Sequence: Synthetic oligonucleotide
uucaagucuagguuguuug

SEQ ID NO: 2291901 - RNA, 19 nt, Artificial Sequence
  Description of Artificial Sequence: Synthetic oligonucleotide
aagaaagugagaccucugu

SEQ ID NO: 2291902 - RNA, 19 nt, Artificial Sequence
  Description of Artificial Sequence: Synthetic oligonucleotide
uagguuguuugaaacacug

SEQ ID NO: 2291903 - RNA, 19 nt, Artificial Sequence
  Description of Artificial Sequence: Synthetic oligonucleotide
uguuuguucaagucuaggu

SEQ ID NO: 2291904 - RNA, 19 nt, Artificial Sequence
  Description of Artificial Sequence: Synthetic oligonucleotide
uauaggaucccuucccucc

SEQ ID NO: 2291905 - RNA, 19 nt, Artificial Sequence
  Description of Artificial Sequence: Synthetic oligonucleotide
auuaagugaugcuagugga

SEQ ID NO: 2291906 - RNA, 19 nt, Artificial Sequence
  Description of Artificial Sequence: Synthetic oligonucleotide
acuaggaaaggaaagucac

SEQ ID NO: 2291907 - RNA, 19 nt, Artificial Sequence
  Description of Artificial Sequence: Synthetic oligonucleotide
ucaaucauucagaaggcaa

SEQ ID NO: 2291908 - RNA, 19 nt, Artificial Sequence
  Description of Artificial Sequence: Synthetic oligonucleotide
uguuagucaaguaaugauu

SEQ ID NO: 2291909 - RNA, 19 nt, Artificial Sequence
  Description of Artificial Sequence: Synthetic oligonucleotide
uuucaaucauucagaaggc

SEQ ID NO: 2291910 - RNA, 19 nt, Artificial Sequence
  Description of Artificial Sequence: Synthetic oligonucleotide
aagcuuacuaacauuaagu

SEQ ID NO: 2291911 - RNA, 19 nt, Artificial Sequence
  Description of Artificial Sequence: Synthetic oligonucleotide
uacaguucuuuaauggucu

SEQ ID NO: 2291912 - RNA, 19 nt, Artificial Sequence
  Description of Artificial Sequence: Synthetic oligonucleotide
guaauaacaacuucuucca

SEQ ID NO: 2291913 - RNA, 19 nt, Artificial Sequence
  Description of Artificial Sequence: Synthetic oligonucleotide
uucuguucgaucauuaauu

SEQ ID NO: 2291914 - RNA, 19 nt, Artificial Sequence
  Description of Artificial Sequence: Synthetic oligonucleotide
aagaugacuguuccagaag

SEQ ID NO: 2291915 - RNA, 19 nt, Artificial Sequence
  Description of Artificial Sequence: Synthetic oligonucleotide
cuuacuaacauuaagugau

SEQ ID NO: 2291916 - RNA, 19 nt, Artificial Sequence
  Description of Artificial Sequence: Synthetic oligonucleotide
uuucguacauggcucagug

SEQ ID NO: 2291917 - RNA, 19 nt, Artificial Sequence
  Description of Artificial Sequence: Synthetic oligonucleotide
caaucauucagaaggcaag

SEQ ID NO: 2291918 - RNA, 19 nt, Artificial Sequence
  Description of Artificial Sequence: Synthetic oligonucleotide
cuugugaauggucuggaag

SEQ ID NO: 2291919 - RNA, 19 nt, Artificial Sequence
  Description of Artificial Sequence: Synthetic oligonucleotide
uuacaguucuuuaaugguc

SEQ ID NO: 2291920 - RNA, 19 nt, Artificial Sequence
  Description of Artificial Sequence: Synthetic oligonucleotide
gauugcauaggccuggcuc

SEQ ID NO: 2291921 - RNA, 19 nt, Artificial Sequence
  Description of Artificial Sequence: Synthetic oligonucleotide
uuugcuggcaagcuuacua

SEQ ID NO: 2291922 - RNA, 19 nt, Artificial Sequence
  Description of Artificial Sequence: Synthetic oligonucleotide
ucuagguuguuugaaacac

SEQ ID NO: 2291923 - RNA, 19 nt, Artificial Sequence
  Description of Artificial Sequence: Synthetic oligonucleotide
ucaaguaaugauucaacuu

SEQ ID NO: 2291924 - RNA, 19 nt, Artificial Sequence
  Description of Artificial Sequence: Synthetic oligonucleotide
uggaagaaaagauguaaaa

SEQ ID NO: 2291925 - RNA, 19 nt, Artificial Sequence
  Description of Artificial Sequence: Synthetic oligonucleotide
agaguggaaaggaauuugc

SEQ ID NO: 2291926 - RNA, 19 nt, Artificial Sequence
  Description of Artificial Sequence: Synthetic oligonucleotide
guuguugggcuugugaacg

SEQ ID NO: 2291927 - RNA, 19 nt, Artificial Sequence
  Description of Artificial Sequence: Synthetic oligonucleotide
uuggaagaaaagauguaaa

SEQ ID NO: 2291928 - RNA, 19 nt, Artificial Sequence
  Description of Artificial Sequence: Synthetic oligonucleotide
ugacucuuuagugagaguc

SEQ ID NO: 2291929 - RNA, 19 nt, Artificial Sequence
  Description of Artificial Sequence: Synthetic oligonucleotide
uguuacuuuuauuuuggaa

SEQ ID NO: 2291930 - RNA, 19 nt, Artificial Sequence
  Description of Artificial Sequence: Synthetic oligonucleotide
ucauucagaaggcaaguau

SEQ ID NO: 2291931 - RNA, 19 nt, Artificial Sequence
  Description of Artificial Sequence: Synthetic oligonucleotide
uuuucuugccauuuacagu

SEQ ID NO: 2291932 - RNA, 19 nt, Artificial Sequence
  Description of Artificial Sequence: Synthetic oligonucleotide
aacauuaagugaugcuagu

SEQ ID NO: 2291933 - RNA, 19 nt, Artificial Sequence
  Description of Artificial Sequence: Synthetic oligonucleotide
agaaggcaaguauauccac

SEQ ID NO: 2291934 - RNA, 19 nt, Artificial Sequence
  Description of Artificial Sequence: Synthetic oligonucleotide
uuucuguucgaucauuaau

SEQ ID NO: 2291935 - RNA, 19 nt, Artificial Sequence
  Description of Artificial Sequence: Synthetic oligonucleotide
ggaagaaaagauguaaaag

SEQ ID NO: 2291936 - RNA, 19 nt, Artificial Sequence
  Description of Artificial Sequence: Synthetic oligonucleotide
auaaaacuaacaagaugac

SEQ ID NO: 2291937 - RNA, 19 nt, Artificial Sequence
  Description of Artificial Sequence: Synthetic oligonucleotide
ucuuucaaucauucagaag

SEQ ID NO: 2291938 - RNA, 19 nt, Artificial Sequence
  Description of Artificial Sequence: Synthetic oligonucleotide
acuaacauuaagugaugcu

SEQ ID NO: 2291939 - RNA, 19 nt, Artificial Sequence
  Description of Artificial Sequence: Synthetic oligonucleotide
uguaaaaguuucuuucaau

SEQ ID NO: 2291940 - RNA, 19 nt, Artificial Sequence
  Description of Artificial Sequence: Synthetic oligonucleotide
caagcuuacuaacauuaag

SEQ ID NO: 2291941 - RNA, 19 nt, Artificial Sequence
  Description of Artificial Sequence: Synthetic oligonucleotide
acuaacaagaugacuguuc

SEQ ID NO: 2291942 - RNA, 19 nt, Artificial Sequence
  Description of Artificial Sequence: Synthetic oligonucleotide
ucacagucagucuuguuac

SEQ ID NO: 2291943 - RNA, 19 nt, Artificial Sequence
  Description of Artificial Sequence: Synthetic oligonucleotide
ucuguuagucaaguaauga

SEQ ID NO: 2291944 - RNA, 19 nt, Artificial Sequence
  Description of Artificial Sequence: Synthetic oligonucleotide
uggguguuuguucaagucu

SEQ ID NO: 2291945 - RNA, 19 nt, Artificial Sequence
  Description of Artificial Sequence: Synthetic oligonucleotide
aauggucuugugaaugguc

SEQ ID NO: 2291946 - RNA, 19 nt, Artificial Sequence
  Description of Artificial Sequence: Synthetic oligonucleotide
uaaaacuaacaagaugacu

SEQ ID NO: 2291947 - RNA, 19 nt, Artificial Sequence
  Description of Artificial Sequence: Synthetic oligonucleotide
aauggcagaaacagacuag

SEQ ID NO: 2291948 - RNA, 19 nt, Artificial Sequence
  Description of Artificial Sequence: Synthetic oligonucleotide
uuuuguuggguguuuguuc

SEQ ID NO: 2291949 - RNA, 19 nt, Artificial Sequence
  Description of Artificial Sequence: Synthetic oligonucleotide
aucacagucagucuuguua

SEQ ID NO: 2291950 - RNA, 19 nt, Artificial Sequence
  Description of Artificial Sequence: Synthetic oligonucleotide
cagcaagaaauauaggauc

SEQ ID NO: 2291951 - RNA, 19 nt, Artificial Sequence
  Description of Artificial Sequence: Synthetic oligonucleotide
aaggcaaguauauccacuu

SEQ ID NO: 2291952 - RNA, 19 nt, Artificial Sequence
  Description of Artificial Sequence: Synthetic oligonucleotide
auugcauaggccuggcuca

SEQ ID NO: 2291953 - RNA, 19 nt, Artificial Sequence
  Description of Artificial Sequence: Synthetic oligonucleotide
auaggaucccuucccuccc

SEQ ID NO: 2291954 - RNA, 19 nt, Artificial Sequence
  Description of Artificial Sequence: Synthetic oligonucleotide
agggguuucuguucgauca

SEQ ID NO: 2291955 - RNA, 19 nt, Artificial Sequence
  Description of Artificial Sequence: Synthetic oligonucleotide
guaucuuuuggcuuuccac

SEQ ID NO: 2291956 - RNA, 19 nt, Artificial Sequence
  Description of Artificial Sequence: Synthetic oligonucleotide
gaagaguccuccauguuug

SEQ ID NO: 2291957 - RNA, 19 nt, Artificial Sequence
  Description of Artificial Sequence: Synthetic oligonucleotide
uuacuaacauuaagugaug

SEQ ID NO: 2291958 - RNA, 19 nt, Artificial Sequence
  Description of Artificial Sequence: Synthetic oligonucleotide
gguuguuugaaacacugac

SEQ ID NO: 2291959 - RNA, 19 nt, Artificial Sequence
  Description of Artificial Sequence: Synthetic oligonucleotide
aggaugacagggcagccuc

SEQ ID NO: 2291960 - RNA, 19 nt, Artificial Sequence
  Description of Artificial Sequence: Synthetic oligonucleotide
auauaggaucccuucccuc

SEQ ID NO: 2291961 - RNA, 19 nt, Artificial Sequence
  Description of Artificial Sequence: Synthetic oligonucleotide
gaggagggguuucuguucg

SEQ ID NO: 2291962 - RNA, 19 nt, Artificial Sequence
  Description of Artificial Sequence: Synthetic oligonucleotide
aaucauucagaaggcaagu

SEQ ID NO: 2291963 - RNA, 19 nt, Artificial Sequence
  Description of Artificial Sequence: Synthetic oligonucleotide
uccaugacuacgauguuuu

SEQ ID NO: 2291964 - RNA, 19 nt, Artificial Sequence
  Description of Artificial Sequence: Synthetic oligonucleotide
gaugcuggaagaguccucc

SEQ ID NO: 2291965 - RNA, 19 nt, Artificial Sequence
  Description of Artificial Sequence: Synthetic oligonucleotide
aguucuuuaauggucuugu

SEQ ID NO: 2291966 - RNA, 19 nt, Artificial Sequence
  Description of Artificial Sequence: Synthetic oligonucleotide
aagucuagguuguuugaaa

SEQ ID NO: 2291967 - RNA, 19 nt, Artificial Sequence
  Description of Artificial Sequence: Synthetic oligonucleotide
acugacucuuuagugagag

SEQ ID NO: 2291968 - RNA, 19 nt, Artificial Sequence
  Description of Artificial Sequence: Synthetic oligonucleotide
uucuuucaaucauucagaa

SEQ ID NO: 2291969 - RNA, 19 nt, Artificial Sequence
  Description of Artificial Sequence: Synthetic oligonucleotide
cugugaaaaggacauggug

SEQ ID NO: 2291970 - RNA, 19 nt, Artificial Sequence
  Description of Artificial Sequence: Synthetic oligonucleotide
uacuaacauuaagugaugc

SEQ ID NO: 2291971 - RNA, 19 nt, Artificial Sequence
  Description of Artificial Sequence: Synthetic oligonucleotide
gaugacuguuccagaaggg

SEQ ID NO: 2291972 - RNA, 19 nt, Artificial Sequence
  Description of Artificial Sequence: Synthetic oligonucleotide
aagugaugcuaguggagga

SEQ ID NO: 2291973 - RNA, 19 nt, Artificial Sequence
  Description of Artificial Sequence: Synthetic oligonucleotide
ucagucuuguuacuuuuau

SEQ ID NO: 2291974 - RNA, 19 nt, Artificial Sequence
  Description of Artificial Sequence: Synthetic oligonucleotide
gaauggcagaaacagacua

SEQ ID NO: 2291975 - RNA, 19 nt, Artificial Sequence
  Description of Artificial Sequence: Synthetic oligonucleotide
uguuugaaacacugacucu

SEQ ID NO: 2291976 - RNA, 19 nt, Artificial Sequence
  Description of Artificial Sequence: Synthetic oligonucleotide
aaacagacuaggaaaggaa

SEQ ID NO: 2291977 - RNA, 19 nt, Artificial Sequence
  Description of Artificial Sequence: Synthetic oligonucleotide
ucaagucuagguuguuuga

SEQ ID NO: 2291978 - RNA, 19 nt, Artificial Sequence
  Description of Artificial Sequence: Synthetic oligonucleotide
ugagagucagcaagaaaua

SEQ ID NO: 2291979 - RNA, 19 nt, Artificial Sequence
  Description of Artificial Sequence: Synthetic oligonucleotide
aaacagaauggcagaaaca

SEQ ID NO: 2291980 - RNA, 19 nt, Artificial Sequence
  Description of Artificial Sequence: Synthetic oligonucleotide
ucagcuucagaaucacagu

SEQ ID NO: 2291981 - RNA, 19 nt, Artificial Sequence
  Description of Artificial Sequence: Synthetic oligonucleotide
ugcaguaucuuuuggcuuu

SEQ ID NO: 2291982 - RNA, 19 nt, Artificial Sequence
  Description of Artificial Sequence: Synthetic oligonucleotide
ugguuguugggcuugugaa

SEQ ID NO: 2291983 - RNA, 19 nt, Artificial Sequence
  Description of Artificial Sequence: Synthetic oligonucleotide
gagacgccagcgcugauug

SEQ ID NO: 2291984 - RNA, 19 nt, Artificial Sequence
  Description of Artificial Sequence: Synthetic oligonucleotide
uaauucaagccaugcccug

SEQ ID NO: 2291985 - RNA, 19 nt, Artificial Sequence
  Description of Artificial Sequence: Synthetic oligonucleotide
uugugaacgcugcaguauc

SEQ ID NO: 2291986 - RNA, 19 nt, Artificial Sequence
  Description of Artificial Sequence: Synthetic oligonucleotide
cuaacauuaagugaugcua

SEQ ID NO: 2291987 - RNA, 19 nt, Artificial Sequence
  Description of Artificial Sequence: Synthetic oligonucleotide
ucaagccaugcccugugca

SEQ ID NO: 2291988 - RNA, 19 nt, Artificial Sequence
  Description of Artificial Sequence: Synthetic oligonucleotide
ucagaaucacagucagucu

SEQ ID NO: 2291989 - RNA, 19 nt, Artificial Sequence
  Description of Artificial Sequence: Synthetic oligonucleotide
ggaaagucacaggugaagg

SEQ ID NO: 2291990 - RNA, 19 nt, Artificial Sequence
  Description of Artificial Sequence: Synthetic oligonucleotide
uagucaaguaaugauucaa

SEQ ID NO: 2291991 - RNA, 19 nt, Artificial Sequence
  Description of Artificial Sequence: Synthetic oligonucleotide
uucuuccaugacuacgaug

SEQ ID NO: 2291992 - RNA, 19 nt, Artificial Sequence
  Description of Artificial Sequence: Synthetic oligonucleotide
acauuaagugaugcuagug

SEQ ID NO: 2291993 - RNA, 19 nt, Artificial Sequence
  Description of Artificial Sequence: Synthetic oligonucleotide
acucuuuagugagagucag

SEQ ID NO: 2291994 - RNA, 19 nt, Artificial Sequence
  Description of Artificial Sequence: Synthetic oligonucleotide
aggaaagucacaggugaag

SEQ ID NO: 2291995 - RNA, 19 nt, Artificial Sequence
  Description of Artificial Sequence: Synthetic oligonucleotide
aauucaagccaugcccugu

SEQ ID NO: 2291996 - RNA, 19 nt, Artificial Sequence
  Description of Artificial Sequence: Synthetic oligonucleotide
ucuugccauuuacaguucu

SEQ ID NO: 2291997 - RNA, 19 nt, Artificial Sequence
  Description of Artificial Sequence: Synthetic oligonucleotide
aagggcagaguggaaagga

SEQ ID NO: 2291998 - RNA, 19 nt, Artificial Sequence
  Description of Artificial Sequence: Synthetic oligonucleotide
acaacuucuuccaugacua

SEQ ID NO: 2291999 - RNA, 19 nt, Artificial Sequence
  Description of Artificial Sequence: Synthetic oligonucleotide
gaugcuaguggaggagggg

SEQ ID NO: 2292000 - RNA, 19 nt, Artificial Sequence
  Description of Artificial Sequence: Synthetic oligonucleotide
uugggcuugugaacgcugc

SEQ ID NO: 2292001 - RNA, 19 nt, Artificial Sequence
  Description of Artificial Sequence: Synthetic oligonucleotide
uccguccgugcuuugcugg

SEQ ID NO: 2292002 - RNA, 19 nt, Artificial Sequence
  Description of Artificial Sequence: Synthetic oligonucleotide
gacuaggaaaggaaaguca

SEQ ID NO: 2292003 - RNA, 19 nt, Artificial Sequence
  Description of Artificial Sequence: Synthetic oligonucleotide
aaagaaagugagaccucug

SEQ ID NO: 2292004 - RNA, 19 nt, Artificial Sequence
  Description of Artificial Sequence: Synthetic oligonucleotide
uccuccauguuuguggacu

SEQ ID NO: 2292005 - RNA, 19 nt, Artificial Sequence
  Description of Artificial Sequence: Synthetic oligonucleotide
uaauaacaacuucuuccau

SEQ ID NO: 2292006 - RNA, 19 nt, Artificial Sequence
  Description of Artificial Sequence: Synthetic oligonucleotide
acuucuuccaugacuacga

SEQ ID NO: 2292007 - RNA, 19 nt, Artificial Sequence
  Description of Artificial Sequence: Synthetic oligonucleotide
cagcuucagaaucacaguc

SEQ ID NO: 2292008 - RNA, 19 nt, Artificial Sequence
  Description of Artificial Sequence: Synthetic oligonucleotide
uguuggguguuuguucaag

SEQ ID NO: 2292009 - RNA, 19 nt, Artificial Sequence
  Description of Artificial Sequence: Synthetic oligonucleotide
uucaaucauucagaaggca

SEQ ID NO: 2292010 - RNA, 19 nt, Artificial Sequence
  Description of Artificial Sequence: Synthetic oligonucleotide
caaguaaugauucaacuuu

SEQ ID NO: 2292011 - RNA, 19 nt, Artificial Sequence
  Description of Artificial Sequence: Synthetic oligonucleotide
uuguuacuuuuauuuugga

SEQ ID NO: 2292012 - RNA, 19 nt, Artificial Sequence
  Description of Artificial Sequence: Synthetic oligonucleotide
uccauguuuguggacucag

SEQ ID NO: 2292013 - RNA, 19 nt, Artificial Sequence
  Description of Artificial Sequence: Synthetic oligonucleotide
caaguauauccacuuauaa

SEQ ID NO: 2292014 - RNA, 19 nt, Artificial Sequence
  Description of Artificial Sequence: Synthetic oligonucleotide
ugugaacgcugcaguaucu

SEQ ID NO: 2292015 - RNA, 19 nt, Artificial Sequence
  Description of Artificial Sequence: Synthetic oligonucleotide
auucaagccaugcccugug

SEQ ID NO: 2292016 - RNA, 19 nt, Artificial Sequence
  Description of Artificial Sequence: Synthetic oligonucleotide
cauggcucagugcacuccc

SEQ ID NO: 2292017 - RNA, 19 nt, Artificial Sequence
  Description of Artificial Sequence: Synthetic oligonucleotide
aagaaauauaggaucccuu

SEQ ID NO: 2292018 - RNA, 19 nt, Artificial Sequence
  Description of Artificial Sequence: Synthetic oligonucleotide
agugagaccucugucuucu

SEQ ID NO: 2292019 - RNA, 19 nt, Artificial Sequence
  Description of Artificial Sequence: Synthetic oligonucleotide
aaguaaugauucaacuuuu

SEQ ID NO: 2292020 - RNA, 19 nt, Artificial Sequence
  Description of Artificial Sequence: Synthetic oligonucleotide
cauucagaaggcaaguaua

SEQ ID NO: 2292021 - RNA, 19 nt, Artificial Sequence
  Description of Artificial Sequence: Synthetic oligonucleotide
agugaugcuaguggaggag

SEQ ID NO: 2292022 - RNA, 19 nt, Artificial Sequence
  Description of Artificial Sequence: Synthetic oligonucleotide
aucuuuuggcuuuccacau

SEQ ID NO: 2292023 - RNA, 19 nt, Artificial Sequence
  Description of Artificial Sequence: Synthetic oligonucleotide
cagucuguuagucaaguaa

SEQ ID NO: 2292024 - RNA, 19 nt, Artificial Sequence
  Description of Artificial Sequence: Synthetic oligonucleotide
uccgcucaagccaccacca

SEQ ID NO: 2292025 - RNA, 19 nt, Artificial Sequence
  Description of Artificial Sequence: Synthetic oligonucleotide
gcuuacuaacauuaaguga

SEQ ID NO: 2292026 - RNA, 19 nt, Artificial Sequence
  Description of Artificial Sequence: Synthetic oligonucleotide
agucuguuagucaaguaau

SEQ ID NO: 2292027 - RNA, 19 nt, Artificial Sequence
  Description of Artificial Sequence: Synthetic oligonucleotide
gucaaguaaugauucaacu

SEQ ID NO: 2292028 - RNA, 19 nt, Artificial Sequence
  Description of Artificial Sequence: Synthetic oligonucleotide
acauggcucagugcacucc

SEQ ID NO: 2292029 - RNA, 19 nt, Artificial Sequence
  Description of Artificial Sequence: Synthetic oligonucleotide
aagucacaggugaagggca

SEQ ID NO: 2292030 - RNA, 19 nt, Artificial Sequence
  Description of Artificial Sequence: Synthetic oligonucleotide
cuuugccuuuacaauuuuc

SEQ ID NO: 2292031 - RNA, 19 nt, Artificial Sequence
  Description of Artificial Sequence: Synthetic oligonucleotide
cuggaugcuggaagagucc

SEQ ID NO: 2292032 - RNA, 19 nt, Artificial Sequence
  Description of Artificial Sequence: Synthetic oligonucleotide
uggucuugugaauggucug

SEQ ID NO: 2292033 - RNA, 19 nt, Artificial Sequence
  Description of Artificial Sequence: Synthetic oligonucleotide
gugaugcuaguggaggagg

SEQ ID NO: 2292034 - RNA, 19 nt, Artificial Sequence
  Description of Artificial Sequence: Synthetic oligonucleotide
gucuagguuguuugaaaca

SEQ ID NO: 2292035 - RNA, 19 nt, Artificial Sequence
  Description of Artificial Sequence: Synthetic oligonucleotide
ucuuuuggcuuuccacauc

SEQ ID NO: 2292036 - RNA, 19 nt, Artificial Sequence
  Description of Artificial Sequence: Synthetic oligonucleotide
cuccgcucaagccaccacc

SEQ ID NO: 2292037 - RNA, 19 nt, Artificial Sequence
  Description of Artificial Sequence: Synthetic oligonucleotide
uucguacauggcucagugc

SEQ ID NO: 2292038 - RNA, 19 nt, Artificial Sequence
  Description of Artificial Sequence: Synthetic oligonucleotide
auggucuugugaauggucu

SEQ ID NO: 2292039 - RNA, 19 nt, Artificial Sequence
  Description of Artificial Sequence: Synthetic oligonucleotide
auucagaaggcaaguauau

SEQ ID NO: 2292040 - RNA, 19 nt, Artificial Sequence
  Description of Artificial Sequence: Synthetic oligonucleotide
gacauggugggccgcaguc

SEQ ID NO: 2292041 - RNA, 19 nt, Artificial Sequence
  Description of Artificial Sequence: Synthetic oligonucleotide
caagaugacuguuccagaa

SEQ ID NO: 2292042 - RNA, 19 nt, Artificial Sequence
  Description of Artificial Sequence: Synthetic oligonucleotide
ugccauuuacaguucuuua

SEQ ID NO: 2292043 - RNA, 19 nt, Artificial Sequence
  Description of Artificial Sequence: Synthetic oligonucleotide
guguuuguucaagucuagg

SEQ ID NO: 2292044 - RNA, 19 nt, Artificial Sequence
  Description of Artificial Sequence: Synthetic oligonucleotide
ucugugguuguugggcuug

SEQ ID NO: 2292045 - RNA, 19 nt, Artificial Sequence
  Description of Artificial Sequence: Synthetic oligonucleotide
ugcacuccccucuuugccu

SEQ ID NO: 2292046 - RNA, 19 nt, Artificial Sequence
  Description of Artificial Sequence: Synthetic oligonucleotide
cucuuuagugagagucagc

SEQ ID NO: 2292047 - RNA, 19 nt, Artificial Sequence
  Description of Artificial Sequence: Synthetic oligonucleotide
uucaagccaugcccugugc

SEQ ID NO: 2292048 - RNA, 19 nt, Artificial Sequence
  Description of Artificial Sequence: Synthetic oligonucleotide
uccagggagacgccagcgc

SEQ ID NO: 2292049 - RNA, 19 nt, Artificial Sequence
  Description of Artificial Sequence: Synthetic oligonucleotide
ucuccguccgugcuuugcu

SEQ ID NO: 2292050 - RNA, 19 nt, Artificial Sequence
  Description of Artificial Sequence: Synthetic oligonucleotide
cuaauucaagccaugcccu

SEQ ID NO: 2292051 - RNA, 19 nt, Artificial Sequence
  Description of Artificial Sequence: Synthetic oligonucleotide
cuaggaaaggaaagucaca

SEQ ID NO: 2292052 - RNA, 19 nt, Artificial Sequence
  Description of Artificial Sequence: Synthetic oligonucleotide
guggacucaggaugacagg

SEQ ID NO: 2292053 - RNA, 19 nt, Artificial Sequence
  Description of Artificial Sequence: Synthetic oligonucleotide
guucuuuaauggucuugug

SEQ ID NO: 2292054 - RNA, 19 nt, Artificial Sequence
  Description of Artificial Sequence: Synthetic oligonucleotide
uuuucguacauggcucagu

SEQ ID NO: 2292055 - RNA, 19 nt, Artificial Sequence
  Description of Artificial Sequence: Synthetic oligonucleotide
ugcuggcaagcuuacuaac

SEQ ID NO: 2292056 - RNA, 19 nt, Artificial Sequence
  Description of Artificial Sequence: Synthetic oligonucleotide
agucagucuuguuacuuuu

SEQ ID NO: 2292057 - RNA, 19 nt, Artificial Sequence
  Description of Artificial Sequence: Synthetic oligonucleotide
aacuaacaagaugacuguu

SEQ ID NO: 2292058 - RNA, 19 nt, Artificial Sequence
  Description of Artificial Sequence: Synthetic oligonucleotide
uaauggucuugugaauggu

SEQ ID NO: 2292059 - RNA, 19 nt, Artificial Sequence
  Description of Artificial Sequence: Synthetic oligonucleotide
uccagaaggggcugugaaa

SEQ ID NO: 2292060 - RNA, 19 nt, Artificial Sequence
  Description of Artificial Sequence: Synthetic oligonucleotide
aagaguccuccauguuugu

SEQ ID NO: 2292061 - RNA, 19 nt, Artificial Sequence
  Description of Artificial Sequence: Synthetic oligonucleotide
gacucuuuagugagaguca

SEQ ID NO: 2292062 - RNA, 19 nt, Artificial Sequence
  Description of Artificial Sequence: Synthetic oligonucleotide
ugcuggaagaguccuccau

SEQ ID NO: 2292063 - RNA, 19 nt, Artificial Sequence
  Description of Artificial Sequence: Synthetic oligonucleotide
gaguggaaaggaauuugca

SEQ ID NO: 2292064 - RNA, 19 nt, Artificial Sequence
  Description of Artificial Sequence: Synthetic oligonucleotide
gucuguuagucaaguaaug

SEQ ID NO: 2292065 - RNA, 19 nt, Artificial Sequence
  Description of Artificial Sequence: Synthetic oligonucleotide
cugucuucugccucugguc

SEQ ID NO: 2292066 - RNA, 19 nt, Artificial Sequence
  Description of Artificial Sequence: Synthetic oligonucleotide
uucagaaggcaaguauauc

SEQ ID NO: 2292067 - RNA, 19 nt, Artificial Sequence
  Description of Artificial Sequence: Synthetic oligonucleotide
uaacaacuucuuccaugac

SEQ ID NO: 2292068 - RNA, 19 nt, Artificial Sequence
  Description of Artificial Sequence: Synthetic oligonucleotide
uugccauuuacaguucuuu

SEQ ID NO: 2292069 - RNA, 19 nt, Artificial Sequence
  Description of Artificial Sequence: Synthetic oligonucleotide
cauggugggccgcagucug

SEQ ID NO: 2292070 - RNA, 19 nt, Artificial Sequence
  Description of Artificial Sequence: Synthetic oligonucleotide
guuuguggacucaggauga

SEQ ID NO: 2292071 - RNA, 19 nt, Artificial Sequence
  Description of Artificial Sequence: Synthetic oligonucleotide
uuguugggcuugugaacgc

SEQ ID NO: 2292072 - RNA, 19 nt, Artificial Sequence
  Description of Artificial Sequence: Synthetic oligonucleotide
ugaacgcugcaguaucuuu

SEQ ID NO: 2292073 - RNA, 19 nt, Artificial Sequence
  Description of Artificial Sequence: Synthetic oligonucleotide
gugggccgcagucuguuag

SEQ ID NO: 2292074 - RNA, 19 nt, Artificial Sequence
  Description of Artificial Sequence: Synthetic oligonucleotide
uuccaugacuacgauguuu

SEQ ID NO: 2292075 - RNA, 19 nt, Artificial Sequence
  Description of Artificial Sequence: Synthetic oligonucleotide
agaauggcagaaacagacu

SEQ ID NO: 2292076 - RNA, 19 nt, Artificial Sequence
  Description of Artificial Sequence: Synthetic oligonucleotide
agaccucugucuucugccu

SEQ ID NO: 2292077 - RNA, 19 nt, Artificial Sequence
  Description of Artificial Sequence: Synthetic oligonucleotide
gugguuguugggcuuguga

SEQ ID NO: 2292078 - RNA, 19 nt, Artificial Sequence
  Description of Artificial Sequence: Synthetic oligonucleotide
gacgccagcgcugauugca

SEQ ID NO: 2292079 - RNA, 19 nt, Artificial Sequence
  Description of Artificial Sequence: Synthetic oligonucleotide
guuucuguucgaucauuaa

SEQ ID NO: 2292080 - RNA, 19 nt, Artificial Sequence
  Description of Artificial Sequence: Synthetic oligonucleotide
ugauugcauaggccuggcu

SEQ ID NO: 2292081 - RNA, 19 nt, Artificial Sequence
  Description of Artificial Sequence: Synthetic oligonucleotide
augcuaguggaggaggggu

SEQ ID NO: 2292082 - RNA, 19 nt, Artificial Sequence
  Description of Artificial Sequence: Synthetic oligonucleotide
gugcacuccccucuuugcc

SEQ ID NO: 2292083 - RNA, 19 nt, Artificial Sequence
  Description of Artificial Sequence: Synthetic oligonucleotide
gcugauugcauaggccugg

SEQ ID NO: 2292084 - RNA, 19 nt, Artificial Sequence
  Description of Artificial Sequence: Synthetic oligonucleotide
gguuguugggcuugugaac

SEQ ID NO: 2292085 - RNA, 19 nt, Artificial Sequence
  Description of Artificial Sequence: Synthetic oligonucleotide
acgcugcaguaucuuuugg

SEQ ID NO: 2292086 - RNA, 19 nt, Artificial Sequence
  Description of Artificial Sequence: Synthetic oligonucleotide
uuguggacucaggaugaca

SEQ ID NO: 2292087 - RNA, 19 nt, Artificial Sequence
  Description of Artificial Sequence: Synthetic oligonucleotide
cuguuagucaaguaaugau

SEQ ID NO: 2292088 - RNA, 19 nt, Artificial Sequence
  Description of Artificial Sequence: Synthetic oligonucleotide
ccuucugugguuguugggc

SEQ ID NO: 2292089 - RNA, 19 nt, Artificial Sequence
  Description of Artificial Sequence: Synthetic oligonucleotide
gccuuuacaauuuuccacu

SEQ ID NO: 2292090 - RNA, 19 nt, Artificial Sequence
  Description of Artificial Sequence: Synthetic oligonucleotide
aaggaaagucacaggugaa

SEQ ID NO: 2292091 - RNA, 19 nt, Artificial Sequence
  Description of Artificial Sequence: Synthetic oligonucleotide
gagggguuucuguucgauc

SEQ ID NO: 2292092 - RNA, 19 nt, Artificial Sequence
  Description of Artificial Sequence: Synthetic oligonucleotide
ucaggaugacagggcagcc

SEQ ID NO: 2292093 - RNA, 19 nt, Artificial Sequence
  Description of Artificial Sequence: Synthetic oligonucleotide
uucuugccauuuacaguuc

SEQ ID NO: 2292094 - RNA, 19 nt, Artificial Sequence
  Description of Artificial Sequence: Synthetic oligonucleotide
acagaauggcagaaacaga

SEQ ID NO: 2292095 - RNA, 19 nt, Artificial Sequence
  Description of Artificial Sequence: Synthetic oligonucleotide
gaaggcaaguauauccacu

SEQ ID NO: 2292096 - RNA, 19 nt, Artificial Sequence
  Description of Artificial Sequence: Synthetic oligonucleotide
aguaaugauucaacuuuua

SEQ ID NO: 2292097 - RNA, 19 nt, Artificial Sequence
  Description of Artificial Sequence: Synthetic oligonucleotide
uguugggcuugugaacgcu

SEQ ID NO: 2292098 - RNA, 19 nt, Artificial Sequence
  Description of Artificial Sequence: Synthetic oligonucleotide
gcaagaaauauaggauccc

SEQ ID NO: 2292099 - RNA, 19 nt, Artificial Sequence
  Description of Artificial Sequence: Synthetic oligonucleotide
cagugcacuccccucuuug

SEQ ID NO: 2292100 - RNA, 19 nt, Artificial Sequence
  Description of Artificial Sequence: Synthetic oligonucleotide
aagccaugcccugugcaaa

SEQ ID NO: 2292101 - RNA, 19 nt, Artificial Sequence
  Description of Artificial Sequence: Synthetic oligonucleotide
cacaucucuaaaauguuuu

SEQ ID NO: 2292102 - RNA, 19 nt, Artificial Sequence
  Description of Artificial Sequence: Synthetic oligonucleotide
uggcucaacuucuccuccu

SEQ ID NO: 2292103 - RNA, 19 nt, Artificial Sequence
  Description of Artificial Sequence: Synthetic oligonucleotide
agacgccagcgcugauugc

SEQ ID NO: 2292104 - RNA, 19 nt, Artificial Sequence
  Description of Artificial Sequence: Synthetic oligonucleotide
uggcaagcuuacuaacauu

SEQ ID NO: 2292105 - RNA, 19 nt, Artificial Sequence
  Description of Artificial Sequence: Synthetic oligonucleotide
uagugagagucagcaagaa

SEQ ID NO: 2292106 - RNA, 19 nt, Artificial Sequence
  Description of Artificial Sequence: Synthetic oligonucleotide
caacuucuuccaugacuac

SEQ ID NO: 2292107 - RNA, 19 nt, Artificial Sequence
  Description of Artificial Sequence: Synthetic oligonucleotide
uucuccguccgugcuuugc

SEQ ID NO: 2292108 - RNA, 19 nt, Artificial Sequence
  Description of Artificial Sequence: Synthetic oligonucleotide
agucacaggugaagggcag

SEQ ID NO: 2292109 - RNA, 19 nt, Artificial Sequence
  Description of Artificial Sequence: Synthetic oligonucleotide
agaguccuccauguuugug

SEQ ID NO: 2292110 - RNA, 19 nt, Artificial Sequence
  Description of Artificial Sequence: Synthetic oligonucleotide
cuuuagugagagucagcaa

SEQ ID NO: 2292111 - RNA, 19 nt, Artificial Sequence
  Description of Artificial Sequence: Synthetic oligonucleotide
gugaagggcagaguggaaa

SEQ ID NO: 2292112 - RNA, 19 nt, Artificial Sequence
  Description of Artificial Sequence: Synthetic oligonucleotide
caagaaauauaggaucccu

SEQ ID NO: 2292113 - RNA, 19 nt, Artificial Sequence
  Description of Artificial Sequence: Synthetic oligonucleotide
cugccuccgcucaagccac

SEQ ID NO: 2292114 - RNA, 19 nt, Artificial Sequence
  Description of Artificial Sequence: Synthetic oligonucleotide
uccgugcuuugcuggcaag

SEQ ID NO: 2292115 - RNA, 19 nt, Artificial Sequence
  Description of Artificial Sequence: Synthetic oligonucleotide
aucauucagaaggcaagua

SEQ ID NO: 2292116 - RNA, 19 nt, Artificial Sequence
  Description of Artificial Sequence: Synthetic oligonucleotide
guugggcuugugaacgcug

SEQ ID NO: 2292117 - RNA, 19 nt, Artificial Sequence
  Description of Artificial Sequence: Synthetic oligonucleotide
caagccaugcccugugcaa

SEQ ID NO: 2292118 - RNA, 19 nt, Artificial Sequence
  Description of Artificial Sequence: Synthetic oligonucleotide
uuguuggguguuuguucaa

SEQ ID NO: 2292119 - RNA, 19 nt, Artificial Sequence
  Description of Artificial Sequence: Synthetic oligonucleotide
ccauguuuguggacucagg

SEQ ID NO: 2292120 - RNA, 19 nt, Artificial Sequence
  Description of Artificial Sequence: Synthetic oligonucleotide
cagggagacgccagcgcug

SEQ ID NO: 2292121 - RNA, 19 nt, Artificial Sequence
  Description of Artificial Sequence: Synthetic oligonucleotide
cuggaagaguccuccaugu

SEQ ID NO: 2292122 - RNA, 19 nt, Artificial Sequence
  Description of Artificial Sequence: Synthetic oligonucleotide
auggcucagugcacucccc

SEQ ID NO: 2292123 - RNA, 19 nt, Artificial Sequence
  Description of Artificial Sequence: Synthetic oligonucleotide
guuggguguuuguucaagu

SEQ ID NO: 2292124 - RNA, 19 nt, Artificial Sequence
  Description of Artificial Sequence: Synthetic oligonucleotide
gggguguaauaacaacuuc

SEQ ID NO: 2292125 - RNA, 19 nt, Artificial Sequence
  Description of Artificial Sequence: Synthetic oligonucleotide
gguguuuguucaagucuag

SEQ ID NO: 2292126 - RNA, 19 nt, Artificial Sequence
  Description of Artificial Sequence: Synthetic oligonucleotide
agguuguuugaaacacuga

SEQ ID NO: 2292127 - RNA, 19 nt, Artificial Sequence
  Description of Artificial Sequence: Synthetic oligonucleotide
aguggaggagggguuucug

SEQ ID NO: 2292128 - RNA, 19 nt, Artificial Sequence
  Description of Artificial Sequence: Synthetic oligonucleotide
ugggccgcagucuguuagu

SEQ ID NO: 2292129 - RNA, 19 nt, Artificial Sequence
  Description of Artificial Sequence: Synthetic oligonucleotide
aggcaaguauauccacuua

SEQ ID NO: 2292130 - RNA, 19 nt, Artificial Sequence
  Description of Artificial Sequence: Synthetic oligonucleotide
gucuuguuacuuuuauuuu

SEQ ID NO: 2292131 - RNA, 19 nt, Artificial Sequence
  Description of Artificial Sequence: Synthetic oligonucleotide
caagucuagguuguuugaa

SEQ ID NO: 2292132 - RNA, 19 nt, Artificial Sequence
  Description of Artificial Sequence: Synthetic oligonucleotide
cagaaucacagucagucuu

SEQ ID NO: 2292133 - RNA, 19 nt, Artificial Sequence
  Description of Artificial Sequence: Synthetic oligonucleotide
cugauugcauaggccuggc

SEQ ID NO: 2292134 - RNA, 19 nt, Artificial Sequence
  Description of Artificial Sequence: Synthetic oligonucleotide
uccuucuccguccgugcuu

SEQ ID NO: 2292135 - RNA, 19 nt, Artificial Sequence
  Description of Artificial Sequence: Synthetic oligonucleotide
ggaggagggguuucuguuc

SEQ ID NO: 2292136 - RNA, 19 nt, Artificial Sequence
  Description of Artificial Sequence: Synthetic oligonucleotide
cagacuaggaaaggaaagu

SEQ ID NO: 2292137 - RNA, 19 nt, Artificial Sequence
  Description of Artificial Sequence: Synthetic oligonucleotide
cuagguuguuugaaacacu

SEQ ID NO: 2292138 - RNA, 19 nt, Artificial Sequence
  Description of Artificial Sequence: Synthetic oligonucleotide
gcucaagccaccaccacca

SEQ ID NO: 2292139 - RNA, 19 nt, Artificial Sequence
  Description of Artificial Sequence: Synthetic oligonucleotide
uucugccucuggucucagc

SEQ ID NO: 2292140 - RNA, 19 nt, Artificial Sequence
  Description of Artificial Sequence: Synthetic oligonucleotide
acauggugggccgcagucu

SEQ ID NO: 2292141 - RNA, 19 nt, Artificial Sequence
  Description of Artificial Sequence: Synthetic oligonucleotide
uaguggaggagggguuucu

SEQ ID NO: 2292142 - RNA, 19 nt, Artificial Sequence
  Description of Artificial Sequence: Synthetic oligonucleotide
cuccguccgugcuuugcug

SEQ ID NO: 2292143 - RNA, 19 nt, Artificial Sequence
  Description of Artificial Sequence: Synthetic oligonucleotide
gccgcagucuguuagucaa

SEQ ID NO: 2292144 - RNA, 19 nt, Artificial Sequence
  Description of Artificial Sequence: Synthetic oligonucleotide
ugugguuguugggcuugug

SEQ ID NO: 2292145 - RNA, 19 nt, Artificial Sequence
  Description of Artificial Sequence: Synthetic oligonucleotide
ucagugcacuccccucuuu

SEQ ID NO: 2292146 - RNA, 19 nt, Artificial Sequence
  Description of Artificial Sequence: Synthetic oligonucleotide
gggcuugugaacgcugcag

SEQ ID NO: 2292147 - RNA, 19 nt, Artificial Sequence
  Description of Artificial Sequence: Synthetic oligonucleotide
cuaguggaggagggguuuc

SEQ ID NO: 2292148 - RNA, 19 nt, Artificial Sequence
  Description of Artificial Sequence: Synthetic oligonucleotide
agggagacgccagcgcuga

SEQ ID NO: 2292149 - RNA, 19 nt, Artificial Sequence
  Description of Artificial Sequence: Synthetic oligonucleotide
gguguaauaacaacuucuu

SEQ ID NO: 2292150 - RNA, 19 nt, Artificial Sequence
  Description of Artificial Sequence: Synthetic oligonucleotide
caguaucuuuuggcuuucc

SEQ ID NO: 2292151 - RNA, 19 nt, Artificial Sequence
  Description of Artificial Sequence: Synthetic oligonucleotide
ggucucagcuucagaauca

SEQ ID NO: 2292152 - RNA, 19 nt, Artificial Sequence
  Description of Artificial Sequence: Synthetic oligonucleotide
gcgcugauugcauaggccu

SEQ ID NO: 2292153 - RNA, 19 nt, Artificial Sequence
  Description of Artificial Sequence: Synthetic oligonucleotide
ggguguuuguucaagucua

SEQ ID NO: 2292154 - RNA, 19 nt, Artificial Sequence
  Description of Artificial Sequence: Synthetic oligonucleotide
uugcauaggccuggcucaa

SEQ ID NO: 2292155 - RNA, 19 nt, Artificial Sequence
  Description of Artificial Sequence: Synthetic oligonucleotide
ccugccuccgcucaagcca

SEQ ID NO: 2292156 - RNA, 19 nt, Artificial Sequence
  Description of Artificial Sequence: Synthetic oligonucleotide
gaacgcugcaguaucuuuu

SEQ ID NO: 2292157 - RNA, 19 nt, Artificial Sequence
  Description of Artificial Sequence: Synthetic oligonucleotide
gcaaguauauccacuuaua

SEQ ID NO: 2292158 - RNA, 19 nt, Artificial Sequence
  Description of Artificial Sequence: Synthetic oligonucleotide
cagccuccuucugugguug

SEQ ID NO: 2292159 - RNA, 19 nt, Artificial Sequence
  Description of Artificial Sequence: Synthetic oligonucleotide
cacugacucuuuagugaga

SEQ ID NO: 2292160 - RNA, 19 nt, Artificial Sequence
  Description of Artificial Sequence: Synthetic oligonucleotide
guacauggcucagugcacu

SEQ ID NO: 2292161 - RNA, 19 nt, Artificial Sequence
  Description of Artificial Sequence: Synthetic oligonucleotide
cuugugaacgcugcaguau

SEQ ID NO: 2292162 - RNA, 19 nt, Artificial Sequence
  Description of Artificial Sequence: Synthetic oligonucleotide
ccaccaucucuguggcugg

SEQ ID NO: 2292163 - RNA, 19 nt, Artificial Sequence
  Description of Artificial Sequence: Synthetic oligonucleotide
ugcauaggccuggcucaac

SEQ ID NO: 2292164 - RNA, 19 nt, Artificial Sequence
  Description of Artificial Sequence: Synthetic oligonucleotide
gugagaccucugucuucug

SEQ ID NO: 2292165 - RNA, 19 nt, Artificial Sequence
  Description of Artificial Sequence: Synthetic oligonucleotide
gcuugugaacgcugcagua

SEQ ID NO: 2292166 - RNA, 19 nt, Artificial Sequence
  Description of Artificial Sequence: Synthetic oligonucleotide
ggcuugugaacgcugcagu

SEQ ID NO: 2292167 - RNA, 19 nt, Artificial Sequence
  Description of Artificial Sequence: Synthetic oligonucleotide
guccgugcuuugcuggcaa

SEQ ID NO: 2292168 - RNA, 19 nt, Artificial Sequence
  Description of Artificial Sequence: Synthetic oligonucleotide
gucacaggugaagggcaga

SEQ ID NO: 2292169 - RNA, 19 nt, Artificial Sequence
  Description of Artificial Sequence: Synthetic oligonucleotide
ggggcugugaaaaggacau

SEQ ID NO: 2292170 - RNA, 19 nt, Artificial Sequence
  Description of Artificial Sequence: Synthetic oligonucleotide
cguacauggcucagugcac

SEQ ID NO: 2292171 - RNA, 19 nt, Artificial Sequence
  Description of Artificial Sequence: Synthetic oligonucleotide
cuugccauuuacaguucuu

SEQ ID NO: 2292172 - RNA, 19 nt, Artificial Sequence
  Description of Artificial Sequence: Synthetic oligonucleotide
ugccuccgcucaagccacc

SEQ ID NO: 2292173 - RNA, 19 nt, Artificial Sequence
  Description of Artificial Sequence: Synthetic oligonucleotide
ccuccauguuuguggacuc

SEQ ID NO: 2292174 - RNA, 19 nt, Artificial Sequence
  Description of Artificial Sequence: Synthetic oligonucleotide
uggugggccgcagucuguu

SEQ ID NO: 2292175 - RNA, 19 nt, Artificial Sequence
  Description of Artificial Sequence: Synthetic oligonucleotide
cagucagucuuguuacuuu

SEQ ID NO: 2292176 - RNA, 19 nt, Artificial Sequence
  Description of Artificial Sequence: Synthetic oligonucleotide
cugcaguaucuuuuggcuu

SEQ ID NO: 2292177 - RNA, 19 nt, Artificial Sequence
  Description of Artificial Sequence: Synthetic oligonucleotide
gcauaggccuggcucaacu

SEQ ID NO: 2292178 - RNA, 19 nt, Artificial Sequence
  Description of Artificial Sequence: Synthetic oligonucleotide
cuccauguuuguggacuca

SEQ ID NO: 2292179 - RNA, 19 nt, Artificial Sequence
  Description of Artificial Sequence: Synthetic oligonucleotide
ccgugcuuugcuggcaagc

SEQ ID NO: 2292180 - RNA, 19 nt, Artificial Sequence
  Description of Artificial Sequence: Synthetic oligonucleotide
ggcuuuccacaucucuaaa

SEQ ID NO: 2292181 - RNA, 19 nt, Artificial Sequence
  Description of Artificial Sequence: Synthetic oligonucleotide
cuucuccguccgugcuuug

SEQ ID NO: 2292182 - RNA, 19 nt, Artificial Sequence
  Description of Artificial Sequence: Synthetic oligonucleotide
cacagucagucuuguuacu

SEQ ID NO: 2292183 - RNA, 19 nt, Artificial Sequence
  Description of Artificial Sequence: Synthetic oligonucleotide
gcucagugcacuccccucu

SEQ ID NO: 2292184 - RNA, 19 nt, Artificial Sequence
  Description of Artificial Sequence: Synthetic oligonucleotide
gcuuugcuggcaagcuuac

SEQ ID NO: 2292185 - RNA, 19 nt, Artificial Sequence
  Description of Artificial Sequence: Synthetic oligonucleotide
ggccgcagucuguuaguca

SEQ ID NO: 2292186 - RNA, 19 nt, Artificial Sequence
  Description of Artificial Sequence: Synthetic oligonucleotide
ccguccgugcuuugcuggc

SEQ ID NO: 2292187 - RNA, 19 nt, Artificial Sequence
  Description of Artificial Sequence: Synthetic oligonucleotide
ggcagaguggaaaggaauu

SEQ ID NO: 2292188 - RNA, 19 nt, Artificial Sequence
  Description of Artificial Sequence: Synthetic oligonucleotide
cuggcccuccagggagacg

SEQ ID NO: 2292189 - RNA, 19 nt, Artificial Sequence
  Description of Artificial Sequence: Synthetic oligonucleotide
cugacucuuuagugagagu

SEQ ID NO: 2292190 - RNA, 19 nt, Artificial Sequence
  Description of Artificial Sequence: Synthetic oligonucleotide
gcagucuguuagucaagua

SEQ ID NO: 2292191 - RNA, 19 nt, Artificial Sequence
  Description of Artificial Sequence: Synthetic oligonucleotide
gcugugaaaaggacauggu

SEQ ID NO: 2292192 - RNA, 19 nt, Artificial Sequence
  Description of Artificial Sequence: Synthetic oligonucleotide
gcaguaucuuuuggcuuuc

SEQ ID NO: 2292193 - RNA, 19 nt, Artificial Sequence
  Description of Artificial Sequence: Synthetic oligonucleotide
cauaggccuggcucaacuu

SEQ ID NO: 2292194 - RNA, 19 nt, Artificial Sequence
  Description of Artificial Sequence: Synthetic oligonucleotide
ccgcagucuguuagucaag

SEQ ID NO: 2292195 - RNA, 19 nt, Artificial Sequence
  Description of Artificial Sequence: Synthetic oligonucleotide
cccucuuugccuuuacaau

SEQ ID NO: 2292196 - RNA, 19 nt, Artificial Sequence
  Description of Artificial Sequence: Synthetic oligonucleotide
gggcugugaaaaggacaug

SEQ ID NO: 2292197 - RNA, 19 nt, Artificial Sequence
  Description of Artificial Sequence: Synthetic oligonucleotide
acgccagcgcugauugcau

SEQ ID NO: 2292198 - RNA, 19 nt, Artificial Sequence
  Description of Artificial Sequence: Synthetic oligonucleotide
gugaacgcugcaguaucuu

SEQ ID NO: 2292199 - RNA, 19 nt, Artificial Sequence
  Description of Artificial Sequence: Synthetic oligonucleotide
acuccccucuuugccuuua

SEQ ID NO: 2292200 - RNA, 19 nt, Artificial Sequence
  Description of Artificial Sequence: Synthetic oligonucleotide
cuccuucuccguccgugcu

SEQ ID NO: 2292201 - RNA, 19 nt, Artificial Sequence
  Description of Artificial Sequence: Synthetic oligonucleotide
ccacaucucuaaaauguuu

SEQ ID NO: 2292202 - RNA, 19 nt, Artificial Sequence
  Description of Artificial Sequence: Synthetic oligonucleotide
gggcagaguggaaaggaau

SEQ ID NO: 2292203 - RNA, 19 nt, Artificial Sequence
  Description of Artificial Sequence: Synthetic oligonucleotide
ccuccgcucaagccaccac

SEQ ID NO: 2292204 - RNA, 19 nt, Artificial Sequence
  Description of Artificial Sequence: Synthetic oligonucleotide
ggugaagggcagaguggaa

SEQ ID NO: 2292205 - RNA, 19 nt, Artificial Sequence
  Description of Artificial Sequence: Synthetic oligonucleotide
ccagggagacgccagcgcu

SEQ ID NO: 2292206 - RNA, 19 nt, Artificial Sequence
  Description of Artificial Sequence: Synthetic oligonucleotide
gggguuucuguucgaucau

SEQ ID NO: 2292207 - RNA, 19 nt, Artificial Sequence
  Description of Artificial Sequence: Synthetic oligonucleotide
gggccgcagucuguuaguc

SEQ ID NO: 2292208 - RNA, 19 nt, Artificial Sequence
  Description of Artificial Sequence: Synthetic oligonucleotide
cucagugcacuccccucuu

SEQ ID NO: 2292209 - RNA, 19 nt, Artificial Sequence
  Description of Artificial Sequence: Synthetic oligonucleotide
cuuccaugacuacgauguu

SEQ ID NO: 2292210 - RNA, 19 nt, Artificial Sequence
  Description of Artificial Sequence: Synthetic oligonucleotide
caccaucucuguggcugga

SEQ ID NO: 2292211 - RNA, 19 nt, Artificial Sequence
  Description of Artificial Sequence: Synthetic oligonucleotide
ccuuuacaauuuuccacuu

SEQ ID NO: 2292212 - RNA, 19 nt, Artificial Sequence
  Description of Artificial Sequence: Synthetic oligonucleotide
ccgcucaagccaccaccac

SEQ ID NO: 2292213 - RNA, 19 nt, Artificial Sequence
  Description of Artificial Sequence: Synthetic oligonucleotide
ggagggguuucuguucgau

SEQ ID NO: 2292214 - RNA, 19 nt, Artificial Sequence
  Description of Artificial Sequence: Synthetic oligonucleotide
gcuaguggaggagggguuu

SEQ ID NO: 2292215 - RNA, 19 nt, Artificial Sequence
  Description of Artificial Sequence: Synthetic oligonucleotide
ggagacgccagcgcugauu

SEQ ID NO: 2292216 - RNA, 19 nt, Artificial Sequence
  Description of Artificial Sequence: Synthetic oligonucleotide
gcagccuccuucugugguu

SEQ ID NO: 2292217 - RNA, 19 nt, Artificial Sequence
  Description of Artificial Sequence: Synthetic oligonucleotide
cucaagccaccaccaccau

SEQ ID NO: 2292218 - RNA, 19 nt, Artificial Sequence
  Description of Artificial Sequence: Synthetic oligonucleotide
ggugggccgcagucuguua

SEQ ID NO: 2292219 - RNA, 19 nt, Artificial Sequence
  Description of Artificial Sequence: Synthetic oligonucleotide
gccuccgcucaagccacca

SEQ ID NO: 2292220 - RNA, 19 nt, Artificial Sequence
  Description of Artificial Sequence: Synthetic oligonucleotide
gcacuccccucuuugccuu

SEQ ID NO: 2292221 - RNA, 19 nt, Artificial Sequence
  Description of Artificial Sequence: Synthetic oligonucleotide
gcccuccagggagacgcca

SEQ ID NO: 2292222 - RNA, 19 nt, Artificial Sequence
  Description of Artificial Sequence: Synthetic oligonucleotide
cccggccugccuccgcuca

SEQ ID NO: 2292223 - RNA, 19 nt, Artificial Sequence
  Description of Artificial Sequence: Synthetic oligonucleotide
ccuucuccguccgugcuuu

SEQ ID NO: 2292224 - RNA, 19 nt, Artificial Sequence
  Description of Artificial Sequence: Synthetic oligonucleotide
cguccgugcuuugcuggca

SEQ ID NO: 2292225 - RNA, 19 nt, Artificial Sequence
  Description of Artificial Sequence: Synthetic oligonucleotide
ccggccugccuccgcucaa

SEQ ID NO: 2292226 - RNA, 19 nt, Artificial Sequence
  Description of Artificial Sequence: Synthetic oligonucleotide
acuugaauggcacauaacc

SEQ ID NO: 2292227 - RNA, 19 nt, Artificial Sequence
  Description of Artificial Sequence: Synthetic oligonucleotide
ugauuaagcacuauggaag

SEQ ID NO: 2292228 - RNA, 19 nt, Artificial Sequence
  Description of Artificial Sequence: Synthetic oligonucleotide
agaaguauuggucacaauc

SEQ ID NO: 2292229 - RNA, 19 nt, Artificial Sequence
  Description of Artificial Sequence: Synthetic oligonucleotide
aaauaucuuggucugcagc

SEQ ID NO: 2292230 - RNA, 19 nt, Artificial Sequence
  Description of Artificial Sequence: Synthetic oligonucleotide
agacacuacauacaggugc

SEQ ID NO: 2292231 - RNA, 19 nt, Artificial Sequence
  Description of Artificial Sequence: Synthetic oligonucleotide
uuaucuaccaccuccaggc

SEQ ID NO: 2292232 - RNA, 19 nt, Artificial Sequence
  Description of Artificial Sequence: Synthetic oligonucleotide
uuagacacuacauacaggu

SEQ ID NO: 2292233 - RNA, 19 nt, Artificial Sequence
  Description of Artificial Sequence: Synthetic oligonucleotide
aaugauuuuggcuccuggg

SEQ ID NO: 2292234 - RNA, 19 nt, Artificial Sequence
  Description of Artificial Sequence: Synthetic oligonucleotide
agcguuagacacuacauac

SEQ ID NO: 2292235 - RNA, 19 nt, Artificial Sequence
  Description of Artificial Sequence: Synthetic oligonucleotide
aaucaucugucacaccagc

SEQ ID NO: 2292236 - RNA, 19 nt, Artificial Sequence
  Description of Artificial Sequence: Synthetic oligonucleotide
gauuaagcacuauggaagg

SEQ ID NO: 2292237 - RNA, 19 nt, Artificial Sequence
  Description of Artificial Sequence: Synthetic oligonucleotide
uaguuugugggcacgaagg

SEQ ID NO: 2292238 - RNA, 19 nt, Artificial Sequence
  Description of Artificial Sequence: Synthetic oligonucleotide
agagccaaguccuuguccc

SEQ ID NO: 2292239 - RNA, 19 nt, Artificial Sequence
  Description of Artificial Sequence: Synthetic oligonucleotide
ugaccaaauaucuuggucu

SEQ ID NO: 2292240 - RNA, 19 nt, Artificial Sequence
  Description of Artificial Sequence: Synthetic oligonucleotide
augucauucccguacagac

SEQ ID NO: 2292241 - RNA, 19 nt, Artificial Sequence
  Description of Artificial Sequence: Synthetic oligonucleotide
cucugauuaagcacuaugg

SEQ ID NO: 2292242 - RNA, 19 nt, Artificial Sequence
  Description of Artificial Sequence: Synthetic oligonucleotide
aaccacuauacuuuccauc

SEQ ID NO: 2292243 - RNA, 19 nt, Artificial Sequence
  Description of Artificial Sequence: Synthetic oligonucleotide
aucuaagaugccuccagcc

SEQ ID NO: 2292244 - RNA, 19 nt, Artificial Sequence
  Description of Artificial Sequence: Synthetic oligonucleotide
ucguuaguaacagugacag

SEQ ID NO: 2292245 - RNA, 19 nt, Artificial Sequence
  Description of Artificial Sequence: Synthetic oligonucleotide
uugaauggcacauaaccca

SEQ ID NO: 2292246 - RNA, 19 nt, Artificial Sequence
  Description of Artificial Sequence: Synthetic oligonucleotide
uggggaacaaugauuuugg

SEQ ID NO: 2292247 - RNA, 19 nt, Artificial Sequence
  Description of Artificial Sequence: Synthetic oligonucleotide
uucacuacucugauuaagc

SEQ ID NO: 2292248 - RNA, 19 nt, Artificial Sequence
  Description of Artificial Sequence: Synthetic oligonucleotide
ucugauuaagcacuaugga

SEQ ID NO: 2292249 - RNA, 19 nt, Artificial Sequence
  Description of Artificial Sequence: Synthetic oligonucleotide
gucaugaccaaauaucuug

SEQ ID NO: 2292250 - RNA, 19 nt, Artificial Sequence
  Description of Artificial Sequence: Synthetic oligonucleotide
cuugaauggcacauaaccc

SEQ ID NO: 2292251 - RNA, 19 nt, Artificial Sequence
  Description of Artificial Sequence: Synthetic oligonucleotide
ggaacaaugauuuuggcuc

SEQ ID NO: 2292252 - RNA, 19 nt, Artificial Sequence
  Description of Artificial Sequence: Synthetic oligonucleotide
ugcuucacuacucugauua

SEQ ID NO: 2292253 - RNA, 19 nt, Artificial Sequence
  Description of Artificial Sequence: Synthetic oligonucleotide
uucccguacagacaaaggc

SEQ ID NO: 2292254 - RNA, 19 nt, Artificial Sequence
  Description of Artificial Sequence: Synthetic oligonucleotide
auuaucuaccaccuccagg

SEQ ID NO: 2292255 - RNA, 19 nt, Artificial Sequence
  Description of Artificial Sequence: Synthetic oligonucleotide
aggacaagauuccuggagg

SEQ ID NO: 2292256 - RNA, 19 nt, Artificial Sequence
  Description of Artificial Sequence: Synthetic oligonucleotide
aaugucuccaaccacuaua

SEQ ID NO: 2292257 - RNA, 19 nt, Artificial Sequence
  Description of Artificial Sequence: Synthetic oligonucleotide
ucacaaucaagucaucuaa

SEQ ID NO: 2292258 - RNA, 19 nt, Artificial Sequence
  Description of Artificial Sequence: Synthetic oligonucleotide
agucaucuaagaugccucc

SEQ ID NO: 2292259 - RNA, 19 nt, Artificial Sequence
  Description of Artificial Sequence: Synthetic oligonucleotide
acagacaaaggccugccuc

SEQ ID NO: 2292260 - RNA, 19 nt, Artificial Sequence
  Description of Artificial Sequence: Synthetic oligonucleotide
uugagaguguaguaguuug

SEQ ID NO: 2292261 - RNA, 19 nt, Artificial Sequence
  Description of Artificial Sequence: Synthetic oligonucleotide
ucaucuaagaugccuccag

SEQ ID NO: 2292262 - RNA, 19 nt, Artificial Sequence
  Description of Artificial Sequence: Synthetic oligonucleotide
ugcaaugucuccaaccacu

SEQ ID NO: 2292263 - RNA, 19 nt, Artificial Sequence
  Description of Artificial Sequence: Synthetic oligonucleotide
guaacagugacaguauucc

SEQ ID NO: 2292264 - RNA, 19 nt, Artificial Sequence
  Description of Artificial Sequence: Synthetic oligonucleotide
ucggucaugaccaaauauc

SEQ ID NO: 2292265 - RNA, 19 nt, Artificial Sequence
  Description of Artificial Sequence: Synthetic oligonucleotide
uaguccugcaccaaacacc

SEQ ID NO: 2292266 - RNA, 19 nt, Artificial Sequence
  Description of Artificial Sequence: Synthetic oligonucleotide
acuauggaaggccaccuag

SEQ ID NO: 2292267 - RNA, 19 nt, Artificial Sequence
  Description of Artificial Sequence: Synthetic oligonucleotide
ucaucaaugucauucccgu

SEQ ID NO: 2292268 - RNA, 19 nt, Artificial Sequence
  Description of Artificial Sequence: Synthetic oligonucleotide
caaaucaucugucacacca

SEQ ID NO: 2292269 - RNA, 19 nt, Artificial Sequence
  Description of Artificial Sequence: Synthetic oligonucleotide
ugaguugugcuucacuacu

SEQ ID NO: 2292270 - RNA, 19 nt, Artificial Sequence
  Description of Artificial Sequence: Synthetic oligonucleotide
uuaggcuuuagucugcaau

SEQ ID NO: 2292271 - RNA, 19 nt, Artificial Sequence
  Description of Artificial Sequence: Synthetic oligonucleotide
uaggcuuuagucugcaaug

SEQ ID NO: 2292272 - RNA, 19 nt, Artificial Sequence
  Description of Artificial Sequence: Synthetic oligonucleotide
uuuuccacgggacaucuuc

SEQ ID NO: 2292273 - RNA, 19 nt, Artificial Sequence
  Description of Artificial Sequence: Synthetic oligonucleotide
ucccguacagacaaaggcc

SEQ ID NO: 2292274 - RNA, 19 nt, Artificial Sequence
  Description of Artificial Sequence: Synthetic oligonucleotide
aaaggccugccuccaagcg

SEQ ID NO: 2292275 - RNA, 19 nt, Artificial Sequence
  Description of Artificial Sequence: Synthetic oligonucleotide
guuaguaacagugacagua

SEQ ID NO: 2292276 - RNA, 19 nt, Artificial Sequence
  Description of Artificial Sequence: Synthetic oligonucleotide
gaaguauuggucacaauca

SEQ ID NO: 2292277 - RNA, 19 nt, Artificial Sequence
  Description of Artificial Sequence: Synthetic oligonucleotide
acuacucugauuaagcacu

SEQ ID NO: 2292278 - RNA, 19 nt, Artificial Sequence
  Description of Artificial Sequence: Synthetic oligonucleotide
agcacuagucaugaagggc

SEQ ID NO: 2292279 - RNA, 19 nt, Artificial Sequence
  Description of Artificial Sequence: Synthetic oligonucleotide
ucaugaagggcauuuuccu

SEQ ID NO: 2292280 - RNA, 19 nt, Artificial Sequence
  Description of Artificial Sequence: Synthetic oligonucleotide
aagggcauuuuccucaaau

SEQ ID NO: 2292281 - RNA, 19 nt, Artificial Sequence
  Description of Artificial Sequence: Synthetic oligonucleotide
cuucaaacugggugaaggg

SEQ ID NO: 2292282 - RNA, 19 nt, Artificial Sequence
  Description of Artificial Sequence: Synthetic oligonucleotide
aguuugugggcacgaaggg

SEQ ID NO: 2292283 - RNA, 19 nt, Artificial Sequence
  Description of Artificial Sequence: Synthetic oligonucleotide
aaccaccgucauuugcugc

SEQ ID NO: 2292284 - RNA, 19 nt, Artificial Sequence
  Description of Artificial Sequence: Synthetic oligonucleotide
aggacugugugcucucacc

SEQ ID NO: 2292285 - RNA, 19 nt, Artificial Sequence
  Description of Artificial Sequence: Synthetic oligonucleotide
gaacaaugauuuuggcucc

SEQ ID NO: 2292286 - RNA, 19 nt, Artificial Sequence
  Description of Artificial Sequence: Synthetic oligonucleotide
ugugaguugugcuucacua

SEQ ID NO: 2292287 - RNA, 19 nt, Artificial Sequence
  Description of Artificial Sequence: Synthetic oligonucleotide
ggcauuaucuaccaccucc

SEQ ID NO: 2292288 - RNA, 19 nt, Artificial Sequence
  Description of Artificial Sequence: Synthetic oligonucleotide
cacagcgccaaucacagug

SEQ ID NO: 2292289 - RNA, 19 nt, Artificial Sequence
  Description of Artificial Sequence: Synthetic oligonucleotide
auaccaaccccacacgucu

SEQ ID NO: 2292290 - RNA, 19 nt, Artificial Sequence
  Description of Artificial Sequence: Synthetic oligonucleotide
agggcauuuuccucaaauc

SEQ ID NO: 2292291 - RNA, 19 nt, Artificial Sequence
  Description of Artificial Sequence: Synthetic oligonucleotide
caccucacccuuuagcugg

SEQ ID NO: 2292292 - RNA, 19 nt, Artificial Sequence
  Description of Artificial Sequence: Synthetic oligonucleotide
cugguuaggcuuuagucug

SEQ ID NO: 2292293 - RNA, 19 nt, Artificial Sequence
  Description of Artificial Sequence: Synthetic oligonucleotide
aaguauuggucacaaucaa

SEQ ID NO: 2292294 - RNA, 19 nt, Artificial Sequence
  Description of Artificial Sequence: Synthetic oligonucleotide
cauuuugcuaaccaccguc

SEQ ID NO: 2292295 - RNA, 19 nt, Artificial Sequence
  Description of Artificial Sequence: Synthetic oligonucleotide
cacuauacuuuccaucagc

SEQ ID NO: 2292296 - RNA, 19 nt, Artificial Sequence
  Description of Artificial Sequence: Synthetic oligonucleotide
uccucaaaucaucugucac

SEQ ID NO: 2292297 - RNA, 19 nt, Artificial Sequence
  Description of Artificial Sequence: Synthetic oligonucleotide
uaacccauggccacauucu

SEQ ID NO: 2292298 - RNA, 19 nt, Artificial Sequence
  Description of Artificial Sequence: Synthetic oligonucleotide
ucacuacucugauuaagca

SEQ ID NO: 2292299 - RNA, 19 nt, Artificial Sequence
  Description of Artificial Sequence: Synthetic oligonucleotide
cucaggauaggacugugug

SEQ ID NO: 2292300 - RNA, 19 nt, Artificial Sequence
  Description of Artificial Sequence: Synthetic oligonucleotide
cuauggaaggccaccuagg

SEQ ID NO: 2292301 - RNA, 19 nt, Artificial Sequence
  Description of Artificial Sequence: Synthetic oligonucleotide
auuaagcacuauggaaggc

SEQ ID NO: 2292302 - RNA, 19 nt, Artificial Sequence
  Description of Artificial Sequence: Synthetic oligonucleotide
ccuaggacaagauuccugg

SEQ ID NO: 2292303 - RNA, 19 nt, Artificial Sequence
  Description of Artificial Sequence: Synthetic oligonucleotide
cucaaaucaucugucacac

SEQ ID NO: 2292304 - RNA, 19 nt, Artificial Sequence
  Description of Artificial Sequence: Synthetic oligonucleotide
aagauuccuggagggaagg

SEQ ID NO: 2292305 - RNA, 19 nt, Artificial Sequence
  Description of Artificial Sequence: Synthetic oligonucleotide
aggugugguauguucauca

SEQ ID NO: 2292306 - RNA, 19 nt, Artificial Sequence
  Description of Artificial Sequence: Synthetic oligonucleotide
accagccuguaacacuugc

SEQ ID NO: 2292307 - RNA, 19 nt, Artificial Sequence
  Description of Artificial Sequence: Synthetic oligonucleotide
ucuaccaccuccaggccga

SEQ ID NO: 2292308 - RNA, 19 nt, Artificial Sequence
  Description of Artificial Sequence: Synthetic oligonucleotide
accgucauuugcugcuucc

SEQ ID NO: 2292309 - RNA, 19 nt, Artificial Sequence
  Description of Artificial Sequence: Synthetic oligonucleotide
gacuauacuugaauggcac

SEQ ID NO: 2292310 - RNA, 19 nt, Artificial Sequence
  Description of Artificial Sequence: Synthetic oligonucleotide
acgaagggcauuuugcuaa

SEQ ID NO: 2292311 - RNA, 19 nt, Artificial Sequence
  Description of Artificial Sequence: Synthetic oligonucleotide
gacacuacauacaggugcc

SEQ ID NO: 2292312 - RNA, 19 nt, Artificial Sequence
  Description of Artificial Sequence: Synthetic oligonucleotide
auacuugaauggcacauaa

SEQ ID NO: 2292313 - RNA, 19 nt, Artificial Sequence
  Description of Artificial Sequence: Synthetic oligonucleotide
aaaucaucugucacaccag

SEQ ID NO: 2292314 - RNA, 19 nt, Artificial Sequence
  Description of Artificial Sequence: Synthetic oligonucleotide
ugguauguucaucaauguc

SEQ ID NO: 2292315 - RNA, 19 nt, Artificial Sequence
  Description of Artificial Sequence: Synthetic oligonucleotide
guaguuugugggcacgaag

SEQ ID NO: 2292316 - RNA, 19 nt, Artificial Sequence
  Description of Artificial Sequence: Synthetic oligonucleotide
cagccuguaacacuugcgc

SEQ ID NO: 2292317 - RNA, 19 nt, Artificial Sequence
  Description of Artificial Sequence: Synthetic oligonucleotide
acacuugcgcugcaguggg

SEQ ID NO: 2292318 - RNA, 19 nt, Artificial Sequence
  Description of Artificial Sequence: Synthetic oligonucleotide
ugaauggcacauaacccau

SEQ ID NO: 2292319 - RNA, 19 nt, Artificial Sequence
  Description of Artificial Sequence: Synthetic oligonucleotide
cugauuaagcacuauggaa

SEQ ID NO: 2292320 - RNA, 19 nt, Artificial Sequence
  Description of Artificial Sequence: Synthetic oligonucleotide
gucauuugcugcuuccgcc

SEQ ID NO: 2292321 - RNA, 19 nt, Artificial Sequence
  Description of Artificial Sequence: Synthetic oligonucleotide
ugucauucccguacagaca

SEQ ID NO: 2292322 - RNA, 19 nt, Artificial Sequence
  Description of Artificial Sequence: Synthetic oligonucleotide
uugcuaaccaccgucauuu

SEQ ID NO: 2292323 - RNA, 19 nt, Artificial Sequence
  Description of Artificial Sequence: Synthetic oligonucleotide
uauuggucacaaucaaguc

SEQ ID NO: 2292324 - RNA, 19 nt, Artificial Sequence
  Description of Artificial Sequence: Synthetic oligonucleotide
uguaguaguuugugggcac

SEQ ID NO: 2292325 - RNA, 19 nt, Artificial Sequence
  Description of Artificial Sequence: Synthetic oligonucleotide
cuaagaugccuccagccuc

SEQ ID NO: 2292326 - RNA, 19 nt, Artificial Sequence
  Description of Artificial Sequence: Synthetic oligonucleotide
agggaagggcuuuuccacg

SEQ ID NO: 2292327 - RNA, 19 nt, Artificial Sequence
  Description of Artificial Sequence: Synthetic oligonucleotide
gccgacuauacuugaaugg

SEQ ID NO: 2292328 - RNA, 19 nt, Artificial Sequence
  Description of Artificial Sequence: Synthetic oligonucleotide
acuacauacaggugccccu

SEQ ID NO: 2292329 - RNA, 19 nt, Artificial Sequence
  Description of Artificial Sequence: Synthetic oligonucleotide
auggcacauaacccauggc

SEQ ID NO: 2292330 - RNA, 19 nt, Artificial Sequence
  Description of Artificial Sequence: Synthetic oligonucleotide
agugacaguauucccuggu

SEQ ID NO: 2292331 - RNA, 19 nt, Artificial Sequence
  Description of Artificial Sequence: Synthetic oligonucleotide
ucuucacuugagaguguag

SEQ ID NO: 2292332 - RNA, 19 nt, Artificial Sequence
  Description of Artificial Sequence: Synthetic oligonucleotide
ugacaguauucccugguua

SEQ ID NO: 2292333 - RNA, 19 nt, Artificial Sequence
  Description of Artificial Sequence: Synthetic oligonucleotide
cuaguccugcaccaaacac

SEQ ID NO: 2292334 - RNA, 19 nt, Artificial Sequence
  Description of Artificial Sequence: Synthetic oligonucleotide
acuauacuugaauggcaca

SEQ ID NO: 2292335 - RNA, 19 nt, Artificial Sequence
  Description of Artificial Sequence: Synthetic oligonucleotide
cuggggaacaaugauuuug

SEQ ID NO: 2292336 - RNA, 19 nt, Artificial Sequence
  Description of Artificial Sequence: Synthetic oligonucleotide
caagauuccuggagggaag

SEQ ID NO: 2292337 - RNA, 19 nt, Artificial Sequence
  Description of Artificial Sequence: Synthetic oligonucleotide
guuagacacuacauacagg

SEQ ID NO: 2292338 - RNA, 19 nt, Artificial Sequence
  Description of Artificial Sequence: Synthetic oligonucleotide
acuauacuuuccaucagcu

SEQ ID NO: 2292339 - RNA, 19 nt, Artificial Sequence
  Description of Artificial Sequence: Synthetic oligonucleotide
ggaaguccauagcaguucg

SEQ ID NO: 2292340 - RNA, 19 nt, Artificial Sequence
  Description of Artificial Sequence: Synthetic oligonucleotide
uuuccacgggacaucuuca

SEQ ID NO: 2292341 - RNA, 19 nt, Artificial Sequence
  Description of Artificial Sequence: Synthetic oligonucleotide
acauaccaaccccacacgu

SEQ ID NO: 2292342 - RNA, 19 nt, Artificial Sequence
  Description of Artificial Sequence: Synthetic oligonucleotide
gucauucccguacagacaa

SEQ ID NO: 2292343 - RNA, 19 nt, Artificial Sequence
  Description of Artificial Sequence: Synthetic oligonucleotide
gaugccuccagccucguua

SEQ ID NO: 2292344 - RNA, 19 nt, Artificial Sequence
  Description of Artificial Sequence: Synthetic oligonucleotide
ggacaagauuccuggaggg

SEQ ID NO: 2292345 - RNA, 19 nt, Artificial Sequence
  Description of Artificial Sequence: Synthetic oligonucleotide
gucacagcgccaaucacag

SEQ ID NO: 2292346 - RNA, 19 nt, Artificial Sequence
  Description of Artificial Sequence: Synthetic oligonucleotide
caaacugggugaagggcag

SEQ ID NO: 2292347 - RNA, 19 nt, Artificial Sequence
  Description of Artificial Sequence: Synthetic oligonucleotide
ggcauuuugcuaaccaccg

SEQ ID NO: 2292348 - RNA, 19 nt, Artificial Sequence
  Description of Artificial Sequence: Synthetic oligonucleotide
cuucacuacucugauuaag

SEQ ID NO: 2292349 - RNA, 19 nt, Artificial Sequence
  Description of Artificial Sequence: Synthetic oligonucleotide
agccucguuaguaacagug

SEQ ID NO: 2292350 - RNA, 19 nt, Artificial Sequence
  Description of Artificial Sequence: Synthetic oligonucleotide
uccagccucguuaguaaca

SEQ ID NO: 2292351 - RNA, 19 nt, Artificial Sequence
  Description of Artificial Sequence: Synthetic oligonucleotide
aaacugggugaagggcagc

SEQ ID NO: 2292352 - RNA, 19 nt, Artificial Sequence
  Description of Artificial Sequence: Synthetic oligonucleotide
ugcuaguccugcaccaaac

SEQ ID NO: 2292353 - RNA, 19 nt, Artificial Sequence
  Description of Artificial Sequence: Synthetic oligonucleotide
cacacgucucuucugcacc

SEQ ID NO: 2292354 - RNA, 19 nt, Artificial Sequence
  Description of Artificial Sequence: Synthetic oligonucleotide
accaccgucauuugcugcu

SEQ ID NO: 2292355 - RNA, 19 nt, Artificial Sequence
  Description of Artificial Sequence: Synthetic oligonucleotide
cuucacauaccaaccccac

SEQ ID NO: 2292356 - RNA, 19 nt, Artificial Sequence
  Description of Artificial Sequence: Synthetic oligonucleotide
uuuugcuaaccaccgucau

SEQ ID NO: 2292357 - RNA, 19 nt, Artificial Sequence
  Description of Artificial Sequence: Synthetic oligonucleotide
cauucccguacagacaaag

SEQ ID NO: 2292358 - RNA, 19 nt, Artificial Sequence
  Description of Artificial Sequence: Synthetic oligonucleotide
cauaccaaccccacacguc

SEQ ID NO: 2292359 - RNA, 19 nt, Artificial Sequence
  Description of Artificial Sequence: Synthetic oligonucleotide
uaaccaccgucauuugcug

SEQ ID NO: 2292360 - RNA, 19 nt, Artificial Sequence
  Description of Artificial Sequence: Synthetic oligonucleotide
ccuucugugcucaggauag

SEQ ID NO: 2292361 - RNA, 19 nt, Artificial Sequence
  Description of Artificial Sequence: Synthetic oligonucleotide
caguauucccugguuaggc

SEQ ID NO: 2292362 - RNA, 19 nt, Artificial Sequence
  Description of Artificial Sequence: Synthetic oligonucleotide
ucaaaucaucugucacacc

SEQ ID NO: 2292363 - RNA, 19 nt, Artificial Sequence
  Description of Artificial Sequence: Synthetic oligonucleotide
aguccugcaccaaacaccu

SEQ ID NO: 2292364 - RNA, 19 nt, Artificial Sequence
  Description of Artificial Sequence: Synthetic oligonucleotide
acaagauuccuggagggaa

SEQ ID NO: 2292365 - RNA, 19 nt, Artificial Sequence
  Description of Artificial Sequence: Synthetic oligonucleotide
acagcgccaaucacagugc

SEQ ID NO: 2292366 - RNA, 19 nt, Artificial Sequence
  Description of Artificial Sequence: Synthetic oligonucleotide
auuuugcuaaccaccguca

SEQ ID NO: 2292367 - RNA, 19 nt, Artificial Sequence
  Description of Artificial Sequence: Synthetic oligonucleotide
guugugcuucacuacucug

SEQ ID NO: 2292368 - RNA, 19 nt, Artificial Sequence
  Description of Artificial Sequence: Synthetic oligonucleotide
guaguaguuugugggcacg

SEQ ID NO: 2292369 - RNA, 19 nt, Artificial Sequence
  Description of Artificial Sequence: Synthetic oligonucleotide
cucguuaguaacagugaca

SEQ ID NO: 2292370 - RNA, 19 nt, Artificial Sequence
  Description of Artificial Sequence: Synthetic oligonucleotide
cacuacauacaggugcccc

SEQ ID NO: 2292371 - RNA, 19 nt, Artificial Sequence
  Description of Artificial Sequence: Synthetic oligonucleotide
cauuaucuaccaccuccag

SEQ ID NO: 2292372 - RNA, 19 nt, Artificial Sequence
  Description of Artificial Sequence: Synthetic oligonucleotide
ugccccucagaaguauugg

SEQ ID NO: 2292373 - RNA, 19 nt, Artificial Sequence
  Description of Artificial Sequence: Synthetic oligonucleotide
uggcugcuaguccugcacc

SEQ ID NO: 2292374 - RNA, 19 nt, Artificial Sequence
  Description of Artificial Sequence: Synthetic oligonucleotide
ugguuaggcuuuagucugc

SEQ ID NO: 2292375 - RNA, 19 nt, Artificial Sequence
  Description of Artificial Sequence: Synthetic oligonucleotide
gugaguugugcuucacuac

SEQ ID NO: 2292376 - RNA, 19 nt, Artificial Sequence
  Description of Artificial Sequence: Synthetic oligonucleotide
uuguccugcaugagagcca

SEQ ID NO: 2292377 - RNA, 19 nt, Artificial Sequence
  Description of Artificial Sequence: Synthetic oligonucleotide
accuccauuacagcacuag

SEQ ID NO: 2292378 - RNA, 19 nt, Artificial Sequence
  Description of Artificial Sequence: Synthetic oligonucleotide
uucugugcucaggauagga

SEQ ID NO: 2292379 - RNA, 19 nt, Artificial Sequence
  Description of Artificial Sequence: Synthetic oligonucleotide
aacaaugauuuuggcuccu

SEQ ID NO: 2292380 - RNA, 19 nt, Artificial Sequence
  Description of Artificial Sequence: Synthetic oligonucleotide
uagcuggggaacaaugauu

SEQ ID NO: 2292381 - RNA, 19 nt, Artificial Sequence
  Description of Artificial Sequence: Synthetic oligonucleotide
gcuucacucggucaugacc

SEQ ID NO: 2292382 - RNA, 19 nt, Artificial Sequence
  Description of Artificial Sequence: Synthetic oligonucleotide
cguuagacacuacauacag

SEQ ID NO: 2292383 - RNA, 19 nt, Artificial Sequence
  Description of Artificial Sequence: Synthetic oligonucleotide
uauucccugguuaggcuuu

SEQ ID NO: 2292384 - RNA, 19 nt, Artificial Sequence
  Description of Artificial Sequence: Synthetic oligonucleotide
gauaggacugugugcucuc

SEQ ID NO: 2292385 - RNA, 19 nt, Artificial Sequence
  Description of Artificial Sequence: Synthetic oligonucleotide
guuugugggcacgaagggc

SEQ ID NO: 2292386 - RNA, 19 nt, Artificial Sequence
  Description of Artificial Sequence: Synthetic oligonucleotide
uaguaacagugacaguauu

SEQ ID NO: 2292387 - RNA, 19 nt, Artificial Sequence
  Description of Artificial Sequence: Synthetic oligonucleotide
ucugcaccucacccuuuag

SEQ ID NO: 2292388 - RNA, 19 nt, Artificial Sequence
  Description of Artificial Sequence: Synthetic oligonucleotide
ucccuggccgacuauacuu

SEQ ID NO: 2292389 - RNA, 19 nt, Artificial Sequence
  Description of Artificial Sequence: Synthetic oligonucleotide
gaaguccauagcaguucgg

SEQ ID NO: 2292390 - RNA, 19 nt, Artificial Sequence
  Description of Artificial Sequence: Synthetic oligonucleotide
uccaggccgacaucacugc

SEQ ID NO: 2292391 - RNA, 19 nt, Artificial Sequence
  Description of Artificial Sequence: Synthetic oligonucleotide
ugucccuggccgacuauac

SEQ ID NO: 2292392 - RNA, 19 nt, Artificial Sequence
  Description of Artificial Sequence: Synthetic oligonucleotide
gccaccuaggacaagauuc

SEQ ID NO: 2292393 - RNA, 19 nt, Artificial Sequence
  Description of Artificial Sequence: Synthetic oligonucleotide
agugccuucugugcucagg

SEQ ID NO: 2292394 - RNA, 19 nt, Artificial Sequence
  Description of Artificial Sequence: Synthetic oligonucleotide
aacccauggccacauucuu

SEQ ID NO: 2292395 - RNA, 19 nt, Artificial Sequence
  Description of Artificial Sequence: Synthetic oligonucleotide
agcuucacucggucaugac

SEQ ID NO: 2292396 - RNA, 19 nt, Artificial Sequence
  Description of Artificial Sequence: Synthetic oligonucleotide
acacuacauacaggugccc

SEQ ID NO: 2292397 - RNA, 19 nt, Artificial Sequence
  Description of Artificial Sequence: Synthetic oligonucleotide
agggcuuuuccacgggaca

SEQ ID NO: 2292398 - RNA, 19 nt, Artificial Sequence
  Description of Artificial Sequence: Synthetic oligonucleotide
cugggugaagggcagccac

SEQ ID NO: 2292399 - RNA, 19 nt, Artificial Sequence
  Description of Artificial Sequence: Synthetic oligonucleotide
agggcauuaucuaccaccu

SEQ ID NO: 2292400 - RNA, 19 nt, Artificial Sequence
  Description of Artificial Sequence: Synthetic oligonucleotide
ugaagggcauuuuccucaa

SEQ ID NO: 2292401 - RNA, 19 nt, Artificial Sequence
  Description of Artificial Sequence: Synthetic oligonucleotide
agcuggggaacaaugauuu

SEQ ID NO: 2292402 - RNA, 19 nt, Artificial Sequence
  Description of Artificial Sequence: Synthetic oligonucleotide
aggauaggacugugugcuc

SEQ ID NO: 2292403 - RNA, 19 nt, Artificial Sequence
  Description of Artificial Sequence: Synthetic oligonucleotide
ggccccuucacauaccaac

SEQ ID NO: 2292404 - RNA, 19 nt, Artificial Sequence
  Description of Artificial Sequence: Synthetic oligonucleotide
gggcauuuugcuaaccacc

SEQ ID NO: 2292405 - RNA, 19 nt, Artificial Sequence
  Description of Artificial Sequence: Synthetic oligonucleotide
uaggacugugugcucucac

SEQ ID NO: 2292406 - RNA, 19 nt, Artificial Sequence
  Description of Artificial Sequence: Synthetic oligonucleotide
caccaaacaccuccauuac

SEQ ID NO: 2292407 - RNA, 19 nt, Artificial Sequence
  Description of Artificial Sequence: Synthetic oligonucleotide
agcaguucggcggcgcuuc

SEQ ID NO: 2292408 - RNA, 19 nt, Artificial Sequence
  Description of Artificial Sequence: Synthetic oligonucleotide
uccccaguguccagcugag

SEQ ID NO: 2292409 - RNA, 19 nt, Artificial Sequence
  Description of Artificial Sequence: Synthetic oligonucleotide
gucacaccagccuguaaca

SEQ ID NO: 2292410 - RNA, 19 nt, Artificial Sequence
  Description of Artificial Sequence: Synthetic oligonucleotide
ugucuccaaccacuauacu

SEQ ID NO: 2292411 - RNA, 19 nt, Artificial Sequence
  Description of Artificial Sequence: Synthetic oligonucleotide
ccaccuaggacaagauucc

SEQ ID NO: 2292412 - RNA, 19 nt, Artificial Sequence
  Description of Artificial Sequence: Synthetic oligonucleotide
ugggugaagggcagccacu

SEQ ID NO: 2292413 - RNA, 19 nt, Artificial Sequence
  Description of Artificial Sequence: Synthetic oligonucleotide
gcaccaaacaccuccauua

SEQ ID NO: 2292414 - RNA, 19 nt, Artificial Sequence
  Description of Artificial Sequence: Synthetic oligonucleotide
acacgucucuucugcaccu

SEQ ID NO: 2292415 - RNA, 19 nt, Artificial Sequence
  Description of Artificial Sequence: Synthetic oligonucleotide
agauuccuggagggaaggg

SEQ ID NO: 2292416 - RNA, 19 nt, Artificial Sequence
  Description of Artificial Sequence: Synthetic oligonucleotide
ccgacuauacuugaauggc

SEQ ID NO: 2292417 - RNA, 19 nt, Artificial Sequence
  Description of Artificial Sequence: Synthetic oligonucleotide
aggccgacaucacugcccu

SEQ ID NO: 2292418 - RNA, 19 nt, Artificial Sequence
  Description of Artificial Sequence: Synthetic oligonucleotide
ggccgacuauacuugaaug

SEQ ID NO: 2292419 - RNA, 19 nt, Artificial Sequence
  Description of Artificial Sequence: Synthetic oligonucleotide
gaauggcacauaacccaug

SEQ ID NO: 2292420 - RNA, 19 nt, Artificial Sequence
  Description of Artificial Sequence: Synthetic oligonucleotide
uaguaguuugugggcacga

SEQ ID NO: 2292421 - RNA, 19 nt, Artificial Sequence
  Description of Artificial Sequence: Synthetic oligonucleotide
cagugacaguauucccugg

SEQ ID NO: 2292422 - RNA, 19 nt, Artificial Sequence
  Description of Artificial Sequence: Synthetic oligonucleotide
uuugcugcuuccgccgaac

SEQ ID NO: 2292423 - RNA, 19 nt, Artificial Sequence
  Description of Artificial Sequence: Synthetic oligonucleotide
gcuaaccaccgucauuugc

SEQ ID NO: 2292424 - RNA, 19 nt, Artificial Sequence
  Description of Artificial Sequence: Synthetic oligonucleotide
gcacuagucaugaagggca

SEQ ID NO: 2292425 - RNA, 19 nt, Artificial Sequence
  Description of Artificial Sequence: Synthetic oligonucleotide
gacaagauuccuggaggga

SEQ ID NO: 2292426 - RNA, 19 nt, Artificial Sequence
  Description of Artificial Sequence: Synthetic oligonucleotide
agcuagcagggcauuaucu

SEQ ID NO: 2292427 - RNA, 19 nt, Artificial Sequence
  Description of Artificial Sequence: Synthetic oligonucleotide
uccgccgaaccuccaccag

SEQ ID NO: 2292428 - RNA, 19 nt, Artificial Sequence
  Description of Artificial Sequence: Synthetic oligonucleotide
accuaggacaagauuccug

SEQ ID NO: 2292429 - RNA, 19 nt, Artificial Sequence
  Description of Artificial Sequence: Synthetic oligonucleotide
cuccaaccacuauacuuuc

SEQ ID NO: 2292430 - RNA, 19 nt, Artificial Sequence
  Description of Artificial Sequence: Synthetic oligonucleotide
aggcuuuagucugcaaugu

SEQ ID NO: 2292431 - RNA, 19 nt, Artificial Sequence
  Description of Artificial Sequence: Synthetic oligonucleotide
auagcaguucggcggcgcu

SEQ ID NO: 2292432 - RNA, 19 nt, Artificial Sequence
  Description of Artificial Sequence: Synthetic oligonucleotide
gagcuagcagggcauuauc

SEQ ID NO: 2292433 - RNA, 19 nt, Artificial Sequence
  Description of Artificial Sequence: Synthetic oligonucleotide
gucuccaaccacuauacuu

SEQ ID NO: 2292434 - RNA, 19 nt, Artificial Sequence
  Description of Artificial Sequence: Synthetic oligonucleotide
gggaacaaugauuuuggcu

SEQ ID NO: 2292435 - RNA, 19 nt, Artificial Sequence
  Description of Artificial Sequence: Synthetic oligonucleotide
cacccuuuagcuggggaac

SEQ ID NO: 2292436 - RNA, 19 nt, Artificial Sequence
  Description of Artificial Sequence: Synthetic oligonucleotide
ucaccggggccccuucaca

SEQ ID NO: 2292437 - RNA, 19 nt, Artificial Sequence
  Description of Artificial Sequence: Synthetic oligonucleotide
uccaagcgcaggcuaucuc

SEQ ID NO: 2292438 - RNA, 19 nt, Artificial Sequence
  Description of Artificial Sequence: Synthetic oligonucleotide
cuacauacaggugccccuc

SEQ ID NO: 2292439 - RNA, 19 nt, Artificial Sequence
  Description of Artificial Sequence: Synthetic oligonucleotide
caggauaggacugugugcu

SEQ ID NO: 2292440 - RNA, 19 nt, Artificial Sequence
  Description of Artificial Sequence: Synthetic oligonucleotide
ugcuaaccaccgucauuug

SEQ ID NO: 2292441 - RNA, 19 nt, Artificial Sequence
  Description of Artificial Sequence: Synthetic oligonucleotide
ccucguuaguaacagugac

SEQ ID NO: 2292442 - RNA, 19 nt, Artificial Sequence
  Description of Artificial Sequence: Synthetic oligonucleotide
agagcuagcagggcauuau

SEQ ID NO: 2292443 - RNA, 19 nt, Artificial Sequence
  Description of Artificial Sequence: Synthetic oligonucleotide
ccucaaaucaucugucaca

SEQ ID NO: 2292444 - RNA, 19 nt, Artificial Sequence
  Description of Artificial Sequence: Synthetic oligonucleotide
acccauggccacauucuuc

SEQ ID NO: 2292445 - RNA, 19 nt, Artificial Sequence
  Description of Artificial Sequence: Synthetic oligonucleotide
cauagcaguucggcggcgc

SEQ ID NO: 2292446 - RNA, 19 nt, Artificial Sequence
  Description of Artificial Sequence: Synthetic oligonucleotide
ggcacauaacccauggcca

SEQ ID NO: 2292447 - RNA, 19 nt, Artificial Sequence
  Description of Artificial Sequence: Synthetic oligonucleotide
agcugugucccuggccgac

SEQ ID NO: 2292448 - RNA, 19 nt, Artificial Sequence
  Description of Artificial Sequence: Synthetic oligonucleotide
accccugugaguugugcuu

SEQ ID NO: 2292449 - RNA, 19 nt, Artificial Sequence
  Description of Artificial Sequence: Synthetic oligonucleotide
cacuugagaguguaguagu

SEQ ID NO: 2292450 - RNA, 19 nt, Artificial Sequence
  Description of Artificial Sequence: Synthetic oligonucleotide
cuaggacaagauuccugga

SEQ ID NO: 2292451 - RNA, 19 nt, Artificial Sequence
  Description of Artificial Sequence: Synthetic oligonucleotide
acaccagccuguaacacuu

SEQ ID NO: 2292452 - RNA, 19 nt, Artificial Sequence
  Description of Artificial Sequence: Synthetic oligonucleotide
ggaagggcuuuuccacggg

SEQ ID NO: 2292453 - RNA, 19 nt, Artificial Sequence
  Description of Artificial Sequence: Synthetic oligonucleotide
aucuucacuugagagugua

SEQ ID NO: 2292454 - RNA, 19 nt, Artificial Sequence
  Description of Artificial Sequence: Synthetic oligonucleotide
cuauacuugaauggcacau

SEQ ID NO: 2292455 - RNA, 19 nt, Artificial Sequence
  Description of Artificial Sequence: Synthetic oligonucleotide
cccucagaaguauugguca

SEQ ID NO: 2292456 - RNA, 19 nt, Artificial Sequence
  Description of Artificial Sequence: Synthetic oligonucleotide
gugguauguucaucaaugu

SEQ ID NO: 2292457 - RNA, 19 nt, Artificial Sequence
  Description of Artificial Sequence: Synthetic oligonucleotide
cauacaggugccccucaga

SEQ ID NO: 2292458 - RNA, 19 nt, Artificial Sequence
  Description of Artificial Sequence: Synthetic oligonucleotide
gggacaucuucacuugaga

SEQ ID NO: 2292459 - RNA, 19 nt, Artificial Sequence
  Description of Artificial Sequence: Synthetic oligonucleotide
aggccugccuccaagcgca

SEQ ID NO: 2292460 - RNA, 19 nt, Artificial Sequence
  Description of Artificial Sequence: Synthetic oligonucleotide
ggggaacaaugauuuuggc

SEQ ID NO: 2292461 - RNA, 19 nt, Artificial Sequence
  Description of Artificial Sequence: Synthetic oligonucleotide
caucagcuucacucgguca

SEQ ID NO: 2292462 - RNA, 19 nt, Artificial Sequence
  Description of Artificial Sequence: Synthetic oligonucleotide
uucacucggucaugaccaa

SEQ ID NO: 2292463 - RNA, 19 nt, Artificial Sequence
  Description of Artificial Sequence: Synthetic oligonucleotide
cucagaaguauuggucaca

SEQ ID NO: 2292464 - RNA, 19 nt, Artificial Sequence
  Description of Artificial Sequence: Synthetic oligonucleotide
gccagcguuagacacuaca

SEQ ID NO: 2292465 - RNA, 19 nt, Artificial Sequence
  Description of Artificial Sequence: Synthetic oligonucleotide
aguaguuugugggcacgaa

SEQ ID NO: 2292466 - RNA, 19 nt, Artificial Sequence
  Description of Artificial Sequence: Synthetic oligonucleotide
auuugcugcuuccgccgaa

SEQ ID NO: 2292467 - RNA, 19 nt, Artificial Sequence
  Description of Artificial Sequence: Synthetic oligonucleotide
ugccuccaagcgcaggcua

SEQ ID NO: 2292468 - RNA, 19 nt, Artificial Sequence
  Description of Artificial Sequence: Synthetic oligonucleotide
acucggucaugaccaaaua

SEQ ID NO: 2292469 - RNA, 19 nt, Artificial Sequence
  Description of Artificial Sequence: Synthetic oligonucleotide
gccgacaucacugcccuug

SEQ ID NO: 2292470 - RNA, 19 nt, Artificial Sequence
  Description of Artificial Sequence: Synthetic oligonucleotide
ucucaccggggccccuuca

SEQ ID NO: 2292471 - RNA, 19 nt, Artificial Sequence
  Description of Artificial Sequence: Synthetic oligonucleotide
ucauucccguacagacaaa

SEQ ID NO: 2292472 - RNA, 19 nt, Artificial Sequence
  Description of Artificial Sequence: Synthetic oligonucleotide
aguguccagcugagacugc

SEQ ID NO: 2292473 - RNA, 19 nt, Artificial Sequence
  Description of Artificial Sequence: Synthetic oligonucleotide
acuugagaguguaguaguu

SEQ ID NO: 2292474 - RNA, 19 nt, Artificial Sequence
  Description of Artificial Sequence: Synthetic oligonucleotide
cagcguuagacacuacaua

SEQ ID NO: 2292475 - RNA, 19 nt, Artificial Sequence
  Description of Artificial Sequence: Synthetic oligonucleotide
caaccccacacgucucuuc

SEQ ID NO: 2292476 - RNA, 19 nt, Artificial Sequence
  Description of Artificial Sequence: Synthetic oligonucleotide
ccugguuaggcuuuagucu

SEQ ID NO: 2292477 - RNA, 19 nt, Artificial Sequence
  Description of Artificial Sequence: Synthetic oligonucleotide
uuacagcacuagucaugaa

SEQ ID NO: 2292478 - RNA, 19 nt, Artificial Sequence
  Description of Artificial Sequence: Synthetic oligonucleotide
uacucugauuaagcacuau

SEQ ID NO: 2292479 - RNA, 19 nt, Artificial Sequence
  Description of Artificial Sequence: Synthetic oligonucleotide
ccccucagaaguauugguc

SEQ ID NO: 2292480 - RNA, 19 nt, Artificial Sequence
  Description of Artificial Sequence: Synthetic oligonucleotide
gcuaguccugcaccaaaca

SEQ ID NO: 2292481 - RNA, 19 nt, Artificial Sequence
  Description of Artificial Sequence: Synthetic oligonucleotide
cacgaagggcauuuugcua

SEQ ID NO: 2292482 - RNA, 19 nt, Artificial Sequence
  Description of Artificial Sequence: Synthetic oligonucleotide
caugaccaaauaucuuggu

SEQ ID NO: 2292483 - RNA, 19 nt, Artificial Sequence
  Description of Artificial Sequence: Synthetic oligonucleotide
gcaggcuaucucuggcugc

SEQ ID NO: 2292484 - RNA, 19 nt, Artificial Sequence
  Description of Artificial Sequence: Synthetic oligonucleotide
accccacacgucucuucug

SEQ ID NO: 2292485 - RNA, 19 nt, Artificial Sequence
  Description of Artificial Sequence: Synthetic oligonucleotide
ugccuucugugcucaggau

SEQ ID NO: 2292486 - RNA, 19 nt, Artificial Sequence
  Description of Artificial Sequence: Synthetic oligonucleotide
cucacccuuuagcugggga

SEQ ID NO: 2292487 - RNA, 19 nt, Artificial Sequence
  Description of Artificial Sequence: Synthetic oligonucleotide
gggaaguccauagcaguuc

SEQ ID NO: 2292488 - RNA, 19 nt, Artificial Sequence
  Description of Artificial Sequence: Synthetic oligonucleotide
uacuuuccaucagcuucac

SEQ ID NO: 2292489 - RNA, 19 nt, Artificial Sequence
  Description of Artificial Sequence: Synthetic oligonucleotide
ugugucccuggccgacuau

SEQ ID NO: 2292490 - RNA, 19 nt, Artificial Sequence
  Description of Artificial Sequence: Synthetic oligonucleotide
cucggucaugaccaaauau

SEQ ID NO: 2292491 - RNA, 19 nt, Artificial Sequence
  Description of Artificial Sequence: Synthetic oligonucleotide
ccccuucacauaccaaccc

SEQ ID NO: 2292492 - RNA, 19 nt, Artificial Sequence
  Description of Artificial Sequence: Synthetic oligonucleotide
cauuugcugcuuccgccga

SEQ ID NO: 2292493 - RNA, 19 nt, Artificial Sequence
  Description of Artificial Sequence: Synthetic oligonucleotide
ccacaggugugguauguuc

SEQ ID NO: 2292494 - RNA, 19 nt, Artificial Sequence
  Description of Artificial Sequence: Synthetic oligonucleotide
gggcacgaagggcauuuug

SEQ ID NO: 2292495 - RNA, 19 nt, Artificial Sequence
  Description of Artificial Sequence: Synthetic oligonucleotide
cuagucaugaagggcauuu

SEQ ID NO: 2292496 - RNA, 19 nt, Artificial Sequence
  Description of Artificial Sequence: Synthetic oligonucleotide
cuacucugauuaagcacua

SEQ ID NO: 2292497 - RNA, 19 nt, Artificial Sequence
  Description of Artificial Sequence: Synthetic oligonucleotide
acugggugaagggcagcca

SEQ ID NO: 2292498 - RNA, 19 nt, Artificial Sequence
  Description of Artificial Sequence: Synthetic oligonucleotide
cugcccuuguucuggaacu

SEQ ID NO: 2292499 - RNA, 19 nt, Artificial Sequence
  Description of Artificial Sequence: Synthetic oligonucleotide
caguggguccuugcagagc

SEQ ID NO: 2292500 - RNA, 19 nt, Artificial Sequence
  Description of Artificial Sequence: Synthetic oligonucleotide
uucccugguuaggcuuuag

SEQ ID NO: 2292501 - RNA, 19 nt, Artificial Sequence
  Description of Artificial Sequence: Synthetic oligonucleotide
ccacuauacuuuccaucag

SEQ ID NO: 2292502 - RNA, 19 nt, Artificial Sequence
  Description of Artificial Sequence: Synthetic oligonucleotide
ugcccuuguucuggaacuc

SEQ ID NO: 2292503 - RNA, 19 nt, Artificial Sequence
  Description of Artificial Sequence: Synthetic oligonucleotide
gacugcccuccacaggugu

SEQ ID NO: 2292504 - RNA, 19 nt, Artificial Sequence
  Description of Artificial Sequence: Synthetic oligonucleotide
ggugugguauguucaucaa

SEQ ID NO: 2292505 - RNA, 19 nt, Artificial Sequence
  Description of Artificial Sequence: Synthetic oligonucleotide
cguacagacaaaggccugc

SEQ ID NO: 2292506 - RNA, 19 nt, Artificial Sequence
  Description of Artificial Sequence: Synthetic oligonucleotide
cacucggucaugaccaaau

SEQ ID NO: 2292507 - RNA, 19 nt, Artificial Sequence
  Description of Artificial Sequence: Synthetic oligonucleotide
guuaggcuuuagucugcaa

SEQ ID NO: 2292508 - RNA, 19 nt, Artificial Sequence
  Description of Artificial Sequence: Synthetic oligonucleotide
ucacagcgccaaucacagu

SEQ ID NO: 2292509 - RNA, 19 nt, Artificial Sequence
  Description of Artificial Sequence: Synthetic oligonucleotide
gccccuucacauaccaacc

SEQ ID NO: 2292510 - RNA, 19 nt, Artificial Sequence
  Description of Artificial Sequence: Synthetic oligonucleotide
ucggcggcgcuuccccagu

SEQ ID NO: 2292511 - RNA, 19 nt, Artificial Sequence
  Description of Artificial Sequence: Synthetic oligonucleotide
cuauacuuuccaucagcuu

SEQ ID NO: 2292512 - RNA, 19 nt, Artificial Sequence
  Description of Artificial Sequence: Synthetic oligonucleotide
accucacccuuuagcuggg

SEQ ID NO: 2292513 - RNA, 19 nt, Artificial Sequence
  Description of Artificial Sequence: Synthetic oligonucleotide
uccacaggugugguauguu

SEQ ID NO: 2292514 - RNA, 19 nt, Artificial Sequence
  Description of Artificial Sequence: Synthetic oligonucleotide
ucccagcagccagcguuag

SEQ ID NO: 2292515 - RNA, 19 nt, Artificial Sequence
  Description of Artificial Sequence: Synthetic oligonucleotide
ccgucauuugcugcuuccg

SEQ ID NO: 2292516 - RNA, 19 nt, Artificial Sequence
  Description of Artificial Sequence: Synthetic oligonucleotide
acuagucaugaagggcauu

SEQ ID NO: 2292517 - RNA, 19 nt, Artificial Sequence
  Description of Artificial Sequence: Synthetic oligonucleotide
cccuggccgacuauacuug

SEQ ID NO: 2292518 - RNA, 19 nt, Artificial Sequence
  Description of Artificial Sequence: Synthetic oligonucleotide
cugcuaguccugcaccaaa

SEQ ID NO: 2292519 - RNA, 19 nt, Artificial Sequence
  Description of Artificial Sequence: Synthetic oligonucleotide
gcacgaagggcauuuugcu

SEQ ID NO: 2292520 - RNA, 19 nt, Artificial Sequence
  Description of Artificial Sequence: Synthetic oligonucleotide
agcgccaaucacagugccu

SEQ ID NO: 2292521 - RNA, 19 nt, Artificial Sequence
  Description of Artificial Sequence: Synthetic oligonucleotide
gaagggcauuuuccucaaa

SEQ ID NO: 2292522 - RNA, 19 nt, Artificial Sequence
  Description of Artificial Sequence: Synthetic oligonucleotide
uccuggagggaagggcuuu

SEQ ID NO: 2292523 - RNA, 19 nt, Artificial Sequence
  Description of Artificial Sequence: Synthetic oligonucleotide
gugacaguauucccugguu

SEQ ID NO: 2292524 - RNA, 19 nt, Artificial Sequence
  Description of Artificial Sequence: Synthetic oligonucleotide
cuggccgacuauacuugaa

SEQ ID NO: 2292525 - RNA, 19 nt, Artificial Sequence
  Description of Artificial Sequence: Synthetic oligonucleotide
ggcgcuuccccagugucca

SEQ ID NO: 2292526 - RNA, 19 nt, Artificial Sequence
  Description of Artificial Sequence: Synthetic oligonucleotide
cgacuauacuugaauggca

SEQ ID NO: 2292527 - RNA, 19 nt, Artificial Sequence
  Description of Artificial Sequence: Synthetic oligonucleotide
ggauaggacugugugcucu

SEQ ID NO: 2292528 - RNA, 19 nt, Artificial Sequence
  Description of Artificial Sequence: Synthetic oligonucleotide
gcuuccgccgaaccuccac

SEQ ID NO: 2292529 - RNA, 19 nt, Artificial Sequence
  Description of Artificial Sequence: Synthetic oligonucleotide
gccucguuaguaacaguga

SEQ ID NO: 2292530 - RNA, 19 nt, Artificial Sequence
  Description of Artificial Sequence: Synthetic oligonucleotide
ccgccgaaccuccaccagc

SEQ ID NO: 2292531 - RNA, 19 nt, Artificial Sequence
  Description of Artificial Sequence: Synthetic oligonucleotide
ggggccccuucacauacca

SEQ ID NO: 2292532 - RNA, 19 nt, Artificial Sequence
  Description of Artificial Sequence: Synthetic oligonucleotide
ugccuccagccucguuagu

SEQ ID NO: 2292533 - RNA, 19 nt, Artificial Sequence
  Description of Artificial Sequence: Synthetic oligonucleotide
cacuauggaaggccaccua

SEQ ID NO: 2292534 - RNA, 19 nt, Artificial Sequence
  Description of Artificial Sequence: Synthetic oligonucleotide
ccguacagacaaaggccug

SEQ ID NO: 2292535 - RNA, 19 nt, Artificial Sequence
  Description of Artificial Sequence: Synthetic oligonucleotide
ccaagcgcaggcuaucucu

SEQ ID NO: 2292536 - RNA, 19 nt, Artificial Sequence
  Description of Artificial Sequence: Synthetic oligonucleotide
aggugccccucagaaguau

SEQ ID NO: 2292537 - RNA, 19 nt, Artificial Sequence
  Description of Artificial Sequence: Synthetic oligonucleotide
gcuucacuacucugauuaa

SEQ ID NO: 2292538 - RNA, 19 nt, Artificial Sequence
  Description of Artificial Sequence: Synthetic oligonucleotide
uggcuccugggaaguccau

SEQ ID NO: 2292539 - RNA, 19 nt, Artificial Sequence
  Description of Artificial Sequence: Synthetic oligonucleotide
ggcuuuuccacgggacauc

SEQ ID NO: 2292540 - RNA, 19 nt, Artificial Sequence
  Description of Artificial Sequence: Synthetic oligonucleotide
accggggccccuucacaua

SEQ ID NO: 2292541 - RNA, 19 nt, Artificial Sequence
  Description of Artificial Sequence: Synthetic oligonucleotide
cagccagcguuagacacua

SEQ ID NO: 2292542 - RNA, 19 nt, Artificial Sequence
  Description of Artificial Sequence: Synthetic oligonucleotide
cacgucucuucugcaccuc

SEQ ID NO: 2292543 - RNA, 19 nt, Artificial Sequence
  Description of Artificial Sequence: Synthetic oligonucleotide
cacuagucaugaagggcau

SEQ ID NO: 2292544 - RNA, 19 nt, Artificial Sequence
  Description of Artificial Sequence: Synthetic oligonucleotide
ccggggccccuucacauac

SEQ ID NO: 2292545 - RNA, 19 nt, Artificial Sequence
  Description of Artificial Sequence: Synthetic oligonucleotide
cggucaugaccaaauaucu

SEQ ID NO: 2292546 - RNA, 19 nt, Artificial Sequence
  Description of Artificial Sequence: Synthetic oligonucleotide
cgcaggcuaucucuggcug

SEQ ID NO: 2292547 - RNA, 19 nt, Artificial Sequence
  Description of Artificial Sequence: Synthetic oligonucleotide
ccagcguuagacacuacau

SEQ ID NO: 2292548 - RNA, 19 nt, Artificial Sequence
  Description of Artificial Sequence: Synthetic oligonucleotide
caggcuaucucuggcugcu

SEQ ID NO: 2292549 - RNA, 19 nt, Artificial Sequence
  Description of Artificial Sequence: Synthetic oligonucleotide
gcuaucucuggcugcuagu

SEQ ID NO: 2292550 - RNA, 19 nt, Artificial Sequence
  Description of Artificial Sequence: Synthetic oligonucleotide
auucccugguuaggcuuua

SEQ ID NO: 2292551 - RNA, 19 nt, Artificial Sequence
  Description of Artificial Sequence: Synthetic oligonucleotide
ccuccagccucguuaguaa

SEQ ID NO: 2292552 - RNA, 19 nt, Artificial Sequence
  Description of Artificial Sequence: Synthetic oligonucleotide
gcauuuugcuaaccaccgu

SEQ ID NO: 2292553 - RNA, 19 nt, Artificial Sequence
  Description of Artificial Sequence: Synthetic oligonucleotide
aggccaccuaggacaagau

SEQ ID NO: 2292554 - RNA, 19 nt, Artificial Sequence
  Description of Artificial Sequence: Synthetic oligonucleotide
cagcugugucccuggccga

SEQ ID NO: 2292555 - RNA, 19 nt, Artificial Sequence
  Description of Artificial Sequence: Synthetic oligonucleotide
gucccagcagccagcguua

SEQ ID NO: 2292556 - RNA, 19 nt, Artificial Sequence
  Description of Artificial Sequence: Synthetic oligonucleotide
gcggcgcuuccccaguguc

SEQ ID NO: 2292557 - RNA, 19 nt, Artificial Sequence
  Description of Artificial Sequence: Synthetic oligonucleotide
agccagcguuagacacuac

SEQ ID NO: 2292558 - RNA, 19 nt, Artificial Sequence
  Description of Artificial Sequence: Synthetic oligonucleotide
gccccucagaaguauuggu

SEQ ID NO: 2292559 - RNA, 19 nt, Artificial Sequence
  Description of Artificial Sequence: Synthetic oligonucleotide
ccuggccgacuauacuuga

SEQ ID NO: 2292560 - RNA, 19 nt, Artificial Sequence
  Description of Artificial Sequence: Synthetic oligonucleotide
ccauuacagcacuagucau

SEQ ID NO: 2292561 - RNA, 19 nt, Artificial Sequence
  Description of Artificial Sequence: Synthetic oligonucleotide
ccacgggacaucuucacuu

SEQ ID NO: 2292562 - RNA, 19 nt, Artificial Sequence
  Description of Artificial Sequence: Synthetic oligonucleotide
gugggcacgaagggcauuu

SEQ ID NO: 2292563 - RNA, 19 nt, Artificial Sequence
  Description of Artificial Sequence: Synthetic oligonucleotide
cagaaguauuggucacaau

SEQ ID NO: 2292564 - RNA, 19 nt, Artificial Sequence
  Description of Artificial Sequence: Synthetic oligonucleotide
caggugccccucagaagua

SEQ ID NO: 2292565 - RNA, 19 nt, Artificial Sequence
  Description of Artificial Sequence: Synthetic oligonucleotide
gcgccaaucacagugccuu

SEQ ID NO: 2292566 - RNA, 19 nt, Artificial Sequence
  Description of Artificial Sequence: Synthetic oligonucleotide
cagagcuagcagggcauua

SEQ ID NO: 2292567 - RNA, 19 nt, Artificial Sequence
  Description of Artificial Sequence: Synthetic oligonucleotide
ggucaugaccaaauaucuu

SEQ ID NO: 2292568 - RNA, 19 nt, Artificial Sequence
  Description of Artificial Sequence: Synthetic oligonucleotide
ccauagcaguucggcggcg

SEQ ID NO: 2292569 - RNA, 19 nt, Artificial Sequence
  Description of Artificial Sequence: Synthetic oligonucleotide
gcacuauggaaggccaccu

SEQ ID NO: 2292570 - RNA, 19 nt, Artificial Sequence
  Description of Artificial Sequence: Synthetic oligonucleotide
cuaccaccuccaggccgac

SEQ ID NO: 2292571 - RNA, 19 nt, Artificial Sequence
  Description of Artificial Sequence: Synthetic oligonucleotide
caccggggccccuucacau

SEQ ID NO: 2292572 - RNA, 19 nt, Artificial Sequence
  Description of Artificial Sequence: Synthetic oligonucleotide
cggcgcuuccccagugucc

SEQ ID NO: 2292573 - RNA, 19 nt, Artificial Sequence
  Description of Artificial Sequence: Synthetic oligonucleotide
cgccgaaccuccaccagca

SEQ ID NO: 2292574 - RNA, 19 nt, Artificial Sequence
  Description of Artificial Sequence: Synthetic oligonucleotide
gcugcuaguccugcaccaa

SEQ ID NO: 2292575 - RNA, 19 nt, Artificial Sequence
  Description of Artificial Sequence: Synthetic oligonucleotide
cuccaagcgcaggcuaucu

SEQ ID NO: 2292576 - RNA, 19 nt, Artificial Sequence
  Description of Artificial Sequence: Synthetic oligonucleotide
ccuccaagcgcaggcuauc

SEQ ID NO: 2292577 - RNA, 19 nt, Artificial Sequence
  Description of Artificial Sequence: Synthetic oligonucleotide
gugcuucacuacucugauu

SEQ ID NO: 2292578 - RNA, 19 nt, Artificial Sequence
  Description of Artificial Sequence: Synthetic oligonucleotide
cccacacgucucuucugca

SEQ ID NO: 2292579 - RNA, 19 nt, Artificial Sequence
  Description of Artificial Sequence: Synthetic oligonucleotide
gggcuuuuccacgggacau

SEQ ID NO: 2292580 - RNA, 19 nt, Artificial Sequence
  Description of Artificial Sequence: Synthetic oligonucleotide
cccuuguucuggaacuccu

SEQ ID NO: 2292581 - RNA, 19 nt, Artificial Sequence
  Description of Artificial Sequence: Synthetic oligonucleotide
gcgcaggcuaucucuggcu

SEQ ID NO: 2292582 - RNA, 19 nt, Artificial Sequence
  Description of Artificial Sequence: Synthetic oligonucleotide
cuuuuccacgggacaucuu

SEQ ID NO: 2292583 - RNA, 19 nt, Artificial Sequence
  Description of Artificial Sequence: Synthetic oligonucleotide
aggcuaucucuggcugcua

SEQ ID NO: 2292584 - RNA, 19 nt, Artificial Sequence
  Description of Artificial Sequence: Synthetic oligonucleotide
gcucaggauaggacugugu

SEQ ID NO: 2292585 - RNA, 19 nt, Artificial Sequence
  Description of Artificial Sequence: Synthetic oligonucleotide
ggcuccugggaaguccaua

SEQ ID NO: 2292586 - RNA, 19 nt, Artificial Sequence
  Description of Artificial Sequence: Synthetic oligonucleotide
guccugcaccaaacaccuc

SEQ ID NO: 2292587 - RNA, 19 nt, Artificial Sequence
  Description of Artificial Sequence: Synthetic oligonucleotide
ggccaccuaggacaagauu

SEQ ID NO: 2292588 - RNA, 19 nt, Artificial Sequence
  Description of Artificial Sequence: Synthetic oligonucleotide
gcgcuuccccaguguccag

SEQ ID NO: 2292589 - RNA, 19 nt, Artificial Sequence
  Description of Artificial Sequence: Synthetic oligonucleotide
cauaacccauggccacauu

SEQ ID NO: 2292590 - RNA, 19 nt, Artificial Sequence
  Description of Artificial Sequence: Synthetic oligonucleotide
gcuggggaacaaugauuuu

SEQ ID NO: 2292591 - RNA, 19 nt, Artificial Sequence
  Description of Artificial Sequence: Synthetic oligonucleotide
cacuugcgcugcagugggu

SEQ ID NO: 2292592 - RNA, 19 nt, Artificial Sequence
  Description of Artificial Sequence: Synthetic oligonucleotide
cccuuuagcuggggaacaa

SEQ ID NO: 2292593 - RNA, 19 nt, Artificial Sequence
  Description of Artificial Sequence: Synthetic oligonucleotide
ggcggcgcuuccccagugu

SEQ ID NO: 2292594 - RNA, 19 nt, Artificial Sequence
  Description of Artificial Sequence: Synthetic oligonucleotide
cggggccccuucacauacc

SEQ ID NO: 2292595 - RNA, 19 nt, Artificial Sequence
  Description of Artificial Sequence: Synthetic oligonucleotide
cguuaguaacagugacagu

SEQ ID NO: 2292596 - RNA, 19 nt, Artificial Sequence
  Description of Artificial Sequence: Synthetic oligonucleotide
ggccugccuccaagcgcag

SEQ ID NO: 2292597 - RNA, 19 nt, Artificial Sequence
  Description of Artificial Sequence: Synthetic oligonucleotide
ccuuuagcuggggaacaau

SEQ ID NO: 2292598 - RNA, 19 nt, Artificial Sequence
  Description of Artificial Sequence: Synthetic oligonucleotide
ccgacaucacugcccuugu

SEQ ID NO: 2292599 - RNA, 19 nt, Artificial Sequence
  Description of Artificial Sequence: Synthetic oligonucleotide
ggugccccucagaaguauu

SEQ ID NO: 2292600 - RNA, 19 nt, Artificial Sequence
  Description of Artificial Sequence: Synthetic oligonucleotide
gggccccuucacauaccaa

SEQ ID NO: 2292601 - RNA, 19 nt, Artificial Sequence
  Description of Artificial Sequence: Synthetic oligonucleotide
gcgcugcaguggguccuug

SEQ ID NO: 2292602 - RNA, 19 nt, Artificial Sequence
  Description of Artificial Sequence: Synthetic oligonucleotide
gcagagcuagcagggcauu

SEQ ID NO: 2292603 - RNA, 19 nt, Artificial Sequence
  Description of Artificial Sequence: Synthetic oligonucleotide
gcucucaccggggccccuu

SEQ ID NO: 2292604 - RNA, 19 nt, Artificial Sequence
  Description of Artificial Sequence: Synthetic oligonucleotide
ccaaccccacacgucucuu

SEQ ID NO: 2292605 - RNA, 19 nt, Artificial Sequence
  Description of Artificial Sequence: Synthetic oligonucleotide
auaaaauuaaaacugaucc

SEQ ID NO: 2292606 - RNA, 19 nt, Artificial Sequence
  Description of Artificial Sequence: Synthetic oligonucleotide
aaaauuaaaacugauccgc

SEQ ID NO: 2292607 - RNA, 19 nt, Artificial Sequence
  Description of Artificial Sequence: Synthetic oligonucleotide
uaaguuauuauuaugaaac

SEQ ID NO: 2292608 - RNA, 19 nt, Artificial Sequence
  Description of Artificial Sequence: Synthetic oligonucleotide
aacuguuggagucagggcc

SEQ ID NO: 2292609 - RNA, 19 nt, Artificial Sequence
  Description of Artificial Sequence: Synthetic oligonucleotide
uguauaauacauuuaacug

SEQ ID NO: 2292610 - RNA, 19 nt, Artificial Sequence
  Description of Artificial Sequence: Synthetic oligonucleotide
uauucuaucauuuauuuuc

SEQ ID NO: 2292611 - RNA, 19 nt, Artificial Sequence
  Description of Artificial Sequence: Synthetic oligonucleotide
aaaauacuuagacagccag

SEQ ID NO: 2292612 - RNA, 19 nt, Artificial Sequence
  Description of Artificial Sequence: Synthetic oligonucleotide
uaaaucagugcaaacauug

SEQ ID NO: 2292613 - RNA, 19 nt, Artificial Sequence
  Description of Artificial Sequence: Synthetic oligonucleotide
aauacuuagacagccaguc

SEQ ID NO: 2292614 - RNA, 19 nt, Artificial Sequence
  Description of Artificial Sequence: Synthetic oligonucleotide
uagaacaucuaccucauag

SEQ ID NO: 2292615 - RNA, 19 nt, Artificial Sequence
  Description of Artificial Sequence: Synthetic oligonucleotide
aaaauuauguauaauacau

SEQ ID NO: 2292616 - RNA, 19 nt, Artificial Sequence
  Description of Artificial Sequence: Synthetic oligonucleotide
aauauaaaagagacggacg

SEQ ID NO: 2292617 - RNA, 19 nt, Artificial Sequence
  Description of Artificial Sequence: Synthetic oligonucleotide
aaaagagacggacgagucc

SEQ ID NO: 2292618 - RNA, 19 nt, Artificial Sequence
  Description of Artificial Sequence: Synthetic oligonucleotide
aauaaacuaaagaugagga

SEQ ID NO: 2292619 - RNA, 19 nt, Artificial Sequence
  Description of Artificial Sequence: Synthetic oligonucleotide
acaucuaccucauagaaga

SEQ ID NO: 2292620 - RNA, 19 nt, Artificial Sequence
  Description of Artificial Sequence: Synthetic oligonucleotide
auucgcuuagaaaagaagc

SEQ ID NO: 2292621 - RNA, 19 nt, Artificial Sequence
  Description of Artificial Sequence: Synthetic oligonucleotide
auaaacuaaagaugaggac

SEQ ID NO: 2292622 - RNA, 19 nt, Artificial Sequence
  Description of Artificial Sequence: Synthetic oligonucleotide
ucuaagaccaguuaagcaa

SEQ ID NO: 2292623 - RNA, 19 nt, Artificial Sequence
  Description of Artificial Sequence: Synthetic oligonucleotide
gaaacagaaccuaaggagg

SEQ ID NO: 2292624 - RNA, 19 nt, Artificial Sequence
  Description of Artificial Sequence: Synthetic oligonucleotide
aggacuuacagagagacac

SEQ ID NO: 2292625 - RNA, 19 nt, Artificial Sequence
  Description of Artificial Sequence: Synthetic oligonucleotide
uagacagccagucuguggg

SEQ ID NO: 2292626 - RNA, 19 nt, Artificial Sequence
  Description of Artificial Sequence: Synthetic oligonucleotide
ugugcguucaugcaggacc

SEQ ID NO: 2292627 - RNA, 19 nt, Artificial Sequence
  Description of Artificial Sequence: Synthetic oligonucleotide
aaggauuucauuucaagua

SEQ ID NO: 2292628 - RNA, 19 nt, Artificial Sequence
  Description of Artificial Sequence: Synthetic oligonucleotide
cauugcauaguucacgugg

SEQ ID NO: 2292629 - RNA, 19 nt, Artificial Sequence
  Description of Artificial Sequence: Synthetic oligonucleotide
aauuaaaacugauccgcug

SEQ ID NO: 2292630 - RNA, 19 nt, Artificial Sequence
  Description of Artificial Sequence: Synthetic oligonucleotide
uccaguuucgccuagugug

SEQ ID NO: 2292631 - RNA, 19 nt, Artificial Sequence
  Description of Artificial Sequence: Synthetic oligonucleotide
uuaugaaacagaaccuaag

SEQ ID NO: 2292632 - RNA, 19 nt, Artificial Sequence
  Description of Artificial Sequence: Synthetic oligonucleotide
accgcaagugcuuugaggg

SEQ ID NO: 2292633 - RNA, 19 nt, Artificial Sequence
  Description of Artificial Sequence: Synthetic oligonucleotide
ucauuuauacccugaaaug

SEQ ID NO: 2292634 - RNA, 19 nt, Artificial Sequence
  Description of Artificial Sequence: Synthetic oligonucleotide
agaccaguuaagcaacucc

SEQ ID NO: 2292635 - RNA, 19 nt, Artificial Sequence
  Description of Artificial Sequence: Synthetic oligonucleotide
agugcaaacauugaaagca

SEQ ID NO: 2292636 - RNA, 19 nt, Artificial Sequence
  Description of Artificial Sequence: Synthetic oligonucleotide
gaucauguugggcacaucc

SEQ ID NO: 2292637 - RNA, 19 nt, Artificial Sequence
  Description of Artificial Sequence: Synthetic oligonucleotide
guuuagaacaucuaccuca

SEQ ID NO: 2292638 - RNA, 19 nt, Artificial Sequence
  Description of Artificial Sequence: Synthetic oligonucleotide
cuuacagagagacaccugc

SEQ ID NO: 2292639 - RNA, 19 nt, Artificial Sequence
  Description of Artificial Sequence: Synthetic oligonucleotide
uuucuuuaccuucugggug

SEQ ID NO: 2292640 - RNA, 19 nt, Artificial Sequence
  Description of Artificial Sequence: Synthetic oligonucleotide
uguaagaacagaagagaca

SEQ ID NO: 2292641 - RNA, 19 nt, Artificial Sequence
  Description of Artificial Sequence: Synthetic oligonucleotide
uuguuuagaacaucuaccu

SEQ ID NO: 2292642 - RNA, 19 nt, Artificial Sequence
  Description of Artificial Sequence: Synthetic oligonucleotide
uacuuagacagccagucug

SEQ ID NO: 2292643 - RNA, 19 nt, Artificial Sequence
  Description of Artificial Sequence: Synthetic oligonucleotide
uuaaguuauuauuaugaaa

SEQ ID NO: 2292644 - RNA, 19 nt, Artificial Sequence
  Description of Artificial Sequence: Synthetic oligonucleotide
uugaaagcaaucauucgcu

SEQ ID NO: 2292645 - RNA, 19 nt, Artificial Sequence
  Description of Artificial Sequence: Synthetic oligonucleotide
guaaaauacuuagacagcc

SEQ ID NO: 2292646 - RNA, 19 nt, Artificial Sequence
  Description of Artificial Sequence: Synthetic oligonucleotide
aaguuauuauuaugaaaca

SEQ ID NO: 2292647 - RNA, 19 nt, Artificial Sequence
  Description of Artificial Sequence: Synthetic oligonucleotide
uucgcuuagaaaagaagca

SEQ ID NO: 2292648 - RNA, 19 nt, Artificial Sequence
  Description of Artificial Sequence: Synthetic oligonucleotide
aguuauuauuaugaaacag

SEQ ID NO: 2292649 - RNA, 19 nt, Artificial Sequence
  Description of Artificial Sequence: Synthetic oligonucleotide
cauuuauacccugaaaugc

SEQ ID NO: 2292650 - RNA, 19 nt, Artificial Sequence
  Description of Artificial Sequence: Synthetic oligonucleotide
caugcaacuaaaucagugc

SEQ ID NO: 2292651 - RNA, 19 nt, Artificial Sequence
  Description of Artificial Sequence: Synthetic oligonucleotide
guaagaacagaagagacac

SEQ ID NO: 2292652 - RNA, 19 nt, Artificial Sequence
  Description of Artificial Sequence: Synthetic oligonucleotide
uucuggguguguaagaaca

SEQ ID NO: 2292653 - RNA, 19 nt, Artificial Sequence
  Description of Artificial Sequence: Synthetic oligonucleotide
uuacauugcauaguucacg

SEQ ID NO: 2292654 - RNA, 19 nt, Artificial Sequence
  Description of Artificial Sequence: Synthetic oligonucleotide
aaaacugauccgcuggccu

SEQ ID NO: 2292655 - RNA, 19 nt, Artificial Sequence
  Description of Artificial Sequence: Synthetic oligonucleotide
aaaauuuccggucucucua

SEQ ID NO: 2292656 - RNA, 19 nt, Artificial Sequence
  Description of Artificial Sequence: Synthetic oligonucleotide
aaguuguugguuuaaguua

SEQ ID NO: 2292657 - RNA, 19 nt, Artificial Sequence
  Description of Artificial Sequence: Synthetic oligonucleotide
aaacagaaccuaaggaggg

SEQ ID NO: 2292658 - RNA, 19 nt, Artificial Sequence
  Description of Artificial Sequence: Synthetic oligonucleotide
uauuauuaugaaacagaac

SEQ ID NO: 2292659 - RNA, 19 nt, Artificial Sequence
  Description of Artificial Sequence: Synthetic oligonucleotide
aaccaugcaacuaaaucag

SEQ ID NO: 2292660 - RNA, 19 nt, Artificial Sequence
  Description of Artificial Sequence: Synthetic oligonucleotide
auuguauucuaucauuuau

SEQ ID NO: 2292661 - RNA, 19 nt, Artificial Sequence
  Description of Artificial Sequence: Synthetic oligonucleotide
aaucagugcaaacauugaa

SEQ ID NO: 2292662 - RNA, 19 nt, Artificial Sequence
  Description of Artificial Sequence: Synthetic oligonucleotide
uuucugacuaaccaugcaa

SEQ ID NO: 2292663 - RNA, 19 nt, Artificial Sequence
  Description of Artificial Sequence: Synthetic oligonucleotide
aaagagacggacgagucca

SEQ ID NO: 2292664 - RNA, 19 nt, Artificial Sequence
  Description of Artificial Sequence: Synthetic oligonucleotide
guuguuuagaacaucuacc

SEQ ID NO: 2292665 - RNA, 19 nt, Artificial Sequence
  Description of Artificial Sequence: Synthetic oligonucleotide
uuaaaacugauccgcuggc

SEQ ID NO: 2292666 - RNA, 19 nt, Artificial Sequence
  Description of Artificial Sequence: Synthetic oligonucleotide
acaacuguuggagucaggg

SEQ ID NO: 2292667 - RNA, 19 nt, Artificial Sequence
  Description of Artificial Sequence: Synthetic oligonucleotide
auacauuuaacuguauuca

SEQ ID NO: 2292668 - RNA, 19 nt, Artificial Sequence
  Description of Artificial Sequence: Synthetic oligonucleotide
cuaaccaugcaacuaaauc

SEQ ID NO: 2292669 - RNA, 19 nt, Artificial Sequence
  Description of Artificial Sequence: Synthetic oligonucleotide
aaacugauccgcuggccuc

SEQ ID NO: 2292670 - RNA, 19 nt, Artificial Sequence
  Description of Artificial Sequence: Synthetic oligonucleotide
caaaauuauguauaauaca

SEQ ID NO: 2292671 - RNA, 19 nt, Artificial Sequence
  Description of Artificial Sequence: Synthetic oligonucleotide
auagaagauggccuuacca

SEQ ID NO: 2292672 - RNA, 19 nt, Artificial Sequence
  Description of Artificial Sequence: Synthetic oligonucleotide
uccggucucucuaagacca

SEQ ID NO: 2292673 - RNA, 19 nt, Artificial Sequence
  Description of Artificial Sequence: Synthetic oligonucleotide
guauaauacauuuaacugu

SEQ ID NO: 2292674 - RNA, 19 nt, Artificial Sequence
  Description of Artificial Sequence: Synthetic oligonucleotide
cauugaaagcaaucauucg

SEQ ID NO: 2292675 - RNA, 19 nt, Artificial Sequence
  Description of Artificial Sequence: Synthetic oligonucleotide
uuuccggucucucuaagac

SEQ ID NO: 2292676 - RNA, 19 nt, Artificial Sequence
  Description of Artificial Sequence: Synthetic oligonucleotide
uuucaaauggcaguuucug

SEQ ID NO: 2292677 - RNA, 19 nt, Artificial Sequence
  Description of Artificial Sequence: Synthetic oligonucleotide
uugucaugugcguucaugc

SEQ ID NO: 2292678 - RNA, 19 nt, Artificial Sequence
  Description of Artificial Sequence: Synthetic oligonucleotide
uucugacuaaccaugcaac

SEQ ID NO: 2292679 - RNA, 19 nt, Artificial Sequence
  Description of Artificial Sequence: Synthetic oligonucleotide
aaucauucgcuuagaaaag

SEQ ID NO: 2292680 - RNA, 19 nt, Artificial Sequence
  Description of Artificial Sequence: Synthetic oligonucleotide
ugaggacuuacagagagac

SEQ ID NO: 2292681 - RNA, 19 nt, Artificial Sequence
  Description of Artificial Sequence: Synthetic oligonucleotide
uuagacagccagucugugg

SEQ ID NO: 2292682 - RNA, 19 nt, Artificial Sequence
  Description of Artificial Sequence: Synthetic oligonucleotide
uacauugcauaguucacgu

SEQ ID NO: 2292683 - RNA, 19 nt, Artificial Sequence
  Description of Artificial Sequence: Synthetic oligonucleotide
acuaaagaugaggacuuac

SEQ ID NO: 2292684 - RNA, 19 nt, Artificial Sequence
  Description of Artificial Sequence: Synthetic oligonucleotide
uaguucacguggcacuugg

SEQ ID NO: 2292685 - RNA, 19 nt, Artificial Sequence
  Description of Artificial Sequence: Synthetic oligonucleotide
uaaaagagacggacgaguc

SEQ ID NO: 2292686 - RNA, 19 nt, Artificial Sequence
  Description of Artificial Sequence: Synthetic oligonucleotide
aaaauauaaaagagacgga

SEQ ID NO: 2292687 - RNA, 19 nt, Artificial Sequence
  Description of Artificial Sequence: Synthetic oligonucleotide
uauaaaagagacggacgag

SEQ ID NO: 2292688 - RNA, 19 nt, Artificial Sequence
  Description of Artificial Sequence: Synthetic oligonucleotide
agaacaucuaccucauaga

SEQ ID NO: 2292689 - RNA, 19 nt, Artificial Sequence
  Description of Artificial Sequence: Synthetic oligonucleotide
cucucuaagaccaguuaag

SEQ ID NO: 2292690 - RNA, 19 nt, Artificial Sequence
  Description of Artificial Sequence: Synthetic oligonucleotide
aacaucuaccucauagaag

SEQ ID NO: 2292691 - RNA, 19 nt, Artificial Sequence
  Description of Artificial Sequence: Synthetic oligonucleotide
auugcauaguucacguggc

SEQ ID NO: 2292692 - RNA, 19 nt, Artificial Sequence
  Description of Artificial Sequence: Synthetic oligonucleotide
auaaaagagacggacgagu

SEQ ID NO: 2292693 - RNA, 19 nt, Artificial Sequence
  Description of Artificial Sequence: Synthetic oligonucleotide
augcaacuaaaucagugca

SEQ ID NO: 2292694 - RNA, 19 nt, Artificial Sequence
  Description of Artificial Sequence: Synthetic oligonucleotide
cauucgcuuagaaaagaag

SEQ ID NO: 2292695 - RNA, 19 nt, Artificial Sequence
  Description of Artificial Sequence: Synthetic oligonucleotide
uuuagaacaucuaccucau

SEQ ID NO: 2292696 - RNA, 19 nt, Artificial Sequence
  Description of Artificial Sequence: Synthetic oligonucleotide
uuguauucuaucauuuauu

SEQ ID NO: 2292697 - RNA, 19 nt, Artificial Sequence
  Description of Artificial Sequence: Synthetic oligonucleotide
ugcaaagccacugaaaauu

SEQ ID NO: 2292698 - RNA, 19 nt, Artificial Sequence
  Description of Artificial Sequence: Synthetic oligonucleotide
aaauuaaaacugauccgcu

SEQ ID NO: 2292699 - RNA, 19 nt, Artificial Sequence
  Description of Artificial Sequence: Synthetic oligonucleotide
aggauuucauuucaaguau

SEQ ID NO: 2292700 - RNA, 19 nt, Artificial Sequence
  Description of Artificial Sequence: Synthetic oligonucleotide
agucacggcagcucuugcc

SEQ ID NO: 2292701 - RNA, 19 nt, Artificial Sequence
  Description of Artificial Sequence: Synthetic oligonucleotide
agccacugaaaauuuccgg

SEQ ID NO: 2292702 - RNA, 19 nt, Artificial Sequence
  Description of Artificial Sequence: Synthetic oligonucleotide
ucucuaagaccaguuaagc

SEQ ID NO: 2292703 - RNA, 19 nt, Artificial Sequence
  Description of Artificial Sequence: Synthetic oligonucleotide
aauuuccggucucucuaag

SEQ ID NO: 2292704 - RNA, 19 nt, Artificial Sequence
  Description of Artificial Sequence: Synthetic oligonucleotide
cuugccgccacacuccucc

SEQ ID NO: 2292705 - RNA, 19 nt, Artificial Sequence
  Description of Artificial Sequence: Synthetic oligonucleotide
uggacgauguggccggacg

SEQ ID NO: 2292706 - RNA, 19 nt, Artificial Sequence
  Description of Artificial Sequence: Synthetic oligonucleotide
gaccaguuaagcaacuccc

SEQ ID NO: 2292707 - RNA, 19 nt, Artificial Sequence
  Description of Artificial Sequence: Synthetic oligonucleotide
gguuguuuagaacaucuac

SEQ ID NO: 2292708 - RNA, 19 nt, Artificial Sequence
  Description of Artificial Sequence: Synthetic oligonucleotide
uucaaauggcaguuucuga

SEQ ID NO: 2292709 - RNA, 19 nt, Artificial Sequence
  Description of Artificial Sequence: Synthetic oligonucleotide
ugguuuaaguuauuauuau

SEQ ID NO: 2292710 - RNA, 19 nt, Artificial Sequence
  Description of Artificial Sequence: Synthetic oligonucleotide
ucugacuaaccaugcaacu

SEQ ID NO: 2292711 - RNA, 19 nt, Artificial Sequence
  Description of Artificial Sequence: Synthetic oligonucleotide
aagccacugaaaauuuccg

SEQ ID NO: 2292712 - RNA, 19 nt, Artificial Sequence
  Description of Artificial Sequence: Synthetic oligonucleotide
gaacaucuaccucauagaa

SEQ ID NO: 2292713 - RNA, 19 nt, Artificial Sequence
  Description of Artificial Sequence: Synthetic oligonucleotide
uggccuuaccaucuaauaa

SEQ ID NO: 2292714 - RNA, 19 nt, Artificial Sequence
  Description of Artificial Sequence: Synthetic oligonucleotide
ucuaccacugccuccucug

SEQ ID NO: 2292715 - RNA, 19 nt, Artificial Sequence
  Description of Artificial Sequence: Synthetic oligonucleotide
aaauggcaguuucugacua

SEQ ID NO: 2292716 - RNA, 19 nt, Artificial Sequence
  Description of Artificial Sequence: Synthetic oligonucleotide
aaauucauuuauacccuga

SEQ ID NO: 2292717 - RNA, 19 nt, Artificial Sequence
  Description of Artificial Sequence: Synthetic oligonucleotide
ugcaacuaaaucagugcaa

SEQ ID NO: 2292718 - RNA, 19 nt, Artificial Sequence
  Description of Artificial Sequence: Synthetic oligonucleotide
ucauucgcuuagaaaagaa

SEQ ID NO: 2292719 - RNA, 19 nt, Artificial Sequence
  Description of Artificial Sequence: Synthetic oligonucleotide
uggguguguaagaacagaa

SEQ ID NO: 2292720 - RNA, 19 nt, Artificial Sequence
  Description of Artificial Sequence: Synthetic oligonucleotide
auuuauacccugaaaugcu

SEQ ID NO: 2292721 - RNA, 19 nt, Artificial Sequence
  Description of Artificial Sequence: Synthetic oligonucleotide
cuaaagaugaggacuuaca

SEQ ID NO: 2292722 - RNA, 19 nt, Artificial Sequence
  Description of Artificial Sequence: Synthetic oligonucleotide
agggacaacuucugcaaag

SEQ ID NO: 2292723 - RNA, 19 nt, Artificial Sequence
  Description of Artificial Sequence: Synthetic oligonucleotide
agugcucuugucaugugcg

SEQ ID NO: 2292724 - RNA, 19 nt, Artificial Sequence
  Description of Artificial Sequence: Synthetic oligonucleotide
gaccgcaagugcuuugagg

SEQ ID NO: 2292725 - RNA, 19 nt, Artificial Sequence
  Description of Artificial Sequence: Synthetic oligonucleotide
ucuggguguguaagaacag

SEQ ID NO: 2292726 - RNA, 19 nt, Artificial Sequence
  Description of Artificial Sequence: Synthetic oligonucleotide
uuacagagagacaccugca

SEQ ID NO: 2292727 - RNA, 19 nt, Artificial Sequence
  Description of Artificial Sequence: Synthetic oligonucleotide
aagaccaguuaagcaacuc

SEQ ID NO: 2292728 - RNA, 19 nt, Artificial Sequence
  Description of Artificial Sequence: Synthetic oligonucleotide
ggcacuuggacauccacag

SEQ ID NO: 2292729 - RNA, 19 nt, Artificial Sequence
  Description of Artificial Sequence: Synthetic oligonucleotide
uggguucuuccccuugccg

SEQ ID NO: 2292730 - RNA, 19 nt, Artificial Sequence
  Description of Artificial Sequence: Synthetic oligonucleotide
acuguuggagucagggccc

SEQ ID NO: 2292731 - RNA, 19 nt, Artificial Sequence
  Description of Artificial Sequence: Synthetic oligonucleotide
ucaugcaggaccgcaagug

SEQ ID NO: 2292732 - RNA, 19 nt, Artificial Sequence
  Description of Artificial Sequence: Synthetic oligonucleotide
ugguuccaaaauuauguau

SEQ ID NO: 2292733 - RNA, 19 nt, Artificial Sequence
  Description of Artificial Sequence: Synthetic oligonucleotide
ugagccagugaagagggca

SEQ ID NO: 2292734 - RNA, 19 nt, Artificial Sequence
  Description of Artificial Sequence: Synthetic oligonucleotide
gaaguuguugguuuaaguu

SEQ ID NO: 2292735 - RNA, 19 nt, Artificial Sequence
  Description of Artificial Sequence: Synthetic oligonucleotide
aaggagggcuuauuaaaua

SEQ ID NO: 2292736 - RNA, 19 nt, Artificial Sequence
  Description of Artificial Sequence: Synthetic oligonucleotide
aaauacuuagacagccagu

SEQ ID NO: 2292737 - RNA, 19 nt, Artificial Sequence
  Description of Artificial Sequence: Synthetic oligonucleotide
cuuaccaucuaauaaaauu

SEQ ID NO: 2292738 - RNA, 19 nt, Artificial Sequence
  Description of Artificial Sequence: Synthetic oligonucleotide
ggcacaucccgcuuggacg

SEQ ID NO: 2292739 - RNA, 19 nt, Artificial Sequence
  Description of Artificial Sequence: Synthetic oligonucleotide
accaguuaagcaacucccc

SEQ ID NO: 2292740 - RNA, 19 nt, Artificial Sequence
  Description of Artificial Sequence: Synthetic oligonucleotide
gacaacuucugcaaagcca

SEQ ID NO: 2292741 - RNA, 19 nt, Artificial Sequence
  Description of Artificial Sequence: Synthetic oligonucleotide
guugguuuaaguuauuauu

SEQ ID NO: 2292742 - RNA, 19 nt, Artificial Sequence
  Description of Artificial Sequence: Synthetic oligonucleotide
cuaaggagggcuuauuaaa

SEQ ID NO: 2292743 - RNA, 19 nt, Artificial Sequence
  Description of Artificial Sequence: Synthetic oligonucleotide
ugauccgcuggccucuuug

SEQ ID NO: 2292744 - RNA, 19 nt, Artificial Sequence
  Description of Artificial Sequence: Synthetic oligonucleotide
guguaagaacagaagagac

SEQ ID NO: 2292745 - RNA, 19 nt, Artificial Sequence
  Description of Artificial Sequence: Synthetic oligonucleotide
ugucaugugcguucaugca

SEQ ID NO: 2292746 - RNA, 19 nt, Artificial Sequence
  Description of Artificial Sequence: Synthetic oligonucleotide
aaaucagugcaaacauuga

SEQ ID NO: 2292747 - RNA, 19 nt, Artificial Sequence
  Description of Artificial Sequence: Synthetic oligonucleotide
uacagagagacaccugcau

SEQ ID NO: 2292748 - RNA, 19 nt, Artificial Sequence
  Description of Artificial Sequence: Synthetic oligonucleotide
auggcaguuucugacuaac

SEQ ID NO: 2292749 - RNA, 19 nt, Artificial Sequence
  Description of Artificial Sequence: Synthetic oligonucleotide
gauccgcuggccucuuugg

SEQ ID NO: 2292750 - RNA, 19 nt, Artificial Sequence
  Description of Artificial Sequence: Synthetic oligonucleotide
ucccgcuuggacgaugugg

SEQ ID NO: 2292751 - RNA, 19 nt, Artificial Sequence
  Description of Artificial Sequence: Synthetic oligonucleotide
uaaaacugauccgcuggcc

SEQ ID NO: 2292752 - RNA, 19 nt, Artificial Sequence
  Description of Artificial Sequence: Synthetic oligonucleotide
caugcaggaccgcaagugc

SEQ ID NO: 2292753 - RNA, 19 nt, Artificial Sequence
  Description of Artificial Sequence: Synthetic oligonucleotide
uuggagucagggcccaccc

SEQ ID NO: 2292754 - RNA, 19 nt, Artificial Sequence
  Description of Artificial Sequence: Synthetic oligonucleotide
acuucugcaaagccacuga

SEQ ID NO: 2292755 - RNA, 19 nt, Artificial Sequence
  Description of Artificial Sequence: Synthetic oligonucleotide
aagagacacaucaacugaa

SEQ ID NO: 2292756 - RNA, 19 nt, Artificial Sequence
  Description of Artificial Sequence: Synthetic oligonucleotide
gggcuuauuaaauaaacua

SEQ ID NO: 2292757 - RNA, 19 nt, Artificial Sequence
  Description of Artificial Sequence: Synthetic oligonucleotide
guucaugcaggaccgcaag

SEQ ID NO: 2292758 - RNA, 19 nt, Artificial Sequence
  Description of Artificial Sequence: Synthetic oligonucleotide
gucacggcagcucuugccc

SEQ ID NO: 2292759 - RNA, 19 nt, Artificial Sequence
  Description of Artificial Sequence: Synthetic oligonucleotide
auuaugaaacagaaccuaa

SEQ ID NO: 2292760 - RNA, 19 nt, Artificial Sequence
  Description of Artificial Sequence: Synthetic oligonucleotide
gaaagcaaucauucgcuua

SEQ ID NO: 2292761 - RNA, 19 nt, Artificial Sequence
  Description of Artificial Sequence: Synthetic oligonucleotide
aguuaagcaacuccccaua

SEQ ID NO: 2292762 - RNA, 19 nt, Artificial Sequence
  Description of Artificial Sequence: Synthetic oligonucleotide
ucaagggguuguuuagaac

SEQ ID NO: 2292763 - RNA, 19 nt, Artificial Sequence
  Description of Artificial Sequence: Synthetic oligonucleotide
ucgcuuagaaaagaagcaa

SEQ ID NO: 2292764 - RNA, 19 nt, Artificial Sequence
  Description of Artificial Sequence: Synthetic oligonucleotide
aauggcaguuucugacuaa

SEQ ID NO: 2292765 - RNA, 19 nt, Artificial Sequence
  Description of Artificial Sequence: Synthetic oligonucleotide
ugcaaacauugaaagcaau

SEQ ID NO: 2292766 - RNA, 19 nt, Artificial Sequence
  Description of Artificial Sequence: Synthetic oligonucleotide
ugcauaguucacguggcac

SEQ ID NO: 2292767 - RNA, 19 nt, Artificial Sequence
  Description of Artificial Sequence: Synthetic oligonucleotide
cacucaagggguuguuuag

SEQ ID NO: 2292768 - RNA, 19 nt, Artificial Sequence
  Description of Artificial Sequence: Synthetic oligonucleotide
caacuaaaucagugcaaac

SEQ ID NO: 2292769 - RNA, 19 nt, Artificial Sequence
  Description of Artificial Sequence: Synthetic oligonucleotide
guuaagcaacuccccauac

SEQ ID NO: 2292770 - RNA, 19 nt, Artificial Sequence
  Description of Artificial Sequence: Synthetic oligonucleotide
uccacucuaccacugccuc

SEQ ID NO: 2292771 - RNA, 19 nt, Artificial Sequence
  Description of Artificial Sequence: Synthetic oligonucleotide
cauagaagauggccuuacc

SEQ ID NO: 2292772 - RNA, 19 nt, Artificial Sequence
  Description of Artificial Sequence: Synthetic oligonucleotide
cacguagaccugcaagugc

SEQ ID NO: 2292773 - RNA, 19 nt, Artificial Sequence
  Description of Artificial Sequence: Synthetic oligonucleotide
cuuggacauccacagggac

SEQ ID NO: 2292774 - RNA, 19 nt, Artificial Sequence
  Description of Artificial Sequence: Synthetic oligonucleotide
ucaacccuuuacauugcau

SEQ ID NO: 2292775 - RNA, 19 nt, Artificial Sequence
  Description of Artificial Sequence: Synthetic oligonucleotide
gacgaguccaguuucgccu

SEQ ID NO: 2292776 - RNA, 19 nt, Artificial Sequence
  Description of Artificial Sequence: Synthetic oligonucleotide
auacuuagacagccagucu

SEQ ID NO: 2292777 - RNA, 19 nt, Artificial Sequence
  Description of Artificial Sequence: Synthetic oligonucleotide
cuugucaugugcguucaug

SEQ ID NO: 2292778 - RNA, 19 nt, Artificial Sequence
  Description of Artificial Sequence: Synthetic oligonucleotide
uuuaccuucugggugugua

SEQ ID NO: 2292779 - RNA, 19 nt, Artificial Sequence
  Description of Artificial Sequence: Synthetic oligonucleotide
auuuccggucucucuaaga

SEQ ID NO: 2292780 - RNA, 19 nt, Artificial Sequence
  Description of Artificial Sequence: Synthetic oligonucleotide
auuauguauaauacauuua

SEQ ID NO: 2292781 - RNA, 19 nt, Artificial Sequence
  Description of Artificial Sequence: Synthetic oligonucleotide
agggcccacccacagggac

SEQ ID NO: 2292782 - RNA, 19 nt, Artificial Sequence
  Description of Artificial Sequence: Synthetic oligonucleotide
ggcaguuucugacuaacca

SEQ ID NO: 2292783 - RNA, 19 nt, Artificial Sequence
  Description of Artificial Sequence: Synthetic oligonucleotide
uucaugcaggaccgcaagu

SEQ ID NO: 2292784 - RNA, 19 nt, Artificial Sequence
  Description of Artificial Sequence: Synthetic oligonucleotide
ugcaagugcucuugucaug

SEQ ID NO: 2292785 - RNA, 19 nt, Artificial Sequence
  Description of Artificial Sequence: Synthetic oligonucleotide
uugcauaguucacguggca

SEQ ID NO: 2292786 - RNA, 19 nt, Artificial Sequence
  Description of Artificial Sequence: Synthetic oligonucleotide
ggcuuauuaaauaaacuaa

SEQ ID NO: 2292787 - RNA, 19 nt, Artificial Sequence
  Description of Artificial Sequence: Synthetic oligonucleotide
ccaugcaacuaaaucagug

SEQ ID NO: 2292788 - RNA, 19 nt, Artificial Sequence
  Description of Artificial Sequence: Synthetic oligonucleotide
aucauucgcuuagaaaaga

SEQ ID NO: 2292789 - RNA, 19 nt, Artificial Sequence
  Description of Artificial Sequence: Synthetic oligonucleotide
gcuuauuaaauaaacuaaa

SEQ ID NO: 2292790 - RNA, 19 nt, Artificial Sequence
  Description of Artificial Sequence: Synthetic oligonucleotide
caacccuuuacauugcaua

SEQ ID NO: 2292791 - RNA, 19 nt, Artificial Sequence
  Description of Artificial Sequence: Synthetic oligonucleotide
agcaaucauucgcuuagaa

SEQ ID NO: 2292792 - RNA, 19 nt, Artificial Sequence
  Description of Artificial Sequence: Synthetic oligonucleotide
acagaaccuaaggagggcu

SEQ ID NO: 2292793 - RNA, 19 nt, Artificial Sequence
  Description of Artificial Sequence: Synthetic oligonucleotide
acauugcauaguucacgug

SEQ ID NO: 2292794 - RNA, 19 nt, Artificial Sequence
  Description of Artificial Sequence: Synthetic oligonucleotide
accugcaagugcucuuguc

SEQ ID NO: 2292795 - RNA, 19 nt, Artificial Sequence
  Description of Artificial Sequence: Synthetic oligonucleotide
uuucgccuaguguggguca

SEQ ID NO: 2292796 - RNA, 19 nt, Artificial Sequence
  Description of Artificial Sequence: Synthetic oligonucleotide
auguggccggacgagagag

SEQ ID NO: 2292797 - RNA, 19 nt, Artificial Sequence
  Description of Artificial Sequence: Synthetic oligonucleotide
guugggcacaucccgcuug

SEQ ID NO: 2292798 - RNA, 19 nt, Artificial Sequence
  Description of Artificial Sequence: Synthetic oligonucleotide
acauuuaacuguauucauu

SEQ ID NO: 2292799 - RNA, 19 nt, Artificial Sequence
  Description of Artificial Sequence: Synthetic oligonucleotide
gacggacgaguccaguuuc

SEQ ID NO: 2292800 - RNA, 19 nt, Artificial Sequence
  Description of Artificial Sequence: Synthetic oligonucleotide
ugggucaacccuuuacauu

SEQ ID NO: 2292801 - RNA, 19 nt, Artificial Sequence
  Description of Artificial Sequence: Synthetic oligonucleotide
ggccuuaccaucuaauaaa

SEQ ID NO: 2292802 - RNA, 19 nt, Artificial Sequence
  Description of Artificial Sequence: Synthetic oligonucleotide
auggccuuaccaucuaaua

SEQ ID NO: 2292803 - RNA, 19 nt, Artificial Sequence
  Description of Artificial Sequence: Synthetic oligonucleotide
cuaccucauagaagauggc

SEQ ID NO: 2292804 - RNA, 19 nt, Artificial Sequence
  Description of Artificial Sequence: Synthetic oligonucleotide
uuaccuucuggguguguaa

SEQ ID NO: 2292805 - RNA, 19 nt, Artificial Sequence
  Description of Artificial Sequence: Synthetic oligonucleotide
agagacaccugcauuguau

SEQ ID NO: 2292806 - RNA, 19 nt, Artificial Sequence
  Description of Artificial Sequence: Synthetic oligonucleotide
gcuuggacgauguggccgg

SEQ ID NO: 2292807 - RNA, 19 nt, Artificial Sequence
  Description of Artificial Sequence: Synthetic oligonucleotide
gugcguucaugcaggaccg

SEQ ID NO: 2292808 - RNA, 19 nt, Artificial Sequence
  Description of Artificial Sequence: Synthetic oligonucleotide
aacugauccgcuggccucu

SEQ ID NO: 2292809 - RNA, 19 nt, Artificial Sequence
  Description of Artificial Sequence: Synthetic oligonucleotide
agacagccagucugugggg

SEQ ID NO: 2292810 - RNA, 19 nt, Artificial Sequence
  Description of Artificial Sequence: Synthetic oligonucleotide
gacgauguggccggacgag

SEQ ID NO: 2292811 - RNA, 19 nt, Artificial Sequence
  Description of Artificial Sequence: Synthetic oligonucleotide
acguagaccugcaagugcu

SEQ ID NO: 2292812 - RNA, 19 nt, Artificial Sequence
  Description of Artificial Sequence: Synthetic oligonucleotide
auguugggcacaucccgcu

SEQ ID NO: 2292813 - RNA, 19 nt, Artificial Sequence
  Description of Artificial Sequence: Synthetic oligonucleotide
gugugggucaacccuuuac

SEQ ID NO: 2292814 - RNA, 19 nt, Artificial Sequence
  Description of Artificial Sequence: Synthetic oligonucleotide
acuuagacagccagucugu

SEQ ID NO: 2292815 - RNA, 19 nt, Artificial Sequence
  Description of Artificial Sequence: Synthetic oligonucleotide
cauuguauucuaucauuua

SEQ ID NO: 2292816 - RNA, 19 nt, Artificial Sequence
  Description of Artificial Sequence: Synthetic oligonucleotide
acacguagaccugcaagug

SEQ ID NO: 2292817 - RNA, 19 nt, Artificial Sequence
  Description of Artificial Sequence: Synthetic oligonucleotide
ggacaacuucugcaaagcc

SEQ ID NO: 2292818 - RNA, 19 nt, Artificial Sequence
  Description of Artificial Sequence: Synthetic oligonucleotide
aagaagcaaaggauuucau

SEQ ID NO: 2292819 - RNA, 19 nt, Artificial Sequence
  Description of Artificial Sequence: Synthetic oligonucleotide
uccccauaccacuccacuc

SEQ ID NO: 2292820 - RNA, 19 nt, Artificial Sequence
  Description of Artificial Sequence: Synthetic oligonucleotide
ccaguuucgccuagugugg

SEQ ID NO: 2292821 - RNA, 19 nt, Artificial Sequence
  Description of Artificial Sequence: Synthetic oligonucleotide
agacggacgaguccaguuu

SEQ ID NO: 2292822 - RNA, 19 nt, Artificial Sequence
  Description of Artificial Sequence: Synthetic oligonucleotide
ucacggcagcucuugcccc

SEQ ID NO: 2292823 - RNA, 19 nt, Artificial Sequence
  Description of Artificial Sequence: Synthetic oligonucleotide
guggccggacgagagagag

SEQ ID NO: 2292824 - RNA, 19 nt, Artificial Sequence
  Description of Artificial Sequence: Synthetic oligonucleotide
acagucacggcagcucuug

SEQ ID NO: 2292825 - RNA, 19 nt, Artificial Sequence
  Description of Artificial Sequence: Synthetic oligonucleotide
aagauggccuuaccaucua

SEQ ID NO: 2292826 - RNA, 19 nt, Artificial Sequence
  Description of Artificial Sequence: Synthetic oligonucleotide
ugcaggaccgcaagugcuu

SEQ ID NO: 2292827 - RNA, 19 nt, Artificial Sequence
  Description of Artificial Sequence: Synthetic oligonucleotide
caacuccccauaccacucc

SEQ ID NO: 2292828 - RNA, 19 nt, Artificial Sequence
  Description of Artificial Sequence: Synthetic oligonucleotide
ggagucagggcccacccac

SEQ ID NO: 2292829 - RNA, 19 nt, Artificial Sequence
  Description of Artificial Sequence: Synthetic oligonucleotide
accaucuaauaaaauuaaa

SEQ ID NO: 2292830 - RNA, 19 nt, Artificial Sequence
  Description of Artificial Sequence: Synthetic oligonucleotide
cuggguucuuccccuugcc

SEQ ID NO: 2292831 - RNA, 19 nt, Artificial Sequence
  Description of Artificial Sequence: Synthetic oligonucleotide
aagcaaucauucgcuuaga

SEQ ID NO: 2292832 - RNA, 19 nt, Artificial Sequence
  Description of Artificial Sequence: Synthetic oligonucleotide
ggguguguaagaacagaag

SEQ ID NO: 2292833 - RNA, 19 nt, Artificial Sequence
  Description of Artificial Sequence: Synthetic oligonucleotide
aguuucgccuagugugggu

SEQ ID NO: 2292834 - RNA, 19 nt, Artificial Sequence
  Description of Artificial Sequence: Synthetic oligonucleotide
acaccugcauuguauucua

SEQ ID NO: 2292835 - RNA, 19 nt, Artificial Sequence
  Description of Artificial Sequence: Synthetic oligonucleotide
cacuccacucuaccacugc

SEQ ID NO: 2292836 - RNA, 19 nt, Artificial Sequence
  Description of Artificial Sequence: Synthetic oligonucleotide
acuuacagagagacaccug

SEQ ID NO: 2292837 - RNA, 19 nt, Artificial Sequence
  Description of Artificial Sequence: Synthetic oligonucleotide
aacuaaagaugaggacuua

SEQ ID NO: 2292838 - RNA, 19 nt, Artificial Sequence
  Description of Artificial Sequence: Synthetic oligonucleotide
uggagucagggcccaccca

SEQ ID NO: 2292839 - RNA, 19 nt, Artificial Sequence
  Description of Artificial Sequence: Synthetic oligonucleotide
ucuuuaccuucugggugug

SEQ ID NO: 2292840 - RNA, 19 nt, Artificial Sequence
  Description of Artificial Sequence: Synthetic oligonucleotide
guuucgccuaguguggguc

SEQ ID NO: 2292841 - RNA, 19 nt, Artificial Sequence
  Description of Artificial Sequence: Synthetic oligonucleotide
augugcguucaugcaggac

SEQ ID NO: 2292842 - RNA, 19 nt, Artificial Sequence
  Description of Artificial Sequence: Synthetic oligonucleotide
acuaaccaugcaacuaaau

SEQ ID NO: 2292843 - RNA, 19 nt, Artificial Sequence
  Description of Artificial Sequence: Synthetic oligonucleotide
gucagggcccacccacagg

SEQ ID NO: 2292844 - RNA, 19 nt, Artificial Sequence
  Description of Artificial Sequence: Synthetic oligonucleotide
ggacgaguccaguuucgcc

SEQ ID NO: 2292845 - RNA, 19 nt, Artificial Sequence
  Description of Artificial Sequence: Synthetic oligonucleotide
uguggccggacgagagaga

SEQ ID NO: 2292846 - RNA, 19 nt, Artificial Sequence
  Description of Artificial Sequence: Synthetic oligonucleotide
caguuucgccuaguguggg

SEQ ID NO: 2292847 - RNA, 19 nt, Artificial Sequence
  Description of Artificial Sequence: Synthetic oligonucleotide
uagaccugcaagugcucuu

SEQ ID NO: 2292848 - RNA, 19 nt, Artificial Sequence
  Description of Artificial Sequence: Synthetic oligonucleotide
gucaacccuuuacauugca

SEQ ID NO: 2292849 - RNA, 19 nt, Artificial Sequence
  Description of Artificial Sequence: Synthetic oligonucleotide
guauucuaucauuuauuuu

SEQ ID NO: 2292850 - RNA, 19 nt, Artificial Sequence
  Description of Artificial Sequence: Synthetic oligonucleotide
aggaccgcaagugcuuuga

SEQ ID NO: 2292851 - RNA, 19 nt, Artificial Sequence
  Description of Artificial Sequence: Synthetic oligonucleotide
uguugggcacaucccgcuu

SEQ ID NO: 2292852 - RNA, 19 nt, Artificial Sequence
  Description of Artificial Sequence: Synthetic oligonucleotide
ccugcaagugcucuuguca

SEQ ID NO: 2292853 - RNA, 19 nt, Artificial Sequence
  Description of Artificial Sequence: Synthetic oligonucleotide
gucucucuaagaccaguua

SEQ ID NO: 2292854 - RNA, 19 nt, Artificial Sequence
  Description of Artificial Sequence: Synthetic oligonucleotide
agaaccuaaggagggcuua

SEQ ID NO: 2292855 - RNA, 19 nt, Artificial Sequence
  Description of Artificial Sequence: Synthetic oligonucleotide
gccgccacacuccuccacg

SEQ ID NO: 2292856 - RNA, 19 nt, Artificial Sequence
  Description of Artificial Sequence: Synthetic oligonucleotide
acggacgaguccaguuucg

SEQ ID NO: 2292857 - RNA, 19 nt, Artificial Sequence
  Description of Artificial Sequence: Synthetic oligonucleotide
uagugugggucaacccuuu

SEQ ID NO: 2292858 - RNA, 19 nt, Artificial Sequence
  Description of Artificial Sequence: Synthetic oligonucleotide
cuccacgaucauguugggc

SEQ ID NO: 2292859 - RNA, 19 nt, Artificial Sequence
  Description of Artificial Sequence: Synthetic oligonucleotide
acuccccauaccacuccac

SEQ ID NO: 2292860 - RNA, 19 nt, Artificial Sequence
  Description of Artificial Sequence: Synthetic oligonucleotide
uuccccuugccgccacacu

SEQ ID NO: 2292861 - RNA, 19 nt, Artificial Sequence
  Description of Artificial Sequence: Synthetic oligonucleotide
acgaguccaguuucgccua

SEQ ID NO: 2292862 - RNA, 19 nt, Artificial Sequence
  Description of Artificial Sequence: Synthetic oligonucleotide
agaugaggacuuacagaga

SEQ ID NO: 2292863 - RNA, 19 nt, Artificial Sequence
  Description of Artificial Sequence: Synthetic oligonucleotide
cuaaaucagugcaaacauu

SEQ ID NO: 2292864 - RNA, 19 nt, Artificial Sequence
  Description of Artificial Sequence: Synthetic oligonucleotide
aaccuaaggagggcuuauu

SEQ ID NO: 2292865 - RNA, 19 nt, Artificial Sequence
  Description of Artificial Sequence: Synthetic oligonucleotide
uggccggacgagagagagc

SEQ ID NO: 2292866 - RNA, 19 nt, Artificial Sequence
  Description of Artificial Sequence: Synthetic oligonucleotide
ggacuuacagagagacacc

SEQ ID NO: 2292867 - RNA, 19 nt, Artificial Sequence
  Description of Artificial Sequence: Synthetic oligonucleotide
gaggacuuacagagagaca

SEQ ID NO: 2292868 - RNA, 19 nt, Artificial Sequence
  Description of Artificial Sequence: Synthetic oligonucleotide
cuggguguguaagaacaga

SEQ ID NO: 2292869 - RNA, 19 nt, Artificial Sequence
  Description of Artificial Sequence: Synthetic oligonucleotide
ccuaaggagggcuuauuaa

SEQ ID NO: 2292870 - RNA, 19 nt, Artificial Sequence
  Description of Artificial Sequence: Synthetic oligonucleotide
ggagccauguccagggaca

SEQ ID NO: 2292871 - RNA, 19 nt, Artificial Sequence
  Description of Artificial Sequence: Synthetic oligonucleotide
gcacuuggacauccacagg

SEQ ID NO: 2292872 - RNA, 19 nt, Artificial Sequence
  Description of Artificial Sequence: Synthetic oligonucleotide
acgaucauguugggcacau

SEQ ID NO: 2292873 - RNA, 19 nt, Artificial Sequence
  Description of Artificial Sequence: Synthetic oligonucleotide
ggacaacuguuggagucag

SEQ ID NO: 2292874 - RNA, 19 nt, Artificial Sequence
  Description of Artificial Sequence: Synthetic oligonucleotide
gauggccuuaccaucuaau

SEQ ID NO: 2292875 - RNA, 19 nt, Artificial Sequence
  Description of Artificial Sequence: Synthetic oligonucleotide
agagacggacgaguccagu

SEQ ID NO: 2292876 - RNA, 19 nt, Artificial Sequence
  Description of Artificial Sequence: Synthetic oligonucleotide
caguuaagcaacuccccau

SEQ ID NO: 2292877 - RNA, 19 nt, Artificial Sequence
  Description of Artificial Sequence: Synthetic oligonucleotide
uucgccuagugugggucaa

SEQ ID NO: 2292878 - RNA, 19 nt, Artificial Sequence
  Description of Artificial Sequence: Synthetic oligonucleotide
caggaccgcaagugcuuug

SEQ ID NO: 2292879 - RNA, 19 nt, Artificial Sequence
  Description of Artificial Sequence: Synthetic oligonucleotide
acgauguggccggacgaga

SEQ ID NO: 2292880 - RNA, 19 nt, Artificial Sequence
  Description of Artificial Sequence: Synthetic oligonucleotide
gagacggacgaguccaguu

SEQ ID NO: 2292881 - RNA, 19 nt, Artificial Sequence
  Description of Artificial Sequence: Synthetic oligonucleotide
gccuagugugggucaaccc

SEQ ID NO: 2292882 - RNA, 19 nt, Artificial Sequence
  Description of Artificial Sequence: Synthetic oligonucleotide
caugugcguucaugcagga

SEQ ID NO: 2292883 - RNA, 19 nt, Artificial Sequence
  Description of Artificial Sequence: Synthetic oligonucleotide
gggguuguuuagaacaucu

SEQ ID NO: 2292884 - RNA, 19 nt, Artificial Sequence
  Description of Artificial Sequence: Synthetic oligonucleotide
cuagugugggucaacccuu

SEQ ID NO: 2292885 - RNA, 19 nt, Artificial Sequence
  Description of Artificial Sequence: Synthetic oligonucleotide
cugcauuguauucuaucau

SEQ ID NO: 2292886 - RNA, 19 nt, Artificial Sequence
  Description of Artificial Sequence: Synthetic oligonucleotide
ggagggcuuauuaaauaaa

SEQ ID NO: 2292887 - RNA, 19 nt, Artificial Sequence
  Description of Artificial Sequence: Synthetic oligonucleotide
cucuugucaugugcguuca

SEQ ID NO: 2292888 - RNA, 19 nt, Artificial Sequence
  Description of Artificial Sequence: Synthetic oligonucleotide
cugcaagugcucuugucau

SEQ ID NO: 2292889 - RNA, 19 nt, Artificial Sequence
  Description of Artificial Sequence: Synthetic oligonucleotide
uuggacgauguggccggac

SEQ ID NO: 2292890 - RNA, 19 nt, Artificial Sequence
  Description of Artificial Sequence: Synthetic oligonucleotide
ccgcaagugcuuugagggg

SEQ ID NO: 2292891 - RNA, 19 nt, Artificial Sequence
  Description of Artificial Sequence: Synthetic oligonucleotide
agugugggucaacccuuua

SEQ ID NO: 2292892 - RNA, 19 nt, Artificial Sequence
  Description of Artificial Sequence: Synthetic oligonucleotide
ugcguucaugcaggaccgc

SEQ ID NO: 2292893 - RNA, 19 nt, Artificial Sequence
  Description of Artificial Sequence: Synthetic oligonucleotide
ggacgauguggccggacga

SEQ ID NO: 2292894 - RNA, 19 nt, Artificial Sequence
  Description of Artificial Sequence: Synthetic oligonucleotide
cauguccagggacaacugu

SEQ ID NO: 2292895 - RNA, 19 nt, Artificial Sequence
  Description of Artificial Sequence: Synthetic oligonucleotide
ggaccgcaagugcuuugag

SEQ ID NO: 2292896 - RNA, 19 nt, Artificial Sequence
  Description of Artificial Sequence: Synthetic oligonucleotide
ggauuucauuucaaguaua

SEQ ID NO: 2292897 - RNA, 19 nt, Artificial Sequence
  Description of Artificial Sequence: Synthetic oligonucleotide
guagaccugcaagugcucu

SEQ ID NO: 2292898 - RNA, 19 nt, Artificial Sequence
  Description of Artificial Sequence: Synthetic oligonucleotide
ccuagugugggucaacccu

SEQ ID NO: 2292899 - RNA, 19 nt, Artificial Sequence
  Description of Artificial Sequence: Synthetic oligonucleotide
acaucccgcuuggacgaug

SEQ ID NO: 2292900 - RNA, 19 nt, Artificial Sequence
  Description of Artificial Sequence: Synthetic oligonucleotide
ccacucuaccacugccucc

SEQ ID NO: 2292901 - RNA, 19 nt, Artificial Sequence
  Description of Artificial Sequence: Synthetic oligonucleotide
ggucaacccuuuacauugc

SEQ ID NO: 2292902 - RNA, 19 nt, Artificial Sequence
  Description of Artificial Sequence: Synthetic oligonucleotide
cgcuuagaaaagaagcaaa

SEQ ID NO: 2292903 - RNA, 19 nt, Artificial Sequence
  Description of Artificial Sequence: Synthetic oligonucleotide
cgcuuggacgauguggccg

SEQ ID NO: 2292904 - RNA, 19 nt, Artificial Sequence
  Description of Artificial Sequence: Synthetic oligonucleotide
gcaagugcucuugucaugu

SEQ ID NO: 2292905 - RNA, 19 nt, Artificial Sequence
  Description of Artificial Sequence: Synthetic oligonucleotide
uugccgccacacuccucca

SEQ ID NO: 2292906 - RNA, 19 nt, Artificial Sequence
  Description of Artificial Sequence: Synthetic oligonucleotide
cuccccauaccacuccacu

SEQ ID NO: 2292907 - RNA, 19 nt, Artificial Sequence
  Description of Artificial Sequence: Synthetic oligonucleotide
cagggacaacuucugcaaa

SEQ ID NO: 2292908 - RNA, 19 nt, Artificial Sequence
  Description of Artificial Sequence: Synthetic oligonucleotide
cacggcagcucuugcccca

SEQ ID NO: 2292909 - RNA, 19 nt, Artificial Sequence
  Description of Artificial Sequence: Synthetic oligonucleotide
gcaacuccccauaccacuc

SEQ ID NO: 2292910 - RNA, 19 nt, Artificial Sequence
  Description of Artificial Sequence: Synthetic oligonucleotide
aucccgcuuggacgaugug

SEQ ID NO: 2292911 - RNA, 19 nt, Artificial Sequence
  Description of Artificial Sequence: Synthetic oligonucleotide
ccgcuggccucuuugguuc

SEQ ID NO: 2292912 - RNA, 19 nt, Artificial Sequence
  Description of Artificial Sequence: Synthetic oligonucleotide
aguucacguggcacuugga

SEQ ID NO: 2292913 - RNA, 19 nt, Artificial Sequence
  Description of Artificial Sequence: Synthetic oligonucleotide
gaaccuaaggagggcuuau

SEQ ID NO: 2292914 - RNA, 19 nt, Artificial Sequence
  Description of Artificial Sequence: Synthetic oligonucleotide
ccauaccacuccacucuac

SEQ ID NO: 2292915 - RNA, 19 nt, Artificial Sequence
  Description of Artificial Sequence: Synthetic oligonucleotide
ggacagucacggcagcucu

SEQ ID NO: 2292916 - RNA, 19 nt, Artificial Sequence
  Description of Artificial Sequence: Synthetic oligonucleotide
ggccacuucuggacacacg

SEQ ID NO: 2292917 - RNA, 19 nt, Artificial Sequence
  Description of Artificial Sequence: Synthetic oligonucleotide
caucccgcuuggacgaugu

SEQ ID NO: 2292918 - RNA, 19 nt, Artificial Sequence
  Description of Artificial Sequence: Synthetic oligonucleotide
ucgccuagugugggucaac

SEQ ID NO: 2292919 - RNA, 19 nt, Artificial Sequence
  Description of Artificial Sequence: Synthetic oligonucleotide
ccacuccacucuaccacug

SEQ ID NO: 2292920 - RNA, 19 nt, Artificial Sequence
  Description of Artificial Sequence: Synthetic oligonucleotide
cuuugaggggcaggcaggu

SEQ ID NO: 2292921 - RNA, 19 nt, Artificial Sequence
  Description of Artificial Sequence: Synthetic oligonucleotide
gugagccagugaagagggc

SEQ ID NO: 2292922 - RNA, 19 nt, Artificial Sequence
  Description of Artificial Sequence: Synthetic oligonucleotide
cauaguucacguggcacuu

SEQ ID NO: 2292923 - RNA, 19 nt, Artificial Sequence
  Description of Artificial Sequence: Synthetic oligonucleotide
cagggacaacuguuggagu

SEQ ID NO: 2292924 - RNA, 19 nt, Artificial Sequence
  Description of Artificial Sequence: Synthetic oligonucleotide
gcguucaugcaggaccgca

SEQ ID NO: 2292925 - RNA, 19 nt, Artificial Sequence
  Description of Artificial Sequence: Synthetic oligonucleotide
caucuaccucauagaagau

SEQ ID NO: 2292926 - RNA, 19 nt, Artificial Sequence
  Description of Artificial Sequence: Synthetic oligonucleotide
cagaaccuaaggagggcuu

SEQ ID NO: 2292927 - RNA, 19 nt, Artificial Sequence
  Description of Artificial Sequence: Synthetic oligonucleotide
ggguuguuuagaacaucua

SEQ ID NO: 2292928 - RNA, 19 nt, Artificial Sequence
  Description of Artificial Sequence: Synthetic oligonucleotide
gccagugaagagggcagga

SEQ ID NO: 2292929 - RNA, 19 nt, Artificial Sequence
  Description of Artificial Sequence: Synthetic oligonucleotide
ggacacacguagaccugca

SEQ ID NO: 2292930 - RNA, 19 nt, Artificial Sequence
  Description of Artificial Sequence: Synthetic oligonucleotide
ggggaaguuguugguuuaa

SEQ ID NO: 2292931 - RNA, 19 nt, Artificial Sequence
  Description of Artificial Sequence: Synthetic oligonucleotide
caggagccauguccaggga

SEQ ID NO: 2292932 - RNA, 19 nt, Artificial Sequence
  Description of Artificial Sequence: Synthetic oligonucleotide
ccgcuuggacgauguggcc

SEQ ID NO: 2292933 - RNA, 19 nt, Artificial Sequence
  Description of Artificial Sequence: Synthetic oligonucleotide
ccucauagaagauggccuu

SEQ ID NO: 2292934 - RNA, 19 nt, Artificial Sequence
  Description of Artificial Sequence: Synthetic oligonucleotide
cgccuagugugggucaacc

SEQ ID NO: 2292935 - RNA, 19 nt, Artificial Sequence
  Description of Artificial Sequence: Synthetic oligonucleotide
gcaaagccacugaaaauuu

SEQ ID NO: 2292936 - RNA, 19 nt, Artificial Sequence
  Description of Artificial Sequence: Synthetic oligonucleotide
ccggucucucuaagaccag

SEQ ID NO: 2292937 - RNA, 19 nt, Artificial Sequence
  Description of Artificial Sequence: Synthetic oligonucleotide
cguagaccugcaagugcuc

SEQ ID NO: 2292938 - RNA, 19 nt, Artificial Sequence
  Description of Artificial Sequence: Synthetic oligonucleotide
guuguugguuuaaguuauu

SEQ ID NO: 2292939 - RNA, 19 nt, Artificial Sequence
  Description of Artificial Sequence: Synthetic oligonucleotide
ccuuaccaucuaauaaaau

SEQ ID NO: 2292940 - RNA, 19 nt, Artificial Sequence
  Description of Artificial Sequence: Synthetic oligonucleotide
cggacgaguccaguuucgc

SEQ ID NO: 2292941 - RNA, 19 nt, Artificial Sequence
  Description of Artificial Sequence: Synthetic oligonucleotide
ggucucucuaagaccaguu

SEQ ID NO: 2292942 - RNA, 19 nt, Artificial Sequence
  Description of Artificial Sequence: Synthetic oligonucleotide
acugauccgcuggccucuu

SEQ ID NO: 2292943 - RNA, 19 nt, Artificial Sequence
  Description of Artificial Sequence: Synthetic oligonucleotide
ggcccacccacagggacaa

SEQ ID NO: 2292944 - RNA, 19 nt, Artificial Sequence
  Description of Artificial Sequence: Synthetic oligonucleotide
cuuggacgauguggccgga

SEQ ID NO: 2292945 - RNA, 19 nt, Artificial Sequence
  Description of Artificial Sequence: Synthetic oligonucleotide
gacagucacggcagcucuu

SEQ ID NO: 2292946 - RNA, 19 nt, Artificial Sequence
  Description of Artificial Sequence: Synthetic oligonucleotide
cgaguccaguuucgccuag

SEQ ID NO: 2292947 - RNA, 19 nt, Artificial Sequence
  Description of Artificial Sequence: Synthetic oligonucleotide
caccugcauuguauucuau

SEQ ID NO: 2292948 - RNA, 19 nt, Artificial Sequence
  Description of Artificial Sequence: Synthetic oligonucleotide
cuuuaccuucugggugugu

SEQ ID NO: 2292949 - RNA, 19 nt, Artificial Sequence
  Description of Artificial Sequence: Synthetic oligonucleotide
cgcuggccucuuugguucc

SEQ ID NO: 2292950 - RNA, 19 nt, Artificial Sequence
  Description of Artificial Sequence: Synthetic oligonucleotide
cccauaccacuccacucua

SEQ ID NO: 2292951 - RNA, 19 nt, Artificial Sequence
  Description of Artificial Sequence: Synthetic oligonucleotide
ccccagggccacuucugga

SEQ ID NO: 2292952 - RNA, 19 nt, Artificial Sequence
  Description of Artificial Sequence: Synthetic oligonucleotide
ccgccacacuccuccacga

SEQ ID NO: 2292953 - RNA, 19 nt, Artificial Sequence
  Description of Artificial Sequence: Synthetic oligonucleotide
gcaggaccgcaagugcuuu

SEQ ID NO: 2292954 - RNA, 19 nt, Artificial Sequence
  Description of Artificial Sequence: Synthetic oligonucleotide
cgaucauguugggcacauc

SEQ ID NO: 2292955 - RNA, 19 nt, Artificial Sequence
  Description of Artificial Sequence: Synthetic oligonucleotide
cugauccgcuggccucuuu

SEQ ID NO: 2292956 - RNA, 19 nt, Artificial Sequence
  Description of Artificial Sequence: Synthetic oligonucleotide
cccuugccgccacacuccu

SEQ ID NO: 2292957 - RNA, 19 nt, Artificial Sequence
  Description of Artificial Sequence: Synthetic oligonucleotide
cacaucccgcuuggacgau

SEQ ID NO: 2292958 - RNA, 19 nt, Artificial Sequence
  Description of Artificial Sequence: Synthetic oligonucleotide
cggucucucuaagaccagu

SEQ ID NO: 2292959 - RNA, 19 nt, Artificial Sequence
  Description of Artificial Sequence: Synthetic oligonucleotide
ggccacucaagggguuguu

SEQ ID NO: 2292960 - RNA, 19 nt, Artificial Sequence
  Description of Artificial Sequence: Synthetic oligonucleotide
aaaaccaaaauguuuauuc

SEQ ID NO: 2292961 - RNA, 19 nt, Artificial Sequence
  Description of Artificial Sequence: Synthetic oligonucleotide
aagacugggacauuaaggc

SEQ ID NO: 2292962 - RNA, 19 nt, Artificial Sequence
  Description of Artificial Sequence: Synthetic oligonucleotide
ucuaguuugaaaaggaggg

SEQ ID NO: 2292963 - RNA, 19 nt, Artificial Sequence
  Description of Artificial Sequence: Synthetic oligonucleotide
aauccaaucauuuuaagua

SEQ ID NO: 2292964 - RNA, 19 nt, Artificial Sequence
  Description of Artificial Sequence: Synthetic oligonucleotide
uaacucauaguaaagacug

SEQ ID NO: 2292965 - RNA, 19 nt, Artificial Sequence
  Description of Artificial Sequence: Synthetic oligonucleotide
ucuguuucgauccagagaa

SEQ ID NO: 2292966 - RNA, 19 nt, Artificial Sequence
  Description of Artificial Sequence: Synthetic oligonucleotide
aguaacucauaguaaagac

SEQ ID NO: 2292967 - RNA, 19 nt, Artificial Sequence
  Description of Artificial Sequence: Synthetic oligonucleotide
uuuuaguuucuuaaaacca

SEQ ID NO: 2292968 - RNA, 19 nt, Artificial Sequence
  Description of Artificial Sequence: Synthetic oligonucleotide
aucauaggaaagcagaauc

SEQ ID NO: 2292969 - RNA, 19 nt, Artificial Sequence
  Description of Artificial Sequence: Synthetic oligonucleotide
aaccaaaauguuuauucuc

SEQ ID NO: 2292970 - RNA, 19 nt, Artificial Sequence
  Description of Artificial Sequence: Synthetic oligonucleotide
aucacccuacaauagaacc

SEQ ID NO: 2292971 - RNA, 19 nt, Artificial Sequence
  Description of Artificial Sequence: Synthetic oligonucleotide
ugaguugacccuuagaaca

SEQ ID NO: 2292972 - RNA, 19 nt, Artificial Sequence
  Description of Artificial Sequence: Synthetic oligonucleotide
ucuauugcuacuuuuccag

SEQ ID NO: 2292973 - RNA, 19 nt, Artificial Sequence
  Description of Artificial Sequence: Synthetic oligonucleotide
uaaguaaggauuucuaaca

SEQ ID NO: 2292974 - RNA, 19 nt, Artificial Sequence
  Description of Artificial Sequence: Synthetic oligonucleotide
aaaacaagacccaguaggc

SEQ ID NO: 2292975 - RNA, 19 nt, Artificial Sequence
  Description of Artificial Sequence: Synthetic oligonucleotide
aacaagacccaguaggcag

SEQ ID NO: 2292976 - RNA, 19 nt, Artificial Sequence
  Description of Artificial Sequence: Synthetic oligonucleotide
cuuuaaaaggaaaucuacc

SEQ ID NO: 2292977 - RNA, 19 nt, Artificial Sequence
  Description of Artificial Sequence: Synthetic oligonucleotide
aaaggauagauggagcuuc

SEQ ID NO: 2292978 - RNA, 19 nt, Artificial Sequence
  Description of Artificial Sequence: Synthetic oligonucleotide
acauuaaggcguuaacacc

SEQ ID NO: 2292979 - RNA, 19 nt, Artificial Sequence
  Description of Artificial Sequence: Synthetic oligonucleotide
uagggguuuaaacaaaacc

SEQ ID NO: 2292980 - RNA, 19 nt, Artificial Sequence
  Description of Artificial Sequence: Synthetic oligonucleotide
aaagacugggacauuaagg

SEQ ID NO: 2292981 - RNA, 19 nt, Artificial Sequence
  Description of Artificial Sequence: Synthetic oligonucleotide
auuagaaucacccuacaau

SEQ ID NO: 2292982 - RNA, 19 nt, Artificial Sequence
  Description of Artificial Sequence: Synthetic oligonucleotide
ugaaguaacucauaguaaa

SEQ ID NO: 2292983 - RNA, 19 nt, Artificial Sequence
  Description of Artificial Sequence: Synthetic oligonucleotide
uacaauagaacccguaccu

SEQ ID NO: 2292984 - RNA, 19 nt, Artificial Sequence
  Description of Artificial Sequence: Synthetic oligonucleotide
acuguugccaaggacaacc

SEQ ID NO: 2292985 - RNA, 19 nt, Artificial Sequence
  Description of Artificial Sequence: Synthetic oligonucleotide
aagcccuauacucagggag

SEQ ID NO: 2292986 - RNA, 19 nt, Artificial Sequence
  Description of Artificial Sequence: Synthetic oligonucleotide
uuuaguuucuuaaaaccaa

SEQ ID NO: 2292987 - RNA, 19 nt, Artificial Sequence
  Description of Artificial Sequence: Synthetic oligonucleotide
ucauaguaaagacugggac

SEQ ID NO: 2292988 - RNA, 19 nt, Artificial Sequence
  Description of Artificial Sequence: Synthetic oligonucleotide
agaguuagggguuuaaaca

SEQ ID NO: 2292989 - RNA, 19 nt, Artificial Sequence
  Description of Artificial Sequence: Synthetic oligonucleotide
cucuaguuugaaaaggagg

SEQ ID NO: 2292990 - RNA, 19 nt, Artificial Sequence
  Description of Artificial Sequence: Synthetic oligonucleotide
ggacucaaaggauagaugg

SEQ ID NO: 2292991 - RNA, 19 nt, Artificial Sequence
  Description of Artificial Sequence: Synthetic oligonucleotide
aaggcguuaacaccagagg

SEQ ID NO: 2292992 - RNA, 19 nt, Artificial Sequence
  Description of Artificial Sequence: Synthetic oligonucleotide
cagagaacaaaacaagacc

SEQ ID NO: 2292993 - RNA, 19 nt, Artificial Sequence
  Description of Artificial Sequence: Synthetic oligonucleotide
uauugcuacuuuuccaggg

SEQ ID NO: 2292994 - RNA, 19 nt, Artificial Sequence
  Description of Artificial Sequence: Synthetic oligonucleotide
ucuaacaauuagaaucacc

SEQ ID NO: 2292995 - RNA, 19 nt, Artificial Sequence
  Description of Artificial Sequence: Synthetic oligonucleotide
auagauggagcuucuauug

SEQ ID NO: 2292996 - RNA, 19 nt, Artificial Sequence
  Description of Artificial Sequence: Synthetic oligonucleotide
uaaggcguuaacaccagag

SEQ ID NO: 2292997 - RNA, 19 nt, Artificial Sequence
  Description of Artificial Sequence: Synthetic oligonucleotide
uauucucuaguuugaaaag

SEQ ID NO: 2292998 - RNA, 19 nt, Artificial Sequence
  Description of Artificial Sequence: Synthetic oligonucleotide
uuagaaucacccuacaaua

SEQ ID NO: 2292999 - RNA, 19 nt, Artificial Sequence
  Description of Artificial Sequence: Synthetic oligonucleotide
uucuggugcaucaagaguc

SEQ ID NO: 2293000 - RNA, 19 nt, Artificial Sequence
  Description of Artificial Sequence: Synthetic oligonucleotide
uuuaaguaaggauuucuaa

SEQ ID NO: 2293001 - RNA, 19 nt, Artificial Sequence
  Description of Artificial Sequence: Synthetic oligonucleotide
cuagcucaaagccaggucc

SEQ ID NO: 2293002 - RNA, 19 nt, Artificial Sequence
  Description of Artificial Sequence: Synthetic oligonucleotide
cauucuaaaaucagcuccc

SEQ ID NO: 2293003 - RNA, 19 nt, Artificial Sequence
  Description of Artificial Sequence: Synthetic oligonucleotide
ucaaaggauagauggagcu

SEQ ID NO: 2293004 - RNA, 19 nt, Artificial Sequence
  Description of Artificial Sequence: Synthetic oligonucleotide
acuuuuccaggguacaggg

SEQ ID NO: 2293005 - RNA, 19 nt, Artificial Sequence
  Description of Artificial Sequence: Synthetic oligonucleotide
acaauuagaaucacccuac

SEQ ID NO: 2293006 - RNA, 19 nt, Artificial Sequence
  Description of Artificial Sequence: Synthetic oligonucleotide
uccaaucauuuuaaguaag

SEQ ID NO: 2293007 - RNA, 19 nt, Artificial Sequence
  Description of Artificial Sequence: Synthetic oligonucleotide
uugaaaaggaggguaaaug

SEQ ID NO: 2293008 - RNA, 19 nt, Artificial Sequence
  Description of Artificial Sequence: Synthetic oligonucleotide
uagaaucacccuacaauag

SEQ ID NO: 2293009 - RNA, 19 nt, Artificial Sequence
  Description of Artificial Sequence: Synthetic oligonucleotide
guaggcagaaaucauagga

SEQ ID NO: 2293010 - RNA, 19 nt, Artificial Sequence
  Description of Artificial Sequence: Synthetic oligonucleotide
ucacccuacaauagaaccc

SEQ ID NO: 2293011 - RNA, 19 nt, Artificial Sequence
  Description of Artificial Sequence: Synthetic oligonucleotide
aauuagaaucacccuacaa

SEQ ID NO: 2293012 - RNA, 19 nt, Artificial Sequence
  Description of Artificial Sequence: Synthetic oligonucleotide
agaucacucacuccaccgc

SEQ ID NO: 2293013 - RNA, 19 nt, Artificial Sequence
  Description of Artificial Sequence: Synthetic oligonucleotide
gaguugaggagaguuaggg

SEQ ID NO: 2293014 - RNA, 19 nt, Artificial Sequence
  Description of Artificial Sequence: Synthetic oligonucleotide
uguuuauucucuaguuuga

SEQ ID NO: 2293015 - RNA, 19 nt, Artificial Sequence
  Description of Artificial Sequence: Synthetic oligonucleotide
gagaguuagggguuuaaac

SEQ ID NO: 2293016 - RNA, 19 nt, Artificial Sequence
  Description of Artificial Sequence: Synthetic oligonucleotide
guaagagugccccagcacc

SEQ ID NO: 2293017 - RNA, 19 nt, Artificial Sequence
  Description of Artificial Sequence: Synthetic oligonucleotide
aaaccccauuccuacacag

SEQ ID NO: 2293018 - RNA, 19 nt, Artificial Sequence
  Description of Artificial Sequence: Synthetic oligonucleotide
aaguaacucauaguaaaga

SEQ ID NO: 2293019 - RNA, 19 nt, Artificial Sequence
  Description of Artificial Sequence: Synthetic oligonucleotide
aacguaggcaccccacccg

SEQ ID NO: 2293020 - RNA, 19 nt, Artificial Sequence
  Description of Artificial Sequence: Synthetic oligonucleotide
aaaaucagcucccugccuu

SEQ ID NO: 2293021 - RNA, 19 nt, Artificial Sequence
  Description of Artificial Sequence: Synthetic oligonucleotide
cuacaauagaacccguacc

SEQ ID NO: 2293022 - RNA, 19 nt, Artificial Sequence
  Description of Artificial Sequence: Synthetic oligonucleotide
ugacccuuagaacacccag

SEQ ID NO: 2293023 - RNA, 19 nt, Artificial Sequence
  Description of Artificial Sequence: Synthetic oligonucleotide
ucuggugcaucaagagucg

SEQ ID NO: 2293024 - RNA, 19 nt, Artificial Sequence
  Description of Artificial Sequence: Synthetic oligonucleotide
agggguuuaaacaaaacca

SEQ ID NO: 2293025 - RNA, 19 nt, Artificial Sequence
  Description of Artificial Sequence: Synthetic oligonucleotide
gcauucuaaaaucagcucc

SEQ ID NO: 2293026 - RNA, 19 nt, Artificial Sequence
  Description of Artificial Sequence: Synthetic oligonucleotide
cauuaaggcguuaacacca

SEQ ID NO: 2293027 - RNA, 19 nt, Artificial Sequence
  Description of Artificial Sequence: Synthetic oligonucleotide
aguugaggagaguuagggg

SEQ ID NO: 2293028 - RNA, 19 nt, Artificial Sequence
  Description of Artificial Sequence: Synthetic oligonucleotide
acucaaaggauagauggag

SEQ ID NO: 2293029 - RNA, 19 nt, Artificial Sequence
  Description of Artificial Sequence: Synthetic oligonucleotide
gaaguaacucauaguaaag

SEQ ID NO: 2293030 - RNA, 19 nt, Artificial Sequence
  Description of Artificial Sequence: Synthetic oligonucleotide
aaaugaccugaaguaacuc

SEQ ID NO: 2293031 - RNA, 19 nt, Artificial Sequence
  Description of Artificial Sequence: Synthetic oligonucleotide
aaucacccuacaauagaac

SEQ ID NO: 2293032 - RNA, 19 nt, Artificial Sequence
  Description of Artificial Sequence: Synthetic oligonucleotide
cuagccgaggacucaaagg

SEQ ID NO: 2293033 - RNA, 19 nt, Artificial Sequence
  Description of Artificial Sequence: Synthetic oligonucleotide
cauaguaaagacugggaca

SEQ ID NO: 2293034 - RNA, 19 nt, Artificial Sequence
  Description of Artificial Sequence: Synthetic oligonucleotide
aaaaugaccugaaguaacu

SEQ ID NO: 2293035 - RNA, 19 nt, Artificial Sequence
  Description of Artificial Sequence: Synthetic oligonucleotide
uucuguuucgauccagaga

SEQ ID NO: 2293036 - RNA, 19 nt, Artificial Sequence
  Description of Artificial Sequence: Synthetic oligonucleotide
uuuauucucuaguuugaaa

SEQ ID NO: 2293037 - RNA, 19 nt, Artificial Sequence
  Description of Artificial Sequence: Synthetic oligonucleotide
agaaucacccuacaauaga

SEQ ID NO: 2293038 - RNA, 19 nt, Artificial Sequence
  Description of Artificial Sequence: Synthetic oligonucleotide
auuuuaaguaaggauuucu

SEQ ID NO: 2293039 - RNA, 19 nt, Artificial Sequence
  Description of Artificial Sequence: Synthetic oligonucleotide
gauggaguggcucccuucc

SEQ ID NO: 2293040 - RNA, 19 nt, Artificial Sequence
  Description of Artificial Sequence: Synthetic oligonucleotide
aggacaaccaggccuguuc

SEQ ID NO: 2293041 - RNA, 19 nt, Artificial Sequence
  Description of Artificial Sequence: Synthetic oligonucleotide
acaaccaggccuguucucc

SEQ ID NO: 2293042 - RNA, 19 nt, Artificial Sequence
  Description of Artificial Sequence: Synthetic oligonucleotide
accccauuccuacacagag

SEQ ID NO: 2293043 - RNA, 19 nt, Artificial Sequence
  Description of Artificial Sequence: Synthetic oligonucleotide
uaggaaagcagaauccaau

SEQ ID NO: 2293044 - RNA, 19 nt, Artificial Sequence
  Description of Artificial Sequence: Synthetic oligonucleotide
ucuagccgaggacucaaag

SEQ ID NO: 2293045 - RNA, 19 nt, Artificial Sequence
  Description of Artificial Sequence: Synthetic oligonucleotide
uguuucgauccagagaaca

SEQ ID NO: 2293046 - RNA, 19 nt, Artificial Sequence
  Description of Artificial Sequence: Synthetic oligonucleotide
aacccucagcaucuguggg

SEQ ID NO: 2293047 - RNA, 19 nt, Artificial Sequence
  Description of Artificial Sequence: Synthetic oligonucleotide
agacugggacauuaaggcg

SEQ ID NO: 2293048 - RNA, 19 nt, Artificial Sequence
  Description of Artificial Sequence: Synthetic oligonucleotide
acuggucgcuccucuagcc

SEQ ID NO: 2293049 - RNA, 19 nt, Artificial Sequence
  Description of Artificial Sequence: Synthetic oligonucleotide
agcaucaacguaggcaccc

SEQ ID NO: 2293050 - RNA, 19 nt, Artificial Sequence
  Description of Artificial Sequence: Synthetic oligonucleotide
gucgucaaaggucugacca

SEQ ID NO: 2293051 - RNA, 19 nt, Artificial Sequence
  Description of Artificial Sequence: Synthetic oligonucleotide
uuaaaaccaaaauguuuau

SEQ ID NO: 2293052 - RNA, 19 nt, Artificial Sequence
  Description of Artificial Sequence: Synthetic oligonucleotide
uucgauccagagaacaaaa

SEQ ID NO: 2293053 - RNA, 19 nt, Artificial Sequence
  Description of Artificial Sequence: Synthetic oligonucleotide
gaguuagggguuuaaacaa

SEQ ID NO: 2293054 - RNA, 19 nt, Artificial Sequence
  Description of Artificial Sequence: Synthetic oligonucleotide
agaauccaaucauuuuaag

SEQ ID NO: 2293055 - RNA, 19 nt, Artificial Sequence
  Description of Artificial Sequence: Synthetic oligonucleotide
gaauccaaucauuuuaagu

SEQ ID NO: 2293056 - RNA, 19 nt, Artificial Sequence
  Description of Artificial Sequence: Synthetic oligonucleotide
uucuaaaaucagcucccug

SEQ ID NO: 2293057 - RNA, 19 nt, Artificial Sequence
  Description of Artificial Sequence: Synthetic oligonucleotide
uuagggguuuaaacaaaac

SEQ ID NO: 2293058 - RNA, 19 nt, Artificial Sequence
  Description of Artificial Sequence: Synthetic oligonucleotide
cuauugcuacuuuuccagg

SEQ ID NO: 2293059 - RNA, 19 nt, Artificial Sequence
  Description of Artificial Sequence: Synthetic oligonucleotide
aauagaacccguaccucug

SEQ ID NO: 2293060 - RNA, 19 nt, Artificial Sequence
  Description of Artificial Sequence: Synthetic oligonucleotide
gaucacucacuccaccgcc

SEQ ID NO: 2293061 - RNA, 19 nt, Artificial Sequence
  Description of Artificial Sequence: Synthetic oligonucleotide
ucaacguaggcaccccacc

SEQ ID NO: 2293062 - RNA, 19 nt, Artificial Sequence
  Description of Artificial Sequence: Synthetic oligonucleotide
auggagcuucuauugcuac

SEQ ID NO: 2293063 - RNA, 19 nt, Artificial Sequence
  Description of Artificial Sequence: Synthetic oligonucleotide
aaggaggguaaaugguugu

SEQ ID NO: 2293064 - RNA, 19 nt, Artificial Sequence
  Description of Artificial Sequence: Synthetic oligonucleotide
aggcguuaacaccagagga

SEQ ID NO: 2293065 - RNA, 19 nt, Artificial Sequence
  Description of Artificial Sequence: Synthetic oligonucleotide
auccaaucauuuuaaguaa

SEQ ID NO: 2293066 - RNA, 19 nt, Artificial Sequence
  Description of Artificial Sequence: Synthetic oligonucleotide
uuaacaccagaggauggag

SEQ ID NO: 2293067 - RNA, 19 nt, Artificial Sequence
  Description of Artificial Sequence: Synthetic oligonucleotide
cacccuacaauagaacccg

SEQ ID NO: 2293068 - RNA, 19 nt, Artificial Sequence
  Description of Artificial Sequence: Synthetic oligonucleotide
guugaggagaguuaggggu

SEQ ID NO: 2293069 - RNA, 19 nt, Artificial Sequence
  Description of Artificial Sequence: Synthetic oligonucleotide
auugcuacuuuuccagggu

SEQ ID NO: 2293070 - RNA, 19 nt, Artificial Sequence
  Description of Artificial Sequence: Synthetic oligonucleotide
agacccaguaggcagaaau

SEQ ID NO: 2293071 - RNA, 19 nt, Artificial Sequence
  Description of Artificial Sequence: Synthetic oligonucleotide
auagaacccguaccucugg

SEQ ID NO: 2293072 - RNA, 19 nt, Artificial Sequence
  Description of Artificial Sequence: Synthetic oligonucleotide
aguaaggauuucuaacaau

SEQ ID NO: 2293073 - RNA, 19 nt, Artificial Sequence
  Description of Artificial Sequence: Synthetic oligonucleotide
aggauuucuaacaauuaga

SEQ ID NO: 2293074 - RNA, 19 nt, Artificial Sequence
  Description of Artificial Sequence: Synthetic oligonucleotide
aacucauaguaaagacugg

SEQ ID NO: 2293075 - RNA, 19 nt, Artificial Sequence
  Description of Artificial Sequence: Synthetic oligonucleotide
ucaagagucgauccucguc

SEQ ID NO: 2293076 - RNA, 19 nt, Artificial Sequence
  Description of Artificial Sequence: Synthetic oligonucleotide
ugcauucuaaaaucagcuc

SEQ ID NO: 2293077 - RNA, 19 nt, Artificial Sequence
  Description of Artificial Sequence: Synthetic oligonucleotide
gaccggcuagcucaaagcc

SEQ ID NO: 2293078 - RNA, 19 nt, Artificial Sequence
  Description of Artificial Sequence: Synthetic oligonucleotide
uuggggaaaccccauuccu

SEQ ID NO: 2293079 - RNA, 19 nt, Artificial Sequence
  Description of Artificial Sequence: Synthetic oligonucleotide
uagaacccguaccucuggg

SEQ ID NO: 2293080 - RNA, 19 nt, Artificial Sequence
  Description of Artificial Sequence: Synthetic oligonucleotide
agaacccguaccucugggg

SEQ ID NO: 2293081 - RNA, 19 nt, Artificial Sequence
  Description of Artificial Sequence: Synthetic oligonucleotide
ugcuacuuuuccaggguac

SEQ ID NO: 2293082 - RNA, 19 nt, Artificial Sequence
  Description of Artificial Sequence: Synthetic oligonucleotide
aaacaagacccaguaggca

SEQ ID NO: 2293083 - RNA, 19 nt, Artificial Sequence
  Description of Artificial Sequence: Synthetic oligonucleotide
uaaaaucagcucccugccu

SEQ ID NO: 2293084 - RNA, 19 nt, Artificial Sequence
  Description of Artificial Sequence: Synthetic oligonucleotide
cagucaaacccucagcauc

SEQ ID NO: 2293085 - RNA, 19 nt, Artificial Sequence
  Description of Artificial Sequence: Synthetic oligonucleotide
uuuccaggguacagggcag

SEQ ID NO: 2293086 - RNA, 19 nt, Artificial Sequence
  Description of Artificial Sequence: Synthetic oligonucleotide
uuugaaaaggaggguaaau

SEQ ID NO: 2293087 - RNA, 19 nt, Artificial Sequence
  Description of Artificial Sequence: Synthetic oligonucleotide
gcagcaucaacguaggcac

SEQ ID NO: 2293088 - RNA, 19 nt, Artificial Sequence
  Description of Artificial Sequence: Synthetic oligonucleotide
ggaagcccuauacucaggg

SEQ ID NO: 2293089 - RNA, 19 nt, Artificial Sequence
  Description of Artificial Sequence: Synthetic oligonucleotide
cagaggauggaguggcucc

SEQ ID NO: 2293090 - RNA, 19 nt, Artificial Sequence
  Description of Artificial Sequence: Synthetic oligonucleotide
guucuguuucgauccagag

SEQ ID NO: 2293091 - RNA, 19 nt, Artificial Sequence
  Description of Artificial Sequence: Synthetic oligonucleotide
aaugguuguucuguuucga

SEQ ID NO: 2293092 - RNA, 19 nt, Artificial Sequence
  Description of Artificial Sequence: Synthetic oligonucleotide
acaauagaacccguaccuc

SEQ ID NO: 2293093 - RNA, 19 nt, Artificial Sequence
  Description of Artificial Sequence: Synthetic oligonucleotide
gcagaaaucauaggaaagc

SEQ ID NO: 2293094 - RNA, 19 nt, Artificial Sequence
  Description of Artificial Sequence: Synthetic oligonucleotide
ucgauccagagaacaaaac

SEQ ID NO: 2293095 - RNA, 19 nt, Artificial Sequence
  Description of Artificial Sequence: Synthetic oligonucleotide
ccagagaacaaaacaagac

SEQ ID NO: 2293096 - RNA, 19 nt, Artificial Sequence
  Description of Artificial Sequence: Synthetic oligonucleotide
cuacagucaaacccucagc

SEQ ID NO: 2293097 - RNA, 19 nt, Artificial Sequence
  Description of Artificial Sequence: Synthetic oligonucleotide
uuucgauccagagaacaaa

SEQ ID NO: 2293098 - RNA, 19 nt, Artificial Sequence
  Description of Artificial Sequence: Synthetic oligonucleotide
ucgauccucgucgucaaag

SEQ ID NO: 2293099 - RNA, 19 nt, Artificial Sequence
  Description of Artificial Sequence: Synthetic oligonucleotide
ucuuucccagaacuccuga

SEQ ID NO: 2293100 - RNA, 19 nt, Artificial Sequence
  Description of Artificial Sequence: Synthetic oligonucleotide
cccauuccuacacagagcc

SEQ ID NO: 2293101 - RNA, 19 nt, Artificial Sequence
  Description of Artificial Sequence: Synthetic oligonucleotide
aguugacccuuagaacacc

SEQ ID NO: 2293102 - RNA, 19 nt, Artificial Sequence
  Description of Artificial Sequence: Synthetic oligonucleotide
aaagcagaauccaaucauu

SEQ ID NO: 2293103 - RNA, 19 nt, Artificial Sequence
  Description of Artificial Sequence: Synthetic oligonucleotide
agggcagucugaguugacc

SEQ ID NO: 2293104 - RNA, 19 nt, Artificial Sequence
  Description of Artificial Sequence: Synthetic oligonucleotide
ugguuguucuguuucgauc

SEQ ID NO: 2293105 - RNA, 19 nt, Artificial Sequence
  Description of Artificial Sequence: Synthetic oligonucleotide
gaugugacucuuccgaugu

SEQ ID NO: 2293106 - RNA, 19 nt, Artificial Sequence
  Description of Artificial Sequence: Synthetic oligonucleotide
ugugggcuagucuuuccca

SEQ ID NO: 2293107 - RNA, 19 nt, Artificial Sequence
  Description of Artificial Sequence: Synthetic oligonucleotide
cucauaguaaagacuggga

SEQ ID NO: 2293108 - RNA, 19 nt, Artificial Sequence
  Description of Artificial Sequence: Synthetic oligonucleotide
aguaaagacugggacauua

SEQ ID NO: 2293109 - RNA, 19 nt, Artificial Sequence
  Description of Artificial Sequence: Synthetic oligonucleotide
cauuccuacacagagccca

SEQ ID NO: 2293110 - RNA, 19 nt, Artificial Sequence
  Description of Artificial Sequence: Synthetic oligonucleotide
uacagggcagucugaguug

SEQ ID NO: 2293111 - RNA, 19 nt, Artificial Sequence
  Description of Artificial Sequence: Synthetic oligonucleotide
gugcaucaagagucgaucc

SEQ ID NO: 2293112 - RNA, 19 nt, Artificial Sequence
  Description of Artificial Sequence: Synthetic oligonucleotide
ugggauccccaccuguccc

SEQ ID NO: 2293113 - RNA, 19 nt, Artificial Sequence
  Description of Artificial Sequence: Synthetic oligonucleotide
ccuauacucagggagagag

SEQ ID NO: 2293114 - RNA, 19 nt, Artificial Sequence
  Description of Artificial Sequence: Synthetic oligonucleotide
aagagucgauccucgucgu

SEQ ID NO: 2293115 - RNA, 19 nt, Artificial Sequence
  Description of Artificial Sequence: Synthetic oligonucleotide
gcucccuucccacuggucg

SEQ ID NO: 2293116 - RNA, 19 nt, Artificial Sequence
  Description of Artificial Sequence: Synthetic oligonucleotide
gauagauggagcuucuauu

SEQ ID NO: 2293117 - RNA, 19 nt, Artificial Sequence
  Description of Artificial Sequence: Synthetic oligonucleotide
caaucauuuuaaguaagga

SEQ ID NO: 2293118 - RNA, 19 nt, Artificial Sequence
  Description of Artificial Sequence: Synthetic oligonucleotide
agcccagaucacucacucc

SEQ ID NO: 2293119 - RNA, 19 nt, Artificial Sequence
  Description of Artificial Sequence: Synthetic oligonucleotide
caacguaggcaccccaccc

SEQ ID NO: 2293120 - RNA, 19 nt, Artificial Sequence
  Description of Artificial Sequence: Synthetic oligonucleotide
aguggcucccuucccacug

SEQ ID NO: 2293121 - RNA, 19 nt, Artificial Sequence
  Description of Artificial Sequence: Synthetic oligonucleotide
accugaaguaacucauagu

SEQ ID NO: 2293122 - RNA, 19 nt, Artificial Sequence
  Description of Artificial Sequence: Synthetic oligonucleotide
aaucuacccaggaccuuuc

SEQ ID NO: 2293123 - RNA, 19 nt, Artificial Sequence
  Description of Artificial Sequence: Synthetic oligonucleotide
uuagaacacccagcugggg

SEQ ID NO: 2293124 - RNA, 19 nt, Artificial Sequence
  Description of Artificial Sequence: Synthetic oligonucleotide
ccuacaauagaacccguac

SEQ ID NO: 2293125 - RNA, 19 nt, Artificial Sequence
  Description of Artificial Sequence: Synthetic oligonucleotide
uccuacacagagcccagau

SEQ ID NO: 2293126 - RNA, 19 nt, Artificial Sequence
  Description of Artificial Sequence: Synthetic oligonucleotide
cauaggaaagcagaaucca

SEQ ID NO: 2293127 - RNA, 19 nt, Artificial Sequence
  Description of Artificial Sequence: Synthetic oligonucleotide
gaaucacccuacaauagaa

SEQ ID NO: 2293128 - RNA, 19 nt, Artificial Sequence
  Description of Artificial Sequence: Synthetic oligonucleotide
uugaggagaguuagggguu

SEQ ID NO: 2293129 - RNA, 19 nt, Artificial Sequence
  Description of Artificial Sequence: Synthetic oligonucleotide
acguaggcaccccacccgg

SEQ ID NO: 2293130 - RNA, 19 nt, Artificial Sequence
  Description of Artificial Sequence: Synthetic oligonucleotide
ggcaucgugcuucuucugg

SEQ ID NO: 2293131 - RNA, 19 nt, Artificial Sequence
  Description of Artificial Sequence: Synthetic oligonucleotide
ucugggauccccaccuguc

SEQ ID NO: 2293132 - RNA, 19 nt, Artificial Sequence
  Description of Artificial Sequence: Synthetic oligonucleotide
ccuggaaacuuuaaaagga

SEQ ID NO: 2293133 - RNA, 19 nt, Artificial Sequence
  Description of Artificial Sequence: Synthetic oligonucleotide
uuaaggcguuaacaccaga

SEQ ID NO: 2293134 - RNA, 19 nt, Artificial Sequence
  Description of Artificial Sequence: Synthetic oligonucleotide
gaaggcgccgucccggaug

SEQ ID NO: 2293135 - RNA, 19 nt, Artificial Sequence
  Description of Artificial Sequence: Synthetic oligonucleotide
ucgucaaaggucugaccac

SEQ ID NO: 2293136 - RNA, 19 nt, Artificial Sequence
  Description of Artificial Sequence: Synthetic oligonucleotide
aagcagaauccaaucauuu

SEQ ID NO: 2293137 - RNA, 19 nt, Artificial Sequence
  Description of Artificial Sequence: Synthetic oligonucleotide
cagaauccaaucauuuuaa

SEQ ID NO: 2293138 - RNA, 19 nt, Artificial Sequence
  Description of Artificial Sequence: Synthetic oligonucleotide
ggaaagcagaauccaauca

SEQ ID NO: 2293139 - RNA, 19 nt, Artificial Sequence
  Description of Artificial Sequence: Synthetic oligonucleotide
aucaacguaggcaccccac

SEQ ID NO: 2293140 - RNA, 19 nt, Artificial Sequence
  Description of Artificial Sequence: Synthetic oligonucleotide
ccugaaguaacucauagua

SEQ ID NO: 2293141 - RNA, 19 nt, Artificial Sequence
  Description of Artificial Sequence: Synthetic oligonucleotide
acccaguaggcagaaauca

SEQ ID NO: 2293142 - RNA, 19 nt, Artificial Sequence
  Description of Artificial Sequence: Synthetic oligonucleotide
gaggguaaaugguuguucu

SEQ ID NO: 2293143 - RNA, 19 nt, Artificial Sequence
  Description of Artificial Sequence: Synthetic oligonucleotide
gacccuuagaacacccagc

SEQ ID NO: 2293144 - RNA, 19 nt, Artificial Sequence
  Description of Artificial Sequence: Synthetic oligonucleotide
agucaaacccucagcaucu

SEQ ID NO: 2293145 - RNA, 19 nt, Artificial Sequence
  Description of Artificial Sequence: Synthetic oligonucleotide
cuggggaccggcuagcuca

SEQ ID NO: 2293146 - RNA, 19 nt, Artificial Sequence
  Description of Artificial Sequence: Synthetic oligonucleotide
gaccacagauggcacagca

SEQ ID NO: 2293147 - RNA, 19 nt, Artificial Sequence
  Description of Artificial Sequence: Synthetic oligonucleotide
ucaaacccucagcaucugu

SEQ ID NO: 2293148 - RNA, 19 nt, Artificial Sequence
  Description of Artificial Sequence: Synthetic oligonucleotide
aguuugaaaaggaggguaa

SEQ ID NO: 2293149 - RNA, 19 nt, Artificial Sequence
  Description of Artificial Sequence: Synthetic oligonucleotide
cucuuaggcaucgugcuuc

SEQ ID NO: 2293150 - RNA, 19 nt, Artificial Sequence
  Description of Artificial Sequence: Synthetic oligonucleotide
cugaaguaacucauaguaa

SEQ ID NO: 2293151 - RNA, 19 nt, Artificial Sequence
  Description of Artificial Sequence: Synthetic oligonucleotide
accagggaagcccuauacu

SEQ ID NO: 2293152 - RNA, 19 nt, Artificial Sequence
  Description of Artificial Sequence: Synthetic oligonucleotide
gugggcuagucuuucccag

SEQ ID NO: 2293153 - RNA, 19 nt, Artificial Sequence
  Description of Artificial Sequence: Synthetic oligonucleotide
gggguuuaaacaaaaccac

SEQ ID NO: 2293154 - RNA, 19 nt, Artificial Sequence
  Description of Artificial Sequence: Synthetic oligonucleotide
gcagaauccaaucauuuua

SEQ ID NO: 2293155 - RNA, 19 nt, Artificial Sequence
  Description of Artificial Sequence: Synthetic oligonucleotide
uggggaaaccccauuccua

SEQ ID NO: 2293156 - RNA, 19 nt, Artificial Sequence
  Description of Artificial Sequence: Synthetic oligonucleotide
ggcagaaaucauaggaaag

SEQ ID NO: 2293157 - RNA, 19 nt, Artificial Sequence
  Description of Artificial Sequence: Synthetic oligonucleotide
cagaaaucauaggaaagca

SEQ ID NO: 2293158 - RNA, 19 nt, Artificial Sequence
  Description of Artificial Sequence: Synthetic oligonucleotide
gaguugacccuuagaacac

SEQ ID NO: 2293159 - RNA, 19 nt, Artificial Sequence
  Description of Artificial Sequence: Synthetic oligonucleotide
gagcccagaucacucacuc

SEQ ID NO: 2293160 - RNA, 19 nt, Artificial Sequence
  Description of Artificial Sequence: Synthetic oligonucleotide
uuguucuguuucgauccag

SEQ ID NO: 2293161 - RNA, 19 nt, Artificial Sequence
  Description of Artificial Sequence: Synthetic oligonucleotide
guaacucauaguaaagacu

SEQ ID NO: 2293162 - RNA, 19 nt, Artificial Sequence
  Description of Artificial Sequence: Synthetic oligonucleotide
uggucgcuccucuagccga

SEQ ID NO: 2293163 - RNA, 19 nt, Artificial Sequence
  Description of Artificial Sequence: Synthetic oligonucleotide
aaggcgccgucccggaugu

SEQ ID NO: 2293164 - RNA, 19 nt, Artificial Sequence
  Description of Artificial Sequence: Synthetic oligonucleotide
gaaaccccauuccuacaca

SEQ ID NO: 2293165 - RNA, 19 nt, Artificial Sequence
  Description of Artificial Sequence: Synthetic oligonucleotide
ugggacauuaaggcguuaa

SEQ ID NO: 2293166 - RNA, 19 nt, Artificial Sequence
  Description of Artificial Sequence: Synthetic oligonucleotide
uggugcaucaagagucgau

SEQ ID NO: 2293167 - RNA, 19 nt, Artificial Sequence
  Description of Artificial Sequence: Synthetic oligonucleotide
agaguugaggagaguuagg

SEQ ID NO: 2293168 - RNA, 19 nt, Artificial Sequence
  Description of Artificial Sequence: Synthetic oligonucleotide
acacccuggaaacuuuaaa

SEQ ID NO: 2293169 - RNA, 19 nt, Artificial Sequence
  Description of Artificial Sequence: Synthetic oligonucleotide
gacugggacauuaaggcgu

SEQ ID NO: 2293170 - RNA, 19 nt, Artificial Sequence
  Description of Artificial Sequence: Synthetic oligonucleotide
ccuacagucaaacccucag

SEQ ID NO: 2293171 - RNA, 19 nt, Artificial Sequence
  Description of Artificial Sequence: Synthetic oligonucleotide
cuggucgcuccucuagccg

SEQ ID NO: 2293172 - RNA, 19 nt, Artificial Sequence
  Description of Artificial Sequence: Synthetic oligonucleotide
ucuuaggcaucgugcuucu

SEQ ID NO: 2293173 - RNA, 19 nt, Artificial Sequence
  Description of Artificial Sequence: Synthetic oligonucleotide
gagucgauccucgucguca

SEQ ID NO: 2293174 - RNA, 19 nt, Artificial Sequence
  Description of Artificial Sequence: Synthetic oligonucleotide
guugacccuuagaacaccc

SEQ ID NO: 2293175 - RNA, 19 nt, Artificial Sequence
  Description of Artificial Sequence: Synthetic oligonucleotide
ugaccugaaguaacucaua

SEQ ID NO: 2293176 - RNA, 19 nt, Artificial Sequence
  Description of Artificial Sequence: Synthetic oligonucleotide
agagucgauccucgucguc

SEQ ID NO: 2293177 - RNA, 19 nt, Artificial Sequence
  Description of Artificial Sequence: Synthetic oligonucleotide
agucugaguugacccuuag

SEQ ID NO: 2293178 - RNA, 19 nt, Artificial Sequence
  Description of Artificial Sequence: Synthetic oligonucleotide
ggggaaaccccauuccuac

SEQ ID NO: 2293179 - RNA, 19 nt, Artificial Sequence
  Description of Artificial Sequence: Synthetic oligonucleotide
ccuaccgccccucuuaggc

SEQ ID NO: 2293180 - RNA, 19 nt, Artificial Sequence
  Description of Artificial Sequence: Synthetic oligonucleotide
augguuguucuguuucgau

SEQ ID NO: 2293181 - RNA, 19 nt, Artificial Sequence
  Description of Artificial Sequence: Synthetic oligonucleotide
ugggcuagucuuucccaga

SEQ ID NO: 2293182 - RNA, 19 nt, Artificial Sequence
  Description of Artificial Sequence: Synthetic oligonucleotide
caauagaacccguaccucu

SEQ ID NO: 2293183 - RNA, 19 nt, Artificial Sequence
  Description of Artificial Sequence: Synthetic oligonucleotide
caccagggaagcccuauac

SEQ ID NO: 2293184 - RNA, 19 nt, Artificial Sequence
  Description of Artificial Sequence: Synthetic oligonucleotide
ggacauuaaggcguuaaca

SEQ ID NO: 2293185 - RNA, 19 nt, Artificial Sequence
  Description of Artificial Sequence: Synthetic oligonucleotide
cugggauccccaccugucc

SEQ ID NO: 2293186 - RNA, 19 nt, Artificial Sequence
  Description of Artificial Sequence: Synthetic oligonucleotide
auaggaaagcagaauccaa

SEQ ID NO: 2293187 - RNA, 19 nt, Artificial Sequence
  Description of Artificial Sequence: Synthetic oligonucleotide
ggaugugacucuuccgaug

SEQ ID NO: 2293188 - RNA, 19 nt, Artificial Sequence
  Description of Artificial Sequence: Synthetic oligonucleotide
aucaagagucgauccucgu

SEQ ID NO: 2293189 - RNA, 19 nt, Artificial Sequence
  Description of Artificial Sequence: Synthetic oligonucleotide
guuagggguuuaaacaaaa

SEQ ID NO: 2293190 - RNA, 19 nt, Artificial Sequence
  Description of Artificial Sequence: Synthetic oligonucleotide
guaggcaccccacccgggc

SEQ ID NO: 2293191 - RNA, 19 nt, Artificial Sequence
  Description of Artificial Sequence: Synthetic oligonucleotide
aucugugggcuagucuuuc

SEQ ID NO: 2293192 - RNA, 19 nt, Artificial Sequence
  Description of Artificial Sequence: Synthetic oligonucleotide
gcccagaucacucacucca

SEQ ID NO: 2293193 - RNA, 19 nt, Artificial Sequence
  Description of Artificial Sequence: Synthetic oligonucleotide
gguaagagugccccagcac

SEQ ID NO: 2293194 - RNA, 19 nt, Artificial Sequence
  Description of Artificial Sequence: Synthetic oligonucleotide
cagaacuccugaagugcug

SEQ ID NO: 2293195 - RNA, 19 nt, Artificial Sequence
  Description of Artificial Sequence: Synthetic oligonucleotide
ccggcuagcucaaagccag

SEQ ID NO: 2293196 - RNA, 19 nt, Artificial Sequence
  Description of Artificial Sequence: Synthetic oligonucleotide
ggaccggcuagcucaaagc

SEQ ID NO: 2293197 - RNA, 19 nt, Artificial Sequence
  Description of Artificial Sequence: Synthetic oligonucleotide
ucgucgucaaaggucugac

SEQ ID NO: 2293198 - RNA, 19 nt, Artificial Sequence
  Description of Artificial Sequence: Synthetic oligonucleotide
uggccuaccgccccucuua

SEQ ID NO: 2293199 - RNA, 19 nt, Artificial Sequence
  Description of Artificial Sequence: Synthetic oligonucleotide
ggaccuuuccuacagucaa

SEQ ID NO: 2293200 - RNA, 19 nt, Artificial Sequence
  Description of Artificial Sequence: Synthetic oligonucleotide
gacccaguaggcagaaauc

SEQ ID NO: 2293201 - RNA, 19 nt, Artificial Sequence
  Description of Artificial Sequence: Synthetic oligonucleotide
ccugccuuggggaaacccc

SEQ ID NO: 2293202 - RNA, 19 nt, Artificial Sequence
  Description of Artificial Sequence: Synthetic oligonucleotide
cacuggucgcuccucuagc

SEQ ID NO: 2293203 - RNA, 19 nt, Artificial Sequence
  Description of Artificial Sequence: Synthetic oligonucleotide
caauuagaaucacccuaca

SEQ ID NO: 2293204 - RNA, 19 nt, Artificial Sequence
  Description of Artificial Sequence: Synthetic oligonucleotide
aguuagggguuuaaacaaa

SEQ ID NO: 2293205 - RNA, 19 nt, Artificial Sequence
  Description of Artificial Sequence: Synthetic oligonucleotide
gauggagcuucuauugcua

SEQ ID NO: 2293206 - RNA, 19 nt, Artificial Sequence
  Description of Artificial Sequence: Synthetic oligonucleotide
agagugccccagcacccag

SEQ ID NO: 2293207 - RNA, 19 nt, Artificial Sequence
  Description of Artificial Sequence: Synthetic oligonucleotide
guuguucuguuucgaucca

SEQ ID NO: 2293208 - RNA, 19 nt, Artificial Sequence
  Description of Artificial Sequence: Synthetic oligonucleotide
gagagaguugaggagaguu

SEQ ID NO: 2293209 - RNA, 19 nt, Artificial Sequence
  Description of Artificial Sequence: Synthetic oligonucleotide
guuucgauccagagaacaa

SEQ ID NO: 2293210 - RNA, 19 nt, Artificial Sequence
  Description of Artificial Sequence: Synthetic oligonucleotide
aggaccuuuccuacaguca

SEQ ID NO: 2293211 - RNA, 19 nt, Artificial Sequence
  Description of Artificial Sequence: Synthetic oligonucleotide
auuccuacacagagcccag

SEQ ID NO: 2293212 - RNA, 19 nt, Artificial Sequence
  Description of Artificial Sequence: Synthetic oligonucleotide
gggacauuaaggcguuaac

SEQ ID NO: 2293213 - RNA, 19 nt, Artificial Sequence
  Description of Artificial Sequence: Synthetic oligonucleotide
gacaaccaggccuguucuc

SEQ ID NO: 2293214 - RNA, 19 nt, Artificial Sequence
  Description of Artificial Sequence: Synthetic oligonucleotide
agucgauccucgucgucaa

SEQ ID NO: 2293215 - RNA, 19 nt, Artificial Sequence
  Description of Artificial Sequence: Synthetic oligonucleotide
agcccuauacucagggaga

SEQ ID NO: 2293216 - RNA, 19 nt, Artificial Sequence
  Description of Artificial Sequence: Synthetic oligonucleotide
ccgaggacucaaaggauag

SEQ ID NO: 2293217 - RNA, 19 nt, Artificial Sequence
  Description of Artificial Sequence: Synthetic oligonucleotide
uccacacccuggaaacuuu

SEQ ID NO: 2293218 - RNA, 19 nt, Artificial Sequence
  Description of Artificial Sequence: Synthetic oligonucleotide
gaacacccagcuggggacc

SEQ ID NO: 2293219 - RNA, 19 nt, Artificial Sequence
  Description of Artificial Sequence: Synthetic oligonucleotide
caaaaccaccagggaagcc

SEQ ID NO: 2293220 - RNA, 19 nt, Artificial Sequence
  Description of Artificial Sequence: Synthetic oligonucleotide
guggcucccuucccacugg

SEQ ID NO: 2293221 - RNA, 19 nt, Artificial Sequence
  Description of Artificial Sequence: Synthetic oligonucleotide
uaccgccccucuuaggcau

SEQ ID NO: 2293222 - RNA, 19 nt, Artificial Sequence
  Description of Artificial Sequence: Synthetic oligonucleotide
agagaguugaggagaguua

SEQ ID NO: 2293223 - RNA, 19 nt, Artificial Sequence
  Description of Artificial Sequence: Synthetic oligonucleotide
ccagcacccaggugcaugg

SEQ ID NO: 2293224 - RNA, 19 nt, Artificial Sequence
  Description of Artificial Sequence: Synthetic oligonucleotide
cagcaucaacguaggcacc

SEQ ID NO: 2293225 - RNA, 19 nt, Artificial Sequence
  Description of Artificial Sequence: Synthetic oligonucleotide
gggaccggcuagcucaaag

SEQ ID NO: 2293226 - RNA, 19 nt, Artificial Sequence
  Description of Artificial Sequence: Synthetic oligonucleotide
aggucccugcauucuaaaa

SEQ ID NO: 2293227 - RNA, 19 nt, Artificial Sequence
  Description of Artificial Sequence: Synthetic oligonucleotide
ccccucuuaggcaucgugc

SEQ ID NO: 2293228 - RNA, 19 nt, Artificial Sequence
  Description of Artificial Sequence: Synthetic oligonucleotide
guaaagacugggacauuaa

SEQ ID NO: 2293229 - RNA, 19 nt, Artificial Sequence
  Description of Artificial Sequence: Synthetic oligonucleotide
cccagaacuccugaagugc

SEQ ID NO: 2293230 - RNA, 19 nt, Artificial Sequence
  Description of Artificial Sequence: Synthetic oligonucleotide
cguuaacaccagaggaugg

SEQ ID NO: 2293231 - RNA, 19 nt, Artificial Sequence
  Description of Artificial Sequence: Synthetic oligonucleotide
gucugaguugacccuuaga

SEQ ID NO: 2293232 - RNA, 19 nt, Artificial Sequence
  Description of Artificial Sequence: Synthetic oligonucleotide
cuguuucgauccagagaac

SEQ ID NO: 2293233 - RNA, 19 nt, Artificial Sequence
  Description of Artificial Sequence: Synthetic oligonucleotide
cuuucccagaacuccugaa

SEQ ID NO: 2293234 - RNA, 19 nt, Artificial Sequence
  Description of Artificial Sequence: Synthetic oligonucleotide
ggcauccacacccuggaaa

SEQ ID NO: 2293235 - RNA, 19 nt, Artificial Sequence
  Description of Artificial Sequence: Synthetic oligonucleotide
ggaggguaaaugguuguuc

SEQ ID NO: 2293236 - RNA, 19 nt, Artificial Sequence
  Description of Artificial Sequence: Synthetic oligonucleotide
gucuuucccagaacuccug

SEQ ID NO: 2293237 - RNA, 19 nt, Artificial Sequence
  Description of Artificial Sequence: Synthetic oligonucleotide
cgauccagagaacaaaaca

SEQ ID NO: 2293238 - RNA, 19 nt, Artificial Sequence
  Description of Artificial Sequence: Synthetic oligonucleotide
uccaccgccccugugccuc

SEQ ID NO: 2293239 - RNA, 19 nt, Artificial Sequence
  Description of Artificial Sequence: Synthetic oligonucleotide
cacagauggcacagcagaa

SEQ ID NO: 2293240 - RNA, 19 nt, Artificial Sequence
  Description of Artificial Sequence: Synthetic oligonucleotide
accggcuagcucaaagcca

SEQ ID NO: 2293241 - RNA, 19 nt, Artificial Sequence
  Description of Artificial Sequence: Synthetic oligonucleotide
ccagaucacucacuccacc

SEQ ID NO: 2293242 - RNA, 19 nt, Artificial Sequence
  Description of Artificial Sequence: Synthetic oligonucleotide
gcagaaggcgccgucccgg

SEQ ID NO: 2293243 - RNA, 19 nt, Artificial Sequence
  Description of Artificial Sequence: Synthetic oligonucleotide
auccacacccuggaaacuu

SEQ ID NO: 2293244 - RNA, 19 nt, Artificial Sequence
  Description of Artificial Sequence: Synthetic oligonucleotide
ggauagauggagcuucuau

SEQ ID NO: 2293245 - RNA, 19 nt, Artificial Sequence
  Description of Artificial Sequence: Synthetic oligonucleotide
cgauccucgucgucaaagg

SEQ ID NO: 2293246 - RNA, 19 nt, Artificial Sequence
  Description of Artificial Sequence: Synthetic oligonucleotide
ucagcaucugugggcuagu

SEQ ID NO: 2293247 - RNA, 19 nt, Artificial Sequence
  Description of Artificial Sequence: Synthetic oligonucleotide
ccggaugugacucuuccga

SEQ ID NO: 2293248 - RNA, 19 nt, Artificial Sequence
  Description of Artificial Sequence: Synthetic oligonucleotide
caggccuguucuccuuggc

SEQ ID NO: 2293249 - RNA, 19 nt, Artificial Sequence
  Description of Artificial Sequence: Synthetic oligonucleotide
ggaaaucuacccaggaccu

SEQ ID NO: 2293250 - RNA, 19 nt, Artificial Sequence
  Description of Artificial Sequence: Synthetic oligonucleotide
caucaacguaggcacccca

SEQ ID NO: 2293251 - RNA, 19 nt, Artificial Sequence
  Description of Artificial Sequence: Synthetic oligonucleotide
cuaguuugaaaaggagggu

SEQ ID NO: 2293252 - RNA, 19 nt, Artificial Sequence
  Description of Artificial Sequence: Synthetic oligonucleotide
uuccuacacagagcccaga

SEQ ID NO: 2293253 - RNA, 19 nt, Artificial Sequence
  Description of Artificial Sequence: Synthetic oligonucleotide
ggaguggcucccuucccac

SEQ ID NO: 2293254 - RNA, 19 nt, Artificial Sequence
  Description of Artificial Sequence: Synthetic oligonucleotide
ggguaagagugccccagca

SEQ ID NO: 2293255 - RNA, 19 nt, Artificial Sequence
  Description of Artificial Sequence: Synthetic oligonucleotide
agcucccugccuuggggaa

SEQ ID NO: 2293256 - RNA, 19 nt, Artificial Sequence
  Description of Artificial Sequence: Synthetic oligonucleotide
ucacuccaccgccccugug

SEQ ID NO: 2293257 - RNA, 19 nt, Artificial Sequence
  Description of Artificial Sequence: Synthetic oligonucleotide
aggaggguaaaugguuguu

SEQ ID NO: 2293258 - RNA, 19 nt, Artificial Sequence
  Description of Artificial Sequence: Synthetic oligonucleotide
cuaccgccccucuuaggca

SEQ ID NO: 2293259 - RNA, 19 nt, Artificial Sequence
  Description of Artificial Sequence: Synthetic oligonucleotide
ccccauuccuacacagagc

SEQ ID NO: 2293260 - RNA, 19 nt, Artificial Sequence
  Description of Artificial Sequence: Synthetic oligonucleotide
uccaggguacagggcaguc

SEQ ID NO: 2293261 - RNA, 19 nt, Artificial Sequence
  Description of Artificial Sequence: Synthetic oligonucleotide
ggauggaguggcucccuuc

SEQ ID NO: 2293262 - RNA, 19 nt, Artificial Sequence
  Description of Artificial Sequence: Synthetic oligonucleotide
gcccuauacucagggagag

SEQ ID NO: 2293263 - RNA, 19 nt, Artificial Sequence
  Description of Artificial Sequence: Synthetic oligonucleotide
gucaaacccucagcaucug

SEQ ID NO: 2293264 - RNA, 19 nt, Artificial Sequence
  Description of Artificial Sequence: Synthetic oligonucleotide
uggggaccggcuagcucaa

SEQ ID NO: 2293265 - RNA, 19 nt, Artificial Sequence
  Description of Artificial Sequence: Synthetic oligonucleotide
ccacuggucgcuccucuag

SEQ ID NO: 2293266 - RNA, 19 nt, Artificial Sequence
  Description of Artificial Sequence: Synthetic oligonucleotide
ucccuucccacuggucgcu

SEQ ID NO: 2293267 - RNA, 19 nt, Artificial Sequence
  Description of Artificial Sequence: Synthetic oligonucleotide
ccaggugcauggguggagg

SEQ ID NO: 2293268 - RNA, 19 nt, Artificial Sequence
  Description of Artificial Sequence: Synthetic oligonucleotide
acugggacauuaaggcguu

SEQ ID NO: 2293269 - RNA, 19 nt, Artificial Sequence
  Description of Artificial Sequence: Synthetic oligonucleotide
cccggaugugacucuuccg

SEQ ID NO: 2293270 - RNA, 19 nt, Artificial Sequence
  Description of Artificial Sequence: Synthetic oligonucleotide
accgccccugugccucugg

SEQ ID NO: 2293271 - RNA, 19 nt, Artificial Sequence
  Description of Artificial Sequence: Synthetic oligonucleotide
gaccuuuccuacagucaaa

SEQ ID NO: 2293272 - RNA, 19 nt, Artificial Sequence
  Description of Artificial Sequence: Synthetic oligonucleotide
cacccgggcccacugccac

SEQ ID NO: 2293273 - RNA, 19 nt, Artificial Sequence
  Description of Artificial Sequence: Synthetic oligonucleotide
ggcuagucuuucccagaac

SEQ ID NO: 2293274 - RNA, 19 nt, Artificial Sequence
  Description of Artificial Sequence: Synthetic oligonucleotide
auacucagggagagagcaa

SEQ ID NO: 2293275 - RNA, 19 nt, Artificial Sequence
  Description of Artificial Sequence: Synthetic oligonucleotide
ggagaguuagggguuuaaa

SEQ ID NO: 2293276 - RNA, 19 nt, Artificial Sequence
  Description of Artificial Sequence: Synthetic oligonucleotide
uaguaaagacugggacauu

SEQ ID NO: 2293277 - RNA, 19 nt, Artificial Sequence
  Description of Artificial Sequence: Synthetic oligonucleotide
acucagggagagagcaaaa

SEQ ID NO: 2293278 - RNA, 19 nt, Artificial Sequence
  Description of Artificial Sequence: Synthetic oligonucleotide
gccccucuuaggcaucgug

SEQ ID NO: 2293279 - RNA, 19 nt, Artificial Sequence
  Description of Artificial Sequence: Synthetic oligonucleotide
cacccagcuggggaccggc

SEQ ID NO: 2293280 - RNA, 19 nt, Artificial Sequence
  Description of Artificial Sequence: Synthetic oligonucleotide
ggacaaccaggccuguucu

SEQ ID NO: 2293281 - RNA, 19 nt, Artificial Sequence
  Description of Artificial Sequence: Synthetic oligonucleotide
agccgaggacucaaaggau

SEQ ID NO: 2293282 - RNA, 19 nt, Artificial Sequence
  Description of Artificial Sequence: Synthetic oligonucleotide
ggccuaccgccccucuuag

SEQ ID NO: 2293283 - RNA, 19 nt, Artificial Sequence
  Description of Artificial Sequence: Synthetic oligonucleotide
cccagaucacucacuccac

SEQ ID NO: 2293284 - RNA, 19 nt, Artificial Sequence
  Description of Artificial Sequence: Synthetic oligonucleotide
aagacccaguaggcagaaa

SEQ ID NO: 2293285 - RNA, 19 nt, Artificial Sequence
  Description of Artificial Sequence: Synthetic oligonucleotide
aggauagauggagcuucua

SEQ ID NO: 2293286 - RNA, 19 nt, Artificial Sequence
  Description of Artificial Sequence: Synthetic oligonucleotide
gcaucaacguaggcacccc

SEQ ID NO: 2293287 - RNA, 19 nt, Artificial Sequence
  Description of Artificial Sequence: Synthetic oligonucleotide
ggcguuaacaccagaggau

SEQ ID NO: 2293288 - RNA, 19 nt, Artificial Sequence
  Description of Artificial Sequence: Synthetic oligonucleotide
acacccagcuggggaccgg

SEQ ID NO: 2293289 - RNA, 19 nt, Artificial Sequence
  Description of Artificial Sequence: Synthetic oligonucleotide
caaaggauagauggagcuu

SEQ ID NO: 2293290 - RNA, 19 nt, Artificial Sequence
  Description of Artificial Sequence: Synthetic oligonucleotide
uucccacuggucgcuccuc

SEQ ID NO: 2293291 - RNA, 19 nt, Artificial Sequence
  Description of Artificial Sequence: Synthetic oligonucleotide
cgucgucaaaggucugacc

SEQ ID NO: 2293292 - RNA, 19 nt, Artificial Sequence
  Description of Artificial Sequence: Synthetic oligonucleotide
ggcagucugaguugacccu

SEQ ID NO: 2293293 - RNA, 19 nt, Artificial Sequence
  Description of Artificial Sequence: Synthetic oligonucleotide
acccuacaauagaacccgu

SEQ ID NO: 2293294 - RNA, 19 nt, Artificial Sequence
  Description of Artificial Sequence: Synthetic oligonucleotide
caagacccaguaggcagaa

SEQ ID NO: 2293295 - RNA, 19 nt, Artificial Sequence
  Description of Artificial Sequence: Synthetic oligonucleotide
aggguacagggcagucuga

SEQ ID NO: 2293296 - RNA, 19 nt, Artificial Sequence
  Description of Artificial Sequence: Synthetic oligonucleotide
gaaaucuacccaggaccuu

SEQ ID NO: 2293297 - RNA, 19 nt, Artificial Sequence
  Description of Artificial Sequence: Synthetic oligonucleotide
cagcaucugugggcuaguc

SEQ ID NO: 2293298 - RNA, 19 nt, Artificial Sequence
  Description of Artificial Sequence: Synthetic oligonucleotide
cucuagccgaggacucaaa

SEQ ID NO: 2293299 - RNA, 19 nt, Artificial Sequence
  Description of Artificial Sequence: Synthetic oligonucleotide
gccuaccgccccucuuagg

SEQ ID NO: 2293300 - RNA, 19 nt, Artificial Sequence
  Description of Artificial Sequence: Synthetic oligonucleotide
cuggugcaucaagagucga

SEQ ID NO: 2293301 - RNA, 19 nt, Artificial Sequence
  Description of Artificial Sequence: Synthetic oligonucleotide
gguacagggcagucugagu

SEQ ID NO: 2293302 - RNA, 19 nt, Artificial Sequence
  Description of Artificial Sequence: Synthetic oligonucleotide
gaggagaguuagggguuua

SEQ ID NO: 2293303 - RNA, 19 nt, Artificial Sequence
  Description of Artificial Sequence: Synthetic oligonucleotide
ccagaacuccugaagugcu

SEQ ID NO: 2293304 - RNA, 19 nt, Artificial Sequence
  Description of Artificial Sequence: Synthetic oligonucleotide
acccgggcccacugccaca

SEQ ID NO: 2293305 - RNA, 19 nt, Artificial Sequence
  Description of Artificial Sequence: Synthetic oligonucleotide
gccgucccggaugugacuc

SEQ ID NO: 2293306 - RNA, 19 nt, Artificial Sequence
  Description of Artificial Sequence: Synthetic oligonucleotide
accgccccucuuaggcauc

SEQ ID NO: 2293307 - RNA, 19 nt, Artificial Sequence
  Description of Artificial Sequence: Synthetic oligonucleotide
ggcgccgucccggauguga

SEQ ID NO: 2293308 - RNA, 19 nt, Artificial Sequence
  Description of Artificial Sequence: Synthetic oligonucleotide
caucugugggcuagucuuu

SEQ ID NO: 2293309 - RNA, 19 nt, Artificial Sequence
  Description of Artificial Sequence: Synthetic oligonucleotide
gaggauggaguggcucccu

SEQ ID NO: 2293310 - RNA, 19 nt, Artificial Sequence
  Description of Artificial Sequence: Synthetic oligonucleotide
cccuacaauagaacccgua

SEQ ID NO: 2293311 - RNA, 19 nt, Artificial Sequence
  Description of Artificial Sequence: Synthetic oligonucleotide
gucgauccucgucgucaaa

SEQ ID NO: 2293312 - RNA, 19 nt, Artificial Sequence
  Description of Artificial Sequence: Synthetic oligonucleotide
cgucaaaggucugaccaca

SEQ ID NO: 2293313 - RNA, 19 nt, Artificial Sequence
  Description of Artificial Sequence: Synthetic oligonucleotide
ggcuagcucaaagccaggu

SEQ ID NO: 2293314 - RNA, 19 nt, Artificial Sequence
  Description of Artificial Sequence: Synthetic oligonucleotide
gccccugugccucugggau

SEQ ID NO: 2293315 - RNA, 19 nt, Artificial Sequence
  Description of Artificial Sequence: Synthetic oligonucleotide
gucccggaugugacucuuc

SEQ ID NO: 2293316 - RNA, 19 nt, Artificial Sequence
  Description of Artificial Sequence: Synthetic oligonucleotide
gcccacugccacacuguug

SEQ ID NO: 2293317 - RNA, 19 nt, Artificial Sequence
  Description of Artificial Sequence: Synthetic oligonucleotide
gggauccccaccugucccu

SEQ ID NO: 2293318 - RNA, 19 nt, Artificial Sequence
  Description of Artificial Sequence: Synthetic oligonucleotide
gccaggucccugcauucua

SEQ ID NO: 2293319 - RNA, 19 nt, Artificial Sequence
  Description of Artificial Sequence: Synthetic oligonucleotide
ggauccccaccugucccuc

SEQ ID NO: 2293320 - RNA, 19 nt, Artificial Sequence
  Description of Artificial Sequence: Synthetic oligonucleotide
cuuggccuaccgccccucu

SEQ ID NO: 2293321 - RNA, 19 nt, Artificial Sequence
  Description of Artificial Sequence: Synthetic oligonucleotide
ccgccccugugccucuggg

SEQ ID NO: 2293322 - RNA, 19 nt, Artificial Sequence
  Description of Artificial Sequence: Synthetic oligonucleotide
ccgccccucuuaggcaucg

SEQ ID NO: 2293323 - RNA, 19 nt, Artificial Sequence
  Description of Artificial Sequence: Synthetic oligonucleotide
ccacacccuggaaacuuua

SEQ ID NO: 2293324 - RNA, 19 nt, Artificial Sequence
  Description of Artificial Sequence: Synthetic oligonucleotide
gcagucugaguugacccuu

SEQ ID NO: 2293325 - RNA, 19 nt, Artificial Sequence
  Description of Artificial Sequence: Synthetic oligonucleotide
gcgccgucccggaugugac

SEQ ID NO: 2293326 - RNA, 19 nt, Artificial Sequence
  Description of Artificial Sequence: Synthetic oligonucleotide
ccucuagccgaggacucaa

SEQ ID NO: 2293327 - RNA, 19 nt, Artificial Sequence
  Description of Artificial Sequence: Synthetic oligonucleotide
caaggacaaccaggccugu

SEQ ID NO: 2293328 - RNA, 19 nt, Artificial Sequence
  Description of Artificial Sequence: Synthetic oligonucleotide
cccuauacucagggagaga

SEQ ID NO: 2293329 - RNA, 19 nt, Artificial Sequence
  Description of Artificial Sequence: Synthetic oligonucleotide
gggcccacugccacacugu

SEQ ID NO: 2293330 - RNA, 19 nt, Artificial Sequence
  Description of Artificial Sequence: Synthetic oligonucleotide
cccagcuggggaccggcua

SEQ ID NO: 2293331 - RNA, 19 nt, Artificial Sequence
  Description of Artificial Sequence: Synthetic oligonucleotide
gccuuggggaaaccccauu

SEQ ID NO: 2293332 - RNA, 19 nt, Artificial Sequence
  Description of Artificial Sequence: Synthetic oligonucleotide
cccacuggucgcuccucua

SEQ ID NO: 2293333 - RNA, 19 nt, Artificial Sequence
  Description of Artificial Sequence: Synthetic oligonucleotide
ccucuuaggcaucgugcuu

SEQ ID NO: 2293334 - RNA, 19 nt, Artificial Sequence
  Description of Artificial Sequence: Synthetic oligonucleotide
cggaugugacucuuccgau

SEQ ID NO: 2293335 - RNA, 19 nt, Artificial Sequence
  Description of Artificial Sequence: Synthetic oligonucleotide
cuuaggcaucgugcuucuu

SEQ ID NO: 2293336 - RNA, 19 nt, Artificial Sequence
  Description of Artificial Sequence: Synthetic oligonucleotide
ccucagcaucugugggcua

SEQ ID NO: 2293337 - RNA, 19 nt, Artificial Sequence
  Description of Artificial Sequence: Synthetic oligonucleotide
ccgucccggaugugacucu

SEQ ID NO: 2293338 - RNA, 19 nt, Artificial Sequence
  Description of Artificial Sequence: Synthetic oligonucleotide
ggggaccggcuagcucaaa

SEQ ID NO: 2293339 - RNA, 19 nt, Artificial Sequence
  Description of Artificial Sequence: Synthetic oligonucleotide
ccaccgccccugugccucu

SEQ ID NO: 2293340 - RNA, 19 nt, Artificial Sequence
  Description of Artificial Sequence: Synthetic oligonucleotide
cgucccggaugugacucuu

SEQ ID NO: 2293341 - RNA, 19 nt, Artificial Sequence
  Description of Artificial Sequence: Synthetic oligonucleotide
ccccagcacccaggugcau

SEQ ID NO: 2293342 - RNA, 19 nt, Artificial Sequence
  Description of Artificial Sequence: Synthetic oligonucleotide
acugucaucuguuugaggc

SEQ ID NO: 2293343 - RNA, 19 nt, Artificial Sequence
  Description of Artificial Sequence: Synthetic oligonucleotide
aagaucaccuucuuguccc

SEQ ID NO: 2293344 - RNA, 19 nt, Artificial Sequence
  Description of Artificial Sequence: Synthetic oligonucleotide
aauuugaugcagcaacagc

SEQ ID NO: 2293345 - RNA, 19 nt, Artificial Sequence
  Description of Artificial Sequence: Synthetic oligonucleotide
aagguaugaacucagaaga

SEQ ID NO: 2293346 - RNA, 19 nt, Artificial Sequence
  Description of Artificial Sequence: Synthetic oligonucleotide
uuugcauucauacacccgc

SEQ ID NO: 2293347 - RNA, 19 nt, Artificial Sequence
  Description of Artificial Sequence: Synthetic oligonucleotide
acuuacuacacaucugugc

SEQ ID NO: 2293348 - RNA, 19 nt, Artificial Sequence
  Description of Artificial Sequence: Synthetic oligonucleotide
ugaguuaagaguaggauuc

SEQ ID NO: 2293349 - RNA, 19 nt, Artificial Sequence
  Description of Artificial Sequence: Synthetic oligonucleotide
ucugacaucauauuaugug

SEQ ID NO: 2293350 - RNA, 19 nt, Artificial Sequence
  Description of Artificial Sequence: Synthetic oligonucleotide
uucaguaugcaccuucugg

SEQ ID NO: 2293351 - RNA, 19 nt, Artificial Sequence
  Description of Artificial Sequence: Synthetic oligonucleotide
uuugcuaccaauaccacaa

SEQ ID NO: 2293352 - RNA, 19 nt, Artificial Sequence
  Description of Artificial Sequence: Synthetic oligonucleotide
uuaucuuauaaauuaucug

SEQ ID NO: 2293353 - RNA, 19 nt, Artificial Sequence
  Description of Artificial Sequence: Synthetic oligonucleotide
aaaugaauggaagucucac

SEQ ID NO: 2293354 - RNA, 19 nt, Artificial Sequence
  Description of Artificial Sequence: Synthetic oligonucleotide
ucucugaaguauaagaaga

SEQ ID NO: 2293355 - RNA, 19 nt, Artificial Sequence
  Description of Artificial Sequence: Synthetic oligonucleotide
aguauaagaagauuugagu

SEQ ID NO: 2293356 - RNA, 19 nt, Artificial Sequence
  Description of Artificial Sequence: Synthetic oligonucleotide
aauuaucugcaugacacuc

SEQ ID NO: 2293357 - RNA, 19 nt, Artificial Sequence
  Description of Artificial Sequence: Synthetic oligonucleotide
guaauuaucuuauaaauua

SEQ ID NO: 2293358 - RNA, 19 nt, Artificial Sequence
  Description of Artificial Sequence: Synthetic oligonucleotide
ucuguauaaagccuuuccc

SEQ ID NO: 2293359 - RNA, 19 nt, Artificial Sequence
  Description of Artificial Sequence: Synthetic oligonucleotide
uguauaaagccuuucccgc

SEQ ID NO: 2293360 - RNA, 19 nt, Artificial Sequence
  Description of Artificial Sequence: Synthetic oligonucleotide
uauaagcucucucugaagu

SEQ ID NO: 2293361 - RNA, 19 nt, Artificial Sequence
  Description of Artificial Sequence: Synthetic oligonucleotide
cuguauaaagccuuucccg

SEQ ID NO: 2293362 - RNA, 19 nt, Artificial Sequence
  Description of Artificial Sequence: Synthetic oligonucleotide
aucuuuuccaugcugacug

SEQ ID NO: 2293363 - RNA, 19 nt, Artificial Sequence
  Description of Artificial Sequence: Synthetic oligonucleotide
uaaucugucuuccugaaau

SEQ ID NO: 2293364 - RNA, 19 nt, Artificial Sequence
  Description of Artificial Sequence: Synthetic oligonucleotide
uuagagcucuggaugaagg

SEQ ID NO: 2293365 - RNA, 19 nt, Artificial Sequence
  Description of Artificial Sequence: Synthetic oligonucleotide
ugucguauaagguaugaac

SEQ ID NO: 2293366 - RNA, 19 nt, Artificial Sequence
  Description of Artificial Sequence: Synthetic oligonucleotide
ucuaugaucuuccuuucug

SEQ ID NO: 2293367 - RNA, 19 nt, Artificial Sequence
  Description of Artificial Sequence: Synthetic oligonucleotide
uggaaauucaggcuucaag

SEQ ID NO: 2293368 - RNA, 19 nt, Artificial Sequence
  Description of Artificial Sequence: Synthetic oligonucleotide
aaguauaagaagauuugag

SEQ ID NO: 2293369 - RNA, 19 nt, Artificial Sequence
  Description of Artificial Sequence: Synthetic oligonucleotide
ugacuuacuacacaucugu

SEQ ID NO: 2293370 - RNA, 19 nt, Artificial Sequence
  Description of Artificial Sequence: Synthetic oligonucleotide
cucacucagggaaagaucc

SEQ ID NO: 2293371 - RNA, 19 nt, Artificial Sequence
  Description of Artificial Sequence: Synthetic oligonucleotide
uaugaacucagaagaaggc

SEQ ID NO: 2293372 - RNA, 19 nt, Artificial Sequence
  Description of Artificial Sequence: Synthetic oligonucleotide
accaauaccacaagaaugg

SEQ ID NO: 2293373 - RNA, 19 nt, Artificial Sequence
  Description of Artificial Sequence: Synthetic oligonucleotide
cuuauaaauuaucugcaug

SEQ ID NO: 2293374 - RNA, 19 nt, Artificial Sequence
  Description of Artificial Sequence: Synthetic oligonucleotide
uauaagaagauuugaguua

SEQ ID NO: 2293375 - RNA, 19 nt, Artificial Sequence
  Description of Artificial Sequence: Synthetic oligonucleotide
aagagggcagcgcggaacc

SEQ ID NO: 2293376 - RNA, 19 nt, Artificial Sequence
  Description of Artificial Sequence: Synthetic oligonucleotide
aaauuccccaggcucagag

SEQ ID NO: 2293377 - RNA, 19 nt, Artificial Sequence
  Description of Artificial Sequence: Synthetic oligonucleotide
ggaaagauccuccuggugg

SEQ ID NO: 2293378 - RNA, 19 nt, Artificial Sequence
  Description of Artificial Sequence: Synthetic oligonucleotide
agaguaauuaucuuauaaa

SEQ ID NO: 2293379 - RNA, 19 nt, Artificial Sequence
  Description of Artificial Sequence: Synthetic oligonucleotide
auuccccaggcucagagac

SEQ ID NO: 2293380 - RNA, 19 nt, Artificial Sequence
  Description of Artificial Sequence: Synthetic oligonucleotide
auuaucuuauaaauuaucu

SEQ ID NO: 2293381 - RNA, 19 nt, Artificial Sequence
  Description of Artificial Sequence: Synthetic oligonucleotide
guaugaacucagaagaagg

SEQ ID NO: 2293382 - RNA, 19 nt, Artificial Sequence
  Description of Artificial Sequence: Synthetic oligonucleotide
auauuugcuaccaauacca

SEQ ID NO: 2293383 - RNA, 19 nt, Artificial Sequence
  Description of Artificial Sequence: Synthetic oligonucleotide
uuaagaguaggauuccuuc

SEQ ID NO: 2293384 - RNA, 19 nt, Artificial Sequence
  Description of Artificial Sequence: Synthetic oligonucleotide
gaauggaagucucacucag

SEQ ID NO: 2293385 - RNA, 19 nt, Artificial Sequence
  Description of Artificial Sequence: Synthetic oligonucleotide
ucauauuaugugaauuuuc

SEQ ID NO: 2293386 - RNA, 19 nt, Artificial Sequence
  Description of Artificial Sequence: Synthetic oligonucleotide
auaaauuaucugcaugaca

SEQ ID NO: 2293387 - RNA, 19 nt, Artificial Sequence
  Description of Artificial Sequence: Synthetic oligonucleotide
uaauuaucuuauaaauuau

SEQ ID NO: 2293388 - RNA, 19 nt, Artificial Sequence
  Description of Artificial Sequence: Synthetic oligonucleotide
aguaggauuccuuccugac

SEQ ID NO: 2293389 - RNA, 19 nt, Artificial Sequence
  Description of Artificial Sequence: Synthetic oligonucleotide
uaugugaauuuucaucccu

SEQ ID NO: 2293390 - RNA, 19 nt, Artificial Sequence
  Description of Artificial Sequence: Synthetic oligonucleotide
ucaguaugcaccuucuggu

SEQ ID NO: 2293391 - RNA, 19 nt, Artificial Sequence
  Description of Artificial Sequence: Synthetic oligonucleotide
uaagaguaggauuccuucc

SEQ ID NO: 2293392 - RNA, 19 nt, Artificial Sequence
  Description of Artificial Sequence: Synthetic oligonucleotide
gauuugaguuaagaguagg

SEQ ID NO: 2293393 - RNA, 19 nt, Artificial Sequence
  Description of Artificial Sequence: Synthetic oligonucleotide
cuguuugaauuuuccagcg

SEQ ID NO: 2293394 - RNA, 19 nt, Artificial Sequence
  Description of Artificial Sequence: Synthetic oligonucleotide
ugaugcagcaacagcuuag

SEQ ID NO: 2293395 - RNA, 19 nt, Artificial Sequence
  Description of Artificial Sequence: Synthetic oligonucleotide
gcaguaacugcacacauag

SEQ ID NO: 2293396 - RNA, 19 nt, Artificial Sequence
  Description of Artificial Sequence: Synthetic oligonucleotide
ucuuugcauucauacaccc

SEQ ID NO: 2293397 - RNA, 19 nt, Artificial Sequence
  Description of Artificial Sequence: Synthetic oligonucleotide
agcuccuacaguagaaucc

SEQ ID NO: 2293398 - RNA, 19 nt, Artificial Sequence
  Description of Artificial Sequence: Synthetic oligonucleotide
uugaguuaagaguaggauu

SEQ ID NO: 2293399 - RNA, 19 nt, Artificial Sequence
  Description of Artificial Sequence: Synthetic oligonucleotide
agaucuuuuccaugcugac

SEQ ID NO: 2293400 - RNA, 19 nt, Artificial Sequence
  Description of Artificial Sequence: Synthetic oligonucleotide
uuaucugcaugacacuccu

SEQ ID NO: 2293401 - RNA, 19 nt, Artificial Sequence
  Description of Artificial Sequence: Synthetic oligonucleotide
uuaugugaauuuucauccc

SEQ ID NO: 2293402 - RNA, 19 nt, Artificial Sequence
  Description of Artificial Sequence: Synthetic oligonucleotide
uuugaauuuuccagcgggu

SEQ ID NO: 2293403 - RNA, 19 nt, Artificial Sequence
  Description of Artificial Sequence: Synthetic oligonucleotide
uaggauuccuuccugacuu

SEQ ID NO: 2293404 - RNA, 19 nt, Artificial Sequence
  Description of Artificial Sequence: Synthetic oligonucleotide
ucuuauaaauuaucugcau

SEQ ID NO: 2293405 - RNA, 19 nt, Artificial Sequence
  Description of Artificial Sequence: Synthetic oligonucleotide
uggcguaagaucuuuucca

SEQ ID NO: 2293406 - RNA, 19 nt, Artificial Sequence
  Description of Artificial Sequence: Synthetic oligonucleotide
ugguggacaagaucugggg

SEQ ID NO: 2293407 - RNA, 19 nt, Artificial Sequence
  Description of Artificial Sequence: Synthetic oligonucleotide
uuugaguuaagaguaggau

SEQ ID NO: 2293408 - RNA, 19 nt, Artificial Sequence
  Description of Artificial Sequence: Synthetic oligonucleotide
ucacacucauauuugcuac

SEQ ID NO: 2293409 - RNA, 19 nt, Artificial Sequence
  Description of Artificial Sequence: Synthetic oligonucleotide
acacucgucacacucauau

SEQ ID NO: 2293410 - RNA, 19 nt, Artificial Sequence
  Description of Artificial Sequence: Synthetic oligonucleotide
uauaagguaugaacucaga

SEQ ID NO: 2293411 - RNA, 19 nt, Artificial Sequence
  Description of Artificial Sequence: Synthetic oligonucleotide
ucuggauuccccagcagcu

SEQ ID NO: 2293412 - RNA, 19 nt, Artificial Sequence
  Description of Artificial Sequence: Synthetic oligonucleotide
aagaucuuuuccaugcuga

SEQ ID NO: 2293413 - RNA, 19 nt, Artificial Sequence
  Description of Artificial Sequence: Synthetic oligonucleotide
uccuaaaugaauggaaguc

SEQ ID NO: 2293414 - RNA, 19 nt, Artificial Sequence
  Description of Artificial Sequence: Synthetic oligonucleotide
ucguauaagguaugaacuc

SEQ ID NO: 2293415 - RNA, 19 nt, Artificial Sequence
  Description of Artificial Sequence: Synthetic oligonucleotide
cuuugcauucauacacccg

SEQ ID NO: 2293416 - RNA, 19 nt, Artificial Sequence
  Description of Artificial Sequence: Synthetic oligonucleotide
ugaauggaagucucacuca

SEQ ID NO: 2293417 - RNA, 19 nt, Artificial Sequence
  Description of Artificial Sequence: Synthetic oligonucleotide
gaaguauaagaagauuuga

SEQ ID NO: 2293418 - RNA, 19 nt, Artificial Sequence
  Description of Artificial Sequence: Synthetic oligonucleotide
auuugcuaccaauaccaca

SEQ ID NO: 2293419 - RNA, 19 nt, Artificial Sequence
  Description of Artificial Sequence: Synthetic oligonucleotide
uuuucaucccuggaaauuc

SEQ ID NO: 2293420 - RNA, 19 nt, Artificial Sequence
  Description of Artificial Sequence: Synthetic oligonucleotide
auaagaagauuugaguuaa

SEQ ID NO: 2293421 - RNA, 19 nt, Artificial Sequence
  Description of Artificial Sequence: Synthetic oligonucleotide
aagaaugggucucccuucu

SEQ ID NO: 2293422 - RNA, 19 nt, Artificial Sequence
  Description of Artificial Sequence: Synthetic oligonucleotide
caagaucaccuucuugucc

SEQ ID NO: 2293423 - RNA, 19 nt, Artificial Sequence
  Description of Artificial Sequence: Synthetic oligonucleotide
gacacuccugaucuguagc

SEQ ID NO: 2293424 - RNA, 19 nt, Artificial Sequence
  Description of Artificial Sequence: Synthetic oligonucleotide
acucgucacacucauauuu

SEQ ID NO: 2293425 - RNA, 19 nt, Artificial Sequence
  Description of Artificial Sequence: Synthetic oligonucleotide
caccgagccgcucagaccc

SEQ ID NO: 2293426 - RNA, 19 nt, Artificial Sequence
  Description of Artificial Sequence: Synthetic oligonucleotide
guauaagaagauuugaguu

SEQ ID NO: 2293427 - RNA, 19 nt, Artificial Sequence
  Description of Artificial Sequence: Synthetic oligonucleotide
ucuucaguaugcaccuucu

SEQ ID NO: 2293428 - RNA, 19 nt, Artificial Sequence
  Description of Artificial Sequence: Synthetic oligonucleotide
acaagaaugggucucccuu

SEQ ID NO: 2293429 - RNA, 19 nt, Artificial Sequence
  Description of Artificial Sequence: Synthetic oligonucleotide
guauaagguaugaacucag

SEQ ID NO: 2293430 - RNA, 19 nt, Artificial Sequence
  Description of Artificial Sequence: Synthetic oligonucleotide
accaagccaaaccgcaccg

SEQ ID NO: 2293431 - RNA, 19 nt, Artificial Sequence
  Description of Artificial Sequence: Synthetic oligonucleotide
gagcccggcgacaagaggg

SEQ ID NO: 2293432 - RNA, 19 nt, Artificial Sequence
  Description of Artificial Sequence: Synthetic oligonucleotide
gaaagauccuccuggugga

SEQ ID NO: 2293433 - RNA, 19 nt, Artificial Sequence
  Description of Artificial Sequence: Synthetic oligonucleotide
uuugaugcagcaacagcuu

SEQ ID NO: 2293434 - RNA, 19 nt, Artificial Sequence
  Description of Artificial Sequence: Synthetic oligonucleotide
uuugaggcuccccuccuga

SEQ ID NO: 2293435 - RNA, 19 nt, Artificial Sequence
  Description of Artificial Sequence: Synthetic oligonucleotide
aaggaaguuggaccucugu

SEQ ID NO: 2293436 - RNA, 19 nt, Artificial Sequence
  Description of Artificial Sequence: Synthetic oligonucleotide
aucuguuugaggcuccccu

SEQ ID NO: 2293437 - RNA, 19 nt, Artificial Sequence
  Description of Artificial Sequence: Synthetic oligonucleotide
cugguggacaagaucuggg

SEQ ID NO: 2293438 - RNA, 19 nt, Artificial Sequence
  Description of Artificial Sequence: Synthetic oligonucleotide
agacggaaggcuccagcac

SEQ ID NO: 2293439 - RNA, 19 nt, Artificial Sequence
  Description of Artificial Sequence: Synthetic oligonucleotide
acagcuuagagcucuggau

SEQ ID NO: 2293440 - RNA, 19 nt, Artificial Sequence
  Description of Artificial Sequence: Synthetic oligonucleotide
ugggccuucugcagaaaag

SEQ ID NO: 2293441 - RNA, 19 nt, Artificial Sequence
  Description of Artificial Sequence: Synthetic oligonucleotide
uacuacacaucugugcugu

SEQ ID NO: 2293442 - RNA, 19 nt, Artificial Sequence
  Description of Artificial Sequence: Synthetic oligonucleotide
uuuccagcgggucacuguc

SEQ ID NO: 2293443 - RNA, 19 nt, Artificial Sequence
  Description of Artificial Sequence: Synthetic oligonucleotide
uaagaagauuugaguuaag

SEQ ID NO: 2293444 - RNA, 19 nt, Artificial Sequence
  Description of Artificial Sequence: Synthetic oligonucleotide
cagcuuagagcucuggaug

SEQ ID NO: 2293445 - RNA, 19 nt, Artificial Sequence
  Description of Artificial Sequence: Synthetic oligonucleotide
accacaagaaugggucucc

SEQ ID NO: 2293446 - RNA, 19 nt, Artificial Sequence
  Description of Artificial Sequence: Synthetic oligonucleotide
uauggacaauuugaugcag

SEQ ID NO: 2293447 - RNA, 19 nt, Artificial Sequence
  Description of Artificial Sequence: Synthetic oligonucleotide
uuacuacacaucugugcug

SEQ ID NO: 2293448 - RNA, 19 nt, Artificial Sequence
  Description of Artificial Sequence: Synthetic oligonucleotide
guggcguaagaucuuuucc

SEQ ID NO: 2293449 - RNA, 19 nt, Artificial Sequence
  Description of Artificial Sequence: Synthetic oligonucleotide
aaguuggaccucuguauaa

SEQ ID NO: 2293450 - RNA, 19 nt, Artificial Sequence
  Description of Artificial Sequence: Synthetic oligonucleotide
agcuuagagcucuggauga

SEQ ID NO: 2293451 - RNA, 19 nt, Artificial Sequence
  Description of Artificial Sequence: Synthetic oligonucleotide
cuauaagcucucucugaag

SEQ ID NO: 2293452 - RNA, 19 nt, Artificial Sequence
  Description of Artificial Sequence: Synthetic oligonucleotide
gcagcaacagcuuagagcu

SEQ ID NO: 2293453 - RNA, 19 nt, Artificial Sequence
  Description of Artificial Sequence: Synthetic oligonucleotide
ucgucacacucauauuugc

SEQ ID NO: 2293454 - RNA, 19 nt, Artificial Sequence
  Description of Artificial Sequence: Synthetic oligonucleotide
guuggaccucuguauaaag

SEQ ID NO: 2293455 - RNA, 19 nt, Artificial Sequence
  Description of Artificial Sequence: Synthetic oligonucleotide
ugggucucccuucuauaag

SEQ ID NO: 2293456 - RNA, 19 nt, Artificial Sequence
  Description of Artificial Sequence: Synthetic oligonucleotide
uagaauccggagcccggcg

SEQ ID NO: 2293457 - RNA, 19 nt, Artificial Sequence
  Description of Artificial Sequence: Synthetic oligonucleotide
gguaugaacucagaagaag

SEQ ID NO: 2293458 - RNA, 19 nt, Artificial Sequence
  Description of Artificial Sequence: Synthetic oligonucleotide
guauggacaauuugaugca

SEQ ID NO: 2293459 - RNA, 19 nt, Artificial Sequence
  Description of Artificial Sequence: Synthetic oligonucleotide
ucucacucagggaaagauc

SEQ ID NO: 2293460 - RNA, 19 nt, Artificial Sequence
  Description of Artificial Sequence: Synthetic oligonucleotide
uagcucucucuccuaaaug

SEQ ID NO: 2293461 - RNA, 19 nt, Artificial Sequence
  Description of Artificial Sequence: Synthetic oligonucleotide
cuuacuacacaucugugcu

SEQ ID NO: 2293462 - RNA, 19 nt, Artificial Sequence
  Description of Artificial Sequence: Synthetic oligonucleotide
uccccaggcucagagacgg

SEQ ID NO: 2293463 - RNA, 19 nt, Artificial Sequence
  Description of Artificial Sequence: Synthetic oligonucleotide
uuccuuucuggauucccca

SEQ ID NO: 2293464 - RNA, 19 nt, Artificial Sequence
  Description of Artificial Sequence: Synthetic oligonucleotide
aaucugucuuccugaaauu

SEQ ID NO: 2293465 - RNA, 19 nt, Artificial Sequence
  Description of Artificial Sequence: Synthetic oligonucleotide
aaugggucucccuucuaua

SEQ ID NO: 2293466 - RNA, 19 nt, Artificial Sequence
  Description of Artificial Sequence: Synthetic oligonucleotide
caauuugaugcagcaacag

SEQ ID NO: 2293467 - RNA, 19 nt, Artificial Sequence
  Description of Artificial Sequence: Synthetic oligonucleotide
aauuccccaggcucagaga

SEQ ID NO: 2293468 - RNA, 19 nt, Artificial Sequence
  Description of Artificial Sequence: Synthetic oligonucleotide
aaagauccuccugguggac

SEQ ID NO: 2293469 - RNA, 19 nt, Artificial Sequence
  Description of Artificial Sequence: Synthetic oligonucleotide
agaguaggauuccuuccug

SEQ ID NO: 2293470 - RNA, 19 nt, Artificial Sequence
  Description of Artificial Sequence: Synthetic oligonucleotide
auuugaguuaagaguagga

SEQ ID NO: 2293471 - RNA, 19 nt, Artificial Sequence
  Description of Artificial Sequence: Synthetic oligonucleotide
aagucucacucagggaaag

SEQ ID NO: 2293472 - RNA, 19 nt, Artificial Sequence
  Description of Artificial Sequence: Synthetic oligonucleotide
aguuugucugacaucauau

SEQ ID NO: 2293473 - RNA, 19 nt, Artificial Sequence
  Description of Artificial Sequence: Synthetic oligonucleotide
caguauggacaauuugaug

SEQ ID NO: 2293474 - RNA, 19 nt, Artificial Sequence
  Description of Artificial Sequence: Synthetic oligonucleotide
uaagcucucucugaaguau

SEQ ID NO: 2293475 - RNA, 19 nt, Artificial Sequence
  Description of Artificial Sequence: Synthetic oligonucleotide
caagccaaaccgcaccgag

SEQ ID NO: 2293476 - RNA, 19 nt, Artificial Sequence
  Description of Artificial Sequence: Synthetic oligonucleotide
gcggaaccaagccaaaccg

SEQ ID NO: 2293477 - RNA, 19 nt, Artificial Sequence
  Description of Artificial Sequence: Synthetic oligonucleotide
uuucuggauuccccagcag

SEQ ID NO: 2293478 - RNA, 19 nt, Artificial Sequence
  Description of Artificial Sequence: Synthetic oligonucleotide
ugcugacuguacuuguaga

SEQ ID NO: 2293479 - RNA, 19 nt, Artificial Sequence
  Description of Artificial Sequence: Synthetic oligonucleotide
cugacuuacuacacaucug

SEQ ID NO: 2293480 - RNA, 19 nt, Artificial Sequence
  Description of Artificial Sequence: Synthetic oligonucleotide
agcaacagcuuagagcucu

SEQ ID NO: 2293481 - RNA, 19 nt, Artificial Sequence
  Description of Artificial Sequence: Synthetic oligonucleotide
ugugcuguuucuccuguuu

SEQ ID NO: 2293482 - RNA, 19 nt, Artificial Sequence
  Description of Artificial Sequence: Synthetic oligonucleotide
cugaaauuccccaggcuca

SEQ ID NO: 2293483 - RNA, 19 nt, Artificial Sequence
  Description of Artificial Sequence: Synthetic oligonucleotide
gaucuuccuuucuggauuc

SEQ ID NO: 2293484 - RNA, 19 nt, Artificial Sequence
  Description of Artificial Sequence: Synthetic oligonucleotide
ugcucagugaggugggccu

SEQ ID NO: 2293485 - RNA, 19 nt, Artificial Sequence
  Description of Artificial Sequence: Synthetic oligonucleotide
gagacggaaggcuccagca

SEQ ID NO: 2293486 - RNA, 19 nt, Artificial Sequence
  Description of Artificial Sequence: Synthetic oligonucleotide
acuaaucugucuuccugaa

SEQ ID NO: 2293487 - RNA, 19 nt, Artificial Sequence
  Description of Artificial Sequence: Synthetic oligonucleotide
guauaaagccuuucccgca

SEQ ID NO: 2293488 - RNA, 19 nt, Artificial Sequence
  Description of Artificial Sequence: Synthetic oligonucleotide
aucauauuaugugaauuuu

SEQ ID NO: 2293489 - RNA, 19 nt, Artificial Sequence
  Description of Artificial Sequence: Synthetic oligonucleotide
augaucuuccuuucuggau

SEQ ID NO: 2293490 - RNA, 19 nt, Artificial Sequence
  Description of Artificial Sequence: Synthetic oligonucleotide
ucuuccuuucuggauuccc

SEQ ID NO: 2293491 - RNA, 19 nt, Artificial Sequence
  Description of Artificial Sequence: Synthetic oligonucleotide
ugucaucuguuugaggcuc

SEQ ID NO: 2293492 - RNA, 19 nt, Artificial Sequence
  Description of Artificial Sequence: Synthetic oligonucleotide
ucacugucaucuguuugag

SEQ ID NO: 2293493 - RNA, 19 nt, Artificial Sequence
  Description of Artificial Sequence: Synthetic oligonucleotide
agauuugaguuaagaguag

SEQ ID NO: 2293494 - RNA, 19 nt, Artificial Sequence
  Description of Artificial Sequence: Synthetic oligonucleotide
aggaaguuggaccucugua

SEQ ID NO: 2293495 - RNA, 19 nt, Artificial Sequence
  Description of Artificial Sequence: Synthetic oligonucleotide
gucguauaagguaugaacu

SEQ ID NO: 2293496 - RNA, 19 nt, Artificial Sequence
  Description of Artificial Sequence: Synthetic oligonucleotide
ugcacuaaucugucuuccu

SEQ ID NO: 2293497 - RNA, 19 nt, Artificial Sequence
  Description of Artificial Sequence: Synthetic oligonucleotide
uugcauucauacacccgcu

SEQ ID NO: 2293498 - RNA, 19 nt, Artificial Sequence
  Description of Artificial Sequence: Synthetic oligonucleotide
uugaugcagcaacagcuua

SEQ ID NO: 2293499 - RNA, 19 nt, Artificial Sequence
  Description of Artificial Sequence: Synthetic oligonucleotide
cacuaaucugucuuccuga

SEQ ID NO: 2293500 - RNA, 19 nt, Artificial Sequence
  Description of Artificial Sequence: Synthetic oligonucleotide
acaauuugaugcagcaaca

SEQ ID NO: 2293501 - RNA, 19 nt, Artificial Sequence
  Description of Artificial Sequence: Synthetic oligonucleotide
gaguuaagaguaggauucc

SEQ ID NO: 2293502 - RNA, 19 nt, Artificial Sequence
  Description of Artificial Sequence: Synthetic oligonucleotide
agggagaacucucuaugau

SEQ ID NO: 2293503 - RNA, 19 nt, Artificial Sequence
  Description of Artificial Sequence: Synthetic oligonucleotide
cucuccuaaaugaauggaa

SEQ ID NO: 2293504 - RNA, 19 nt, Artificial Sequence
  Description of Artificial Sequence: Synthetic oligonucleotide
cuuagagcucuggaugaag

SEQ ID NO: 2293505 - RNA, 19 nt, Artificial Sequence
  Description of Artificial Sequence: Synthetic oligonucleotide
caguaugcaccuucuggug

SEQ ID NO: 2293506 - RNA, 19 nt, Artificial Sequence
  Description of Artificial Sequence: Synthetic oligonucleotide
uguacuuguagagcuucuc

SEQ ID NO: 2293507 - RNA, 19 nt, Artificial Sequence
  Description of Artificial Sequence: Synthetic oligonucleotide
gaguaggauuccuuccuga

SEQ ID NO: 2293508 - RNA, 19 nt, Artificial Sequence
  Description of Artificial Sequence: Synthetic oligonucleotide
aguagaauccggagcccgg

SEQ ID NO: 2293509 - RNA, 19 nt, Artificial Sequence
  Description of Artificial Sequence: Synthetic oligonucleotide
gcuccuacaguagaauccg

SEQ ID NO: 2293510 - RNA, 19 nt, Artificial Sequence
  Description of Artificial Sequence: Synthetic oligonucleotide
augugaauuuucaucccug

SEQ ID NO: 2293511 - RNA, 19 nt, Artificial Sequence
  Description of Artificial Sequence: Synthetic oligonucleotide
aaccgcaccgagccgcuca

SEQ ID NO: 2293512 - RNA, 19 nt, Artificial Sequence
  Description of Artificial Sequence: Synthetic oligonucleotide
auaagcucucucugaagua

SEQ ID NO: 2293513 - RNA, 19 nt, Artificial Sequence
  Description of Artificial Sequence: Synthetic oligonucleotide
auuuucaucccuggaaauu

SEQ ID NO: 2293514 - RNA, 19 nt, Artificial Sequence
  Description of Artificial Sequence: Synthetic oligonucleotide
caguagaauccggagcccg

SEQ ID NO: 2293515 - RNA, 19 nt, Artificial Sequence
  Description of Artificial Sequence: Synthetic oligonucleotide
gaguuugucugacaucaua

SEQ ID NO: 2293516 - RNA, 19 nt, Artificial Sequence
  Description of Artificial Sequence: Synthetic oligonucleotide
gugcuguuucuccuguuug

SEQ ID NO: 2293517 - RNA, 19 nt, Artificial Sequence
  Description of Artificial Sequence: Synthetic oligonucleotide
agggaaagauccuccuggu

SEQ ID NO: 2293518 - RNA, 19 nt, Artificial Sequence
  Description of Artificial Sequence: Synthetic oligonucleotide
cuuucccgcaguaacugca

SEQ ID NO: 2293519 - RNA, 19 nt, Artificial Sequence
  Description of Artificial Sequence: Synthetic oligonucleotide
gggucucccuucuauaagc

SEQ ID NO: 2293520 - RNA, 19 nt, Artificial Sequence
  Description of Artificial Sequence: Synthetic oligonucleotide
caguaacugcacacauagg

SEQ ID NO: 2293521 - RNA, 19 nt, Artificial Sequence
  Description of Artificial Sequence: Synthetic oligonucleotide
ucccgcaguaacugcacac

SEQ ID NO: 2293522 - RNA, 19 nt, Artificial Sequence
  Description of Artificial Sequence: Synthetic oligonucleotide
cuuucuggauuccccagca

SEQ ID NO: 2293523 - RNA, 19 nt, Artificial Sequence
  Description of Artificial Sequence: Synthetic oligonucleotide
uggugucguauaagguaug

SEQ ID NO: 2293524 - RNA, 19 nt, Artificial Sequence
  Description of Artificial Sequence: Synthetic oligonucleotide
agaauccggagcccggcga

SEQ ID NO: 2293525 - RNA, 19 nt, Artificial Sequence
  Description of Artificial Sequence: Synthetic oligonucleotide
uccugacuuacuacacauc

SEQ ID NO: 2293526 - RNA, 19 nt, Artificial Sequence
  Description of Artificial Sequence: Synthetic oligonucleotide
acacccgcucaccagugug

SEQ ID NO: 2293527 - RNA, 19 nt, Artificial Sequence
  Description of Artificial Sequence: Synthetic oligonucleotide
uguagcucucucuccuaaa

SEQ ID NO: 2293528 - RNA, 19 nt, Artificial Sequence
  Description of Artificial Sequence: Synthetic oligonucleotide
ucugcaugacacuccugau

SEQ ID NO: 2293529 - RNA, 19 nt, Artificial Sequence
  Description of Artificial Sequence: Synthetic oligonucleotide
uccugagagggagaacucu

SEQ ID NO: 2293530 - RNA, 19 nt, Artificial Sequence
  Description of Artificial Sequence: Synthetic oligonucleotide
cacugucaucuguuugagg

SEQ ID NO: 2293531 - RNA, 19 nt, Artificial Sequence
  Description of Artificial Sequence: Synthetic oligonucleotide
cugcacuaaucugucuucc

SEQ ID NO: 2293532 - RNA, 19 nt, Artificial Sequence
  Description of Artificial Sequence: Synthetic oligonucleotide
uccagcacugugaguuugu

SEQ ID NO: 2293533 - RNA, 19 nt, Artificial Sequence
  Description of Artificial Sequence: Synthetic oligonucleotide
gggagaacucucuaugauc

SEQ ID NO: 2293534 - RNA, 19 nt, Artificial Sequence
  Description of Artificial Sequence: Synthetic oligonucleotide
uaccacaagaaugggucuc

SEQ ID NO: 2293535 - RNA, 19 nt, Artificial Sequence
  Description of Artificial Sequence: Synthetic oligonucleotide
cacccgcucaccagugugg

SEQ ID NO: 2293536 - RNA, 19 nt, Artificial Sequence
  Description of Artificial Sequence: Synthetic oligonucleotide
cagcuccuacaguagaauc

SEQ ID NO: 2293537 - RNA, 19 nt, Artificial Sequence
  Description of Artificial Sequence: Synthetic oligonucleotide
cuucaguaugcaccuucug

SEQ ID NO: 2293538 - RNA, 19 nt, Artificial Sequence
  Description of Artificial Sequence: Synthetic oligonucleotide
cuccuacaguagaauccgg

SEQ ID NO: 2293539 - RNA, 19 nt, Artificial Sequence
  Description of Artificial Sequence: Synthetic oligonucleotide
ucagagacggaaggcucca

SEQ ID NO: 2293540 - RNA, 19 nt, Artificial Sequence
  Description of Artificial Sequence: Synthetic oligonucleotide
gacaucauauuaugugaau

SEQ ID NO: 2293541 - RNA, 19 nt, Artificial Sequence
  Description of Artificial Sequence: Synthetic oligonucleotide
guacuuguagagcuucucu

SEQ ID NO: 2293542 - RNA, 19 nt, Artificial Sequence
  Description of Artificial Sequence: Synthetic oligonucleotide
acucucuaugaucuuccuu

SEQ ID NO: 2293543 - RNA, 19 nt, Artificial Sequence
  Description of Artificial Sequence: Synthetic oligonucleotide
aguuggaccucuguauaaa

SEQ ID NO: 2293544 - RNA, 19 nt, Artificial Sequence
  Description of Artificial Sequence: Synthetic oligonucleotide
uccagcgggucacugucau

SEQ ID NO: 2293545 - RNA, 19 nt, Artificial Sequence
  Description of Artificial Sequence: Synthetic oligonucleotide
guagaauccggagcccggc

SEQ ID NO: 2293546 - RNA, 19 nt, Artificial Sequence
  Description of Artificial Sequence: Synthetic oligonucleotide
gguggcguaagaucuuuuc

SEQ ID NO: 2293547 - RNA, 19 nt, Artificial Sequence
  Description of Artificial Sequence: Synthetic oligonucleotide
uucccgcaguaacugcaca

SEQ ID NO: 2293548 - RNA, 19 nt, Artificial Sequence
  Description of Artificial Sequence: Synthetic oligonucleotide
gaaccaagccaaaccgcac

SEQ ID NO: 2293549 - RNA, 19 nt, Artificial Sequence
  Description of Artificial Sequence: Synthetic oligonucleotide
caagagggcagcgcggaac

SEQ ID NO: 2293550 - RNA, 19 nt, Artificial Sequence
  Description of Artificial Sequence: Synthetic oligonucleotide
ggagaacucucuaugaucu

SEQ ID NO: 2293551 - RNA, 19 nt, Artificial Sequence
  Description of Artificial Sequence: Synthetic oligonucleotide
cuaccaauaccacaagaau

SEQ ID NO: 2293552 - RNA, 19 nt, Artificial Sequence
  Description of Artificial Sequence: Synthetic oligonucleotide
cucccuucuauaagcucuc

SEQ ID NO: 2293553 - RNA, 19 nt, Artificial Sequence
  Description of Artificial Sequence: Synthetic oligonucleotide
ggaaccaagccaaaccgca

SEQ ID NO: 2293554 - RNA, 19 nt, Artificial Sequence
  Description of Artificial Sequence: Synthetic oligonucleotide
guaggauuccuuccugacu

SEQ ID NO: 2293555 - RNA, 19 nt, Artificial Sequence
  Description of Artificial Sequence: Synthetic oligonucleotide
gugcugaaggaaguuggac

SEQ ID NO: 2293556 - RNA, 19 nt, Artificial Sequence
  Description of Artificial Sequence: Synthetic oligonucleotide
uacacccgcucaccagugu

SEQ ID NO: 2293557 - RNA, 19 nt, Artificial Sequence
  Description of Artificial Sequence: Synthetic oligonucleotide
cuggugucguauaagguau

SEQ ID NO: 2293558 - RNA, 19 nt, Artificial Sequence
  Description of Artificial Sequence: Synthetic oligonucleotide
ggaaguuggaccucuguau

SEQ ID NO: 2293559 - RNA, 19 nt, Artificial Sequence
  Description of Artificial Sequence: Synthetic oligonucleotide
gccgcucagacccgggugg

SEQ ID NO: 2293560 - RNA, 19 nt, Artificial Sequence
  Description of Artificial Sequence: Synthetic oligonucleotide
ccuucuauaagcucucucu

SEQ ID NO: 2293561 - RNA, 19 nt, Artificial Sequence
  Description of Artificial Sequence: Synthetic oligonucleotide
guaugcaccuucuggugcu

SEQ ID NO: 2293562 - RNA, 19 nt, Artificial Sequence
  Description of Artificial Sequence: Synthetic oligonucleotide
cuccugaucuguagcucuc

SEQ ID NO: 2293563 - RNA, 19 nt, Artificial Sequence
  Description of Artificial Sequence: Synthetic oligonucleotide
gcguaagaucuuuuccaug

SEQ ID NO: 2293564 - RNA, 19 nt, Artificial Sequence
  Description of Artificial Sequence: Synthetic oligonucleotide
gggaaagauccuccuggug

SEQ ID NO: 2293565 - RNA, 19 nt, Artificial Sequence
  Description of Artificial Sequence: Synthetic oligonucleotide
uccugaucuguagcucucu

SEQ ID NO: 2293566 - RNA, 19 nt, Artificial Sequence
  Description of Artificial Sequence: Synthetic oligonucleotide
cuccugagagggagaacuc

SEQ ID NO: 2293567 - RNA, 19 nt, Artificial Sequence
  Description of Artificial Sequence: Synthetic oligonucleotide
cauacacccgcucaccagu

SEQ ID NO: 2293568 - RNA, 19 nt, Artificial Sequence
  Description of Artificial Sequence: Synthetic oligonucleotide
gcugcacuaaucugucuuc

SEQ ID NO: 2293569 - RNA, 19 nt, Artificial Sequence
  Description of Artificial Sequence: Synthetic oligonucleotide
gucaucuguuugaggcucc

SEQ ID NO: 2293570 - RNA, 19 nt, Artificial Sequence
  Description of Artificial Sequence: Synthetic oligonucleotide
caucuguuugaggcucccc

SEQ ID NO: 2293571 - RNA, 19 nt, Artificial Sequence
  Description of Artificial Sequence: Synthetic oligonucleotide
ccaaaccgcaccgagccgc

SEQ ID NO: 2293572 - RNA, 19 nt, Artificial Sequence
  Description of Artificial Sequence: Synthetic oligonucleotide
cuaaucugucuuccugaaa

SEQ ID NO: 2293573 - RNA, 19 nt, Artificial Sequence
  Description of Artificial Sequence: Synthetic oligonucleotide
cagcgcggaaccaagccaa

SEQ ID NO: 2293574 - RNA, 19 nt, Artificial Sequence
  Description of Artificial Sequence: Synthetic oligonucleotide
cgcggaaccaagccaaacc

SEQ ID NO: 2293575 - RNA, 19 nt, Artificial Sequence
  Description of Artificial Sequence: Synthetic oligonucleotide
aaaccgcaccgagccgcuc

SEQ ID NO: 2293576 - RNA, 19 nt, Artificial Sequence
  Description of Artificial Sequence: Synthetic oligonucleotide
caugacacuccugaucugu

SEQ ID NO: 2293577 - RNA, 19 nt, Artificial Sequence
  Description of Artificial Sequence: Synthetic oligonucleotide
acggaaggcuccagcacug

SEQ ID NO: 2293578 - RNA, 19 nt, Artificial Sequence
  Description of Artificial Sequence: Synthetic oligonucleotide
ggagcccggcgacaagagg

SEQ ID NO: 2293579 - RNA, 19 nt, Artificial Sequence
  Description of Artificial Sequence: Synthetic oligonucleotide
guuaagaguaggauuccuu

SEQ ID NO: 2293580 - RNA, 19 nt, Artificial Sequence
  Description of Artificial Sequence: Synthetic oligonucleotide
cacuccugaucuguagcuc

SEQ ID NO: 2293581 - RNA, 19 nt, Artificial Sequence
  Description of Artificial Sequence: Synthetic oligonucleotide
agcgggucacugucaucug

SEQ ID NO: 2293582 - RNA, 19 nt, Artificial Sequence
  Description of Artificial Sequence: Synthetic oligonucleotide
ggugucguauaagguauga

SEQ ID NO: 2293583 - RNA, 19 nt, Artificial Sequence
  Description of Artificial Sequence: Synthetic oligonucleotide
auacacccgcucaccagug

SEQ ID NO: 2293584 - RNA, 19 nt, Artificial Sequence
  Description of Artificial Sequence: Synthetic oligonucleotide
agucucacucagggaaaga

SEQ ID NO: 2293585 - RNA, 19 nt, Artificial Sequence
  Description of Artificial Sequence: Synthetic oligonucleotide
cugagagggagaacucucu

SEQ ID NO: 2293586 - RNA, 19 nt, Artificial Sequence
  Description of Artificial Sequence: Synthetic oligonucleotide
agcucucucugaaguauaa

SEQ ID NO: 2293587 - RNA, 19 nt, Artificial Sequence
  Description of Artificial Sequence: Synthetic oligonucleotide
agggcagcgcggaaccaag

SEQ ID NO: 2293588 - RNA, 19 nt, Artificial Sequence
  Description of Artificial Sequence: Synthetic oligonucleotide
gaacucagaagaaggcuuu

SEQ ID NO: 2293589 - RNA, 19 nt, Artificial Sequence
  Description of Artificial Sequence: Synthetic oligonucleotide
agaaugggucucccuucua

SEQ ID NO: 2293590 - RNA, 19 nt, Artificial Sequence
  Description of Artificial Sequence: Synthetic oligonucleotide
ccuuucccgcaguaacugc

SEQ ID NO: 2293591 - RNA, 19 nt, Artificial Sequence
  Description of Artificial Sequence: Synthetic oligonucleotide
aggauuccuuccugacuua

SEQ ID NO: 2293592 - RNA, 19 nt, Artificial Sequence
  Description of Artificial Sequence: Synthetic oligonucleotide
ccuaaaugaauggaagucu

SEQ ID NO: 2293593 - RNA, 19 nt, Artificial Sequence
  Description of Artificial Sequence: Synthetic oligonucleotide
cagcgggucacugucaucu

SEQ ID NO: 2293594 - RNA, 19 nt, Artificial Sequence
  Description of Artificial Sequence: Synthetic oligonucleotide
ucccuucuauaagcucucu

SEQ ID NO: 2293595 - RNA, 19 nt, Artificial Sequence
  Description of Artificial Sequence: Synthetic oligonucleotide
gucucacucagggaaagau

SEQ ID NO: 2293596 - RNA, 19 nt, Artificial Sequence
  Description of Artificial Sequence: Synthetic oligonucleotide
gugucguauaagguaugaa

SEQ ID NO: 2293597 - RNA, 19 nt, Artificial Sequence
  Description of Artificial Sequence: Synthetic oligonucleotide
caucugugcuguuucuccu

SEQ ID NO: 2293598 - RNA, 19 nt, Artificial Sequence
  Description of Artificial Sequence: Synthetic oligonucleotide
gaccucuguauaaagccuu

SEQ ID NO: 2293599 - RNA, 19 nt, Artificial Sequence
  Description of Artificial Sequence: Synthetic oligonucleotide
cggaaccaagccaaaccgc

SEQ ID NO: 2293600 - RNA, 19 nt, Artificial Sequence
  Description of Artificial Sequence: Synthetic oligonucleotide
gccaaaccgcaccgagccg

SEQ ID NO: 2293601 - RNA, 19 nt, Artificial Sequence
  Description of Artificial Sequence: Synthetic oligonucleotide
ggcguaagaucuuuuccau

SEQ ID NO: 2293602 - RNA, 19 nt, Artificial Sequence
  Description of Artificial Sequence: Synthetic oligonucleotide
gcaccgagccgcucagacc

SEQ ID NO: 2293603 - RNA, 19 nt, Artificial Sequence
  Description of Artificial Sequence: Synthetic oligonucleotide
uucuuguccccagcuccua

SEQ ID NO: 2293604 - RNA, 19 nt, Artificial Sequence
  Description of Artificial Sequence: Synthetic oligonucleotide
acccgcucaccagugugga

SEQ ID NO: 2293605 - RNA, 19 nt, Artificial Sequence
  Description of Artificial Sequence: Synthetic oligonucleotide
cagcaacagcuuagagcuc

SEQ ID NO: 2293606 - RNA, 19 nt, Artificial Sequence
  Description of Artificial Sequence: Synthetic oligonucleotide
augacacuccugaucugua

SEQ ID NO: 2293607 - RNA, 19 nt, Artificial Sequence
  Description of Artificial Sequence: Synthetic oligonucleotide
ggauuuucuggugucguau

SEQ ID NO: 2293608 - RNA, 19 nt, Artificial Sequence
  Description of Artificial Sequence: Synthetic oligonucleotide
cccuucuauaagcucucuc

SEQ ID NO: 2293609 - RNA, 19 nt, Artificial Sequence
  Description of Artificial Sequence: Synthetic oligonucleotide
cgacaagagggcagcgcgg

SEQ ID NO: 2293610 - RNA, 19 nt, Artificial Sequence
  Description of Artificial Sequence: Synthetic oligonucleotide
gcacugugaguuugucuga

SEQ ID NO: 2293611 - RNA, 19 nt, Artificial Sequence
  Description of Artificial Sequence: Synthetic oligonucleotide
ccugaucuguagcucucuc

SEQ ID NO: 2293612 - RNA, 19 nt, Artificial Sequence
  Description of Artificial Sequence: Synthetic oligonucleotide
cagcacugugaguuugucu

SEQ ID NO: 2293613 - RNA, 19 nt, Artificial Sequence
  Description of Artificial Sequence: Synthetic oligonucleotide
cccggcgacaagagggcag

SEQ ID NO: 2293614 - RNA, 19 nt, Artificial Sequence
  Description of Artificial Sequence: Synthetic oligonucleotide
auccggagcccggcgacaa

SEQ ID NO: 2293615 - RNA, 19 nt, Artificial Sequence
  Description of Artificial Sequence: Synthetic oligonucleotide
agagggcagcgcggaacca

SEQ ID NO: 2293616 - RNA, 19 nt, Artificial Sequence
  Description of Artificial Sequence: Synthetic oligonucleotide
ccggcgacaagagggcagc

SEQ ID NO: 2293617 - RNA, 19 nt, Artificial Sequence
  Description of Artificial Sequence: Synthetic oligonucleotide
ccucuguauaaagccuuuc

SEQ ID NO: 2293618 - RNA, 19 nt, Artificial Sequence
  Description of Artificial Sequence: Synthetic oligonucleotide
gcaacagcuuagagcucug

SEQ ID NO: 2293619 - RNA, 19 nt, Artificial Sequence
  Description of Artificial Sequence: Synthetic oligonucleotide
caaaccgcaccgagccgcu

SEQ ID NO: 2293620 - RNA, 19 nt, Artificial Sequence
  Description of Artificial Sequence: Synthetic oligonucleotide
cccgcaguaacugcacaca

SEQ ID NO: 2293621 - RNA, 19 nt, Artificial Sequence
  Description of Artificial Sequence: Synthetic oligonucleotide
gcuuagagcucuggaugaa

SEQ ID NO: 2293622 - RNA, 19 nt, Artificial Sequence
  Description of Artificial Sequence: Synthetic oligonucleotide
agcgcggaaccaagccaaa

SEQ ID NO: 2293623 - RNA, 19 nt, Artificial Sequence
  Description of Artificial Sequence: Synthetic oligonucleotide
cacucgucacacucauauu

SEQ ID NO: 2293624 - RNA, 19 nt, Artificial Sequence
  Description of Artificial Sequence: Synthetic oligonucleotide
gcgcggaaccaagccaaac

SEQ ID NO: 2293625 - RNA, 19 nt, Artificial Sequence
  Description of Artificial Sequence: Synthetic oligonucleotide
ugucuccaguguggaucuu

SEQ ID NO: 2293626 - RNA, 19 nt, Artificial Sequence
  Description of Artificial Sequence: Synthetic oligonucleotide
gcgggucacugucaucugu

SEQ ID NO: 2293627 - RNA, 19 nt, Artificial Sequence
  Description of Artificial Sequence: Synthetic oligonucleotide
ccagcgggucacugucauc

SEQ ID NO: 2293628 - RNA, 19 nt, Artificial Sequence
  Description of Artificial Sequence: Synthetic oligonucleotide
ccgagccgcucagacccgg

SEQ ID NO: 2293629 - RNA, 19 nt, Artificial Sequence
  Description of Artificial Sequence: Synthetic oligonucleotide
ccaagccaaaccgcaccga

SEQ ID NO: 2293630 - RNA, 19 nt, Artificial Sequence
  Description of Artificial Sequence: Synthetic oligonucleotide
ccggagcccggcgacaaga

SEQ ID NO: 2293631 - RNA, 19 nt, Artificial Sequence
  Description of Artificial Sequence: Synthetic oligonucleotide
ccgcucagacccggguggc

SEQ ID NO: 2293632 - RNA, 19 nt, Artificial Sequence
  Description of Artificial Sequence: Synthetic oligonucleotide
cccuccugagagggagaac

SEQ ID NO: 2293633 - RNA, 19 nt, Artificial Sequence
  Description of Artificial Sequence: Synthetic oligonucleotide
ccagcuccuacaguagaau

SEQ ID NO: 2293634 - RNA, 19 nt, Artificial Sequence
  Description of Artificial Sequence: Synthetic oligonucleotide
ccgcaguaacugcacacau

SEQ ID NO: 2293635 - RNA, 19 nt, Artificial Sequence
  Description of Artificial Sequence: Synthetic oligonucleotide
ggugggccuucugcagaaa

SEQ ID NO: 2293636 - RNA, 19 nt, Artificial Sequence
  Description of Artificial Sequence: Synthetic oligonucleotide
gggguggcguaagaucuuu

SEQ ID NO: 2293637 - RNA, 19 nt, Artificial Sequence
  Description of Artificial Sequence: Synthetic oligonucleotide
ccccuccugagagggagaa

SEQ ID NO: 2293638 - RNA, 19 nt, Artificial Sequence
  Description of Artificial Sequence: Synthetic oligonucleotide
gcccggcgacaagagggca

SEQ ID NO: 2293639 - RNA, 19 nt, Artificial Sequence
  Description of Artificial Sequence: Synthetic oligonucleotide
cggcgacaagagggcagcg

SEQ ID NO: 2293640 - RNA, 19 nt, Artificial Sequence
  Description of Artificial Sequence: Synthetic oligonucleotide
ggguggcguaagaucuuuu

SEQ ID NO: 2293641 - RNA, 19 nt, Artificial Sequence
  Description of Artificial Sequence: Synthetic oligonucleotide
ccccaggcucagagacgga

SEQ ID NO: 2293642 - RNA, 19 nt, Artificial Sequence
  Description of Artificial Sequence: Synthetic oligonucleotide
ccgcaccgagccgcucaga

SEQ ID NO: 2293643 - RNA, 19 nt, Artificial Sequence
  Description of Artificial Sequence: Synthetic oligonucleotide
cggaaggcuccagcacugu

SEQ ID NO: 2293644 - RNA, 19 nt, Artificial Sequence
  Description of Artificial Sequence: Synthetic oligonucleotide
aaaauauccacacgaauuc

SEQ ID NO: 2293645 - RNA, 19 nt, Artificial Sequence
  Description of Artificial Sequence: Synthetic oligonucleotide
uuaaucauacauccuaccc

SEQ ID NO: 2293646 - RNA, 19 nt, Artificial Sequence
  Description of Artificial Sequence: Synthetic oligonucleotide
aaucauacauccuacccug

SEQ ID NO: 2293647 - RNA, 19 nt, Artificial Sequence
  Description of Artificial Sequence: Synthetic oligonucleotide
gauucuguggucugaaagg

SEQ ID NO: 2293648 - RNA, 19 nt, Artificial Sequence
  Description of Artificial Sequence: Synthetic oligonucleotide
uugauucuccaaaauaucc

SEQ ID NO: 2293649 - RNA, 19 nt, Artificial Sequence
  Description of Artificial Sequence: Synthetic oligonucleotide
aaggagaaggaaaaggugg

SEQ ID NO: 2293650 - RNA, 19 nt, Artificial Sequence
  Description of Artificial Sequence: Synthetic oligonucleotide
agcgaugaaauccacaaag

SEQ ID NO: 2293651 - RNA, 19 nt, Artificial Sequence
  Description of Artificial Sequence: Synthetic oligonucleotide
ucuuugugaacacaggucu

SEQ ID NO: 2293652 - RNA, 19 nt, Artificial Sequence
  Description of Artificial Sequence: Synthetic oligonucleotide
ugauaugaaguccuucagg

SEQ ID NO: 2293653 - RNA, 19 nt, Artificial Sequence
  Description of Artificial Sequence: Synthetic oligonucleotide
aaauacuugauuccucuca

SEQ ID NO: 2293654 - RNA, 19 nt, Artificial Sequence
  Description of Artificial Sequence: Synthetic oligonucleotide
uuuaaagagccucugcaug

SEQ ID NO: 2293655 - RNA, 19 nt, Artificial Sequence
  Description of Artificial Sequence: Synthetic oligonucleotide
auuggcuuuggucauaguc

SEQ ID NO: 2293656 - RNA, 19 nt, Artificial Sequence
  Description of Artificial Sequence: Synthetic oligonucleotide
aaagcgugauaugaagucc

SEQ ID NO: 2293657 - RNA, 19 nt, Artificial Sequence
  Description of Artificial Sequence: Synthetic oligonucleotide
aaaggacaggcucaguguc

SEQ ID NO: 2293658 - RNA, 19 nt, Artificial Sequence
  Description of Artificial Sequence: Synthetic oligonucleotide
agugucaugggcaugauuc

SEQ ID NO: 2293659 - RNA, 19 nt, Artificial Sequence
  Description of Artificial Sequence: Synthetic oligonucleotide
ucucaagaacaucauaagc

SEQ ID NO: 2293660 - RNA, 19 nt, Artificial Sequence
  Description of Artificial Sequence: Synthetic oligonucleotide
ugauucuguggucugaaag

SEQ ID NO: 2293661 - RNA, 19 nt, Artificial Sequence
  Description of Artificial Sequence: Synthetic oligonucleotide
ugaaaggacaggcucagug

SEQ ID NO: 2293662 - RNA, 19 nt, Artificial Sequence
  Description of Artificial Sequence: Synthetic oligonucleotide
uaaucauacauccuacccu

SEQ ID NO: 2293663 - RNA, 19 nt, Artificial Sequence
  Description of Artificial Sequence: Synthetic oligonucleotide
acagguugugcuuucggcc

SEQ ID NO: 2293664 - RNA, 19 nt, Artificial Sequence
  Description of Artificial Sequence: Synthetic oligonucleotide
ucuggaacgggauggaaag

SEQ ID NO: 2293665 - RNA, 19 nt, Artificial Sequence
  Description of Artificial Sequence: Synthetic oligonucleotide
uaagcgaugaaauccacaa

SEQ ID NO: 2293666 - RNA, 19 nt, Artificial Sequence
  Description of Artificial Sequence: Synthetic oligonucleotide
uucucguucagccauuggc

SEQ ID NO: 2293667 - RNA, 19 nt, Artificial Sequence
  Description of Artificial Sequence: Synthetic oligonucleotide
uaugaaguccuucagguuu

SEQ ID NO: 2293668 - RNA, 19 nt, Artificial Sequence
  Description of Artificial Sequence: Synthetic oligonucleotide
ucaaauacuugauuccucu

SEQ ID NO: 2293669 - RNA, 19 nt, Artificial Sequence
  Description of Artificial Sequence: Synthetic oligonucleotide
ucaggguuauagcaaagcc

SEQ ID NO: 2293670 - RNA, 19 nt, Artificial Sequence
  Description of Artificial Sequence: Synthetic oligonucleotide
uauagcaaagccuggccag

SEQ ID NO: 2293671 - RNA, 19 nt, Artificial Sequence
  Description of Artificial Sequence: Synthetic oligonucleotide
ugauucuccaaaauaucca

SEQ ID NO: 2293672 - RNA, 19 nt, Artificial Sequence
  Description of Artificial Sequence: Synthetic oligonucleotide
aguagagccucaucauucc

SEQ ID NO: 2293673 - RNA, 19 nt, Artificial Sequence
  Description of Artificial Sequence: Synthetic oligonucleotide
acgaauucucuccucuucc

SEQ ID NO: 2293674 - RNA, 19 nt, Artificial Sequence
  Description of Artificial Sequence: Synthetic oligonucleotide
acuuuaaagagccucugca

SEQ ID NO: 2293675 - RNA, 19 nt, Artificial Sequence
  Description of Artificial Sequence: Synthetic oligonucleotide
ucggaguagagccucauca

SEQ ID NO: 2293676 - RNA, 19 nt, Artificial Sequence
  Description of Artificial Sequence: Synthetic oligonucleotide
ucuuaaucauacauccuac

SEQ ID NO: 2293677 - RNA, 19 nt, Artificial Sequence
  Description of Artificial Sequence: Synthetic oligonucleotide
uugauuccucucaagaaca

SEQ ID NO: 2293678 - RNA, 19 nt, Artificial Sequence
  Description of Artificial Sequence: Synthetic oligonucleotide
uacuugauuccucucaaga

SEQ ID NO: 2293679 - RNA, 19 nt, Artificial Sequence
  Description of Artificial Sequence: Synthetic oligonucleotide
ucuguggucugaaaggaca

SEQ ID NO: 2293680 - RNA, 19 nt, Artificial Sequence
  Description of Artificial Sequence: Synthetic oligonucleotide
uuugugaacacaggucucg

SEQ ID NO: 2293681 - RNA, 19 nt, Artificial Sequence
  Description of Artificial Sequence: Synthetic oligonucleotide
ucagugucagacuagccug

SEQ ID NO: 2293682 - RNA, 19 nt, Artificial Sequence
  Description of Artificial Sequence: Synthetic oligonucleotide
aauauccacacgaauucuc

SEQ ID NO: 2293683 - RNA, 19 nt, Artificial Sequence
  Description of Artificial Sequence: Synthetic oligonucleotide
guugcugggacuuuaaaga

SEQ ID NO: 2293684 - RNA, 19 nt, Artificial Sequence
  Description of Artificial Sequence: Synthetic oligonucleotide
gauucuccaaaauauccac

SEQ ID NO: 2293685 - RNA, 19 nt, Artificial Sequence
  Description of Artificial Sequence: Synthetic oligonucleotide
aauacuugauuccucucaa

SEQ ID NO: 2293686 - RNA, 19 nt, Artificial Sequence
  Description of Artificial Sequence: Synthetic oligonucleotide
ugucagacuagccuggacu

SEQ ID NO: 2293687 - RNA, 19 nt, Artificial Sequence
  Description of Artificial Sequence: Synthetic oligonucleotide
cuugauuccucucaagaac

SEQ ID NO: 2293688 - RNA, 19 nt, Artificial Sequence
  Description of Artificial Sequence: Synthetic oligonucleotide
uagagccucaucauucccg

SEQ ID NO: 2293689 - RNA, 19 nt, Artificial Sequence
  Description of Artificial Sequence: Synthetic oligonucleotide
gcaucuuaaucauacaucc

SEQ ID NO: 2293690 - RNA, 19 nt, Artificial Sequence
  Description of Artificial Sequence: Synthetic oligonucleotide
aaguugauucuccaaaaua

SEQ ID NO: 2293691 - RNA, 19 nt, Artificial Sequence
  Description of Artificial Sequence: Synthetic oligonucleotide
cuuaaucauacauccuacc

SEQ ID NO: 2293692 - RNA, 19 nt, Artificial Sequence
  Description of Artificial Sequence: Synthetic oligonucleotide
aagaacaucauaagcgaug

SEQ ID NO: 2293693 - RNA, 19 nt, Artificial Sequence
  Description of Artificial Sequence: Synthetic oligonucleotide
gauaugaaguccuucaggu

SEQ ID NO: 2293694 - RNA, 19 nt, Artificial Sequence
  Description of Artificial Sequence: Synthetic oligonucleotide
ucaaagcgugauaugaagu

SEQ ID NO: 2293695 - RNA, 19 nt, Artificial Sequence
  Description of Artificial Sequence: Synthetic oligonucleotide
aagguaacgaagaauggca

SEQ ID NO: 2293696 - RNA, 19 nt, Artificial Sequence
  Description of Artificial Sequence: Synthetic oligonucleotide
aucuuaaucauacauccua

SEQ ID NO: 2293697 - RNA, 19 nt, Artificial Sequence
  Description of Artificial Sequence: Synthetic oligonucleotide
aaaggagaaggaaaaggug

SEQ ID NO: 2293698 - RNA, 19 nt, Artificial Sequence
  Description of Artificial Sequence: Synthetic oligonucleotide
aacgggauggaaagaaagg

SEQ ID NO: 2293699 - RNA, 19 nt, Artificial Sequence
  Description of Artificial Sequence: Synthetic oligonucleotide
augggcaugauucuguggu

SEQ ID NO: 2293700 - RNA, 19 nt, Artificial Sequence
  Description of Artificial Sequence: Synthetic oligonucleotide
auggaaaggaguugcuggg

SEQ ID NO: 2293701 - RNA, 19 nt, Artificial Sequence
  Description of Artificial Sequence: Synthetic oligonucleotide
cuuggguucaaauacuuga

SEQ ID NO: 2293702 - RNA, 19 nt, Artificial Sequence
  Description of Artificial Sequence: Synthetic oligonucleotide
cuagccuggacuuucugag

SEQ ID NO: 2293703 - RNA, 19 nt, Artificial Sequence
  Description of Artificial Sequence: Synthetic oligonucleotide
uggaaagaaaggagaagga

SEQ ID NO: 2293704 - RNA, 19 nt, Artificial Sequence
  Description of Artificial Sequence: Synthetic oligonucleotide
uuguccauaaguugauucu

SEQ ID NO: 2293705 - RNA, 19 nt, Artificial Sequence
  Description of Artificial Sequence: Synthetic oligonucleotide
cucaaagcgugauaugaag

SEQ ID NO: 2293706 - RNA, 19 nt, Artificial Sequence
  Description of Artificial Sequence: Synthetic oligonucleotide
guaacgaagaauggcauug

SEQ ID NO: 2293707 - RNA, 19 nt, Artificial Sequence
  Description of Artificial Sequence: Synthetic oligonucleotide
ucucguucagccauuggcu

SEQ ID NO: 2293708 - RNA, 19 nt, Artificial Sequence
  Description of Artificial Sequence: Synthetic oligonucleotide
ucauacauccuacccugcc

SEQ ID NO: 2293709 - RNA, 19 nt, Artificial Sequence
  Description of Artificial Sequence: Synthetic oligonucleotide
ugaacacaggucucgggag

SEQ ID NO: 2293710 - RNA, 19 nt, Artificial Sequence
  Description of Artificial Sequence: Synthetic oligonucleotide
guuauagcaaagccuggcc

SEQ ID NO: 2293711 - RNA, 19 nt, Artificial Sequence
  Description of Artificial Sequence: Synthetic oligonucleotide
caaagcgugauaugaaguc

SEQ ID NO: 2293712 - RNA, 19 nt, Artificial Sequence
  Description of Artificial Sequence: Synthetic oligonucleotide
gauggaaagaaaggagaag

SEQ ID NO: 2293713 - RNA, 19 nt, Artificial Sequence
  Description of Artificial Sequence: Synthetic oligonucleotide
aggguuauagcaaagccug

SEQ ID NO: 2293714 - RNA, 19 nt, Artificial Sequence
  Description of Artificial Sequence: Synthetic oligonucleotide
aaaagguggcucugggcug

SEQ ID NO: 2293715 - RNA, 19 nt, Artificial Sequence
  Description of Artificial Sequence: Synthetic oligonucleotide
gguucaaauacuugauucc

SEQ ID NO: 2293716 - RNA, 19 nt, Artificial Sequence
  Description of Artificial Sequence: Synthetic oligonucleotide
aaccaagggaaccuggcau

SEQ ID NO: 2293717 - RNA, 19 nt, Artificial Sequence
  Description of Artificial Sequence: Synthetic oligonucleotide
cucucaagaacaucauaag

SEQ ID NO: 2293718 - RNA, 19 nt, Artificial Sequence
  Description of Artificial Sequence: Synthetic oligonucleotide
caagguaacgaagaauggc

SEQ ID NO: 2293719 - RNA, 19 nt, Artificial Sequence
  Description of Artificial Sequence: Synthetic oligonucleotide
gaaaagguggcucugggcu

SEQ ID NO: 2293720 - RNA, 19 nt, Artificial Sequence
  Description of Artificial Sequence: Synthetic oligonucleotide
gaacgggauggaaagaaag

SEQ ID NO: 2293721 - RNA, 19 nt, Artificial Sequence
  Description of Artificial Sequence: Synthetic oligonucleotide
agagccucaucauucccgg

SEQ ID NO: 2293722 - RNA, 19 nt, Artificial Sequence
  Description of Artificial Sequence: Synthetic oligonucleotide
uggcaucuuaaucauacau

SEQ ID NO: 2293723 - RNA, 19 nt, Artificial Sequence
  Description of Artificial Sequence: Synthetic oligonucleotide
aaaccaagggaaccuggca

SEQ ID NO: 2293724 - RNA, 19 nt, Artificial Sequence
  Description of Artificial Sequence: Synthetic oligonucleotide
uugcugggacuuuaaagag

SEQ ID NO: 2293725 - RNA, 19 nt, Artificial Sequence
  Description of Artificial Sequence: Synthetic oligonucleotide
cacaaaggugaucuugucc

SEQ ID NO: 2293726 - RNA, 19 nt, Artificial Sequence
  Description of Artificial Sequence: Synthetic oligonucleotide
auaaguugauucuccaaaa

SEQ ID NO: 2293727 - RNA, 19 nt, Artificial Sequence
  Description of Artificial Sequence: Synthetic oligonucleotide
aggagaaggaaaagguggc

SEQ ID NO: 2293728 - RNA, 19 nt, Artificial Sequence
  Description of Artificial Sequence: Synthetic oligonucleotide
aacgaagaauggcauugcu

SEQ ID NO: 2293729 - RNA, 19 nt, Artificial Sequence
  Description of Artificial Sequence: Synthetic oligonucleotide
uggcuuuggucauagucag

SEQ ID NO: 2293730 - RNA, 19 nt, Artificial Sequence
  Description of Artificial Sequence: Synthetic oligonucleotide
ucagccauuggcuuugguc

SEQ ID NO: 2293731 - RNA, 19 nt, Artificial Sequence
  Description of Artificial Sequence: Synthetic oligonucleotide
guuguccauaaguugauuc

SEQ ID NO: 2293732 - RNA, 19 nt, Artificial Sequence
  Description of Artificial Sequence: Synthetic oligonucleotide
uaaguugauucuccaaaau

SEQ ID NO: 2293733 - RNA, 19 nt, Artificial Sequence
  Description of Artificial Sequence: Synthetic oligonucleotide
gacuuuaaagagccucugc

SEQ ID NO: 2293734 - RNA, 19 nt, Artificial Sequence
  Description of Artificial Sequence: Synthetic oligonucleotide
auuccucucaagaacauca

SEQ ID NO: 2293735 - RNA, 19 nt, Artificial Sequence
  Description of Artificial Sequence: Synthetic oligonucleotide
gaacacaggucucgggagg

SEQ ID NO: 2293736 - RNA, 19 nt, Artificial Sequence
  Description of Artificial Sequence: Synthetic oligonucleotide
aaggaaaagguggcucugg

SEQ ID NO: 2293737 - RNA, 19 nt, Artificial Sequence
  Description of Artificial Sequence: Synthetic oligonucleotide
ugugaacacaggucucggg

SEQ ID NO: 2293738 - RNA, 19 nt, Artificial Sequence
  Description of Artificial Sequence: Synthetic oligonucleotide
uucaaauacuugauuccuc

SEQ ID NO: 2293739 - RNA, 19 nt, Artificial Sequence
  Description of Artificial Sequence: Synthetic oligonucleotide
aaauauccacacgaauucu

SEQ ID NO: 2293740 - RNA, 19 nt, Artificial Sequence
  Description of Artificial Sequence: Synthetic oligonucleotide
ugcaugggaggauuggaug

SEQ ID NO: 2293741 - RNA, 19 nt, Artificial Sequence
  Description of Artificial Sequence: Synthetic oligonucleotide
cauaaguugauucuccaaa

SEQ ID NO: 2293742 - RNA, 19 nt, Artificial Sequence
  Description of Artificial Sequence: Synthetic oligonucleotide
aucuuugugaacacagguc

SEQ ID NO: 2293743 - RNA, 19 nt, Artificial Sequence
  Description of Artificial Sequence: Synthetic oligonucleotide
agagccucugcaugggagg

SEQ ID NO: 2293744 - RNA, 19 nt, Artificial Sequence
  Description of Artificial Sequence: Synthetic oligonucleotide
caaaccaagggaaccuggc

SEQ ID NO: 2293745 - RNA, 19 nt, Artificial Sequence
  Description of Artificial Sequence: Synthetic oligonucleotide
aggaaaagguggcucuggg

SEQ ID NO: 2293746 - RNA, 19 nt, Artificial Sequence
  Description of Artificial Sequence: Synthetic oligonucleotide
agaacaucauaagcgauga

SEQ ID NO: 2293747 - RNA, 19 nt, Artificial Sequence
  Description of Artificial Sequence: Synthetic oligonucleotide
ugcugggacuuuaaagagc

SEQ ID NO: 2293748 - RNA, 19 nt, Artificial Sequence
  Description of Artificial Sequence: Synthetic oligonucleotide
acuugauuccucucaagaa

SEQ ID NO: 2293749 - RNA, 19 nt, Artificial Sequence
  Description of Artificial Sequence: Synthetic oligonucleotide
accaagggaaccuggcauc

SEQ ID NO: 2293750 - RNA, 19 nt, Artificial Sequence
  Description of Artificial Sequence: Synthetic oligonucleotide
uccauaaguugauucucca

SEQ ID NO: 2293751 - RNA, 19 nt, Artificial Sequence
  Description of Artificial Sequence: Synthetic oligonucleotide
ugcgguuguccauaaguug

SEQ ID NO: 2293752 - RNA, 19 nt, Artificial Sequence
  Description of Artificial Sequence: Synthetic oligonucleotide
aggcuuggggucuggaacg

SEQ ID NO: 2293753 - RNA, 19 nt, Artificial Sequence
  Description of Artificial Sequence: Synthetic oligonucleotide
gugauaugaaguccuucag

SEQ ID NO: 2293754 - RNA, 19 nt, Artificial Sequence
  Description of Artificial Sequence: Synthetic oligonucleotide
gaaaggagaaggaaaaggu

SEQ ID NO: 2293755 - RNA, 19 nt, Artificial Sequence
  Description of Artificial Sequence: Synthetic oligonucleotide
ucagguuugggaacucuuc

SEQ ID NO: 2293756 - RNA, 19 nt, Artificial Sequence
  Description of Artificial Sequence: Synthetic oligonucleotide
uuggguucaaauacuugau

SEQ ID NO: 2293757 - RNA, 19 nt, Artificial Sequence
  Description of Artificial Sequence: Synthetic oligonucleotide
uaaagagccucugcauggg

SEQ ID NO: 2293758 - RNA, 19 nt, Artificial Sequence
  Description of Artificial Sequence: Synthetic oligonucleotide
caaguggccaucuuuguga

SEQ ID NO: 2293759 - RNA, 19 nt, Artificial Sequence
  Description of Artificial Sequence: Synthetic oligonucleotide
gagcuggugaggcuugggg

SEQ ID NO: 2293760 - RNA, 19 nt, Artificial Sequence
  Description of Artificial Sequence: Synthetic oligonucleotide
auagcaaagccuggccagc

SEQ ID NO: 2293761 - RNA, 19 nt, Artificial Sequence
  Description of Artificial Sequence: Synthetic oligonucleotide
uucggccaagguaacgaag

SEQ ID NO: 2293762 - RNA, 19 nt, Artificial Sequence
  Description of Artificial Sequence: Synthetic oligonucleotide
uccuggcugcuccucaagg

SEQ ID NO: 2293763 - RNA, 19 nt, Artificial Sequence
  Description of Artificial Sequence: Synthetic oligonucleotide
ggguucaaauacuugauuc

SEQ ID NO: 2293764 - RNA, 19 nt, Artificial Sequence
  Description of Artificial Sequence: Synthetic oligonucleotide
ugggaggauuggaugagca

SEQ ID NO: 2293765 - RNA, 19 nt, Artificial Sequence
  Description of Artificial Sequence: Synthetic oligonucleotide
cuuccaggcacuuggguuc

SEQ ID NO: 2293766 - RNA, 19 nt, Artificial Sequence
  Description of Artificial Sequence: Synthetic oligonucleotide
cagguuugggaacucuucc

SEQ ID NO: 2293767 - RNA, 19 nt, Artificial Sequence
  Description of Artificial Sequence: Synthetic oligonucleotide
gaagaauggcauugcucug

SEQ ID NO: 2293768 - RNA, 19 nt, Artificial Sequence
  Description of Artificial Sequence: Synthetic oligonucleotide
acuagccuggacuuucuga

SEQ ID NO: 2293769 - RNA, 19 nt, Artificial Sequence
  Description of Artificial Sequence: Synthetic oligonucleotide
cuuccgucuccccacacag

SEQ ID NO: 2293770 - RNA, 19 nt, Artificial Sequence
  Description of Artificial Sequence: Synthetic oligonucleotide
caaaauauccacacgaauu

SEQ ID NO: 2293771 - RNA, 19 nt, Artificial Sequence
  Description of Artificial Sequence: Synthetic oligonucleotide
cagccauuggcuuugguca

SEQ ID NO: 2293772 - RNA, 19 nt, Artificial Sequence
  Description of Artificial Sequence: Synthetic oligonucleotide
auacuugauuccucucaag

SEQ ID NO: 2293773 - RNA, 19 nt, Artificial Sequence
  Description of Artificial Sequence: Synthetic oligonucleotide
ucuuccaggcacuuggguu

SEQ ID NO: 2293774 - RNA, 19 nt, Artificial Sequence
  Description of Artificial Sequence: Synthetic oligonucleotide
agcaccaugcgguugucca

SEQ ID NO: 2293775 - RNA, 19 nt, Artificial Sequence
  Description of Artificial Sequence: Synthetic oligonucleotide
ugggacuuuaaagagccuc

SEQ ID NO: 2293776 - RNA, 19 nt, Artificial Sequence
  Description of Artificial Sequence: Synthetic oligonucleotide
aagcgugauaugaaguccu

SEQ ID NO: 2293777 - RNA, 19 nt, Artificial Sequence
  Description of Artificial Sequence: Synthetic oligonucleotide
gaguagagccucaucauuc

SEQ ID NO: 2293778 - RNA, 19 nt, Artificial Sequence
  Description of Artificial Sequence: Synthetic oligonucleotide
aaccuggcaucuuaaucau

SEQ ID NO: 2293779 - RNA, 19 nt, Artificial Sequence
  Description of Artificial Sequence: Synthetic oligonucleotide
ccuggcaucuuaaucauac

SEQ ID NO: 2293780 - RNA, 19 nt, Artificial Sequence
  Description of Artificial Sequence: Synthetic oligonucleotide
uguggucugaaaggacagg

SEQ ID NO: 2293781 - RNA, 19 nt, Artificial Sequence
  Description of Artificial Sequence: Synthetic oligonucleotide
gugaacacaggucucggga

SEQ ID NO: 2293782 - RNA, 19 nt, Artificial Sequence
  Description of Artificial Sequence: Synthetic oligonucleotide
cauccuacccugccaaggc

SEQ ID NO: 2293783 - RNA, 19 nt, Artificial Sequence
  Description of Artificial Sequence: Synthetic oligonucleotide
gguuugggaacucuuccag

SEQ ID NO: 2293784 - RNA, 19 nt, Artificial Sequence
  Description of Artificial Sequence: Synthetic oligonucleotide
auacauccuacccugccaa

SEQ ID NO: 2293785 - RNA, 19 nt, Artificial Sequence
  Description of Artificial Sequence: Synthetic oligonucleotide
gacaggcucagugucagac

SEQ ID NO: 2293786 - RNA, 19 nt, Artificial Sequence
  Description of Artificial Sequence: Synthetic oligonucleotide
uguccauaaguugauucuc

SEQ ID NO: 2293787 - RNA, 19 nt, Artificial Sequence
  Description of Artificial Sequence: Synthetic oligonucleotide
ucaugggcaugauucugug

SEQ ID NO: 2293788 - RNA, 19 nt, Artificial Sequence
  Description of Artificial Sequence: Synthetic oligonucleotide
aagggaaccuggcaucuua

SEQ ID NO: 2293789 - RNA, 19 nt, Artificial Sequence
  Description of Artificial Sequence: Synthetic oligonucleotide
acauccuacccugccaagg

SEQ ID NO: 2293790 - RNA, 19 nt, Artificial Sequence
  Description of Artificial Sequence: Synthetic oligonucleotide
acaggucucgggaggaagc

SEQ ID NO: 2293791 - RNA, 19 nt, Artificial Sequence
  Description of Artificial Sequence: Synthetic oligonucleotide
uugugaacacaggucucgg

SEQ ID NO: 2293792 - RNA, 19 nt, Artificial Sequence
  Description of Artificial Sequence: Synthetic oligonucleotide
guugauucuccaaaauauc

SEQ ID NO: 2293793 - RNA, 19 nt, Artificial Sequence
  Description of Artificial Sequence: Synthetic oligonucleotide
ugcuccucaaggcucccug

SEQ ID NO: 2293794 - RNA, 19 nt, Artificial Sequence
  Description of Artificial Sequence: Synthetic oligonucleotide
acgggauggaaagaaagga

SEQ ID NO: 2293795 - RNA, 19 nt, Artificial Sequence
  Description of Artificial Sequence: Synthetic oligonucleotide
ucuuccgucuccccacaca

SEQ ID NO: 2293796 - RNA, 19 nt, Artificial Sequence
  Description of Artificial Sequence: Synthetic oligonucleotide
agccucaucauucccggga

SEQ ID NO: 2293797 - RNA, 19 nt, Artificial Sequence
  Description of Artificial Sequence: Synthetic oligonucleotide
auucuguggucugaaagga

SEQ ID NO: 2293798 - RNA, 19 nt, Artificial Sequence
  Description of Artificial Sequence: Synthetic oligonucleotide
guggccaucuuugugaaca

SEQ ID NO: 2293799 - RNA, 19 nt, Artificial Sequence
  Description of Artificial Sequence: Synthetic oligonucleotide
uaacgaagaauggcauugc

SEQ ID NO: 2293800 - RNA, 19 nt, Artificial Sequence
  Description of Artificial Sequence: Synthetic oligonucleotide
guggucugaaaggacaggc

SEQ ID NO: 2293801 - RNA, 19 nt, Artificial Sequence
  Description of Artificial Sequence: Synthetic oligonucleotide
auccacaaaggugaucuug

SEQ ID NO: 2293802 - RNA, 19 nt, Artificial Sequence
  Description of Artificial Sequence: Synthetic oligonucleotide
gcugggacuuuaaagagcc

SEQ ID NO: 2293803 - RNA, 19 nt, Artificial Sequence
  Description of Artificial Sequence: Synthetic oligonucleotide
uggguucaaauacuugauu

SEQ ID NO: 2293804 - RNA, 19 nt, Artificial Sequence
  Description of Artificial Sequence: Synthetic oligonucleotide
aagcgaugaaauccacaaa

SEQ ID NO: 2293805 - RNA, 19 nt, Artificial Sequence
  Description of Artificial Sequence: Synthetic oligonucleotide
caaauacuugauuccucuc

SEQ ID NO: 2293806 - RNA, 19 nt, Artificial Sequence
  Description of Artificial Sequence: Synthetic oligonucleotide
uucuguggucugaaaggac

SEQ ID NO: 2293807 - RNA, 19 nt, Artificial Sequence
  Description of Artificial Sequence: Synthetic oligonucleotide
cagugucagacuagccugg

SEQ ID NO: 2293808 - RNA, 19 nt, Artificial Sequence
  Description of Artificial Sequence: Synthetic oligonucleotide
cauucccgggaguugcucc

SEQ ID NO: 2293809 - RNA, 19 nt, Artificial Sequence
  Description of Artificial Sequence: Synthetic oligonucleotide
caugggcaugauucugugg

SEQ ID NO: 2293810 - RNA, 19 nt, Artificial Sequence
  Description of Artificial Sequence: Synthetic oligonucleotide
agguuugggaacucuucca

SEQ ID NO: 2293811 - RNA, 19 nt, Artificial Sequence
  Description of Artificial Sequence: Synthetic oligonucleotide
cuuuggucauagucaggag

SEQ ID NO: 2293812 - RNA, 19 nt, Artificial Sequence
  Description of Artificial Sequence: Synthetic oligonucleotide
aaguggccaucuuugugaa

SEQ ID NO: 2293813 - RNA, 19 nt, Artificial Sequence
  Description of Artificial Sequence: Synthetic oligonucleotide
gucaggguuauagcaaagc

SEQ ID NO: 2293814 - RNA, 19 nt, Artificial Sequence
  Description of Artificial Sequence: Synthetic oligonucleotide
auauccacacgaauucucu

SEQ ID NO: 2293815 - RNA, 19 nt, Artificial Sequence
  Description of Artificial Sequence: Synthetic oligonucleotide
uucagguuugggaacucuu

SEQ ID NO: 2293816 - RNA, 19 nt, Artificial Sequence
  Description of Artificial Sequence: Synthetic oligonucleotide
uauccacacgaauucucuc

SEQ ID NO: 2293817 - RNA, 19 nt, Artificial Sequence
  Description of Artificial Sequence: Synthetic oligonucleotide
guccauaaguugauucucc

SEQ ID NO: 2293818 - RNA, 19 nt, Artificial Sequence
  Description of Artificial Sequence: Synthetic oligonucleotide
gaaggaaaagguggcucug

SEQ ID NO: 2293819 - RNA, 19 nt, Artificial Sequence
  Description of Artificial Sequence: Synthetic oligonucleotide
augggaggauuggaugagc

SEQ ID NO: 2293820 - RNA, 19 nt, Artificial Sequence
  Description of Artificial Sequence: Synthetic oligonucleotide
ugauuccucucaagaacau

SEQ ID NO: 2293821 - RNA, 19 nt, Artificial Sequence
  Description of Artificial Sequence: Synthetic oligonucleotide
ucaaggcucccugcaaacc

SEQ ID NO: 2293822 - RNA, 19 nt, Artificial Sequence
  Description of Artificial Sequence: Synthetic oligonucleotide
aacacaggucucgggagga

SEQ ID NO: 2293823 - RNA, 19 nt, Artificial Sequence
  Description of Artificial Sequence: Synthetic oligonucleotide
ugcaaaccaagggaaccug

SEQ ID NO: 2293824 - RNA, 19 nt, Artificial Sequence
  Description of Artificial Sequence: Synthetic oligonucleotide
ggucugaaaggacaggcuc

SEQ ID NO: 2293825 - RNA, 19 nt, Artificial Sequence
  Description of Artificial Sequence: Synthetic oligonucleotide
auaugaaguccuucagguu

SEQ ID NO: 2293826 - RNA, 19 nt, Artificial Sequence
  Description of Artificial Sequence: Synthetic oligonucleotide
aucauacauccuacccugc

SEQ ID NO: 2293827 - RNA, 19 nt, Artificial Sequence
  Description of Artificial Sequence: Synthetic oligonucleotide
cacgaauucucuccucuuc

SEQ ID NO: 2293828 - RNA, 19 nt, Artificial Sequence
  Description of Artificial Sequence: Synthetic oligonucleotide
cucaaggcucccugcaaac

SEQ ID NO: 2293829 - RNA, 19 nt, Artificial Sequence
  Description of Artificial Sequence: Synthetic oligonucleotide
uccucucaagaacaucaua

SEQ ID NO: 2293830 - RNA, 19 nt, Artificial Sequence
  Description of Artificial Sequence: Synthetic oligonucleotide
uacauccuacccugccaag

SEQ ID NO: 2293831 - RNA, 19 nt, Artificial Sequence
  Description of Artificial Sequence: Synthetic oligonucleotide
gcucccugcaaaccaaggg

SEQ ID NO: 2293832 - RNA, 19 nt, Artificial Sequence
  Description of Artificial Sequence: Synthetic oligonucleotide
guagagccucaucauuccc

SEQ ID NO: 2293833 - RNA, 19 nt, Artificial Sequence
  Description of Artificial Sequence: Synthetic oligonucleotide
ggaaccuggcaucuuaauc

SEQ ID NO: 2293834 - RNA, 19 nt, Artificial Sequence
  Description of Artificial Sequence: Synthetic oligonucleotide
ccaagguaacgaagaaugg

SEQ ID NO: 2293835 - RNA, 19 nt, Artificial Sequence
  Description of Artificial Sequence: Synthetic oligonucleotide
gcgaugaaauccacaaagg

SEQ ID NO: 2293836 - RNA, 19 nt, Artificial Sequence
  Description of Artificial Sequence: Synthetic oligonucleotide
uggggucuggaacgggaug

SEQ ID NO: 2293837 - RNA, 19 nt, Artificial Sequence
  Description of Artificial Sequence: Synthetic oligonucleotide
cauacauccuacccugcca

SEQ ID NO: 2293838 - RNA, 19 nt, Artificial Sequence
  Description of Artificial Sequence: Synthetic oligonucleotide
guugcuccagguacccugg

SEQ ID NO: 2293839 - RNA, 19 nt, Artificial Sequence
  Description of Artificial Sequence: Synthetic oligonucleotide
ggaaaagguggcucugggc

SEQ ID NO: 2293840 - RNA, 19 nt, Artificial Sequence
  Description of Artificial Sequence: Synthetic oligonucleotide
uuucggccaagguaacgaa

SEQ ID NO: 2293841 - RNA, 19 nt, Artificial Sequence
  Description of Artificial Sequence: Synthetic oligonucleotide
aguggccaucuuugugaac

SEQ ID NO: 2293842 - RNA, 19 nt, Artificial Sequence
  Description of Artificial Sequence: Synthetic oligonucleotide
guacccuggcuucagcuuc

SEQ ID NO: 2293843 - RNA, 19 nt, Artificial Sequence
  Description of Artificial Sequence: Synthetic oligonucleotide
ggcaucuuaaucauacauc

SEQ ID NO: 2293844 - RNA, 19 nt, Artificial Sequence
  Description of Artificial Sequence: Synthetic oligonucleotide
ggaaaggaguugcugggac

SEQ ID NO: 2293845 - RNA, 19 nt, Artificial Sequence
  Description of Artificial Sequence: Synthetic oligonucleotide
uuccucucaagaacaucau

SEQ ID NO: 2293846 - RNA, 19 nt, Artificial Sequence
  Description of Artificial Sequence: Synthetic oligonucleotide
ccucucaagaacaucauaa

SEQ ID NO: 2293847 - RNA, 19 nt, Artificial Sequence
  Description of Artificial Sequence: Synthetic oligonucleotide
cuuucggccaagguaacga

SEQ ID NO: 2293848 - RNA, 19 nt, Artificial Sequence
  Description of Artificial Sequence: Synthetic oligonucleotide
cucagugucagacuagccu

SEQ ID NO: 2293849 - RNA, 19 nt, Artificial Sequence
  Description of Artificial Sequence: Synthetic oligonucleotide
gugcuuucggccaagguaa

SEQ ID NO: 2293850 - RNA, 19 nt, Artificial Sequence
  Description of Artificial Sequence: Synthetic oligonucleotide
caugcgguuguccauaagu

SEQ ID NO: 2293851 - RNA, 19 nt, Artificial Sequence
  Description of Artificial Sequence: Synthetic oligonucleotide
uggaaaggaguugcuggga

SEQ ID NO: 2293852 - RNA, 19 nt, Artificial Sequence
  Description of Artificial Sequence: Synthetic oligonucleotide
caugggaggauuggaugag

SEQ ID NO: 2293853 - RNA, 19 nt, Artificial Sequence
  Description of Artificial Sequence: Synthetic oligonucleotide
gauuccucucaagaacauc

SEQ ID NO: 2293854 - RNA, 19 nt, Artificial Sequence
  Description of Artificial Sequence: Synthetic oligonucleotide
caucuuugugaacacaggu

SEQ ID NO: 2293855 - RNA, 19 nt, Artificial Sequence
  Description of Artificial Sequence: Synthetic oligonucleotide
gggauggaaagaaaggaga

SEQ ID NO: 2293856 - RNA, 19 nt, Artificial Sequence
  Description of Artificial Sequence: Synthetic oligonucleotide
acaggcucagugucagacu

SEQ ID NO: 2293857 - RNA, 19 nt, Artificial Sequence
  Description of Artificial Sequence: Synthetic oligonucleotide
cucugggcugcaguggucc

SEQ ID NO: 2293858 - RNA, 19 nt, Artificial Sequence
  Description of Artificial Sequence: Synthetic oligonucleotide
gcuuuggucauagucagga

SEQ ID NO: 2293859 - RNA, 19 nt, Artificial Sequence
  Description of Artificial Sequence: Synthetic oligonucleotide
acuuggguucaaauacuug

SEQ ID NO: 2293860 - RNA, 19 nt, Artificial Sequence
  Description of Artificial Sequence: Synthetic oligonucleotide
guggcucugggcugcagug

SEQ ID NO: 2293861 - RNA, 19 nt, Artificial Sequence
  Description of Artificial Sequence: Synthetic oligonucleotide
gaggauuggaugagcaaaa

SEQ ID NO: 2293862 - RNA, 19 nt, Artificial Sequence
  Description of Artificial Sequence: Synthetic oligonucleotide
caaggcucccugcaaacca

SEQ ID NO: 2293863 - RNA, 19 nt, Artificial Sequence
  Description of Artificial Sequence: Synthetic oligonucleotide
cuucucguucagccauugg

SEQ ID NO: 2293864 - RNA, 19 nt, Artificial Sequence
  Description of Artificial Sequence: Synthetic oligonucleotide
caggguuauagcaaagccu

SEQ ID NO: 2293865 - RNA, 19 nt, Artificial Sequence
  Description of Artificial Sequence: Synthetic oligonucleotide
ggaaagaaaggagaaggaa

SEQ ID NO: 2293866 - RNA, 19 nt, Artificial Sequence
  Description of Artificial Sequence: Synthetic oligonucleotide
ggggucuggaacgggaugg

SEQ ID NO: 2293867 - RNA, 19 nt, Artificial Sequence
  Description of Artificial Sequence: Synthetic oligonucleotide
cuuggggucuggaacggga

SEQ ID NO: 2293868 - RNA, 19 nt, Artificial Sequence
  Description of Artificial Sequence: Synthetic oligonucleotide
gaaaggaguugcugggacu

SEQ ID NO: 2293869 - RNA, 19 nt, Artificial Sequence
  Description of Artificial Sequence: Synthetic oligonucleotide
cuuuaaagagccucugcau

SEQ ID NO: 2293870 - RNA, 19 nt, Artificial Sequence
  Description of Artificial Sequence: Synthetic oligonucleotide
uccucaaggcucccugcaa

SEQ ID NO: 2293871 - RNA, 19 nt, Artificial Sequence
  Description of Artificial Sequence: Synthetic oligonucleotide
cagugguccuggcugcucc

SEQ ID NO: 2293872 - RNA, 19 nt, Artificial Sequence
  Description of Artificial Sequence: Synthetic oligonucleotide
gucugaaaggacaggcuca

SEQ ID NO: 2293873 - RNA, 19 nt, Artificial Sequence
  Description of Artificial Sequence: Synthetic oligonucleotide
uagccuggacuuucugaga

SEQ ID NO: 2293874 - RNA, 19 nt, Artificial Sequence
  Description of Artificial Sequence: Synthetic oligonucleotide
caaagccuggccagcacca

SEQ ID NO: 2293875 - RNA, 19 nt, Artificial Sequence
  Description of Artificial Sequence: Synthetic oligonucleotide
uggcugcuccucaaggcuc

SEQ ID NO: 2293876 - RNA, 19 nt, Artificial Sequence
  Description of Artificial Sequence: Synthetic oligonucleotide
gacuagccuggacuuucug

SEQ ID NO: 2293877 - RNA, 19 nt, Artificial Sequence
  Description of Artificial Sequence: Synthetic oligonucleotide
uuggggucuggaacgggau

SEQ ID NO: 2293878 - RNA, 19 nt, Artificial Sequence
  Description of Artificial Sequence: Synthetic oligonucleotide
cagacuagccuggacuuuc

SEQ ID NO: 2293879 - RNA, 19 nt, Artificial Sequence
  Description of Artificial Sequence: Synthetic oligonucleotide
gcaugggaggauuggauga

SEQ ID NO: 2293880 - RNA, 19 nt, Artificial Sequence
  Description of Artificial Sequence: Synthetic oligonucleotide
gagccucaucauucccggg

SEQ ID NO: 2293881 - RNA, 19 nt, Artificial Sequence
  Description of Artificial Sequence: Synthetic oligonucleotide
ucccgggaguugcuccagg

SEQ ID NO: 2293882 - RNA, 19 nt, Artificial Sequence
  Description of Artificial Sequence: Synthetic oligonucleotide
ccugcaaaccaagggaacc

SEQ ID NO: 2293883 - RNA, 19 nt, Artificial Sequence
  Description of Artificial Sequence: Synthetic oligonucleotide
gcaaagccuggccagcacc

SEQ ID NO: 2293884 - RNA, 19 nt, Artificial Sequence
  Description of Artificial Sequence: Synthetic oligonucleotide
uggcucugggcugcagugg

SEQ ID NO: 2293885 - RNA, 19 nt, Artificial Sequence
  Description of Artificial Sequence: Synthetic oligonucleotide
ggaggauuggaugagcaaa

SEQ ID NO: 2293886 - RNA, 19 nt, Artificial Sequence
  Description of Artificial Sequence: Synthetic oligonucleotide
ucguucagccauuggcuuu

SEQ ID NO: 2293887 - RNA, 19 nt, Artificial Sequence
  Description of Artificial Sequence: Synthetic oligonucleotide
gcaaaccaagggaaccugg

SEQ ID NO: 2293888 - RNA, 19 nt, Artificial Sequence
  Description of Artificial Sequence: Synthetic oligonucleotide
ugggcaugauucugugguc

SEQ ID NO: 2293889 - RNA, 19 nt, Artificial Sequence
  Description of Artificial Sequence: Synthetic oligonucleotide
cgugauaugaaguccuuca

SEQ ID NO: 2293890 - RNA, 19 nt, Artificial Sequence
  Description of Artificial Sequence: Synthetic oligonucleotide
uagcaaagccuggccagca

SEQ ID NO: 2293891 - RNA, 19 nt, Artificial Sequence
  Description of Artificial Sequence: Synthetic oligonucleotide
augauucuguggucugaaa

SEQ ID NO: 2293892 - RNA, 19 nt, Artificial Sequence
  Description of Artificial Sequence: Synthetic oligonucleotide
uggccaucuuugugaacac

SEQ ID NO: 2293893 - RNA, 19 nt, Artificial Sequence
  Description of Artificial Sequence: Synthetic oligonucleotide
cuccagguacccuggcuuc

SEQ ID NO: 2293894 - RNA, 19 nt, Artificial Sequence
  Description of Artificial Sequence: Synthetic oligonucleotide
agguaacgaagaauggcau

SEQ ID NO: 2293895 - RNA, 19 nt, Artificial Sequence
  Description of Artificial Sequence: Synthetic oligonucleotide
ugcuuucggccaagguaac

SEQ ID NO: 2293896 - RNA, 19 nt, Artificial Sequence
  Description of Artificial Sequence: Synthetic oligonucleotide
uucucuccucuuccgucuc

SEQ ID NO: 2293897 - RNA, 19 nt, Artificial Sequence
  Description of Artificial Sequence: Synthetic oligonucleotide
acacgaauucucuccucuu

SEQ ID NO: 2293898 - RNA, 19 nt, Artificial Sequence
  Description of Artificial Sequence: Synthetic oligonucleotide
ggauggaaagaaaggagaa

SEQ ID NO: 2293899 - RNA, 19 nt, Artificial Sequence
  Description of Artificial Sequence: Synthetic oligonucleotide
acuucucguucagccauug

SEQ ID NO: 2293900 - RNA, 19 nt, Artificial Sequence
  Description of Artificial Sequence: Synthetic oligonucleotide
cacaggucucgggaggaag

SEQ ID NO: 2293901 - RNA, 19 nt, Artificial Sequence
  Description of Artificial Sequence: Synthetic oligonucleotide
agagggagcuggugaggcu

SEQ ID NO: 2293902 - RNA, 19 nt, Artificial Sequence
  Description of Artificial Sequence: Synthetic oligonucleotide
ggcaugauucuguggucug

SEQ ID NO: 2293903 - RNA, 19 nt, Artificial Sequence
  Description of Artificial Sequence: Synthetic oligonucleotide
cgaauucucuccucuuccg

SEQ ID NO: 2293904 - RNA, 19 nt, Artificial Sequence
  Description of Artificial Sequence: Synthetic oligonucleotide
cgaagaauggcauugcucu

SEQ ID NO: 2293905 - RNA, 19 nt, Artificial Sequence
  Description of Artificial Sequence: Synthetic oligonucleotide
agccauuggcuuuggucau

SEQ ID NO: 2293906 - RNA, 19 nt, Artificial Sequence
  Description of Artificial Sequence: Synthetic oligonucleotide
gcgguuguccauaaguuga

SEQ ID NO: 2293907 - RNA, 19 nt, Artificial Sequence
  Description of Artificial Sequence: Synthetic oligonucleotide
gcuggugaggcuugggguc

SEQ ID NO: 2293908 - RNA, 19 nt, Artificial Sequence
  Description of Artificial Sequence: Synthetic oligonucleotide
uucagccauuggcuuuggu

SEQ ID NO: 2293909 - RNA, 19 nt, Artificial Sequence
  Description of Artificial Sequence: Synthetic oligonucleotide
gccucaucauucccgggag

SEQ ID NO: 2293910 - RNA, 19 nt, Artificial Sequence
  Description of Artificial Sequence: Synthetic oligonucleotide
aaggcucccugcaaaccaa

SEQ ID NO: 2293911 - RNA, 19 nt, Artificial Sequence
  Description of Artificial Sequence: Synthetic oligonucleotide
gaguugcugggacuuuaaa

SEQ ID NO: 2293912 - RNA, 19 nt, Artificial Sequence
  Description of Artificial Sequence: Synthetic oligonucleotide
ccuggcugcuccucaaggc

SEQ ID NO: 2293913 - RNA, 19 nt, Artificial Sequence
  Description of Artificial Sequence: Synthetic oligonucleotide
uccagguacccuggcuuca

SEQ ID NO: 2293914 - RNA, 19 nt, Artificial Sequence
  Description of Artificial Sequence: Synthetic oligonucleotide
gaacaucauaagcgaugaa

SEQ ID NO: 2293915 - RNA, 19 nt, Artificial Sequence
  Description of Artificial Sequence: Synthetic oligonucleotide
ggacuuuaaagagccucug

SEQ ID NO: 2293916 - RNA, 19 nt, Artificial Sequence
  Description of Artificial Sequence: Synthetic oligonucleotide
ccccaaguggccaucuuug

SEQ ID NO: 2293917 - RNA, 19 nt, Artificial Sequence
  Description of Artificial Sequence: Synthetic oligonucleotide
caucuuaaucauacauccu

SEQ ID NO: 2293918 - RNA, 19 nt, Artificial Sequence
  Description of Artificial Sequence: Synthetic oligonucleotide
ggcucagugucagacuagc

SEQ ID NO: 2293919 - RNA, 19 nt, Artificial Sequence
  Description of Artificial Sequence: Synthetic oligonucleotide
gucuggaacgggauggaaa

SEQ ID NO: 2293920 - RNA, 19 nt, Artificial Sequence
  Description of Artificial Sequence: Synthetic oligonucleotide
caggcucagugucagacua

SEQ ID NO: 2293921 - RNA, 19 nt, Artificial Sequence
  Description of Artificial Sequence: Synthetic oligonucleotide
cuggcaucuuaaucauaca

SEQ ID NO: 2293922 - RNA, 19 nt, Artificial Sequence
  Description of Artificial Sequence: Synthetic oligonucleotide
uugcuccagguacccuggc

SEQ ID NO: 2293923 - RNA, 19 nt, Artificial Sequence
  Description of Artificial Sequence: Synthetic oligonucleotide
augcgguuguccauaaguu

SEQ ID NO: 2293924 - RNA, 19 nt, Artificial Sequence
  Description of Artificial Sequence: Synthetic oligonucleotide
ccaaguggccaucuuugug

SEQ ID NO: 2293925 - RNA, 19 nt, Artificial Sequence
  Description of Artificial Sequence: Synthetic oligonucleotide
ggguuauagcaaagccugg

SEQ ID NO: 2293926 - RNA, 19 nt, Artificial Sequence
  Description of Artificial Sequence: Synthetic oligonucleotide
caagaacaucauaagcgau

SEQ ID NO: 2293927 - RNA, 19 nt, Artificial Sequence
  Description of Artificial Sequence: Synthetic oligonucleotide
cucggaguagagccucauc

SEQ ID NO: 2293928 - RNA, 19 nt, Artificial Sequence
  Description of Artificial Sequence: Synthetic oligonucleotide
caugauucuguggucugaa

SEQ ID NO: 2293929 - RNA, 19 nt, Artificial Sequence
  Description of Artificial Sequence: Synthetic oligonucleotide
gugucagacuagccuggac

SEQ ID NO: 2293930 - RNA, 19 nt, Artificial Sequence
  Description of Artificial Sequence: Synthetic oligonucleotide
agugucagacuagccugga

SEQ ID NO: 2293931 - RNA, 19 nt, Artificial Sequence
  Description of Artificial Sequence: Synthetic oligonucleotide
ucauucccgggaguugcuc

SEQ ID NO: 2293932 - RNA, 19 nt, Artificial Sequence
  Description of Artificial Sequence: Synthetic oligonucleotide
aaagccuggccagcaccau

SEQ ID NO: 2293933 - RNA, 19 nt, Artificial Sequence
  Description of Artificial Sequence: Synthetic oligonucleotide
ggaguugcuccagguaccc

SEQ ID NO: 2293934 - RNA, 19 nt, Artificial Sequence
  Description of Artificial Sequence: Synthetic oligonucleotide
gucagacuagccuggacuu

SEQ ID NO: 2293935 - RNA, 19 nt, Artificial Sequence
  Description of Artificial Sequence: Synthetic oligonucleotide
ucagacuagccuggacuuu

SEQ ID NO: 2293936 - RNA, 19 nt, Artificial Sequence
  Description of Artificial Sequence: Synthetic oligonucleotide
cuccucaaggcucccugca

SEQ ID NO: 2293937 - RNA, 19 nt, Artificial Sequence
  Description of Artificial Sequence: Synthetic oligonucleotide
cagguacccuggcuucagc

SEQ ID NO: 2293938 - RNA, 19 nt, Artificial Sequence
  Description of Artificial Sequence: Synthetic oligonucleotide
gcuuucggccaagguaacg

SEQ ID NO: 2293939 - RNA, 19 nt, Artificial Sequence
  Description of Artificial Sequence: Synthetic oligonucleotide
accaugcgguuguccauaa

SEQ ID NO: 2293940 - RNA, 19 nt, Artificial Sequence
  Description of Artificial Sequence: Synthetic oligonucleotide
gagccucugcaugggagga

SEQ ID NO: 2293941 - RNA, 19 nt, Artificial Sequence
  Description of Artificial Sequence: Synthetic oligonucleotide
cccucaaagcgugauauga

SEQ ID NO: 2293942 - RNA, 19 nt, Artificial Sequence
  Description of Artificial Sequence: Synthetic oligonucleotide
gucaugggcaugauucugu

SEQ ID NO: 2293943 - RNA, 19 nt, Artificial Sequence
  Description of Artificial Sequence: Synthetic oligonucleotide
aacuucucguucagccauu

SEQ ID NO: 2293944 - RNA, 19 nt, Artificial Sequence
  Description of Artificial Sequence: Synthetic oligonucleotide
aaggaguugcugggacuuu

SEQ ID NO: 2293945 - RNA, 19 nt, Artificial Sequence
  Description of Artificial Sequence: Synthetic oligonucleotide
aggcucagugucagacuag

SEQ ID NO: 2293946 - RNA, 19 nt, Artificial Sequence
  Description of Artificial Sequence: Synthetic oligonucleotide
aggaguugcugggacuuua

SEQ ID NO: 2293947 - RNA, 19 nt, Artificial Sequence
  Description of Artificial Sequence: Synthetic oligonucleotide
cuggcugcuccucaaggcu

SEQ ID NO: 2293948 - RNA, 19 nt, Artificial Sequence
  Description of Artificial Sequence: Synthetic oligonucleotide
ccauuggcuuuggucauag

SEQ ID NO: 2293949 - RNA, 19 nt, Artificial Sequence
  Description of Artificial Sequence: Synthetic oligonucleotide
agacuagccuggacuuucu

SEQ ID NO: 2293950 - RNA, 19 nt, Artificial Sequence
  Description of Artificial Sequence: Synthetic oligonucleotide
ccuggccagcaccaugcgg

SEQ ID NO: 2293951 - RNA, 19 nt, Artificial Sequence
  Description of Artificial Sequence: Synthetic oligonucleotide
cccugcaaaccaagggaac

SEQ ID NO: 2293952 - RNA, 19 nt, Artificial Sequence
  Description of Artificial Sequence: Synthetic oligonucleotide
ccauaaguugauucuccaa

SEQ ID NO: 2293953 - RNA, 19 nt, Artificial Sequence
  Description of Artificial Sequence: Synthetic oligonucleotide
ggcuuuggucauagucagg

SEQ ID NO: 2293954 - RNA, 19 nt, Artificial Sequence
  Description of Artificial Sequence: Synthetic oligonucleotide
gggaggauuggaugagcaa

SEQ ID NO: 2293955 - RNA, 19 nt, Artificial Sequence
  Description of Artificial Sequence: Synthetic oligonucleotide
cucuuccgucuccccacac

SEQ ID NO: 2293956 - RNA, 19 nt, Artificial Sequence
  Description of Artificial Sequence: Synthetic oligonucleotide
aggcucccugcaaaccaag

SEQ ID NO: 2293957 - RNA, 19 nt, Artificial Sequence
  Description of Artificial Sequence: Synthetic oligonucleotide
uugccccaaguggccaucu

SEQ ID NO: 2293958 - RNA, 19 nt, Artificial Sequence
  Description of Artificial Sequence: Synthetic oligonucleotide
gguaacgaagaauggcauu

SEQ ID NO: 2293959 - RNA, 19 nt, Artificial Sequence
  Description of Artificial Sequence: Synthetic oligonucleotide
gccuggacuuucugagagc

SEQ ID NO: 2293960 - RNA, 19 nt, Artificial Sequence
  Description of Artificial Sequence: Synthetic oligonucleotide
cagcaccaugcgguugucc

SEQ ID NO: 2293961 - RNA, 19 nt, Artificial Sequence
  Description of Artificial Sequence: Synthetic oligonucleotide
aucauucccgggaguugcu

SEQ ID NO: 2293962 - RNA, 19 nt, Artificial Sequence
  Description of Artificial Sequence: Synthetic oligonucleotide
ggcuuggggucuggaacgg

SEQ ID NO: 2293963 - RNA, 19 nt, Artificial Sequence
  Description of Artificial Sequence: Synthetic oligonucleotide
gggacuuuaaagagccucu

SEQ ID NO: 2293964 - RNA, 19 nt, Artificial Sequence
  Description of Artificial Sequence: Synthetic oligonucleotide
ggagcuggugaggcuuggg

SEQ ID NO: 2293965 - RNA, 19 nt, Artificial Sequence
  Description of Artificial Sequence: Synthetic oligonucleotide
agggaaccuggcaucuuaa

SEQ ID NO: 2293966 - RNA, 19 nt, Artificial Sequence
  Description of Artificial Sequence: Synthetic oligonucleotide
aggcccucaaagcgugaua

SEQ ID NO: 2293967 - RNA, 19 nt, Artificial Sequence
  Description of Artificial Sequence: Synthetic oligonucleotide
cugcaaaccaagggaaccu

SEQ ID NO: 2293968 - RNA, 19 nt, Artificial Sequence
  Description of Artificial Sequence: Synthetic oligonucleotide
ccucaaagcgugauaugaa

SEQ ID NO: 2293969 - RNA, 19 nt, Artificial Sequence
  Description of Artificial Sequence: Synthetic oligonucleotide
cacuuggguucaaauacuu

SEQ ID NO: 2293970 - RNA, 19 nt, Artificial Sequence
  Description of Artificial Sequence: Synthetic oligonucleotide
cugcaugggaggauuggau

SEQ ID NO: 2293971 - RNA, 19 nt, Artificial Sequence
  Description of Artificial Sequence: Synthetic oligonucleotide
agggagcuggugaggcuug

SEQ ID NO: 2293972 - RNA, 19 nt, Artificial Sequence
  Description of Artificial Sequence: Synthetic oligonucleotide
uggccagcaccaugcgguu

SEQ ID NO: 2293973 - RNA, 19 nt, Artificial Sequence
  Description of Artificial Sequence: Synthetic oligonucleotide
ggaguagagccucaucauu

SEQ ID NO: 2293974 - RNA, 19 nt, Artificial Sequence
  Description of Artificial Sequence: Synthetic oligonucleotide
gcccucaaagcgugauaug

SEQ ID NO: 2293975 - RNA, 19 nt, Artificial Sequence
  Description of Artificial Sequence: Synthetic oligonucleotide
agcgugauaugaaguccuu

SEQ ID NO: 2293976 - RNA, 19 nt, Artificial Sequence
  Description of Artificial Sequence: Synthetic oligonucleotide
cucaucauucccgggaguu

SEQ ID NO: 2293977 - RNA, 19 nt, Artificial Sequence
  Description of Artificial Sequence: Synthetic oligonucleotide
cucguucagccauuggcuu

SEQ ID NO: 2293978 - RNA, 19 nt, Artificial Sequence
  Description of Artificial Sequence: Synthetic oligonucleotide
gagggagcuggugaggcuu

SEQ ID NO: 2293979 - RNA, 19 nt, Artificial Sequence
  Description of Artificial Sequence: Synthetic oligonucleotide
cuggaacgggauggaaaga

SEQ ID NO: 2293980 - RNA, 19 nt, Artificial Sequence
  Description of Artificial Sequence: Synthetic oligonucleotide
ugccccaaguggccaucuu

SEQ ID NO: 2293981 - RNA, 19 nt, Artificial Sequence
  Description of Artificial Sequence: Synthetic oligonucleotide
gcaugauucuguggucuga

SEQ ID NO: 2293982 - RNA, 19 nt, Artificial Sequence
  Description of Artificial Sequence: Synthetic oligonucleotide
gcgugauaugaaguccuuc

SEQ ID NO: 2293983 - RNA, 19 nt, Artificial Sequence
  Description of Artificial Sequence: Synthetic oligonucleotide
cguucagccauuggcuuug

SEQ ID NO: 2293984 - RNA, 19 nt, Artificial Sequence
  Description of Artificial Sequence: Synthetic oligonucleotide
gcuuggggucuggaacggg

SEQ ID NO: 2293985 - RNA, 19 nt, Artificial Sequence
  Description of Artificial Sequence: Synthetic oligonucleotide
ggagaaggaaaagguggcu

SEQ ID NO: 2293986 - RNA, 19 nt, Artificial Sequence
  Description of Artificial Sequence: Synthetic oligonucleotide
cuucagguuugggaacucu

SEQ ID NO: 2293987 - RNA, 19 nt, Artificial Sequence
  Description of Artificial Sequence: Synthetic oligonucleotide
cccuacuuguugccccaag

SEQ ID NO: 2293988 - RNA, 19 nt, Artificial Sequence
  Description of Artificial Sequence: Synthetic oligonucleotide
caccaugcgguuguccaua

SEQ ID NO: 2293989 - RNA, 19 nt, Artificial Sequence
  Description of Artificial Sequence: Synthetic oligonucleotide
gccuggccagcaccaugcg

SEQ ID NO: 2293990 - RNA, 19 nt, Artificial Sequence
  Description of Artificial Sequence: Synthetic oligonucleotide
gccagcaccaugcgguugu

SEQ ID NO: 2293991 - RNA, 19 nt, Artificial Sequence
  Description of Artificial Sequence: Synthetic oligonucleotide
acacaggucucgggaggaa

SEQ ID NO: 2293992 - RNA, 19 nt, Artificial Sequence
  Description of Artificial Sequence: Synthetic oligonucleotide
ggcccucaaagcgugauau

SEQ ID NO: 2293993 - RNA, 19 nt, Artificial Sequence
  Description of Artificial Sequence: Synthetic oligonucleotide
gggcaugauucuguggucu

SEQ ID NO: 2293994 - RNA, 19 nt, Artificial Sequence
  Description of Artificial Sequence: Synthetic oligonucleotide
gggagcuggugaggcuugg

SEQ ID NO: 2293995 - RNA, 19 nt, Artificial Sequence
  Description of Artificial Sequence: Synthetic oligonucleotide
gguggcucugggcugcagu

SEQ ID NO: 2293996 - RNA, 19 nt, Artificial Sequence
  Description of Artificial Sequence: Synthetic oligonucleotide
ccucaaggcucccugcaaa

SEQ ID NO: 2293997 - RNA, 19 nt, Artificial Sequence
  Description of Artificial Sequence: Synthetic oligonucleotide
ccagguacccuggcuucag

SEQ ID NO: 2293998 - RNA, 19 nt, Artificial Sequence
  Description of Artificial Sequence: Synthetic oligonucleotide
agccucugcaugggaggau

SEQ ID NO: 2293999 - RNA, 19 nt, Artificial Sequence
  Description of Artificial Sequence: Synthetic oligonucleotide
ggcucugggcugcaguggu

SEQ ID NO: 2294000 - RNA, 19 nt, Artificial Sequence
  Description of Artificial Sequence: Synthetic oligonucleotide
gguccuggcugcuccucaa

SEQ ID NO: 2294001 - RNA, 19 nt, Artificial Sequence
  Description of Artificial Sequence: Synthetic oligonucleotide
gugguccuggcugcuccuc

SEQ ID NO: 2294002 - RNA, 19 nt, Artificial Sequence
  Description of Artificial Sequence: Synthetic oligonucleotide
ccaugcgguuguccauaag

SEQ ID NO: 2294003 - RNA, 19 nt, Artificial Sequence
  Description of Artificial Sequence: Synthetic oligonucleotide
accuggcaucuuaaucaua

SEQ ID NO: 2294004 - RNA, 19 nt, Artificial Sequence
  Description of Artificial Sequence: Synthetic oligonucleotide
cuggugaggcuuggggucu

SEQ ID NO: 2294005 - RNA, 19 nt, Artificial Sequence
  Description of Artificial Sequence: Synthetic oligonucleotide
gggaaccuggcaucuuaau

SEQ ID NO: 2294006 - RNA, 19 nt, Artificial Sequence
  Description of Artificial Sequence: Synthetic oligonucleotide
ggucuggaacgggauggaa

SEQ ID NO: 2294007 - RNA, 19 nt, Artificial Sequence
  Description of Artificial Sequence: Synthetic oligonucleotide
gggucuggaacgggaugga

SEQ ID NO: 2294008 - RNA, 19 nt, Artificial Sequence
  Description of Artificial Sequence: Synthetic oligonucleotide
cauuggcuuuggucauagu

SEQ ID NO: 2294009 - RNA, 19 nt, Artificial Sequence
  Description of Artificial Sequence: Synthetic oligonucleotide
ggacaggcucagugucaga

SEQ ID NO: 2294010 - RNA, 19 nt, Artificial Sequence
  Description of Artificial Sequence: Synthetic oligonucleotide
ggccagcaccaugcgguug

SEQ ID NO: 2294011 - RNA, 19 nt, Artificial Sequence
  Description of Artificial Sequence: Synthetic oligonucleotide
ccuucagguuugggaacuc

SEQ ID NO: 2294012 - RNA, 19 nt, Artificial Sequence
  Description of Artificial Sequence: Synthetic oligonucleotide
cagugucaugggcaugauu

SEQ ID NO: 2294013 - RNA, 19 nt, Artificial Sequence
  Description of Artificial Sequence: Synthetic oligonucleotide
gcugcuccucaaggcuccc

SEQ ID NO: 2294014 - RNA, 19 nt, Artificial Sequence
  Description of Artificial Sequence: Synthetic oligonucleotide
gccccaaguggccaucuuu

SEQ ID NO: 2294015 - RNA, 19 nt, Artificial Sequence
  Description of Artificial Sequence: Synthetic oligonucleotide
cugaaaggacaggcucagu

SEQ ID NO: 2294016 - RNA, 19 nt, Artificial Sequence
  Description of Artificial Sequence: Synthetic oligonucleotide
gguuguccauaaguugauu

SEQ ID NO: 2294017 - RNA, 19 nt, Artificial Sequence
  Description of Artificial Sequence: Synthetic oligonucleotide
cccaaguggccaucuuugu

SEQ ID NO: 2294018 - RNA, 19 nt, Artificial Sequence
  Description of Artificial Sequence: Synthetic oligonucleotide
gcaccaugcgguuguccau

SEQ ID NO: 2294019 - RNA, 19 nt, Artificial Sequence
  Description of Artificial Sequence: Synthetic oligonucleotide
ccaagggaaccuggcaucu

SEQ ID NO: 2294020 - RNA, 19 nt, Artificial Sequence
  Description of Artificial Sequence: Synthetic oligonucleotide
gcucugggcugcagugguc

SEQ ID NO: 2294021 - RNA, 19 nt, Artificial Sequence
  Description of Artificial Sequence: Synthetic oligonucleotide
gccauuggcuuuggucaua

SEQ ID NO: 2294022 - RNA, 19 nt, Artificial Sequence
  Description of Artificial Sequence: Synthetic oligonucleotide
cggaguagagccucaucau

SEQ ID NO: 2294023 - RNA, 19 nt, Artificial Sequence
  Description of Artificial Sequence: Synthetic oligonucleotide
gccucugcaugggaggauu

SEQ ID NO: 2294024 - RNA, 19 nt, Artificial Sequence
  Description of Artificial Sequence: Synthetic oligonucleotide
caagggaaccuggcaucuu

SEQ ID NO: 2294025 - RNA, 19 nt, Artificial Sequence
  Description of Artificial Sequence: Synthetic oligonucleotide
cccgggaguugcuccaggu

SEQ ID NO: 2294026 - RNA, 19 nt, Artificial Sequence
  Description of Artificial Sequence: Synthetic oligonucleotide
cugcuccucaaggcucccu

SEQ ID NO: 2294027 - RNA, 19 nt, Artificial Sequence
  Description of Artificial Sequence: Synthetic oligonucleotide
ccagcaccaugcgguuguc

SEQ ID NO: 2294028 - RNA, 19 nt, Artificial Sequence
  Description of Artificial Sequence: Synthetic oligonucleotide
cgguuguccauaaguugau

SEQ ID NO: 2294029 - RNA, 19 nt, Artificial Sequence
  Description of Artificial Sequence: Synthetic oligonucleotide
aaaucuuugguauuucccc

SEQ ID NO: 2294030 - RNA, 19 nt, Artificial Sequence
  Description of Artificial Sequence: Synthetic oligonucleotide
ugauuuugaaacuucagag

SEQ ID NO: 2294031 - RNA, 19 nt, Artificial Sequence
  Description of Artificial Sequence: Synthetic oligonucleotide
aaguucugaagccagcugc

SEQ ID NO: 2294032 - RNA, 19 nt, Artificial Sequence
  Description of Artificial Sequence: Synthetic oligonucleotide
aauguccuuguucagaguc

SEQ ID NO: 2294033 - RNA, 19 nt, Artificial Sequence
  Description of Artificial Sequence: Synthetic oligonucleotide
gauuuugaaacuucagagg

SEQ ID NO: 2294034 - RNA, 19 nt, Artificial Sequence
  Description of Artificial Sequence: Synthetic oligonucleotide
aacaggacauucuaggcuc

SEQ ID NO: 2294035 - RNA, 19 nt, Artificial Sequence
  Description of Artificial Sequence: Synthetic oligonucleotide
ugcaacuccccacagauag

SEQ ID NO: 2294036 - RNA, 19 nt, Artificial Sequence
  Description of Artificial Sequence: Synthetic oligonucleotide
acugagaaguagaagaucc

SEQ ID NO: 2294037 - RNA, 19 nt, Artificial Sequence
  Description of Artificial Sequence: Synthetic oligonucleotide
agaacgcugacacaaggcc

SEQ ID NO: 2294038 - RNA, 19 nt, Artificial Sequence
  Description of Artificial Sequence: Synthetic oligonucleotide
ucugcauaggcaaagggug

SEQ ID NO: 2294039 - RNA, 19 nt, Artificial Sequence
  Description of Artificial Sequence: Synthetic oligonucleotide
cuuguucagagucugauag

SEQ ID NO: 2294040 - RNA, 19 nt, Artificial Sequence
  Description of Artificial Sequence: Synthetic oligonucleotide
aacaugucccuugaacucc

SEQ ID NO: 2294041 - RNA, 19 nt, Artificial Sequence
  Description of Artificial Sequence: Synthetic oligonucleotide
uuugaaacuucagaggacc

SEQ ID NO: 2294042 - RNA, 19 nt, Artificial Sequence
  Description of Artificial Sequence: Synthetic oligonucleotide
ucaauguccuuguucagag

SEQ ID NO: 2294043 - RNA, 19 nt, Artificial Sequence
  Description of Artificial Sequence: Synthetic oligonucleotide
uucgucuucagcaggugcg

SEQ ID NO: 2294044 - RNA, 19 nt, Artificial Sequence
  Description of Artificial Sequence: Synthetic oligonucleotide
ucuggguaagaacaggaca

SEQ ID NO: 2294045 - RNA, 19 nt, Artificial Sequence
  Description of Artificial Sequence: Synthetic oligonucleotide
agcugaaacaguccuugcc

SEQ ID NO: 2294046 - RNA, 19 nt, Artificial Sequence
  Description of Artificial Sequence: Synthetic oligonucleotide
ucacucucacuccagaggc

SEQ ID NO: 2294047 - RNA, 19 nt, Artificial Sequence
  Description of Artificial Sequence: Synthetic oligonucleotide
gcuaagaagacagagaggc

SEQ ID NO: 2294048 - RNA, 19 nt, Artificial Sequence
  Description of Artificial Sequence: Synthetic oligonucleotide
uccuuaaagaacagaugag

SEQ ID NO: 2294049 - RNA, 19 nt, Artificial Sequence
  Description of Artificial Sequence: Synthetic oligonucleotide
aacagaugagauugcacgu

SEQ ID NO: 2294050 - RNA, 19 nt, Artificial Sequence
  Description of Artificial Sequence: Synthetic oligonucleotide
gagcgagucauucuucugg

SEQ ID NO: 2294051 - RNA, 19 nt, Artificial Sequence
  Description of Artificial Sequence: Synthetic oligonucleotide
gauggaaacaugucccuug

SEQ ID NO: 2294052 - RNA, 19 nt, Artificial Sequence
  Description of Artificial Sequence: Synthetic oligonucleotide
ugugcaacuccccacagau

SEQ ID NO: 2294053 - RNA, 19 nt, Artificial Sequence
  Description of Artificial Sequence: Synthetic oligonucleotide
agcacauugccacugugag

SEQ ID NO: 2294054 - RNA, 19 nt, Artificial Sequence
  Description of Artificial Sequence: Synthetic oligonucleotide
uauuuccccguccugaccu

SEQ ID NO: 2294055 - RNA, 19 nt, Artificial Sequence
  Description of Artificial Sequence: Synthetic oligonucleotide
acaacgcgcagccaggcac

SEQ ID NO: 2294056 - RNA, 19 nt, Artificial Sequence
  Description of Artificial Sequence: Synthetic oligonucleotide
auacaucuccucuuccugg

SEQ ID NO: 2294057 - RNA, 19 nt, Artificial Sequence
  Description of Artificial Sequence: Synthetic oligonucleotide
uuagcuagguccccaguug

SEQ ID NO: 2294058 - RNA, 19 nt, Artificial Sequence
  Description of Artificial Sequence: Synthetic oligonucleotide
guaauggucuacccgauac

SEQ ID NO: 2294059 - RNA, 19 nt, Artificial Sequence
  Description of Artificial Sequence: Synthetic oligonucleotide
uuuugaaacuucagaggac

SEQ ID NO: 2294060 - RNA, 19 nt, Artificial Sequence
  Description of Artificial Sequence: Synthetic oligonucleotide
uauuagugcuugcucccgg

SEQ ID NO: 2294061 - RNA, 19 nt, Artificial Sequence
  Description of Artificial Sequence: Synthetic oligonucleotide
ugagauugcacguggggcu

SEQ ID NO: 2294062 - RNA, 19 nt, Artificial Sequence
  Description of Artificial Sequence: Synthetic oligonucleotide
cauucuaggcucaggcugg

SEQ ID NO: 2294063 - RNA, 19 nt, Artificial Sequence
  Description of Artificial Sequence: Synthetic oligonucleotide
agagaggcagccugcuugc

SEQ ID NO: 2294064 - RNA, 19 nt, Artificial Sequence
  Description of Artificial Sequence: Synthetic oligonucleotide
ugagaaguagaagauccug

SEQ ID NO: 2294065 - RNA, 19 nt, Artificial Sequence
  Description of Artificial Sequence: Synthetic oligonucleotide
gggcuaagaagacagagag

SEQ ID NO: 2294066 - RNA, 19 nt, Artificial Sequence
  Description of Artificial Sequence: Synthetic oligonucleotide
ugcacguggggcuaagaag

SEQ ID NO: 2294067 - RNA, 19 nt, Artificial Sequence
  Description of Artificial Sequence: Synthetic oligonucleotide
uguuauucagaacgcugac

SEQ ID NO: 2294068 - RNA, 19 nt, Artificial Sequence
  Description of Artificial Sequence: Synthetic oligonucleotide
cagaacaacgcgcagccag

SEQ ID NO: 2294069 - RNA, 19 nt, Artificial Sequence
  Description of Artificial Sequence: Synthetic oligonucleotide
cugauuuugaaacuucaga

SEQ ID NO: 2294070 - RNA, 19 nt, Artificial Sequence
  Description of Artificial Sequence: Synthetic oligonucleotide
cuggcuagcacggacaggc

SEQ ID NO: 2294071 - RNA, 19 nt, Artificial Sequence
  Description of Artificial Sequence: Synthetic oligonucleotide
aaggccuguucacucucac

SEQ ID NO: 2294072 - RNA, 19 nt, Artificial Sequence
  Description of Artificial Sequence: Synthetic oligonucleotide
ucugauaguccucggcugu

SEQ ID NO: 2294073 - RNA, 19 nt, Artificial Sequence
  Description of Artificial Sequence: Synthetic oligonucleotide
aaaggaaaucuuugguauu

SEQ ID NO: 2294074 - RNA, 19 nt, Artificial Sequence
  Description of Artificial Sequence: Synthetic oligonucleotide
cacauugccacugugagca

SEQ ID NO: 2294075 - RNA, 19 nt, Artificial Sequence
  Description of Artificial Sequence: Synthetic oligonucleotide
agcgagucauucuucuggg

SEQ ID NO: 2294076 - RNA, 19 nt, Artificial Sequence
  Description of Artificial Sequence: Synthetic oligonucleotide
uuauuagugcuugcucccg

SEQ ID NO: 2294077 - RNA, 19 nt, Artificial Sequence
  Description of Artificial Sequence: Synthetic oligonucleotide
agaacagaugagauugcac

SEQ ID NO: 2294078 - RNA, 19 nt, Artificial Sequence
  Description of Artificial Sequence: Synthetic oligonucleotide
auucagaacgcugacacaa

SEQ ID NO: 2294079 - RNA, 19 nt, Artificial Sequence
  Description of Artificial Sequence: Synthetic oligonucleotide
aaacaguccuugccacagg

SEQ ID NO: 2294080 - RNA, 19 nt, Artificial Sequence
  Description of Artificial Sequence: Synthetic oligonucleotide
uggggcuaagaagacagag

SEQ ID NO: 2294081 - RNA, 19 nt, Artificial Sequence
  Description of Artificial Sequence: Synthetic oligonucleotide
acugugagcauucuccaaa

SEQ ID NO: 2294082 - RNA, 19 nt, Artificial Sequence
  Description of Artificial Sequence: Synthetic oligonucleotide
uaauggucuacccgauaca

SEQ ID NO: 2294083 - RNA, 19 nt, Artificial Sequence
  Description of Artificial Sequence: Synthetic oligonucleotide
uucagaacgcugacacaag

SEQ ID NO: 2294084 - RNA, 19 nt, Artificial Sequence
  Description of Artificial Sequence: Synthetic oligonucleotide
uucuggguaagaacaggac

SEQ ID NO: 2294085 - RNA, 19 nt, Artificial Sequence
  Description of Artificial Sequence: Synthetic oligonucleotide
agguacagcugaaacaguc

SEQ ID NO: 2294086 - RNA, 19 nt, Artificial Sequence
  Description of Artificial Sequence: Synthetic oligonucleotide
aggugcgcgcuucacacgg

SEQ ID NO: 2294087 - RNA, 19 nt, Artificial Sequence
  Description of Artificial Sequence: Synthetic oligonucleotide
uacccgauacaucuccucu

SEQ ID NO: 2294088 - RNA, 19 nt, Artificial Sequence
  Description of Artificial Sequence: Synthetic oligonucleotide
acuguuauucagaacgcug

SEQ ID NO: 2294089 - RNA, 19 nt, Artificial Sequence
  Description of Artificial Sequence: Synthetic oligonucleotide
cuguuauucagaacgcuga

SEQ ID NO: 2294090 - RNA, 19 nt, Artificial Sequence
  Description of Artificial Sequence: Synthetic oligonucleotide
agugacucacuguuauuca

SEQ ID NO: 2294091 - RNA, 19 nt, Artificial Sequence
  Description of Artificial Sequence: Synthetic oligonucleotide
gaaguagaagauccugcca

SEQ ID NO: 2294092 - RNA, 19 nt, Artificial Sequence
  Description of Artificial Sequence: Synthetic oligonucleotide
uggaccugcgucucaaugu

SEQ ID NO: 2294093 - RNA, 19 nt, Artificial Sequence
  Description of Artificial Sequence: Synthetic oligonucleotide
caguccuugccacagguac

SEQ ID NO: 2294094 - RNA, 19 nt, Artificial Sequence
  Description of Artificial Sequence: Synthetic oligonucleotide
cagaacgcugacacaaggc

SEQ ID NO: 2294095 - RNA, 19 nt, Artificial Sequence
  Description of Artificial Sequence: Synthetic oligonucleotide
ucaguuggcgguacugacu

SEQ ID NO: 2294096 - RNA, 19 nt, Artificial Sequence
  Description of Artificial Sequence: Synthetic oligonucleotide
uagcuagguccccaguugc

SEQ ID NO: 2294097 - RNA, 19 nt, Artificial Sequence
  Description of Artificial Sequence: Synthetic oligonucleotide
cagguaauggucuacccga

SEQ ID NO: 2294098 - RNA, 19 nt, Artificial Sequence
  Description of Artificial Sequence: Synthetic oligonucleotide
ugauguugcgggcaauguc

SEQ ID NO: 2294099 - RNA, 19 nt, Artificial Sequence
  Description of Artificial Sequence: Synthetic oligonucleotide
gguggucauggccaaaggg

SEQ ID NO: 2294100 - RNA, 19 nt, Artificial Sequence
  Description of Artificial Sequence: Synthetic oligonucleotide
cagagucugauaguccucg

SEQ ID NO: 2294101 - RNA, 19 nt, Artificial Sequence
  Description of Artificial Sequence: Synthetic oligonucleotide
gagucugauaguccucggc

SEQ ID NO: 2294102 - RNA, 19 nt, Artificial Sequence
  Description of Artificial Sequence: Synthetic oligonucleotide
cugagagguggucauggcc

SEQ ID NO: 2294103 - RNA, 19 nt, Artificial Sequence
  Description of Artificial Sequence: Synthetic oligonucleotide
uagagcgagucauucuucu

SEQ ID NO: 2294104 - RNA, 19 nt, Artificial Sequence
  Description of Artificial Sequence: Synthetic oligonucleotide
cugaaacaguccuugccac

SEQ ID NO: 2294105 - RNA, 19 nt, Artificial Sequence
  Description of Artificial Sequence: Synthetic oligonucleotide
agauagagcgagucauucu

SEQ ID NO: 2294106 - RNA, 19 nt, Artificial Sequence
  Description of Artificial Sequence: Synthetic oligonucleotide
augauggaaacaugucccu

SEQ ID NO: 2294107 - RNA, 19 nt, Artificial Sequence
  Description of Artificial Sequence: Synthetic oligonucleotide
gucuacccgauacaucucc

SEQ ID NO: 2294108 - RNA, 19 nt, Artificial Sequence
  Description of Artificial Sequence: Synthetic oligonucleotide
uucaguuggcgguacugac

SEQ ID NO: 2294109 - RNA, 19 nt, Artificial Sequence
  Description of Artificial Sequence: Synthetic oligonucleotide
uauucagaacgcugacaca

SEQ ID NO: 2294110 - RNA, 19 nt, Artificial Sequence
  Description of Artificial Sequence: Synthetic oligonucleotide
ucagccucauccagguaca

SEQ ID NO: 2294111 - RNA, 19 nt, Artificial Sequence
  Description of Artificial Sequence: Synthetic oligonucleotide
cuuaaagaacagaugagau

SEQ ID NO: 2294112 - RNA, 19 nt, Artificial Sequence
  Description of Artificial Sequence: Synthetic oligonucleotide
uacaucuccucuuccugga

SEQ ID NO: 2294113 - RNA, 19 nt, Artificial Sequence
  Description of Artificial Sequence: Synthetic oligonucleotide
cucggcugucuucaguugg

SEQ ID NO: 2294114 - RNA, 19 nt, Artificial Sequence
  Description of Artificial Sequence: Synthetic oligonucleotide
agcuucccagagcccaucc

SEQ ID NO: 2294115 - RNA, 19 nt, Artificial Sequence
  Description of Artificial Sequence: Synthetic oligonucleotide
uucuuagcuagguccccag

SEQ ID NO: 2294116 - RNA, 19 nt, Artificial Sequence
  Description of Artificial Sequence: Synthetic oligonucleotide
agcacggacaggcggcugg

SEQ ID NO: 2294117 - RNA, 19 nt, Artificial Sequence
  Description of Artificial Sequence: Synthetic oligonucleotide
cacuccagaggcauucaag

SEQ ID NO: 2294118 - RNA, 19 nt, Artificial Sequence
  Description of Artificial Sequence: Synthetic oligonucleotide
gagucauucuucuggguaa

SEQ ID NO: 2294119 - RNA, 19 nt, Artificial Sequence
  Description of Artificial Sequence: Synthetic oligonucleotide
acuucuuagcuaggucccc

SEQ ID NO: 2294120 - RNA, 19 nt, Artificial Sequence
  Description of Artificial Sequence: Synthetic oligonucleotide
cuucgucuucagcaggugc

SEQ ID NO: 2294121 - RNA, 19 nt, Artificial Sequence
  Description of Artificial Sequence: Synthetic oligonucleotide
gaacaggacauucuaggcu

SEQ ID NO: 2294122 - RNA, 19 nt, Artificial Sequence
  Description of Artificial Sequence: Synthetic oligonucleotide
cuucacacgggaccgcgcc

SEQ ID NO: 2294123 - RNA, 19 nt, Artificial Sequence
  Description of Artificial Sequence: Synthetic oligonucleotide
cuaggcucaggcugggcag

SEQ ID NO: 2294124 - RNA, 19 nt, Artificial Sequence
  Description of Artificial Sequence: Synthetic oligonucleotide
ugacacaaggccuguucac

SEQ ID NO: 2294125 - RNA, 19 nt, Artificial Sequence
  Description of Artificial Sequence: Synthetic oligonucleotide
aagauccugccagcuuccc

SEQ ID NO: 2294126 - RNA, 19 nt, Artificial Sequence
  Description of Artificial Sequence: Synthetic oligonucleotide
auggaaacaugucccuuga

SEQ ID NO: 2294127 - RNA, 19 nt, Artificial Sequence
  Description of Artificial Sequence: Synthetic oligonucleotide
cuucuggguaagaacagga

SEQ ID NO: 2294128 - RNA, 19 nt, Artificial Sequence
  Description of Artificial Sequence: Synthetic oligonucleotide
gacucacuguuauucagaa

SEQ ID NO: 2294129 - RNA, 19 nt, Artificial Sequence
  Description of Artificial Sequence: Synthetic oligonucleotide
caacuccccacagauagag

SEQ ID NO: 2294130 - RNA, 19 nt, Artificial Sequence
  Description of Artificial Sequence: Synthetic oligonucleotide
uugcacguggggcuaagaa

SEQ ID NO: 2294131 - RNA, 19 nt, Artificial Sequence
  Description of Artificial Sequence: Synthetic oligonucleotide
gauguugcgggcaaugucu

SEQ ID NO: 2294132 - RNA, 19 nt, Artificial Sequence
  Description of Artificial Sequence: Synthetic oligonucleotide
gauagagcgagucauucuu

SEQ ID NO: 2294133 - RNA, 19 nt, Artificial Sequence
  Description of Artificial Sequence: Synthetic oligonucleotide
uaggcaaaggguggcacug

SEQ ID NO: 2294134 - RNA, 19 nt, Artificial Sequence
  Description of Artificial Sequence: Synthetic oligonucleotide
ugcauaggcaaaggguggc

SEQ ID NO: 2294135 - RNA, 19 nt, Artificial Sequence
  Description of Artificial Sequence: Synthetic oligonucleotide
aagcacauugccacuguga

SEQ ID NO: 2294136 - RNA, 19 nt, Artificial Sequence
  Description of Artificial Sequence: Synthetic oligonucleotide
gugagcauucuccaaaugu

SEQ ID NO: 2294137 - RNA, 19 nt, Artificial Sequence
  Description of Artificial Sequence: Synthetic oligonucleotide
uugguauuuccccguccug

SEQ ID NO: 2294138 - RNA, 19 nt, Artificial Sequence
  Description of Artificial Sequence: Synthetic oligonucleotide
gucugauaguccucggcug

SEQ ID NO: 2294139 - RNA, 19 nt, Artificial Sequence
  Description of Artificial Sequence: Synthetic oligonucleotide
ucuuugguauuuccccguc

SEQ ID NO: 2294140 - RNA, 19 nt, Artificial Sequence
  Description of Artificial Sequence: Synthetic oligonucleotide
auuagugcuugcucccgga

SEQ ID NO: 2294141 - RNA, 19 nt, Artificial Sequence
  Description of Artificial Sequence: Synthetic oligonucleotide
caguuggcgguacugacuc

SEQ ID NO: 2294142 - RNA, 19 nt, Artificial Sequence
  Description of Artificial Sequence: Synthetic oligonucleotide
agagucugauaguccucgg

SEQ ID NO: 2294143 - RNA, 19 nt, Artificial Sequence
  Description of Artificial Sequence: Synthetic oligonucleotide
ucggcugucuucaguuggc

SEQ ID NO: 2294144 - RNA, 19 nt, Artificial Sequence
  Description of Artificial Sequence: Synthetic oligonucleotide
aacuccccacagauagagc

SEQ ID NO: 2294145 - RNA, 19 nt, Artificial Sequence
  Description of Artificial Sequence: Synthetic oligonucleotide
uuguucagagucugauagu

SEQ ID NO: 2294146 - RNA, 19 nt, Artificial Sequence
  Description of Artificial Sequence: Synthetic oligonucleotide
ucuacccgauacaucuccu

SEQ ID NO: 2294147 - RNA, 19 nt, Artificial Sequence
  Description of Artificial Sequence: Synthetic oligonucleotide
uccuccgggaaguggcccg

SEQ ID NO: 2294148 - RNA, 19 nt, Artificial Sequence
  Description of Artificial Sequence: Synthetic oligonucleotide
agaacaacgcgcagccagg

SEQ ID NO: 2294149 - RNA, 19 nt, Artificial Sequence
  Description of Artificial Sequence: Synthetic oligonucleotide
gccccucugauuuugaaac

SEQ ID NO: 2294150 - RNA, 19 nt, Artificial Sequence
  Description of Artificial Sequence: Synthetic oligonucleotide
gcugaaacaguccuugcca

SEQ ID NO: 2294151 - RNA, 19 nt, Artificial Sequence
  Description of Artificial Sequence: Synthetic oligonucleotide
guuggcgguacugacucag

SEQ ID NO: 2294152 - RNA, 19 nt, Artificial Sequence
  Description of Artificial Sequence: Synthetic oligonucleotide
uccccacagauagagcgag

SEQ ID NO: 2294153 - RNA, 19 nt, Artificial Sequence
  Description of Artificial Sequence: Synthetic oligonucleotide
aacaacgcgcagccaggca

SEQ ID NO: 2294154 - RNA, 19 nt, Artificial Sequence
  Description of Artificial Sequence: Synthetic oligonucleotide
guugcucccagcaggauga

SEQ ID NO: 2294155 - RNA, 19 nt, Artificial Sequence
  Description of Artificial Sequence: Synthetic oligonucleotide
gagcauucuccaaauguuc

SEQ ID NO: 2294156 - RNA, 19 nt, Artificial Sequence
  Description of Artificial Sequence: Synthetic oligonucleotide
auagagcgagucauucuuc

SEQ ID NO: 2294157 - RNA, 19 nt, Artificial Sequence
  Description of Artificial Sequence: Synthetic oligonucleotide
cuugcucccggaaaggaaa

SEQ ID NO: 2294158 - RNA, 19 nt, Artificial Sequence
  Description of Artificial Sequence: Synthetic oligonucleotide
ccggaaaggaaaucuuugg

SEQ ID NO: 2294159 - RNA, 19 nt, Artificial Sequence
  Description of Artificial Sequence: Synthetic oligonucleotide
ugcuguugauguugcgggc

SEQ ID NO: 2294160 - RNA, 19 nt, Artificial Sequence
  Description of Artificial Sequence: Synthetic oligonucleotide
ucuuagcuagguccccagu

SEQ ID NO: 2294161 - RNA, 19 nt, Artificial Sequence
  Description of Artificial Sequence: Synthetic oligonucleotide
ucucacuccagaggcauuc

SEQ ID NO: 2294162 - RNA, 19 nt, Artificial Sequence
  Description of Artificial Sequence: Synthetic oligonucleotide
ccagguaauggucuacccg

SEQ ID NO: 2294163 - RNA, 19 nt, Artificial Sequence
  Description of Artificial Sequence: Synthetic oligonucleotide
ccagaggcauucaaggccc

SEQ ID NO: 2294164 - RNA, 19 nt, Artificial Sequence
  Description of Artificial Sequence: Synthetic oligonucleotide
agagcgagucauucuucug

SEQ ID NO: 2294165 - RNA, 19 nt, Artificial Sequence
  Description of Artificial Sequence: Synthetic oligonucleotide
uuagugcuugcucccggaa

SEQ ID NO: 2294166 - RNA, 19 nt, Artificial Sequence
  Description of Artificial Sequence: Synthetic oligonucleotide
ucccggaaaggaaaucuuu

SEQ ID NO: 2294167 - RNA, 19 nt, Artificial Sequence
  Description of Artificial Sequence: Synthetic oligonucleotide
uccuuguucagagucugau

SEQ ID NO: 2294168 - RNA, 19 nt, Artificial Sequence
  Description of Artificial Sequence: Synthetic oligonucleotide
agguggucauggccaaagg

SEQ ID NO: 2294169 - RNA, 19 nt, Artificial Sequence
  Description of Artificial Sequence: Synthetic oligonucleotide
uagaagauccugccagcuu

SEQ ID NO: 2294170 - RNA, 19 nt, Artificial Sequence
  Description of Artificial Sequence: Synthetic oligonucleotide
uccucggcugucuucaguu

SEQ ID NO: 2294171 - RNA, 19 nt, Artificial Sequence
  Description of Artificial Sequence: Synthetic oligonucleotide
ggaccaaguccuuaaagaa

SEQ ID NO: 2294172 - RNA, 19 nt, Artificial Sequence
  Description of Artificial Sequence: Synthetic oligonucleotide
cuggguaagaacaggacau

SEQ ID NO: 2294173 - RNA, 19 nt, Artificial Sequence
  Description of Artificial Sequence: Synthetic oligonucleotide
gucuucagcaggugcgcgc

SEQ ID NO: 2294174 - RNA, 19 nt, Artificial Sequence
  Description of Artificial Sequence: Synthetic oligonucleotide
aggacauucuaggcucagg

SEQ ID NO: 2294175 - RNA, 19 nt, Artificial Sequence
  Description of Artificial Sequence: Synthetic oligonucleotide
uguugcgggcaaugucugc

SEQ ID NO: 2294176 - RNA, 19 nt, Artificial Sequence
  Description of Artificial Sequence: Synthetic oligonucleotide
cuggaccugcgucucaaug

SEQ ID NO: 2294177 - RNA, 19 nt, Artificial Sequence
  Description of Artificial Sequence: Synthetic oligonucleotide
cugacacaaggccuguuca

SEQ ID NO: 2294178 - RNA, 19 nt, Artificial Sequence
  Description of Artificial Sequence: Synthetic oligonucleotide
ggcuagcacggacaggcgg

SEQ ID NO: 2294179 - RNA, 19 nt, Artificial Sequence
  Description of Artificial Sequence: Synthetic oligonucleotide
uggcuagcacggacaggcg

SEQ ID NO: 2294180 - RNA, 19 nt, Artificial Sequence
  Description of Artificial Sequence: Synthetic oligonucleotide
cccaguugcucccagcagg

SEQ ID NO: 2294181 - RNA, 19 nt, Artificial Sequence
  Description of Artificial Sequence: Synthetic oligonucleotide
uuggcgguacugacucagc

SEQ ID NO: 2294182 - RNA, 19 nt, Artificial Sequence
  Description of Artificial Sequence: Synthetic oligonucleotide
cucaauguccuuguucaga

SEQ ID NO: 2294183 - RNA, 19 nt, Artificial Sequence
  Description of Artificial Sequence: Synthetic oligonucleotide
cuacccgauacaucuccuc

SEQ ID NO: 2294184 - RNA, 19 nt, Artificial Sequence
  Description of Artificial Sequence: Synthetic oligonucleotide
caacgcgcagccaggcacc

SEQ ID NO: 2294185 - RNA, 19 nt, Artificial Sequence
  Description of Artificial Sequence: Synthetic oligonucleotide
ccuuaaagaacagaugaga

SEQ ID NO: 2294186 - RNA, 19 nt, Artificial Sequence
  Description of Artificial Sequence: Synthetic oligonucleotide
caagcacauugccacugug

SEQ ID NO: 2294187 - RNA, 19 nt, Artificial Sequence
  Description of Artificial Sequence: Synthetic oligonucleotide
uggaaacaugucccuugaa

SEQ ID NO: 2294188 - RNA, 19 nt, Artificial Sequence
  Description of Artificial Sequence: Synthetic oligonucleotide
gaacaacgcgcagccaggc

SEQ ID NO: 2294189 - RNA, 19 nt, Artificial Sequence
  Description of Artificial Sequence: Synthetic oligonucleotide
agauccugccagcuuccca

SEQ ID NO: 2294190 - RNA, 19 nt, Artificial Sequence
  Description of Artificial Sequence: Synthetic oligonucleotide
agcaggugcgcgcuucaca

SEQ ID NO: 2294191 - RNA, 19 nt, Artificial Sequence
  Description of Artificial Sequence: Synthetic oligonucleotide
aguggcccgggcuggcuag

SEQ ID NO: 2294192 - RNA, 19 nt, Artificial Sequence
  Description of Artificial Sequence: Synthetic oligonucleotide
ugauaguccucggcugucu

SEQ ID NO: 2294193 - RNA, 19 nt, Artificial Sequence
  Description of Artificial Sequence: Synthetic oligonucleotide
auggucuacccgauacauc

SEQ ID NO: 2294194 - RNA, 19 nt, Artificial Sequence
  Description of Artificial Sequence: Synthetic oligonucleotide
agccugcuugcccagguaa

SEQ ID NO: 2294195 - RNA, 19 nt, Artificial Sequence
  Description of Artificial Sequence: Synthetic oligonucleotide
guugcgggcaaugucugca

SEQ ID NO: 2294196 - RNA, 19 nt, Artificial Sequence
  Description of Artificial Sequence: Synthetic oligonucleotide
ugcuugcucccggaaagga

SEQ ID NO: 2294197 - RNA, 19 nt, Artificial Sequence
  Description of Artificial Sequence: Synthetic oligonucleotide
aucucgcuccuccgggaag

SEQ ID NO: 2294198 - RNA, 19 nt, Artificial Sequence
  Description of Artificial Sequence: Synthetic oligonucleotide
ggcuaagaagacagagagg

SEQ ID NO: 2294199 - RNA, 19 nt, Artificial Sequence
  Description of Artificial Sequence: Synthetic oligonucleotide
cagguacuucuuagcuagg

SEQ ID NO: 2294200 - RNA, 19 nt, Artificial Sequence
  Description of Artificial Sequence: Synthetic oligonucleotide
auucaaggccccucugauu

SEQ ID NO: 2294201 - RNA, 19 nt, Artificial Sequence
  Description of Artificial Sequence: Synthetic oligonucleotide
ucacacgggaccgcgccug

SEQ ID NO: 2294202 - RNA, 19 nt, Artificial Sequence
  Description of Artificial Sequence: Synthetic oligonucleotide
guggucauggccaaagggu

SEQ ID NO: 2294203 - RNA, 19 nt, Artificial Sequence
  Description of Artificial Sequence: Synthetic oligonucleotide
ggcaaugucugcauaggca

SEQ ID NO: 2294204 - RNA, 19 nt, Artificial Sequence
  Description of Artificial Sequence: Synthetic oligonucleotide
acucucacuccagaggcau

SEQ ID NO: 2294205 - RNA, 19 nt, Artificial Sequence
  Description of Artificial Sequence: Synthetic oligonucleotide
cugcgucucaauguccuug

SEQ ID NO: 2294206 - RNA, 19 nt, Artificial Sequence
  Description of Artificial Sequence: Synthetic oligonucleotide
gcaggugcgcgcuucacac

SEQ ID NO: 2294207 - RNA, 19 nt, Artificial Sequence
  Description of Artificial Sequence: Synthetic oligonucleotide
uugcucccggaaaggaaau

SEQ ID NO: 2294208 - RNA, 19 nt, Artificial Sequence
  Description of Artificial Sequence: Synthetic oligonucleotide
cagaggaccaaguccuuaa

SEQ ID NO: 2294209 - RNA, 19 nt, Artificial Sequence
  Description of Artificial Sequence: Synthetic oligonucleotide
ggcaaaggguggcacugag

SEQ ID NO: 2294210 - RNA, 19 nt, Artificial Sequence
  Description of Artificial Sequence: Synthetic oligonucleotide
gcacguggggcuaagaaga

SEQ ID NO: 2294211 - RNA, 19 nt, Artificial Sequence
  Description of Artificial Sequence: Synthetic oligonucleotide
agagcgcucgggcgcgagg

SEQ ID NO: 2294212 - RNA, 19 nt, Artificial Sequence
  Description of Artificial Sequence: Synthetic oligonucleotide
gcgguacugacucagccuc

SEQ ID NO: 2294213 - RNA, 19 nt, Artificial Sequence
  Description of Artificial Sequence: Synthetic oligonucleotide
uccgggaaguggcccgggc

SEQ ID NO: 2294214 - RNA, 19 nt, Artificial Sequence
  Description of Artificial Sequence: Synthetic oligonucleotide
ugaccuccccugugcaacu

SEQ ID NO: 2294215 - RNA, 19 nt, Artificial Sequence
  Description of Artificial Sequence: Synthetic oligonucleotide
gaggcauucaaggccccuc

SEQ ID NO: 2294216 - RNA, 19 nt, Artificial Sequence
  Description of Artificial Sequence: Synthetic oligonucleotide
accugcgucucaauguccu

SEQ ID NO: 2294217 - RNA, 19 nt, Artificial Sequence
  Description of Artificial Sequence: Synthetic oligonucleotide
cacguggggcuaagaagac

SEQ ID NO: 2294218 - RNA, 19 nt, Artificial Sequence
  Description of Artificial Sequence: Synthetic oligonucleotide
gauugcacguggggcuaag

SEQ ID NO: 2294219 - RNA, 19 nt, Artificial Sequence
  Description of Artificial Sequence: Synthetic oligonucleotide
uuuccccguccugaccucc

SEQ ID NO: 2294220 - RNA, 19 nt, Artificial Sequence
  Description of Artificial Sequence: Synthetic oligonucleotide
caggugcgcgcuucacacg

SEQ ID NO: 2294221 - RNA, 19 nt, Artificial Sequence
  Description of Artificial Sequence: Synthetic oligonucleotide
aggccuguucacucucacu

SEQ ID NO: 2294222 - RNA, 19 nt, Artificial Sequence
  Description of Artificial Sequence: Synthetic oligonucleotide
ggaccugcgucucaauguc

SEQ ID NO: 2294223 - RNA, 19 nt, Artificial Sequence
  Description of Artificial Sequence: Synthetic oligonucleotide
ugcgcgcuucacacgggac

SEQ ID NO: 2294224 - RNA, 19 nt, Artificial Sequence
  Description of Artificial Sequence: Synthetic oligonucleotide
uggguaagaacaggacauu

SEQ ID NO: 2294225 - RNA, 19 nt, Artificial Sequence
  Description of Artificial Sequence: Synthetic oligonucleotide
gagcgcucgggcgcgaggc

SEQ ID NO: 2294226 - RNA, 19 nt, Artificial Sequence
  Description of Artificial Sequence: Synthetic oligonucleotide
uucagaggaccaaguccuu

SEQ ID NO: 2294227 - RNA, 19 nt, Artificial Sequence
  Description of Artificial Sequence: Synthetic oligonucleotide
cacgggaccgcgccugggc

SEQ ID NO: 2294228 - RNA, 19 nt, Artificial Sequence
  Description of Artificial Sequence: Synthetic oligonucleotide
gugcuugcucccggaaagg

SEQ ID NO: 2294229 - RNA, 19 nt, Artificial Sequence
  Description of Artificial Sequence: Synthetic oligonucleotide
gcuagcacggacaggcggc

SEQ ID NO: 2294230 - RNA, 19 nt, Artificial Sequence
  Description of Artificial Sequence: Synthetic oligonucleotide
gagagguggucauggccaa

SEQ ID NO: 2294231 - RNA, 19 nt, Artificial Sequence
  Description of Artificial Sequence: Synthetic oligonucleotide
aguccuugccacagguacu

SEQ ID NO: 2294232 - RNA, 19 nt, Artificial Sequence
  Description of Artificial Sequence: Synthetic oligonucleotide
gaccugcgucucaaugucc

SEQ ID NO: 2294233 - RNA, 19 nt, Artificial Sequence
  Description of Artificial Sequence: Synthetic oligonucleotide
gcacauugccacugugagc

SEQ ID NO: 2294234 - RNA, 19 nt, Artificial Sequence
  Description of Artificial Sequence: Synthetic oligonucleotide
auguugcgggcaaugucug

SEQ ID NO: 2294235 - RNA, 19 nt, Artificial Sequence
  Description of Artificial Sequence: Synthetic oligonucleotide
gguaagaacaggacauucu

SEQ ID NO: 2294236 - RNA, 19 nt, Artificial Sequence
  Description of Artificial Sequence: Synthetic oligonucleotide
uugcgggcaaugucugcau

SEQ ID NO: 2294237 - RNA, 19 nt, Artificial Sequence
  Description of Artificial Sequence: Synthetic oligonucleotide
cacagauagagcgagucau

SEQ ID NO: 2294238 - RNA, 19 nt, Artificial Sequence
  Description of Artificial Sequence: Synthetic oligonucleotide
caaugucugcauaggcaaa

SEQ ID NO: 2294239 - RNA, 19 nt, Artificial Sequence
  Description of Artificial Sequence: Synthetic oligonucleotide
ugcgggcaaugucugcaua

SEQ ID NO: 2294240 - RNA, 19 nt, Artificial Sequence
  Description of Artificial Sequence: Synthetic oligonucleotide
gcugucuucaguuggcggu

SEQ ID NO: 2294241 - RNA, 19 nt, Artificial Sequence
  Description of Artificial Sequence: Synthetic oligonucleotide
cuucuuagcuaggucccca

SEQ ID NO: 2294242 - RNA, 19 nt, Artificial Sequence
  Description of Artificial Sequence: Synthetic oligonucleotide
cugagaaguagaagauccu

SEQ ID NO: 2294243 - RNA, 19 nt, Artificial Sequence
  Description of Artificial Sequence: Synthetic oligonucleotide
ugcuggaccugcgucucaa

SEQ ID NO: 2294244 - RNA, 19 nt, Artificial Sequence
  Description of Artificial Sequence: Synthetic oligonucleotide
aguuggcgguacugacuca

SEQ ID NO: 2294245 - RNA, 19 nt, Artificial Sequence
  Description of Artificial Sequence: Synthetic oligonucleotide
cuuagcuagguccccaguu

SEQ ID NO: 2294246 - RNA, 19 nt, Artificial Sequence
  Description of Artificial Sequence: Synthetic oligonucleotide
guagaagauccugccagcu

SEQ ID NO: 2294247 - RNA, 19 nt, Artificial Sequence
  Description of Artificial Sequence: Synthetic oligonucleotide
acagauagagcgagucauu

SEQ ID NO: 2294248 - RNA, 19 nt, Artificial Sequence
  Description of Artificial Sequence: Synthetic oligonucleotide
caggacauucuaggcucag

SEQ ID NO: 2294249 - RNA, 19 nt, Artificial Sequence
  Description of Artificial Sequence: Synthetic oligonucleotide
gcgcgcuucacacgggacc

SEQ ID NO: 2294250 - RNA, 19 nt, Artificial Sequence
  Description of Artificial Sequence: Synthetic oligonucleotide
ccugggcgcgccgagagcg

SEQ ID NO: 2294251 - RNA, 19 nt, Artificial Sequence
  Description of Artificial Sequence: Synthetic oligonucleotide
cugauaguccucggcuguc

SEQ ID NO: 2294252 - RNA, 19 nt, Artificial Sequence
  Description of Artificial Sequence: Synthetic oligonucleotide
ugcccagguaauggucuac

SEQ ID NO: 2294253 - RNA, 19 nt, Artificial Sequence
  Description of Artificial Sequence: Synthetic oligonucleotide
ggggcuaagaagacagaga

SEQ ID NO: 2294254 - RNA, 19 nt, Artificial Sequence
  Description of Artificial Sequence: Synthetic oligonucleotide
cauucaaggccccucugau

SEQ ID NO: 2294255 - RNA, 19 nt, Artificial Sequence
  Description of Artificial Sequence: Synthetic oligonucleotide
uucuaggcucaggcugggc

SEQ ID NO: 2294256 - RNA, 19 nt, Artificial Sequence
  Description of Artificial Sequence: Synthetic oligonucleotide
caugucccuugaacuccug

SEQ ID NO: 2294257 - RNA, 19 nt, Artificial Sequence
  Description of Artificial Sequence: Synthetic oligonucleotide
caaggccuguucacucuca

SEQ ID NO: 2294258 - RNA, 19 nt, Artificial Sequence
  Description of Artificial Sequence: Synthetic oligonucleotide
aacgcgcagccaggcaccu

SEQ ID NO: 2294259 - RNA, 19 nt, Artificial Sequence
  Description of Artificial Sequence: Synthetic oligonucleotide
caggcggcugggguguggg

SEQ ID NO: 2294260 - RNA, 19 nt, Artificial Sequence
  Description of Artificial Sequence: Synthetic oligonucleotide
acaggacauucuaggcuca

SEQ ID NO: 2294261 - RNA, 19 nt, Artificial Sequence
  Description of Artificial Sequence: Synthetic oligonucleotide
cacacgggaccgcgccugg

SEQ ID NO: 2294262 - RNA, 19 nt, Artificial Sequence
  Description of Artificial Sequence: Synthetic oligonucleotide
cugugcaacuccccacaga

SEQ ID NO: 2294263 - RNA, 19 nt, Artificial Sequence
  Description of Artificial Sequence: Synthetic oligonucleotide
auugcacguggggcuaaga

SEQ ID NO: 2294264 - RNA, 19 nt, Artificial Sequence
  Description of Artificial Sequence: Synthetic oligonucleotide
gagauugcacguggggcua

SEQ ID NO: 2294265 - RNA, 19 nt, Artificial Sequence
  Description of Artificial Sequence: Synthetic oligonucleotide
ggcauucaaggccccucug

SEQ ID NO: 2294266 - RNA, 19 nt, Artificial Sequence
  Description of Artificial Sequence: Synthetic oligonucleotide
gccaagcacauugccacug

SEQ ID NO: 2294267 - RNA, 19 nt, Artificial Sequence
  Description of Artificial Sequence: Synthetic oligonucleotide
ugcucccggaaaggaaauc

SEQ ID NO: 2294268 - RNA, 19 nt, Artificial Sequence
  Description of Artificial Sequence: Synthetic oligonucleotide
agcuagguccccaguugcu

SEQ ID NO: 2294269 - RNA, 19 nt, Artificial Sequence
  Description of Artificial Sequence: Synthetic oligonucleotide
gcgcuucgucuucagcagg

SEQ ID NO: 2294270 - RNA, 19 nt, Artificial Sequence
  Description of Artificial Sequence: Synthetic oligonucleotide
cuccuccgggaaguggccc

SEQ ID NO: 2294271 - RNA, 19 nt, Artificial Sequence
  Description of Artificial Sequence: Synthetic oligonucleotide
cacugugagcauucuccaa

SEQ ID NO: 2294272 - RNA, 19 nt, Artificial Sequence
  Description of Artificial Sequence: Synthetic oligonucleotide
ccgauacaucuccucuucc

SEQ ID NO: 2294273 - RNA, 19 nt, Artificial Sequence
  Description of Artificial Sequence: Synthetic oligonucleotide
cgcgcagccaggcaccugg

SEQ ID NO: 2294274 - RNA, 19 nt, Artificial Sequence
  Description of Artificial Sequence: Synthetic oligonucleotide
agguaauggucuacccgau

SEQ ID NO: 2294275 - RNA, 19 nt, Artificial Sequence
  Description of Artificial Sequence: Synthetic oligonucleotide
gggaaguggcccgggcugg

SEQ ID NO: 2294276 - RNA, 19 nt, Artificial Sequence
  Description of Artificial Sequence: Synthetic oligonucleotide
aggccccucugauuuugaa

SEQ ID NO: 2294277 - RNA, 19 nt, Artificial Sequence
  Description of Artificial Sequence: Synthetic oligonucleotide
aggcggcuggggugugggg

SEQ ID NO: 2294278 - RNA, 19 nt, Artificial Sequence
  Description of Artificial Sequence: Synthetic oligonucleotide
cacaaggccuguucacucu

SEQ ID NO: 2294279 - RNA, 19 nt, Artificial Sequence
  Description of Artificial Sequence: Synthetic oligonucleotide
aggcaaaggguggcacuga

SEQ ID NO: 2294280 - RNA, 19 nt, Artificial Sequence
  Description of Artificial Sequence: Synthetic oligonucleotide
gugcgcgcuucacacggga

SEQ ID NO: 2294281 - RNA, 19 nt, Artificial Sequence
  Description of Artificial Sequence: Synthetic oligonucleotide
gcccagguaauggucuacc

SEQ ID NO: 2294282 - RNA, 19 nt, Artificial Sequence
  Description of Artificial Sequence: Synthetic oligonucleotide
gacagagaggcagccugcu

SEQ ID NO: 2294283 - RNA, 19 nt, Artificial Sequence
  Description of Artificial Sequence: Synthetic oligonucleotide
cugggcgcgccgagagcgc

SEQ ID NO: 2294284 - RNA, 19 nt, Artificial Sequence
  Description of Artificial Sequence: Synthetic oligonucleotide
gagagcgcucgggcgcgag

SEQ ID NO: 2294285 - RNA, 19 nt, Artificial Sequence
  Description of Artificial Sequence: Synthetic oligonucleotide
cacuguuauucagaacgcu

SEQ ID NO: 2294286 - RNA, 19 nt, Artificial Sequence
  Description of Artificial Sequence: Synthetic oligonucleotide
ccugugcaacuccccacag

SEQ ID NO: 2294287 - RNA, 19 nt, Artificial Sequence
  Description of Artificial Sequence: Synthetic oligonucleotide
acacgggaccgcgccuggg

SEQ ID NO: 2294288 - RNA, 19 nt, Artificial Sequence
  Description of Artificial Sequence: Synthetic oligonucleotide
uagcacggacaggcggcug

SEQ ID NO: 2294289 - RNA, 19 nt, Artificial Sequence
  Description of Artificial Sequence: Synthetic oligonucleotide
ggugcuucaucucgcuccu

SEQ ID NO: 2294290 - RNA, 19 nt, Artificial Sequence
  Description of Artificial Sequence: Synthetic oligonucleotide
ccacagauagagcgaguca

SEQ ID NO: 2294291 - RNA, 19 nt, Artificial Sequence
  Description of Artificial Sequence: Synthetic oligonucleotide
agauugcacguggggcuaa

SEQ ID NO: 2294292 - RNA, 19 nt, Artificial Sequence
  Description of Artificial Sequence: Synthetic oligonucleotide
cgcgcuucacacgggaccg

SEQ ID NO: 2294293 - RNA, 19 nt, Artificial Sequence
  Description of Artificial Sequence: Synthetic oligonucleotide
acaguccuugccacaggua

SEQ ID NO: 2294294 - RNA, 19 nt, Artificial Sequence
  Description of Artificial Sequence: Synthetic oligonucleotide
ugggcgcgccgagagcgcu

SEQ ID NO: 2294295 - RNA, 19 nt, Artificial Sequence
  Description of Artificial Sequence: Synthetic oligonucleotide
uccuugccacagguacuuc

SEQ ID NO: 2294296 - RNA, 19 nt, Artificial Sequence
  Description of Artificial Sequence: Synthetic oligonucleotide
gcgccgagagcgcucgggc

SEQ ID NO: 2294297 - RNA, 19 nt, Artificial Sequence
  Description of Artificial Sequence: Synthetic oligonucleotide
gcuggcuagcacggacagg

SEQ ID NO: 2294298 - RNA, 19 nt, Artificial Sequence
  Description of Artificial Sequence: Synthetic oligonucleotide
ggcgcgccgagagcgcucg

SEQ ID NO: 2294299 - RNA, 19 nt, Artificial Sequence
  Description of Artificial Sequence: Synthetic oligonucleotide
cgagucauucuucugggua

SEQ ID NO: 2294300 - RNA, 19 nt, Artificial Sequence
  Description of Artificial Sequence: Synthetic oligonucleotide
gggaccgcgccugggcgcg

SEQ ID NO: 2294301 - RNA, 19 nt, Artificial Sequence
  Description of Artificial Sequence: Synthetic oligonucleotide
ugcccgcgcuucgucuuca

SEQ ID NO: 2294302 - RNA, 19 nt, Artificial Sequence
  Description of Artificial Sequence: Synthetic oligonucleotide
accgcgccugggcgcgccg

SEQ ID NO: 2294303 - RNA, 19 nt, Artificial Sequence
  Description of Artificial Sequence: Synthetic oligonucleotide
ccuuguucagagucugaua

SEQ ID NO: 2294304 - RNA, 19 nt, Artificial Sequence
  Description of Artificial Sequence: Synthetic oligonucleotide
gcaaaggguggcacugaga

SEQ ID NO: 2294305 - RNA, 19 nt, Artificial Sequence
  Description of Artificial Sequence: Synthetic oligonucleotide
ggugcgcgcuucacacggg

SEQ ID NO: 2294306 - RNA, 19 nt, Artificial Sequence
  Description of Artificial Sequence: Synthetic oligonucleotide
ccccugugcaacuccccac

SEQ ID NO: 2294307 - RNA, 19 nt, Artificial Sequence
  Description of Artificial Sequence: Synthetic oligonucleotide
cccguccugaccuccccug

SEQ ID NO: 2294308 - RNA, 19 nt, Artificial Sequence
  Description of Artificial Sequence: Synthetic oligonucleotide
gaccuccccugugcaacuc

SEQ ID NO: 2294309 - RNA, 19 nt, Artificial Sequence
  Description of Artificial Sequence: Synthetic oligonucleotide
cucccggaaaggaaaucuu

SEQ ID NO: 2294310 - RNA, 19 nt, Artificial Sequence
  Description of Artificial Sequence: Synthetic oligonucleotide
cugcccgcgcuucgucuuc

SEQ ID NO: 2294311 - RNA, 19 nt, Artificial Sequence
  Description of Artificial Sequence: Synthetic oligonucleotide
ggucuacccgauacaucuc

SEQ ID NO: 2294312 - RNA, 19 nt, Artificial Sequence
  Description of Artificial Sequence: Synthetic oligonucleotide
gcuucacacgggaccgcgc

SEQ ID NO: 2294313 - RNA, 19 nt, Artificial Sequence
  Description of Artificial Sequence: Synthetic oligonucleotide
cggaaaggaaaucuuuggu

SEQ ID NO: 2294314 - RNA, 19 nt, Artificial Sequence
  Description of Artificial Sequence: Synthetic oligonucleotide
guccucggcugucuucagu

SEQ ID NO: 2294315 - RNA, 19 nt, Artificial Sequence
  Description of Artificial Sequence: Synthetic oligonucleotide
cgauacaucuccucuuccu

SEQ ID NO: 2294316 - RNA, 19 nt, Artificial Sequence
  Description of Artificial Sequence: Synthetic oligonucleotide
aggguggcacugagaagua

SEQ ID NO: 2294317 - RNA, 19 nt, Artificial Sequence
  Description of Artificial Sequence: Synthetic oligonucleotide
cgccgagagcgcucgggcg

SEQ ID NO: 2294318 - RNA, 19 nt, Artificial Sequence
  Description of Artificial Sequence: Synthetic oligonucleotide
cgcuucacacgggaccgcg

SEQ ID NO: 2294319 - RNA, 19 nt, Artificial Sequence
  Description of Artificial Sequence: Synthetic oligonucleotide
gcuccuccgggaaguggcc

SEQ ID NO: 2294320 - RNA, 19 nt, Artificial Sequence
  Description of Artificial Sequence: Synthetic oligonucleotide
cugggccugcaggcagccc

SEQ ID NO: 2294321 - RNA, 19 nt, Artificial Sequence
  Description of Artificial Sequence: Synthetic oligonucleotide
gaaguggcccgggcuggcu

SEQ ID NO: 2294322 - RNA, 19 nt, Artificial Sequence
  Description of Artificial Sequence: Synthetic oligonucleotide
cccgcgcuucgucuucagc

SEQ ID NO: 2294323 - RNA, 19 nt, Artificial Sequence
  Description of Artificial Sequence: Synthetic oligonucleotide
cuagcacggacaggcggcu

SEQ ID NO: 2294324 - RNA, 19 nt, Artificial Sequence
  Description of Artificial Sequence: Synthetic oligonucleotide
gugcaacuccccacagaua

SEQ ID NO: 2294325 - RNA, 19 nt, Artificial Sequence
  Description of Artificial Sequence: Synthetic oligonucleotide
gguacugacucagccucau

SEQ ID NO: 2294326 - RNA, 19 nt, Artificial Sequence
  Description of Artificial Sequence: Synthetic oligonucleotide
cgggcuggcuagcacggac

SEQ ID NO: 2294327 - RNA, 19 nt, Artificial Sequence
  Description of Artificial Sequence: Synthetic oligonucleotide
guggcccgggcuggcuagc

SEQ ID NO: 2294328 - RNA, 19 nt, Artificial Sequence
  Description of Artificial Sequence: Synthetic oligonucleotide
gcgagucauucuucugggu

SEQ ID NO: 2294329 - RNA, 19 nt, Artificial Sequence
  Description of Artificial Sequence: Synthetic oligonucleotide
ggcccgggcuggcuagcac

SEQ ID NO: 2294330 - RNA, 19 nt, Artificial Sequence
  Description of Artificial Sequence: Synthetic oligonucleotide
ccugaccuccccugugcaa

SEQ ID NO: 2294331 - RNA, 19 nt, Artificial Sequence
  Description of Artificial Sequence: Synthetic oligonucleotide
acgcgcagccaggcaccug

SEQ ID NO: 2294332 - RNA, 19 nt, Artificial Sequence
  Description of Artificial Sequence: Synthetic oligonucleotide
cgccugggcgcgccgagag

SEQ ID NO: 2294333 - RNA, 19 nt, Artificial Sequence
  Description of Artificial Sequence: Synthetic oligonucleotide
ggucauggccaaaggguuu

SEQ ID NO: 2294334 - RNA, 19 nt, Artificial Sequence
  Description of Artificial Sequence: Synthetic oligonucleotide
gugcuucaucucgcuccuc

SEQ ID NO: 2294335 - RNA, 19 nt, Artificial Sequence
  Description of Artificial Sequence: Synthetic oligonucleotide
gcccgcgcuucgucuucag

SEQ ID NO: 2294336 - RNA, 19 nt, Artificial Sequence
  Description of Artificial Sequence: Synthetic oligonucleotide
cucucacuccagaggcauu

SEQ ID NO: 2294337 - RNA, 19 nt, Artificial Sequence
  Description of Artificial Sequence: Synthetic oligonucleotide
gcgcagccaggcaccuggg

SEQ ID NO: 2294338 - RNA, 19 nt, Artificial Sequence
  Description of Artificial Sequence: Synthetic oligonucleotide
cgcgccgagagcgcucggg

SEQ ID NO: 2294339 - RNA, 19 nt, Artificial Sequence
  Description of Artificial Sequence: Synthetic oligonucleotide
ggcucaggcugggcaguga

SEQ ID NO: 2294340 - RNA, 19 nt, Artificial Sequence
  Description of Artificial Sequence: Synthetic oligonucleotide
gcgcuucacacgggaccgc

SEQ ID NO: 2294341 - RNA, 19 nt, Artificial Sequence
  Description of Artificial Sequence: Synthetic oligonucleotide
gggcagugacucacuguua

SEQ ID NO: 2294342 - RNA, 19 nt, Artificial Sequence
  Description of Artificial Sequence: Synthetic oligonucleotide
cgguacugacucagccuca

SEQ ID NO: 2294343 - RNA, 19 nt, Artificial Sequence
  Description of Artificial Sequence: Synthetic oligonucleotide
cgcuucgucuucagcaggu

SEQ ID NO: 2294344 - RNA, 19 nt, Artificial Sequence
  Description of Artificial Sequence: Synthetic oligonucleotide
ccaggcaccuggguguggu

SEQ ID NO: 2294345 - RNA, 19 nt, Artificial Sequence
  Description of Artificial Sequence: Synthetic oligonucleotide
ccccugcccgcgcuucguc

SEQ ID NO: 2294346 - RNA, 19 nt, Artificial Sequence
  Description of Artificial Sequence: Synthetic oligonucleotide
gcgcgccgagagcgcucgg

SEQ ID NO: 2294347 - RNA, 19 nt, Artificial Sequence
  Description of Artificial Sequence: Synthetic oligonucleotide
cgcgccugggcgcgccgag

SEQ ID NO: 2294348 - RNA, 19 nt, Artificial Sequence
  Description of Artificial Sequence: Synthetic oligonucleotide
gcgucucaauguccuuguu

SEQ ID NO: 2294349 - RNA, 19 nt, Artificial Sequence
  Description of Artificial Sequence: Synthetic oligonucleotide
gggcgcgccgagagcgcuc

SEQ ID NO: 2294350 - RNA, 19 nt, Artificial Sequence
  Description of Artificial Sequence: Synthetic oligonucleotide
ccccacagauagagcgagu

SEQ ID NO: 2294351 - RNA, 19 nt, Artificial Sequence
  Description of Artificial Sequence: Synthetic oligonucleotide
ccugcccgcgcuucgucuu

SEQ ID NO: 2294352 - RNA, 19 nt, Artificial Sequence
  Description of Artificial Sequence: Synthetic oligonucleotide
ccugcgucucaauguccuu

SEQ ID NO: 2294353 - RNA, 19 nt, Artificial Sequence
  Description of Artificial Sequence: Synthetic oligonucleotide
ggaccgcgccugggcgcgc

SEQ ID NO: 2294354 - RNA, 19 nt, Artificial Sequence
  Description of Artificial Sequence: Synthetic oligonucleotide
gcgccugggcgcgccgaga

SEQ ID NO: 2294355 - RNA, 19 nt, Artificial Sequence
  Description of Artificial Sequence: Synthetic oligonucleotide
ccccguccugaccuccccu

SEQ ID NO: 2294356 - RNA, 19 nt, Artificial Sequence
  Description of Artificial Sequence: Synthetic oligonucleotide
ccgcgccugggcgcgccga

SEQ ID NO: 2294357 - RNA, 19 nt, Artificial Sequence
  Description of Artificial Sequence: Synthetic oligonucleotide
cgcugacacaaggccuguu

SEQ ID NO: 2294358 - RNA, 19 nt, Artificial Sequence
  Description of Artificial Sequence: Synthetic oligonucleotide
aauuucaugaauuaauccc

SEQ ID NO: 2294359 - RNA, 19 nt, Artificial Sequence
  Description of Artificial Sequence: Synthetic oligonucleotide
aguaauuugagcucaaagc

SEQ ID NO: 2294360 - RNA, 19 nt, Artificial Sequence
  Description of Artificial Sequence: Synthetic oligonucleotide
aaaauaugcuauguaaggc

SEQ ID NO: 2294361 - RNA, 19 nt, Artificial Sequence
  Description of Artificial Sequence: Synthetic oligonucleotide
uuuaauuuggaauucucug

SEQ ID NO: 2294362 - RNA, 19 nt, Artificial Sequence
  Description of Artificial Sequence: Synthetic oligonucleotide
uuuagaaauguucacguga

SEQ ID NO: 2294363 - RNA, 19 nt, Artificial Sequence
  Description of Artificial Sequence: Synthetic oligonucleotide
aaaagcaguauuuuguaga

SEQ ID NO: 2294364 - RNA, 19 nt, Artificial Sequence
  Description of Artificial Sequence: Synthetic oligonucleotide
uugaauucauguuaagagg

SEQ ID NO: 2294365 - RNA, 19 nt, Artificial Sequence
  Description of Artificial Sequence: Synthetic oligonucleotide
agcuauaauuuccauaugg

SEQ ID NO: 2294366 - RNA, 19 nt, Artificial Sequence
  Description of Artificial Sequence: Synthetic oligonucleotide
aaauaugcuauguaaggcu

SEQ ID NO: 2294367 - RNA, 19 nt, Artificial Sequence
  Description of Artificial Sequence: Synthetic oligonucleotide
agaaauguucacgugaacc

SEQ ID NO: 2294368 - RNA, 19 nt, Artificial Sequence
  Description of Artificial Sequence: Synthetic oligonucleotide
aaaucuugucagcaacucc

SEQ ID NO: 2294369 - RNA, 19 nt, Artificial Sequence
  Description of Artificial Sequence: Synthetic oligonucleotide
gugaaugcugauuagaucc

SEQ ID NO: 2294370 - RNA, 19 nt, Artificial Sequence
  Description of Artificial Sequence: Synthetic oligonucleotide
ucucauaagaaauuuguga

SEQ ID NO: 2294371 - RNA, 19 nt, Artificial Sequence
  Description of Artificial Sequence: Synthetic oligonucleotide
ugaauucauguuaagagga

SEQ ID NO: 2294372 - RNA, 19 nt, Artificial Sequence
  Description of Artificial Sequence: Synthetic oligonucleotide
cucauaagaaauuugugag

SEQ ID NO: 2294373 - RNA, 19 nt, Artificial Sequence
  Description of Artificial Sequence: Synthetic oligonucleotide
aaauuugugagcucacuug

SEQ ID NO: 2294374 - RNA, 19 nt, Artificial Sequence
  Description of Artificial Sequence: Synthetic oligonucleotide
acuugaaaugaacagcaac

SEQ ID NO: 2294375 - RNA, 19 nt, Artificial Sequence
  Description of Artificial Sequence: Synthetic oligonucleotide
ugcuauguaaggcugaucu

SEQ ID NO: 2294376 - RNA, 19 nt, Artificial Sequence
  Description of Artificial Sequence: Synthetic oligonucleotide
ugaucuaaagaacacuuga

SEQ ID NO: 2294377 - RNA, 19 nt, Artificial Sequence
  Description of Artificial Sequence: Synthetic oligonucleotide
aguaacuguaacucuauag

SEQ ID NO: 2294378 - RNA, 19 nt, Artificial Sequence
  Description of Artificial Sequence: Synthetic oligonucleotide
guaacuguaacucuauagc

SEQ ID NO: 2294379 - RNA, 19 nt, Artificial Sequence
  Description of Artificial Sequence: Synthetic oligonucleotide
aucguuaucacauucugug

SEQ ID NO: 2294380 - RNA, 19 nt, Artificial Sequence
  Description of Artificial Sequence: Synthetic oligonucleotide
aacggaguaacuguaacuc

SEQ ID NO: 2294381 - RNA, 19 nt, Artificial Sequence
  Description of Artificial Sequence: Synthetic oligonucleotide
acauaacucugcuucaagc

SEQ ID NO: 2294382 - RNA, 19 nt, Artificial Sequence
  Description of Artificial Sequence: Synthetic oligonucleotide
ugcagugaccuucacaggg

SEQ ID NO: 2294383 - RNA, 19 nt, Artificial Sequence
  Description of Artificial Sequence: Synthetic oligonucleotide
uaauuucaugaauuaaucc

SEQ ID NO: 2294384 - RNA, 19 nt, Artificial Sequence
  Description of Artificial Sequence: Synthetic oligonucleotide
uaauuuggaauucucuggc

SEQ ID NO: 2294385 - RNA, 19 nt, Artificial Sequence
  Description of Artificial Sequence: Synthetic oligonucleotide
gauuagauccuccacaauc

SEQ ID NO: 2294386 - RNA, 19 nt, Artificial Sequence
  Description of Artificial Sequence: Synthetic oligonucleotide
aauuuggaauucucuggcg

SEQ ID NO: 2294387 - RNA, 19 nt, Artificial Sequence
  Description of Artificial Sequence: Synthetic oligonucleotide
aauuugugagcucacuuga

SEQ ID NO: 2294388 - RNA, 19 nt, Artificial Sequence
  Description of Artificial Sequence: Synthetic oligonucleotide
auccaaacgucuucuaacc

SEQ ID NO: 2294389 - RNA, 19 nt, Artificial Sequence
  Description of Artificial Sequence: Synthetic oligonucleotide
ucuauaaacggaguaacug

SEQ ID NO: 2294390 - RNA, 19 nt, Artificial Sequence
  Description of Artificial Sequence: Synthetic oligonucleotide
uugacuccuauguuuagcg

SEQ ID NO: 2294391 - RNA, 19 nt, Artificial Sequence
  Description of Artificial Sequence: Synthetic oligonucleotide
uucucaaaggugauaagug

SEQ ID NO: 2294392 - RNA, 19 nt, Artificial Sequence
  Description of Artificial Sequence: Synthetic oligonucleotide
auucccgucacguugaucu

SEQ ID NO: 2294393 - RNA, 19 nt, Artificial Sequence
  Description of Artificial Sequence: Synthetic oligonucleotide
uaaagaacacuugaccacg

SEQ ID NO: 2294394 - RNA, 19 nt, Artificial Sequence
  Description of Artificial Sequence: Synthetic oligonucleotide
aacuguaacucuauagcac

SEQ ID NO: 2294395 - RNA, 19 nt, Artificial Sequence
  Description of Artificial Sequence: Synthetic oligonucleotide
uccauuauucuuccuuugg

SEQ ID NO: 2294396 - RNA, 19 nt, Artificial Sequence
  Description of Artificial Sequence: Synthetic oligonucleotide
uugaucuucauuuuagaaa

SEQ ID NO: 2294397 - RNA, 19 nt, Artificial Sequence
  Description of Artificial Sequence: Synthetic oligonucleotide
uucuuggacuuacagaagc

SEQ ID NO: 2294398 - RNA, 19 nt, Artificial Sequence
  Description of Artificial Sequence: Synthetic oligonucleotide
ucuuagauauggcugaaaa

SEQ ID NO: 2294399 - RNA, 19 nt, Artificial Sequence
  Description of Artificial Sequence: Synthetic oligonucleotide
aaaaucuugucagcaacuc

SEQ ID NO: 2294400 - RNA, 19 nt, Artificial Sequence
  Description of Artificial Sequence: Synthetic oligonucleotide
gacuccuauguuuagcggg

SEQ ID NO: 2294401 - RNA, 19 nt, Artificial Sequence
  Description of Artificial Sequence: Synthetic oligonucleotide
aacucuauagcacuuugaa

SEQ ID NO: 2294402 - RNA, 19 nt, Artificial Sequence
  Description of Artificial Sequence: Synthetic oligonucleotide
uaagaaauuugugagcuca

SEQ ID NO: 2294403 - RNA, 19 nt, Artificial Sequence
  Description of Artificial Sequence: Synthetic oligonucleotide
gauguuuacaguaauuuga

SEQ ID NO: 2294404 - RNA, 19 nt, Artificial Sequence
  Description of Artificial Sequence: Synthetic oligonucleotide
acuuacagaagcucaguuc

SEQ ID NO: 2294405 - RNA, 19 nt, Artificial Sequence
  Description of Artificial Sequence: Synthetic oligonucleotide
uuuacaguaauuugagcuc

SEQ ID NO: 2294406 - RNA, 19 nt, Artificial Sequence
  Description of Artificial Sequence: Synthetic oligonucleotide
aauucucuggcguccgaac

SEQ ID NO: 2294407 - RNA, 19 nt, Artificial Sequence
  Description of Artificial Sequence: Synthetic oligonucleotide
aacuauuugagaaccgguc

SEQ ID NO: 2294408 - RNA, 19 nt, Artificial Sequence
  Description of Artificial Sequence: Synthetic oligonucleotide
aacgucuucuaacccaguc

SEQ ID NO: 2294409 - RNA, 19 nt, Artificial Sequence
  Description of Artificial Sequence: Synthetic oligonucleotide
uugagaaccggucaucaug

SEQ ID NO: 2294410 - RNA, 19 nt, Artificial Sequence
  Description of Artificial Sequence: Synthetic oligonucleotide
uaacuguaacucuauagca

SEQ ID NO: 2294411 - RNA, 19 nt, Artificial Sequence
  Description of Artificial Sequence: Synthetic oligonucleotide
ugagaaccggucaucaugc

SEQ ID NO: 2294412 - RNA, 19 nt, Artificial Sequence
  Description of Artificial Sequence: Synthetic oligonucleotide
aacgugaucacagcgcuuc

SEQ ID NO: 2294413 - RNA, 19 nt, Artificial Sequence
  Description of Artificial Sequence: Synthetic oligonucleotide
ucucaaaggugauaagugc

SEQ ID NO: 2294414 - RNA, 19 nt, Artificial Sequence
  Description of Artificial Sequence: Synthetic oligonucleotide
agcucaaagcuauaauuuc

SEQ ID NO: 2294415 - RNA, 19 nt, Artificial Sequence
  Description of Artificial Sequence: Synthetic oligonucleotide
gaaaagcaguauuuuguag

SEQ ID NO: 2294416 - RNA, 19 nt, Artificial Sequence
  Description of Artificial Sequence: Synthetic oligonucleotide
aaagcaguauuuuguagau

SEQ ID NO: 2294417 - RNA, 19 nt, Artificial Sequence
  Description of Artificial Sequence: Synthetic oligonucleotide
aucugcacgacaugcuucc

SEQ ID NO: 2294418 - RNA, 19 nt, Artificial Sequence
  Description of Artificial Sequence: Synthetic oligonucleotide
aacauaacucugcuucaag

SEQ ID NO: 2294419 - RNA, 19 nt, Artificial Sequence
  Description of Artificial Sequence: Synthetic oligonucleotide
uguuuagcgggacuggaug

SEQ ID NO: 2294420 - RNA, 19 nt, Artificial Sequence
  Description of Artificial Sequence: Synthetic oligonucleotide
aacacuugaccacgucuac

SEQ ID NO: 2294421 - RNA, 19 nt, Artificial Sequence
  Description of Artificial Sequence: Synthetic oligonucleotide
aaacggaguaacuguaacu

SEQ ID NO: 2294422 - RNA, 19 nt, Artificial Sequence
  Description of Artificial Sequence: Synthetic oligonucleotide
gaacucuccacugagauga

SEQ ID NO: 2294423 - RNA, 19 nt, Artificial Sequence
  Description of Artificial Sequence: Synthetic oligonucleotide
agaagcaccguccucuuag

SEQ ID NO: 2294424 - RNA, 19 nt, Artificial Sequence
  Description of Artificial Sequence: Synthetic oligonucleotide
aaugaacagcaacuauuug

SEQ ID NO: 2294425 - RNA, 19 nt, Artificial Sequence
  Description of Artificial Sequence: Synthetic oligonucleotide
ugugagcucacuugaaaug

SEQ ID NO: 2294426 - RNA, 19 nt, Artificial Sequence
  Description of Artificial Sequence: Synthetic oligonucleotide
uggaagugaaugcugauua

SEQ ID NO: 2294427 - RNA, 19 nt, Artificial Sequence
  Description of Artificial Sequence: Synthetic oligonucleotide
aggauagucuuucuucuuc

SEQ ID NO: 2294428 - RNA, 19 nt, Artificial Sequence
  Description of Artificial Sequence: Synthetic oligonucleotide
acuguaacucuauagcacu

SEQ ID NO: 2294429 - RNA, 19 nt, Artificial Sequence
  Description of Artificial Sequence: Synthetic oligonucleotide
ugcaaguuuucccucauaa

SEQ ID NO: 2294430 - RNA, 19 nt, Artificial Sequence
  Description of Artificial Sequence: Synthetic oligonucleotide
acaaacgugaucacagcgc

SEQ ID NO: 2294431 - RNA, 19 nt, Artificial Sequence
  Description of Artificial Sequence: Synthetic oligonucleotide
acuauuugagaaccgguca

SEQ ID NO: 2294432 - RNA, 19 nt, Artificial Sequence
  Description of Artificial Sequence: Synthetic oligonucleotide
uuggacuuacagaagcuca

SEQ ID NO: 2294433 - RNA, 19 nt, Artificial Sequence
  Description of Artificial Sequence: Synthetic oligonucleotide
uuuuagaaauguucacgug

SEQ ID NO: 2294434 - RNA, 19 nt, Artificial Sequence
  Description of Artificial Sequence: Synthetic oligonucleotide
uccacugagaugaauuuaa

SEQ ID NO: 2294435 - RNA, 19 nt, Artificial Sequence
  Description of Artificial Sequence: Synthetic oligonucleotide
guaauuugagcucaaagcu

SEQ ID NO: 2294436 - RNA, 19 nt, Artificial Sequence
  Description of Artificial Sequence: Synthetic oligonucleotide
agcgucucucuauaaacgg

SEQ ID NO: 2294437 - RNA, 19 nt, Artificial Sequence
  Description of Artificial Sequence: Synthetic oligonucleotide
ugagcucaaagcuauaauu

SEQ ID NO: 2294438 - RNA, 19 nt, Artificial Sequence
  Description of Artificial Sequence: Synthetic oligonucleotide
uaaacggaguaacuguaac

SEQ ID NO: 2294439 - RNA, 19 nt, Artificial Sequence
  Description of Artificial Sequence: Synthetic oligonucleotide
gaaccggucaucaugcucc

SEQ ID NO: 2294440 - RNA, 19 nt, Artificial Sequence
  Description of Artificial Sequence: Synthetic oligonucleotide
aggaauucccgucacguug

SEQ ID NO: 2294441 - RNA, 19 nt, Artificial Sequence
  Description of Artificial Sequence: Synthetic oligonucleotide
ugguauauucucuuuaauu

SEQ ID NO: 2294442 - RNA, 19 nt, Artificial Sequence
  Description of Artificial Sequence: Synthetic oligonucleotide
aauuugagcucaaagcuau

SEQ ID NO: 2294443 - RNA, 19 nt, Artificial Sequence
  Description of Artificial Sequence: Synthetic oligonucleotide
uggacuuacagaagcucag

SEQ ID NO: 2294444 - RNA, 19 nt, Artificial Sequence
  Description of Artificial Sequence: Synthetic oligonucleotide
cacaaacgugaucacagcg

SEQ ID NO: 2294445 - RNA, 19 nt, Artificial Sequence
  Description of Artificial Sequence: Synthetic oligonucleotide
ggugauaagugcuuguccc

SEQ ID NO: 2294446 - RNA, 19 nt, Artificial Sequence
  Description of Artificial Sequence: Synthetic oligonucleotide
uuccccaucguuaucacau

SEQ ID NO: 2294447 - RNA, 19 nt, Artificial Sequence
  Description of Artificial Sequence: Synthetic oligonucleotide
aaaggugauaagugcuugu

SEQ ID NO: 2294448 - RNA, 19 nt, Artificial Sequence
  Description of Artificial Sequence: Synthetic oligonucleotide
uaauuugagcucaaagcua

SEQ ID NO: 2294449 - RNA, 19 nt, Artificial Sequence
  Description of Artificial Sequence: Synthetic oligonucleotide
ucuugucugcucuucagga

SEQ ID NO: 2294450 - RNA, 19 nt, Artificial Sequence
  Description of Artificial Sequence: Synthetic oligonucleotide
auaagaaauuugugagcuc

SEQ ID NO: 2294451 - RNA, 19 nt, Artificial Sequence
  Description of Artificial Sequence: Synthetic oligonucleotide
uccucuuagauauggcuga

SEQ ID NO: 2294452 - RNA, 19 nt, Artificial Sequence
  Description of Artificial Sequence: Synthetic oligonucleotide
cuucaggaaguucaucagg

SEQ ID NO: 2294453 - RNA, 19 nt, Artificial Sequence
  Description of Artificial Sequence: Synthetic oligonucleotide
caguaauuugagcucaaag

SEQ ID NO: 2294454 - RNA, 19 nt, Artificial Sequence
  Description of Artificial Sequence: Synthetic oligonucleotide
uccugacuucuuaucauag

SEQ ID NO: 2294455 - RNA, 19 nt, Artificial Sequence
  Description of Artificial Sequence: Synthetic oligonucleotide
agaacacuugaccacgucu

SEQ ID NO: 2294456 - RNA, 19 nt, Artificial Sequence
  Description of Artificial Sequence: Synthetic oligonucleotide
uuccuuuggaagugaaugc

SEQ ID NO: 2294457 - RNA, 19 nt, Artificial Sequence
  Description of Artificial Sequence: Synthetic oligonucleotide
aagaacacuugaccacguc

SEQ ID NO: 2294458 - RNA, 19 nt, Artificial Sequence
  Description of Artificial Sequence: Synthetic oligonucleotide
ucuucuaacccagucagaa

SEQ ID NO: 2294459 - RNA, 19 nt, Artificial Sequence
  Description of Artificial Sequence: Synthetic oligonucleotide
guaaggcugaucuaaagaa

SEQ ID NO: 2294460 - RNA, 19 nt, Artificial Sequence
  Description of Artificial Sequence: Synthetic oligonucleotide
aagcgucucucuauaaacg

SEQ ID NO: 2294461 - RNA, 19 nt, Artificial Sequence
  Description of Artificial Sequence: Synthetic oligonucleotide
uguuuacaguaauuugagc

SEQ ID NO: 2294462 - RNA, 19 nt, Artificial Sequence
  Description of Artificial Sequence: Synthetic oligonucleotide
ucucuauaaacggaguaac

SEQ ID NO: 2294463 - RNA, 19 nt, Artificial Sequence
  Description of Artificial Sequence: Synthetic oligonucleotide
uuacaguaauuugagcuca

SEQ ID NO: 2294464 - RNA, 19 nt, Artificial Sequence
  Description of Artificial Sequence: Synthetic oligonucleotide
caagcgucucucuauaaac

SEQ ID NO: 2294465 - RNA, 19 nt, Artificial Sequence
  Description of Artificial Sequence: Synthetic oligonucleotide
uccagcuuccacaaacgug

SEQ ID NO: 2294466 - RNA, 19 nt, Artificial Sequence
  Description of Artificial Sequence: Synthetic oligonucleotide
uccauaugguuucucuggc

SEQ ID NO: 2294467 - RNA, 19 nt, Artificial Sequence
  Description of Artificial Sequence: Synthetic oligonucleotide
gaaauguucacgugaaccu

SEQ ID NO: 2294468 - RNA, 19 nt, Artificial Sequence
  Description of Artificial Sequence: Synthetic oligonucleotide
aagaaauuugugagcucac

SEQ ID NO: 2294469 - RNA, 19 nt, Artificial Sequence
  Description of Artificial Sequence: Synthetic oligonucleotide
aucauaguccacacuuucc

SEQ ID NO: 2294470 - RNA, 19 nt, Artificial Sequence
  Description of Artificial Sequence: Synthetic oligonucleotide
accacgucuacuucuccac

SEQ ID NO: 2294471 - RNA, 19 nt, Artificial Sequence
  Description of Artificial Sequence: Synthetic oligonucleotide
aguucaucaggaauucccg

SEQ ID NO: 2294472 - RNA, 19 nt, Artificial Sequence
  Description of Artificial Sequence: Synthetic oligonucleotide
uucacgugaaccuggaauu

SEQ ID NO: 2294473 - RNA, 19 nt, Artificial Sequence
  Description of Artificial Sequence: Synthetic oligonucleotide
ugguacuuuuccaagcguc

SEQ ID NO: 2294474 - RNA, 19 nt, Artificial Sequence
  Description of Artificial Sequence: Synthetic oligonucleotide
agaaccggucaucaugcuc

SEQ ID NO: 2294475 - RNA, 19 nt, Artificial Sequence
  Description of Artificial Sequence: Synthetic oligonucleotide
ugugcaacuucuuccuucu

SEQ ID NO: 2294476 - RNA, 19 nt, Artificial Sequence
  Description of Artificial Sequence: Synthetic oligonucleotide
uaacucuauagcacuuuga

SEQ ID NO: 2294477 - RNA, 19 nt, Artificial Sequence
  Description of Artificial Sequence: Synthetic oligonucleotide
uccaaacgucuucuaaccc

SEQ ID NO: 2294478 - RNA, 19 nt, Artificial Sequence
  Description of Artificial Sequence: Synthetic oligonucleotide
aauuugacuccuauguuua

SEQ ID NO: 2294479 - RNA, 19 nt, Artificial Sequence
  Description of Artificial Sequence: Synthetic oligonucleotide
uaacccagucagaagcacc

SEQ ID NO: 2294480 - RNA, 19 nt, Artificial Sequence
  Description of Artificial Sequence: Synthetic oligonucleotide
ugacuccuauguuuagcgg

SEQ ID NO: 2294481 - RNA, 19 nt, Artificial Sequence
  Description of Artificial Sequence: Synthetic oligonucleotide
guaacucuauagcacuuug

SEQ ID NO: 2294482 - RNA, 19 nt, Artificial Sequence
  Description of Artificial Sequence: Synthetic oligonucleotide
auguuaagaggauagucuu

SEQ ID NO: 2294483 - RNA, 19 nt, Artificial Sequence
  Description of Artificial Sequence: Synthetic oligonucleotide
ucaggaauucccgucacgu

SEQ ID NO: 2294484 - RNA, 19 nt, Artificial Sequence
  Description of Artificial Sequence: Synthetic oligonucleotide
ucucucuauaaacggagua

SEQ ID NO: 2294485 - RNA, 19 nt, Artificial Sequence
  Description of Artificial Sequence: Synthetic oligonucleotide
agcacuuugaauucauguu

SEQ ID NO: 2294486 - RNA, 19 nt, Artificial Sequence
  Description of Artificial Sequence: Synthetic oligonucleotide
uauguaaggcugaucuaaa

SEQ ID NO: 2294487 - RNA, 19 nt, Artificial Sequence
  Description of Artificial Sequence: Synthetic oligonucleotide
ucaaaggugauaagugcuu

SEQ ID NO: 2294488 - RNA, 19 nt, Artificial Sequence
  Description of Artificial Sequence: Synthetic oligonucleotide
ugaaugcugauuagauccu

SEQ ID NO: 2294489 - RNA, 19 nt, Artificial Sequence
  Description of Artificial Sequence: Synthetic oligonucleotide
ucguuaucacauucugugc

SEQ ID NO: 2294490 - RNA, 19 nt, Artificial Sequence
  Description of Artificial Sequence: Synthetic oligonucleotide
agaugaauuuaagauuucu

SEQ ID NO: 2294491 - RNA, 19 nt, Artificial Sequence
  Description of Artificial Sequence: Synthetic oligonucleotide
auguaaggcugaucuaaag

SEQ ID NO: 2294492 - RNA, 19 nt, Artificial Sequence
  Description of Artificial Sequence: Synthetic oligonucleotide
guuaagaggauagucuuuc

SEQ ID NO: 2294493 - RNA, 19 nt, Artificial Sequence
  Description of Artificial Sequence: Synthetic oligonucleotide
cugaucuaaagaacacuug

SEQ ID NO: 2294494 - RNA, 19 nt, Artificial Sequence
  Description of Artificial Sequence: Synthetic oligonucleotide
aagugaaugcugauuagau

SEQ ID NO: 2294495 - RNA, 19 nt, Artificial Sequence
  Description of Artificial Sequence: Synthetic oligonucleotide
uucugguauauucucuuua

SEQ ID NO: 2294496 - RNA, 19 nt, Artificial Sequence
  Description of Artificial Sequence: Synthetic oligonucleotide
aagcuauaauuuccauaug

SEQ ID NO: 2294497 - RNA, 19 nt, Artificial Sequence
  Description of Artificial Sequence: Synthetic oligonucleotide
uuugagcucaaagcuauaa

SEQ ID NO: 2294498 - RNA, 19 nt, Artificial Sequence
  Description of Artificial Sequence: Synthetic oligonucleotide
uucuuaucauaguccacac

SEQ ID NO: 2294499 - RNA, 19 nt, Artificial Sequence
  Description of Artificial Sequence: Synthetic oligonucleotide
ucccuucuggaucucauaa

SEQ ID NO: 2294500 - RNA, 19 nt, Artificial Sequence
  Description of Artificial Sequence: Synthetic oligonucleotide
uugaaaugaacagcaacua

SEQ ID NO: 2294501 - RNA, 19 nt, Artificial Sequence
  Description of Artificial Sequence: Synthetic oligonucleotide
ccuagucuucaaaauaugc

SEQ ID NO: 2294502 - RNA, 19 nt, Artificial Sequence
  Description of Artificial Sequence: Synthetic oligonucleotide
gaagugaaugcugauuaga

SEQ ID NO: 2294503 - RNA, 19 nt, Artificial Sequence
  Description of Artificial Sequence: Synthetic oligonucleotide
uugagcucaaagcuauaau

SEQ ID NO: 2294504 - RNA, 19 nt, Artificial Sequence
  Description of Artificial Sequence: Synthetic oligonucleotide
auaacucugcuucaagcuu

SEQ ID NO: 2294505 - RNA, 19 nt, Artificial Sequence
  Description of Artificial Sequence: Synthetic oligonucleotide
ugcacgacaugcuucccca

SEQ ID NO: 2294506 - RNA, 19 nt, Artificial Sequence
  Description of Artificial Sequence: Synthetic oligonucleotide
gaucacagcgcuuccugac

SEQ ID NO: 2294507 - RNA, 19 nt, Artificial Sequence
  Description of Artificial Sequence: Synthetic oligonucleotide
aguauuuuguagauguuua

SEQ ID NO: 2294508 - RNA, 19 nt, Artificial Sequence
  Description of Artificial Sequence: Synthetic oligonucleotide
uaacucugcuucaagcuuu

SEQ ID NO: 2294509 - RNA, 19 nt, Artificial Sequence
  Description of Artificial Sequence: Synthetic oligonucleotide
agucuuucuucuucaaaau

SEQ ID NO: 2294510 - RNA, 19 nt, Artificial Sequence
  Description of Artificial Sequence: Synthetic oligonucleotide
uuaucauaguccacacuuu

SEQ ID NO: 2294511 - RNA, 19 nt, Artificial Sequence
  Description of Artificial Sequence: Synthetic oligonucleotide
auuugacuccuauguuuag

SEQ ID NO: 2294512 - RNA, 19 nt, Artificial Sequence
  Description of Artificial Sequence: Synthetic oligonucleotide
cauaagaaauuugugagcu

SEQ ID NO: 2294513 - RNA, 19 nt, Artificial Sequence
  Description of Artificial Sequence: Synthetic oligonucleotide
ccgaacauaacucugcuuc

SEQ ID NO: 2294514 - RNA, 19 nt, Artificial Sequence
  Description of Artificial Sequence: Synthetic oligonucleotide
aucaggaauucccgucacg

SEQ ID NO: 2294515 - RNA, 19 nt, Artificial Sequence
  Description of Artificial Sequence: Synthetic oligonucleotide
uuggaauucucuggcgucc

SEQ ID NO: 2294516 - RNA, 19 nt, Artificial Sequence
  Description of Artificial Sequence: Synthetic oligonucleotide
uuuccaagcgucucucuau

SEQ ID NO: 2294517 - RNA, 19 nt, Artificial Sequence
  Description of Artificial Sequence: Synthetic oligonucleotide
ucuugucagcaacuccagc

SEQ ID NO: 2294518 - RNA, 19 nt, Artificial Sequence
  Description of Artificial Sequence: Synthetic oligonucleotide
ucaucaugcuccgaacucu

SEQ ID NO: 2294519 - RNA, 19 nt, Artificial Sequence
  Description of Artificial Sequence: Synthetic oligonucleotide
gucacguugaucuucauuu

SEQ ID NO: 2294520 - RNA, 19 nt, Artificial Sequence
  Description of Artificial Sequence: Synthetic oligonucleotide
uggccuagucuucaaaaua

SEQ ID NO: 2294521 - RNA, 19 nt, Artificial Sequence
  Description of Artificial Sequence: Synthetic oligonucleotide
ugcuugucccuucuggauc

SEQ ID NO: 2294522 - RNA, 19 nt, Artificial Sequence
  Description of Artificial Sequence: Synthetic oligonucleotide
cuauaaacggaguaacugu

SEQ ID NO: 2294523 - RNA, 19 nt, Artificial Sequence
  Description of Artificial Sequence: Synthetic oligonucleotide
aucucauaagaaauuugug

SEQ ID NO: 2294524 - RNA, 19 nt, Artificial Sequence
  Description of Artificial Sequence: Synthetic oligonucleotide
uauguuuagcgggacugga

SEQ ID NO: 2294525 - RNA, 19 nt, Artificial Sequence
  Description of Artificial Sequence: Synthetic oligonucleotide
acguugaucuucauuuuag

SEQ ID NO: 2294526 - RNA, 19 nt, Artificial Sequence
  Description of Artificial Sequence: Synthetic oligonucleotide
acuuuuccaagcgucucuc

SEQ ID NO: 2294527 - RNA, 19 nt, Artificial Sequence
  Description of Artificial Sequence: Synthetic oligonucleotide
aaccggucaucaugcuccg

SEQ ID NO: 2294528 - RNA, 19 nt, Artificial Sequence
  Description of Artificial Sequence: Synthetic oligonucleotide
cuauguuuagcgggacugg

SEQ ID NO: 2294529 - RNA, 19 nt, Artificial Sequence
  Description of Artificial Sequence: Synthetic oligonucleotide
auaagugcuugucccuucu

SEQ ID NO: 2294530 - RNA, 19 nt, Artificial Sequence
  Description of Artificial Sequence: Synthetic oligonucleotide
accguccucuuagauaugg

SEQ ID NO: 2294531 - RNA, 19 nt, Artificial Sequence
  Description of Artificial Sequence: Synthetic oligonucleotide
guccucuuagauauggcug

SEQ ID NO: 2294532 - RNA, 19 nt, Artificial Sequence
  Description of Artificial Sequence: Synthetic oligonucleotide
uggaucucauaagaaauuu

SEQ ID NO: 2294533 - RNA, 19 nt, Artificial Sequence
  Description of Artificial Sequence: Synthetic oligonucleotide
cuauguaaggcugaucuaa

SEQ ID NO: 2294534 - RNA, 19 nt, Artificial Sequence
  Description of Artificial Sequence: Synthetic oligonucleotide
uugaccacgucuacuucuc

SEQ ID NO: 2294535 - RNA, 19 nt, Artificial Sequence
  Description of Artificial Sequence: Synthetic oligonucleotide
uggcguccgaacauaacuc

SEQ ID NO: 2294536 - RNA, 19 nt, Artificial Sequence
  Description of Artificial Sequence: Synthetic oligonucleotide
uucauguuaagaggauagu

SEQ ID NO: 2294537 - RNA, 19 nt, Artificial Sequence
  Description of Artificial Sequence: Synthetic oligonucleotide
acaccugguacuuuuccaa

SEQ ID NO: 2294538 - RNA, 19 nt, Artificial Sequence
  Description of Artificial Sequence: Synthetic oligonucleotide
cacaaucucuucauccauc

SEQ ID NO: 2294539 - RNA, 19 nt, Artificial Sequence
  Description of Artificial Sequence: Synthetic oligonucleotide
acgucuacuucuccaccuc

SEQ ID NO: 2294540 - RNA, 19 nt, Artificial Sequence
  Description of Artificial Sequence: Synthetic oligonucleotide
cugauuagauccuccacaa

SEQ ID NO: 2294541 - RNA, 19 nt, Artificial Sequence
  Description of Artificial Sequence: Synthetic oligonucleotide
agucuucaaaauaugcuau

SEQ ID NO: 2294542 - RNA, 19 nt, Artificial Sequence
  Description of Artificial Sequence: Synthetic oligonucleotide
uuuagcgggacuggaugug

SEQ ID NO: 2294543 - RNA, 19 nt, Artificial Sequence
  Description of Artificial Sequence: Synthetic oligonucleotide
agaaauuugugagcucacu

SEQ ID NO: 2294544 - RNA, 19 nt, Artificial Sequence
  Description of Artificial Sequence: Synthetic oligonucleotide
ucuuccuuuggaagugaau

SEQ ID NO: 2294545 - RNA, 19 nt, Artificial Sequence
  Description of Artificial Sequence: Synthetic oligonucleotide
uccuauguuuagcgggacu

SEQ ID NO: 2294546 - RNA, 19 nt, Artificial Sequence
  Description of Artificial Sequence: Synthetic oligonucleotide
acggaguaacuguaacucu

SEQ ID NO: 2294547 - RNA, 19 nt, Artificial Sequence
  Description of Artificial Sequence: Synthetic oligonucleotide
uauuugagaaccggucauc

SEQ ID NO: 2294548 - RNA, 19 nt, Artificial Sequence
  Description of Artificial Sequence: Synthetic oligonucleotide
agcucacuugaaaugaaca

SEQ ID NO: 2294549 - RNA, 19 nt, Artificial Sequence
  Description of Artificial Sequence: Synthetic oligonucleotide
uucucuggcguccgaacau

SEQ ID NO: 2294550 - RNA, 19 nt, Artificial Sequence
  Description of Artificial Sequence: Synthetic oligonucleotide
caugcuccgaacucuccac

SEQ ID NO: 2294551 - RNA, 19 nt, Artificial Sequence
  Description of Artificial Sequence: Synthetic oligonucleotide
ugcuccgaacucuccacug

SEQ ID NO: 2294552 - RNA, 19 nt, Artificial Sequence
  Description of Artificial Sequence: Synthetic oligonucleotide
uuaucacauucugugcaac

SEQ ID NO: 2294553 - RNA, 19 nt, Artificial Sequence
  Description of Artificial Sequence: Synthetic oligonucleotide
cuccauuauucuuccuuug

SEQ ID NO: 2294554 - RNA, 19 nt, Artificial Sequence
  Description of Artificial Sequence: Synthetic oligonucleotide
caaaggugauaagugcuug

SEQ ID NO: 2294555 - RNA, 19 nt, Artificial Sequence
  Description of Artificial Sequence: Synthetic oligonucleotide
cacuuugaauucauguuaa

SEQ ID NO: 2294556 - RNA, 19 nt, Artificial Sequence
  Description of Artificial Sequence: Synthetic oligonucleotide
aauucccgucacguugauc

SEQ ID NO: 2294557 - RNA, 19 nt, Artificial Sequence
  Description of Artificial Sequence: Synthetic oligonucleotide
acgugaucacagcgcuucc

SEQ ID NO: 2294558 - RNA, 19 nt, Artificial Sequence
  Description of Artificial Sequence: Synthetic oligonucleotide
ggaagugaaugcugauuag

SEQ ID NO: 2294559 - RNA, 19 nt, Artificial Sequence
  Description of Artificial Sequence: Synthetic oligonucleotide
uuugagaaccggucaucau

SEQ ID NO: 2294560 - RNA, 19 nt, Artificial Sequence
  Description of Artificial Sequence: Synthetic oligonucleotide
agcaacuauuugagaaccg

SEQ ID NO: 2294561 - RNA, 19 nt, Artificial Sequence
  Description of Artificial Sequence: Synthetic oligonucleotide
uaugcuauguaaggcugau

SEQ ID NO: 2294562 - RNA, 19 nt, Artificial Sequence
  Description of Artificial Sequence: Synthetic oligonucleotide
uuagcgggacuggaugugc

SEQ ID NO: 2294563 - RNA, 19 nt, Artificial Sequence
  Description of Artificial Sequence: Synthetic oligonucleotide
uggcugaaaacaccuggua

SEQ ID NO: 2294564 - RNA, 19 nt, Artificial Sequence
  Description of Artificial Sequence: Synthetic oligonucleotide
uuucugguauauucucuuu

SEQ ID NO: 2294565 - RNA, 19 nt, Artificial Sequence
  Description of Artificial Sequence: Synthetic oligonucleotide
uacaguaauuugagcucaa

SEQ ID NO: 2294566 - RNA, 19 nt, Artificial Sequence
  Description of Artificial Sequence: Synthetic oligonucleotide
gugagcucacuugaaauga

SEQ ID NO: 2294567 - RNA, 19 nt, Artificial Sequence
  Description of Artificial Sequence: Synthetic oligonucleotide
ugauuagauccuccacaau

SEQ ID NO: 2294568 - RNA, 19 nt, Artificial Sequence
  Description of Artificial Sequence: Synthetic oligonucleotide
cuucaaaauaugcuaugua

SEQ ID NO: 2294569 - RNA, 19 nt, Artificial Sequence
  Description of Artificial Sequence: Synthetic oligonucleotide
guucacgugaaccuggaau

SEQ ID NO: 2294570 - RNA, 19 nt, Artificial Sequence
  Description of Artificial Sequence: Synthetic oligonucleotide
uuggaagugaaugcugauu

SEQ ID NO: 2294571 - RNA, 19 nt, Artificial Sequence
  Description of Artificial Sequence: Synthetic oligonucleotide
gaccacgucuacuucucca

SEQ ID NO: 2294572 - RNA, 19 nt, Artificial Sequence
  Description of Artificial Sequence: Synthetic oligonucleotide
cuccgaacucuccacugag

SEQ ID NO: 2294573 - RNA, 19 nt, Artificial Sequence
  Description of Artificial Sequence: Synthetic oligonucleotide
cuauaauuuccauaugguu

SEQ ID NO: 2294574 - RNA, 19 nt, Artificial Sequence
  Description of Artificial Sequence: Synthetic oligonucleotide
cugcacgacaugcuucccc

SEQ ID NO: 2294575 - RNA, 19 nt, Artificial Sequence
  Description of Artificial Sequence: Synthetic oligonucleotide
ucuggcguccgaacauaac

SEQ ID NO: 2294576 - RNA, 19 nt, Artificial Sequence
  Description of Artificial Sequence: Synthetic oligonucleotide
aggugcaaguuuucccuca

SEQ ID NO: 2294577 - RNA, 19 nt, Artificial Sequence
  Description of Artificial Sequence: Synthetic oligonucleotide
agcaccguccucuuagaua

SEQ ID NO: 2294578 - RNA, 19 nt, Artificial Sequence
  Description of Artificial Sequence: Synthetic oligonucleotide
ccagucagaagcaccgucc

SEQ ID NO: 2294579 - RNA, 19 nt, Artificial Sequence
  Description of Artificial Sequence: Synthetic oligonucleotide
uuccaagcgucucucuaua

SEQ ID NO: 2294580 - RNA, 19 nt, Artificial Sequence
  Description of Artificial Sequence: Synthetic oligonucleotide
caucaugcuccgaacucuc

SEQ ID NO: 2294581 - RNA, 19 nt, Artificial Sequence
  Description of Artificial Sequence: Synthetic oligonucleotide
gacuggaugugcagugacc

SEQ ID NO: 2294582 - RNA, 19 nt, Artificial Sequence
  Description of Artificial Sequence: Synthetic oligonucleotide
cuuuccaccucuccaccuc

SEQ ID NO: 2294583 - RNA, 19 nt, Artificial Sequence
  Description of Artificial Sequence: Synthetic oligonucleotide
cacuuuccaccucuccacc

SEQ ID NO: 2294584 - RNA, 19 nt, Artificial Sequence
  Description of Artificial Sequence: Synthetic oligonucleotide
ugaccacgucuacuucucc

SEQ ID NO: 2294585 - RNA, 19 nt, Artificial Sequence
  Description of Artificial Sequence: Synthetic oligonucleotide
ugauaagugcuugucccuu

SEQ ID NO: 2294586 - RNA, 19 nt, Artificial Sequence
  Description of Artificial Sequence: Synthetic oligonucleotide
auucuuggacuuacagaag

SEQ ID NO: 2294587 - RNA, 19 nt, Artificial Sequence
  Description of Artificial Sequence: Synthetic oligonucleotide
cugagaugaauuuaagauu

SEQ ID NO: 2294588 - RNA, 19 nt, Artificial Sequence
  Description of Artificial Sequence: Synthetic oligonucleotide
cucucuauaaacggaguaa

SEQ ID NO: 2294589 - RNA, 19 nt, Artificial Sequence
  Description of Artificial Sequence: Synthetic oligonucleotide
caaaaucuugucagcaacu

SEQ ID NO: 2294590 - RNA, 19 nt, Artificial Sequence
  Description of Artificial Sequence: Synthetic oligonucleotide
ggaucucauaagaaauuug

SEQ ID NO: 2294591 - RNA, 19 nt, Artificial Sequence
  Description of Artificial Sequence: Synthetic oligonucleotide
gagcucacuugaaaugaac

SEQ ID NO: 2294592 - RNA, 19 nt, Artificial Sequence
  Description of Artificial Sequence: Synthetic oligonucleotide
ggauagucuuucuucuuca

SEQ ID NO: 2294593 - RNA, 19 nt, Artificial Sequence
  Description of Artificial Sequence: Synthetic oligonucleotide
auaaacggaguaacuguaa

SEQ ID NO: 2294594 - RNA, 19 nt, Artificial Sequence
  Description of Artificial Sequence: Synthetic oligonucleotide
cuucuggaucucauaagaa

SEQ ID NO: 2294595 - RNA, 19 nt, Artificial Sequence
  Description of Artificial Sequence: Synthetic oligonucleotide
gcacuuugaauucauguua

SEQ ID NO: 2294596 - RNA, 19 nt, Artificial Sequence
  Description of Artificial Sequence: Synthetic oligonucleotide
agcgggacuggaugugcag

SEQ ID NO: 2294597 - RNA, 19 nt, Artificial Sequence
  Description of Artificial Sequence: Synthetic oligonucleotide
acuccuauguuuagcggga

SEQ ID NO: 2294598 - RNA, 19 nt, Artificial Sequence
  Description of Artificial Sequence: Synthetic oligonucleotide
cuaacccagucagaagcac

SEQ ID NO: 2294599 - RNA, 19 nt, Artificial Sequence
  Description of Artificial Sequence: Synthetic oligonucleotide
ucacguugaucuucauuuu

SEQ ID NO: 2294600 - RNA, 19 nt, Artificial Sequence
  Description of Artificial Sequence: Synthetic oligonucleotide
auaugcuauguaaggcuga

SEQ ID NO: 2294601 - RNA, 19 nt, Artificial Sequence
  Description of Artificial Sequence: Synthetic oligonucleotide
cgucuucuaacccagucag

SEQ ID NO: 2294602 - RNA, 19 nt, Artificial Sequence
  Description of Artificial Sequence: Synthetic oligonucleotide
ccuauguuuagcgggacug

SEQ ID NO: 2294603 - RNA, 19 nt, Artificial Sequence
  Description of Artificial Sequence: Synthetic oligonucleotide
uguucacgugaaccuggaa

SEQ ID NO: 2294604 - RNA, 19 nt, Artificial Sequence
  Description of Artificial Sequence: Synthetic oligonucleotide
uagcgggacuggaugugca

SEQ ID NO: 2294605 - RNA, 19 nt, Artificial Sequence
  Description of Artificial Sequence: Synthetic oligonucleotide
gagcucaaagcuauaauuu

SEQ ID NO: 2294606 - RNA, 19 nt, Artificial Sequence
  Description of Artificial Sequence: Synthetic oligonucleotide
cuugaccacgucuacuucu

SEQ ID NO: 2294607 - RNA, 19 nt, Artificial Sequence
  Description of Artificial Sequence: Synthetic oligonucleotide
cgucucucuauaaacggag

SEQ ID NO: 2294608 - RNA, 19 nt, Artificial Sequence
  Description of Artificial Sequence: Synthetic oligonucleotide
auauggcugaaaacaccug

SEQ ID NO: 2294609 - RNA, 19 nt, Artificial Sequence
  Description of Artificial Sequence: Synthetic oligonucleotide
uccaagcgucucucuauaa

SEQ ID NO: 2294610 - RNA, 19 nt, Artificial Sequence
  Description of Artificial Sequence: Synthetic oligonucleotide
ccaucguuaucacauucug

SEQ ID NO: 2294611 - RNA, 19 nt, Artificial Sequence
  Description of Artificial Sequence: Synthetic oligonucleotide
uccgaacauaacucugcuu

SEQ ID NO: 2294612 - RNA, 19 nt, Artificial Sequence
  Description of Artificial Sequence: Synthetic oligonucleotide
cacgugaaccuggaauuug

SEQ ID NO: 2294613 - RNA, 19 nt, Artificial Sequence
  Description of Artificial Sequence: Synthetic oligonucleotide
gaagcaccguccucuuaga

SEQ ID NO: 2294614 - RNA, 19 nt, Artificial Sequence
  Description of Artificial Sequence: Synthetic oligonucleotide
gucagaagcaccguccucu

SEQ ID NO: 2294615 - RNA, 19 nt, Artificial Sequence
  Description of Artificial Sequence: Synthetic oligonucleotide
cagaagcucaguuccagcu

SEQ ID NO: 2294616 - RNA, 19 nt, Artificial Sequence
  Description of Artificial Sequence: Synthetic oligonucleotide
cacgacaugcuuccccauc

SEQ ID NO: 2294617 - RNA, 19 nt, Artificial Sequence
  Description of Artificial Sequence: Synthetic oligonucleotide
ugucucuugucugcucuuc

SEQ ID NO: 2294618 - RNA, 19 nt, Artificial Sequence
  Description of Artificial Sequence: Synthetic oligonucleotide
acgugaaccuggaauuuga

SEQ ID NO: 2294619 - RNA, 19 nt, Artificial Sequence
  Description of Artificial Sequence: Synthetic oligonucleotide
guuuagcgggacuggaugu

SEQ ID NO: 2294620 - RNA, 19 nt, Artificial Sequence
  Description of Artificial Sequence: Synthetic oligonucleotide
augcuauguaaggcugauc

SEQ ID NO: 2294621 - RNA, 19 nt, Artificial Sequence
  Description of Artificial Sequence: Synthetic oligonucleotide
cucuauaaacggaguaacu

SEQ ID NO: 2294622 - RNA, 19 nt, Artificial Sequence
  Description of Artificial Sequence: Synthetic oligonucleotide
gaguaacuguaacucuaua

SEQ ID NO: 2294623 - RNA, 19 nt, Artificial Sequence
  Description of Artificial Sequence: Synthetic oligonucleotide
cuugucucuugucugcucu

SEQ ID NO: 2294624 - RNA, 19 nt, Artificial Sequence
  Description of Artificial Sequence: Synthetic oligonucleotide
gaauucucuggcguccgaa

SEQ ID NO: 2294625 - RNA, 19 nt, Artificial Sequence
  Description of Artificial Sequence: Synthetic oligonucleotide
ccauaugguuucucuggcc

SEQ ID NO: 2294626 - RNA, 19 nt, Artificial Sequence
  Description of Artificial Sequence: Synthetic oligonucleotide
cuauuugagaaccggucau

SEQ ID NO: 2294627 - RNA, 19 nt, Artificial Sequence
  Description of Artificial Sequence: Synthetic oligonucleotide
uccauccaaacgucuucua

SEQ ID NO: 2294628 - RNA, 19 nt, Artificial Sequence
  Description of Artificial Sequence: Synthetic oligonucleotide
acaguaauuugagcucaaa

SEQ ID NO: 2294629 - RNA, 19 nt, Artificial Sequence
  Description of Artificial Sequence: Synthetic oligonucleotide
cguccgaacauaacucugc

SEQ ID NO: 2294630 - RNA, 19 nt, Artificial Sequence
  Description of Artificial Sequence: Synthetic oligonucleotide
ucacgugaaccuggaauuu

SEQ ID NO: 2294631 - RNA, 19 nt, Artificial Sequence
  Description of Artificial Sequence: Synthetic oligonucleotide
gugauaagugcuugucccu

SEQ ID NO: 2294632 - RNA, 19 nt, Artificial Sequence
  Description of Artificial Sequence: Synthetic oligonucleotide
gcuauaauuuccauauggu

SEQ ID NO: 2294633 - RNA, 19 nt, Artificial Sequence
  Description of Artificial Sequence: Synthetic oligonucleotide
gaauucauguuaagaggau

SEQ ID NO: 2294634 - RNA, 19 nt, Artificial Sequence
  Description of Artificial Sequence: Synthetic oligonucleotide
guucaucaggaauucccgu

SEQ ID NO: 2294635 - RNA, 19 nt, Artificial Sequence
  Description of Artificial Sequence: Synthetic oligonucleotide
auuugugagcucacuugaa

SEQ ID NO: 2294636 - RNA, 19 nt, Artificial Sequence
  Description of Artificial Sequence: Synthetic oligonucleotide
cacguugaucuucauuuua

SEQ ID NO: 2294637 - RNA, 19 nt, Artificial Sequence
  Description of Artificial Sequence: Synthetic oligonucleotide
caucguuaucacauucugu

SEQ ID NO: 2294638 - RNA, 19 nt, Artificial Sequence
  Description of Artificial Sequence: Synthetic oligonucleotide
ggacuggaugugcagugac

SEQ ID NO: 2294639 - RNA, 19 nt, Artificial Sequence
  Description of Artificial Sequence: Synthetic oligonucleotide
caugcuuccccaucguuau

SEQ ID NO: 2294640 - RNA, 19 nt, Artificial Sequence
  Description of Artificial Sequence: Synthetic oligonucleotide
ccauuauucuuccuuugga

SEQ ID NO: 2294641 - RNA, 19 nt, Artificial Sequence
  Description of Artificial Sequence: Synthetic oligonucleotide
gcaacuccagcuuccacaa

SEQ ID NO: 2294642 - RNA, 19 nt, Artificial Sequence
  Description of Artificial Sequence: Synthetic oligonucleotide
ccacaaacgugaucacagc

SEQ ID NO: 2294643 - RNA, 19 nt, Artificial Sequence
  Description of Artificial Sequence: Synthetic oligonucleotide
gcaccguccucuuagauau

SEQ ID NO: 2294644 - RNA, 19 nt, Artificial Sequence
  Description of Artificial Sequence: Synthetic oligonucleotide
cguuaucacauucugugca

SEQ ID NO: 2294645 - RNA, 19 nt, Artificial Sequence
  Description of Artificial Sequence: Synthetic oligonucleotide
aaacgucuucuaacccagu

SEQ ID NO: 2294646 - RNA, 19 nt, Artificial Sequence
  Description of Artificial Sequence: Synthetic oligonucleotide
ucugcacgacaugcuuccc

SEQ ID NO: 2294647 - RNA, 19 nt, Artificial Sequence
  Description of Artificial Sequence: Synthetic oligonucleotide
ggaauucccgucacguuga

SEQ ID NO: 2294648 - RNA, 19 nt, Artificial Sequence
  Description of Artificial Sequence: Synthetic oligonucleotide
ccaccuccauuauucuucc

SEQ ID NO: 2294649 - RNA, 19 nt, Artificial Sequence
  Description of Artificial Sequence: Synthetic oligonucleotide
ucccgucacguugaucuuc

SEQ ID NO: 2294650 - RNA, 19 nt, Artificial Sequence
  Description of Artificial Sequence: Synthetic oligonucleotide
ucucuggcguccgaacaua

SEQ ID NO: 2294651 - RNA, 19 nt, Artificial Sequence
  Description of Artificial Sequence: Synthetic oligonucleotide
ucucuggccuagucuucaa

SEQ ID NO: 2294652 - RNA, 19 nt, Artificial Sequence
  Description of Artificial Sequence: Synthetic oligonucleotide
auguuuagcgggacuggau

SEQ ID NO: 2294653 - RNA, 19 nt, Artificial Sequence
  Description of Artificial Sequence: Synthetic oligonucleotide
cuuccccaucguuaucaca

SEQ ID NO: 2294654 - RNA, 19 nt, Artificial Sequence
  Description of Artificial Sequence: Synthetic oligonucleotide
cccuucuggaucucauaag

SEQ ID NO: 2294655 - RNA, 19 nt, Artificial Sequence
  Description of Artificial Sequence: Synthetic oligonucleotide
caaucucuucauccaucca

SEQ ID NO: 2294656 - RNA, 19 nt, Artificial Sequence
  Description of Artificial Sequence: Synthetic oligonucleotide
cuggaucucauaagaaauu

SEQ ID NO: 2294657 - RNA, 19 nt, Artificial Sequence
  Description of Artificial Sequence: Synthetic oligonucleotide
ucuccuguuccaggugcaa

SEQ ID NO: 2294658 - RNA, 19 nt, Artificial Sequence
  Description of Artificial Sequence: Synthetic oligonucleotide
cacuugaccacgucuacuu

SEQ ID NO: 2294659 - RNA, 19 nt, Artificial Sequence
  Description of Artificial Sequence: Synthetic oligonucleotide
auguucacgugaaccugga

SEQ ID NO: 2294660 - RNA, 19 nt, Artificial Sequence
  Description of Artificial Sequence: Synthetic oligonucleotide
guccgaacauaacucugcu

SEQ ID NO: 2294661 - RNA, 19 nt, Artificial Sequence
  Description of Artificial Sequence: Synthetic oligonucleotide
cacgucuacuucuccaccu

SEQ ID NO: 2294662 - RNA, 19 nt, Artificial Sequence
  Description of Artificial Sequence: Synthetic oligonucleotide
aaacgugaucacagcgcuu

SEQ ID NO: 2294663 - RNA, 19 nt, Artificial Sequence
  Description of Artificial Sequence: Synthetic oligonucleotide
gccuagucuucaaaauaug

SEQ ID NO: 2294664 - RNA, 19 nt, Artificial Sequence
  Description of Artificial Sequence: Synthetic oligonucleotide
uccccaucguuaucacauu

SEQ ID NO: 2294665 - RNA, 19 nt, Artificial Sequence
  Description of Artificial Sequence: Synthetic oligonucleotide
gaggauagucuuucuucuu

SEQ ID NO: 2294666 - RNA, 19 nt, Artificial Sequence
  Description of Artificial Sequence: Synthetic oligonucleotide
cuccuauguuuagcgggac

SEQ ID NO: 2294667 - RNA, 19 nt, Artificial Sequence
  Description of Artificial Sequence: Synthetic oligonucleotide
ccacgucuacuucuccacc

SEQ ID NO: 2294668 - RNA, 19 nt, Artificial Sequence
  Description of Artificial Sequence: Synthetic oligonucleotide
ugaccuucacaggggcuuu

SEQ ID NO: 2294669 - RNA, 19 nt, Artificial Sequence
  Description of Artificial Sequence: Synthetic oligonucleotide
gcuauguaaggcugaucua

SEQ ID NO: 2294670 - RNA, 19 nt, Artificial Sequence
  Description of Artificial Sequence: Synthetic oligonucleotide
gucuucuaacccagucaga

SEQ ID NO: 2294671 - RNA, 19 nt, Artificial Sequence
  Description of Artificial Sequence: Synthetic oligonucleotide
ggccuagucuucaaaauau

SEQ ID NO: 2294672 - RNA, 19 nt, Artificial Sequence
  Description of Artificial Sequence: Synthetic oligonucleotide
uucccgucacguugaucuu

SEQ ID NO: 2294673 - RNA, 19 nt, Artificial Sequence
  Description of Artificial Sequence: Synthetic oligonucleotide
cuccacugagaugaauuua

SEQ ID NO: 2294674 - RNA, 19 nt, Artificial Sequence
  Description of Artificial Sequence: Synthetic oligonucleotide
gcuccgaacucuccacuga

SEQ ID NO: 2294675 - RNA, 19 nt, Artificial Sequence
  Description of Artificial Sequence: Synthetic oligonucleotide
cagucagaagcaccguccu

SEQ ID NO: 2294676 - RNA, 19 nt, Artificial Sequence
  Description of Artificial Sequence: Synthetic oligonucleotide
ggcguccgaacauaacucu

SEQ ID NO: 2294677 - RNA, 19 nt, Artificial Sequence
  Description of Artificial Sequence: Synthetic oligonucleotide
cucuggcguccgaacauaa

SEQ ID NO: 2294678 - RNA, 19 nt, Artificial Sequence
  Description of Artificial Sequence: Synthetic oligonucleotide
cgugaaccuggaauuugac

SEQ ID NO: 2294679 - RNA, 19 nt, Artificial Sequence
  Description of Artificial Sequence: Synthetic oligonucleotide
gcguccgaacauaacucug

SEQ ID NO: 2294680 - RNA, 19 nt, Artificial Sequence
  Description of Artificial Sequence: Synthetic oligonucleotide
cucuuagauauggcugaaa

SEQ ID NO: 2294681 - RNA, 19 nt, Artificial Sequence
  Description of Artificial Sequence: Synthetic oligonucleotide
cgaacucuccacugagaug

SEQ ID NO: 2294682 - RNA, 19 nt, Artificial Sequence
  Description of Artificial Sequence: Synthetic oligonucleotide
augguuucucuggccuagu

SEQ ID NO: 2294683 - RNA, 19 nt, Artificial Sequence
  Description of Artificial Sequence: Synthetic oligonucleotide
gagaaccggucaucaugcu

SEQ ID NO: 2294684 - RNA, 19 nt, Artificial Sequence
  Description of Artificial Sequence: Synthetic oligonucleotide
ccguccucuuagauauggc

SEQ ID NO: 2294685 - RNA, 19 nt, Artificial Sequence
  Description of Artificial Sequence: Synthetic oligonucleotide
cgaacauaacucugcuuca

SEQ ID NO: 2294686 - RNA, 19 nt, Artificial Sequence
  Description of Artificial Sequence: Synthetic oligonucleotide
auuugagcucaaagcuaua

SEQ ID NO: 2294687 - RNA, 19 nt, Artificial Sequence
  Description of Artificial Sequence: Synthetic oligonucleotide
ccccaucguuaucacauuc

SEQ ID NO: 2294688 - RNA, 19 nt, Artificial Sequence
  Description of Artificial Sequence: Synthetic oligonucleotide
gugaccuucacaggggcuu

SEQ ID NO: 2294689 - RNA, 19 nt, Artificial Sequence
  Description of Artificial Sequence: Synthetic oligonucleotide
ccaagcgucucucuauaaa

SEQ ID NO: 2294690 - RNA, 19 nt, Artificial Sequence
  Description of Artificial Sequence: Synthetic oligonucleotide
gcgucucucuauaaacgga

SEQ ID NO: 2294691 - RNA, 19 nt, Artificial Sequence
  Description of Artificial Sequence: Synthetic oligonucleotide
gaccuucacaggggcuuuc

SEQ ID NO: 2294692 - RNA, 19 nt, Artificial Sequence
  Description of Artificial Sequence: Synthetic oligonucleotide
caggggcuuucuccaucug

SEQ ID NO: 2294693 - RNA, 19 nt, Artificial Sequence
  Description of Artificial Sequence: Synthetic oligonucleotide
caccguccucuuagauaug

SEQ ID NO: 2294694 - RNA, 19 nt, Artificial Sequence
  Description of Artificial Sequence: Synthetic oligonucleotide
ccggucaucaugcuccgaa

SEQ ID NO: 2294695 - RNA, 19 nt, Artificial Sequence
  Description of Artificial Sequence: Synthetic oligonucleotide
ggaguaacuguaacucuau

SEQ ID NO: 2294696 - RNA, 19 nt, Artificial Sequence
  Description of Artificial Sequence: Synthetic oligonucleotide
cccgucacguugaucuuca

SEQ ID NO: 2294697 - RNA, 19 nt, Artificial Sequence
  Description of Artificial Sequence: Synthetic oligonucleotide
cccaucguuaucacauucu

SEQ ID NO: 2294698 - RNA, 19 nt, Artificial Sequence
  Description of Artificial Sequence: Synthetic oligonucleotide
cuugucccuucuggaucuc

SEQ ID NO: 2294699 - RNA, 19 nt, Artificial Sequence
  Description of Artificial Sequence: Synthetic oligonucleotide
gaauucccgucacguugau

SEQ ID NO: 2294700 - RNA, 19 nt, Artificial Sequence
  Description of Artificial Sequence: Synthetic oligonucleotide
cggucaucaugcuccgaac

SEQ ID NO: 2294701 - RNA, 19 nt, Artificial Sequence
  Description of Artificial Sequence: Synthetic oligonucleotide
cguccucuuagauauggcu

SEQ ID NO: 2294702 - RNA, 19 nt, Artificial Sequence
  Description of Artificial Sequence: Synthetic oligonucleotide
ggugcaaguuuucccucau

SEQ ID NO: 2294703 - RNA, 19 nt, Artificial Sequence
  Description of Artificial Sequence: Synthetic oligonucleotide
caggaauucccgucacguu

SEQ ID NO: 2294704 - RNA, 19 nt, Artificial Sequence
  Description of Artificial Sequence: Synthetic oligonucleotide
ccgaacucuccacugagau

SEQ ID NO: 2294705 - RNA, 19 nt, Artificial Sequence
  Description of Artificial Sequence: Synthetic oligonucleotide
ccuccauuauucuuccuuu

SEQ ID NO: 2294706 - RNA, 19 nt, Artificial Sequence
  Description of Artificial Sequence: Synthetic oligonucleotide
cccucauaauuucaugaau

SEQ ID NO: 2294707 - RNA, 19 nt, Artificial Sequence
  Description of Artificial Sequence: Synthetic oligonucleotide
accggucaucaugcuccga

SEQ ID NO: 2294708 - RNA, 19 nt, Artificial Sequence
  Description of Artificial Sequence: Synthetic oligonucleotide
cuucuccaccuccauuauu

SEQ ID NO: 2294709 - RNA, 19 nt, Artificial Sequence
  Description of Artificial Sequence: Synthetic oligonucleotide
ccaccuccauucuuggacu

SEQ ID NO: 2294710 - RNA, 19 nt, Artificial Sequence
  Description of Artificial Sequence: Synthetic oligonucleotide
caacuccagcuuccacaaa

SEQ ID NO: 2294711 - RNA, 19 nt, Artificial Sequence
  Description of Artificial Sequence: Synthetic oligonucleotide
accuggaauuugacuccua

SEQ ID NO: 2294712 - RNA, 19 nt, Artificial Sequence
  Description of Artificial Sequence: Synthetic oligonucleotide
caccuccauucuuggacuu

SEQ ID NO: 2294713 - RNA, 19 nt, Artificial Sequence
  Description of Artificial Sequence: Synthetic oligonucleotide
caccuccauuauucuuccu

SEQ ID NO: 2294714 - RNA, 19 nt, Artificial Sequence
  Description of Artificial Sequence: Synthetic oligonucleotide
ccucuuagauauggcugaa

SEQ ID NO: 2294715 - RNA, 19 nt, Artificial Sequence
  Description of Artificial Sequence: Synthetic oligonucleotide
gcgggacuggaugugcagu

SEQ ID NO: 2294716 - RNA, 19 nt, Artificial Sequence
  Description of Artificial Sequence: Synthetic oligonucleotide
cgugaucacagcgcuuccu

SEQ ID NO: 2294717 - RNA, 19 nt, Artificial Sequence
  Description of Artificial Sequence: Synthetic oligonucleotide
cgacaugcuuccccaucgu

SEQ ID NO: 2294718 - RNA, 19 nt, Artificial Sequence
  Description of Artificial Sequence: Synthetic oligonucleotide
ccgucacguugaucuucau

SEQ ID NO: 2294719 - RNA, 19 nt, Artificial Sequence
  Description of Artificial Sequence: Synthetic oligonucleotide
uacaugugcaccuugaacg

SEQ ID NO: 2294720 - RNA, 19 nt, Artificial Sequence
  Description of Artificial Sequence: Synthetic oligonucleotide
gaagguaugguucugagca

SEQ ID NO: 2294721 - RNA, 19 nt, Artificial Sequence
  Description of Artificial Sequence: Synthetic oligonucleotide
ugaaucauggaagaugugg

SEQ ID NO: 2294722 - RNA, 19 nt, Artificial Sequence
  Description of Artificial Sequence: Synthetic oligonucleotide
aguaaaggagucuugacug

SEQ ID NO: 2294723 - RNA, 19 nt, Artificial Sequence
  Description of Artificial Sequence: Synthetic oligonucleotide
aagacaucacuguugguuc

SEQ ID NO: 2294724 - RNA, 19 nt, Artificial Sequence
  Description of Artificial Sequence: Synthetic oligonucleotide
auucacguguccuucauac

SEQ ID NO: 2294725 - RNA, 19 nt, Artificial Sequence
  Description of Artificial Sequence: Synthetic oligonucleotide
ugauuacugacgaacagug

SEQ ID NO: 2294726 - RNA, 19 nt, Artificial Sequence
  Description of Artificial Sequence: Synthetic oligonucleotide
aucacuguugguuccauac

SEQ ID NO: 2294727 - RNA, 19 nt, Artificial Sequence
  Description of Artificial Sequence: Synthetic oligonucleotide
aagugauugagggaugccc

SEQ ID NO: 2294728 - RNA, 19 nt, Artificial Sequence
  Description of Artificial Sequence: Synthetic oligonucleotide
agaacgacagccauuaaac

SEQ ID NO: 2294729 - RNA, 19 nt, Artificial Sequence
  Description of Artificial Sequence: Synthetic oligonucleotide
uguacugaagcaguuauug

SEQ ID NO: 2294730 - RNA, 19 nt, Artificial Sequence
  Description of Artificial Sequence: Synthetic oligonucleotide
aacgugggagccuucaguc

SEQ ID NO: 2294731 - RNA, 19 nt, Artificial Sequence
  Description of Artificial Sequence: Synthetic oligonucleotide
ugacgaacagugaugcugg

SEQ ID NO: 2294732 - RNA, 19 nt, Artificial Sequence
  Description of Artificial Sequence: Synthetic oligonucleotide
aaugagcuguaggagaaac

SEQ ID NO: 2294733 - RNA, 19 nt, Artificial Sequence
  Description of Artificial Sequence: Synthetic oligonucleotide
uucgagacaaaccuguacu

SEQ ID NO: 2294734 - RNA, 19 nt, Artificial Sequence
  Description of Artificial Sequence: Synthetic oligonucleotide
cuuaaggacccguacagag

SEQ ID NO: 2294735 - RNA, 19 nt, Artificial Sequence
  Description of Artificial Sequence: Synthetic oligonucleotide
uuaaggacccguacagagg

SEQ ID NO: 2294736 - RNA, 19 nt, Artificial Sequence
  Description of Artificial Sequence: Synthetic oligonucleotide
uacugccucacacauuugg

SEQ ID NO: 2294737 - RNA, 19 nt, Artificial Sequence
  Description of Artificial Sequence: Synthetic oligonucleotide
uccuuaaggacccguacag

SEQ ID NO: 2294738 - RNA, 19 nt, Artificial Sequence
  Description of Artificial Sequence: Synthetic oligonucleotide
uguugguuccauacgacug

SEQ ID NO: 2294739 - RNA, 19 nt, Artificial Sequence
  Description of Artificial Sequence: Synthetic oligonucleotide
ugcuuggugauuacugacg

SEQ ID NO: 2294740 - RNA, 19 nt, Artificial Sequence
  Description of Artificial Sequence: Synthetic oligonucleotide
gaguucaccuuccuguugg

SEQ ID NO: 2294741 - RNA, 19 nt, Artificial Sequence
  Description of Artificial Sequence: Synthetic oligonucleotide
uccucaugcacaugcaggg

SEQ ID NO: 2294742 - RNA, 19 nt, Artificial Sequence
  Description of Artificial Sequence: Synthetic oligonucleotide
agccauuaaacaguaaagg

SEQ ID NO: 2294743 - RNA, 19 nt, Artificial Sequence
  Description of Artificial Sequence: Synthetic oligonucleotide
gacaaaccuguacugaagc

SEQ ID NO: 2294744 - RNA, 19 nt, Artificial Sequence
  Description of Artificial Sequence: Synthetic oligonucleotide
gaaacaguaaagguccugc

SEQ ID NO: 2294745 - RNA, 19 nt, Artificial Sequence
  Description of Artificial Sequence: Synthetic oligonucleotide
ucauggaggcuccagauuc

SEQ ID NO: 2294746 - RNA, 19 nt, Artificial Sequence
  Description of Artificial Sequence: Synthetic oligonucleotide
cuugacuuggagaacgcag

SEQ ID NO: 2294747 - RNA, 19 nt, Artificial Sequence
  Description of Artificial Sequence: Synthetic oligonucleotide
uaaggacccguacagaggu

SEQ ID NO: 2294748 - RNA, 19 nt, Artificial Sequence
  Description of Artificial Sequence: Synthetic oligonucleotide
ugcaccuugaacgugggag

SEQ ID NO: 2294749 - RNA, 19 nt, Artificial Sequence
  Description of Artificial Sequence: Synthetic oligonucleotide
aauugcugagccaagacau

SEQ ID NO: 2294750 - RNA, 19 nt, Artificial Sequence
  Description of Artificial Sequence: Synthetic oligonucleotide
gaaguacagguucucauac

SEQ ID NO: 2294751 - RNA, 19 nt, Artificial Sequence
  Description of Artificial Sequence: Synthetic oligonucleotide
ugggguauggagaagguau

SEQ ID NO: 2294752 - RNA, 19 nt, Artificial Sequence
  Description of Artificial Sequence: Synthetic oligonucleotide
aaucauggaagaugugggu

SEQ ID NO: 2294753 - RNA, 19 nt, Artificial Sequence
  Description of Artificial Sequence: Synthetic oligonucleotide
acaguaaaggagucuugac

SEQ ID NO: 2294754 - RNA, 19 nt, Artificial Sequence
  Description of Artificial Sequence: Synthetic oligonucleotide
ccauuaaacaguaaaggag

SEQ ID NO: 2294755 - RNA, 19 nt, Artificial Sequence
  Description of Artificial Sequence: Synthetic oligonucleotide
ggagaaacaguaaaggucc

SEQ ID NO: 2294756 - RNA, 19 nt, Artificial Sequence
  Description of Artificial Sequence: Synthetic oligonucleotide
uaggagaaacaguaaaggu

SEQ ID NO: 2294757 - RNA, 19 nt, Artificial Sequence
  Description of Artificial Sequence: Synthetic oligonucleotide
uuacugacgaacagugaug

SEQ ID NO: 2294758 - RNA, 19 nt, Artificial Sequence
  Description of Artificial Sequence: Synthetic oligonucleotide
gucaacaggacccuucgag

SEQ ID NO: 2294759 - RNA, 19 nt, Artificial Sequence
  Description of Artificial Sequence: Synthetic oligonucleotide
aagaucuccccagaacgac

SEQ ID NO: 2294760 - RNA, 19 nt, Artificial Sequence
  Description of Artificial Sequence: Synthetic oligonucleotide
ucacuguugguuccauacg

SEQ ID NO: 2294761 - RNA, 19 nt, Artificial Sequence
  Description of Artificial Sequence: Synthetic oligonucleotide
cagguucucauacaugugc

SEQ ID NO: 2294762 - RNA, 19 nt, Artificial Sequence
  Description of Artificial Sequence: Synthetic oligonucleotide
uuggugauuacugacgaac

SEQ ID NO: 2294763 - RNA, 19 nt, Artificial Sequence
  Description of Artificial Sequence: Synthetic oligonucleotide
cacacugggaauguuagcc

SEQ ID NO: 2294764 - RNA, 19 nt, Artificial Sequence
  Description of Artificial Sequence: Synthetic oligonucleotide
acguuggucaacaggaccc

SEQ ID NO: 2294765 - RNA, 19 nt, Artificial Sequence
  Description of Artificial Sequence: Synthetic oligonucleotide
uggucaacaggacccuucg

SEQ ID NO: 2294766 - RNA, 19 nt, Artificial Sequence
  Description of Artificial Sequence: Synthetic oligonucleotide
ugcugaaucauggaagaug

SEQ ID NO: 2294767 - RNA, 19 nt, Artificial Sequence
  Description of Artificial Sequence: Synthetic oligonucleotide
uucauacugccucacacau

SEQ ID NO: 2294768 - RNA, 19 nt, Artificial Sequence
  Description of Artificial Sequence: Synthetic oligonucleotide
ugagccaagacaucacugu

SEQ ID NO: 2294769 - RNA, 19 nt, Artificial Sequence
  Description of Artificial Sequence: Synthetic oligonucleotide
cagccauuaaacaguaaag

SEQ ID NO: 2294770 - RNA, 19 nt, Artificial Sequence
  Description of Artificial Sequence: Synthetic oligonucleotide
aguacagguucucauacau

SEQ ID NO: 2294771 - RNA, 19 nt, Artificial Sequence
  Description of Artificial Sequence: Synthetic oligonucleotide
agacaucacuguugguucc

SEQ ID NO: 2294772 - RNA, 19 nt, Artificial Sequence
  Description of Artificial Sequence: Synthetic oligonucleotide
cauuaaacaguaaaggagu

SEQ ID NO: 2294773 - RNA, 19 nt, Artificial Sequence
  Description of Artificial Sequence: Synthetic oligonucleotide
gagaacgcaggucaauggc

SEQ ID NO: 2294774 - RNA, 19 nt, Artificial Sequence
  Description of Artificial Sequence: Synthetic oligonucleotide
uuccuguuggugaaguaca

SEQ ID NO: 2294775 - RNA, 19 nt, Artificial Sequence
  Description of Artificial Sequence: Synthetic oligonucleotide
gauccgggaaacugcagag

SEQ ID NO: 2294776 - RNA, 19 nt, Artificial Sequence
  Description of Artificial Sequence: Synthetic oligonucleotide
auuaaacaguaaaggaguc

SEQ ID NO: 2294777 - RNA, 19 nt, Artificial Sequence
  Description of Artificial Sequence: Synthetic oligonucleotide
uacugacgaacagugaugc

SEQ ID NO: 2294778 - RNA, 19 nt, Artificial Sequence
  Description of Artificial Sequence: Synthetic oligonucleotide
ucaacaggacccuucgaga

SEQ ID NO: 2294779 - RNA, 19 nt, Artificial Sequence
  Description of Artificial Sequence: Synthetic oligonucleotide
cuccagauugccuggacag

SEQ ID NO: 2294780 - RNA, 19 nt, Artificial Sequence
  Description of Artificial Sequence: Synthetic oligonucleotide
guaggcauacucauucacg

SEQ ID NO: 2294781 - RNA, 19 nt, Artificial Sequence
  Description of Artificial Sequence: Synthetic oligonucleotide
uggcuugacuuggagaacg

SEQ ID NO: 2294782 - RNA, 19 nt, Artificial Sequence
  Description of Artificial Sequence: Synthetic oligonucleotide
caaaccuguacugaagcag

SEQ ID NO: 2294783 - RNA, 19 nt, Artificial Sequence
  Description of Artificial Sequence: Synthetic oligonucleotide
agauugccuggacagaaug

SEQ ID NO: 2294784 - RNA, 19 nt, Artificial Sequence
  Description of Artificial Sequence: Synthetic oligonucleotide
gugggaauccaagugauug

SEQ ID NO: 2294785 - RNA, 19 nt, Artificial Sequence
  Description of Artificial Sequence: Synthetic oligonucleotide
auugccuggacagaaugag

SEQ ID NO: 2294786 - RNA, 19 nt, Artificial Sequence
  Description of Artificial Sequence: Synthetic oligonucleotide
gagaagguaugguucugag

SEQ ID NO: 2294787 - RNA, 19 nt, Artificial Sequence
  Description of Artificial Sequence: Synthetic oligonucleotide
aagguaugguucugagcag

SEQ ID NO: 2294788 - RNA, 19 nt, Artificial Sequence
  Description of Artificial Sequence: Synthetic oligonucleotide
aggcccaugaggcauagca

SEQ ID NO: 2294789 - RNA, 19 nt, Artificial Sequence
  Description of Artificial Sequence: Synthetic oligonucleotide
gguguagcagucuuggccc

SEQ ID NO: 2294790 - RNA, 19 nt, Artificial Sequence
  Description of Artificial Sequence: Synthetic oligonucleotide
caggugugcgucauggagg

SEQ ID NO: 2294791 - RNA, 19 nt, Artificial Sequence
  Description of Artificial Sequence: Synthetic oligonucleotide
ucgagacaaaccuguacug

SEQ ID NO: 2294792 - RNA, 19 nt, Artificial Sequence
  Description of Artificial Sequence: Synthetic oligonucleotide
aauguuagccuuggaggug

SEQ ID NO: 2294793 - RNA, 19 nt, Artificial Sequence
  Description of Artificial Sequence: Synthetic oligonucleotide
caugucugaugccaucacg

SEQ ID NO: 2294794 - RNA, 19 nt, Artificial Sequence
  Description of Artificial Sequence: Synthetic oligonucleotide
uccgggaaacugcagagaa

SEQ ID NO: 2294795 - RNA, 19 nt, Artificial Sequence
  Description of Artificial Sequence: Synthetic oligonucleotide
gagaaggccacacugggaa

SEQ ID NO: 2294796 - RNA, 19 nt, Artificial Sequence
  Description of Artificial Sequence: Synthetic oligonucleotide
aaaccuguacugaagcagu

SEQ ID NO: 2294797 - RNA, 19 nt, Artificial Sequence
  Description of Artificial Sequence: Synthetic oligonucleotide
agggaugcccagcacacag

SEQ ID NO: 2294798 - RNA, 19 nt, Artificial Sequence
  Description of Artificial Sequence: Synthetic oligonucleotide
gguuccauacgacugccgg

SEQ ID NO: 2294799 - RNA, 19 nt, Artificial Sequence
  Description of Artificial Sequence: Synthetic oligonucleotide
cugacgaacagugaugcug

SEQ ID NO: 2294800 - RNA, 19 nt, Artificial Sequence
  Description of Artificial Sequence: Synthetic oligonucleotide
cucaugcacaugcaggggc

SEQ ID NO: 2294801 - RNA, 19 nt, Artificial Sequence
  Description of Artificial Sequence: Synthetic oligonucleotide
acugccgguguccugucac

SEQ ID NO: 2294802 - RNA, 19 nt, Artificial Sequence
  Description of Artificial Sequence: Synthetic oligonucleotide
cagguaggcauacucauuc

SEQ ID NO: 2294803 - RNA, 19 nt, Artificial Sequence
  Description of Artificial Sequence: Synthetic oligonucleotide
gcaguuauuggccugggug

SEQ ID NO: 2294804 - RNA, 19 nt, Artificial Sequence
  Description of Artificial Sequence: Synthetic oligonucleotide
guaaaggagucuugacugc

SEQ ID NO: 2294805 - RNA, 19 nt, Artificial Sequence
  Description of Artificial Sequence: Synthetic oligonucleotide
ugcaaauugcugagccaag

SEQ ID NO: 2294806 - RNA, 19 nt, Artificial Sequence
  Description of Artificial Sequence: Synthetic oligonucleotide
ucacguauugcucuuccuu

SEQ ID NO: 2294807 - RNA, 19 nt, Artificial Sequence
  Description of Artificial Sequence: Synthetic oligonucleotide
gaauguuagccuuggaggu

SEQ ID NO: 2294808 - RNA, 19 nt, Artificial Sequence
  Description of Artificial Sequence: Synthetic oligonucleotide
auguuagccuuggaggugg

SEQ ID NO: 2294809 - RNA, 19 nt, Artificial Sequence
  Description of Artificial Sequence: Synthetic oligonucleotide
aacaggacccuucgagaca

SEQ ID NO: 2294810 - RNA, 19 nt, Artificial Sequence
  Description of Artificial Sequence: Synthetic oligonucleotide
ugaagcaguuauuggccug

SEQ ID NO: 2294811 - RNA, 19 nt, Artificial Sequence
  Description of Artificial Sequence: Synthetic oligonucleotide
uuccauacgacugccggug

SEQ ID NO: 2294812 - RNA, 19 nt, Artificial Sequence
  Description of Artificial Sequence: Synthetic oligonucleotide
ucuccccagaacgacagcc

SEQ ID NO: 2294813 - RNA, 19 nt, Artificial Sequence
  Description of Artificial Sequence: Synthetic oligonucleotide
auccaagugauugagggau

SEQ ID NO: 2294814 - RNA, 19 nt, Artificial Sequence
  Description of Artificial Sequence: Synthetic oligonucleotide
acuaggauuccuuccuccu

SEQ ID NO: 2294815 - RNA, 19 nt, Artificial Sequence
  Description of Artificial Sequence: Synthetic oligonucleotide
caacaggacccuucgagac

SEQ ID NO: 2294816 - RNA, 19 nt, Artificial Sequence
  Description of Artificial Sequence: Synthetic oligonucleotide
aaagaucuccccagaacga

SEQ ID NO: 2294817 - RNA, 19 nt, Artificial Sequence
  Description of Artificial Sequence: Synthetic oligonucleotide
guaaagguccugcuggaca

SEQ ID NO: 2294818 - RNA, 19 nt, Artificial Sequence
  Description of Artificial Sequence: Synthetic oligonucleotide
gauugagggaugcccagca

SEQ ID NO: 2294819 - RNA, 19 nt, Artificial Sequence
  Description of Artificial Sequence: Synthetic oligonucleotide
gaggcauagcaggaugugg

SEQ ID NO: 2294820 - RNA, 19 nt, Artificial Sequence
  Description of Artificial Sequence: Synthetic oligonucleotide
acaaaccuguacugaagca

SEQ ID NO: 2294821 - RNA, 19 nt, Artificial Sequence
  Description of Artificial Sequence: Synthetic oligonucleotide
gagacaaaccuguacugaa

SEQ ID NO: 2294822 - RNA, 19 nt, Artificial Sequence
  Description of Artificial Sequence: Synthetic oligonucleotide
auuugguggcccucagguc

SEQ ID NO: 2294823 - RNA, 19 nt, Artificial Sequence
  Description of Artificial Sequence: Synthetic oligonucleotide
agcagucuuggcccacugc

SEQ ID NO: 2294824 - RNA, 19 nt, Artificial Sequence
  Description of Artificial Sequence: Synthetic oligonucleotide
auugagggaugcccagcac

SEQ ID NO: 2294825 - RNA, 19 nt, Artificial Sequence
  Description of Artificial Sequence: Synthetic oligonucleotide
cuuccuguuggugaaguac

SEQ ID NO: 2294826 - RNA, 19 nt, Artificial Sequence
  Description of Artificial Sequence: Synthetic oligonucleotide
gacccuucgagacaaaccu

SEQ ID NO: 2294827 - RNA, 19 nt, Artificial Sequence
  Description of Artificial Sequence: Synthetic oligonucleotide
cuucgagacaaaccuguac

SEQ ID NO: 2294828 - RNA, 19 nt, Artificial Sequence
  Description of Artificial Sequence: Synthetic oligonucleotide
acaugugcaccuugaacgu

SEQ ID NO: 2294829 - RNA, 19 nt, Artificial Sequence
  Description of Artificial Sequence: Synthetic oligonucleotide
cacguuggucaacaggacc

SEQ ID NO: 2294830 - RNA, 19 nt, Artificial Sequence
  Description of Artificial Sequence: Synthetic oligonucleotide
cuucagucccugcagguug

SEQ ID NO: 2294831 - RNA, 19 nt, Artificial Sequence
  Description of Artificial Sequence: Synthetic oligonucleotide
gagcaggugugcgucaugg

SEQ ID NO: 2294832 - RNA, 19 nt, Artificial Sequence
  Description of Artificial Sequence: Synthetic oligonucleotide
acgugggagccuucagucc

SEQ ID NO: 2294833 - RNA, 19 nt, Artificial Sequence
  Description of Artificial Sequence: Synthetic oligonucleotide
ugugcaccuugaacguggg

SEQ ID NO: 2294834 - RNA, 19 nt, Artificial Sequence
  Description of Artificial Sequence: Synthetic oligonucleotide
aaagguccugcuggacagc

SEQ ID NO: 2294835 - RNA, 19 nt, Artificial Sequence
  Description of Artificial Sequence: Synthetic oligonucleotide
ugacuuggagaacgcaggu

SEQ ID NO: 2294836 - RNA, 19 nt, Artificial Sequence
  Description of Artificial Sequence: Synthetic oligonucleotide
gaucuccccagaacgacag

SEQ ID NO: 2294837 - RNA, 19 nt, Artificial Sequence
  Description of Artificial Sequence: Synthetic oligonucleotide
gccauuaaacaguaaagga

SEQ ID NO: 2294838 - RNA, 19 nt, Artificial Sequence
  Description of Artificial Sequence: Synthetic oligonucleotide
agguaugguucugagcagg

SEQ ID NO: 2294839 - RNA, 19 nt, Artificial Sequence
  Description of Artificial Sequence: Synthetic oligonucleotide
gauguggguggccuuccag

SEQ ID NO: 2294840 - RNA, 19 nt, Artificial Sequence
  Description of Artificial Sequence: Synthetic oligonucleotide
aaggagucuugacugcaaa

SEQ ID NO: 2294841 - RNA, 19 nt, Artificial Sequence
  Description of Artificial Sequence: Synthetic oligonucleotide
cacguguccuucauacugc

SEQ ID NO: 2294842 - RNA, 19 nt, Artificial Sequence
  Description of Artificial Sequence: Synthetic oligonucleotide
ugaacgugggagccuucag

SEQ ID NO: 2294843 - RNA, 19 nt, Artificial Sequence
  Description of Artificial Sequence: Synthetic oligonucleotide
auagcaggaugugggaauc

SEQ ID NO: 2294844 - RNA, 19 nt, Artificial Sequence
  Description of Artificial Sequence: Synthetic oligonucleotide
uggagaacgcaggucaaug

SEQ ID NO: 2294845 - RNA, 19 nt, Artificial Sequence
  Description of Artificial Sequence: Synthetic oligonucleotide
aaacugcagagaacgccgg

SEQ ID NO: 2294846 - RNA, 19 nt, Artificial Sequence
  Description of Artificial Sequence: Synthetic oligonucleotide
uguaccugcuuggugauua

SEQ ID NO: 2294847 - RNA, 19 nt, Artificial Sequence
  Description of Artificial Sequence: Synthetic oligonucleotide
caucacguauugcucuucc

SEQ ID NO: 2294848 - RNA, 19 nt, Artificial Sequence
  Description of Artificial Sequence: Synthetic oligonucleotide
ggaugugggaauccaagug

SEQ ID NO: 2294849 - RNA, 19 nt, Artificial Sequence
  Description of Artificial Sequence: Synthetic oligonucleotide
aguaaagguccugcuggac

SEQ ID NO: 2294850 - RNA, 19 nt, Artificial Sequence
  Description of Artificial Sequence: Synthetic oligonucleotide
ggagaacgcaggucaaugg

SEQ ID NO: 2294851 - RNA, 19 nt, Artificial Sequence
  Description of Artificial Sequence: Synthetic oligonucleotide
cuggucuguaccugcuugg

SEQ ID NO: 2294852 - RNA, 19 nt, Artificial Sequence
  Description of Artificial Sequence: Synthetic oligonucleotide
acuguugguuccauacgac

SEQ ID NO: 2294853 - RNA, 19 nt, Artificial Sequence
  Description of Artificial Sequence: Synthetic oligonucleotide
cagggauccgggaaacugc

SEQ ID NO: 2294854 - RNA, 19 nt, Artificial Sequence
  Description of Artificial Sequence: Synthetic oligonucleotide
uggaggcuccagauucugg

SEQ ID NO: 2294855 - RNA, 19 nt, Artificial Sequence
  Description of Artificial Sequence: Synthetic oligonucleotide
uuggucaacaggacccuuc

SEQ ID NO: 2294856 - RNA, 19 nt, Artificial Sequence
  Description of Artificial Sequence: Synthetic oligonucleotide
augugcaccuugaacgugg

SEQ ID NO: 2294857 - RNA, 19 nt, Artificial Sequence
  Description of Artificial Sequence: Synthetic oligonucleotide
acugcaaauugcugagcca

SEQ ID NO: 2294858 - RNA, 19 nt, Artificial Sequence
  Description of Artificial Sequence: Synthetic oligonucleotide
ucuuccuuaaggacccgua

SEQ ID NO: 2294859 - RNA, 19 nt, Artificial Sequence
  Description of Artificial Sequence: Synthetic oligonucleotide
ugaucuuuccagccauguc

SEQ ID NO: 2294860 - RNA, 19 nt, Artificial Sequence
  Description of Artificial Sequence: Synthetic oligonucleotide
uugaucuuuccagccaugu

SEQ ID NO: 2294861 - RNA, 19 nt, Artificial Sequence
  Description of Artificial Sequence: Synthetic oligonucleotide
gaaggccacacugggaaug

SEQ ID NO: 2294862 - RNA, 19 nt, Artificial Sequence
  Description of Artificial Sequence: Synthetic oligonucleotide
cugccucacacauuuggug

SEQ ID NO: 2294863 - RNA, 19 nt, Artificial Sequence
  Description of Artificial Sequence: Synthetic oligonucleotide
uccaagugauugagggaug

SEQ ID NO: 2294864 - RNA, 19 nt, Artificial Sequence
  Description of Artificial Sequence: Synthetic oligonucleotide
cauacgacugccggugucc

SEQ ID NO: 2294865 - RNA, 19 nt, Artificial Sequence
  Description of Artificial Sequence: Synthetic oligonucleotide
uggccuuccagcccuuggc

SEQ ID NO: 2294866 - RNA, 19 nt, Artificial Sequence
  Description of Artificial Sequence: Synthetic oligonucleotide
augucugaugccaucacgu

SEQ ID NO: 2294867 - RNA, 19 nt, Artificial Sequence
  Description of Artificial Sequence: Synthetic oligonucleotide
cuucauacugccucacaca

SEQ ID NO: 2294868 - RNA, 19 nt, Artificial Sequence
  Description of Artificial Sequence: Synthetic oligonucleotide
ugguuccauacgacugccg

SEQ ID NO: 2294869 - RNA, 19 nt, Artificial Sequence
  Description of Artificial Sequence: Synthetic oligonucleotide
cugcuuggugauuacugac

SEQ ID NO: 2294870 - RNA, 19 nt, Artificial Sequence
  Description of Artificial Sequence: Synthetic oligonucleotide
agugauugagggaugccca

SEQ ID NO: 2294871 - RNA, 19 nt, Artificial Sequence
  Description of Artificial Sequence: Synthetic oligonucleotide
agaggucacugcugaauca

SEQ ID NO: 2294872 - RNA, 19 nt, Artificial Sequence
  Description of Artificial Sequence: Synthetic oligonucleotide
uggcccacugccacuagga

SEQ ID NO: 2294873 - RNA, 19 nt, Artificial Sequence
  Description of Artificial Sequence: Synthetic oligonucleotide
gugauugagggaugcccag

SEQ ID NO: 2294874 - RNA, 19 nt, Artificial Sequence
  Description of Artificial Sequence: Synthetic oligonucleotide
agaaacaguaaagguccug

SEQ ID NO: 2294875 - RNA, 19 nt, Artificial Sequence
  Description of Artificial Sequence: Synthetic oligonucleotide
auacucauucacguguccu

SEQ ID NO: 2294876 - RNA, 19 nt, Artificial Sequence
  Description of Artificial Sequence: Synthetic oligonucleotide
agacaaaccuguacugaag

SEQ ID NO: 2294877 - RNA, 19 nt, Artificial Sequence
  Description of Artificial Sequence: Synthetic oligonucleotide
cacaugcaggggcagguag

SEQ ID NO: 2294878 - RNA, 19 nt, Artificial Sequence
  Description of Artificial Sequence: Synthetic oligonucleotide
caauggcaaagaucucccc

SEQ ID NO: 2294879 - RNA, 19 nt, Artificial Sequence
  Description of Artificial Sequence: Synthetic oligonucleotide
cccacugccacuaggauuc

SEQ ID NO: 2294880 - RNA, 19 nt, Artificial Sequence
  Description of Artificial Sequence: Synthetic oligonucleotide
uacucauucacguguccuu

SEQ ID NO: 2294881 - RNA, 19 nt, Artificial Sequence
  Description of Artificial Sequence: Synthetic oligonucleotide
ugauugagggaugcccagc

SEQ ID NO: 2294882 - RNA, 19 nt, Artificial Sequence
  Description of Artificial Sequence: Synthetic oligonucleotide
ucauucacguguccuucau

SEQ ID NO: 2294883 - RNA, 19 nt, Artificial Sequence
  Description of Artificial Sequence: Synthetic oligonucleotide
gcaggugugcgucauggag

SEQ ID NO: 2294884 - RNA, 19 nt, Artificial Sequence
  Description of Artificial Sequence: Synthetic oligonucleotide
agauucugguguagcaguc

SEQ ID NO: 2294885 - RNA, 19 nt, Artificial Sequence
  Description of Artificial Sequence: Synthetic oligonucleotide
cacuguugguuccauacga

SEQ ID NO: 2294886 - RNA, 19 nt, Artificial Sequence
  Description of Artificial Sequence: Synthetic oligonucleotide
aggcauacucauucacgug

SEQ ID NO: 2294887 - RNA, 19 nt, Artificial Sequence
  Description of Artificial Sequence: Synthetic oligonucleotide
agccaugucugaugccauc

SEQ ID NO: 2294888 - RNA, 19 nt, Artificial Sequence
  Description of Artificial Sequence: Synthetic oligonucleotide
uucacguguccuucauacu

SEQ ID NO: 2294889 - RNA, 19 nt, Artificial Sequence
  Description of Artificial Sequence: Synthetic oligonucleotide
uugaacgugggagccuuca

SEQ ID NO: 2294890 - RNA, 19 nt, Artificial Sequence
  Description of Artificial Sequence: Synthetic oligonucleotide
gaagauguggguggccuuc

SEQ ID NO: 2294891 - RNA, 19 nt, Artificial Sequence
  Description of Artificial Sequence: Synthetic oligonucleotide
cauacugccucacacauuu

SEQ ID NO: 2294892 - RNA, 19 nt, Artificial Sequence
  Description of Artificial Sequence: Synthetic oligonucleotide
auugcugagccaagacauc

SEQ ID NO: 2294893 - RNA, 19 nt, Artificial Sequence
  Description of Artificial Sequence: Synthetic oligonucleotide
gguaggcauacucauucac

SEQ ID NO: 2294894 - RNA, 19 nt, Artificial Sequence
  Description of Artificial Sequence: Synthetic oligonucleotide
aagcaguuauuggccuggg

SEQ ID NO: 2294895 - RNA, 19 nt, Artificial Sequence
  Description of Artificial Sequence: Synthetic oligonucleotide
agaacgcaggucaauggca

SEQ ID NO: 2294896 - RNA, 19 nt, Artificial Sequence
  Description of Artificial Sequence: Synthetic oligonucleotide
cagaacgacagccauuaaa

SEQ ID NO: 2294897 - RNA, 19 nt, Artificial Sequence
  Description of Artificial Sequence: Synthetic oligonucleotide
ugucugaugccaucacgua

SEQ ID NO: 2294898 - RNA, 19 nt, Artificial Sequence
  Description of Artificial Sequence: Synthetic oligonucleotide
gauugccuggacagaauga

SEQ ID NO: 2294899 - RNA, 19 nt, Artificial Sequence
  Description of Artificial Sequence: Synthetic oligonucleotide
aucuccccagaacgacagc

SEQ ID NO: 2294900 - RNA, 19 nt, Artificial Sequence
  Description of Artificial Sequence: Synthetic oligonucleotide
acguauugcucuuccuuaa

SEQ ID NO: 2294901 - RNA, 19 nt, Artificial Sequence
  Description of Artificial Sequence: Synthetic oligonucleotide
agccaagacaucacuguug

SEQ ID NO: 2294902 - RNA, 19 nt, Artificial Sequence
  Description of Artificial Sequence: Synthetic oligonucleotide
caguaaaggagucuugacu

SEQ ID NO: 2294903 - RNA, 19 nt, Artificial Sequence
  Description of Artificial Sequence: Synthetic oligonucleotide
ucuguaccugcuuggugau

SEQ ID NO: 2294904 - RNA, 19 nt, Artificial Sequence
  Description of Artificial Sequence: Synthetic oligonucleotide
acagccaugagcagcccug

SEQ ID NO: 2294905 - RNA, 19 nt, Artificial Sequence
  Description of Artificial Sequence: Synthetic oligonucleotide
accaggcacaggaccaggc

SEQ ID NO: 2294906 - RNA, 19 nt, Artificial Sequence
  Description of Artificial Sequence: Synthetic oligonucleotide
aacgcaggucaauggcaaa

SEQ ID NO: 2294907 - RNA, 19 nt, Artificial Sequence
  Description of Artificial Sequence: Synthetic oligonucleotide
agguaggcauacucauuca

SEQ ID NO: 2294908 - RNA, 19 nt, Artificial Sequence
  Description of Artificial Sequence: Synthetic oligonucleotide
aaggccacacugggaaugu

SEQ ID NO: 2294909 - RNA, 19 nt, Artificial Sequence
  Description of Artificial Sequence: Synthetic oligonucleotide
ucucugcaaggcccaugag

SEQ ID NO: 2294910 - RNA, 19 nt, Artificial Sequence
  Description of Artificial Sequence: Synthetic oligonucleotide
acccguacagaggucacug

SEQ ID NO: 2294911 - RNA, 19 nt, Artificial Sequence
  Description of Artificial Sequence: Synthetic oligonucleotide
aaaggagucuugacugcaa

SEQ ID NO: 2294912 - RNA, 19 nt, Artificial Sequence
  Description of Artificial Sequence: Synthetic oligonucleotide
uccccagaacgacagccau

SEQ ID NO: 2294913 - RNA, 19 nt, Artificial Sequence
  Description of Artificial Sequence: Synthetic oligonucleotide
caagugauugagggaugcc

SEQ ID NO: 2294914 - RNA, 19 nt, Artificial Sequence
  Description of Artificial Sequence: Synthetic oligonucleotide
aggacccguacagagguca

SEQ ID NO: 2294915 - RNA, 19 nt, Artificial Sequence
  Description of Artificial Sequence: Synthetic oligonucleotide
cugaaucauggaagaugug

SEQ ID NO: 2294916 - RNA, 19 nt, Artificial Sequence
  Description of Artificial Sequence: Synthetic oligonucleotide
ggguauggagaagguaugg

SEQ ID NO: 2294917 - RNA, 19 nt, Artificial Sequence
  Description of Artificial Sequence: Synthetic oligonucleotide
ggcauacucauucacgugu

SEQ ID NO: 2294918 - RNA, 19 nt, Artificial Sequence
  Description of Artificial Sequence: Synthetic oligonucleotide
cuccagauucugguguagc

SEQ ID NO: 2294919 - RNA, 19 nt, Artificial Sequence
  Description of Artificial Sequence: Synthetic oligonucleotide
ugcgucauggaggcuccag

SEQ ID NO: 2294920 - RNA, 19 nt, Artificial Sequence
  Description of Artificial Sequence: Synthetic oligonucleotide
caccuugaacgugggagcc

SEQ ID NO: 2294921 - RNA, 19 nt, Artificial Sequence
  Description of Artificial Sequence: Synthetic oligonucleotide
gcuuggugauuacugacga

SEQ ID NO: 2294922 - RNA, 19 nt, Artificial Sequence
  Description of Artificial Sequence: Synthetic oligonucleotide
ucauacugccucacacauu

SEQ ID NO: 2294923 - RNA, 19 nt, Artificial Sequence
  Description of Artificial Sequence: Synthetic oligonucleotide
ggauccgggaaacugcaga

SEQ ID NO: 2294924 - RNA, 19 nt, Artificial Sequence
  Description of Artificial Sequence: Synthetic oligonucleotide
cacguauugcucuuccuua

SEQ ID NO: 2294925 - RNA, 19 nt, Artificial Sequence
  Description of Artificial Sequence: Synthetic oligonucleotide
acugacgaacagugaugcu

SEQ ID NO: 2294926 - RNA, 19 nt, Artificial Sequence
  Description of Artificial Sequence: Synthetic oligonucleotide
gaacgcaggucaauggcaa

SEQ ID NO: 2294927 - RNA, 19 nt, Artificial Sequence
  Description of Artificial Sequence: Synthetic oligonucleotide
augaggcauagcaggaugu

SEQ ID NO: 2294928 - RNA, 19 nt, Artificial Sequence
  Description of Artificial Sequence: Synthetic oligonucleotide
caguuauuggccugggugu

SEQ ID NO: 2294929 - RNA, 19 nt, Artificial Sequence
  Description of Artificial Sequence: Synthetic oligonucleotide
cagcccuuggcuugacuug

SEQ ID NO: 2294930 - RNA, 19 nt, Artificial Sequence
  Description of Artificial Sequence: Synthetic oligonucleotide
uccagauugccuggacaga

SEQ ID NO: 2294931 - RNA, 19 nt, Artificial Sequence
  Description of Artificial Sequence: Synthetic oligonucleotide
uagcagucuuggcccacug

SEQ ID NO: 2294932 - RNA, 19 nt, Artificial Sequence
  Description of Artificial Sequence: Synthetic oligonucleotide
gugugcgucauggaggcuc

SEQ ID NO: 2294933 - RNA, 19 nt, Artificial Sequence
  Description of Artificial Sequence: Synthetic oligonucleotide
gaacgugggagccuucagu

SEQ ID NO: 2294934 - RNA, 19 nt, Artificial Sequence
  Description of Artificial Sequence: Synthetic oligonucleotide
gcagagaacgccgggcugg

SEQ ID NO: 2294935 - RNA, 19 nt, Artificial Sequence
  Description of Artificial Sequence: Synthetic oligonucleotide
acgacugccgguguccugu

SEQ ID NO: 2294936 - RNA, 19 nt, Artificial Sequence
  Description of Artificial Sequence: Synthetic oligonucleotide
cugccacuaggauuccuuc

SEQ ID NO: 2294937 - RNA, 19 nt, Artificial Sequence
  Description of Artificial Sequence: Synthetic oligonucleotide
uccauacgacugccggugu

SEQ ID NO: 2294938 - RNA, 19 nt, Artificial Sequence
  Description of Artificial Sequence: Synthetic oligonucleotide
uggagaagguaugguucug

SEQ ID NO: 2294939 - RNA, 19 nt, Artificial Sequence
  Description of Artificial Sequence: Synthetic oligonucleotide
agcaguuauuggccugggu

SEQ ID NO: 2294940 - RNA, 19 nt, Artificial Sequence
  Description of Artificial Sequence: Synthetic oligonucleotide
uccuccagauugccuggac

SEQ ID NO: 2294941 - RNA, 19 nt, Artificial Sequence
  Description of Artificial Sequence: Synthetic oligonucleotide
gugauuacugacgaacagu

SEQ ID NO: 2294942 - RNA, 19 nt, Artificial Sequence
  Description of Artificial Sequence: Synthetic oligonucleotide
ugguucugagcaggugugc

SEQ ID NO: 2294943 - RNA, 19 nt, Artificial Sequence
  Description of Artificial Sequence: Synthetic oligonucleotide
cucacacauuugguggccc

SEQ ID NO: 2294944 - RNA, 19 nt, Artificial Sequence
  Description of Artificial Sequence: Synthetic oligonucleotide
gacuuggagaacgcagguc

SEQ ID NO: 2294945 - RNA, 19 nt, Artificial Sequence
  Description of Artificial Sequence: Synthetic oligonucleotide
caggcaccagggauccggg

SEQ ID NO: 2294946 - RNA, 19 nt, Artificial Sequence
  Description of Artificial Sequence: Synthetic oligonucleotide
aaggcccaugaggcauagc

SEQ ID NO: 2294947 - RNA, 19 nt, Artificial Sequence
  Description of Artificial Sequence: Synthetic oligonucleotide
guaugguucugagcaggug

SEQ ID NO: 2294948 - RNA, 19 nt, Artificial Sequence
  Description of Artificial Sequence: Synthetic oligonucleotide
gccacacugggaauguuag

SEQ ID NO: 2294949 - RNA, 19 nt, Artificial Sequence
  Description of Artificial Sequence: Synthetic oligonucleotide
augugggaauccaagugau

SEQ ID NO: 2294950 - RNA, 19 nt, Artificial Sequence
  Description of Artificial Sequence: Synthetic oligonucleotide
gaccaggcacaggaccagg

SEQ ID NO: 2294951 - RNA, 19 nt, Artificial Sequence
  Description of Artificial Sequence: Synthetic oligonucleotide
uauuggccuggguguucag

SEQ ID NO: 2294952 - RNA, 19 nt, Artificial Sequence
  Description of Artificial Sequence: Synthetic oligonucleotide
augagcuguaggagaaaca

SEQ ID NO: 2294953 - RNA, 19 nt, Artificial Sequence
  Description of Artificial Sequence: Synthetic oligonucleotide
ggacccuucgagacaaacc

SEQ ID NO: 2294954 - RNA, 19 nt, Artificial Sequence
  Description of Artificial Sequence: Synthetic oligonucleotide
aaggacccguacagagguc

SEQ ID NO: 2294955 - RNA, 19 nt, Artificial Sequence
  Description of Artificial Sequence: Synthetic oligonucleotide
cucauucacguguccuuca

SEQ ID NO: 2294956 - RNA, 19 nt, Artificial Sequence
  Description of Artificial Sequence: Synthetic oligonucleotide
augcacaugcaggggcagg

SEQ ID NO: 2294957 - RNA, 19 nt, Artificial Sequence
  Description of Artificial Sequence: Synthetic oligonucleotide
agaucuccccagaacgaca

SEQ ID NO: 2294958 - RNA, 19 nt, Artificial Sequence
  Description of Artificial Sequence: Synthetic oligonucleotide
caguaaagguccugcugga

SEQ ID NO: 2294959 - RNA, 19 nt, Artificial Sequence
  Description of Artificial Sequence: Synthetic oligonucleotide
acgaacagugaugcuggga

SEQ ID NO: 2294960 - RNA, 19 nt, Artificial Sequence
  Description of Artificial Sequence: Synthetic oligonucleotide
uuggagaacgcaggucaau

SEQ ID NO: 2294961 - RNA, 19 nt, Artificial Sequence
  Description of Artificial Sequence: Synthetic oligonucleotide
cauagcaggaugugggaau

SEQ ID NO: 2294962 - RNA, 19 nt, Artificial Sequence
  Description of Artificial Sequence: Synthetic oligonucleotide
gccucacacauuugguggc

SEQ ID NO: 2294963 - RNA, 19 nt, Artificial Sequence
  Description of Artificial Sequence: Synthetic oligonucleotide
ccaagugauugagggaugc

SEQ ID NO: 2294964 - RNA, 19 nt, Artificial Sequence
  Description of Artificial Sequence: Synthetic oligonucleotide
gucuugacugcaaauugcu

SEQ ID NO: 2294965 - RNA, 19 nt, Artificial Sequence
  Description of Artificial Sequence: Synthetic oligonucleotide
caugcacaugcaggggcag

SEQ ID NO: 2294966 - RNA, 19 nt, Artificial Sequence
  Description of Artificial Sequence: Synthetic oligonucleotide
aguuauuggccuggguguu

SEQ ID NO: 2294967 - RNA, 19 nt, Artificial Sequence
  Description of Artificial Sequence: Synthetic oligonucleotide
ccuggugucucugcaaggc

SEQ ID NO: 2294968 - RNA, 19 nt, Artificial Sequence
  Description of Artificial Sequence: Synthetic oligonucleotide
cugccgguguccugucacc

SEQ ID NO: 2294969 - RNA, 19 nt, Artificial Sequence
  Description of Artificial Sequence: Synthetic oligonucleotide
ggggcagguaggcauacuc

SEQ ID NO: 2294970 - RNA, 19 nt, Artificial Sequence
  Description of Artificial Sequence: Synthetic oligonucleotide
guucaccuuccuguuggug

SEQ ID NO: 2294971 - RNA, 19 nt, Artificial Sequence
  Description of Artificial Sequence: Synthetic oligonucleotide
uguagcagucuuggcccac

SEQ ID NO: 2294972 - RNA, 19 nt, Artificial Sequence
  Description of Artificial Sequence: Synthetic oligonucleotide
ggucuguaccugcuuggug

SEQ ID NO: 2294973 - RNA, 19 nt, Artificial Sequence
  Description of Artificial Sequence: Synthetic oligonucleotide
acugccacuaggauuccuu

SEQ ID NO: 2294974 - RNA, 19 nt, Artificial Sequence
  Description of Artificial Sequence: Synthetic oligonucleotide
agggauccgggaaacugca

SEQ ID NO: 2294975 - RNA, 19 nt, Artificial Sequence
  Description of Artificial Sequence: Synthetic oligonucleotide
cuguugguuccauacgacu

SEQ ID NO: 2294976 - RNA, 19 nt, Artificial Sequence
  Description of Artificial Sequence: Synthetic oligonucleotide
agauguggguggccuucca

SEQ ID NO: 2294977 - RNA, 19 nt, Artificial Sequence
  Description of Artificial Sequence: Synthetic oligonucleotide
cuuggagaacgcaggucaa

SEQ ID NO: 2294978 - RNA, 19 nt, Artificial Sequence
  Description of Artificial Sequence: Synthetic oligonucleotide
cuuggugauuacugacgaa

SEQ ID NO: 2294979 - RNA, 19 nt, Artificial Sequence
  Description of Artificial Sequence: Synthetic oligonucleotide
cgugggagccuucaguccc

SEQ ID NO: 2294980 - RNA, 19 nt, Artificial Sequence
  Description of Artificial Sequence: Synthetic oligonucleotide
uacgacugccgguguccug

SEQ ID NO: 2294981 - RNA, 19 nt, Artificial Sequence
  Description of Artificial Sequence: Synthetic oligonucleotide
ugccgguguccugucacca

SEQ ID NO: 2294982 - RNA, 19 nt, Artificial Sequence
  Description of Artificial Sequence: Synthetic oligonucleotide
aaccuguacugaagcaguu

SEQ ID NO: 2294983 - RNA, 19 nt, Artificial Sequence
  Description of Artificial Sequence: Synthetic oligonucleotide
gucugaugccaucacguau

SEQ ID NO: 2294984 - RNA, 19 nt, Artificial Sequence
  Description of Artificial Sequence: Synthetic oligonucleotide
ccuguuggugaaguacagg

SEQ ID NO: 2294985 - RNA, 19 nt, Artificial Sequence
  Description of Artificial Sequence: Synthetic oligonucleotide
ccaggcaccagggauccgg

SEQ ID NO: 2294986 - RNA, 19 nt, Artificial Sequence
  Description of Artificial Sequence: Synthetic oligonucleotide
guuccauacgacugccggu

SEQ ID NO: 2294987 - RNA, 19 nt, Artificial Sequence
  Description of Artificial Sequence: Synthetic oligonucleotide
cagccaugagcagcccugg

SEQ ID NO: 2294988 - RNA, 19 nt, Artificial Sequence
  Description of Artificial Sequence: Synthetic oligonucleotide
uccagcccuuggcuugacu

SEQ ID NO: 2294989 - RNA, 19 nt, Artificial Sequence
  Description of Artificial Sequence: Synthetic oligonucleotide
auccgggaaacugcagaga

SEQ ID NO: 2294990 - RNA, 19 nt, Artificial Sequence
  Description of Artificial Sequence: Synthetic oligonucleotide
acgccgggcuggucuguac

SEQ ID NO: 2294991 - RNA, 19 nt, Artificial Sequence
  Description of Artificial Sequence: Synthetic oligonucleotide
ccgguguccugucaccacg

SEQ ID NO: 2294992 - RNA, 19 nt, Artificial Sequence
  Description of Artificial Sequence: Synthetic oligonucleotide
auacgacugccgguguccu

SEQ ID NO: 2294993 - RNA, 19 nt, Artificial Sequence
  Description of Artificial Sequence: Synthetic oligonucleotide
ggcaaagaucuccccagaa

SEQ ID NO: 2294994 - RNA, 19 nt, Artificial Sequence
  Description of Artificial Sequence: Synthetic oligonucleotide
accuguacugaagcaguua

SEQ ID NO: 2294995 - RNA, 19 nt, Artificial Sequence
  Description of Artificial Sequence: Synthetic oligonucleotide
acccuucgagacaaaccug

SEQ ID NO: 2294996 - RNA, 19 nt, Artificial Sequence
  Description of Artificial Sequence: Synthetic oligonucleotide
uccugucaccacguugguc

SEQ ID NO: 2294997 - RNA, 19 nt, Artificial Sequence
  Description of Artificial Sequence: Synthetic oligonucleotide
gagccaagacaucacuguu

SEQ ID NO: 2294998 - RNA, 19 nt, Artificial Sequence
  Description of Artificial Sequence: Synthetic oligonucleotide
gccuggacagaaugagcug

SEQ ID NO: 2294999 - RNA, 19 nt, Artificial Sequence
  Description of Artificial Sequence: Synthetic oligonucleotide
guguagcagucuuggccca

SEQ ID NO: 2295000 - RNA, 19 nt, Artificial Sequence
  Description of Artificial Sequence: Synthetic oligonucleotide
cuuggcccacugccacuag

SEQ ID NO: 2295001 - RNA, 19 nt, Artificial Sequence
  Description of Artificial Sequence: Synthetic oligonucleotide
gguguucagggaccaggca

SEQ ID NO: 2295002 - RNA, 19 nt, Artificial Sequence
  Description of Artificial Sequence: Synthetic oligonucleotide
cguauugcucuuccuuaag

SEQ ID NO: 2295003 - RNA, 19 nt, Artificial Sequence
  Description of Artificial Sequence: Synthetic oligonucleotide
gccacuaggauuccuuccu

SEQ ID NO: 2295004 - RNA, 19 nt, Artificial Sequence
  Description of Artificial Sequence: Synthetic oligonucleotide
caccagggauccgggaaac

SEQ ID NO: 2295005 - RNA, 19 nt, Artificial Sequence
  Description of Artificial Sequence: Synthetic oligonucleotide
gggaaacugcagagaacgc

SEQ ID NO: 2295006 - RNA, 19 nt, Artificial Sequence
  Description of Artificial Sequence: Synthetic oligonucleotide
aggguggcgcagccuggug

SEQ ID NO: 2295007 - RNA, 19 nt, Artificial Sequence
  Description of Artificial Sequence: Synthetic oligonucleotide
gagaaacaguaaagguccu

SEQ ID NO: 2295008 - RNA, 19 nt, Artificial Sequence
  Description of Artificial Sequence: Synthetic oligonucleotide
gcauacucauucacguguc

SEQ ID NO: 2295009 - RNA, 19 nt, Artificial Sequence
  Description of Artificial Sequence: Synthetic oligonucleotide
gagcuguaggagaaacagu

SEQ ID NO: 2295010 - RNA, 19 nt, Artificial Sequence
  Description of Artificial Sequence: Synthetic oligonucleotide
acaucacuguugguuccau

SEQ ID NO: 2295011 - RNA, 19 nt, Artificial Sequence
  Description of Artificial Sequence: Synthetic oligonucleotide
gccaugucugaugccauca

SEQ ID NO: 2295012 - RNA, 19 nt, Artificial Sequence
  Description of Artificial Sequence: Synthetic oligonucleotide
gguauggagaagguauggu

SEQ ID NO: 2295013 - RNA, 19 nt, Artificial Sequence
  Description of Artificial Sequence: Synthetic oligonucleotide
cauucacguguccuucaua

SEQ ID NO: 2295014 - RNA, 19 nt, Artificial Sequence
  Description of Artificial Sequence: Synthetic oligonucleotide
cugcagagaacgccgggcu

SEQ ID NO: 2295015 - RNA, 19 nt, Artificial Sequence
  Description of Artificial Sequence: Synthetic oligonucleotide
ggugucucugcaaggccca

SEQ ID NO: 2295016 - RNA, 19 nt, Artificial Sequence
  Description of Artificial Sequence: Synthetic oligonucleotide
ccaugucugaugccaucac

SEQ ID NO: 2295017 - RNA, 19 nt, Artificial Sequence
  Description of Artificial Sequence: Synthetic oligonucleotide
ccucacacauuugguggcc

SEQ ID NO: 2295018 - RNA, 19 nt, Artificial Sequence
  Description of Artificial Sequence: Synthetic oligonucleotide
ggcgaggagagaaggccac

SEQ ID NO: 2295019 - RNA, 19 nt, Artificial Sequence
  Description of Artificial Sequence: Synthetic oligonucleotide
ccgggaaacugcagagaac

SEQ ID NO: 2295020 - RNA, 19 nt, Artificial Sequence
  Description of Artificial Sequence: Synthetic oligonucleotide
cccguacagaggucacugc

SEQ ID NO: 2295021 - RNA, 19 nt, Artificial Sequence
  Description of Artificial Sequence: Synthetic oligonucleotide
gcgucauggaggcuccaga

SEQ ID NO: 2295022 - RNA, 19 nt, Artificial Sequence
  Description of Artificial Sequence: Synthetic oligonucleotide
caucacuguugguuccaua

SEQ ID NO: 2295023 - RNA, 19 nt, Artificial Sequence
  Description of Artificial Sequence: Synthetic oligonucleotide
accagggauccgggaaacu

SEQ ID NO: 2295024 - RNA, 19 nt, Artificial Sequence
  Description of Artificial Sequence: Synthetic oligonucleotide
ggucaacaggacccuucga

SEQ ID NO: 2295025 - RNA, 19 nt, Artificial Sequence
  Description of Artificial Sequence: Synthetic oligonucleotide
cccuucgagacaaaccugu

SEQ ID NO: 2295026 - RNA, 19 nt, Artificial Sequence
  Description of Artificial Sequence: Synthetic oligonucleotide
ccuccagauugccuggaca

SEQ ID NO: 2295027 - RNA, 19 nt, Artificial Sequence
  Description of Artificial Sequence: Synthetic oligonucleotide
gcauagcaggaugugggaa

SEQ ID NO: 2295028 - RNA, 19 nt, Artificial Sequence
  Description of Artificial Sequence: Synthetic oligonucleotide
aacgccgggcuggucugua

SEQ ID NO: 2295029 - RNA, 19 nt, Artificial Sequence
  Description of Artificial Sequence: Synthetic oligonucleotide
ccagauugccuggacagaa

SEQ ID NO: 2295030 - RNA, 19 nt, Artificial Sequence
  Description of Artificial Sequence: Synthetic oligonucleotide
ccacuaggauuccuuccuc

SEQ ID NO: 2295031 - RNA, 19 nt, Artificial Sequence
  Description of Artificial Sequence: Synthetic oligonucleotide
augcaggggcagguaggca

SEQ ID NO: 2295032 - RNA, 19 nt, Artificial Sequence
  Description of Artificial Sequence: Synthetic oligonucleotide
gugcaccuugaacguggga

SEQ ID NO: 2295033 - RNA, 19 nt, Artificial Sequence
  Description of Artificial Sequence: Synthetic oligonucleotide
accuguccuccuccagauu

SEQ ID NO: 2295034 - RNA, 19 nt, Artificial Sequence
  Description of Artificial Sequence: Synthetic oligonucleotide
caggaccaggcaccaggga

SEQ ID NO: 2295035 - RNA, 19 nt, Artificial Sequence
  Description of Artificial Sequence: Synthetic oligonucleotide
ccauacgacugccgguguc

SEQ ID NO: 2295036 - RNA, 19 nt, Artificial Sequence
  Description of Artificial Sequence: Synthetic oligonucleotide
cgagacaaaccuguacuga

SEQ ID NO: 2295037 - RNA, 19 nt, Artificial Sequence
  Description of Artificial Sequence: Synthetic oligonucleotide
cagauugccuggacagaau

SEQ ID NO: 2295038 - RNA, 19 nt, Artificial Sequence
  Description of Artificial Sequence: Synthetic oligonucleotide
gguaugguucugagcaggu

SEQ ID NO: 2295039 - RNA, 19 nt, Artificial Sequence
  Description of Artificial Sequence: Synthetic oligonucleotide
gacccguacagaggucacu

SEQ ID NO: 2295040 - RNA, 19 nt, Artificial Sequence
  Description of Artificial Sequence: Synthetic oligonucleotide
accaggcaccagggauccg

SEQ ID NO: 2295041 - RNA, 19 nt, Artificial Sequence
  Description of Artificial Sequence: Synthetic oligonucleotide
guagcagucuuggcccacu

SEQ ID NO: 2295042 - RNA, 19 nt, Artificial Sequence
  Description of Artificial Sequence: Synthetic oligonucleotide
ggcacaggaccaggcacca

SEQ ID NO: 2295043 - RNA, 19 nt, Artificial Sequence
  Description of Artificial Sequence: Synthetic oligonucleotide
gucuuggcccacugccacu

SEQ ID NO: 2295044 - RNA, 19 nt, Artificial Sequence
  Description of Artificial Sequence: Synthetic oligonucleotide
gcaggaugugggaauccaa

SEQ ID NO: 2295045 - RNA, 19 nt, Artificial Sequence
  Description of Artificial Sequence: Synthetic oligonucleotide
ggacccguacagaggucac

SEQ ID NO: 2295046 - RNA, 19 nt, Artificial Sequence
  Description of Artificial Sequence: Synthetic oligonucleotide
ggguggcgcagccuggugu

SEQ ID NO: 2295047 - RNA, 19 nt, Artificial Sequence
  Description of Artificial Sequence: Synthetic oligonucleotide
ccguacagaggucacugcu

SEQ ID NO: 2295048 - RNA, 19 nt, Artificial Sequence
  Description of Artificial Sequence: Synthetic oligonucleotide
ccaucacguauugcucuuc

SEQ ID NO: 2295049 - RNA, 19 nt, Artificial Sequence
  Description of Artificial Sequence: Synthetic oligonucleotide
ccuucgagacaaaccugua

SEQ ID NO: 2295050 - RNA, 19 nt, Artificial Sequence
  Description of Artificial Sequence: Synthetic oligonucleotide
cgccgggcuggucuguacc

SEQ ID NO: 2295051 - RNA, 19 nt, Artificial Sequence
  Description of Artificial Sequence: Synthetic oligonucleotide
cgacagccauuaaacagua

SEQ ID NO: 2295052 - RNA, 19 nt, Artificial Sequence
  Description of Artificial Sequence: Synthetic oligonucleotide
gcgaggagagaaggccaca

SEQ ID NO: 2295053 - RNA, 19 nt, Artificial Sequence
  Description of Artificial Sequence: Synthetic oligonucleotide
gccaucacguauugcucuu

SEQ ID NO: 2295054 - RNA, 19 nt, Artificial Sequence
  Description of Artificial Sequence: Synthetic oligonucleotide
cgcaggucaauggcaaaga

SEQ ID NO: 2295055 - RNA, 19 nt, Artificial Sequence
  Description of Artificial Sequence: Synthetic oligonucleotide
ccgggcuggucuguaccug

SEQ ID NO: 2295056 - RNA, 19 nt, Artificial Sequence
  Description of Artificial Sequence: Synthetic oligonucleotide
gcaaggcccaugaggcaua

SEQ ID NO: 2295057 - RNA, 19 nt, Artificial Sequence
  Description of Artificial Sequence: Synthetic oligonucleotide
ggcgcagccuggugucucu

SEQ ID NO: 2295058 - RNA, 19 nt, Artificial Sequence
  Description of Artificial Sequence: Synthetic oligonucleotide
gaacgccgggcuggucugu

SEQ ID NO: 2295059 - RNA, 19 nt, Artificial Sequence
  Description of Artificial Sequence: Synthetic oligonucleotide
gugcgucauggaggcucca

SEQ ID NO: 2295060 - RNA, 19 nt, Artificial Sequence
  Description of Artificial Sequence: Synthetic oligonucleotide
gguguccugucaccacguu

SEQ ID NO: 2295061 - RNA, 19 nt, Artificial Sequence
  Description of Artificial Sequence: Synthetic oligonucleotide
gguggcccucaggucccac

SEQ ID NO: 2295062 - RNA, 19 nt, Artificial Sequence
  Description of Artificial Sequence: Synthetic oligonucleotide
cacugccacuaggauuccu

SEQ ID NO: 2295063 - RNA, 19 nt, Artificial Sequence
  Description of Artificial Sequence: Synthetic oligonucleotide
gcgcagccuggugucucug

SEQ ID NO: 2295064 - RNA, 19 nt, Artificial Sequence
  Description of Artificial Sequence: Synthetic oligonucleotide
ccuugaacgugggagccuu

SEQ ID NO: 2295065 - RNA, 19 nt, Artificial Sequence
  Description of Artificial Sequence: Synthetic oligonucleotide
ccagaacgacagccauuaa

SEQ ID NO: 2295066 - RNA, 19 nt, Artificial Sequence
  Description of Artificial Sequence: Synthetic oligonucleotide
gcccuuggcuugacuugga

SEQ ID NO: 2295067 - RNA, 19 nt, Artificial Sequence
  Description of Artificial Sequence: Synthetic oligonucleotide
ccaugaggcauagcaggau

SEQ ID NO: 2295068 - RNA, 19 nt, Artificial Sequence
  Description of Artificial Sequence: Synthetic oligonucleotide
cgacugccgguguccuguc

SEQ ID NO: 2295069 - RNA, 19 nt, Artificial Sequence
  Description of Artificial Sequence: Synthetic oligonucleotide
cguuggucaacaggacccu

SEQ ID NO: 2295070 - RNA, 19 nt, Artificial Sequence
  Description of Artificial Sequence: Synthetic oligonucleotide
ccccagaacgacagccauu

SEQ ID NO: 2295071 - RNA, 19 nt, Artificial Sequence
  Description of Artificial Sequence: Synthetic oligonucleotide
cgguguccugucaccacgu

SEQ ID NO: 2295072 - RNA, 19 nt, Artificial Sequence
  Description of Artificial Sequence: Synthetic oligonucleotide
uuuuauguugguuuguuca

SEQ ID NO: 2295073 - RNA, 19 nt, Artificial Sequence
  Description of Artificial Sequence: Synthetic oligonucleotide
auugcaaacuuuuauguug

SEQ ID NO: 2295074 - RNA, 19 nt, Artificial Sequence
  Description of Artificial Sequence: Synthetic oligonucleotide
aaguuuguggaggagaggg

SEQ ID NO: 2295075 - RNA, 19 nt, Artificial Sequence
  Description of Artificial Sequence: Synthetic oligonucleotide
acuugaaguguuuaggauc

SEQ ID NO: 2295076 - RNA, 19 nt, Artificial Sequence
  Description of Artificial Sequence: Synthetic oligonucleotide
cuugaaguguuuaggaucc

SEQ ID NO: 2295077 - RNA, 19 nt, Artificial Sequence
  Description of Artificial Sequence: Synthetic oligonucleotide
cauaucguaccacucaucg

SEQ ID NO: 2295078 - RNA, 19 nt, Artificial Sequence
  Description of Artificial Sequence: Synthetic oligonucleotide
uguaguagcguucagggau

SEQ ID NO: 2295079 - RNA, 19 nt, Artificial Sequence
  Description of Artificial Sequence: Synthetic oligonucleotide
uaucguaccacucaucgac

SEQ ID NO: 2295080 - RNA, 19 nt, Artificial Sequence
  Description of Artificial Sequence: Synthetic oligonucleotide
aaaggguacgggcaggguc

SEQ ID NO: 2295081 - RNA, 19 nt, Artificial Sequence
  Description of Artificial Sequence: Synthetic oligonucleotide
aaacuuuuauguugguuug

SEQ ID NO: 2295082 - RNA, 19 nt, Artificial Sequence
  Description of Artificial Sequence: Synthetic oligonucleotide
agcuaggacggacauaagc

SEQ ID NO: 2295083 - RNA, 19 nt, Artificial Sequence
  Description of Artificial Sequence: Synthetic oligonucleotide
uccauugucauaucguacc

SEQ ID NO: 2295084 - RNA, 19 nt, Artificial Sequence
  Description of Artificial Sequence: Synthetic oligonucleotide
uggguuuaaaggcagugag

SEQ ID NO: 2295085 - RNA, 19 nt, Artificial Sequence
  Description of Artificial Sequence: Synthetic oligonucleotide
ugaggugcaacagugacag

SEQ ID NO: 2295086 - RNA, 19 nt, Artificial Sequence
  Description of Artificial Sequence: Synthetic oligonucleotide
gaaaacgccgauuuucuug

SEQ ID NO: 2295087 - RNA, 19 nt, Artificial Sequence
  Description of Artificial Sequence: Synthetic oligonucleotide
ugauugcaaacuuuuaugu

SEQ ID NO: 2295088 - RNA, 19 nt, Artificial Sequence
  Description of Artificial Sequence: Synthetic oligonucleotide
ucaagaaaggguacgggca

SEQ ID NO: 2295089 - RNA, 19 nt, Artificial Sequence
  Description of Artificial Sequence: Synthetic oligonucleotide
aaaacgccgauuuucuugu

SEQ ID NO: 2295090 - RNA, 19 nt, Artificial Sequence
  Description of Artificial Sequence: Synthetic oligonucleotide
agugaggugcaacagugac

SEQ ID NO: 2295091 - RNA, 19 nt, Artificial Sequence
  Description of Artificial Sequence: Synthetic oligonucleotide
gaauucucgcaccucaucc

SEQ ID NO: 2295092 - RNA, 19 nt, Artificial Sequence
  Description of Artificial Sequence: Synthetic oligonucleotide
ucauguacuggucugcgca

SEQ ID NO: 2295093 - RNA, 19 nt, Artificial Sequence
  Description of Artificial Sequence: Synthetic oligonucleotide
ucaucacaugaucauauac

SEQ ID NO: 2295094 - RNA, 19 nt, Artificial Sequence
  Description of Artificial Sequence: Synthetic oligonucleotide
uauguugguuuguucaugc

SEQ ID NO: 2295095 - RNA, 19 nt, Artificial Sequence
  Description of Artificial Sequence: Synthetic oligonucleotide
uccauugucauguacuggu

SEQ ID NO: 2295096 - RNA, 19 nt, Artificial Sequence
  Description of Artificial Sequence: Synthetic oligonucleotide
agaauacacgccuuggucu

SEQ ID NO: 2295097 - RNA, 19 nt, Artificial Sequence
  Description of Artificial Sequence: Synthetic oligonucleotide
ugucauaucguaccacuca

SEQ ID NO: 2295098 - RNA, 19 nt, Artificial Sequence
  Description of Artificial Sequence: Synthetic oligonucleotide
aaguguuuaggauccucag

SEQ ID NO: 2295099 - RNA, 19 nt, Artificial Sequence
  Description of Artificial Sequence: Synthetic oligonucleotide
gauaguggagcacucaaga

SEQ ID NO: 2295100 - RNA, 19 nt, Artificial Sequence
  Description of Artificial Sequence: Synthetic oligonucleotide
cugauugcaaacuuuuaug

SEQ ID NO: 2295101 - RNA, 19 nt, Artificial Sequence
  Description of Artificial Sequence: Synthetic oligonucleotide
aggugcaacagugacagac

SEQ ID NO: 2295102 - RNA, 19 nt, Artificial Sequence
  Description of Artificial Sequence: Synthetic oligonucleotide
aaggguacgggcagggucc

SEQ ID NO: 2295103 - RNA, 19 nt, Artificial Sequence
  Description of Artificial Sequence: Synthetic oligonucleotide
aauggcggugggaaaacgc

SEQ ID NO: 2295104 - RNA, 19 nt, Artificial Sequence
  Description of Artificial Sequence: Synthetic oligonucleotide
auugucauaucguaccacu

SEQ ID NO: 2295105 - RNA, 19 nt, Artificial Sequence
  Description of Artificial Sequence: Synthetic oligonucleotide
gucguugacauucugcuug

SEQ ID NO: 2295106 - RNA, 19 nt, Artificial Sequence
  Description of Artificial Sequence: Synthetic oligonucleotide
uucgaauucucgcaccuca

SEQ ID NO: 2295107 - RNA, 19 nt, Artificial Sequence
  Description of Artificial Sequence: Synthetic oligonucleotide
guuuaggauccucagauuc

SEQ ID NO: 2295108 - RNA, 19 nt, Artificial Sequence
  Description of Artificial Sequence: Synthetic oligonucleotide
ucauccauugucauaucgu

SEQ ID NO: 2295109 - RNA, 19 nt, Artificial Sequence
  Description of Artificial Sequence: Synthetic oligonucleotide
uuucucguauucccgaaca

SEQ ID NO: 2295110 - RNA, 19 nt, Artificial Sequence
  Description of Artificial Sequence: Synthetic oligonucleotide
uuuaggauccucagauucu

SEQ ID NO: 2295111 - RNA, 19 nt, Artificial Sequence
  Description of Artificial Sequence: Synthetic oligonucleotide
uggguugauggcuaucccg

SEQ ID NO: 2295112 - RNA, 19 nt, Artificial Sequence
  Description of Artificial Sequence: Synthetic oligonucleotide
uguuguucgucguugacau

SEQ ID NO: 2295113 - RNA, 19 nt, Artificial Sequence
  Description of Artificial Sequence: Synthetic oligonucleotide
aaggagaauacacgccuug

SEQ ID NO: 2295114 - RNA, 19 nt, Artificial Sequence
  Description of Artificial Sequence: Synthetic oligonucleotide
acauuggggauaguggagc

SEQ ID NO: 2295115 - RNA, 19 nt, Artificial Sequence
  Description of Artificial Sequence: Synthetic oligonucleotide
aaggcagugaggugcaaca

SEQ ID NO: 2295116 - RNA, 19 nt, Artificial Sequence
  Description of Artificial Sequence: Synthetic oligonucleotide
agucaggaaggacagcuag

SEQ ID NO: 2295117 - RNA, 19 nt, Artificial Sequence
  Description of Artificial Sequence: Synthetic oligonucleotide
aggagugcugauugcaaac

SEQ ID NO: 2295118 - RNA, 19 nt, Artificial Sequence
  Description of Artificial Sequence: Synthetic oligonucleotide
acggacauaagcucuggag

SEQ ID NO: 2295119 - RNA, 19 nt, Artificial Sequence
  Description of Artificial Sequence: Synthetic oligonucleotide
uaagcucuggagcuccccg

SEQ ID NO: 2295120 - RNA, 19 nt, Artificial Sequence
  Description of Artificial Sequence: Synthetic oligonucleotide
aauucucgcaccucaucca

SEQ ID NO: 2295121 - RNA, 19 nt, Artificial Sequence
  Description of Artificial Sequence: Synthetic oligonucleotide
uguacuggucugcgcaugg

SEQ ID NO: 2295122 - RNA, 19 nt, Artificial Sequence
  Description of Artificial Sequence: Synthetic oligonucleotide
uucgucguugacauucugc

SEQ ID NO: 2295123 - RNA, 19 nt, Artificial Sequence
  Description of Artificial Sequence: Synthetic oligonucleotide
agacuucucuuucugccac

SEQ ID NO: 2295124 - RNA, 19 nt, Artificial Sequence
  Description of Artificial Sequence: Synthetic oligonucleotide
cuugugcacgaauugcucc

SEQ ID NO: 2295125 - RNA, 19 nt, Artificial Sequence
  Description of Artificial Sequence: Synthetic oligonucleotide
uguugguuuguucaugcau

SEQ ID NO: 2295126 - RNA, 19 nt, Artificial Sequence
  Description of Artificial Sequence: Synthetic oligonucleotide
aaaggcagugaggugcaac

SEQ ID NO: 2295127 - RNA, 19 nt, Artificial Sequence
  Description of Artificial Sequence: Synthetic oligonucleotide
gaauacacgccuuggucug

SEQ ID NO: 2295128 - RNA, 19 nt, Artificial Sequence
  Description of Artificial Sequence: Synthetic oligonucleotide
acgccgauuuucuuguugg

SEQ ID NO: 2295129 - RNA, 19 nt, Artificial Sequence
  Description of Artificial Sequence: Synthetic oligonucleotide
ucgucguugacauucugcu

SEQ ID NO: 2295130 - RNA, 19 nt, Artificial Sequence
  Description of Artificial Sequence: Synthetic oligonucleotide
cuuccuuguggguuuaaag

SEQ ID NO: 2295131 - RNA, 19 nt, Artificial Sequence
  Description of Artificial Sequence: Synthetic oligonucleotide
uaccgaggaaggcagcagg

SEQ ID NO: 2295132 - RNA, 19 nt, Artificial Sequence
  Description of Artificial Sequence: Synthetic oligonucleotide
gagaauacacgccuugguc

SEQ ID NO: 2295133 - RNA, 19 nt, Artificial Sequence
  Description of Artificial Sequence: Synthetic oligonucleotide
uuuauguugguuuguucau

SEQ ID NO: 2295134 - RNA, 19 nt, Artificial Sequence
  Description of Artificial Sequence: Synthetic oligonucleotide
agggcgaugccggagaucg

SEQ ID NO: 2295135 - RNA, 19 nt, Artificial Sequence
  Description of Artificial Sequence: Synthetic oligonucleotide
acauaagcucuggagcucc

SEQ ID NO: 2295136 - RNA, 19 nt, Artificial Sequence
  Description of Artificial Sequence: Synthetic oligonucleotide
cuuguaggagcacaugaug

SEQ ID NO: 2295137 - RNA, 19 nt, Artificial Sequence
  Description of Artificial Sequence: Synthetic oligonucleotide
uugacggucacuagcuugu

SEQ ID NO: 2295138 - RNA, 19 nt, Artificial Sequence
  Description of Artificial Sequence: Synthetic oligonucleotide
aacgccgauuuucuuguug

SEQ ID NO: 2295139 - RNA, 19 nt, Artificial Sequence
  Description of Artificial Sequence: Synthetic oligonucleotide
uuguuguuaccuaaccaaa

SEQ ID NO: 2295140 - RNA, 19 nt, Artificial Sequence
  Description of Artificial Sequence: Synthetic oligonucleotide
uuaaaggcagugaggugca

SEQ ID NO: 2295141 - RNA, 19 nt, Artificial Sequence
  Description of Artificial Sequence: Synthetic oligonucleotide
agagacauuggggauagug

SEQ ID NO: 2295142 - RNA, 19 nt, Artificial Sequence
  Description of Artificial Sequence: Synthetic oligonucleotide
ugcguaccgaggaaggcag

SEQ ID NO: 2295143 - RNA, 19 nt, Artificial Sequence
  Description of Artificial Sequence: Synthetic oligonucleotide
cuuguggguuuaaaggcag

SEQ ID NO: 2295144 - RNA, 19 nt, Artificial Sequence
  Description of Artificial Sequence: Synthetic oligonucleotide
guugguuuguucaugcaug

SEQ ID NO: 2295145 - RNA, 19 nt, Artificial Sequence
  Description of Artificial Sequence: Synthetic oligonucleotide
uuguucgucguugacauuc

SEQ ID NO: 2295146 - RNA, 19 nt, Artificial Sequence
  Description of Artificial Sequence: Synthetic oligonucleotide
aaggacccgagagacauug

SEQ ID NO: 2295147 - RNA, 19 nt, Artificial Sequence
  Description of Artificial Sequence: Synthetic oligonucleotide
cuccacucgugucugaagg

SEQ ID NO: 2295148 - RNA, 19 nt, Artificial Sequence
  Description of Artificial Sequence: Synthetic oligonucleotide
gcacaugauggguugaugg

SEQ ID NO: 2295149 - RNA, 19 nt, Artificial Sequence
  Description of Artificial Sequence: Synthetic oligonucleotide
cucguauucccgaacauca

SEQ ID NO: 2295150 - RNA, 19 nt, Artificial Sequence
  Description of Artificial Sequence: Synthetic oligonucleotide
ucucgcaccucauccauug

SEQ ID NO: 2295151 - RNA, 19 nt, Artificial Sequence
  Description of Artificial Sequence: Synthetic oligonucleotide
ugggagaggucaaggaccc

SEQ ID NO: 2295152 - RNA, 19 nt, Artificial Sequence
  Description of Artificial Sequence: Synthetic oligonucleotide
ucaucgacccacgcaaagg

SEQ ID NO: 2295153 - RNA, 19 nt, Artificial Sequence
  Description of Artificial Sequence: Synthetic oligonucleotide
cuugacggucacuagcuug

SEQ ID NO: 2295154 - RNA, 19 nt, Artificial Sequence
  Description of Artificial Sequence: Synthetic oligonucleotide
gagaucgaaauggcggugg

SEQ ID NO: 2295155 - RNA, 19 nt, Artificial Sequence
  Description of Artificial Sequence: Synthetic oligonucleotide
aacuugacggucacuagcu

SEQ ID NO: 2295156 - RNA, 19 nt, Artificial Sequence
  Description of Artificial Sequence: Synthetic oligonucleotide
caagaaaggguacgggcag

SEQ ID NO: 2295157 - RNA, 19 nt, Artificial Sequence
  Description of Artificial Sequence: Synthetic oligonucleotide
cagauucuuuguaguagcg

SEQ ID NO: 2295158 - RNA, 19 nt, Artificial Sequence
  Description of Artificial Sequence: Synthetic oligonucleotide
acgggcaggguccacuggc

SEQ ID NO: 2295159 - RNA, 19 nt, Artificial Sequence
  Description of Artificial Sequence: Synthetic oligonucleotide
aacaucauccauugucaua

SEQ ID NO: 2295160 - RNA, 19 nt, Artificial Sequence
  Description of Artificial Sequence: Synthetic oligonucleotide
ucaaggacccgagagacau

SEQ ID NO: 2295161 - RNA, 19 nt, Artificial Sequence
  Description of Artificial Sequence: Synthetic oligonucleotide
cauccauugucauguacug

SEQ ID NO: 2295162 - RNA, 19 nt, Artificial Sequence
  Description of Artificial Sequence: Synthetic oligonucleotide
ggaaggacagcuaggacgg

SEQ ID NO: 2295163 - RNA, 19 nt, Artificial Sequence
  Description of Artificial Sequence: Synthetic oligonucleotide
aguguuuaggauccucaga

SEQ ID NO: 2295164 - RNA, 19 nt, Artificial Sequence
  Description of Artificial Sequence: Synthetic oligonucleotide
auggguugauggcuauccc

SEQ ID NO: 2295165 - RNA, 19 nt, Artificial Sequence
  Description of Artificial Sequence: Synthetic oligonucleotide
ccgauuuucuuguuggugg

SEQ ID NO: 2295166 - RNA, 19 nt, Artificial Sequence
  Description of Artificial Sequence: Synthetic oligonucleotide
uguggguuuaaaggcagug

SEQ ID NO: 2295167 - RNA, 19 nt, Artificial Sequence
  Description of Artificial Sequence: Synthetic oligonucleotide
ucccgaacaucauccauug

SEQ ID NO: 2295168 - RNA, 19 nt, Artificial Sequence
  Description of Artificial Sequence: Synthetic oligonucleotide
caucgacccacgcaaaggc

SEQ ID NO: 2295169 - RNA, 19 nt, Artificial Sequence
  Description of Artificial Sequence: Synthetic oligonucleotide
ugucauguacuggucugcg

SEQ ID NO: 2295170 - RNA, 19 nt, Artificial Sequence
  Description of Artificial Sequence: Synthetic oligonucleotide
uuuucucguauucccgaac

SEQ ID NO: 2295171 - RNA, 19 nt, Artificial Sequence
  Description of Artificial Sequence: Synthetic oligonucleotide
ugucugaaggccccacacc

SEQ ID NO: 2295172 - RNA, 19 nt, Artificial Sequence
  Description of Artificial Sequence: Synthetic oligonucleotide
cugaaggccccacaccucg

SEQ ID NO: 2295173 - RNA, 19 nt, Artificial Sequence
  Description of Artificial Sequence: Synthetic oligonucleotide
uggacggagcggcuggacg

SEQ ID NO: 2295174 - RNA, 19 nt, Artificial Sequence
  Description of Artificial Sequence: Synthetic oligonucleotide
ugggaaaacgccgauuuuc

SEQ ID NO: 2295175 - RNA, 19 nt, Artificial Sequence
  Description of Artificial Sequence: Synthetic oligonucleotide
uacuggucugcgcauggcc

SEQ ID NO: 2295176 - RNA, 19 nt, Artificial Sequence
  Description of Artificial Sequence: Synthetic oligonucleotide
uuauguugguuuguucaug

SEQ ID NO: 2295177 - RNA, 19 nt, Artificial Sequence
  Description of Artificial Sequence: Synthetic oligonucleotide
uugugcacgaauugcucca

SEQ ID NO: 2295178 - RNA, 19 nt, Artificial Sequence
  Description of Artificial Sequence: Synthetic oligonucleotide
uucagggauuucaucacau

SEQ ID NO: 2295179 - RNA, 19 nt, Artificial Sequence
  Description of Artificial Sequence: Synthetic oligonucleotide
ggugauuuccuuuccugag

SEQ ID NO: 2295180 - RNA, 19 nt, Artificial Sequence
  Description of Artificial Sequence: Synthetic oligonucleotide
ucgacccacgcaaaggccu

SEQ ID NO: 2295181 - RNA, 19 nt, Artificial Sequence
  Description of Artificial Sequence: Synthetic oligonucleotide
uggcggugggaaaacgccg

SEQ ID NO: 2295182 - RNA, 19 nt, Artificial Sequence
  Description of Artificial Sequence: Synthetic oligonucleotide
acccgagagacauugggga

SEQ ID NO: 2295183 - RNA, 19 nt, Artificial Sequence
  Description of Artificial Sequence: Synthetic oligonucleotide
gaaguguuuaggauccuca

SEQ ID NO: 2295184 - RNA, 19 nt, Artificial Sequence
  Description of Artificial Sequence: Synthetic oligonucleotide
agaucgaaauggcgguggg

SEQ ID NO: 2295185 - RNA, 19 nt, Artificial Sequence
  Description of Artificial Sequence: Synthetic oligonucleotide
aaauggcggugggaaaacg

SEQ ID NO: 2295186 - RNA, 19 nt, Artificial Sequence
  Description of Artificial Sequence: Synthetic oligonucleotide
cuuuuauguugguuuguuc

SEQ ID NO: 2295187 - RNA, 19 nt, Artificial Sequence
  Description of Artificial Sequence: Synthetic oligonucleotide
cuaggacggacauaagcuc

SEQ ID NO: 2295188 - RNA, 19 nt, Artificial Sequence
  Description of Artificial Sequence: Synthetic oligonucleotide
ccagccuucucuuagcugc

SEQ ID NO: 2295189 - RNA, 19 nt, Artificial Sequence
  Description of Artificial Sequence: Synthetic oligonucleotide
ucgaacuugacggucacua

SEQ ID NO: 2295190 - RNA, 19 nt, Artificial Sequence
  Description of Artificial Sequence: Synthetic oligonucleotide
acucaagaaaggguacggg

SEQ ID NO: 2295191 - RNA, 19 nt, Artificial Sequence
  Description of Artificial Sequence: Synthetic oligonucleotide
gacccgagagacauugggg

SEQ ID NO: 2295192 - RNA, 19 nt, Artificial Sequence
  Description of Artificial Sequence: Synthetic oligonucleotide
gauucuuuguaguagcguu

SEQ ID NO: 2295193 - RNA, 19 nt, Artificial Sequence
  Description of Artificial Sequence: Synthetic oligonucleotide
agcguucagggauuucauc

SEQ ID NO: 2295194 - RNA, 19 nt, Artificial Sequence
  Description of Artificial Sequence: Synthetic oligonucleotide
uucccgaacaucauccauu

SEQ ID NO: 2295195 - RNA, 19 nt, Artificial Sequence
  Description of Artificial Sequence: Synthetic oligonucleotide
auccauugucauaucguac

SEQ ID NO: 2295196 - RNA, 19 nt, Artificial Sequence
  Description of Artificial Sequence: Synthetic oligonucleotide
uccacaguggaggagugcu

SEQ ID NO: 2295197 - RNA, 19 nt, Artificial Sequence
  Description of Artificial Sequence: Synthetic oligonucleotide
uugucauaucguaccacuc

SEQ ID NO: 2295198 - RNA, 19 nt, Artificial Sequence
  Description of Artificial Sequence: Synthetic oligonucleotide
gguccacuggcugagaggg

SEQ ID NO: 2295199 - RNA, 19 nt, Artificial Sequence
  Description of Artificial Sequence: Synthetic oligonucleotide
ccggagaucgaaauggcgg

SEQ ID NO: 2295200 - RNA, 19 nt, Artificial Sequence
  Description of Artificial Sequence: Synthetic oligonucleotide
uugggaucuggguuggggu

SEQ ID NO: 2295201 - RNA, 19 nt, Artificial Sequence
  Description of Artificial Sequence: Synthetic oligonucleotide
aggucagucaggaaggaca

SEQ ID NO: 2295202 - RNA, 19 nt, Artificial Sequence
  Description of Artificial Sequence: Synthetic oligonucleotide
accacucaucgacccacgc

SEQ ID NO: 2295203 - RNA, 19 nt, Artificial Sequence
  Description of Artificial Sequence: Synthetic oligonucleotide
guuuaaaggcagugaggug

SEQ ID NO: 2295204 - RNA, 19 nt, Artificial Sequence
  Description of Artificial Sequence: Synthetic oligonucleotide
uucucagacuugaaguguu

SEQ ID NO: 2295205 - RNA, 19 nt, Artificial Sequence
  Description of Artificial Sequence: Synthetic oligonucleotide
aacuuuuauguugguuugu

SEQ ID NO: 2295206 - RNA, 19 nt, Artificial Sequence
  Description of Artificial Sequence: Synthetic oligonucleotide
ucguaccacucaucgaccc

SEQ ID NO: 2295207 - RNA, 19 nt, Artificial Sequence
  Description of Artificial Sequence: Synthetic oligonucleotide
cacucaagaaaggguacgg

SEQ ID NO: 2295208 - RNA, 19 nt, Artificial Sequence
  Description of Artificial Sequence: Synthetic oligonucleotide
uauucccgaacaucaucca

SEQ ID NO: 2295209 - RNA, 19 nt, Artificial Sequence
  Description of Artificial Sequence: Synthetic oligonucleotide
auaagcucuggagcucccc

SEQ ID NO: 2295210 - RNA, 19 nt, Artificial Sequence
  Description of Artificial Sequence: Synthetic oligonucleotide
aucgaaauggcggugggaa

SEQ ID NO: 2295211 - RNA, 19 nt, Artificial Sequence
  Description of Artificial Sequence: Synthetic oligonucleotide
agcacucaagaaaggguac

SEQ ID NO: 2295212 - RNA, 19 nt, Artificial Sequence
  Description of Artificial Sequence: Synthetic oligonucleotide
guguuuaggauccucagau

SEQ ID NO: 2295213 - RNA, 19 nt, Artificial Sequence
  Description of Artificial Sequence: Synthetic oligonucleotide
ugcacgaauugcuccacuc

SEQ ID NO: 2295214 - RNA, 19 nt, Artificial Sequence
  Description of Artificial Sequence: Synthetic oligonucleotide
acaugauggguugauggcu

SEQ ID NO: 2295215 - RNA, 19 nt, Artificial Sequence
  Description of Artificial Sequence: Synthetic oligonucleotide
acuagcuuguaggagcaca

SEQ ID NO: 2295216 - RNA, 19 nt, Artificial Sequence
  Description of Artificial Sequence: Synthetic oligonucleotide
ucguucgaauucucgcacc

SEQ ID NO: 2295217 - RNA, 19 nt, Artificial Sequence
  Description of Artificial Sequence: Synthetic oligonucleotide
ggacccgagagacauuggg

SEQ ID NO: 2295218 - RNA, 19 nt, Artificial Sequence
  Description of Artificial Sequence: Synthetic oligonucleotide
auaucguaccacucaucga

SEQ ID NO: 2295219 - RNA, 19 nt, Artificial Sequence
  Description of Artificial Sequence: Synthetic oligonucleotide
agauucuuuguaguagcgu

SEQ ID NO: 2295220 - RNA, 19 nt, Artificial Sequence
  Description of Artificial Sequence: Synthetic oligonucleotide
cucguucgaauucucgcac

SEQ ID NO: 2295221 - RNA, 19 nt, Artificial Sequence
  Description of Artificial Sequence: Synthetic oligonucleotide
aucguaccacucaucgacc

SEQ ID NO: 2295222 - RNA, 19 nt, Artificial Sequence
  Description of Artificial Sequence: Synthetic oligonucleotide
aggucaaggacccgagaga

SEQ ID NO: 2295223 - RNA, 19 nt, Artificial Sequence
  Description of Artificial Sequence: Synthetic oligonucleotide
ucucguauucccgaacauc

SEQ ID NO: 2295224 - RNA, 19 nt, Artificial Sequence
  Description of Artificial Sequence: Synthetic oligonucleotide
ccgaacaucauccauuguc

SEQ ID NO: 2295225 - RNA, 19 nt, Artificial Sequence
  Description of Artificial Sequence: Synthetic oligonucleotide
uguucgucguugacauucu

SEQ ID NO: 2295226 - RNA, 19 nt, Artificial Sequence
  Description of Artificial Sequence: Synthetic oligonucleotide
gacggucacuagcuuguag

SEQ ID NO: 2295227 - RNA, 19 nt, Artificial Sequence
  Description of Artificial Sequence: Synthetic oligonucleotide
cuggguuggggugauuucc

SEQ ID NO: 2295228 - RNA, 19 nt, Artificial Sequence
  Description of Artificial Sequence: Synthetic oligonucleotide
auccauugucauguacugg

SEQ ID NO: 2295229 - RNA, 19 nt, Artificial Sequence
  Description of Artificial Sequence: Synthetic oligonucleotide
cacucgugucugaaggccc

SEQ ID NO: 2295230 - RNA, 19 nt, Artificial Sequence
  Description of Artificial Sequence: Synthetic oligonucleotide
ugaaguguuuaggauccuc

SEQ ID NO: 2295231 - RNA, 19 nt, Artificial Sequence
  Description of Artificial Sequence: Synthetic oligonucleotide
cucaucgacccacgcaaag

SEQ ID NO: 2295232 - RNA, 19 nt, Artificial Sequence
  Description of Artificial Sequence: Synthetic oligonucleotide
ucgcaccucauccauuguc

SEQ ID NO: 2295233 - RNA, 19 nt, Artificial Sequence
  Description of Artificial Sequence: Synthetic oligonucleotide
acucgugucugaaggcccc

SEQ ID NO: 2295234 - RNA, 19 nt, Artificial Sequence
  Description of Artificial Sequence: Synthetic oligonucleotide
gauggcuaucccgccagcc

SEQ ID NO: 2295235 - RNA, 19 nt, Artificial Sequence
  Description of Artificial Sequence: Synthetic oligonucleotide
uccugaguggcucguucga

SEQ ID NO: 2295236 - RNA, 19 nt, Artificial Sequence
  Description of Artificial Sequence: Synthetic oligonucleotide
gggauuucaucacaugauc

SEQ ID NO: 2295237 - RNA, 19 nt, Artificial Sequence
  Description of Artificial Sequence: Synthetic oligonucleotide
uaccuguuguucgucguug

SEQ ID NO: 2295238 - RNA, 19 nt, Artificial Sequence
  Description of Artificial Sequence: Synthetic oligonucleotide
auggcuaucccgccagccu

SEQ ID NO: 2295239 - RNA, 19 nt, Artificial Sequence
  Description of Artificial Sequence: Synthetic oligonucleotide
gacggagcgcugcguaccg

SEQ ID NO: 2295240 - RNA, 19 nt, Artificial Sequence
  Description of Artificial Sequence: Synthetic oligonucleotide
gguuuaaaggcagugaggu

SEQ ID NO: 2295241 - RNA, 19 nt, Artificial Sequence
  Description of Artificial Sequence: Synthetic oligonucleotide
cacucaucgacccacgcaa

SEQ ID NO: 2295242 - RNA, 19 nt, Artificial Sequence
  Description of Artificial Sequence: Synthetic oligonucleotide
uucucguauucccgaacau

SEQ ID NO: 2295243 - RNA, 19 nt, Artificial Sequence
  Description of Artificial Sequence: Synthetic oligonucleotide
ugcugauugcaaacuuuua

SEQ ID NO: 2295244 - RNA, 19 nt, Artificial Sequence
  Description of Artificial Sequence: Synthetic oligonucleotide
ugaguggcucguucgaauu

SEQ ID NO: 2295245 - RNA, 19 nt, Artificial Sequence
  Description of Artificial Sequence: Synthetic oligonucleotide
uuaggauccucagauucuu

SEQ ID NO: 2295246 - RNA, 19 nt, Artificial Sequence
  Description of Artificial Sequence: Synthetic oligonucleotide
ggcucguucgaauucucgc

SEQ ID NO: 2295247 - RNA, 19 nt, Artificial Sequence
  Description of Artificial Sequence: Synthetic oligonucleotide
auucucgcaccucauccau

SEQ ID NO: 2295248 - RNA, 19 nt, Artificial Sequence
  Description of Artificial Sequence: Synthetic oligonucleotide
cauccauugucauaucgua

SEQ ID NO: 2295249 - RNA, 19 nt, Artificial Sequence
  Description of Artificial Sequence: Synthetic oligonucleotide
aggguccacuggcugagag

SEQ ID NO: 2295250 - RNA, 19 nt, Artificial Sequence
  Description of Artificial Sequence: Synthetic oligonucleotide
gagcacucaagaaagggua

SEQ ID NO: 2295251 - RNA, 19 nt, Artificial Sequence
  Description of Artificial Sequence: Synthetic oligonucleotide
ggacggagcggcuggacgg

SEQ ID NO: 2295252 - RNA, 19 nt, Artificial Sequence
  Description of Artificial Sequence: Synthetic oligonucleotide
gcguucagggauuucauca

SEQ ID NO: 2295253 - RNA, 19 nt, Artificial Sequence
  Description of Artificial Sequence: Synthetic oligonucleotide
cacgccuuggucuguuuug

SEQ ID NO: 2295254 - RNA, 19 nt, Artificial Sequence
  Description of Artificial Sequence: Synthetic oligonucleotide
agggauuucaucacaugau

SEQ ID NO: 2295255 - RNA, 19 nt, Artificial Sequence
  Description of Artificial Sequence: Synthetic oligonucleotide
caggaugucucggaccacc

SEQ ID NO: 2295256 - RNA, 19 nt, Artificial Sequence
  Description of Artificial Sequence: Synthetic oligonucleotide
gucugugcccaaucagcag

SEQ ID NO: 2295257 - RNA, 19 nt, Artificial Sequence
  Description of Artificial Sequence: Synthetic oligonucleotide
ucugaaggccccacaccuc

SEQ ID NO: 2295258 - RNA, 19 nt, Artificial Sequence
  Description of Artificial Sequence: Synthetic oligonucleotide
aguggcucguucgaauucu

SEQ ID NO: 2295259 - RNA, 19 nt, Artificial Sequence
  Description of Artificial Sequence: Synthetic oligonucleotide
auugcuccacucgugucug

SEQ ID NO: 2295260 - RNA, 19 nt, Artificial Sequence
  Description of Artificial Sequence: Synthetic oligonucleotide
guugauggcuaucccgcca

SEQ ID NO: 2295261 - RNA, 19 nt, Artificial Sequence
  Description of Artificial Sequence: Synthetic oligonucleotide
ugcaaacuuuuauguuggu

SEQ ID NO: 2295262 - RNA, 19 nt, Artificial Sequence
  Description of Artificial Sequence: Synthetic oligonucleotide
uacgggcaggguccacugg

SEQ ID NO: 2295263 - RNA, 19 nt, Artificial Sequence
  Description of Artificial Sequence: Synthetic oligonucleotide
ggaaggagaauacacgccu

SEQ ID NO: 2295264 - RNA, 19 nt, Artificial Sequence
  Description of Artificial Sequence: Synthetic oligonucleotide
gaggagugcugauugcaaa

SEQ ID NO: 2295265 - RNA, 19 nt, Artificial Sequence
  Description of Artificial Sequence: Synthetic oligonucleotide
gucauguacuggucugcgc

SEQ ID NO: 2295266 - RNA, 19 nt, Artificial Sequence
  Description of Artificial Sequence: Synthetic oligonucleotide
auuuucuuguugguggcuu

SEQ ID NO: 2295267 - RNA, 19 nt, Artificial Sequence
  Description of Artificial Sequence: Synthetic oligonucleotide
gacuugaaguguuuaggau

SEQ ID NO: 2295268 - RNA, 19 nt, Artificial Sequence
  Description of Artificial Sequence: Synthetic oligonucleotide
ggauuucaucacaugauca

SEQ ID NO: 2295269 - RNA, 19 nt, Artificial Sequence
  Description of Artificial Sequence: Synthetic oligonucleotide
ucgaauucucgcaccucau

SEQ ID NO: 2295270 - RNA, 19 nt, Artificial Sequence
  Description of Artificial Sequence: Synthetic oligonucleotide
ggagcggcuggacggagcg

SEQ ID NO: 2295271 - RNA, 19 nt, Artificial Sequence
  Description of Artificial Sequence: Synthetic oligonucleotide
gugcccaaucagcaggaug

SEQ ID NO: 2295272 - RNA, 19 nt, Artificial Sequence
  Description of Artificial Sequence: Synthetic oligonucleotide
cggacauaagcucuggagc

SEQ ID NO: 2295273 - RNA, 19 nt, Artificial Sequence
  Description of Artificial Sequence: Synthetic oligonucleotide
ucguauucccgaacaucau

SEQ ID NO: 2295274 - RNA, 19 nt, Artificial Sequence
  Description of Artificial Sequence: Synthetic oligonucleotide
cauaagcucuggagcuccc

SEQ ID NO: 2295275 - RNA, 19 nt, Artificial Sequence
  Description of Artificial Sequence: Synthetic oligonucleotide
cuuccugaguggcucguuc

SEQ ID NO: 2295276 - RNA, 19 nt, Artificial Sequence
  Description of Artificial Sequence: Synthetic oligonucleotide
uagcguucagggauuucau

SEQ ID NO: 2295277 - RNA, 19 nt, Artificial Sequence
  Description of Artificial Sequence: Synthetic oligonucleotide
cuaugucauccacagugga

SEQ ID NO: 2295278 - RNA, 19 nt, Artificial Sequence
  Description of Artificial Sequence: Synthetic oligonucleotide
accgaggaaggcagcaggg

SEQ ID NO: 2295279 - RNA, 19 nt, Artificial Sequence
  Description of Artificial Sequence: Synthetic oligonucleotide
aauacacgccuuggucugu

SEQ ID NO: 2295280 - RNA, 19 nt, Artificial Sequence
  Description of Artificial Sequence: Synthetic oligonucleotide
cuuuccugagguuggaggu

SEQ ID NO: 2295281 - RNA, 19 nt, Artificial Sequence
  Description of Artificial Sequence: Synthetic oligonucleotide
agcagggcgaugccggaga

SEQ ID NO: 2295282 - RNA, 19 nt, Artificial Sequence
  Description of Artificial Sequence: Synthetic oligonucleotide
ggucaaggacccgagagac

SEQ ID NO: 2295283 - RNA, 19 nt, Artificial Sequence
  Description of Artificial Sequence: Synthetic oligonucleotide
ucgaaauggcggugggaaa

SEQ ID NO: 2295284 - RNA, 19 nt, Artificial Sequence
  Description of Artificial Sequence: Synthetic oligonucleotide
ggucagucaggaaggacag

SEQ ID NO: 2295285 - RNA, 19 nt, Artificial Sequence
  Description of Artificial Sequence: Synthetic oligonucleotide
ucucagacuugaaguguuu

SEQ ID NO: 2295286 - RNA, 19 nt, Artificial Sequence
  Description of Artificial Sequence: Synthetic oligonucleotide
caccucauccauugucaug

SEQ ID NO: 2295287 - RNA, 19 nt, Artificial Sequence
  Description of Artificial Sequence: Synthetic oligonucleotide
ugauggcuaucccgccagc

SEQ ID NO: 2295288 - RNA, 19 nt, Artificial Sequence
  Description of Artificial Sequence: Synthetic oligonucleotide
uuuccugagguuggagguc

SEQ ID NO: 2295289 - RNA, 19 nt, Artificial Sequence
  Description of Artificial Sequence: Synthetic oligonucleotide
uggcuaucccgccagccuu

SEQ ID NO: 2295290 - RNA, 19 nt, Artificial Sequence
  Description of Artificial Sequence: Synthetic oligonucleotide
gcacucaagaaaggguacg

SEQ ID NO: 2295291 - RNA, 19 nt, Artificial Sequence
  Description of Artificial Sequence: Synthetic oligonucleotide
acaccucgaacuugacggu

SEQ ID NO: 2295292 - RNA, 19 nt, Artificial Sequence
  Description of Artificial Sequence: Synthetic oligonucleotide
caugauggguugauggcua

SEQ ID NO: 2295293 - RNA, 19 nt, Artificial Sequence
  Description of Artificial Sequence: Synthetic oligonucleotide
ggacauaagcucuggagcu

SEQ ID NO: 2295294 - RNA, 19 nt, Artificial Sequence
  Description of Artificial Sequence: Synthetic oligonucleotide
accuguuguucgucguuga

SEQ ID NO: 2295295 - RNA, 19 nt, Artificial Sequence
  Description of Artificial Sequence: Synthetic oligonucleotide
uccuuuccugagguuggag

SEQ ID NO: 2295296 - RNA, 19 nt, Artificial Sequence
  Description of Artificial Sequence: Synthetic oligonucleotide
cuguuguucgucguugaca

SEQ ID NO: 2295297 - RNA, 19 nt, Artificial Sequence
  Description of Artificial Sequence: Synthetic oligonucleotide
cauuggggauaguggagca

SEQ ID NO: 2295298 - RNA, 19 nt, Artificial Sequence
  Description of Artificial Sequence: Synthetic oligonucleotide
uggggauaguggagcacuc

SEQ ID NO: 2295299 - RNA, 19 nt, Artificial Sequence
  Description of Artificial Sequence: Synthetic oligonucleotide
guggguuuaaaggcaguga

SEQ ID NO: 2295300 - RNA, 19 nt, Artificial Sequence
  Description of Artificial Sequence: Synthetic oligonucleotide
agcacaugauggguugaug

SEQ ID NO: 2295301 - RNA, 19 nt, Artificial Sequence
  Description of Artificial Sequence: Synthetic oligonucleotide
acgaauugcuccacucgug

SEQ ID NO: 2295302 - RNA, 19 nt, Artificial Sequence
  Description of Artificial Sequence: Synthetic oligonucleotide
gacggacauaagcucugga

SEQ ID NO: 2295303 - RNA, 19 nt, Artificial Sequence
  Description of Artificial Sequence: Synthetic oligonucleotide
ugugcacgaauugcuccac

SEQ ID NO: 2295304 - RNA, 19 nt, Artificial Sequence
  Description of Artificial Sequence: Synthetic oligonucleotide
gggaaggagaauacacgcc

SEQ ID NO: 2295305 - RNA, 19 nt, Artificial Sequence
  Description of Artificial Sequence: Synthetic oligonucleotide
ugaaggccccacaccucga

SEQ ID NO: 2295306 - RNA, 19 nt, Artificial Sequence
  Description of Artificial Sequence: Synthetic oligonucleotide
uggacggagcgcugcguac

SEQ ID NO: 2295307 - RNA, 19 nt, Artificial Sequence
  Description of Artificial Sequence: Synthetic oligonucleotide
uuggucuguuuuguuuccu

SEQ ID NO: 2295308 - RNA, 19 nt, Artificial Sequence
  Description of Artificial Sequence: Synthetic oligonucleotide
guacgggcaggguccacug

SEQ ID NO: 2295309 - RNA, 19 nt, Artificial Sequence
  Description of Artificial Sequence: Synthetic oligonucleotide
cauugucauguacuggucu

SEQ ID NO: 2295310 - RNA, 19 nt, Artificial Sequence
  Description of Artificial Sequence: Synthetic oligonucleotide
cagccuucucuuagcugcc

SEQ ID NO: 2295311 - RNA, 19 nt, Artificial Sequence
  Description of Artificial Sequence: Synthetic oligonucleotide
aggacagcuaggacggaca

SEQ ID NO: 2295312 - RNA, 19 nt, Artificial Sequence
  Description of Artificial Sequence: Synthetic oligonucleotide
gguugauggcuaucccgcc

SEQ ID NO: 2295313 - RNA, 19 nt, Artificial Sequence
  Description of Artificial Sequence: Synthetic oligonucleotide
uggcccucuaugucaucca

SEQ ID NO: 2295314 - RNA, 19 nt, Artificial Sequence
  Description of Artificial Sequence: Synthetic oligonucleotide
ggguccacuggcugagagg

SEQ ID NO: 2295315 - RNA, 19 nt, Artificial Sequence
  Description of Artificial Sequence: Synthetic oligonucleotide
uccugagguuggaggucag

SEQ ID NO: 2295316 - RNA, 19 nt, Artificial Sequence
  Description of Artificial Sequence: Synthetic oligonucleotide
gucauaucguaccacucau

SEQ ID NO: 2295317 - RNA, 19 nt, Artificial Sequence
  Description of Artificial Sequence: Synthetic oligonucleotide
gcugauugcaaacuuuuau

SEQ ID NO: 2295318 - RNA, 19 nt, Artificial Sequence
  Description of Artificial Sequence: Synthetic oligonucleotide
guaccgaggaaggcagcag

SEQ ID NO: 2295319 - RNA, 19 nt, Artificial Sequence
  Description of Artificial Sequence: Synthetic oligonucleotide
gcucguucgaauucucgca

SEQ ID NO: 2295320 - RNA, 19 nt, Artificial Sequence
  Description of Artificial Sequence: Synthetic oligonucleotide
gaggucagucaggaaggac

SEQ ID NO: 2295321 - RNA, 19 nt, Artificial Sequence
  Description of Artificial Sequence: Synthetic oligonucleotide
gaucgaaauggcgguggga

SEQ ID NO: 2295322 - RNA, 19 nt, Artificial Sequence
  Description of Artificial Sequence: Synthetic oligonucleotide
cgaacaucauccauuguca

SEQ ID NO: 2295323 - RNA, 19 nt, Artificial Sequence
  Description of Artificial Sequence: Synthetic oligonucleotide
guucgucguugacauucug

SEQ ID NO: 2295324 - RNA, 19 nt, Artificial Sequence
  Description of Artificial Sequence: Synthetic oligonucleotide
aggcagugaggugcaacag

SEQ ID NO: 2295325 - RNA, 19 nt, Artificial Sequence
  Description of Artificial Sequence: Synthetic oligonucleotide
gcuaggacggacauaagcu

SEQ ID NO: 2295326 - RNA, 19 nt, Artificial Sequence
  Description of Artificial Sequence: Synthetic oligonucleotide
auguacuggucugcgcaug

SEQ ID NO: 2295327 - RNA, 19 nt, Artificial Sequence
  Description of Artificial Sequence: Synthetic oligonucleotide
uaggauccucagauucuuu

SEQ ID NO: 2295328 - RNA, 19 nt, Artificial Sequence
  Description of Artificial Sequence: Synthetic oligonucleotide
accucgaacuugacgguca

SEQ ID NO: 2295329 - RNA, 19 nt, Artificial Sequence
  Description of Artificial Sequence: Synthetic oligonucleotide
gugacagacuucucuuucu

SEQ ID NO: 2295330 - RNA, 19 nt, Artificial Sequence
  Description of Artificial Sequence: Synthetic oligonucleotide
gccgauuuucuuguuggug

SEQ ID NO: 2295331 - RNA, 19 nt, Artificial Sequence
  Description of Artificial Sequence: Synthetic oligonucleotide
acacgccuuggucuguuuu

SEQ ID NO: 2295332 - RNA, 19 nt, Artificial Sequence
  Description of Artificial Sequence: Synthetic oligonucleotide
cacgaauugcuccacucgu

SEQ ID NO: 2295333 - RNA, 19 nt, Artificial Sequence
  Description of Artificial Sequence: Synthetic oligonucleotide
gggauaguggagcacucaa

SEQ ID NO: 2295334 - RNA, 19 nt, Artificial Sequence
  Description of Artificial Sequence: Synthetic oligonucleotide
caucauccauugucauauc

SEQ ID NO: 2295335 - RNA, 19 nt, Artificial Sequence
  Description of Artificial Sequence: Synthetic oligonucleotide
uucucgcaccucauccauu

SEQ ID NO: 2295336 - RNA, 19 nt, Artificial Sequence
  Description of Artificial Sequence: Synthetic oligonucleotide
ggagaggucaaggacccga

SEQ ID NO: 2295337 - RNA, 19 nt, Artificial Sequence
  Description of Artificial Sequence: Synthetic oligonucleotide
ugcuccacucgugucugaa

SEQ ID NO: 2295338 - RNA, 19 nt, Artificial Sequence
  Description of Artificial Sequence: Synthetic oligonucleotide
aaacgccgauuuucuuguu

SEQ ID NO: 2295339 - RNA, 19 nt, Artificial Sequence
  Description of Artificial Sequence: Synthetic oligonucleotide
ucugcgcauggcccucuau

SEQ ID NO: 2295340 - RNA, 19 nt, Artificial Sequence
  Description of Artificial Sequence: Synthetic oligonucleotide
ccuugugcacgaauugcuc

SEQ ID NO: 2295341 - RNA, 19 nt, Artificial Sequence
  Description of Artificial Sequence: Synthetic oligonucleotide
augucucggaccaccuugu

SEQ ID NO: 2295342 - RNA, 19 nt, Artificial Sequence
  Description of Artificial Sequence: Synthetic oligonucleotide
gccggagaucgaaauggcg

SEQ ID NO: 2295343 - RNA, 19 nt, Artificial Sequence
  Description of Artificial Sequence: Synthetic oligonucleotide
uggagcuccccggcuaccu

SEQ ID NO: 2295344 - RNA, 19 nt, Artificial Sequence
  Description of Artificial Sequence: Synthetic oligonucleotide
acgccuuggucuguuuugu

SEQ ID NO: 2295345 - RNA, 19 nt, Artificial Sequence
  Description of Artificial Sequence: Synthetic oligonucleotide
cugcguaccgaggaaggca

SEQ ID NO: 2295346 - RNA, 19 nt, Artificial Sequence
  Description of Artificial Sequence: Synthetic oligonucleotide
ccacgcaaaggccugucug

SEQ ID NO: 2295347 - RNA, 19 nt, Artificial Sequence
  Description of Artificial Sequence: Synthetic oligonucleotide
guaggagcacaugaugggu

SEQ ID NO: 2295348 - RNA, 19 nt, Artificial Sequence
  Description of Artificial Sequence: Synthetic oligonucleotide
cagugaggugcaacaguga

SEQ ID NO: 2295349 - RNA, 19 nt, Artificial Sequence
  Description of Artificial Sequence: Synthetic oligonucleotide
caacagugacagacuucuc

SEQ ID NO: 2295350 - RNA, 19 nt, Artificial Sequence
  Description of Artificial Sequence: Synthetic oligonucleotide
cacgcaaaggccugucugu

SEQ ID NO: 2295351 - RNA, 19 nt, Artificial Sequence
  Description of Artificial Sequence: Synthetic oligonucleotide
ccaccuugugcacgaauug

SEQ ID NO: 2295352 - RNA, 19 nt, Artificial Sequence
  Description of Artificial Sequence: Synthetic oligonucleotide
ccacucgugucugaaggcc

SEQ ID NO: 2295353 - RNA, 19 nt, Artificial Sequence
  Description of Artificial Sequence: Synthetic oligonucleotide
ggagaucgaaauggcggug

SEQ ID NO: 2295354 - RNA, 19 nt, Artificial Sequence
  Description of Artificial Sequence: Synthetic oligonucleotide
guucgaauucucgcaccuc

SEQ ID NO: 2295355 - RNA, 19 nt, Artificial Sequence
  Description of Artificial Sequence: Synthetic oligonucleotide
guacuggucugcgcauggc

SEQ ID NO: 2295356 - RNA, 19 nt, Artificial Sequence
  Description of Artificial Sequence: Synthetic oligonucleotide
ggacggacauaagcucugg

SEQ ID NO: 2295357 - RNA, 19 nt, Artificial Sequence
  Description of Artificial Sequence: Synthetic oligonucleotide
cguauucccgaacaucauc

SEQ ID NO: 2295358 - RNA, 19 nt, Artificial Sequence
  Description of Artificial Sequence: Synthetic oligonucleotide
gcuccacucgugucugaag

SEQ ID NO: 2295359 - RNA, 19 nt, Artificial Sequence
  Description of Artificial Sequence: Synthetic oligonucleotide
caccucgaacuugacgguc

SEQ ID NO: 2295360 - RNA, 19 nt, Artificial Sequence
  Description of Artificial Sequence: Synthetic oligonucleotide
acccacgcaaaggccuguc

SEQ ID NO: 2295361 - RNA, 19 nt, Artificial Sequence
  Description of Artificial Sequence: Synthetic oligonucleotide
gucagucaggaaggacagc

SEQ ID NO: 2295362 - RNA, 19 nt, Artificial Sequence
  Description of Artificial Sequence: Synthetic oligonucleotide
ccauugucauguacugguc

SEQ ID NO: 2295363 - RNA, 19 nt, Artificial Sequence
  Description of Artificial Sequence: Synthetic oligonucleotide
aggaugucucggaccaccu

SEQ ID NO: 2295364 - RNA, 19 nt, Artificial Sequence
  Description of Artificial Sequence: Synthetic oligonucleotide
ucgugucugaaggccccac

SEQ ID NO: 2295365 - RNA, 19 nt, Artificial Sequence
  Description of Artificial Sequence: Synthetic oligonucleotide
aggaaggcagcagggcgau

SEQ ID NO: 2295366 - RNA, 19 nt, Artificial Sequence
  Description of Artificial Sequence: Synthetic oligonucleotide
guuggaggucagucaggaa

SEQ ID NO: 2295367 - RNA, 19 nt, Artificial Sequence
  Description of Artificial Sequence: Synthetic oligonucleotide
cccgccagccuucucuuag

SEQ ID NO: 2295368 - RNA, 19 nt, Artificial Sequence
  Description of Artificial Sequence: Synthetic oligonucleotide
uccccggcuaccuguuguu

SEQ ID NO: 2295369 - RNA, 19 nt, Artificial Sequence
  Description of Artificial Sequence: Synthetic oligonucleotide
ggacggagcgcugcguacc

SEQ ID NO: 2295370 - RNA, 19 nt, Artificial Sequence
  Description of Artificial Sequence: Synthetic oligonucleotide
cgagagacauuggggauag

SEQ ID NO: 2295371 - RNA, 19 nt, Artificial Sequence
  Description of Artificial Sequence: Synthetic oligonucleotide
uaaaggcagugaggugcaa

SEQ ID NO: 2295372 - RNA, 19 nt, Artificial Sequence
  Description of Artificial Sequence: Synthetic oligonucleotide
aucccgccagccuucucuu

SEQ ID NO: 2295373 - RNA, 19 nt, Artificial Sequence
  Description of Artificial Sequence: Synthetic oligonucleotide
ccuguuguucgucguugac

SEQ ID NO: 2295374 - RNA, 19 nt, Artificial Sequence
  Description of Artificial Sequence: Synthetic oligonucleotide
gggaaaacgccgauuuucu

SEQ ID NO: 2295375 - RNA, 19 nt, Artificial Sequence
  Description of Artificial Sequence: Synthetic oligonucleotide
ugugcccaaucagcaggau

SEQ ID NO: 2295376 - RNA, 19 nt, Artificial Sequence
  Description of Artificial Sequence: Synthetic oligonucleotide
gaaggagaauacacgccuu

SEQ ID NO: 2295377 - RNA, 19 nt, Artificial Sequence
  Description of Artificial Sequence: Synthetic oligonucleotide
gugcaacagugacagacuu

SEQ ID NO: 2295378 - RNA, 19 nt, Artificial Sequence
  Description of Artificial Sequence: Synthetic oligonucleotide
gucaaggacccgagagaca

SEQ ID NO: 2295379 - RNA, 19 nt, Artificial Sequence
  Description of Artificial Sequence: Synthetic oligonucleotide
uaguagcguucagggauuu

SEQ ID NO: 2295380 - RNA, 19 nt, Artificial Sequence
  Description of Artificial Sequence: Synthetic oligonucleotide
cgcugcguaccgaggaagg

SEQ ID NO: 2295381 - RNA, 19 nt, Artificial Sequence
  Description of Artificial Sequence: Synthetic oligonucleotide
gacggagcggcuggacgga

SEQ ID NO: 2295382 - RNA, 19 nt, Artificial Sequence
  Description of Artificial Sequence: Synthetic oligonucleotide
uacacgccuuggucuguuu

SEQ ID NO: 2295383 - RNA, 19 nt, Artificial Sequence
  Description of Artificial Sequence: Synthetic oligonucleotide
cugaguggcucguucgaau

SEQ ID NO: 2295384 - RNA, 19 nt, Artificial Sequence
  Description of Artificial Sequence: Synthetic oligonucleotide
ccggccugucuucucagac

SEQ ID NO: 2295385 - RNA, 19 nt, Artificial Sequence
  Description of Artificial Sequence: Synthetic oligonucleotide
cacuagcuuguaggagcac

SEQ ID NO: 2295386 - RNA, 19 nt, Artificial Sequence
  Description of Artificial Sequence: Synthetic oligonucleotide
cauggcccucuaugucauc

SEQ ID NO: 2295387 - RNA, 19 nt, Artificial Sequence
  Description of Artificial Sequence: Synthetic oligonucleotide
cgcaccucauccauuguca

SEQ ID NO: 2295388 - RNA, 19 nt, Artificial Sequence
  Description of Artificial Sequence: Synthetic oligonucleotide
auacacgccuuggucuguu

SEQ ID NO: 2295389 - RNA, 19 nt, Artificial Sequence
  Description of Artificial Sequence: Synthetic oligonucleotide
ggugcaacagugacagacu

SEQ ID NO: 2295390 - RNA, 19 nt, Artificial Sequence
  Description of Artificial Sequence: Synthetic oligonucleotide
cuggacggagcgcugcgua

SEQ ID NO: 2295391 - RNA, 19 nt, Artificial Sequence
  Description of Artificial Sequence: Synthetic oligonucleotide
ggaggagugcugauugcaa

SEQ ID NO: 2295392 - RNA, 19 nt, Artificial Sequence
  Description of Artificial Sequence: Synthetic oligonucleotide
cagcagggcgaugccggag

SEQ ID NO: 2295393 - RNA, 19 nt, Artificial Sequence
  Description of Artificial Sequence: Synthetic oligonucleotide
gggaucuggguugggguga

SEQ ID NO: 2295394 - RNA, 19 nt, Artificial Sequence
  Description of Artificial Sequence: Synthetic oligonucleotide
gaggugcaacagugacaga

SEQ ID NO: 2295395 - RNA, 19 nt, Artificial Sequence
  Description of Artificial Sequence: Synthetic oligonucleotide
acucaucgacccacgcaaa

SEQ ID NO: 2295396 - RNA, 19 nt, Artificial Sequence
  Description of Artificial Sequence: Synthetic oligonucleotide
cgcaaaggccugucugugc

SEQ ID NO: 2295397 - RNA, 19 nt, Artificial Sequence
  Description of Artificial Sequence: Synthetic oligonucleotide
ggagagggguggacggagc

SEQ ID NO: 2295398 - RNA, 19 nt, Artificial Sequence
  Description of Artificial Sequence: Synthetic oligonucleotide
gggccagggaaggagaaua

SEQ ID NO: 2295399 - RNA, 19 nt, Artificial Sequence
  Description of Artificial Sequence: Synthetic oligonucleotide
gaaggacagcuaggacgga

SEQ ID NO: 2295400 - RNA, 19 nt, Artificial Sequence
  Description of Artificial Sequence: Synthetic oligonucleotide
ugacggucacuagcuugua

SEQ ID NO: 2295401 - RNA, 19 nt, Artificial Sequence
  Description of Artificial Sequence: Synthetic oligonucleotide
ggcgaugccggagaucgaa

SEQ ID NO: 2295402 - RNA, 19 nt, Artificial Sequence
  Description of Artificial Sequence: Synthetic oligonucleotide
ggcggugggaaaacgccga

SEQ ID NO: 2295403 - RNA, 19 nt, Artificial Sequence
  Description of Artificial Sequence: Synthetic oligonucleotide
ggccagggaaggagaauac

SEQ ID NO: 2295404 - RNA, 19 nt, Artificial Sequence
  Description of Artificial Sequence: Synthetic oligonucleotide
ccgaggaaggcagcagggc

SEQ ID NO: 2295405 - RNA, 19 nt, Artificial Sequence
  Description of Artificial Sequence: Synthetic oligonucleotide
ccacucaucgacccacgca

SEQ ID NO: 2295406 - RNA, 19 nt, Artificial Sequence
  Description of Artificial Sequence: Synthetic oligonucleotide
ggggauaguggagcacuca

SEQ ID NO: 2295407 - RNA, 19 nt, Artificial Sequence
  Description of Artificial Sequence: Synthetic oligonucleotide
guaguagcguucagggauu

SEQ ID NO: 2295408 - RNA, 19 nt, Artificial Sequence
  Description of Artificial Sequence: Synthetic oligonucleotide
acggagcggcuggacggag

SEQ ID NO: 2295409 - RNA, 19 nt, Artificial Sequence
  Description of Artificial Sequence: Synthetic oligonucleotide
gcuaccuguuguucgucgu

SEQ ID NO: 2295410 - RNA, 19 nt, Artificial Sequence
  Description of Artificial Sequence: Synthetic oligonucleotide
gcgcugcguaccgaggaag

SEQ ID NO: 2295411 - RNA, 19 nt, Artificial Sequence
  Description of Artificial Sequence: Synthetic oligonucleotide
guggacggagcggcuggac

SEQ ID NO: 2295412 - RNA, 19 nt, Artificial Sequence
  Description of Artificial Sequence: Synthetic oligonucleotide
aggguacgggcagggucca

SEQ ID NO: 2295413 - RNA, 19 nt, Artificial Sequence
  Description of Artificial Sequence: Synthetic oligonucleotide
cggagcgcugcguaccgag

SEQ ID NO: 2295414 - RNA, 19 nt, Artificial Sequence
  Description of Artificial Sequence: Synthetic oligonucleotide
ggccugucugugcccaauc

SEQ ID NO: 2295415 - RNA, 19 nt, Artificial Sequence
  Description of Artificial Sequence: Synthetic oligonucleotide
cuaucccgccagccuucuc

SEQ ID NO: 2295416 - RNA, 19 nt, Artificial Sequence
  Description of Artificial Sequence: Synthetic oligonucleotide
ucccgccagccuucucuua

SEQ ID NO: 2295417 - RNA, 19 nt, Artificial Sequence
  Description of Artificial Sequence: Synthetic oligonucleotide
ccgccagccuucucuuagc

SEQ ID NO: 2295418 - RNA, 19 nt, Artificial Sequence
  Description of Artificial Sequence: Synthetic oligonucleotide
cuaccuguuguucgucguu

SEQ ID NO: 2295419 - RNA, 19 nt, Artificial Sequence
  Description of Artificial Sequence: Synthetic oligonucleotide
gggagaggucaaggacccg

SEQ ID NO: 2295420 - RNA, 19 nt, Artificial Sequence
  Description of Artificial Sequence: Synthetic oligonucleotide
cuccccggcuaccuguugu

SEQ ID NO: 2295421 - RNA, 19 nt, Artificial Sequence
  Description of Artificial Sequence: Synthetic oligonucleotide
cgaaauggcggugggaaaa

SEQ ID NO: 2295422 - RNA, 19 nt, Artificial Sequence
  Description of Artificial Sequence: Synthetic oligonucleotide
ggaaaacgccgauuuucuu

SEQ ID NO: 2295423 - RNA, 19 nt, Artificial Sequence
  Description of Artificial Sequence: Synthetic oligonucleotide
cagggcgaugccggagauc

SEQ ID NO: 2295424 - RNA, 19 nt, Artificial Sequence
  Description of Artificial Sequence: Synthetic oligonucleotide
cucgugucugaaggcccca

SEQ ID NO: 2295425 - RNA, 19 nt, Artificial Sequence
  Description of Artificial Sequence: Synthetic oligonucleotide
gcccucuaugucauccaca

SEQ ID NO: 2295426 - RNA, 19 nt, Artificial Sequence
  Description of Artificial Sequence: Synthetic oligonucleotide
gguacgggcaggguccacu

SEQ ID NO: 2295427 - RNA, 19 nt, Artificial Sequence
  Description of Artificial Sequence: Synthetic oligonucleotide
ggcuaucccgccagccuuc

SEQ ID NO: 2295428 - RNA, 19 nt, Artificial Sequence
  Description of Artificial Sequence: Synthetic oligonucleotide
cgacccacgcaaaggccug

SEQ ID NO: 2295429 - RNA, 19 nt, Artificial Sequence
  Description of Artificial Sequence: Synthetic oligonucleotide
gccccacaccucgaacuug

SEQ ID NO: 2295430 - RNA, 19 nt, Artificial Sequence
  Description of Artificial Sequence: Synthetic oligonucleotide
guuguucgucguugacauu

SEQ ID NO: 2295431 - RNA, 19 nt, Artificial Sequence
  Description of Artificial Sequence: Synthetic oligonucleotide
cguaccgaggaaggcagca

SEQ ID NO: 2295432 - RNA, 19 nt, Artificial Sequence
  Description of Artificial Sequence: Synthetic oligonucleotide
cguaccacucaucgaccca

SEQ ID NO: 2295433 - RNA, 19 nt, Artificial Sequence
  Description of Artificial Sequence: Synthetic oligonucleotide
cggaccaccuugugcacga

SEQ ID NO: 2295434 - RNA, 19 nt, Artificial Sequence
  Description of Artificial Sequence: Synthetic oligonucleotide
gcaccucauccauugucau

SEQ ID NO: 2295435 - RNA, 19 nt, Artificial Sequence
  Description of Artificial Sequence: Synthetic oligonucleotide
cggagaucgaaauggcggu

SEQ ID NO: 2295436 - RNA, 19 nt, Artificial Sequence
  Description of Artificial Sequence: Synthetic oligonucleotide
ccgagagacauuggggaua

SEQ ID NO: 2295437 - RNA, 19 nt, Artificial Sequence
  Description of Artificial Sequence: Synthetic oligonucleotide
gacccacgcaaaggccugu

SEQ ID NO: 2295438 - RNA, 19 nt, Artificial Sequence
  Description of Artificial Sequence: Synthetic oligonucleotide
cguucgaauucucgcaccu

SEQ ID NO: 2295439 - RNA, 19 nt, Artificial Sequence
  Description of Artificial Sequence: Synthetic oligonucleotide
cucgcaccucauccauugu

SEQ ID NO: 2295440 - RNA, 19 nt, Artificial Sequence
  Description of Artificial Sequence: Synthetic oligonucleotide
cucgaacuugacggucacu

SEQ ID NO: 2295441 - RNA, 19 nt, Artificial Sequence
  Description of Artificial Sequence: Synthetic oligonucleotide
gcguaccgaggaaggcagc

SEQ ID NO: 2295442 - RNA, 19 nt, Artificial Sequence
  Description of Artificial Sequence: Synthetic oligonucleotide
cggagcggcuggacggagc

SEQ ID NO: 2295443 - RNA, 19 nt, Artificial Sequence
  Description of Artificial Sequence: Synthetic oligonucleotide
gguggacggagcggcugga

SEQ ID NO: 2295444 - RNA, 19 nt, Artificial Sequence
  Description of Artificial Sequence: Synthetic oligonucleotide
gucugcgcauggcccucua

SEQ ID NO: 2295445 - RNA, 19 nt, Artificial Sequence
  Description of Artificial Sequence: Synthetic oligonucleotide
caguggaggagugcugauu

SEQ ID NO: 2295446 - RNA, 19 nt, Artificial Sequence
  Description of Artificial Sequence: Synthetic oligonucleotide
ccugaguggcucguucgaa

SEQ ID NO: 2295447 - RNA, 19 nt, Artificial Sequence
  Description of Artificial Sequence: Synthetic oligonucleotide
gcgaugccggagaucgaaa

SEQ ID NO: 2295448 - RNA, 19 nt, Artificial Sequence
  Description of Artificial Sequence: Synthetic oligonucleotide
ggccccacaccucgaacuu

SEQ ID NO: 2295449 - RNA, 19 nt, Artificial Sequence
  Description of Artificial Sequence: Synthetic oligonucleotide
ccggcuaccuguuguucgu

SEQ ID NO: 2295450 - RNA, 19 nt, Artificial Sequence
  Description of Artificial Sequence: Synthetic oligonucleotide
gcucuggagcuccccggcu

SEQ ID NO: 2295451 - RNA, 19 nt, Artificial Sequence
  Description of Artificial Sequence: Synthetic oligonucleotide
cccgagagacauuggggau

SEQ ID NO: 2295452 - RNA, 19 nt, Artificial Sequence
  Description of Artificial Sequence: Synthetic oligonucleotide
gagagacauuggggauagu

SEQ ID NO: 2295453 - RNA, 19 nt, Artificial Sequence
  Description of Artificial Sequence: Synthetic oligonucleotide
gcauggcccucuaugucau

SEQ ID NO: 2295454 - RNA, 19 nt, Artificial Sequence
  Description of Artificial Sequence: Synthetic oligonucleotide
ccccggcuaccuguuguuc

SEQ ID NO: 2295455 - RNA, 19 nt, Artificial Sequence
  Description of Artificial Sequence: Synthetic oligonucleotide
cgaugccggagaucgaaau

SEQ ID NO: 2295456 - RNA, 19 nt, Artificial Sequence
  Description of Artificial Sequence: Synthetic oligonucleotide
cggcuggacggagcgcugc

SEQ ID NO: 2295457 - RNA, 19 nt, Artificial Sequence
  Description of Artificial Sequence: Synthetic oligonucleotide
ccucuaugucauccacagu

SEQ ID NO: 2295458 - RNA, 19 nt, Artificial Sequence
  Description of Artificial Sequence: Synthetic oligonucleotide
gcggugggaaaacgccgau

SEQ ID NO: 2295459 - RNA, 19 nt, Artificial Sequence
  Description of Artificial Sequence: Synthetic oligonucleotide
gcuaucccgccagccuucu

SEQ ID NO: 2295460 - RNA, 19 nt, Artificial Sequence
  Description of Artificial Sequence: Synthetic oligonucleotide
gcagggcgaugccggagau

SEQ ID NO: 2295461 - RNA, 19 nt, Artificial Sequence
  Description of Artificial Sequence: Synthetic oligonucleotide
cccacgcaaaggccugucu

SEQ ID NO: 2295462 - RNA, 19 nt, Artificial Sequence
  Description of Artificial Sequence: Synthetic oligonucleotide
ggguacgggcaggguccac

SEQ ID NO: 2295463 - RNA, 19 nt, Artificial Sequence
  Description of Artificial Sequence: Synthetic oligonucleotide
ggucugcgcauggcccucu

SEQ ID NO: 2295464 - RNA, 19 nt, Artificial Sequence
  Description of Artificial Sequence: Synthetic oligonucleotide
cccgaacaucauccauugu

SEQ ID NO: 2295465 - RNA, 19 nt, Artificial Sequence
  Description of Artificial Sequence: Synthetic oligonucleotide
cggcuaccuguuguucguc

SEQ ID NO: 2295466 - RNA, 19 nt, Artificial Sequence
  Description of Artificial Sequence: Synthetic oligonucleotide
gggcgaugccggagaucga

SEQ ID NO: 2295467 - RNA, 19 nt, Artificial Sequence
  Description of Artificial Sequence: Synthetic oligonucleotide
cgccgauuuucuuguuggu

SEQ ID NO: 2295468 - RNA, 19 nt, Artificial Sequence
  Description of Artificial Sequence: Synthetic oligonucleotide
cgucguugacauucugcuu

SEQ ID NO: 2295469 - RNA, 19 nt, Artificial Sequence
  Description of Artificial Sequence: Synthetic oligonucleotide
cggugggaaaacgccgauu

SEQ ID NO: 2295470 - RNA, 19 nt, Artificial Sequence
  Description of Artificial Sequence: Synthetic oligonucleotide
aacagugauuucuagaagg

SEQ ID NO: 2295471 - RNA, 19 nt, Artificial Sequence
  Description of Artificial Sequence: Synthetic oligonucleotide
uuucuagaaggcaagaacg

SEQ ID NO: 2295472 - RNA, 19 nt, Artificial Sequence
  Description of Artificial Sequence: Synthetic oligonucleotide
gaaaauagggaagugaggg

SEQ ID NO: 2295473 - RNA, 19 nt, Artificial Sequence
  Description of Artificial Sequence: Synthetic oligonucleotide
uauuaaaugaaauucugga

SEQ ID NO: 2295474 - RNA, 19 nt, Artificial Sequence
  Description of Artificial Sequence: Synthetic oligonucleotide
aguaaagucacuccugagc

SEQ ID NO: 2295475 - RNA, 19 nt, Artificial Sequence
  Description of Artificial Sequence: Synthetic oligonucleotide
aagggacucaaauacaagg

SEQ ID NO: 2295476 - RNA, 19 nt, Artificial Sequence
  Description of Artificial Sequence: Synthetic oligonucleotide
aaauucuugaagauaacac

SEQ ID NO: 2295477 - RNA, 19 nt, Artificial Sequence
  Description of Artificial Sequence: Synthetic oligonucleotide
agacaaaugcuuuugugcc

SEQ ID NO: 2295478 - RNA, 19 nt, Artificial Sequence
  Description of Artificial Sequence: Synthetic oligonucleotide
aauucuugaagauaacacu

SEQ ID NO: 2295479 - RNA, 19 nt, Artificial Sequence
  Description of Artificial Sequence: Synthetic oligonucleotide
agcuguucuagacaaaugc

SEQ ID NO: 2295480 - RNA, 19 nt, Artificial Sequence
  Description of Artificial Sequence: Synthetic oligonucleotide
auuucuagaaggcaagaac

SEQ ID NO: 2295481 - RNA, 19 nt, Artificial Sequence
  Description of Artificial Sequence: Synthetic oligonucleotide
aacaauacacauuuuacau

SEQ ID NO: 2295482 - RNA, 19 nt, Artificial Sequence
  Description of Artificial Sequence: Synthetic oligonucleotide
cuuccuaccacuuacuagg

SEQ ID NO: 2295483 - RNA, 19 nt, Artificial Sequence
  Description of Artificial Sequence: Synthetic oligonucleotide
aaugaaauucuggacacuc

SEQ ID NO: 2295484 - RNA, 19 nt, Artificial Sequence
  Description of Artificial Sequence: Synthetic oligonucleotide
acaaaugauuuacauaguc

SEQ ID NO: 2295485 - RNA, 19 nt, Artificial Sequence
  Description of Artificial Sequence: Synthetic oligonucleotide
ucuuuaucaaaacuguaac

SEQ ID NO: 2295486 - RNA, 19 nt, Artificial Sequence
  Description of Artificial Sequence: Synthetic oligonucleotide
acuaccuuuucucuucucc

SEQ ID NO: 2295487 - RNA, 19 nt, Artificial Sequence
  Description of Artificial Sequence: Synthetic oligonucleotide
aaugagaucacacguggcu

SEQ ID NO: 2295488 - RNA, 19 nt, Artificial Sequence
  Description of Artificial Sequence: Synthetic oligonucleotide
acauuuaauaaccacacau

SEQ ID NO: 2295489 - RNA, 19 nt, Artificial Sequence
  Description of Artificial Sequence: Synthetic oligonucleotide
uucccaaauauguacagag

SEQ ID NO: 2295490 - RNA, 19 nt, Artificial Sequence
  Description of Artificial Sequence: Synthetic oligonucleotide
aaauuuugcuucaaugcac

SEQ ID NO: 2295491 - RNA, 19 nt, Artificial Sequence
  Description of Artificial Sequence: Synthetic oligonucleotide
augacuuauccuuagccac

SEQ ID NO: 2295492 - RNA, 19 nt, Artificial Sequence
  Description of Artificial Sequence: Synthetic oligonucleotide
guaggauuggcacugagag

SEQ ID NO: 2295493 - RNA, 19 nt, Artificial Sequence
  Description of Artificial Sequence: Synthetic oligonucleotide
aaauagggaagugagggag

SEQ ID NO: 2295494 - RNA, 19 nt, Artificial Sequence
  Description of Artificial Sequence: Synthetic oligonucleotide
ugaacagugauuucuagaa

SEQ ID NO: 2295495 - RNA, 19 nt, Artificial Sequence
  Description of Artificial Sequence: Synthetic oligonucleotide
uauucuacgcacaacaaua

SEQ ID NO: 2295496 - RNA, 19 nt, Artificial Sequence
  Description of Artificial Sequence: Synthetic oligonucleotide
gacauguucgguaugauug

SEQ ID NO: 2295497 - RNA, 19 nt, Artificial Sequence
  Description of Artificial Sequence: Synthetic oligonucleotide
aacaagaaaucucuuggga

SEQ ID NO: 2295498 - RNA, 19 nt, Artificial Sequence
  Description of Artificial Sequence: Synthetic oligonucleotide
uguccaacaagaaaucucu

SEQ ID NO: 2295499 - RNA, 19 nt, Artificial Sequence
  Description of Artificial Sequence: Synthetic oligonucleotide
aaauaucagaugaacagug

SEQ ID NO: 2295500 - RNA, 19 nt, Artificial Sequence
  Description of Artificial Sequence: Synthetic oligonucleotide
ucuacgcacaacaauacac

SEQ ID NO: 2295501 - RNA, 19 nt, Artificial Sequence
  Description of Artificial Sequence: Synthetic oligonucleotide
gauaacacugaccucagca

SEQ ID NO: 2295502 - RNA, 19 nt, Artificial Sequence
  Description of Artificial Sequence: Synthetic oligonucleotide
cuaaugagaucacacgugg

SEQ ID NO: 2295503 - RNA, 19 nt, Artificial Sequence
  Description of Artificial Sequence: Synthetic oligonucleotide
aaccacacauuuucccucc

SEQ ID NO: 2295504 - RNA, 19 nt, Artificial Sequence
  Description of Artificial Sequence: Synthetic oligonucleotide
ggaaauuuugcuucaaugc

SEQ ID NO: 2295505 - RNA, 19 nt, Artificial Sequence
  Description of Artificial Sequence: Synthetic oligonucleotide
acaacaauacacauuuuac

SEQ ID NO: 2295506 - RNA, 19 nt, Artificial Sequence
  Description of Artificial Sequence: Synthetic oligonucleotide
ugggguaacccuaacagca

SEQ ID NO: 2295507 - RNA, 19 nt, Artificial Sequence
  Description of Artificial Sequence: Synthetic oligonucleotide
uucuggacacucuagcacg

SEQ ID NO: 2295508 - RNA, 19 nt, Artificial Sequence
  Description of Artificial Sequence: Synthetic oligonucleotide
acucuacagaaacggaugc

SEQ ID NO: 2295509 - RNA, 19 nt, Artificial Sequence
  Description of Artificial Sequence: Synthetic oligonucleotide
ucaacaguaaagucacucc

SEQ ID NO: 2295510 - RNA, 19 nt, Artificial Sequence
  Description of Artificial Sequence: Synthetic oligonucleotide
accguuagggucuucugcc

SEQ ID NO: 2295511 - RNA, 19 nt, Artificial Sequence
  Description of Artificial Sequence: Synthetic oligonucleotide
uuuugacucuacagaaacg

SEQ ID NO: 2295512 - RNA, 19 nt, Artificial Sequence
  Description of Artificial Sequence: Synthetic oligonucleotide
aguaacaaaugauuuacau

SEQ ID NO: 2295513 - RNA, 19 nt, Artificial Sequence
  Description of Artificial Sequence: Synthetic oligonucleotide
acugagaugucucuuuauc

SEQ ID NO: 2295514 - RNA, 19 nt, Artificial Sequence
  Description of Artificial Sequence: Synthetic oligonucleotide
uuucccuccauuauuaaau

SEQ ID NO: 2295515 - RNA, 19 nt, Artificial Sequence
  Description of Artificial Sequence: Synthetic oligonucleotide
aauucuggacacucuagca

SEQ ID NO: 2295516 - RNA, 19 nt, Artificial Sequence
  Description of Artificial Sequence: Synthetic oligonucleotide
aacacuauuccuaaugaga

SEQ ID NO: 2295517 - RNA, 19 nt, Artificial Sequence
  Description of Artificial Sequence: Synthetic oligonucleotide
gaucacacguggcugauag

SEQ ID NO: 2295518 - RNA, 19 nt, Artificial Sequence
  Description of Artificial Sequence: Synthetic oligonucleotide
acaucaaacuuccuaccac

SEQ ID NO: 2295519 - RNA, 19 nt, Artificial Sequence
  Description of Artificial Sequence: Synthetic oligonucleotide
acuauuccuaaugagauca

SEQ ID NO: 2295520 - RNA, 19 nt, Artificial Sequence
  Description of Artificial Sequence: Synthetic oligonucleotide
ugagagguauccaagcugu

SEQ ID NO: 2295521 - RNA, 19 nt, Artificial Sequence
  Description of Artificial Sequence: Synthetic oligonucleotide
acccuaacagcacacuacc

SEQ ID NO: 2295522 - RNA, 19 nt, Artificial Sequence
  Description of Artificial Sequence: Synthetic oligonucleotide
gagccuuucaccuucagga

SEQ ID NO: 2295523 - RNA, 19 nt, Artificial Sequence
  Description of Artificial Sequence: Synthetic oligonucleotide
ucugccaaauauucuacgc

SEQ ID NO: 2295524 - RNA, 19 nt, Artificial Sequence
  Description of Artificial Sequence: Synthetic oligonucleotide
guaugauugucuuucuugc

SEQ ID NO: 2295525 - RNA, 19 nt, Artificial Sequence
  Description of Artificial Sequence: Synthetic oligonucleotide
uuauccuuagccacgugca

SEQ ID NO: 2295526 - RNA, 19 nt, Artificial Sequence
  Description of Artificial Sequence: Synthetic oligonucleotide
uguaacucuguaagaaaca

SEQ ID NO: 2295527 - RNA, 19 nt, Artificial Sequence
  Description of Artificial Sequence: Synthetic oligonucleotide
aaaauagggaagugaggga

SEQ ID NO: 2295528 - RNA, 19 nt, Artificial Sequence
  Description of Artificial Sequence: Synthetic oligonucleotide
uccauuauuaaaugaaauu

SEQ ID NO: 2295529 - RNA, 19 nt, Artificial Sequence
  Description of Artificial Sequence: Synthetic oligonucleotide
aagaacgaaaggcucacau

SEQ ID NO: 2295530 - RNA, 19 nt, Artificial Sequence
  Description of Artificial Sequence: Synthetic oligonucleotide
uuuaauaaccacacauuuu

SEQ ID NO: 2295531 - RNA, 19 nt, Artificial Sequence
  Description of Artificial Sequence: Synthetic oligonucleotide
cuuauccuuagccacgugc

SEQ ID NO: 2295532 - RNA, 19 nt, Artificial Sequence
  Description of Artificial Sequence: Synthetic oligonucleotide
augcacauuuaauaaccac

SEQ ID NO: 2295533 - RNA, 19 nt, Artificial Sequence
  Description of Artificial Sequence: Synthetic oligonucleotide
aacccuaacagcacacuac

SEQ ID NO: 2295534 - RNA, 19 nt, Artificial Sequence
  Description of Artificial Sequence: Synthetic oligonucleotide
uggucgagcaccguuaggg

SEQ ID NO: 2295535 - RNA, 19 nt, Artificial Sequence
  Description of Artificial Sequence: Synthetic oligonucleotide
guaaagucacuccugagca

SEQ ID NO: 2295536 - RNA, 19 nt, Artificial Sequence
  Description of Artificial Sequence: Synthetic oligonucleotide
cuguaacucuguaagaaac

SEQ ID NO: 2295537 - RNA, 19 nt, Artificial Sequence
  Description of Artificial Sequence: Synthetic oligonucleotide
auucuugaagauaacacug

SEQ ID NO: 2295538 - RNA, 19 nt, Artificial Sequence
  Description of Artificial Sequence: Synthetic oligonucleotide
cugauagcaugacuuaucc

SEQ ID NO: 2295539 - RNA, 19 nt, Artificial Sequence
  Description of Artificial Sequence: Synthetic oligonucleotide
auaaccacacauuuucccu

SEQ ID NO: 2295540 - RNA, 19 nt, Artificial Sequence
  Description of Artificial Sequence: Synthetic oligonucleotide
gugucuaucacuucccagc

SEQ ID NO: 2295541 - RNA, 19 nt, Artificial Sequence
  Description of Artificial Sequence: Synthetic oligonucleotide
gauucccaaauauguacag

SEQ ID NO: 2295542 - RNA, 19 nt, Artificial Sequence
  Description of Artificial Sequence: Synthetic oligonucleotide
aaucucuugggaaauuuug

SEQ ID NO: 2295543 - RNA, 19 nt, Artificial Sequence
  Description of Artificial Sequence: Synthetic oligonucleotide
ugaacagaugacacagcag

SEQ ID NO: 2295544 - RNA, 19 nt, Artificial Sequence
  Description of Artificial Sequence: Synthetic oligonucleotide
uucuugaagauaacacuga

SEQ ID NO: 2295545 - RNA, 19 nt, Artificial Sequence
  Description of Artificial Sequence: Synthetic oligonucleotide
aacagcacacuaccuuuuc

SEQ ID NO: 2295546 - RNA, 19 nt, Artificial Sequence
  Description of Artificial Sequence: Synthetic oligonucleotide
ugcaguaguaggauuggca

SEQ ID NO: 2295547 - RNA, 19 nt, Artificial Sequence
  Description of Artificial Sequence: Synthetic oligonucleotide
caacaagaaaucucuuggg

SEQ ID NO: 2295548 - RNA, 19 nt, Artificial Sequence
  Description of Artificial Sequence: Synthetic oligonucleotide
caaagggcgguauggaagg

SEQ ID NO: 2295549 - RNA, 19 nt, Artificial Sequence
  Description of Artificial Sequence: Synthetic oligonucleotide
ugugccuaugaacugucug

SEQ ID NO: 2295550 - RNA, 19 nt, Artificial Sequence
  Description of Artificial Sequence: Synthetic oligonucleotide
ucccagccuaacuagagag

SEQ ID NO: 2295551 - RNA, 19 nt, Artificial Sequence
  Description of Artificial Sequence: Synthetic oligonucleotide
acagugauuucuagaaggc

SEQ ID NO: 2295552 - RNA, 19 nt, Artificial Sequence
  Description of Artificial Sequence: Synthetic oligonucleotide
uuacaucaaacuuccuacc

SEQ ID NO: 2295553 - RNA, 19 nt, Artificial Sequence
  Description of Artificial Sequence: Synthetic oligonucleotide
ugaaauucuggacacucua

SEQ ID NO: 2295554 - RNA, 19 nt, Artificial Sequence
  Description of Artificial Sequence: Synthetic oligonucleotide
acaagaaaucucuugggaa

SEQ ID NO: 2295555 - RNA, 19 nt, Artificial Sequence
  Description of Artificial Sequence: Synthetic oligonucleotide
uacauagucuucagauucc

SEQ ID NO: 2295556 - RNA, 19 nt, Artificial Sequence
  Description of Artificial Sequence: Synthetic oligonucleotide
ugucuaucacuucccagcc

SEQ ID NO: 2295557 - RNA, 19 nt, Artificial Sequence
  Description of Artificial Sequence: Synthetic oligonucleotide
gguaugauugucuuucuug

SEQ ID NO: 2295558 - RNA, 19 nt, Artificial Sequence
  Description of Artificial Sequence: Synthetic oligonucleotide
augauugucuuucuugccu

SEQ ID NO: 2295559 - RNA, 19 nt, Artificial Sequence
  Description of Artificial Sequence: Synthetic oligonucleotide
aauuuugcuucaaugcaca

SEQ ID NO: 2295560 - RNA, 19 nt, Artificial Sequence
  Description of Artificial Sequence: Synthetic oligonucleotide
ugauuuacauagucuucag

SEQ ID NO: 2295561 - RNA, 19 nt, Artificial Sequence
  Description of Artificial Sequence: Synthetic oligonucleotide
gaacagaugacacagcagu

SEQ ID NO: 2295562 - RNA, 19 nt, Artificial Sequence
  Description of Artificial Sequence: Synthetic oligonucleotide
aucucuugggaaauuuugc

SEQ ID NO: 2295563 - RNA, 19 nt, Artificial Sequence
  Description of Artificial Sequence: Synthetic oligonucleotide
acuuccuaccacuuacuag

SEQ ID NO: 2295564 - RNA, 19 nt, Artificial Sequence
  Description of Artificial Sequence: Synthetic oligonucleotide
aaacuguaacucuguaaga

SEQ ID NO: 2295565 - RNA, 19 nt, Artificial Sequence
  Description of Artificial Sequence: Synthetic oligonucleotide
cuagacaaaugcuuuugug

SEQ ID NO: 2295566 - RNA, 19 nt, Artificial Sequence
  Description of Artificial Sequence: Synthetic oligonucleotide
gaacgaaaggcucacaugu

SEQ ID NO: 2295567 - RNA, 19 nt, Artificial Sequence
  Description of Artificial Sequence: Synthetic oligonucleotide
ccaacaagaaaucucuugg

SEQ ID NO: 2295568 - RNA, 19 nt, Artificial Sequence
  Description of Artificial Sequence: Synthetic oligonucleotide
agcaguuaagauuggggug

SEQ ID NO: 2295569 - RNA, 19 nt, Artificial Sequence
  Description of Artificial Sequence: Synthetic oligonucleotide
uucgguaugauugucuuuc

SEQ ID NO: 2295570 - RNA, 19 nt, Artificial Sequence
  Description of Artificial Sequence: Synthetic oligonucleotide
ucuagacaaaugcuuuugu

SEQ ID NO: 2295571 - RNA, 19 nt, Artificial Sequence
  Description of Artificial Sequence: Synthetic oligonucleotide
agcagucaacaguaaaguc

SEQ ID NO: 2295572 - RNA, 19 nt, Artificial Sequence
  Description of Artificial Sequence: Synthetic oligonucleotide
ucuagcacguaauaguguu

SEQ ID NO: 2295573 - RNA, 19 nt, Artificial Sequence
  Description of Artificial Sequence: Synthetic oligonucleotide
cacuuacuaggucaggugc

SEQ ID NO: 2295574 - RNA, 19 nt, Artificial Sequence
  Description of Artificial Sequence: Synthetic oligonucleotide
uccaagcuguucuagacaa

SEQ ID NO: 2295575 - RNA, 19 nt, Artificial Sequence
  Description of Artificial Sequence: Synthetic oligonucleotide
gaaaggcucacaugugcag

SEQ ID NO: 2295576 - RNA, 19 nt, Artificial Sequence
  Description of Artificial Sequence: Synthetic oligonucleotide
ugacucuacagaaacggau

SEQ ID NO: 2295577 - RNA, 19 nt, Artificial Sequence
  Description of Artificial Sequence: Synthetic oligonucleotide
ggugggguaacccuaacag

SEQ ID NO: 2295578 - RNA, 19 nt, Artificial Sequence
  Description of Artificial Sequence: Synthetic oligonucleotide
ucacacguggcugauagca

SEQ ID NO: 2295579 - RNA, 19 nt, Artificial Sequence
  Description of Artificial Sequence: Synthetic oligonucleotide
acacucaggagaacaagcc

SEQ ID NO: 2295580 - RNA, 19 nt, Artificial Sequence
  Description of Artificial Sequence: Synthetic oligonucleotide
agcaugacuuauccuuagc

SEQ ID NO: 2295581 - RNA, 19 nt, Artificial Sequence
  Description of Artificial Sequence: Synthetic oligonucleotide
cuaccuuuucucuucuccc

SEQ ID NO: 2295582 - RNA, 19 nt, Artificial Sequence
  Description of Artificial Sequence: Synthetic oligonucleotide
cacacucaggagaacaagc

SEQ ID NO: 2295583 - RNA, 19 nt, Artificial Sequence
  Description of Artificial Sequence: Synthetic oligonucleotide
agagaaaauagggaaguga

SEQ ID NO: 2295584 - RNA, 19 nt, Artificial Sequence
  Description of Artificial Sequence: Synthetic oligonucleotide
caacaauacacauuuuaca

SEQ ID NO: 2295585 - RNA, 19 nt, Artificial Sequence
  Description of Artificial Sequence: Synthetic oligonucleotide
ugcuucaaugcacauuuaa

SEQ ID NO: 2295586 - RNA, 19 nt, Artificial Sequence
  Description of Artificial Sequence: Synthetic oligonucleotide
cauuauuaaaugaaauucu

SEQ ID NO: 2295587 - RNA, 19 nt, Artificial Sequence
  Description of Artificial Sequence: Synthetic oligonucleotide
ugccgugucuaucacuucc

SEQ ID NO: 2295588 - RNA, 19 nt, Artificial Sequence
  Description of Artificial Sequence: Synthetic oligonucleotide
ugaacugucugccgugucu

SEQ ID NO: 2295589 - RNA, 19 nt, Artificial Sequence
  Description of Artificial Sequence: Synthetic oligonucleotide
uagcacguaauaguguucc

SEQ ID NO: 2295590 - RNA, 19 nt, Artificial Sequence
  Description of Artificial Sequence: Synthetic oligonucleotide
aacaguaaagucacuccug

SEQ ID NO: 2295591 - RNA, 19 nt, Artificial Sequence
  Description of Artificial Sequence: Synthetic oligonucleotide
acuuacuaggucaggugcc

SEQ ID NO: 2295592 - RNA, 19 nt, Artificial Sequence
  Description of Artificial Sequence: Synthetic oligonucleotide
uuuacauagucuucagauu

SEQ ID NO: 2295593 - RNA, 19 nt, Artificial Sequence
  Description of Artificial Sequence: Synthetic oligonucleotide
agaaaauagggaagugagg

SEQ ID NO: 2295594 - RNA, 19 nt, Artificial Sequence
  Description of Artificial Sequence: Synthetic oligonucleotide
acagagaaaauagggaagu

SEQ ID NO: 2295595 - RNA, 19 nt, Artificial Sequence
  Description of Artificial Sequence: Synthetic oligonucleotide
agggacucaaauacaaggg

SEQ ID NO: 2295596 - RNA, 19 nt, Artificial Sequence
  Description of Artificial Sequence: Synthetic oligonucleotide
uaagaggugggguaacccu

SEQ ID NO: 2295597 - RNA, 19 nt, Artificial Sequence
  Description of Artificial Sequence: Synthetic oligonucleotide
uucuagacaaaugcuuuug

SEQ ID NO: 2295598 - RNA, 19 nt, Artificial Sequence
  Description of Artificial Sequence: Synthetic oligonucleotide
ccauuauuaaaugaaauuc

SEQ ID NO: 2295599 - RNA, 19 nt, Artificial Sequence
  Description of Artificial Sequence: Synthetic oligonucleotide
ugggaugugaacagaugac

SEQ ID NO: 2295600 - RNA, 19 nt, Artificial Sequence
  Description of Artificial Sequence: Synthetic oligonucleotide
auucuacgcacaacaauac

SEQ ID NO: 2295601 - RNA, 19 nt, Artificial Sequence
  Description of Artificial Sequence: Synthetic oligonucleotide
gugccuaugaacugucugc

SEQ ID NO: 2295602 - RNA, 19 nt, Artificial Sequence
  Description of Artificial Sequence: Synthetic oligonucleotide
ucugccgugucuaucacuu

SEQ ID NO: 2295603 - RNA, 19 nt, Artificial Sequence
  Description of Artificial Sequence: Synthetic oligonucleotide
aguaagaggugggguaacc

SEQ ID NO: 2295604 - RNA, 19 nt, Artificial Sequence
  Description of Artificial Sequence: Synthetic oligonucleotide
ugugcaguaguaggauugg

SEQ ID NO: 2295605 - RNA, 19 nt, Artificial Sequence
  Description of Artificial Sequence: Synthetic oligonucleotide
uuuugugccuaugaacugu

SEQ ID NO: 2295606 - RNA, 19 nt, Artificial Sequence
  Description of Artificial Sequence: Synthetic oligonucleotide
uaggauuggcacugagagg

SEQ ID NO: 2295607 - RNA, 19 nt, Artificial Sequence
  Description of Artificial Sequence: Synthetic oligonucleotide
uucuacgcacaacaauaca

SEQ ID NO: 2295608 - RNA, 19 nt, Artificial Sequence
  Description of Artificial Sequence: Synthetic oligonucleotide
aaugcacauuuaauaacca

SEQ ID NO: 2295609 - RNA, 19 nt, Artificial Sequence
  Description of Artificial Sequence: Synthetic oligonucleotide
ucgagcaccguuagggucu

SEQ ID NO: 2295610 - RNA, 19 nt, Artificial Sequence
  Description of Artificial Sequence: Synthetic oligonucleotide
caugacuuauccuuagcca

SEQ ID NO: 2295611 - RNA, 19 nt, Artificial Sequence
  Description of Artificial Sequence: Synthetic oligonucleotide
ugagaucacacguggcuga

SEQ ID NO: 2295612 - RNA, 19 nt, Artificial Sequence
  Description of Artificial Sequence: Synthetic oligonucleotide
gugaacagaugacacagca

SEQ ID NO: 2295613 - RNA, 19 nt, Artificial Sequence
  Description of Artificial Sequence: Synthetic oligonucleotide
cuguccaacaagaaaucuc

SEQ ID NO: 2295614 - RNA, 19 nt, Artificial Sequence
  Description of Artificial Sequence: Synthetic oligonucleotide
ugucuuucuugccuucuac

SEQ ID NO: 2295615 - RNA, 19 nt, Artificial Sequence
  Description of Artificial Sequence: Synthetic oligonucleotide
caccuucaggacauguucg

SEQ ID NO: 2295616 - RNA, 19 nt, Artificial Sequence
  Description of Artificial Sequence: Synthetic oligonucleotide
cuuagccacgugcacacag

SEQ ID NO: 2295617 - RNA, 19 nt, Artificial Sequence
  Description of Artificial Sequence: Synthetic oligonucleotide
ugugaacagaugacacagc

SEQ ID NO: 2295618 - RNA, 19 nt, Artificial Sequence
  Description of Artificial Sequence: Synthetic oligonucleotide
agugauuucuagaaggcaa

SEQ ID NO: 2295619 - RNA, 19 nt, Artificial Sequence
  Description of Artificial Sequence: Synthetic oligonucleotide
agagguauccaagcuguuc

SEQ ID NO: 2295620 - RNA, 19 nt, Artificial Sequence
  Description of Artificial Sequence: Synthetic oligonucleotide
aaugggaugugaacagaug

SEQ ID NO: 2295621 - RNA, 19 nt, Artificial Sequence
  Description of Artificial Sequence: Synthetic oligonucleotide
agauaacacugaccucagc

SEQ ID NO: 2295622 - RNA, 19 nt, Artificial Sequence
  Description of Artificial Sequence: Synthetic oligonucleotide
uuagccacgugcacacagc

SEQ ID NO: 2295623 - RNA, 19 nt, Artificial Sequence
  Description of Artificial Sequence: Synthetic oligonucleotide
ucacuucccagccuaacua

SEQ ID NO: 2295624 - RNA, 19 nt, Artificial Sequence
  Description of Artificial Sequence: Synthetic oligonucleotide
uucaggacauguucgguau

SEQ ID NO: 2295625 - RNA, 19 nt, Artificial Sequence
  Description of Artificial Sequence: Synthetic oligonucleotide
ucuggucgagcaccguuag

SEQ ID NO: 2295626 - RNA, 19 nt, Artificial Sequence
  Description of Artificial Sequence: Synthetic oligonucleotide
uauuccuaaugagaucaca

SEQ ID NO: 2295627 - RNA, 19 nt, Artificial Sequence
  Description of Artificial Sequence: Synthetic oligonucleotide
aagaaaucucuugggaaau

SEQ ID NO: 2295628 - RNA, 19 nt, Artificial Sequence
  Description of Artificial Sequence: Synthetic oligonucleotide
aaaggcucacaugugcagu

SEQ ID NO: 2295629 - RNA, 19 nt, Artificial Sequence
  Description of Artificial Sequence: Synthetic oligonucleotide
agcacacuaccuuuucucu

SEQ ID NO: 2295630 - RNA, 19 nt, Artificial Sequence
  Description of Artificial Sequence: Synthetic oligonucleotide
uaaccacacauuuucccuc

SEQ ID NO: 2295631 - RNA, 19 nt, Artificial Sequence
  Description of Artificial Sequence: Synthetic oligonucleotide
ugagggagaguaagaggug

SEQ ID NO: 2295632 - RNA, 19 nt, Artificial Sequence
  Description of Artificial Sequence: Synthetic oligonucleotide
cacacuaccuuuucucuuc

SEQ ID NO: 2295633 - RNA, 19 nt, Artificial Sequence
  Description of Artificial Sequence: Synthetic oligonucleotide
uagcaugacuuauccuuag

SEQ ID NO: 2295634 - RNA, 19 nt, Artificial Sequence
  Description of Artificial Sequence: Synthetic oligonucleotide
ugcagcaguuaagauuggg

SEQ ID NO: 2295635 - RNA, 19 nt, Artificial Sequence
  Description of Artificial Sequence: Synthetic oligonucleotide
caggagaacaagccugugc

SEQ ID NO: 2295636 - RNA, 19 nt, Artificial Sequence
  Description of Artificial Sequence: Synthetic oligonucleotide
uuugugccuaugaacuguc

SEQ ID NO: 2295637 - RNA, 19 nt, Artificial Sequence
  Description of Artificial Sequence: Synthetic oligonucleotide
acagaaacggaugcagcag

SEQ ID NO: 2295638 - RNA, 19 nt, Artificial Sequence
  Description of Artificial Sequence: Synthetic oligonucleotide
cugagaugucucuuuauca

SEQ ID NO: 2295639 - RNA, 19 nt, Artificial Sequence
  Description of Artificial Sequence: Synthetic oligonucleotide
gugauuucuagaaggcaag

SEQ ID NO: 2295640 - RNA, 19 nt, Artificial Sequence
  Description of Artificial Sequence: Synthetic oligonucleotide
gaagggacucaaauacaag

SEQ ID NO: 2295641 - RNA, 19 nt, Artificial Sequence
  Description of Artificial Sequence: Synthetic oligonucleotide
cuuuugugccuaugaacug

SEQ ID NO: 2295642 - RNA, 19 nt, Artificial Sequence
  Description of Artificial Sequence: Synthetic oligonucleotide
acacuauuccuaaugagau

SEQ ID NO: 2295643 - RNA, 19 nt, Artificial Sequence
  Description of Artificial Sequence: Synthetic oligonucleotide
cuacgcacaacaauacaca

SEQ ID NO: 2295644 - RNA, 19 nt, Artificial Sequence
  Description of Artificial Sequence: Synthetic oligonucleotide
aacugagaugucucuuuau

SEQ ID NO: 2295645 - RNA, 19 nt, Artificial Sequence
  Description of Artificial Sequence: Synthetic oligonucleotide
aacuuccuaccacuuacua

SEQ ID NO: 2295646 - RNA, 19 nt, Artificial Sequence
  Description of Artificial Sequence: Synthetic oligonucleotide
acucuagcacguaauagug

SEQ ID NO: 2295647 - RNA, 19 nt, Artificial Sequence
  Description of Artificial Sequence: Synthetic oligonucleotide
acauguucgguaugauugu

SEQ ID NO: 2295648 - RNA, 19 nt, Artificial Sequence
  Description of Artificial Sequence: Synthetic oligonucleotide
uguucgguaugauugucuu

SEQ ID NO: 2295649 - RNA, 19 nt, Artificial Sequence
  Description of Artificial Sequence: Synthetic oligonucleotide
cuagaaggcaagaacgaaa

SEQ ID NO: 2295650 - RNA, 19 nt, Artificial Sequence
  Description of Artificial Sequence: Synthetic oligonucleotide
cacaacaauacacauuuua

SEQ ID NO: 2295651 - RNA, 19 nt, Artificial Sequence
  Description of Artificial Sequence: Synthetic oligonucleotide
gacacagcagucaacagua

SEQ ID NO: 2295652 - RNA, 19 nt, Artificial Sequence
  Description of Artificial Sequence: Synthetic oligonucleotide
acacucuagcacguaauag

SEQ ID NO: 2295653 - RNA, 19 nt, Artificial Sequence
  Description of Artificial Sequence: Synthetic oligonucleotide
acacguggcugauagcaug

SEQ ID NO: 2295654 - RNA, 19 nt, Artificial Sequence
  Description of Artificial Sequence: Synthetic oligonucleotide
uacgcacaacaauacacau

SEQ ID NO: 2295655 - RNA, 19 nt, Artificial Sequence
  Description of Artificial Sequence: Synthetic oligonucleotide
ugauagcaugacuuauccu

SEQ ID NO: 2295656 - RNA, 19 nt, Artificial Sequence
  Description of Artificial Sequence: Synthetic oligonucleotide
ugauuucuagaaggcaaga

SEQ ID NO: 2295657 - RNA, 19 nt, Artificial Sequence
  Description of Artificial Sequence: Synthetic oligonucleotide
gcaguaguaggauuggcac

SEQ ID NO: 2295658 - RNA, 19 nt, Artificial Sequence
  Description of Artificial Sequence: Synthetic oligonucleotide
augugcaguaguaggauug

SEQ ID NO: 2295659 - RNA, 19 nt, Artificial Sequence
  Description of Artificial Sequence: Synthetic oligonucleotide
cucacaugugcaguaguag

SEQ ID NO: 2295660 - RNA, 19 nt, Artificial Sequence
  Description of Artificial Sequence: Synthetic oligonucleotide
uaacugagaugucucuuua

SEQ ID NO: 2295661 - RNA, 19 nt, Artificial Sequence
  Description of Artificial Sequence: Synthetic oligonucleotide
uaaagucacuccugagcac

SEQ ID NO: 2295662 - RNA, 19 nt, Artificial Sequence
  Description of Artificial Sequence: Synthetic oligonucleotide
uauccuuagccacgugcac

SEQ ID NO: 2295663 - RNA, 19 nt, Artificial Sequence
  Description of Artificial Sequence: Synthetic oligonucleotide
aagccugugccagucauaa

SEQ ID NO: 2295664 - RNA, 19 nt, Artificial Sequence
  Description of Artificial Sequence: Synthetic oligonucleotide
cuuuaucaaaacuguaacu

SEQ ID NO: 2295665 - RNA, 19 nt, Artificial Sequence
  Description of Artificial Sequence: Synthetic oligonucleotide
uucccagccuaacuagaga

SEQ ID NO: 2295666 - RNA, 19 nt, Artificial Sequence
  Description of Artificial Sequence: Synthetic oligonucleotide
cacuucccagccuaacuag

SEQ ID NO: 2295667 - RNA, 19 nt, Artificial Sequence
  Description of Artificial Sequence: Synthetic oligonucleotide
agauucccaaauauguaca

SEQ ID NO: 2295668 - RNA, 19 nt, Artificial Sequence
  Description of Artificial Sequence: Synthetic oligonucleotide
augagaucacacguggcug

SEQ ID NO: 2295669 - RNA, 19 nt, Artificial Sequence
  Description of Artificial Sequence: Synthetic oligonucleotide
aucacacguggcugauagc

SEQ ID NO: 2295670 - RNA, 19 nt, Artificial Sequence
  Description of Artificial Sequence: Synthetic oligonucleotide
caaauauucuacgcacaac

SEQ ID NO: 2295671 - RNA, 19 nt, Artificial Sequence
  Description of Artificial Sequence: Synthetic oligonucleotide
caccguuagggucuucugc

SEQ ID NO: 2295672 - RNA, 19 nt, Artificial Sequence
  Description of Artificial Sequence: Synthetic oligonucleotide
ggacucaaauacaaggggc

SEQ ID NO: 2295673 - RNA, 19 nt, Artificial Sequence
  Description of Artificial Sequence: Synthetic oligonucleotide
ucuggacacucuagcacgu

SEQ ID NO: 2295674 - RNA, 19 nt, Artificial Sequence
  Description of Artificial Sequence: Synthetic oligonucleotide
gugggguaacccuaacagc

SEQ ID NO: 2295675 - RNA, 19 nt, Artificial Sequence
  Description of Artificial Sequence: Synthetic oligonucleotide
aacgaaaggcucacaugug

SEQ ID NO: 2295676 - RNA, 19 nt, Artificial Sequence
  Description of Artificial Sequence: Synthetic oligonucleotide
gauuucuagaaggcaagaa

SEQ ID NO: 2295677 - RNA, 19 nt, Artificial Sequence
  Description of Artificial Sequence: Synthetic oligonucleotide
aucaaaacuguaacucugu

SEQ ID NO: 2295678 - RNA, 19 nt, Artificial Sequence
  Description of Artificial Sequence: Synthetic oligonucleotide
guaagaggugggguaaccc

SEQ ID NO: 2295679 - RNA, 19 nt, Artificial Sequence
  Description of Artificial Sequence: Synthetic oligonucleotide
ggucagucuccaaagggcg

SEQ ID NO: 2295680 - RNA, 19 nt, Artificial Sequence
  Description of Artificial Sequence: Synthetic oligonucleotide
ucagaugaacagugauuuc

SEQ ID NO: 2295681 - RNA, 19 nt, Artificial Sequence
  Description of Artificial Sequence: Synthetic oligonucleotide
accacuuacuaggucaggu

SEQ ID NO: 2295682 - RNA, 19 nt, Artificial Sequence
  Description of Artificial Sequence: Synthetic oligonucleotide
ccaaagggcgguauggaag

SEQ ID NO: 2295683 - RNA, 19 nt, Artificial Sequence
  Description of Artificial Sequence: Synthetic oligonucleotide
caguaaagucacuccugag

SEQ ID NO: 2295684 - RNA, 19 nt, Artificial Sequence
  Description of Artificial Sequence: Synthetic oligonucleotide
aggcaagaacgaaaggcuc

SEQ ID NO: 2295685 - RNA, 19 nt, Artificial Sequence
  Description of Artificial Sequence: Synthetic oligonucleotide
guauccaagcuguucuaga

SEQ ID NO: 2295686 - RNA, 19 nt, Artificial Sequence
  Description of Artificial Sequence: Synthetic oligonucleotide
aaacuuccuaccacuuacu

SEQ ID NO: 2295687 - RNA, 19 nt, Artificial Sequence
  Description of Artificial Sequence: Synthetic oligonucleotide
aaagggcgguauggaaggg

SEQ ID NO: 2295688 - RNA, 19 nt, Artificial Sequence
  Description of Artificial Sequence: Synthetic oligonucleotide
ccuaccacuuacuagguca

SEQ ID NO: 2295689 - RNA, 19 nt, Artificial Sequence
  Description of Artificial Sequence: Synthetic oligonucleotide
cacuauuccuaaugagauc

SEQ ID NO: 2295690 - RNA, 19 nt, Artificial Sequence
  Description of Artificial Sequence: Synthetic oligonucleotide
acacacucaggagaacaag

SEQ ID NO: 2295691 - RNA, 19 nt, Artificial Sequence
  Description of Artificial Sequence: Synthetic oligonucleotide
agccugcacacacucagga

SEQ ID NO: 2295692 - RNA, 19 nt, Artificial Sequence
  Description of Artificial Sequence: Synthetic oligonucleotide
aguaggauuggcacugaga

SEQ ID NO: 2295693 - RNA, 19 nt, Artificial Sequence
  Description of Artificial Sequence: Synthetic oligonucleotide
ucagucuccaaagggcggu

SEQ ID NO: 2295694 - RNA, 19 nt, Artificial Sequence
  Description of Artificial Sequence: Synthetic oligonucleotide
uacuaggucaggugccuuc

SEQ ID NO: 2295695 - RNA, 19 nt, Artificial Sequence
  Description of Artificial Sequence: Synthetic oligonucleotide
cauuuaauaaccacacauu

SEQ ID NO: 2295696 - RNA, 19 nt, Artificial Sequence
  Description of Artificial Sequence: Synthetic oligonucleotide
augaacugucugccguguc

SEQ ID NO: 2295697 - RNA, 19 nt, Artificial Sequence
  Description of Artificial Sequence: Synthetic oligonucleotide
augcuuuugugccuaugaa

SEQ ID NO: 2295698 - RNA, 19 nt, Artificial Sequence
  Description of Artificial Sequence: Synthetic oligonucleotide
auucccaaauauguacaga

SEQ ID NO: 2295699 - RNA, 19 nt, Artificial Sequence
  Description of Artificial Sequence: Synthetic oligonucleotide
cuagcacguaauaguguuc

SEQ ID NO: 2295700 - RNA, 19 nt, Artificial Sequence
  Description of Artificial Sequence: Synthetic oligonucleotide
acugaccucagcagcaaug

SEQ ID NO: 2295701 - RNA, 19 nt, Artificial Sequence
  Description of Artificial Sequence: Synthetic oligonucleotide
uaacagcacacuaccuuuu

SEQ ID NO: 2295702 - RNA, 19 nt, Artificial Sequence
  Description of Artificial Sequence: Synthetic oligonucleotide
gguagucuguccaacaaga

SEQ ID NO: 2295703 - RNA, 19 nt, Artificial Sequence
  Description of Artificial Sequence: Synthetic oligonucleotide
uuccuaccacuuacuaggu

SEQ ID NO: 2295704 - RNA, 19 nt, Artificial Sequence
  Description of Artificial Sequence: Synthetic oligonucleotide
auuggcacugagagguauc

SEQ ID NO: 2295705 - RNA, 19 nt, Artificial Sequence
  Description of Artificial Sequence: Synthetic oligonucleotide
gacacucuagcacguaaua

SEQ ID NO: 2295706 - RNA, 19 nt, Artificial Sequence
  Description of Artificial Sequence: Synthetic oligonucleotide
acaagccugugccagucau

SEQ ID NO: 2295707 - RNA, 19 nt, Artificial Sequence
  Description of Artificial Sequence: Synthetic oligonucleotide
cacucuagcacguaauagu

SEQ ID NO: 2295708 - RNA, 19 nt, Artificial Sequence
  Description of Artificial Sequence: Synthetic oligonucleotide
guauggaagggacucaaau

SEQ ID NO: 2295709 - RNA, 19 nt, Artificial Sequence
  Description of Artificial Sequence: Synthetic oligonucleotide
auuuugcuucaaugcacau

SEQ ID NO: 2295710 - RNA, 19 nt, Artificial Sequence
  Description of Artificial Sequence: Synthetic oligonucleotide
aggugggguaacccuaaca

SEQ ID NO: 2295711 - RNA, 19 nt, Artificial Sequence
  Description of Artificial Sequence: Synthetic oligonucleotide
ccagccuaacuagagagcc

SEQ ID NO: 2295712 - RNA, 19 nt, Artificial Sequence
  Description of Artificial Sequence: Synthetic oligonucleotide
caucaaacuuccuaccacu

SEQ ID NO: 2295713 - RNA, 19 nt, Artificial Sequence
  Description of Artificial Sequence: Synthetic oligonucleotide
augaaauucuggacacucu

SEQ ID NO: 2295714 - RNA, 19 nt, Artificial Sequence
  Description of Artificial Sequence: Synthetic oligonucleotide
ucgguaugauugucuuucu

SEQ ID NO: 2295715 - RNA, 19 nt, Artificial Sequence
  Description of Artificial Sequence: Synthetic oligonucleotide
uggcugauagcaugacuua

SEQ ID NO: 2295716 - RNA, 19 nt, Artificial Sequence
  Description of Artificial Sequence: Synthetic oligonucleotide
cagaugaacagugauuucu

SEQ ID NO: 2295717 - RNA, 19 nt, Artificial Sequence
  Description of Artificial Sequence: Synthetic oligonucleotide
auccuuagccacgugcaca

SEQ ID NO: 2295718 - RNA, 19 nt, Artificial Sequence
  Description of Artificial Sequence: Synthetic oligonucleotide
uaccacuuacuaggucagg

SEQ ID NO: 2295719 - RNA, 19 nt, Artificial Sequence
  Description of Artificial Sequence: Synthetic oligonucleotide
cuccauuauuaaaugaaau

SEQ ID NO: 2295720 - RNA, 19 nt, Artificial Sequence
  Description of Artificial Sequence: Synthetic oligonucleotide
gguauccaagcuguucuag

SEQ ID NO: 2295721 - RNA, 19 nt, Artificial Sequence
  Description of Artificial Sequence: Synthetic oligonucleotide
uugugccuaugaacugucu

SEQ ID NO: 2295722 - RNA, 19 nt, Artificial Sequence
  Description of Artificial Sequence: Synthetic oligonucleotide
aguuaagauuggggugggg

SEQ ID NO: 2295723 - RNA, 19 nt, Artificial Sequence
  Description of Artificial Sequence: Synthetic oligonucleotide
cuucaggacauguucggua

SEQ ID NO: 2295724 - RNA, 19 nt, Artificial Sequence
  Description of Artificial Sequence: Synthetic oligonucleotide
uccuaccacuuacuagguc

SEQ ID NO: 2295725 - RNA, 19 nt, Artificial Sequence
  Description of Artificial Sequence: Synthetic oligonucleotide
gccugugccagucauaaaa

SEQ ID NO: 2295726 - RNA, 19 nt, Artificial Sequence
  Description of Artificial Sequence: Synthetic oligonucleotide
uccugagcacucuggucga

SEQ ID NO: 2295727 - RNA, 19 nt, Artificial Sequence
  Description of Artificial Sequence: Synthetic oligonucleotide
acacuaccuuuucucuucu

SEQ ID NO: 2295728 - RNA, 19 nt, Artificial Sequence
  Description of Artificial Sequence: Synthetic oligonucleotide
gucgagcaccguuaggguc

SEQ ID NO: 2295729 - RNA, 19 nt, Artificial Sequence
  Description of Artificial Sequence: Synthetic oligonucleotide
aagaggugggguaacccua

SEQ ID NO: 2295730 - RNA, 19 nt, Artificial Sequence
  Description of Artificial Sequence: Synthetic oligonucleotide
gaacaagccugugccaguc

SEQ ID NO: 2295731 - RNA, 19 nt, Artificial Sequence
  Description of Artificial Sequence: Synthetic oligonucleotide
acguaauaguguuccuuuu

SEQ ID NO: 2295732 - RNA, 19 nt, Artificial Sequence
  Description of Artificial Sequence: Synthetic oligonucleotide
auagcaugacuuauccuua

SEQ ID NO: 2295733 - RNA, 19 nt, Artificial Sequence
  Description of Artificial Sequence: Synthetic oligonucleotide
auguucgguaugauugucu

SEQ ID NO: 2295734 - RNA, 19 nt, Artificial Sequence
  Description of Artificial Sequence: Synthetic oligonucleotide
agaugaacagugauuucua

SEQ ID NO: 2295735 - RNA, 19 nt, Artificial Sequence
  Description of Artificial Sequence: Synthetic oligonucleotide
agccuaacuagagagccuu

SEQ ID NO: 2295736 - RNA, 19 nt, Artificial Sequence
  Description of Artificial Sequence: Synthetic oligonucleotide
agcacguaauaguguuccu

SEQ ID NO: 2295737 - RNA, 19 nt, Artificial Sequence
  Description of Artificial Sequence: Synthetic oligonucleotide
cuaacagcacacuaccuuu

SEQ ID NO: 2295738 - RNA, 19 nt, Artificial Sequence
  Description of Artificial Sequence: Synthetic oligonucleotide
gagagccuuucaccuucag

SEQ ID NO: 2295739 - RNA, 19 nt, Artificial Sequence
  Description of Artificial Sequence: Synthetic oligonucleotide
caguuaagauugggguggg

SEQ ID NO: 2295740 - RNA, 19 nt, Artificial Sequence
  Description of Artificial Sequence: Synthetic oligonucleotide
acucuggucgagcaccguu

SEQ ID NO: 2295741 - RNA, 19 nt, Artificial Sequence
  Description of Artificial Sequence: Synthetic oligonucleotide
ggaagggacucaaauacaa

SEQ ID NO: 2295742 - RNA, 19 nt, Artificial Sequence
  Description of Artificial Sequence: Synthetic oligonucleotide
cauguucgguaugauuguc

SEQ ID NO: 2295743 - RNA, 19 nt, Artificial Sequence
  Description of Artificial Sequence: Synthetic oligonucleotide
gccuaugaacugucugccg

SEQ ID NO: 2295744 - RNA, 19 nt, Artificial Sequence
  Description of Artificial Sequence: Synthetic oligonucleotide
acuuauccuuagccacgug

SEQ ID NO: 2295745 - RNA, 19 nt, Artificial Sequence
  Description of Artificial Sequence: Synthetic oligonucleotide
cacguggcugauagcauga

SEQ ID NO: 2295746 - RNA, 19 nt, Artificial Sequence
  Description of Artificial Sequence: Synthetic oligonucleotide
cugcacacacucaggagaa

SEQ ID NO: 2295747 - RNA, 19 nt, Artificial Sequence
  Description of Artificial Sequence: Synthetic oligonucleotide
gugccacccacagagaaaa

SEQ ID NO: 2295748 - RNA, 19 nt, Artificial Sequence
  Description of Artificial Sequence: Synthetic oligonucleotide
cucagcagcaaugggaugu

SEQ ID NO: 2295749 - RNA, 19 nt, Artificial Sequence
  Description of Artificial Sequence: Synthetic oligonucleotide
agcagcaaugggaugugaa

SEQ ID NO: 2295750 - RNA, 19 nt, Artificial Sequence
  Description of Artificial Sequence: Synthetic oligonucleotide
caggacauguucgguauga

SEQ ID NO: 2295751 - RNA, 19 nt, Artificial Sequence
  Description of Artificial Sequence: Synthetic oligonucleotide
cuggucgagcaccguuagg

SEQ ID NO: 2295752 - RNA, 19 nt, Artificial Sequence
  Description of Artificial Sequence: Synthetic oligonucleotide
ggcaagaacgaaaggcuca

SEQ ID NO: 2295753 - RNA, 19 nt, Artificial Sequence
  Description of Artificial Sequence: Synthetic oligonucleotide
cagugauuucuagaaggca

SEQ ID NO: 2295754 - RNA, 19 nt, Artificial Sequence
  Description of Artificial Sequence: Synthetic oligonucleotide
uuccugugccacccacaga

SEQ ID NO: 2295755 - RNA, 19 nt, Artificial Sequence
  Description of Artificial Sequence: Synthetic oligonucleotide
ccacuuacuaggucaggug

SEQ ID NO: 2295756 - RNA, 19 nt, Artificial Sequence
  Description of Artificial Sequence: Synthetic oligonucleotide
guggcugauagcaugacuu

SEQ ID NO: 2295757 - RNA, 19 nt, Artificial Sequence
  Description of Artificial Sequence: Synthetic oligonucleotide
agaaaucucuugggaaauu

SEQ ID NO: 2295758 - RNA, 19 nt, Artificial Sequence
  Description of Artificial Sequence: Synthetic oligonucleotide
acguggcugauagcaugac

SEQ ID NO: 2295759 - RNA, 19 nt, Artificial Sequence
  Description of Artificial Sequence: Synthetic oligonucleotide
cacguaauaguguuccuuu

SEQ ID NO: 2295760 - RNA, 19 nt, Artificial Sequence
  Description of Artificial Sequence: Synthetic oligonucleotide
agguauccaagcuguucua

SEQ ID NO: 2295761 - RNA, 19 nt, Artificial Sequence
  Description of Artificial Sequence: Synthetic oligonucleotide
gcaguaacugagaugucuc

SEQ ID NO: 2295762 - RNA, 19 nt, Artificial Sequence
  Description of Artificial Sequence: Synthetic oligonucleotide
ggcgguauggaagggacuc

SEQ ID NO: 2295763 - RNA, 19 nt, Artificial Sequence
  Description of Artificial Sequence: Synthetic oligonucleotide
gaaacggaugcagcaguua

SEQ ID NO: 2295764 - RNA, 19 nt, Artificial Sequence
  Description of Artificial Sequence: Synthetic oligonucleotide
ccaaauauucuacgcacaa

SEQ ID NO: 2295765 - RNA, 19 nt, Artificial Sequence
  Description of Artificial Sequence: Synthetic oligonucleotide
caaugggaugugaacagau

SEQ ID NO: 2295766 - RNA, 19 nt, Artificial Sequence
  Description of Artificial Sequence: Synthetic oligonucleotide
gcugauagcaugacuuauc

SEQ ID NO: 2295767 - RNA, 19 nt, Artificial Sequence
  Description of Artificial Sequence: Synthetic oligonucleotide
aggcucacaugugcaguag

SEQ ID NO: 2295768 - RNA, 19 nt, Artificial Sequence
  Description of Artificial Sequence: Synthetic oligonucleotide
gcaagaacgaaaggcucac

SEQ ID NO: 2295769 - RNA, 19 nt, Artificial Sequence
  Description of Artificial Sequence: Synthetic oligonucleotide
cucuacagaaacggaugca

SEQ ID NO: 2295770 - RNA, 19 nt, Artificial Sequence
  Description of Artificial Sequence: Synthetic oligonucleotide
uugcuucaaugcacauuua

SEQ ID NO: 2295771 - RNA, 19 nt, Artificial Sequence
  Description of Artificial Sequence: Synthetic oligonucleotide
ggugccuuccugugccacc

SEQ ID NO: 2295772 - RNA, 19 nt, Artificial Sequence
  Description of Artificial Sequence: Synthetic oligonucleotide
gacuuauccuuagccacgu

SEQ ID NO: 2295773 - RNA, 19 nt, Artificial Sequence
  Description of Artificial Sequence: Synthetic oligonucleotide
agaaacggaugcagcaguu

SEQ ID NO: 2295774 - RNA, 19 nt, Artificial Sequence
  Description of Artificial Sequence: Synthetic oligonucleotide
cccagccuaacuagagagc

SEQ ID NO: 2295775 - RNA, 19 nt, Artificial Sequence
  Description of Artificial Sequence: Synthetic oligonucleotide
cacauuuucccuccauuau

SEQ ID NO: 2295776 - RNA, 19 nt, Artificial Sequence
  Description of Artificial Sequence: Synthetic oligonucleotide
gaggugggguaacccuaac

SEQ ID NO: 2295777 - RNA, 19 nt, Artificial Sequence
  Description of Artificial Sequence: Synthetic oligonucleotide
cucuggucgagcaccguua

SEQ ID NO: 2295778 - RNA, 19 nt, Artificial Sequence
  Description of Artificial Sequence: Synthetic oligonucleotide
cagaaacggaugcagcagu

SEQ ID NO: 2295779 - RNA, 19 nt, Artificial Sequence
  Description of Artificial Sequence: Synthetic oligonucleotide
cucuagcacguaauagugu

SEQ ID NO: 2295780 - RNA, 19 nt, Artificial Sequence
  Description of Artificial Sequence: Synthetic oligonucleotide
cacuaccuuuucucuucuc

SEQ ID NO: 2295781 - RNA, 19 nt, Artificial Sequence
  Description of Artificial Sequence: Synthetic oligonucleotide
ggcaguaacugagaugucu

SEQ ID NO: 2295782 - RNA, 19 nt, Artificial Sequence
  Description of Artificial Sequence: Synthetic oligonucleotide
ccuaacuagagagccuuuc

SEQ ID NO: 2295783 - RNA, 19 nt, Artificial Sequence
  Description of Artificial Sequence: Synthetic oligonucleotide
acgcacaacaauacacauu

SEQ ID NO: 2295784 - RNA, 19 nt, Artificial Sequence
  Description of Artificial Sequence: Synthetic oligonucleotide
cgugucuaucacuucccag

SEQ ID NO: 2295785 - RNA, 19 nt, Artificial Sequence
  Description of Artificial Sequence: Synthetic oligonucleotide
ugcacacacucaggagaac

SEQ ID NO: 2295786 - RNA, 19 nt, Artificial Sequence
  Description of Artificial Sequence: Synthetic oligonucleotide
agaggugggguaacccuaa

SEQ ID NO: 2295787 - RNA, 19 nt, Artificial Sequence
  Description of Artificial Sequence: Synthetic oligonucleotide
caguaacugagaugucucu

SEQ ID NO: 2295788 - RNA, 19 nt, Artificial Sequence
  Description of Artificial Sequence: Synthetic oligonucleotide
ccccaaguggucagucucc

SEQ ID NO: 2295789 - RNA, 19 nt, Artificial Sequence
  Description of Artificial Sequence: Synthetic oligonucleotide
gauuggcacugagagguau

SEQ ID NO: 2295790 - RNA, 19 nt, Artificial Sequence
  Description of Artificial Sequence: Synthetic oligonucleotide
uuacuaggucaggugccuu

SEQ ID NO: 2295791 - RNA, 19 nt, Artificial Sequence
  Description of Artificial Sequence: Synthetic oligonucleotide
cuuacuaggucaggugccu

SEQ ID NO: 2295792 - RNA, 19 nt, Artificial Sequence
  Description of Artificial Sequence: Synthetic oligonucleotide
cgcacaacaauacacauuu

SEQ ID NO: 2295793 - RNA, 19 nt, Artificial Sequence
  Description of Artificial Sequence: Synthetic oligonucleotide
cuccaaagggcgguaugga

SEQ ID NO: 2295794 - RNA, 19 nt, Artificial Sequence
  Description of Artificial Sequence: Synthetic oligonucleotide
augcagcaguuaagauugg

SEQ ID NO: 2295795 - RNA, 19 nt, Artificial Sequence
  Description of Artificial Sequence: Synthetic oligonucleotide
agucuccaaagggcgguau

SEQ ID NO: 2295796 - RNA, 19 nt, Artificial Sequence
  Description of Artificial Sequence: Synthetic oligonucleotide
gcaccguuagggucuucug

SEQ ID NO: 2295797 - RNA, 19 nt, Artificial Sequence
  Description of Artificial Sequence: Synthetic oligonucleotide
gggguaacccuaacagcac

SEQ ID NO: 2295798 - RNA, 19 nt, Artificial Sequence
  Description of Artificial Sequence: Synthetic oligonucleotide
agucaacaguaaagucacu

SEQ ID NO: 2295799 - RNA, 19 nt, Artificial Sequence
  Description of Artificial Sequence: Synthetic oligonucleotide
ccuaugaacugucugccgu

SEQ ID NO: 2295800 - RNA, 19 nt, Artificial Sequence
  Description of Artificial Sequence: Synthetic oligonucleotide
gccgugucuaucacuuccc

SEQ ID NO: 2295801 - RNA, 19 nt, Artificial Sequence
  Description of Artificial Sequence: Synthetic oligonucleotide
guaguaggauuggcacuga

SEQ ID NO: 2295802 - RNA, 19 nt, Artificial Sequence
  Description of Artificial Sequence: Synthetic oligonucleotide
gccuucuaccuugaauuca

SEQ ID NO: 2295803 - RNA, 19 nt, Artificial Sequence
  Description of Artificial Sequence: Synthetic oligonucleotide
agagagccuuucaccuuca

SEQ ID NO: 2295804 - RNA, 19 nt, Artificial Sequence
  Description of Artificial Sequence: Synthetic oligonucleotide
caagaacgaaaggcucaca

SEQ ID NO: 2295805 - RNA, 19 nt, Artificial Sequence
  Description of Artificial Sequence: Synthetic oligonucleotide
gcacucuggucgagcaccg

SEQ ID NO: 2295806 - RNA, 19 nt, Artificial Sequence
  Description of Artificial Sequence: Synthetic oligonucleotide
gucuaucacuucccagccu

SEQ ID NO: 2295807 - RNA, 19 nt, Artificial Sequence
  Description of Artificial Sequence: Synthetic oligonucleotide
agccacgugcacacagccu

SEQ ID NO: 2295808 - RNA, 19 nt, Artificial Sequence
  Description of Artificial Sequence: Synthetic oligonucleotide
cuagagagccuuucaccuu

SEQ ID NO: 2295809 - RNA, 19 nt, Artificial Sequence
  Description of Artificial Sequence: Synthetic oligonucleotide
caagccugugccagucaua

SEQ ID NO: 2295810 - RNA, 19 nt, Artificial Sequence
  Description of Artificial Sequence: Synthetic oligonucleotide
cugugccagucauaaaauu

SEQ ID NO: 2295811 - RNA, 19 nt, Artificial Sequence
  Description of Artificial Sequence: Synthetic oligonucleotide
ccuaacagcacacuaccuu

SEQ ID NO: 2295812 - RNA, 19 nt, Artificial Sequence
  Description of Artificial Sequence: Synthetic oligonucleotide
guucgguaugauugucuuu

SEQ ID NO: 2295813 - RNA, 19 nt, Artificial Sequence
  Description of Artificial Sequence: Synthetic oligonucleotide
agccugugccagucauaaa

SEQ ID NO: 2295814 - RNA, 19 nt, Artificial Sequence
  Description of Artificial Sequence: Synthetic oligonucleotide
ggacauguucgguaugauu

SEQ ID NO: 2295815 - RNA, 19 nt, Artificial Sequence
  Description of Artificial Sequence: Synthetic oligonucleotide
gucugccgugucuaucacu

SEQ ID NO: 2295816 - RNA, 19 nt, Artificial Sequence
  Description of Artificial Sequence: Synthetic oligonucleotide
gagaucacacguggcugau

SEQ ID NO: 2295817 - RNA, 19 nt, Artificial Sequence
  Description of Artificial Sequence: Synthetic oligonucleotide
cacacguggcugauagcau

SEQ ID NO: 2295818 - RNA, 19 nt, Artificial Sequence
  Description of Artificial Sequence: Synthetic oligonucleotide
ggcucacaugugcaguagu

SEQ ID NO: 2295819 - RNA, 19 nt, Artificial Sequence
  Description of Artificial Sequence: Synthetic oligonucleotide
gggucuucugccaaauauu

SEQ ID NO: 2295820 - RNA, 19 nt, Artificial Sequence
  Description of Artificial Sequence: Synthetic oligonucleotide
ccugugccagucauaaaau

SEQ ID NO: 2295821 - RNA, 19 nt, Artificial Sequence
  Description of Artificial Sequence: Synthetic oligonucleotide
ggcugauagcaugacuuau

SEQ ID NO: 2295822 - RNA, 19 nt, Artificial Sequence
  Description of Artificial Sequence: Synthetic oligonucleotide
ccguuagggucuucugcca

SEQ ID NO: 2295823 - RNA, 19 nt, Artificial Sequence
  Description of Artificial Sequence: Synthetic oligonucleotide
ggacacucuagcacguaau

SEQ ID NO: 2295824 - RNA, 19 nt, Artificial Sequence
  Description of Artificial Sequence: Synthetic oligonucleotide
ccgugucuaucacuuccca

SEQ ID NO: 2295825 - RNA, 19 nt, Artificial Sequence
  Description of Artificial Sequence: Synthetic oligonucleotide
gcgguauggaagggacuca

SEQ ID NO: 2295826 - RNA, 19 nt, Artificial Sequence
  Description of Artificial Sequence: Synthetic oligonucleotide
gagagguauccaagcuguu

SEQ ID NO: 2295827 - RNA, 19 nt, Artificial Sequence
  Description of Artificial Sequence: Synthetic oligonucleotide
cuggacacucuagcacgua

SEQ ID NO: 2295828 - RNA, 19 nt, Artificial Sequence
  Description of Artificial Sequence: Synthetic oligonucleotide
cagucuccaaagggcggua

SEQ ID NO: 2295829 - RNA, 19 nt, Artificial Sequence
  Description of Artificial Sequence: Synthetic oligonucleotide
ggauuggcacugagaggua

SEQ ID NO: 2295830 - RNA, 19 nt, Artificial Sequence
  Description of Artificial Sequence: Synthetic oligonucleotide
gggcaguaacugagauguc

SEQ ID NO: 2295831 - RNA, 19 nt, Artificial Sequence
  Description of Artificial Sequence: Synthetic oligonucleotide
cgguauggaagggacucaa

SEQ ID NO: 2295832 - RNA, 19 nt, Artificial Sequence
  Description of Artificial Sequence: Synthetic oligonucleotide
gggcgguauggaagggacu

SEQ ID NO: 2295833 - RNA, 19 nt, Artificial Sequence
  Description of Artificial Sequence: Synthetic oligonucleotide
cacucuggucgagcaccgu

SEQ ID NO: 2295834 - RNA, 19 nt, Artificial Sequence
  Description of Artificial Sequence: Synthetic oligonucleotide
ccuuagccacgugcacaca

SEQ ID NO: 2295835 - RNA, 19 nt, Artificial Sequence
  Description of Artificial Sequence: Synthetic oligonucleotide
gccuaacuagagagccuuu

SEQ ID NO: 2295836 - RNA, 19 nt, Artificial Sequence
  Description of Artificial Sequence: Synthetic oligonucleotide
aauugcuugauucaagcgc

SEQ ID NO: 2295837 - RNA, 19 nt, Artificial Sequence
  Description of Artificial Sequence: Synthetic oligonucleotide
uuuugucugagccagauca

SEQ ID NO: 2295838 - RNA, 19 nt, Artificial Sequence
  Description of Artificial Sequence: Synthetic oligonucleotide
aacuuuccgaagcaggucc

SEQ ID NO: 2295839 - RNA, 19 nt, Artificial Sequence
  Description of Artificial Sequence: Synthetic oligonucleotide
ugaucauacacgaaguucc

SEQ ID NO: 2295840 - RNA, 19 nt, Artificial Sequence
  Description of Artificial Sequence: Synthetic oligonucleotide
ugguguuccacuauuagag

SEQ ID NO: 2295841 - RNA, 19 nt, Artificial Sequence
  Description of Artificial Sequence: Synthetic oligonucleotide
ucaaacuuuuccuucacag

SEQ ID NO: 2295842 - RNA, 19 nt, Artificial Sequence
  Description of Artificial Sequence: Synthetic oligonucleotide
aauuugcuguagcugaguc

SEQ ID NO: 2295843 - RNA, 19 nt, Artificial Sequence
  Description of Artificial Sequence: Synthetic oligonucleotide
auuagagcuguccagacca

SEQ ID NO: 2295844 - RNA, 19 nt, Artificial Sequence
  Description of Artificial Sequence: Synthetic oligonucleotide
uucaauuugcuguagcuga

SEQ ID NO: 2295845 - RNA, 19 nt, Artificial Sequence
  Description of Artificial Sequence: Synthetic oligonucleotide
aaggcgguuauucucugac

SEQ ID NO: 2295846 - RNA, 19 nt, Artificial Sequence
  Description of Artificial Sequence: Synthetic oligonucleotide
guuauucucugacaggagg

SEQ ID NO: 2295847 - RNA, 19 nt, Artificial Sequence
  Description of Artificial Sequence: Synthetic oligonucleotide
uccccaacgauguuuaggg

SEQ ID NO: 2295848 - RNA, 19 nt, Artificial Sequence
  Description of Artificial Sequence: Synthetic oligonucleotide
acagucuccaacuccauuc

SEQ ID NO: 2295849 - RNA, 19 nt, Artificial Sequence
  Description of Artificial Sequence: Synthetic oligonucleotide
ucaauugcuugauucaagc

SEQ ID NO: 2295850 - RNA, 19 nt, Artificial Sequence
  Description of Artificial Sequence: Synthetic oligonucleotide
ucauacacgaaguuccugc

SEQ ID NO: 2295851 - RNA, 19 nt, Artificial Sequence
  Description of Artificial Sequence: Synthetic oligonucleotide
uuuagggcugauauccggg

SEQ ID NO: 2295852 - RNA, 19 nt, Artificial Sequence
  Description of Artificial Sequence: Synthetic oligonucleotide
agauucuagaagauuuucc

SEQ ID NO: 2295853 - RNA, 19 nt, Artificial Sequence
  Description of Artificial Sequence: Synthetic oligonucleotide
uccagggacaugauugugg

SEQ ID NO: 2295854 - RNA, 19 nt, Artificial Sequence
  Description of Artificial Sequence: Synthetic oligonucleotide
uagaagauuuuccuuuuca

SEQ ID NO: 2295855 - RNA, 19 nt, Artificial Sequence
  Description of Artificial Sequence: Synthetic oligonucleotide
uuauucucugacaggaggu

SEQ ID NO: 2295856 - RNA, 19 nt, Artificial Sequence
  Description of Artificial Sequence: Synthetic oligonucleotide
agccagaucaucuuccaag

SEQ ID NO: 2295857 - RNA, 19 nt, Artificial Sequence
  Description of Artificial Sequence: Synthetic oligonucleotide
uacacgaaguuccugcaug

SEQ ID NO: 2295858 - RNA, 19 nt, Artificial Sequence
  Description of Artificial Sequence: Synthetic oligonucleotide
cagaucaucuuccaaggcc

SEQ ID NO: 2295859 - RNA, 19 nt, Artificial Sequence
  Description of Artificial Sequence: Synthetic oligonucleotide
uaguuuggacuccagggcc

SEQ ID NO: 2295860 - RNA, 19 nt, Artificial Sequence
  Description of Artificial Sequence: Synthetic oligonucleotide
uuggggacugaucauacac

SEQ ID NO: 2295861 - RNA, 19 nt, Artificial Sequence
  Description of Artificial Sequence: Synthetic oligonucleotide
agggacaugauuguggcuc

SEQ ID NO: 2295862 - RNA, 19 nt, Artificial Sequence
  Description of Artificial Sequence: Synthetic oligonucleotide
gcuaguuuggacuccaggg

SEQ ID NO: 2295863 - RNA, 19 nt, Artificial Sequence
  Description of Artificial Sequence: Synthetic oligonucleotide
uguuccacuauuagagcug

SEQ ID NO: 2295864 - RNA, 19 nt, Artificial Sequence
  Description of Artificial Sequence: Synthetic oligonucleotide
ucaagcgcugcucaaaguc

SEQ ID NO: 2295865 - RNA, 19 nt, Artificial Sequence
  Description of Artificial Sequence: Synthetic oligonucleotide
uucuagaagauuuuccuuu

SEQ ID NO: 2295866 - RNA, 19 nt, Artificial Sequence
  Description of Artificial Sequence: Synthetic oligonucleotide
augaugcuaguuuggacuc

SEQ ID NO: 2295867 - RNA, 19 nt, Artificial Sequence
  Description of Artificial Sequence: Synthetic oligonucleotide
ugaaugcugcauuucaaac

SEQ ID NO: 2295868 - RNA, 19 nt, Artificial Sequence
  Description of Artificial Sequence: Synthetic oligonucleotide
uggggacugaucauacacg

SEQ ID NO: 2295869 - RNA, 19 nt, Artificial Sequence
  Description of Artificial Sequence: Synthetic oligonucleotide
ugcuaguuuggacuccagg

SEQ ID NO: 2295870 - RNA, 19 nt, Artificial Sequence
  Description of Artificial Sequence: Synthetic oligonucleotide
aauauuccugguguguuca

SEQ ID NO: 2295871 - RNA, 19 nt, Artificial Sequence
  Description of Artificial Sequence: Synthetic oligonucleotide
cuaguuuggacuccagggc

SEQ ID NO: 2295872 - RNA, 19 nt, Artificial Sequence
  Description of Artificial Sequence: Synthetic oligonucleotide
uccacuauuagagcugucc

SEQ ID NO: 2295873 - RNA, 19 nt, Artificial Sequence
  Description of Artificial Sequence: Synthetic oligonucleotide
uauuagagcuguccagacc

SEQ ID NO: 2295874 - RNA, 19 nt, Artificial Sequence
  Description of Artificial Sequence: Synthetic oligonucleotide
guccuuucaguuucuacgg

SEQ ID NO: 2295875 - RNA, 19 nt, Artificial Sequence
  Description of Artificial Sequence: Synthetic oligonucleotide
uguuuagggcugauauccg

SEQ ID NO: 2295876 - RNA, 19 nt, Artificial Sequence
  Description of Artificial Sequence: Synthetic oligonucleotide
auuguggcucguuuggcuc

SEQ ID NO: 2295877 - RNA, 19 nt, Artificial Sequence
  Description of Artificial Sequence: Synthetic oligonucleotide
agugguguuccacuauuag

SEQ ID NO: 2295878 - RNA, 19 nt, Artificial Sequence
  Description of Artificial Sequence: Synthetic oligonucleotide
ugguuccucgcccugaggc

SEQ ID NO: 2295879 - RNA, 19 nt, Artificial Sequence
  Description of Artificial Sequence: Synthetic oligonucleotide
uugauucaagcgcugcuca

SEQ ID NO: 2295880 - RNA, 19 nt, Artificial Sequence
  Description of Artificial Sequence: Synthetic oligonucleotide
ucugaauauuccuggugug

SEQ ID NO: 2295881 - RNA, 19 nt, Artificial Sequence
  Description of Artificial Sequence: Synthetic oligonucleotide
uguguucaaaccagagcug

SEQ ID NO: 2295882 - RNA, 19 nt, Artificial Sequence
  Description of Artificial Sequence: Synthetic oligonucleotide
ucaaagucuuccagggaca

SEQ ID NO: 2295883 - RNA, 19 nt, Artificial Sequence
  Description of Artificial Sequence: Synthetic oligonucleotide
guuuagggcugauauccgg

SEQ ID NO: 2295884 - RNA, 19 nt, Artificial Sequence
  Description of Artificial Sequence: Synthetic oligonucleotide
guguguucaaaccagagcu

SEQ ID NO: 2295885 - RNA, 19 nt, Artificial Sequence
  Description of Artificial Sequence: Synthetic oligonucleotide
ugaucuuuaauggcuuuug

SEQ ID NO: 2295886 - RNA, 19 nt, Artificial Sequence
  Description of Artificial Sequence: Synthetic oligonucleotide
ugucugagccagaucaucu

SEQ ID NO: 2295887 - RNA, 19 nt, Artificial Sequence
  Description of Artificial Sequence: Synthetic oligonucleotide
ggaauuucucgguaguucc

SEQ ID NO: 2295888 - RNA, 19 nt, Artificial Sequence
  Description of Artificial Sequence: Synthetic oligonucleotide
cugcuuguaggucauggcc

SEQ ID NO: 2295889 - RNA, 19 nt, Artificial Sequence
  Description of Artificial Sequence: Synthetic oligonucleotide
cugauauccgggcugcagg

SEQ ID NO: 2295890 - RNA, 19 nt, Artificial Sequence
  Description of Artificial Sequence: Synthetic oligonucleotide
uggcuuguuccaauucccg

SEQ ID NO: 2295891 - RNA, 19 nt, Artificial Sequence
  Description of Artificial Sequence: Synthetic oligonucleotide
ugguguguucaaaccagag

SEQ ID NO: 2295892 - RNA, 19 nt, Artificial Sequence
  Description of Artificial Sequence: Synthetic oligonucleotide
caugauuguggcucguuug

SEQ ID NO: 2295893 - RNA, 19 nt, Artificial Sequence
  Description of Artificial Sequence: Synthetic oligonucleotide
acuuguccggcuuggggac

SEQ ID NO: 2295894 - RNA, 19 nt, Artificial Sequence
  Description of Artificial Sequence: Synthetic oligonucleotide
cugcucaaagucuuccagg

SEQ ID NO: 2295895 - RNA, 19 nt, Artificial Sequence
  Description of Artificial Sequence: Synthetic oligonucleotide
acuauuagagcuguccaga

SEQ ID NO: 2295896 - RNA, 19 nt, Artificial Sequence
  Description of Artificial Sequence: Synthetic oligonucleotide
guguucaaaccagagcugg

SEQ ID NO: 2295897 - RNA, 19 nt, Artificial Sequence
  Description of Artificial Sequence: Synthetic oligonucleotide
cuuccuguguauucucugc

SEQ ID NO: 2295898 - RNA, 19 nt, Artificial Sequence
  Description of Artificial Sequence: Synthetic oligonucleotide
ucuacggagccuggcaugg

SEQ ID NO: 2295899 - RNA, 19 nt, Artificial Sequence
  Description of Artificial Sequence: Synthetic oligonucleotide
uucccgacuucccuccugg

SEQ ID NO: 2295900 - RNA, 19 nt, Artificial Sequence
  Description of Artificial Sequence: Synthetic oligonucleotide
cacuauuagagcuguccag

SEQ ID NO: 2295901 - RNA, 19 nt, Artificial Sequence
  Description of Artificial Sequence: Synthetic oligonucleotide
auacuucccgacuucccuc

SEQ ID NO: 2295902 - RNA, 19 nt, Artificial Sequence
  Description of Artificial Sequence: Synthetic oligonucleotide
uuggccgucugucaccacc

SEQ ID NO: 2295903 - RNA, 19 nt, Artificial Sequence
  Description of Artificial Sequence: Synthetic oligonucleotide
acacuggugccgcuuggcc

SEQ ID NO: 2295904 - RNA, 19 nt, Artificial Sequence
  Description of Artificial Sequence: Synthetic oligonucleotide
uuucucgguaguuccuucc

SEQ ID NO: 2295905 - RNA, 19 nt, Artificial Sequence
  Description of Artificial Sequence: Synthetic oligonucleotide
ucugccgguagccuucuga

SEQ ID NO: 2295906 - RNA, 19 nt, Artificial Sequence
  Description of Artificial Sequence: Synthetic oligonucleotide
cugagccagaucaucuucc

SEQ ID NO: 2295907 - RNA, 19 nt, Artificial Sequence
  Description of Artificial Sequence: Synthetic oligonucleotide
caauucagcuucauacuuc

SEQ ID NO: 2295908 - RNA, 19 nt, Artificial Sequence
  Description of Artificial Sequence: Synthetic oligonucleotide
auuucucgguaguuccuuc

SEQ ID NO: 2295909 - RNA, 19 nt, Artificial Sequence
  Description of Artificial Sequence: Synthetic oligonucleotide
uucgaaggcgguuauucuc

SEQ ID NO: 2295910 - RNA, 19 nt, Artificial Sequence
  Description of Artificial Sequence: Synthetic oligonucleotide
guagccuucugaaugcugc

SEQ ID NO: 2295911 - RNA, 19 nt, Artificial Sequence
  Description of Artificial Sequence: Synthetic oligonucleotide
caugaugcuaguuuggacu

SEQ ID NO: 2295912 - RNA, 19 nt, Artificial Sequence
  Description of Artificial Sequence: Synthetic oligonucleotide
cgaaguuccugcaugaugc

SEQ ID NO: 2295913 - RNA, 19 nt, Artificial Sequence
  Description of Artificial Sequence: Synthetic oligonucleotide
uuccugguguguucaaacc

SEQ ID NO: 2295914 - RNA, 19 nt, Artificial Sequence
  Description of Artificial Sequence: Synthetic oligonucleotide
cuauuagagcuguccagac

SEQ ID NO: 2295915 - RNA, 19 nt, Artificial Sequence
  Description of Artificial Sequence: Synthetic oligonucleotide
auuugcuguagcugagucu

SEQ ID NO: 2295916 - RNA, 19 nt, Artificial Sequence
  Description of Artificial Sequence: Synthetic oligonucleotide
ggcgguuauucucugacag

SEQ ID NO: 2295917 - RNA, 19 nt, Artificial Sequence
  Description of Artificial Sequence: Synthetic oligonucleotide
ucuagaagauuuuccuuuu

SEQ ID NO: 2295918 - RNA, 19 nt, Artificial Sequence
  Description of Artificial Sequence: Synthetic oligonucleotide
cauucgaaggcgguuauuc

SEQ ID NO: 2295919 - RNA, 19 nt, Artificial Sequence
  Description of Artificial Sequence: Synthetic oligonucleotide
aguuuggacuccagggccc

SEQ ID NO: 2295920 - RNA, 19 nt, Artificial Sequence
  Description of Artificial Sequence: Synthetic oligonucleotide
gaauauuccugguguguuc

SEQ ID NO: 2295921 - RNA, 19 nt, Artificial Sequence
  Description of Artificial Sequence: Synthetic oligonucleotide
uuucuacggagccuggcau

SEQ ID NO: 2295922 - RNA, 19 nt, Artificial Sequence
  Description of Artificial Sequence: Synthetic oligonucleotide
gguguguucaaaccagagc

SEQ ID NO: 2295923 - RNA, 19 nt, Artificial Sequence
  Description of Artificial Sequence: Synthetic oligonucleotide
aguuucuacggagccuggc

SEQ ID NO: 2295924 - RNA, 19 nt, Artificial Sequence
  Description of Artificial Sequence: Synthetic oligonucleotide
ugauauccgggcugcaggu

SEQ ID NO: 2295925 - RNA, 19 nt, Artificial Sequence
  Description of Artificial Sequence: Synthetic oligonucleotide
ugcugcauuucaaacuuuu

SEQ ID NO: 2295926 - RNA, 19 nt, Artificial Sequence
  Description of Artificial Sequence: Synthetic oligonucleotide
agagccuguggcuugcaca

SEQ ID NO: 2295927 - RNA, 19 nt, Artificial Sequence
  Description of Artificial Sequence: Synthetic oligonucleotide
uguguauucucugcccucu

SEQ ID NO: 2295928 - RNA, 19 nt, Artificial Sequence
  Description of Artificial Sequence: Synthetic oligonucleotide
ugcacagauucuagaagau

SEQ ID NO: 2295929 - RNA, 19 nt, Artificial Sequence
  Description of Artificial Sequence: Synthetic oligonucleotide
cugcaugaugcuaguuugg

SEQ ID NO: 2295930 - RNA, 19 nt, Artificial Sequence
  Description of Artificial Sequence: Synthetic oligonucleotide
ugcaugaugcuaguuugga

SEQ ID NO: 2295931 - RNA, 19 nt, Artificial Sequence
  Description of Artificial Sequence: Synthetic oligonucleotide
auauccgggcugcaggugu

SEQ ID NO: 2295932 - RNA, 19 nt, Artificial Sequence
  Description of Artificial Sequence: Synthetic oligonucleotide
uacuucccgacuucccucc

SEQ ID NO: 2295933 - RNA, 19 nt, Artificial Sequence
  Description of Artificial Sequence: Synthetic oligonucleotide
auucgaaggcgguuauucu

SEQ ID NO: 2295934 - RNA, 19 nt, Artificial Sequence
  Description of Artificial Sequence: Synthetic oligonucleotide
ugagugguguuccacuauu

SEQ ID NO: 2295935 - RNA, 19 nt, Artificial Sequence
  Description of Artificial Sequence: Synthetic oligonucleotide
ucugacaggaggucccggu

SEQ ID NO: 2295936 - RNA, 19 nt, Artificial Sequence
  Description of Artificial Sequence: Synthetic oligonucleotide
cuugauucaagcgcugcuc

SEQ ID NO: 2295937 - RNA, 19 nt, Artificial Sequence
  Description of Artificial Sequence: Synthetic oligonucleotide
aagcagguccccaacgaug

SEQ ID NO: 2295938 - RNA, 19 nt, Artificial Sequence
  Description of Artificial Sequence: Synthetic oligonucleotide
gucugaauauuccuggugu

SEQ ID NO: 2295939 - RNA, 19 nt, Artificial Sequence
  Description of Artificial Sequence: Synthetic oligonucleotide
uucuacggagccuggcaug

SEQ ID NO: 2295940 - RNA, 19 nt, Artificial Sequence
  Description of Artificial Sequence: Synthetic oligonucleotide
auuccugccgaagaucucu

SEQ ID NO: 2295941 - RNA, 19 nt, Artificial Sequence
  Description of Artificial Sequence: Synthetic oligonucleotide
acacgaaguuccugcauga

SEQ ID NO: 2295942 - RNA, 19 nt, Artificial Sequence
  Description of Artificial Sequence: Synthetic oligonucleotide
uuugucugagccagaucau

SEQ ID NO: 2295943 - RNA, 19 nt, Artificial Sequence
  Description of Artificial Sequence: Synthetic oligonucleotide
gguuucaauuugcuguagc

SEQ ID NO: 2295944 - RNA, 19 nt, Artificial Sequence
  Description of Artificial Sequence: Synthetic oligonucleotide
guuucuacggagccuggca

SEQ ID NO: 2295945 - RNA, 19 nt, Artificial Sequence
  Description of Artificial Sequence: Synthetic oligonucleotide
ugugggaguggauggcaca

SEQ ID NO: 2295946 - RNA, 19 nt, Artificial Sequence
  Description of Artificial Sequence: Synthetic oligonucleotide
acuggugccgcuuggccgu

SEQ ID NO: 2295947 - RNA, 19 nt, Artificial Sequence
  Description of Artificial Sequence: Synthetic oligonucleotide
ucuccaauucagcuucaua

SEQ ID NO: 2295948 - RNA, 19 nt, Artificial Sequence
  Description of Artificial Sequence: Synthetic oligonucleotide
ugugagugguguuccacua

SEQ ID NO: 2295949 - RNA, 19 nt, Artificial Sequence
  Description of Artificial Sequence: Synthetic oligonucleotide
gugguguuccacuauuaga

SEQ ID NO: 2295950 - RNA, 19 nt, Artificial Sequence
  Description of Artificial Sequence: Synthetic oligonucleotide
caacuccauucgaaggcgg

SEQ ID NO: 2295951 - RNA, 19 nt, Artificial Sequence
  Description of Artificial Sequence: Synthetic oligonucleotide
gucauggccaggucucucc

SEQ ID NO: 2295952 - RNA, 19 nt, Artificial Sequence
  Description of Artificial Sequence: Synthetic oligonucleotide
ggcuuguuccaauucccgg

SEQ ID NO: 2295953 - RNA, 19 nt, Artificial Sequence
  Description of Artificial Sequence: Synthetic oligonucleotide
gaccacgucugaauauucc

SEQ ID NO: 2295954 - RNA, 19 nt, Artificial Sequence
  Description of Artificial Sequence: Synthetic oligonucleotide
guuccugguuucaauuugc

SEQ ID NO: 2295955 - RNA, 19 nt, Artificial Sequence
  Description of Artificial Sequence: Synthetic oligonucleotide
acuuuccgaagcagguccc

SEQ ID NO: 2295956 - RNA, 19 nt, Artificial Sequence
  Description of Artificial Sequence: Synthetic oligonucleotide
ucgguaguuccuuccugug

SEQ ID NO: 2295957 - RNA, 19 nt, Artificial Sequence
  Description of Artificial Sequence: Synthetic oligonucleotide
cagauucuagaagauuuuc

SEQ ID NO: 2295958 - RNA, 19 nt, Artificial Sequence
  Description of Artificial Sequence: Synthetic oligonucleotide
guccccaacgauguuuagg

SEQ ID NO: 2295959 - RNA, 19 nt, Artificial Sequence
  Description of Artificial Sequence: Synthetic oligonucleotide
ugcuugauucaagcgcugc

SEQ ID NO: 2295960 - RNA, 19 nt, Artificial Sequence
  Description of Artificial Sequence: Synthetic oligonucleotide
cacagauucuagaagauuu

SEQ ID NO: 2295961 - RNA, 19 nt, Artificial Sequence
  Description of Artificial Sequence: Synthetic oligonucleotide
gccgguagccuucugaaug

SEQ ID NO: 2295962 - RNA, 19 nt, Artificial Sequence
  Description of Artificial Sequence: Synthetic oligonucleotide
ccugcaugaugcuaguuug

SEQ ID NO: 2295963 - RNA, 19 nt, Artificial Sequence
  Description of Artificial Sequence: Synthetic oligonucleotide
caaggccgagaucugccgg

SEQ ID NO: 2295964 - RNA, 19 nt, Artificial Sequence
  Description of Artificial Sequence: Synthetic oligonucleotide
acaugauuguggcucguuu

SEQ ID NO: 2295965 - RNA, 19 nt, Artificial Sequence
  Description of Artificial Sequence: Synthetic oligonucleotide
ccuuucaguuucuacggag

SEQ ID NO: 2295966 - RNA, 19 nt, Artificial Sequence
  Description of Artificial Sequence: Synthetic oligonucleotide
gaugcuaguuuggacucca

SEQ ID NO: 2295967 - RNA, 19 nt, Artificial Sequence
  Description of Artificial Sequence: Synthetic oligonucleotide
uuccaauucccggauguau

SEQ ID NO: 2295968 - RNA, 19 nt, Artificial Sequence
  Description of Artificial Sequence: Synthetic oligonucleotide
cauuggcuuguuccaauuc

SEQ ID NO: 2295969 - RNA, 19 nt, Artificial Sequence
  Description of Artificial Sequence: Synthetic oligonucleotide
caguugaucuuuaauggcu

SEQ ID NO: 2295970 - RNA, 19 nt, Artificial Sequence
  Description of Artificial Sequence: Synthetic oligonucleotide
gguguuccacuauuagagc

SEQ ID NO: 2295971 - RNA, 19 nt, Artificial Sequence
  Description of Artificial Sequence: Synthetic oligonucleotide
uucaagcgcugcucaaagu

SEQ ID NO: 2295972 - RNA, 19 nt, Artificial Sequence
  Description of Artificial Sequence: Synthetic oligonucleotide
uugguuccucgcccugagg

SEQ ID NO: 2295973 - RNA, 19 nt, Artificial Sequence
  Description of Artificial Sequence: Synthetic oligonucleotide
ugauucaagcgcugcucaa

SEQ ID NO: 2295974 - RNA, 19 nt, Artificial Sequence
  Description of Artificial Sequence: Synthetic oligonucleotide
cauacacgaaguuccugca

SEQ ID NO: 2295975 - RNA, 19 nt, Artificial Sequence
  Description of Artificial Sequence: Synthetic oligonucleotide
cucgcccugaggcuggccc

SEQ ID NO: 2295976 - RNA, 19 nt, Artificial Sequence
  Description of Artificial Sequence: Synthetic oligonucleotide
gaucuuuaauggcuuuugu

SEQ ID NO: 2295977 - RNA, 19 nt, Artificial Sequence
  Description of Artificial Sequence: Synthetic oligonucleotide
uuggcucucuccaggucgu

SEQ ID NO: 2295978 - RNA, 19 nt, Artificial Sequence
  Description of Artificial Sequence: Synthetic oligonucleotide
aucacccacacuggugccg

SEQ ID NO: 2295979 - RNA, 19 nt, Artificial Sequence
  Description of Artificial Sequence: Synthetic oligonucleotide
uggcauggguguccggggc

SEQ ID NO: 2295980 - RNA, 19 nt, Artificial Sequence
  Description of Artificial Sequence: Synthetic oligonucleotide
guguuccacuauuagagcu

SEQ ID NO: 2295981 - RNA, 19 nt, Artificial Sequence
  Description of Artificial Sequence: Synthetic oligonucleotide
uuccucgcccugaggcugg

SEQ ID NO: 2295982 - RNA, 19 nt, Artificial Sequence
  Description of Artificial Sequence: Synthetic oligonucleotide
acgucugaauauuccuggu

SEQ ID NO: 2295983 - RNA, 19 nt, Artificial Sequence
  Description of Artificial Sequence: Synthetic oligonucleotide
auacacgaaguuccugcau

SEQ ID NO: 2295984 - RNA, 19 nt, Artificial Sequence
  Description of Artificial Sequence: Synthetic oligonucleotide
uggccgucugucaccacca

SEQ ID NO: 2295985 - RNA, 19 nt, Artificial Sequence
  Description of Artificial Sequence: Synthetic oligonucleotide
uguaggucauggccagguc

SEQ ID NO: 2295986 - RNA, 19 nt, Artificial Sequence
  Description of Artificial Sequence: Synthetic oligonucleotide
ccaacgauguuuagggcug

SEQ ID NO: 2295987 - RNA, 19 nt, Artificial Sequence
  Description of Artificial Sequence: Synthetic oligonucleotide
gggacaugauuguggcucg

SEQ ID NO: 2295988 - RNA, 19 nt, Artificial Sequence
  Description of Artificial Sequence: Synthetic oligonucleotide
aacuccauucgaaggcggu

SEQ ID NO: 2295989 - RNA, 19 nt, Artificial Sequence
  Description of Artificial Sequence: Synthetic oligonucleotide
aucauacacgaaguuccug

SEQ ID NO: 2295990 - RNA, 19 nt, Artificial Sequence
  Description of Artificial Sequence: Synthetic oligonucleotide
uugucugagccagaucauc

SEQ ID NO: 2295991 - RNA, 19 nt, Artificial Sequence
  Description of Artificial Sequence: Synthetic oligonucleotide
gcuuguaggucauggccag

SEQ ID NO: 2295992 - RNA, 19 nt, Artificial Sequence
  Description of Artificial Sequence: Synthetic oligonucleotide
gauucaagcgcugcucaaa

SEQ ID NO: 2295993 - RNA, 19 nt, Artificial Sequence
  Description of Artificial Sequence: Synthetic oligonucleotide
uauccgggcugcaggugug

SEQ ID NO: 2295994 - RNA, 19 nt, Artificial Sequence
  Description of Artificial Sequence: Synthetic oligonucleotide
uccauucgaaggcgguuau

SEQ ID NO: 2295995 - RNA, 19 nt, Artificial Sequence
  Description of Artificial Sequence: Synthetic oligonucleotide
cuguguauucucugcccuc

SEQ ID NO: 2295996 - RNA, 19 nt, Artificial Sequence
  Description of Artificial Sequence: Synthetic oligonucleotide
gguaguuccuuccugugua

SEQ ID NO: 2295997 - RNA, 19 nt, Artificial Sequence
  Description of Artificial Sequence: Synthetic oligonucleotide
agaccacgucugaauauuc

SEQ ID NO: 2295998 - RNA, 19 nt, Artificial Sequence
  Description of Artificial Sequence: Synthetic oligonucleotide
gugggaguggauggcacag

SEQ ID NO: 2295999 - RNA, 19 nt, Artificial Sequence
  Description of Artificial Sequence: Synthetic oligonucleotide
ggggacugaucauacacga

SEQ ID NO: 2296000 - RNA, 19 nt, Artificial Sequence
  Description of Artificial Sequence: Synthetic oligonucleotide
gcgguuauucucugacagg

SEQ ID NO: 2296001 - RNA, 19 nt, Artificial Sequence
  Description of Artificial Sequence: Synthetic oligonucleotide
cuuuugucugagccagauc

SEQ ID NO: 2296002 - RNA, 19 nt, Artificial Sequence
  Description of Artificial Sequence: Synthetic oligonucleotide
caauaguuggcuucuuccu

SEQ ID NO: 2296003 - RNA, 19 nt, Artificial Sequence
  Description of Artificial Sequence: Synthetic oligonucleotide
guaggucauggccaggucu

SEQ ID NO: 2296004 - RNA, 19 nt, Artificial Sequence
  Description of Artificial Sequence: Synthetic oligonucleotide
agagcuguccagaccacgu

SEQ ID NO: 2296005 - RNA, 19 nt, Artificial Sequence
  Description of Artificial Sequence: Synthetic oligonucleotide
ggccccaacuuuccgaagc

SEQ ID NO: 2296006 - RNA, 19 nt, Artificial Sequence
  Description of Artificial Sequence: Synthetic oligonucleotide
gauauccgggcugcaggug

SEQ ID NO: 2296007 - RNA, 19 nt, Artificial Sequence
  Description of Artificial Sequence: Synthetic oligonucleotide
uucaaccucugcacagauu

SEQ ID NO: 2296008 - RNA, 19 nt, Artificial Sequence
  Description of Artificial Sequence: Synthetic oligonucleotide
gaaggcgguuauucucuga

SEQ ID NO: 2296009 - RNA, 19 nt, Artificial Sequence
  Description of Artificial Sequence: Synthetic oligonucleotide
uuccgaagcagguccccaa

SEQ ID NO: 2296010 - RNA, 19 nt, Artificial Sequence
  Description of Artificial Sequence: Synthetic oligonucleotide
agggccccaacuuuccgaa

SEQ ID NO: 2296011 - RNA, 19 nt, Artificial Sequence
  Description of Artificial Sequence: Synthetic oligonucleotide
acagccaauuccugccgaa

SEQ ID NO: 2296012 - RNA, 19 nt, Artificial Sequence
  Description of Artificial Sequence: Synthetic oligonucleotide
cagcuucauacuucccgac

SEQ ID NO: 2296013 - RNA, 19 nt, Artificial Sequence
  Description of Artificial Sequence: Synthetic oligonucleotide
aggcgguuauucucugaca

SEQ ID NO: 2296014 - RNA, 19 nt, Artificial Sequence
  Description of Artificial Sequence: Synthetic oligonucleotide
uccugccgaagaucucuug

SEQ ID NO: 2296015 - RNA, 19 nt, Artificial Sequence
  Description of Artificial Sequence: Synthetic oligonucleotide
caguuucuacggagccugg

SEQ ID NO: 2296016 - RNA, 19 nt, Artificial Sequence
  Description of Artificial Sequence: Synthetic oligonucleotide
uucccuccuggaauuucuc

SEQ ID NO: 2296017 - RNA, 19 nt, Artificial Sequence
  Description of Artificial Sequence: Synthetic oligonucleotide
uguccggggcuugucuugc

SEQ ID NO: 2296018 - RNA, 19 nt, Artificial Sequence
  Description of Artificial Sequence: Synthetic oligonucleotide
ugucuugcuucugcugcac

SEQ ID NO: 2296019 - RNA, 19 nt, Artificial Sequence
  Description of Artificial Sequence: Synthetic oligonucleotide
guuccucgcccugaggcug

SEQ ID NO: 2296020 - RNA, 19 nt, Artificial Sequence
  Description of Artificial Sequence: Synthetic oligonucleotide
gguuauucucugacaggag

SEQ ID NO: 2296021 - RNA, 19 nt, Artificial Sequence
  Description of Artificial Sequence: Synthetic oligonucleotide
gcaugaugcuaguuuggac

SEQ ID NO: 2296022 - RNA, 19 nt, Artificial Sequence
  Description of Artificial Sequence: Synthetic oligonucleotide
ucucuccaauaguuggcuu

SEQ ID NO: 2296023 - RNA, 19 nt, Artificial Sequence
  Description of Artificial Sequence: Synthetic oligonucleotide
uccggcuuggggacugauc

SEQ ID NO: 2296024 - RNA, 19 nt, Artificial Sequence
  Description of Artificial Sequence: Synthetic oligonucleotide
ugucaccaccaucucuguu

SEQ ID NO: 2296025 - RNA, 19 nt, Artificial Sequence
  Description of Artificial Sequence: Synthetic oligonucleotide
auucccggauguauuucug

SEQ ID NO: 2296026 - RNA, 19 nt, Artificial Sequence
  Description of Artificial Sequence: Synthetic oligonucleotide
ggucucuccaauaguuggc

SEQ ID NO: 2296027 - RNA, 19 nt, Artificial Sequence
  Description of Artificial Sequence: Synthetic oligonucleotide
auauuccugguguguucaa

SEQ ID NO: 2296028 - RNA, 19 nt, Artificial Sequence
  Description of Artificial Sequence: Synthetic oligonucleotide
guguccggggcuugucuug

SEQ ID NO: 2296029 - RNA, 19 nt, Artificial Sequence
  Description of Artificial Sequence: Synthetic oligonucleotide
uggauggcacagagccugu

SEQ ID NO: 2296030 - RNA, 19 nt, Artificial Sequence
  Description of Artificial Sequence: Synthetic oligonucleotide
guuuggacuccagggcccc

SEQ ID NO: 2296031 - RNA, 19 nt, Artificial Sequence
  Description of Artificial Sequence: Synthetic oligonucleotide
aagcgcugcucaaagucuu

SEQ ID NO: 2296032 - RNA, 19 nt, Artificial Sequence
  Description of Artificial Sequence: Synthetic oligonucleotide
cuuggggacugaucauaca

SEQ ID NO: 2296033 - RNA, 19 nt, Artificial Sequence
  Description of Artificial Sequence: Synthetic oligonucleotide
gggcuugucuugcuucugc

SEQ ID NO: 2296034 - RNA, 19 nt, Artificial Sequence
  Description of Artificial Sequence: Synthetic oligonucleotide
ccgguagccuucugaaugc

SEQ ID NO: 2296035 - RNA, 19 nt, Artificial Sequence
  Description of Artificial Sequence: Synthetic oligonucleotide
cagccaauuccugccgaag

SEQ ID NO: 2296036 - RNA, 19 nt, Artificial Sequence
  Description of Artificial Sequence: Synthetic oligonucleotide
gaucaucuuccaaggccga

SEQ ID NO: 2296037 - RNA, 19 nt, Artificial Sequence
  Description of Artificial Sequence: Synthetic oligonucleotide
gcucccuuaucacccacac

SEQ ID NO: 2296038 - RNA, 19 nt, Artificial Sequence
  Description of Artificial Sequence: Synthetic oligonucleotide
gaucauacacgaaguuccu

SEQ ID NO: 2296039 - RNA, 19 nt, Artificial Sequence
  Description of Artificial Sequence: Synthetic oligonucleotide
gaagcagguccccaacgau

SEQ ID NO: 2296040 - RNA, 19 nt, Artificial Sequence
  Description of Artificial Sequence: Synthetic oligonucleotide
ccaaggccgagaucugccg

SEQ ID NO: 2296041 - RNA, 19 nt, Artificial Sequence
  Description of Artificial Sequence: Synthetic oligonucleotide
ccacuuguccggcuugggg

SEQ ID NO: 2296042 - RNA, 19 nt, Artificial Sequence
  Description of Artificial Sequence: Synthetic oligonucleotide
uuguccggcuuggggacug

SEQ ID NO: 2296043 - RNA, 19 nt, Artificial Sequence
  Description of Artificial Sequence: Synthetic oligonucleotide
caagcgcugcucaaagucu

SEQ ID NO: 2296044 - RNA, 19 nt, Artificial Sequence
  Description of Artificial Sequence: Synthetic oligonucleotide
cucgguaguuccuuccugu

SEQ ID NO: 2296045 - RNA, 19 nt, Artificial Sequence
  Description of Artificial Sequence: Synthetic oligonucleotide
cccggauguauuucugcag

SEQ ID NO: 2296046 - RNA, 19 nt, Artificial Sequence
  Description of Artificial Sequence: Synthetic oligonucleotide
cuucccgacuucccuccug

SEQ ID NO: 2296047 - RNA, 19 nt, Artificial Sequence
  Description of Artificial Sequence: Synthetic oligonucleotide
uuccacuauuagagcuguc

SEQ ID NO: 2296048 - RNA, 19 nt, Artificial Sequence
  Description of Artificial Sequence: Synthetic oligonucleotide
cugccgguagccuucugaa

SEQ ID NO: 2296049 - RNA, 19 nt, Artificial Sequence
  Description of Artificial Sequence: Synthetic oligonucleotide
cacagagccuguggcuugc

SEQ ID NO: 2296050 - RNA, 19 nt, Artificial Sequence
  Description of Artificial Sequence: Synthetic oligonucleotide
gccgagaucugccgguagc

SEQ ID NO: 2296051 - RNA, 19 nt, Artificial Sequence
  Description of Artificial Sequence: Synthetic oligonucleotide
agcgcugcucaaagucuuc

SEQ ID NO: 2296052 - RNA, 19 nt, Artificial Sequence
  Description of Artificial Sequence: Synthetic oligonucleotide
cuuccagggacaugauugu

SEQ ID NO: 2296053 - RNA, 19 nt, Artificial Sequence
  Description of Artificial Sequence: Synthetic oligonucleotide
cugaauauuccuggugugu

SEQ ID NO: 2296054 - RNA, 19 nt, Artificial Sequence
  Description of Artificial Sequence: Synthetic oligonucleotide
ugccgguagccuucugaau

SEQ ID NO: 2296055 - RNA, 19 nt, Artificial Sequence
  Description of Artificial Sequence: Synthetic oligonucleotide
ugccgcuuggccgucuguc

SEQ ID NO: 2296056 - RNA, 19 nt, Artificial Sequence
  Description of Artificial Sequence: Synthetic oligonucleotide
ccacuauuagagcugucca

SEQ ID NO: 2296057 - RNA, 19 nt, Artificial Sequence
  Description of Artificial Sequence: Synthetic oligonucleotide
guuccacuauuagagcugu

SEQ ID NO: 2296058 - RNA, 19 nt, Artificial Sequence
  Description of Artificial Sequence: Synthetic oligonucleotide
uccggggcuugucuugcuu

SEQ ID NO: 2296059 - RNA, 19 nt, Artificial Sequence
  Description of Artificial Sequence: Synthetic oligonucleotide
uggccaggucucuccaaua

SEQ ID NO: 2296060 - RNA, 19 nt, Artificial Sequence
  Description of Artificial Sequence: Synthetic oligonucleotide
cuuguuccaauucccggau

SEQ ID NO: 2296061 - RNA, 19 nt, Artificial Sequence
  Description of Artificial Sequence: Synthetic oligonucleotide
gagaucugccgguagccuu

SEQ ID NO: 2296062 - RNA, 19 nt, Artificial Sequence
  Description of Artificial Sequence: Synthetic oligonucleotide
acuccauucgaaggcgguu

SEQ ID NO: 2296063 - RNA, 19 nt, Artificial Sequence
  Description of Artificial Sequence: Synthetic oligonucleotide
cugccgaagaucucuugcu

SEQ ID NO: 2296064 - RNA, 19 nt, Artificial Sequence
  Description of Artificial Sequence: Synthetic oligonucleotide
cucugcccucugcuuguag

SEQ ID NO: 2296065 - RNA, 19 nt, Artificial Sequence
  Description of Artificial Sequence: Synthetic oligonucleotide
cacagccaauuccugccga

SEQ ID NO: 2296066 - RNA, 19 nt, Artificial Sequence
  Description of Artificial Sequence: Synthetic oligonucleotide
acggagccuggcaugggug

SEQ ID NO: 2296067 - RNA, 19 nt, Artificial Sequence
  Description of Artificial Sequence: Synthetic oligonucleotide
acuucccgacuucccuccu

SEQ ID NO: 2296068 - RNA, 19 nt, Artificial Sequence
  Description of Artificial Sequence: Synthetic oligonucleotide
ccgucugucaccaccaucu

SEQ ID NO: 2296069 - RNA, 19 nt, Artificial Sequence
  Description of Artificial Sequence: Synthetic oligonucleotide
gucucuccaauaguuggcu

SEQ ID NO: 2296070 - RNA, 19 nt, Artificial Sequence
  Description of Artificial Sequence: Synthetic oligonucleotide
gucauuggcuuguuccaau

SEQ ID NO: 2296071 - RNA, 19 nt, Artificial Sequence
  Description of Artificial Sequence: Synthetic oligonucleotide
uguggcucguuuggcucuc

SEQ ID NO: 2296072 - RNA, 19 nt, Artificial Sequence
  Description of Artificial Sequence: Synthetic oligonucleotide
cccaacgauguuuagggcu

SEQ ID NO: 2296073 - RNA, 19 nt, Artificial Sequence
  Description of Artificial Sequence: Synthetic oligonucleotide
gcuuggggacugaucauac

SEQ ID NO: 2296074 - RNA, 19 nt, Artificial Sequence
  Description of Artificial Sequence: Synthetic oligonucleotide
gcuguccagaccacgucug

SEQ ID NO: 2296075 - RNA, 19 nt, Artificial Sequence
  Description of Artificial Sequence: Synthetic oligonucleotide
ucccgacuucccuccugga

SEQ ID NO: 2296076 - RNA, 19 nt, Artificial Sequence
  Description of Artificial Sequence: Synthetic oligonucleotide
cuccauucgaaggcgguua

SEQ ID NO: 2296077 - RNA, 19 nt, Artificial Sequence
  Description of Artificial Sequence: Synthetic oligonucleotide
augcuaguuuggacuccag

SEQ ID NO: 2296078 - RNA, 19 nt, Artificial Sequence
  Description of Artificial Sequence: Synthetic oligonucleotide
ccaacuuuccgaagcaggu

SEQ ID NO: 2296079 - RNA, 19 nt, Artificial Sequence
  Description of Artificial Sequence: Synthetic oligonucleotide
ccgagaucugccgguagcc

SEQ ID NO: 2296080 - RNA, 19 nt, Artificial Sequence
  Description of Artificial Sequence: Synthetic oligonucleotide
gcuugauucaagcgcugcu

SEQ ID NO: 2296081 - RNA, 19 nt, Artificial Sequence
  Description of Artificial Sequence: Synthetic oligonucleotide
cgguuauucucugacagga

SEQ ID NO: 2296082 - RNA, 19 nt, Artificial Sequence
  Description of Artificial Sequence: Synthetic oligonucleotide
cuguagcugagucuccaau

SEQ ID NO: 2296083 - RNA, 19 nt, Artificial Sequence
  Description of Artificial Sequence: Synthetic oligonucleotide
ucccgguuccugguuucaa

SEQ ID NO: 2296084 - RNA, 19 nt, Artificial Sequence
  Description of Artificial Sequence: Synthetic oligonucleotide
ccccaacgauguuuagggc

SEQ ID NO: 2296085 - RNA, 19 nt, Artificial Sequence
  Description of Artificial Sequence: Synthetic oligonucleotide
gugagugguguuccacuau

SEQ ID NO: 2296086 - RNA, 19 nt, Artificial Sequence
  Description of Artificial Sequence: Synthetic oligonucleotide
ggccgagaucugccgguag

SEQ ID NO: 2296087 - RNA, 19 nt, Artificial Sequence
  Description of Artificial Sequence: Synthetic oligonucleotide
gccccaacuuuccgaagca

SEQ ID NO: 2296088 - RNA, 19 nt, Artificial Sequence
  Description of Artificial Sequence: Synthetic oligonucleotide
cuugcacagccaugucugu

SEQ ID NO: 2296089 - RNA, 19 nt, Artificial Sequence
  Description of Artificial Sequence: Synthetic oligonucleotide
auggguguccggggcuugu

SEQ ID NO: 2296090 - RNA, 19 nt, Artificial Sequence
  Description of Artificial Sequence: Synthetic oligonucleotide
cuuggccgucugucaccac

SEQ ID NO: 2296091 - RNA, 19 nt, Artificial Sequence
  Description of Artificial Sequence: Synthetic oligonucleotide
ggcccacuuguccggcuug

SEQ ID NO: 2296092 - RNA, 19 nt, Artificial Sequence
  Description of Artificial Sequence: Synthetic oligonucleotide
ggucgucauuggcuuguuc

SEQ ID NO: 2296093 - RNA, 19 nt, Artificial Sequence
  Description of Artificial Sequence: Synthetic oligonucleotide
ggucccgguuccugguuuc

SEQ ID NO: 2296094 - RNA, 19 nt, Artificial Sequence
  Description of Artificial Sequence: Synthetic oligonucleotide
ccugaggcuggcccacuug

SEQ ID NO: 2296095 - RNA, 19 nt, Artificial Sequence
  Description of Artificial Sequence: Synthetic oligonucleotide
gccaauuccugccgaagau

SEQ ID NO: 2296096 - RNA, 19 nt, Artificial Sequence
  Description of Artificial Sequence: Synthetic oligonucleotide
caacgauguuuagggcuga

SEQ ID NO: 2296097 - RNA, 19 nt, Artificial Sequence
  Description of Artificial Sequence: Synthetic oligonucleotide
uggguguccggggcuuguc

SEQ ID NO: 2296098 - RNA, 19 nt, Artificial Sequence
  Description of Artificial Sequence: Synthetic oligonucleotide
gacaugauuguggcucguu

SEQ ID NO: 2296099 - RNA, 19 nt, Artificial Sequence
  Description of Artificial Sequence: Synthetic oligonucleotide
ccggggcuugucuugcuuc

SEQ ID NO: 2296100 - RNA, 19 nt, Artificial Sequence
  Description of Artificial Sequence: Synthetic oligonucleotide
caaagucuuccagggacau

SEQ ID NO: 2296101 - RNA, 19 nt, Artificial Sequence
  Description of Artificial Sequence: Synthetic oligonucleotide
gguccucggugagcugugg

SEQ ID NO: 2296102 - RNA, 19 nt, Artificial Sequence
  Description of Artificial Sequence: Synthetic oligonucleotide
ccggauguauuucugcagu

SEQ ID NO: 2296103 - RNA, 19 nt, Artificial Sequence
  Description of Artificial Sequence: Synthetic oligonucleotide
cagaccacgucugaauauu

SEQ ID NO: 2296104 - RNA, 19 nt, Artificial Sequence
  Description of Artificial Sequence: Synthetic oligonucleotide
ccaggucucuccaauaguu

SEQ ID NO: 2296105 - RNA, 19 nt, Artificial Sequence
  Description of Artificial Sequence: Synthetic oligonucleotide
gccgcuuggccgucuguca

SEQ ID NO: 2296106 - RNA, 19 nt, Artificial Sequence
  Description of Artificial Sequence: Synthetic oligonucleotide
augcugcauuucaaacuuu

SEQ ID NO: 2296107 - RNA, 19 nt, Artificial Sequence
  Description of Artificial Sequence: Synthetic oligonucleotide
gcuuggccgucugucacca

SEQ ID NO: 2296108 - RNA, 19 nt, Artificial Sequence
  Description of Artificial Sequence: Synthetic oligonucleotide
caggucgucauuggcuugu

SEQ ID NO: 2296109 - RNA, 19 nt, Artificial Sequence
  Description of Artificial Sequence: Synthetic oligonucleotide
ccgcuuggccgucugucac

SEQ ID NO: 2296110 - RNA, 19 nt, Artificial Sequence
  Description of Artificial Sequence: Synthetic oligonucleotide
gggccccaacuuuccgaag

SEQ ID NO: 2296111 - RNA, 19 nt, Artificial Sequence
  Description of Artificial Sequence: Synthetic oligonucleotide
ccuggaauuucucgguagu

SEQ ID NO: 2296112 - RNA, 19 nt, Artificial Sequence
  Description of Artificial Sequence: Synthetic oligonucleotide
ccccaacuuuccgaagcag

SEQ ID NO: 2296113 - RNA, 19 nt, Artificial Sequence
  Description of Artificial Sequence: Synthetic oligonucleotide
gggacugaucauacacgaa

SEQ ID NO: 2296114 - RNA, 19 nt, Artificial Sequence
  Description of Artificial Sequence: Synthetic oligonucleotide
cgcuuggccgucugucacc

SEQ ID NO: 2296115 - RNA, 19 nt, Artificial Sequence
  Description of Artificial Sequence: Synthetic oligonucleotide
ggaaggcauuucuuucaau

SEQ ID NO: 2296116 - RNA, 19 nt, Artificial Sequence
  Description of Artificial Sequence: Synthetic oligonucleotide
gccaggucucuccaauagu

SEQ ID NO: 2296117 - RNA, 19 nt, Artificial Sequence
  Description of Artificial Sequence: Synthetic oligonucleotide
uccucgcccugaggcuggc

SEQ ID NO: 2296118 - RNA, 19 nt, Artificial Sequence
  Description of Artificial Sequence: Synthetic oligonucleotide
cugacaggaggucccgguu

SEQ ID NO: 2296119 - RNA, 19 nt, Artificial Sequence
  Description of Artificial Sequence: Synthetic oligonucleotide
gggcucccuuaucacccac

SEQ ID NO: 2296120 - RNA, 19 nt, Artificial Sequence
  Description of Artificial Sequence: Synthetic oligonucleotide
ccgacuucccuccuggaau

SEQ ID NO: 2296121 - RNA, 19 nt, Artificial Sequence
  Description of Artificial Sequence: Synthetic oligonucleotide
ggaggucccgguuccuggu

SEQ ID NO: 2296122 - RNA, 19 nt, Artificial Sequence
  Description of Artificial Sequence: Synthetic oligonucleotide
uggcucucuccaggucguc

SEQ ID NO: 2296123 - RNA, 19 nt, Artificial Sequence
  Description of Artificial Sequence: Synthetic oligonucleotide
aggccgagaucugccggua

SEQ ID NO: 2296124 - RNA, 19 nt, Artificial Sequence
  Description of Artificial Sequence: Synthetic oligonucleotide
cccacuuguccggcuuggg

SEQ ID NO: 2296125 - RNA, 19 nt, Artificial Sequence
  Description of Artificial Sequence: Synthetic oligonucleotide
ggguccucggugagcugug

SEQ ID NO: 2296126 - RNA, 19 nt, Artificial Sequence
  Description of Artificial Sequence: Synthetic oligonucleotide
aggucgucauuggcuuguu

SEQ ID NO: 2296127 - RNA, 19 nt, Artificial Sequence
  Description of Artificial Sequence: Synthetic oligonucleotide
gguguccggggcuugucuu

SEQ ID NO: 2296128 - RNA, 19 nt, Artificial Sequence
  Description of Artificial Sequence: Synthetic oligonucleotide
uggugccgcuuggccgucu

SEQ ID NO: 2296129 - RNA, 19 nt, Artificial Sequence
  Description of Artificial Sequence: Synthetic oligonucleotide
cccgacuucccuccuggaa

SEQ ID NO: 2296130 - RNA, 19 nt, Artificial Sequence
  Description of Artificial Sequence: Synthetic oligonucleotide
ggguguccggggcuugucu

SEQ ID NO: 2296131 - RNA, 19 nt, Artificial Sequence
  Description of Artificial Sequence: Synthetic oligonucleotide
ccagaccacgucugaauau

SEQ ID NO: 2296132 - RNA, 19 nt, Artificial Sequence
  Description of Artificial Sequence: Synthetic oligonucleotide
cacucuccaggaaggcauu

SEQ ID NO: 2296133 - RNA, 19 nt, Artificial Sequence
  Description of Artificial Sequence: Synthetic oligonucleotide
gacuucccuccuggaauuu

SEQ ID NO: 2296134 - RNA, 19 nt, Artificial Sequence
  Description of Artificial Sequence: Synthetic oligonucleotide
ggcuuuugucugagccaga

SEQ ID NO: 2296135 - RNA, 19 nt, Artificial Sequence
  Description of Artificial Sequence: Synthetic oligonucleotide
cuuguccggcuuggggacu

SEQ ID NO: 2296136 - RNA, 19 nt, Artificial Sequence
  Description of Artificial Sequence: Synthetic oligonucleotide
ccgguuccugguuucaauu

SEQ ID NO: 2296137 - RNA, 19 nt, Artificial Sequence
  Description of Artificial Sequence: Synthetic oligonucleotide
cgucauuggcuuguuccaa

SEQ ID NO: 2296138 - RNA, 19 nt, Artificial Sequence
  Description of Artificial Sequence: Synthetic oligonucleotide
ggacaugauuguggcucgu

SEQ ID NO: 2296139 - RNA, 19 nt, Artificial Sequence
  Description of Artificial Sequence: Synthetic oligonucleotide
gugccgcuuggccgucugu

SEQ ID NO: 2296140 - RNA, 19 nt, Artificial Sequence
  Description of Artificial Sequence: Synthetic oligonucleotide
cgguaguuccuuccugugu

SEQ ID NO: 2296141 - RNA, 19 nt, Artificial Sequence
  Description of Artificial Sequence: Synthetic oligonucleotide
cccgguuccugguuucaau

SEQ ID NO: 2296142 - RNA, 19 nt, Artificial Sequence
  Description of Artificial Sequence: Synthetic oligonucleotide
guggcucguuuggcucucu

SEQ ID NO: 2296143 - RNA, 19 nt, Artificial Sequence
  Description of Artificial Sequence: Synthetic oligonucleotide
ccucgcccugaggcuggcc

SEQ ID NO: 2296144 - RNA, 19 nt, Artificial Sequence
  Description of Artificial Sequence: Synthetic oligonucleotide
cgacuucccuccuggaauu

SEQ ID NO: 2296145 - RNA, 19 nt, Artificial Sequence
  Description of Artificial Sequence: Synthetic oligonucleotide
guccggcuuggggacugau

SEQ ID NO: 2296146 - RNA, 19 nt, Artificial Sequence
  Description of Artificial Sequence: Synthetic oligonucleotide
ccauucgaaggcgguuauu

SEQ ID NO: 2296147 - RNA, 19 nt, Artificial Sequence
  Description of Artificial Sequence: Synthetic oligonucleotide
augaaaagaaaccucaugc

SEQ ID NO: 2296148 - RNA, 19 nt, Artificial Sequence
  Description of Artificial Sequence: Synthetic oligonucleotide
cuaaauaaaccauaaaagg

SEQ ID NO: 2296149 - RNA, 19 nt, Artificial Sequence
  Description of Artificial Sequence: Synthetic oligonucleotide
aauaauuuauucuaaugcu

SEQ ID NO: 2296150 - RNA, 19 nt, Artificial Sequence
  Description of Artificial Sequence: Synthetic oligonucleotide
ucaaguauucccuuuaacg

SEQ ID NO: 2296151 - RNA, 19 nt, Artificial Sequence
  Description of Artificial Sequence: Synthetic oligonucleotide
auuuguuccccacugaucc

SEQ ID NO: 2296152 - RNA, 19 nt, Artificial Sequence
  Description of Artificial Sequence: Synthetic oligonucleotide
aauaaauuugcucauugca

SEQ ID NO: 2296153 - RNA, 19 nt, Artificial Sequence
  Description of Artificial Sequence: Synthetic oligonucleotide
uaaauaaaccauaaaaggu

SEQ ID NO: 2296154 - RNA, 19 nt, Artificial Sequence
  Description of Artificial Sequence: Synthetic oligonucleotide
uguaugauuaucauaaccu

SEQ ID NO: 2296155 - RNA, 19 nt, Artificial Sequence
  Description of Artificial Sequence: Synthetic oligonucleotide
ucagaauauacucauauac

SEQ ID NO: 2296156 - RNA, 19 nt, Artificial Sequence
  Description of Artificial Sequence: Synthetic oligonucleotide
auagugaaaauguaaacuc

SEQ ID NO: 2296157 - RNA, 19 nt, Artificial Sequence
  Description of Artificial Sequence: Synthetic oligonucleotide
aaaccauaaaagguaaucc

SEQ ID NO: 2296158 - RNA, 19 nt, Artificial Sequence
  Description of Artificial Sequence: Synthetic oligonucleotide
ugaaaauguaaacucacag

SEQ ID NO: 2296159 - RNA, 19 nt, Artificial Sequence
  Description of Artificial Sequence: Synthetic oligonucleotide
auuaucauaaccuaauagu

SEQ ID NO: 2296160 - RNA, 19 nt, Artificial Sequence
  Description of Artificial Sequence: Synthetic oligonucleotide
uuaucauaaccuaauagug

SEQ ID NO: 2296161 - RNA, 19 nt, Artificial Sequence
  Description of Artificial Sequence: Synthetic oligonucleotide
uucuuuuaauacuuuaggg

SEQ ID NO: 2296162 - RNA, 19 nt, Artificial Sequence
  Description of Artificial Sequence: Synthetic oligonucleotide
aaaucuuaaaacaaguuga

SEQ ID NO: 2296163 - RNA, 19 nt, Artificial Sequence
  Description of Artificial Sequence: Synthetic oligonucleotide
uauucuauaugcuaauuug

SEQ ID NO: 2296164 - RNA, 19 nt, Artificial Sequence
  Description of Artificial Sequence: Synthetic oligonucleotide
auguaugauuaucauaacc

SEQ ID NO: 2296165 - RNA, 19 nt, Artificial Sequence
  Description of Artificial Sequence: Synthetic oligonucleotide
gauuaucauaaccuaauag

SEQ ID NO: 2296166 - RNA, 19 nt, Artificial Sequence
  Description of Artificial Sequence: Synthetic oligonucleotide
aacaaguugaaauuuuaca

SEQ ID NO: 2296167 - RNA, 19 nt, Artificial Sequence
  Description of Artificial Sequence: Synthetic oligonucleotide
uggaaaguauucuauaugc

SEQ ID NO: 2296168 - RNA, 19 nt, Artificial Sequence
  Description of Artificial Sequence: Synthetic oligonucleotide
uaauaaaauuucauaaaga

SEQ ID NO: 2296169 - RNA, 19 nt, Artificial Sequence
  Description of Artificial Sequence: Synthetic oligonucleotide
uuuacauaauaauuuauuc

SEQ ID NO: 2296170 - RNA, 19 nt, Artificial Sequence
  Description of Artificial Sequence: Synthetic oligonucleotide
uucuaagugaccugaaggg

SEQ ID NO: 2296171 - RNA, 19 nt, Artificial Sequence
  Description of Artificial Sequence: Synthetic oligonucleotide
uuacauaauaauuuauucu

SEQ ID NO: 2296172 - RNA, 19 nt, Artificial Sequence
  Description of Artificial Sequence: Synthetic oligonucleotide
aaauauuuguuccccacug

SEQ ID NO: 2296173 - RNA, 19 nt, Artificial Sequence
  Description of Artificial Sequence: Synthetic oligonucleotide
aaugucagaguucagaaua

SEQ ID NO: 2296174 - RNA, 19 nt, Artificial Sequence
  Description of Artificial Sequence: Synthetic oligonucleotide
agacacagaacuuucuacc

SEQ ID NO: 2296175 - RNA, 19 nt, Artificial Sequence
  Description of Artificial Sequence: Synthetic oligonucleotide
aucauaaccuaauaguguc

SEQ ID NO: 2296176 - RNA, 19 nt, Artificial Sequence
  Description of Artificial Sequence: Synthetic oligonucleotide
ugguugauggcaaaguagg

SEQ ID NO: 2296177 - RNA, 19 nt, Artificial Sequence
  Description of Artificial Sequence: Synthetic oligonucleotide
ugugcuuuggauauugagc

SEQ ID NO: 2296178 - RNA, 19 nt, Artificial Sequence
  Description of Artificial Sequence: Synthetic oligonucleotide
uucagaguaauucaugaga

SEQ ID NO: 2296179 - RNA, 19 nt, Artificial Sequence
  Description of Artificial Sequence: Synthetic oligonucleotide
uacauaauaauuuauucua

SEQ ID NO: 2296180 - RNA, 19 nt, Artificial Sequence
  Description of Artificial Sequence: Synthetic oligonucleotide
uaaauguuacccuaaaauc

SEQ ID NO: 2296181 - RNA, 19 nt, Artificial Sequence
  Description of Artificial Sequence: Synthetic oligonucleotide
ucaauaaauuugcucauug

SEQ ID NO: 2296182 - RNA, 19 nt, Artificial Sequence
  Description of Artificial Sequence: Synthetic oligonucleotide
aaguugaaauuuuacauaa

SEQ ID NO: 2296183 - RNA, 19 nt, Artificial Sequence
  Description of Artificial Sequence: Synthetic oligonucleotide
aaauguuacccuaaaaucu

SEQ ID NO: 2296184 - RNA, 19 nt, Artificial Sequence
  Description of Artificial Sequence: Synthetic oligonucleotide
aaauuugcucauugcauag

SEQ ID NO: 2296185 - RNA, 19 nt, Artificial Sequence
  Description of Artificial Sequence: Synthetic oligonucleotide
uuuagggaauuuucaaacg

SEQ ID NO: 2296186 - RNA, 19 nt, Artificial Sequence
  Description of Artificial Sequence: Synthetic oligonucleotide
cugaacuauucaaagaacc

SEQ ID NO: 2296187 - RNA, 19 nt, Artificial Sequence
  Description of Artificial Sequence: Synthetic oligonucleotide
aaagaaccaaaugucagag

SEQ ID NO: 2296188 - RNA, 19 nt, Artificial Sequence
  Description of Artificial Sequence: Synthetic oligonucleotide
aauguaugauuaucauaac

SEQ ID NO: 2296189 - RNA, 19 nt, Artificial Sequence
  Description of Artificial Sequence: Synthetic oligonucleotide
ugaaaagaaaccucaugcc

SEQ ID NO: 2296190 - RNA, 19 nt, Artificial Sequence
  Description of Artificial Sequence: Synthetic oligonucleotide
uggauauugagcuaaguaa

SEQ ID NO: 2296191 - RNA, 19 nt, Artificial Sequence
  Description of Artificial Sequence: Synthetic oligonucleotide
uguaaacucacagagaauc

SEQ ID NO: 2296192 - RNA, 19 nt, Artificial Sequence
  Description of Artificial Sequence: Synthetic oligonucleotide
ugaacuauucaaagaacca

SEQ ID NO: 2296193 - RNA, 19 nt, Artificial Sequence
  Description of Artificial Sequence: Synthetic oligonucleotide
aaauaaaccauaaaaggua

SEQ ID NO: 2296194 - RNA, 19 nt, Artificial Sequence
  Description of Artificial Sequence: Synthetic oligonucleotide
aaacaaguugaaauuuuac

SEQ ID NO: 2296195 - RNA, 19 nt, Artificial Sequence
  Description of Artificial Sequence: Synthetic oligonucleotide
uaucauaaccuaauagugu

SEQ ID NO: 2296196 - RNA, 19 nt, Artificial Sequence
  Description of Artificial Sequence: Synthetic oligonucleotide
uuacccuaaaaucuuaaaa

SEQ ID NO: 2296197 - RNA, 19 nt, Artificial Sequence
  Description of Artificial Sequence: Synthetic oligonucleotide
uauuuucuaaauaaaccau

SEQ ID NO: 2296198 - RNA, 19 nt, Artificial Sequence
  Description of Artificial Sequence: Synthetic oligonucleotide
uguaacugccccaagauuu

SEQ ID NO: 2296199 - RNA, 19 nt, Artificial Sequence
  Description of Artificial Sequence: Synthetic oligonucleotide
ugcauagugaaaauguaaa

SEQ ID NO: 2296200 - RNA, 19 nt, Artificial Sequence
  Description of Artificial Sequence: Synthetic oligonucleotide
agaguaauucaugagauca

SEQ ID NO: 2296201 - RNA, 19 nt, Artificial Sequence
  Description of Artificial Sequence: Synthetic oligonucleotide
uuuaacaugugcuuuggau

SEQ ID NO: 2296202 - RNA, 19 nt, Artificial Sequence
  Description of Artificial Sequence: Synthetic oligonucleotide
uuagggaauuuucaaacgu

SEQ ID NO: 2296203 - RNA, 19 nt, Artificial Sequence
  Description of Artificial Sequence: Synthetic oligonucleotide
ucagaguucagaauauacu

SEQ ID NO: 2296204 - RNA, 19 nt, Artificial Sequence
  Description of Artificial Sequence: Synthetic oligonucleotide
ugccuuaaauauuuguucc

SEQ ID NO: 2296205 - RNA, 19 nt, Artificial Sequence
  Description of Artificial Sequence: Synthetic oligonucleotide
ucaaacgucgggauguuug

SEQ ID NO: 2296206 - RNA, 19 nt, Artificial Sequence
  Description of Artificial Sequence: Synthetic oligonucleotide
aaguaggauuucauggucc

SEQ ID NO: 2296207 - RNA, 19 nt, Artificial Sequence
  Description of Artificial Sequence: Synthetic oligonucleotide
acagagaaucuauaaaugu

SEQ ID NO: 2296208 - RNA, 19 nt, Artificial Sequence
  Description of Artificial Sequence: Synthetic oligonucleotide
uaauucaugagaucaugca

SEQ ID NO: 2296209 - RNA, 19 nt, Artificial Sequence
  Description of Artificial Sequence: Synthetic oligonucleotide
ugcuaauuuguuuaacaug

SEQ ID NO: 2296210 - RNA, 19 nt, Artificial Sequence
  Description of Artificial Sequence: Synthetic oligonucleotide
ugagcaagcugcuugaggu

SEQ ID NO: 2296211 - RNA, 19 nt, Artificial Sequence
  Description of Artificial Sequence: Synthetic oligonucleotide
uuaaauauuuguuccccac

SEQ ID NO: 2296212 - RNA, 19 nt, Artificial Sequence
  Description of Artificial Sequence: Synthetic oligonucleotide
aacgaugaaaagaaaccuc

SEQ ID NO: 2296213 - RNA, 19 nt, Artificial Sequence
  Description of Artificial Sequence: Synthetic oligonucleotide
agugaaaauguaaacucac

SEQ ID NO: 2296214 - RNA, 19 nt, Artificial Sequence
  Description of Artificial Sequence: Synthetic oligonucleotide
agaaccaaaugucagaguu

SEQ ID NO: 2296215 - RNA, 19 nt, Artificial Sequence
  Description of Artificial Sequence: Synthetic oligonucleotide
aauagugucuuugucuuca

SEQ ID NO: 2296216 - RNA, 19 nt, Artificial Sequence
  Description of Artificial Sequence: Synthetic oligonucleotide
uuaacaugugcuuuggaua

SEQ ID NO: 2296217 - RNA, 19 nt, Artificial Sequence
  Description of Artificial Sequence: Synthetic oligonucleotide
aguaggauuucaugguccg

SEQ ID NO: 2296218 - RNA, 19 nt, Artificial Sequence
  Description of Artificial Sequence: Synthetic oligonucleotide
uggauuuccgaucaaacuu

SEQ ID NO: 2296219 - RNA, 19 nt, Artificial Sequence
  Description of Artificial Sequence: Synthetic oligonucleotide
uuuucaaacgucgggaugu

SEQ ID NO: 2296220 - RNA, 19 nt, Artificial Sequence
  Description of Artificial Sequence: Synthetic oligonucleotide
uaaauauuuguuccccacu

SEQ ID NO: 2296221 - RNA, 19 nt, Artificial Sequence
  Description of Artificial Sequence: Synthetic oligonucleotide
aaacuuuuaaauguaugau

SEQ ID NO: 2296222 - RNA, 19 nt, Artificial Sequence
  Description of Artificial Sequence: Synthetic oligonucleotide
aauuuauucuaaugcuuau

SEQ ID NO: 2296223 - RNA, 19 nt, Artificial Sequence
  Description of Artificial Sequence: Synthetic oligonucleotide
acccuaaaaucuuaaaaca

SEQ ID NO: 2296224 - RNA, 19 nt, Artificial Sequence
  Description of Artificial Sequence: Synthetic oligonucleotide
aaguauucccuuuaacgau

SEQ ID NO: 2296225 - RNA, 19 nt, Artificial Sequence
  Description of Artificial Sequence: Synthetic oligonucleotide
uuggauauugagcuaagua

SEQ ID NO: 2296226 - RNA, 19 nt, Artificial Sequence
  Description of Artificial Sequence: Synthetic oligonucleotide
ucuauaaauguuacccuaa

SEQ ID NO: 2296227 - RNA, 19 nt, Artificial Sequence
  Description of Artificial Sequence: Synthetic oligonucleotide
uauugagcuaaguaagagu

SEQ ID NO: 2296228 - RNA, 19 nt, Artificial Sequence
  Description of Artificial Sequence: Synthetic oligonucleotide
aaccaaaugucagaguuca

SEQ ID NO: 2296229 - RNA, 19 nt, Artificial Sequence
  Description of Artificial Sequence: Synthetic oligonucleotide
cagcacacaagauaaaaug

SEQ ID NO: 2296230 - RNA, 19 nt, Artificial Sequence
  Description of Artificial Sequence: Synthetic oligonucleotide
aaggaaagaaacauuccug

SEQ ID NO: 2296231 - RNA, 19 nt, Artificial Sequence
  Description of Artificial Sequence: Synthetic oligonucleotide
uaaaccauaaaagguaauc

SEQ ID NO: 2296232 - RNA, 19 nt, Artificial Sequence
  Description of Artificial Sequence: Synthetic oligonucleotide
ugguucauaaacuuuuaaa

SEQ ID NO: 2296233 - RNA, 19 nt, Artificial Sequence
  Description of Artificial Sequence: Synthetic oligonucleotide
aacuccuuuuggucaggcc

SEQ ID NO: 2296234 - RNA, 19 nt, Artificial Sequence
  Description of Artificial Sequence: Synthetic oligonucleotide
aauaaaccauaaaagguaa

SEQ ID NO: 2296235 - RNA, 19 nt, Artificial Sequence
  Description of Artificial Sequence: Synthetic oligonucleotide
accugaacuauucaaagaa

SEQ ID NO: 2296236 - RNA, 19 nt, Artificial Sequence
  Description of Artificial Sequence: Synthetic oligonucleotide
ucauaaacuuuuaaaugua

SEQ ID NO: 2296237 - RNA, 19 nt, Artificial Sequence
  Description of Artificial Sequence: Synthetic oligonucleotide
gacacagaacuuucuaccc

SEQ ID NO: 2296238 - RNA, 19 nt, Artificial Sequence
  Description of Artificial Sequence: Synthetic oligonucleotide
ggaauuuucaaacgucggg

SEQ ID NO: 2296239 - RNA, 19 nt, Artificial Sequence
  Description of Artificial Sequence: Synthetic oligonucleotide
uuuguuucugauaccuugu

SEQ ID NO: 2296240 - RNA, 19 nt, Artificial Sequence
  Description of Artificial Sequence: Synthetic oligonucleotide
uucaugagaucaugcacag

SEQ ID NO: 2296241 - RNA, 19 nt, Artificial Sequence
  Description of Artificial Sequence: Synthetic oligonucleotide
cuaagugaccugaagggac

SEQ ID NO: 2296242 - RNA, 19 nt, Artificial Sequence
  Description of Artificial Sequence: Synthetic oligonucleotide
ugacaauucuaagugaccu

SEQ ID NO: 2296243 - RNA, 19 nt, Artificial Sequence
  Description of Artificial Sequence: Synthetic oligonucleotide
ucuggaaaguauucuauau

SEQ ID NO: 2296244 - RNA, 19 nt, Artificial Sequence
  Description of Artificial Sequence: Synthetic oligonucleotide
uaacgaugaaaagaaaccu

SEQ ID NO: 2296245 - RNA, 19 nt, Artificial Sequence
  Description of Artificial Sequence: Synthetic oligonucleotide
acuccuuuuggucaggccu

SEQ ID NO: 2296246 - RNA, 19 nt, Artificial Sequence
  Description of Artificial Sequence: Synthetic oligonucleotide
uugagcaagcugcuugagg

SEQ ID NO: 2296247 - RNA, 19 nt, Artificial Sequence
  Description of Artificial Sequence: Synthetic oligonucleotide
uccgaucaaacuuuucccc

SEQ ID NO: 2296248 - RNA, 19 nt, Artificial Sequence
  Description of Artificial Sequence: Synthetic oligonucleotide
ugugcaaccugaacuauuc

SEQ ID NO: 2296249 - RNA, 19 nt, Artificial Sequence
  Description of Artificial Sequence: Synthetic oligonucleotide
uaacaugugcuuuggauau

SEQ ID NO: 2296250 - RNA, 19 nt, Artificial Sequence
  Description of Artificial Sequence: Synthetic oligonucleotide
aaccugaacuauucaaaga

SEQ ID NO: 2296251 - RNA, 19 nt, Artificial Sequence
  Description of Artificial Sequence: Synthetic oligonucleotide
uugcauagugaaaauguaa

SEQ ID NO: 2296252 - RNA, 19 nt, Artificial Sequence
  Description of Artificial Sequence: Synthetic oligonucleotide
caaccugaacuauucaaag

SEQ ID NO: 2296253 - RNA, 19 nt, Artificial Sequence
  Description of Artificial Sequence: Synthetic oligonucleotide
ugcaguggauuuccgauca

SEQ ID NO: 2296254 - RNA, 19 nt, Artificial Sequence
  Description of Artificial Sequence: Synthetic oligonucleotide
aaccuaauagugucuuugu

SEQ ID NO: 2296255 - RNA, 19 nt, Artificial Sequence
  Description of Artificial Sequence: Synthetic oligonucleotide
gaauuuucaaacgucggga

SEQ ID NO: 2296256 - RNA, 19 nt, Artificial Sequence
  Description of Artificial Sequence: Synthetic oligonucleotide
uucuauaugcuaauuuguu

SEQ ID NO: 2296257 - RNA, 19 nt, Artificial Sequence
  Description of Artificial Sequence: Synthetic oligonucleotide
ugcaaaacuccuuuugguc

SEQ ID NO: 2296258 - RNA, 19 nt, Artificial Sequence
  Description of Artificial Sequence: Synthetic oligonucleotide
auauugagcuaaguaagag

SEQ ID NO: 2296259 - RNA, 19 nt, Artificial Sequence
  Description of Artificial Sequence: Synthetic oligonucleotide
uugagcuaaguaagaguag

SEQ ID NO: 2296260 - RNA, 19 nt, Artificial Sequence
  Description of Artificial Sequence: Synthetic oligonucleotide
ucuauaugcuaauuuguuu

SEQ ID NO: 2296261 - RNA, 19 nt, Artificial Sequence
  Description of Artificial Sequence: Synthetic oligonucleotide
uuuugagcaagcugcuuga

SEQ ID NO: 2296262 - RNA, 19 nt, Artificial Sequence
  Description of Artificial Sequence: Synthetic oligonucleotide
acugccccaagauuuguuc

SEQ ID NO: 2296263 - RNA, 19 nt, Artificial Sequence
  Description of Artificial Sequence: Synthetic oligonucleotide
cuauaugcuaauuuguuua

SEQ ID NO: 2296264 - RNA, 19 nt, Artificial Sequence
  Description of Artificial Sequence: Synthetic oligonucleotide
aaagaaaccucaugccuua

SEQ ID NO: 2296265 - RNA, 19 nt, Artificial Sequence
  Description of Artificial Sequence: Synthetic oligonucleotide
gaauauacucauauacuuc

SEQ ID NO: 2296266 - RNA, 19 nt, Artificial Sequence
  Description of Artificial Sequence: Synthetic oligonucleotide
uugcucauugcauagugaa

SEQ ID NO: 2296267 - RNA, 19 nt, Artificial Sequence
  Description of Artificial Sequence: Synthetic oligonucleotide
ggauauugagcuaaguaag

SEQ ID NO: 2296268 - RNA, 19 nt, Artificial Sequence
  Description of Artificial Sequence: Synthetic oligonucleotide
aaaagaaaccucaugccuu

SEQ ID NO: 2296269 - RNA, 19 nt, Artificial Sequence
  Description of Artificial Sequence: Synthetic oligonucleotide
aaaccucaugccuuaaaua

SEQ ID NO: 2296270 - RNA, 19 nt, Artificial Sequence
  Description of Artificial Sequence: Synthetic oligonucleotide
uacuuuagggaauuuucaa

SEQ ID NO: 2296271 - RNA, 19 nt, Artificial Sequence
  Description of Artificial Sequence: Synthetic oligonucleotide
uugauggcaaaguaggauu

SEQ ID NO: 2296272 - RNA, 19 nt, Artificial Sequence
  Description of Artificial Sequence: Synthetic oligonucleotide
uucaaguauucccuuuaac

SEQ ID NO: 2296273 - RNA, 19 nt, Artificial Sequence
  Description of Artificial Sequence: Synthetic oligonucleotide
aguaauucaugagaucaug

SEQ ID NO: 2296274 - RNA, 19 nt, Artificial Sequence
  Description of Artificial Sequence: Synthetic oligonucleotide
accuaauagugucuuuguc

SEQ ID NO: 2296275 - RNA, 19 nt, Artificial Sequence
  Description of Artificial Sequence: Synthetic oligonucleotide
aacgucgggauguuuggcu

SEQ ID NO: 2296276 - RNA, 19 nt, Artificial Sequence
  Description of Artificial Sequence: Synthetic oligonucleotide
uuuaauacuuuagggaauu

SEQ ID NO: 2296277 - RNA, 19 nt, Artificial Sequence
  Description of Artificial Sequence: Synthetic oligonucleotide
aaucuuaaaacaaguugaa

SEQ ID NO: 2296278 - RNA, 19 nt, Artificial Sequence
  Description of Artificial Sequence: Synthetic oligonucleotide
auugagcuaaguaagagua

SEQ ID NO: 2296279 - RNA, 19 nt, Artificial Sequence
  Description of Artificial Sequence: Synthetic oligonucleotide
uaagugaccugaagggaca

SEQ ID NO: 2296280 - RNA, 19 nt, Artificial Sequence
  Description of Artificial Sequence: Synthetic oligonucleotide
cuucagaguaauucaugag

SEQ ID NO: 2296281 - RNA, 19 nt, Artificial Sequence
  Description of Artificial Sequence: Synthetic oligonucleotide
aauguuacccuaaaaucuu

SEQ ID NO: 2296282 - RNA, 19 nt, Artificial Sequence
  Description of Artificial Sequence: Synthetic oligonucleotide
uagggaauuuucaaacguc

SEQ ID NO: 2296283 - RNA, 19 nt, Artificial Sequence
  Description of Artificial Sequence: Synthetic oligonucleotide
caaaacuccuuuuggucag

SEQ ID NO: 2296284 - RNA, 19 nt, Artificial Sequence
  Description of Artificial Sequence: Synthetic oligonucleotide
cuggaaaguauucuauaug

SEQ ID NO: 2296285 - RNA, 19 nt, Artificial Sequence
  Description of Artificial Sequence: Synthetic oligonucleotide
uuugcucauugcauaguga

SEQ ID NO: 2296286 - RNA, 19 nt, Artificial Sequence
  Description of Artificial Sequence: Synthetic oligonucleotide
gauuucaugguccggagcu

SEQ ID NO: 2296287 - RNA, 19 nt, Artificial Sequence
  Description of Artificial Sequence: Synthetic oligonucleotide
ucauugcauagugaaaaug

SEQ ID NO: 2296288 - RNA, 19 nt, Artificial Sequence
  Description of Artificial Sequence: Synthetic oligonucleotide
uuguucucccugcaaaacu

SEQ ID NO: 2296289 - RNA, 19 nt, Artificial Sequence
  Description of Artificial Sequence: Synthetic oligonucleotide
aucuauaaauguuacccua

SEQ ID NO: 2296290 - RNA, 19 nt, Artificial Sequence
  Description of Artificial Sequence: Synthetic oligonucleotide
acaauucuaagugaccuga

SEQ ID NO: 2296291 - RNA, 19 nt, Artificial Sequence
  Description of Artificial Sequence: Synthetic oligonucleotide
guaauucaugagaucaugc

SEQ ID NO: 2296292 - RNA, 19 nt, Artificial Sequence
  Description of Artificial Sequence: Synthetic oligonucleotide
gaaacauuccugacaauuc

SEQ ID NO: 2296293 - RNA, 19 nt, Artificial Sequence
  Description of Artificial Sequence: Synthetic oligonucleotide
aaaacaaguugaaauuuua

SEQ ID NO: 2296294 - RNA, 19 nt, Artificial Sequence
  Description of Artificial Sequence: Synthetic oligonucleotide
auaaauuugcucauugcau

SEQ ID NO: 2296295 - RNA, 19 nt, Artificial Sequence
  Description of Artificial Sequence: Synthetic oligonucleotide
aaguaagaguagcuuuaca

SEQ ID NO: 2296296 - RNA, 19 nt, Artificial Sequence
  Description of Artificial Sequence: Synthetic oligonucleotide
ugauuaucauaaccuaaua

SEQ ID NO: 2296297 - RNA, 19 nt, Artificial Sequence
  Description of Artificial Sequence: Synthetic oligonucleotide
cugacaauucuaagugacc

SEQ ID NO: 2296298 - RNA, 19 nt, Artificial Sequence
  Description of Artificial Sequence: Synthetic oligonucleotide
agaaacauuccugacaauu

SEQ ID NO: 2296299 - RNA, 19 nt, Artificial Sequence
  Description of Artificial Sequence: Synthetic oligonucleotide
uuuucucucucucucucuc

SEQ ID NO: 2296300 - RNA, 19 nt, Artificial Sequence
  Description of Artificial Sequence: Synthetic oligonucleotide
uauuuguuccccacugauc

SEQ ID NO: 2296301 - RNA, 19 nt, Artificial Sequence
  Description of Artificial Sequence: Synthetic oligonucleotide
aaacgucgggauguuuggc

SEQ ID NO: 2296302 - RNA, 19 nt, Artificial Sequence
  Description of Artificial Sequence: Synthetic oligonucleotide
caaacgucgggauguuugg

SEQ ID NO: 2296303 - RNA, 19 nt, Artificial Sequence
  Description of Artificial Sequence: Synthetic oligonucleotide
uucuacccauggcugaugc

SEQ ID NO: 2296304 - RNA, 19 nt, Artificial Sequence
  Description of Artificial Sequence: Synthetic oligonucleotide
aacuuucuacccauggcug

SEQ ID NO: 2296305 - RNA, 19 nt, Artificial Sequence
  Description of Artificial Sequence: Synthetic oligonucleotide
uguuacccuaaaaucuuaa

SEQ ID NO: 2296306 - RNA, 19 nt, Artificial Sequence
  Description of Artificial Sequence: Synthetic oligonucleotide
acgaugaaaagaaaccuca

SEQ ID NO: 2296307 - RNA, 19 nt, Artificial Sequence
  Description of Artificial Sequence: Synthetic oligonucleotide
aagaaccaaaugucagagu

SEQ ID NO: 2296308 - RNA, 19 nt, Artificial Sequence
  Description of Artificial Sequence: Synthetic oligonucleotide
cauugcauagugaaaaugu

SEQ ID NO: 2296309 - RNA, 19 nt, Artificial Sequence
  Description of Artificial Sequence: Synthetic oligonucleotide
caaagaaccaaaugucaga

SEQ ID NO: 2296310 - RNA, 19 nt, Artificial Sequence
  Description of Artificial Sequence: Synthetic oligonucleotide
gaccugaagggacacagga

SEQ ID NO: 2296311 - RNA, 19 nt, Artificial Sequence
  Description of Artificial Sequence: Synthetic oligonucleotide
gauauugagcuaaguaaga

SEQ ID NO: 2296312 - RNA, 19 nt, Artificial Sequence
  Description of Artificial Sequence: Synthetic oligonucleotide
ucccuuuaacgaugaaaag

SEQ ID NO: 2296313 - RNA, 19 nt, Artificial Sequence
  Description of Artificial Sequence: Synthetic oligonucleotide
acucacagagaaucuauaa

SEQ ID NO: 2296314 - RNA, 19 nt, Artificial Sequence
  Description of Artificial Sequence: Synthetic oligonucleotide
cuaauuuguuuaacaugug

SEQ ID NO: 2296315 - RNA, 19 nt, Artificial Sequence
  Description of Artificial Sequence: Synthetic oligonucleotide
ggauguuuggcuguaacug

SEQ ID NO: 2296316 - RNA, 19 nt, Artificial Sequence
  Description of Artificial Sequence: Synthetic oligonucleotide
gguucauaaacuuuuaaau

SEQ ID NO: 2296317 - RNA, 19 nt, Artificial Sequence
  Description of Artificial Sequence: Synthetic oligonucleotide
caugcacaguguaaacaag

SEQ ID NO: 2296318 - RNA, 19 nt, Artificial Sequence
  Description of Artificial Sequence: Synthetic oligonucleotide
ugauaccuugugcaaccug

SEQ ID NO: 2296319 - RNA, 19 nt, Artificial Sequence
  Description of Artificial Sequence: Synthetic oligonucleotide
cuaaguaagaguagcuuua

SEQ ID NO: 2296320 - RNA, 19 nt, Artificial Sequence
  Description of Artificial Sequence: Synthetic oligonucleotide
uaaguaagaguagcuuuac

SEQ ID NO: 2296321 - RNA, 19 nt, Artificial Sequence
  Description of Artificial Sequence: Synthetic oligonucleotide
gugcuuuggauauugagcu

SEQ ID NO: 2296322 - RNA, 19 nt, Artificial Sequence
  Description of Artificial Sequence: Synthetic oligonucleotide
ucucucucucucuucuuug

SEQ ID NO: 2296323 - RNA, 19 nt, Artificial Sequence
  Description of Artificial Sequence: Synthetic oligonucleotide
cucucucucucuucuuugg

SEQ ID NO: 2296324 - RNA, 19 nt, Artificial Sequence
  Description of Artificial Sequence: Synthetic oligonucleotide
agaguucagaauauacuca

SEQ ID NO: 2296325 - RNA, 19 nt, Artificial Sequence
  Description of Artificial Sequence: Synthetic oligonucleotide
acacagaacuuucuaccca

SEQ ID NO: 2296326 - RNA, 19 nt, Artificial Sequence
  Description of Artificial Sequence: Synthetic oligonucleotide
uccugacaauucuaaguga

SEQ ID NO: 2296327 - RNA, 19 nt, Artificial Sequence
  Description of Artificial Sequence: Synthetic oligonucleotide
guaugauuaucauaaccua

SEQ ID NO: 2296328 - RNA, 19 nt, Artificial Sequence
  Description of Artificial Sequence: Synthetic oligonucleotide
uaaacucacagagaaucua

SEQ ID NO: 2296329 - RNA, 19 nt, Artificial Sequence
  Description of Artificial Sequence: Synthetic oligonucleotide
uuuguucucccugcaaaac

SEQ ID NO: 2296330 - RNA, 19 nt, Artificial Sequence
  Description of Artificial Sequence: Synthetic oligonucleotide
auacuuuagggaauuuuca

SEQ ID NO: 2296331 - RNA, 19 nt, Artificial Sequence
  Description of Artificial Sequence: Synthetic oligonucleotide
gucagaguucagaauauac

SEQ ID NO: 2296332 - RNA, 19 nt, Artificial Sequence
  Description of Artificial Sequence: Synthetic oligonucleotide
aaaacuccuuuuggucagg

SEQ ID NO: 2296333 - RNA, 19 nt, Artificial Sequence
  Description of Artificial Sequence: Synthetic oligonucleotide
acuuucuacccauggcuga

SEQ ID NO: 2296334 - RNA, 19 nt, Artificial Sequence
  Description of Artificial Sequence: Synthetic oligonucleotide
aagugaccugaagggacac

SEQ ID NO: 2296335 - RNA, 19 nt, Artificial Sequence
  Description of Artificial Sequence: Synthetic oligonucleotide
aucaugcacaguguaaaca

SEQ ID NO: 2296336 - RNA, 19 nt, Artificial Sequence
  Description of Artificial Sequence: Synthetic oligonucleotide
ugauccuuuguuucugaua

SEQ ID NO: 2296337 - RNA, 19 nt, Artificial Sequence
  Description of Artificial Sequence: Synthetic oligonucleotide
gcuaauuuguuuaacaugu

SEQ ID NO: 2296338 - RNA, 19 nt, Artificial Sequence
  Description of Artificial Sequence: Synthetic oligonucleotide
ccugacaauucuaagugac

SEQ ID NO: 2296339 - RNA, 19 nt, Artificial Sequence
  Description of Artificial Sequence: Synthetic oligonucleotide
acaugugcuuuggauauug

SEQ ID NO: 2296340 - RNA, 19 nt, Artificial Sequence
  Description of Artificial Sequence: Synthetic oligonucleotide
acauaauaauuuauucuaa

SEQ ID NO: 2296341 - RNA, 19 nt, Artificial Sequence
  Description of Artificial Sequence: Synthetic oligonucleotide
gcaaaacuccuuuugguca

SEQ ID NO: 2296342 - RNA, 19 nt, Artificial Sequence
  Description of Artificial Sequence: Synthetic oligonucleotide
ccuuuaacgaugaaaagaa

SEQ ID NO: 2296343 - RNA, 19 nt, Artificial Sequence
  Description of Artificial Sequence: Synthetic oligonucleotide
uuuggauauugagcuaagu

SEQ ID NO: 2296344 - RNA, 19 nt, Artificial Sequence
  Description of Artificial Sequence: Synthetic oligonucleotide
uucucucucucucucucuc

SEQ ID NO: 2296345 - RNA, 19 nt, Artificial Sequence
  Description of Artificial Sequence: Synthetic oligonucleotide
ugcucauugcauagugaaa

SEQ ID NO: 2296346 - RNA, 19 nt, Artificial Sequence
  Description of Artificial Sequence: Synthetic oligonucleotide
aacagacacagaacuuucu

SEQ ID NO: 2296347 - RNA, 19 nt, Artificial Sequence
  Description of Artificial Sequence: Synthetic oligonucleotide
ggaaagaaacauuccugac

SEQ ID NO: 2296348 - RNA, 19 nt, Artificial Sequence
  Description of Artificial Sequence: Synthetic oligonucleotide
cagaguaauucaugagauc

SEQ ID NO: 2296349 - RNA, 19 nt, Artificial Sequence
  Description of Artificial Sequence: Synthetic oligonucleotide
acacaagauaaaauguaau

SEQ ID NO: 2296350 - RNA, 19 nt, Artificial Sequence
  Description of Artificial Sequence: Synthetic oligonucleotide
uggcaaaguaggauuucau

SEQ ID NO: 2296351 - RNA, 19 nt, Artificial Sequence
  Description of Artificial Sequence: Synthetic oligonucleotide
uuugagcaagcugcuugag

SEQ ID NO: 2296352 - RNA, 19 nt, Artificial Sequence
  Description of Artificial Sequence: Synthetic oligonucleotide
uuucucucucucucucucu

SEQ ID NO: 2296353 - RNA, 19 nt, Artificial Sequence
  Description of Artificial Sequence: Synthetic oligonucleotide
gccuuaaauauuuguuccc

SEQ ID NO: 2296354 - RNA, 19 nt, Artificial Sequence
  Description of Artificial Sequence: Synthetic oligonucleotide
gggaauuuucaaacgucgg

SEQ ID NO: 2296355 - RNA, 19 nt, Artificial Sequence
  Description of Artificial Sequence: Synthetic oligonucleotide
uaauagugucuuugucuuc

SEQ ID NO: 2296356 - RNA, 19 nt, Artificial Sequence
  Description of Artificial Sequence: Synthetic oligonucleotide
uaccuugugcaaccugaac

SEQ ID NO: 2296357 - RNA, 19 nt, Artificial Sequence
  Description of Artificial Sequence: Synthetic oligonucleotide
guuacccuaaaaucuuaaa

SEQ ID NO: 2296358 - RNA, 19 nt, Artificial Sequence
  Description of Artificial Sequence: Synthetic oligonucleotide
gaaccaaaugucagaguuc

SEQ ID NO: 2296359 - RNA, 19 nt, Artificial Sequence
  Description of Artificial Sequence: Synthetic oligonucleotide
uacccauggcugaugccug

SEQ ID NO: 2296360 - RNA, 19 nt, Artificial Sequence
  Description of Artificial Sequence: Synthetic oligonucleotide
cuaauagugucuuugucuu

SEQ ID NO: 2296361 - RNA, 19 nt, Artificial Sequence
  Description of Artificial Sequence: Synthetic oligonucleotide
ucacugcaguggauuuccg

SEQ ID NO: 2296362 - RNA, 19 nt, Artificial Sequence
  Description of Artificial Sequence: Synthetic oligonucleotide
acugauccuuuguuucuga

SEQ ID NO: 2296363 - RNA, 19 nt, Artificial Sequence
  Description of Artificial Sequence: Synthetic oligonucleotide
gugaaaauguaaacucaca

SEQ ID NO: 2296364 - RNA, 19 nt, Artificial Sequence
  Description of Artificial Sequence: Synthetic oligonucleotide
guauucuauaugcuaauuu

SEQ ID NO: 2296365 - RNA, 19 nt, Artificial Sequence
  Description of Artificial Sequence: Synthetic oligonucleotide
acgucgggauguuuggcug

SEQ ID NO: 2296366 - RNA, 19 nt, Artificial Sequence
  Description of Artificial Sequence: Synthetic oligonucleotide
uuuguuccccacugauccu

SEQ ID NO: 2296367 - RNA, 19 nt, Artificial Sequence
  Description of Artificial Sequence: Synthetic oligonucleotide
ucuacccauggcugaugcc

SEQ ID NO: 2296368 - RNA, 19 nt, Artificial Sequence
  Description of Artificial Sequence: Synthetic oligonucleotide
agaguagcuuuacaacauu

SEQ ID NO: 2296369 - RNA, 19 nt, Artificial Sequence
  Description of Artificial Sequence: Synthetic oligonucleotide
guaacugccccaagauuug

SEQ ID NO: 2296370 - RNA, 19 nt, Artificial Sequence
  Description of Artificial Sequence: Synthetic oligonucleotide
uugugcaaccugaacuauu

SEQ ID NO: 2296371 - RNA, 19 nt, Artificial Sequence
  Description of Artificial Sequence: Synthetic oligonucleotide
cauggcugaugccuggauc

SEQ ID NO: 2296372 - RNA, 19 nt, Artificial Sequence
  Description of Artificial Sequence: Synthetic oligonucleotide
agaaaccucaugccuuaaa

SEQ ID NO: 2296373 - RNA, 19 nt, Artificial Sequence
  Description of Artificial Sequence: Synthetic oligonucleotide
agguccuuuggcauccggg

SEQ ID NO: 2296374 - RNA, 19 nt, Artificial Sequence
  Description of Artificial Sequence: Synthetic oligonucleotide
aguagcuuuacaacauuuu

SEQ ID NO: 2296375 - RNA, 19 nt, Artificial Sequence
  Description of Artificial Sequence: Synthetic oligonucleotide
ucuugccacuucagcacac

SEQ ID NO: 2296376 - RNA, 19 nt, Artificial Sequence
  Description of Artificial Sequence: Synthetic oligonucleotide
agcuaaguaagaguagcuu

SEQ ID NO: 2296377 - RNA, 19 nt, Artificial Sequence
  Description of Artificial Sequence: Synthetic oligonucleotide
ugccccaagauuuguucuc

SEQ ID NO: 2296378 - RNA, 19 nt, Artificial Sequence
  Description of Artificial Sequence: Synthetic oligonucleotide
caugccuuaaauauuuguu

SEQ ID NO: 2296379 - RNA, 19 nt, Artificial Sequence
  Description of Artificial Sequence: Synthetic oligonucleotide
auuuccgaucaaacuuuuc

SEQ ID NO: 2296380 - RNA, 19 nt, Artificial Sequence
  Description of Artificial Sequence: Synthetic oligonucleotide
ccugaacuauucaaagaac

SEQ ID NO: 2296381 - RNA, 19 nt, Artificial Sequence
  Description of Artificial Sequence: Synthetic oligonucleotide
auaaccuaauagugucuuu

SEQ ID NO: 2296382 - RNA, 19 nt, Artificial Sequence
  Description of Artificial Sequence: Synthetic oligonucleotide
guaggauuucaugguccgg

SEQ ID NO: 2296383 - RNA, 19 nt, Artificial Sequence
  Description of Artificial Sequence: Synthetic oligonucleotide
cuuuaacgaugaaaagaaa

SEQ ID NO: 2296384 - RNA, 19 nt, Artificial Sequence
  Description of Artificial Sequence: Synthetic oligonucleotide
gagguccuuuggcauccgg

SEQ ID NO: 2296385 - RNA, 19 nt, Artificial Sequence
  Description of Artificial Sequence: Synthetic oligonucleotide
ucucucucucucucucucu

SEQ ID NO: 2296386 - RNA, 19 nt, Artificial Sequence
  Description of Artificial Sequence: Synthetic oligonucleotide
cugaagggacacaggaaca

SEQ ID NO: 2296387 - RNA, 19 nt, Artificial Sequence
  Description of Artificial Sequence: Synthetic oligonucleotide
cuggaucuuuauccuugcc

SEQ ID NO: 2296388 - RNA, 19 nt, Artificial Sequence
  Description of Artificial Sequence: Synthetic oligonucleotide
guuuaacaugugcuuugga

SEQ ID NO: 2296389 - RNA, 19 nt, Artificial Sequence
  Description of Artificial Sequence: Synthetic oligonucleotide
gcucauugcauagugaaaa

SEQ ID NO: 2296390 - RNA, 19 nt, Artificial Sequence
  Description of Artificial Sequence: Synthetic oligonucleotide
cugcaguggauuuccgauc

SEQ ID NO: 2296391 - RNA, 19 nt, Artificial Sequence
  Description of Artificial Sequence: Synthetic oligonucleotide
gagaucaugcacaguguaa

SEQ ID NO: 2296392 - RNA, 19 nt, Artificial Sequence
  Description of Artificial Sequence: Synthetic oligonucleotide
cucucucucucucucucuc

SEQ ID NO: 2296393 - RNA, 19 nt, Artificial Sequence
  Description of Artificial Sequence: Synthetic oligonucleotide
uuucuacccauggcugaug

SEQ ID NO: 2296394 - RNA, 19 nt, Artificial Sequence
  Description of Artificial Sequence: Synthetic oligonucleotide
auaaaccauaaaagguaau

SEQ ID NO: 2296395 - RNA, 19 nt, Artificial Sequence
  Description of Artificial Sequence: Synthetic oligonucleotide
ggauuucaugguccggagc

SEQ ID NO: 2296396 - RNA, 19 nt, Artificial Sequence
  Description of Artificial Sequence: Synthetic oligonucleotide
ugucagaguucagaauaua

SEQ ID NO: 2296397 - RNA, 19 nt, Artificial Sequence
  Description of Artificial Sequence: Synthetic oligonucleotide
augagaucaugcacagugu

SEQ ID NO: 2296398 - RNA, 19 nt, Artificial Sequence
  Description of Artificial Sequence: Synthetic oligonucleotide
ucucucucucucucucuuc

SEQ ID NO: 2296399 - RNA, 19 nt, Artificial Sequence
  Description of Artificial Sequence: Synthetic oligonucleotide
aguugaaauuuuacauaau

SEQ ID NO: 2296400 - RNA, 19 nt, Artificial Sequence
  Description of Artificial Sequence: Synthetic oligonucleotide
cccuaaaaucuuaaaacaa

SEQ ID NO: 2296401 - RNA, 19 nt, Artificial Sequence
  Description of Artificial Sequence: Synthetic oligonucleotide
cuucaauaaauuugcucau

SEQ ID NO: 2296402 - RNA, 19 nt, Artificial Sequence
  Description of Artificial Sequence: Synthetic oligonucleotide
aucuuuauccuugccuguu

SEQ ID NO: 2296403 - RNA, 19 nt, Artificial Sequence
  Description of Artificial Sequence: Synthetic oligonucleotide
agguacucuucagaguaau

SEQ ID NO: 2296404 - RNA, 19 nt, Artificial Sequence
  Description of Artificial Sequence: Synthetic oligonucleotide
cuucacugcaguggauuuc

SEQ ID NO: 2296405 - RNA, 19 nt, Artificial Sequence
  Description of Artificial Sequence: Synthetic oligonucleotide
augucagaguucagaauau

SEQ ID NO: 2296406 - RNA, 19 nt, Artificial Sequence
  Description of Artificial Sequence: Synthetic oligonucleotide
gcuuuggauauugagcuaa

SEQ ID NO: 2296407 - RNA, 19 nt, Artificial Sequence
  Description of Artificial Sequence: Synthetic oligonucleotide
gcuaaguaagaguagcuuu

SEQ ID NO: 2296408 - RNA, 19 nt, Artificial Sequence
  Description of Artificial Sequence: Synthetic oligonucleotide
uuguuccccacugauccuu

SEQ ID NO: 2296409 - RNA, 19 nt, Artificial Sequence
  Description of Artificial Sequence: Synthetic oligonucleotide
ggcuguaacugccccaaga

SEQ ID NO: 2296410 - RNA, 19 nt, Artificial Sequence
  Description of Artificial Sequence: Synthetic oligonucleotide
uggcuguaacugccccaag

SEQ ID NO: 2296411 - RNA, 19 nt, Artificial Sequence
  Description of Artificial Sequence: Synthetic oligonucleotide
ucaugagaucaugcacagu

SEQ ID NO: 2296412 - RNA, 19 nt, Artificial Sequence
  Description of Artificial Sequence: Synthetic oligonucleotide
acagaacuuucuacccaug

SEQ ID NO: 2296413 - RNA, 19 nt, Artificial Sequence
  Description of Artificial Sequence: Synthetic oligonucleotide
gcaaccugaacuauucaaa

SEQ ID NO: 2296414 - RNA, 19 nt, Artificial Sequence
  Description of Artificial Sequence: Synthetic oligonucleotide
gccuggaucuuuauccuug

SEQ ID NO: 2296415 - RNA, 19 nt, Artificial Sequence
  Description of Artificial Sequence: Synthetic oligonucleotide
cccugcaaaacuccuuuug

SEQ ID NO: 2296416 - RNA, 19 nt, Artificial Sequence
  Description of Artificial Sequence: Synthetic oligonucleotide
ugccuggaucuuuauccuu

SEQ ID NO: 2296417 - RNA, 19 nt, Artificial Sequence
  Description of Artificial Sequence: Synthetic oligonucleotide
caugugcuuuggauauuga

SEQ ID NO: 2296418 - RNA, 19 nt, Artificial Sequence
  Description of Artificial Sequence: Synthetic oligonucleotide
gagcuaaguaagaguagcu

SEQ ID NO: 2296419 - RNA, 19 nt, Artificial Sequence
  Description of Artificial Sequence: Synthetic oligonucleotide
aacaugugcuuuggauauu

SEQ ID NO: 2296420 - RNA, 19 nt, Artificial Sequence
  Description of Artificial Sequence: Synthetic oligonucleotide
aguucagaauauacucaua

SEQ ID NO: 2296421 - RNA, 19 nt, Artificial Sequence
  Description of Artificial Sequence: Synthetic oligonucleotide
gugcaaccugaacuauuca

SEQ ID NO: 2296422 - RNA, 19 nt, Artificial Sequence
  Description of Artificial Sequence: Synthetic oligonucleotide
uccuuuuggucaggccugu

SEQ ID NO: 2296423 - RNA, 19 nt, Artificial Sequence
  Description of Artificial Sequence: Synthetic oligonucleotide
gaguaauucaugagaucau

SEQ ID NO: 2296424 - RNA, 19 nt, Artificial Sequence
  Description of Artificial Sequence: Synthetic oligonucleotide
uuucaaacgucgggauguu

SEQ ID NO: 2296425 - RNA, 19 nt, Artificial Sequence
  Description of Artificial Sequence: Synthetic oligonucleotide
aacugccccaagauuuguu

SEQ ID NO: 2296426 - RNA, 19 nt, Artificial Sequence
  Description of Artificial Sequence: Synthetic oligonucleotide
ucucucucucucucuucuu

SEQ ID NO: 2296427 - RNA, 19 nt, Artificial Sequence
  Description of Artificial Sequence: Synthetic oligonucleotide
ccuguuucuugccacuuca

SEQ ID NO: 2296428 - RNA, 19 nt, Artificial Sequence
  Description of Artificial Sequence: Synthetic oligonucleotide
gaguagcuuuacaacauuu

SEQ ID NO: 2296429 - RNA, 19 nt, Artificial Sequence
  Description of Artificial Sequence: Synthetic oligonucleotide
agugaccugaagggacaca

SEQ ID NO: 2296430 - RNA, 19 nt, Artificial Sequence
  Description of Artificial Sequence: Synthetic oligonucleotide
cauaaccuaauagugucuu

SEQ ID NO: 2296431 - RNA, 19 nt, Artificial Sequence
  Description of Artificial Sequence: Synthetic oligonucleotide
ucccugcaaaacuccuuuu

SEQ ID NO: 2296432 - RNA, 19 nt, Artificial Sequence
  Description of Artificial Sequence: Synthetic oligonucleotide
accaaaugucagaguucag

SEQ ID NO: 2296433 - RNA, 19 nt, Artificial Sequence
  Description of Artificial Sequence: Synthetic oligonucleotide
auaccuugugcaaccugaa

SEQ ID NO: 2296434 - RNA, 19 nt, Artificial Sequence
  Description of Artificial Sequence: Synthetic oligonucleotide
gggauguuuggcuguaacu

SEQ ID NO: 2296435 - RNA, 19 nt, Artificial Sequence
  Description of Artificial Sequence: Synthetic oligonucleotide
auguuacccuaaaaucuua

SEQ ID NO: 2296436 - RNA, 19 nt, Artificial Sequence
  Description of Artificial Sequence: Synthetic oligonucleotide
ccuugugcaaccugaacua

SEQ ID NO: 2296437 - RNA, 19 nt, Artificial Sequence
  Description of Artificial Sequence: Synthetic oligonucleotide
cucauugcauagugaaaau

SEQ ID NO: 2296438 - RNA, 19 nt, Artificial Sequence
  Description of Artificial Sequence: Synthetic oligonucleotide
cucucucucucucucuucu

SEQ ID NO: 2296439 - RNA, 19 nt, Artificial Sequence
  Description of Artificial Sequence: Synthetic oligonucleotide
gguccuuuggcauccgggu

SEQ ID NO: 2296440 - RNA, 19 nt, Artificial Sequence
  Description of Artificial Sequence: Synthetic oligonucleotide
uucaaacgucgggauguuu

SEQ ID NO: 2296441 - RNA, 19 nt, Artificial Sequence
  Description of Artificial Sequence: Synthetic oligonucleotide
gguugauggcaaaguagga

SEQ ID NO: 2296442 - RNA, 19 nt, Artificial Sequence
  Description of Artificial Sequence: Synthetic oligonucleotide
cuugccacuucagcacaca

SEQ ID NO: 2296443 - RNA, 19 nt, Artificial Sequence
  Description of Artificial Sequence: Synthetic oligonucleotide
cuuuuggucaggccuguuu

SEQ ID NO: 2296444 - RNA, 19 nt, Artificial Sequence
  Description of Artificial Sequence: Synthetic oligonucleotide
gccccaagauuuguucucc

SEQ ID NO: 2296445 - RNA, 19 nt, Artificial Sequence
  Description of Artificial Sequence: Synthetic oligonucleotide
gauuuccgaucaaacuuuu

SEQ ID NO: 2296446 - RNA, 19 nt, Artificial Sequence
  Description of Artificial Sequence: Synthetic oligonucleotide
ccucaugccuuaaauauuu

SEQ ID NO: 2296447 - RNA, 19 nt, Artificial Sequence
  Description of Artificial Sequence: Synthetic oligonucleotide
ggauuuccgaucaaacuuu

SEQ ID NO: 2296448 - RNA, 19 nt, Artificial Sequence
  Description of Artificial Sequence: Synthetic oligonucleotide
gucuucacugcaguggauu

SEQ ID NO: 2296449 - RNA, 19 nt, Artificial Sequence
  Description of Artificial Sequence: Synthetic oligonucleotide
ccggguugugguugauggc

SEQ ID NO: 2296450 - RNA, 19 nt, Artificial Sequence
  Description of Artificial Sequence: Synthetic oligonucleotide
ucgggauguuuggcuguaa

SEQ ID NO: 2296451 - RNA, 19 nt, Artificial Sequence
  Description of Artificial Sequence: Synthetic oligonucleotide
cucucucucucucuucuuu

SEQ ID NO: 2296452 - RNA, 19 nt, Artificial Sequence
  Description of Artificial Sequence: Synthetic oligonucleotide
cugauccuuuguuucugau

SEQ ID NO: 2296453 - RNA, 19 nt, Artificial Sequence
  Description of Artificial Sequence: Synthetic oligonucleotide
cgggauguuuggcuguaac

SEQ ID NO: 2296454 - RNA, 19 nt, Artificial Sequence
  Description of Artificial Sequence: Synthetic oligonucleotide
cuugugcaaccugaacuau

SEQ ID NO: 2296455 - RNA, 19 nt, Artificial Sequence
  Description of Artificial Sequence: Synthetic oligonucleotide
cucucucucucucucucuu

SEQ ID NO: 2296456 - RNA, 19 nt, Artificial Sequence
  Description of Artificial Sequence: Synthetic oligonucleotide
gucgggauguuuggcugua

SEQ ID NO: 2296457 - RNA, 19 nt, Artificial Sequence
  Description of Artificial Sequence: Synthetic oligonucleotide
ggguugugguugauggcaa

SEQ ID NO: 2296458 - RNA, 19 nt, Artificial Sequence
  Description of Artificial Sequence: Synthetic oligonucleotide
cccaagauuuguucucccu

SEQ ID NO: 2296459 - RNA, 19 nt, Artificial Sequence
  Description of Artificial Sequence: Synthetic oligonucleotide
cugauaccuugugcaaccu

SEQ ID NO: 2296460 - RNA, 19 nt, Artificial Sequence
  Description of Artificial Sequence: Synthetic oligonucleotide
gcaguggauuuccgaucaa

SEQ ID NO: 2296461 - RNA, 19 nt, Artificial Sequence
  Description of Artificial Sequence: Synthetic oligonucleotide
ggcugaugccuggaucuuu

SEQ ID NO: 2296462 - RNA, 19 nt, Artificial Sequence
  Description of Artificial Sequence: Synthetic oligonucleotide
cgucgggauguuuggcugu

SEQ ID NO: 2296463 - RNA, 19 nt, Artificial Sequence
  Description of Artificial Sequence: Synthetic oligonucleotide
ccauggcugaugccuggau

SEQ ID NO: 2296464 - RNA, 19 nt, Artificial Sequence
  Description of Artificial Sequence: Synthetic oligonucleotide
cauccggguugugguugau

SEQ ID NO: 2296465 - RNA, 19 nt, Artificial Sequence
  Description of Artificial Sequence: Synthetic oligonucleotide
ugaugaaacaucaauacca

SEQ ID NO: 2296466 - RNA, 19 nt, Artificial Sequence
  Description of Artificial Sequence: Synthetic oligonucleotide
aaacccuuggcacagcacc

SEQ ID NO: 2296467 - RNA, 19 nt, Artificial Sequence
  Description of Artificial Sequence: Synthetic oligonucleotide
aaaccggagucauaaaagc

SEQ ID NO: 2296468 - RNA, 19 nt, Artificial Sequence
  Description of Artificial Sequence: Synthetic oligonucleotide
gaauaucugaucuaguugc

SEQ ID NO: 2296469 - RNA, 19 nt, Artificial Sequence
  Description of Artificial Sequence: Synthetic oligonucleotide
aaaguguuacucuuggaag

SEQ ID NO: 2296470 - RNA, 19 nt, Artificial Sequence
  Description of Artificial Sequence: Synthetic oligonucleotide
ucaaguaugucacugguca

SEQ ID NO: 2296471 - RNA, 19 nt, Artificial Sequence
  Description of Artificial Sequence: Synthetic oligonucleotide
ugugcauagacgaugagca

SEQ ID NO: 2296472 - RNA, 19 nt, Artificial Sequence
  Description of Artificial Sequence: Synthetic oligonucleotide
ucaauaccaaaacugaucu

SEQ ID NO: 2296473 - RNA, 19 nt, Artificial Sequence
  Description of Artificial Sequence: Synthetic oligonucleotide
auaagucagacacagugac

SEQ ID NO: 2296474 - RNA, 19 nt, Artificial Sequence
  Description of Artificial Sequence: Synthetic oligonucleotide
aacaucaauaccaaaacug

SEQ ID NO: 2296475 - RNA, 19 nt, Artificial Sequence
  Description of Artificial Sequence: Synthetic oligonucleotide
uaauuugcuguacucagag

SEQ ID NO: 2296476 - RNA, 19 nt, Artificial Sequence
  Description of Artificial Sequence: Synthetic oligonucleotide
ucugaugaaacaucaauac

SEQ ID NO: 2296477 - RNA, 19 nt, Artificial Sequence
  Description of Artificial Sequence: Synthetic oligonucleotide
uuacccuugagcaaaccgg

SEQ ID NO: 2296478 - RNA, 19 nt, Artificial Sequence
  Description of Artificial Sequence: Synthetic oligonucleotide
uuuacccuugagcaaaccg

SEQ ID NO: 2296479 - RNA, 19 nt, Artificial Sequence
  Description of Artificial Sequence: Synthetic oligonucleotide
cuuggcucaaaguucaugg

SEQ ID NO: 2296480 - RNA, 19 nt, Artificial Sequence
  Description of Artificial Sequence: Synthetic oligonucleotide
ugaauaucugaucuaguug

SEQ ID NO: 2296481 - RNA, 19 nt, Artificial Sequence
  Description of Artificial Sequence: Synthetic oligonucleotide
uuuuguguacaucucagcu

SEQ ID NO: 2296482 - RNA, 19 nt, Artificial Sequence
  Description of Artificial Sequence: Synthetic oligonucleotide
aguugcaugaaacugaaaa

SEQ ID NO: 2296483 - RNA, 19 nt, Artificial Sequence
  Description of Artificial Sequence: Synthetic oligonucleotide
acgaugagcacuuucuuac

SEQ ID NO: 2296484 - RNA, 19 nt, Artificial Sequence
  Description of Artificial Sequence: Synthetic oligonucleotide
auaucacuagaucagcuuc

SEQ ID NO: 2296485 - RNA, 19 nt, Artificial Sequence
  Description of Artificial Sequence: Synthetic oligonucleotide
ugaaaacacucauuugugg

SEQ ID NO: 2296486 - RNA, 19 nt, Artificial Sequence
  Description of Artificial Sequence: Synthetic oligonucleotide
uuguacaugcuuuaggucu

SEQ ID NO: 2296487 - RNA, 19 nt, Artificial Sequence
  Description of Artificial Sequence: Synthetic oligonucleotide
ucuuuguacaugcuuuagg

SEQ ID NO: 2296488 - RNA, 19 nt, Artificial Sequence
  Description of Artificial Sequence: Synthetic oligonucleotide
ucuaguugcaugaaacuga

SEQ ID NO: 2296489 - RNA, 19 nt, Artificial Sequence
  Description of Artificial Sequence: Synthetic oligonucleotide
gaagacuucaggauuagag

SEQ ID NO: 2296490 - RNA, 19 nt, Artificial Sequence
  Description of Artificial Sequence: Synthetic oligonucleotide
uuucuuaccugccauguug

SEQ ID NO: 2296491 - RNA, 19 nt, Artificial Sequence
  Description of Artificial Sequence: Synthetic oligonucleotide
ugaucuaguugcaugaaac

SEQ ID NO: 2296492 - RNA, 19 nt, Artificial Sequence
  Description of Artificial Sequence: Synthetic oligonucleotide
auaucugaagacuucagga

SEQ ID NO: 2296493 - RNA, 19 nt, Artificial Sequence
  Description of Artificial Sequence: Synthetic oligonucleotide
agacuucaggauuagagag

SEQ ID NO: 2296494 - RNA, 19 nt, Artificial Sequence
  Description of Artificial Sequence: Synthetic oligonucleotide
aauuugcuguacucagagc

SEQ ID NO: 2296495 - RNA, 19 nt, Artificial Sequence
  Description of Artificial Sequence: Synthetic oligonucleotide
uguugaauaucugaucuag

SEQ ID NO: 2296496 - RNA, 19 nt, Artificial Sequence
  Description of Artificial Sequence: Synthetic oligonucleotide
uuuuagaauugcuggcacg

SEQ ID NO: 2296497 - RNA, 19 nt, Artificial Sequence
  Description of Artificial Sequence: Synthetic oligonucleotide
aaguguuacucuuggaagu

SEQ ID NO: 2296498 - RNA, 19 nt, Artificial Sequence
  Description of Artificial Sequence: Synthetic oligonucleotide
uguuuguugaauaucugau

SEQ ID NO: 2296499 - RNA, 19 nt, Artificial Sequence
  Description of Artificial Sequence: Synthetic oligonucleotide
agugacuguacaucccugc

SEQ ID NO: 2296500 - RNA, 19 nt, Artificial Sequence
  Description of Artificial Sequence: Synthetic oligonucleotide
uuuagaauugcuggcacgc

SEQ ID NO: 2296501 - RNA, 19 nt, Artificial Sequence
  Description of Artificial Sequence: Synthetic oligonucleotide
ucuuggugugcauagacga

SEQ ID NO: 2296502 - RNA, 19 nt, Artificial Sequence
  Description of Artificial Sequence: Synthetic oligonucleotide
ugcaccaagauguuuguug

SEQ ID NO: 2296503 - RNA, 19 nt, Artificial Sequence
  Description of Artificial Sequence: Synthetic oligonucleotide
aaaguuucagguacuauca

SEQ ID NO: 2296504 - RNA, 19 nt, Artificial Sequence
  Description of Artificial Sequence: Synthetic oligonucleotide
uucagggacccguugaagg

SEQ ID NO: 2296505 - RNA, 19 nt, Artificial Sequence
  Description of Artificial Sequence: Synthetic oligonucleotide
agaagugcaauguaccaug

SEQ ID NO: 2296506 - RNA, 19 nt, Artificial Sequence
  Description of Artificial Sequence: Synthetic oligonucleotide
uuccagaugcucuucagcc

SEQ ID NO: 2296507 - RNA, 19 nt, Artificial Sequence
  Description of Artificial Sequence: Synthetic oligonucleotide
uugcaugaaacugaaaaca

SEQ ID NO: 2296508 - RNA, 19 nt, Artificial Sequence
  Description of Artificial Sequence: Synthetic oligonucleotide
uuuguguacaucucagcug

SEQ ID NO: 2296509 - RNA, 19 nt, Artificial Sequence
  Description of Artificial Sequence: Synthetic oligonucleotide
aaguuucagguacuaucac

SEQ ID NO: 2296510 - RNA, 19 nt, Artificial Sequence
  Description of Artificial Sequence: Synthetic oligonucleotide
aauaucacuagaucagcuu

SEQ ID NO: 2296511 - RNA, 19 nt, Artificial Sequence
  Description of Artificial Sequence: Synthetic oligonucleotide
auauucacugcaucucugg

SEQ ID NO: 2296512 - RNA, 19 nt, Artificial Sequence
  Description of Artificial Sequence: Synthetic oligonucleotide
ucuggauacagcaccaccu

SEQ ID NO: 2296513 - RNA, 19 nt, Artificial Sequence
  Description of Artificial Sequence: Synthetic oligonucleotide
uacucuuggaaguaccaag

SEQ ID NO: 2296514 - RNA, 19 nt, Artificial Sequence
  Description of Artificial Sequence: Synthetic oligonucleotide
uuucuuguggcccuuggcu

SEQ ID NO: 2296515 - RNA, 19 nt, Artificial Sequence
  Description of Artificial Sequence: Synthetic oligonucleotide
ugaaacugaaaacacucau

SEQ ID NO: 2296516 - RNA, 19 nt, Artificial Sequence
  Description of Artificial Sequence: Synthetic oligonucleotide
gcuaauuuacccuugagca

SEQ ID NO: 2296517 - RNA, 19 nt, Artificial Sequence
  Description of Artificial Sequence: Synthetic oligonucleotide
uucuuaccugccauguugg

SEQ ID NO: 2296518 - RNA, 19 nt, Artificial Sequence
  Description of Artificial Sequence: Synthetic oligonucleotide
uucuuggugugcauagacg

SEQ ID NO: 2296519 - RNA, 19 nt, Artificial Sequence
  Description of Artificial Sequence: Synthetic oligonucleotide
aaccggagucauaaaagcc

SEQ ID NO: 2296520 - RNA, 19 nt, Artificial Sequence
  Description of Artificial Sequence: Synthetic oligonucleotide
aucaauaccaaaacugauc

SEQ ID NO: 2296521 - RNA, 19 nt, Artificial Sequence
  Description of Artificial Sequence: Synthetic oligonucleotide
caaaccggagucauaaaag

SEQ ID NO: 2296522 - RNA, 19 nt, Artificial Sequence
  Description of Artificial Sequence: Synthetic oligonucleotide
aauguaccaugcuggagug

SEQ ID NO: 2296523 - RNA, 19 nt, Artificial Sequence
  Description of Artificial Sequence: Synthetic oligonucleotide
uagaucagcuucuugcacc

SEQ ID NO: 2296524 - RNA, 19 nt, Artificial Sequence
  Description of Artificial Sequence: Synthetic oligonucleotide
cauuuguggacauauucac

SEQ ID NO: 2296525 - RNA, 19 nt, Artificial Sequence
  Description of Artificial Sequence: Synthetic oligonucleotide
uagacgaugagcacuuucu

SEQ ID NO: 2296526 - RNA, 19 nt, Artificial Sequence
  Description of Artificial Sequence: Synthetic oligonucleotide
acuucaggauuagagaggg

SEQ ID NO: 2296527 - RNA, 19 nt, Artificial Sequence
  Description of Artificial Sequence: Synthetic oligonucleotide
uaucugaucuaguugcaug

SEQ ID NO: 2296528 - RNA, 19 nt, Artificial Sequence
  Description of Artificial Sequence: Synthetic oligonucleotide
uguacagaggauaggcucu

SEQ ID NO: 2296529 - RNA, 19 nt, Artificial Sequence
  Description of Artificial Sequence: Synthetic oligonucleotide
ugauacaguagcccaaagu

SEQ ID NO: 2296530 - RNA, 19 nt, Artificial Sequence
  Description of Artificial Sequence: Synthetic oligonucleotide
uugaauaucugaucuaguu

SEQ ID NO: 2296531 - RNA, 19 nt, Artificial Sequence
  Description of Artificial Sequence: Synthetic oligonucleotide
ugauuugauacaguagccc

SEQ ID NO: 2296532 - RNA, 19 nt, Artificial Sequence
  Description of Artificial Sequence: Synthetic oligonucleotide
uguuacucuuggaaguacc

SEQ ID NO: 2296533 - RNA, 19 nt, Artificial Sequence
  Description of Artificial Sequence: Synthetic oligonucleotide
gacuguacaucccugcuug

SEQ ID NO: 2296534 - RNA, 19 nt, Artificial Sequence
  Description of Artificial Sequence: Synthetic oligonucleotide
gucauaaaagccugggaug

SEQ ID NO: 2296535 - RNA, 19 nt, Artificial Sequence
  Description of Artificial Sequence: Synthetic oligonucleotide
uauagugggaacugaaaua

SEQ ID NO: 2296536 - RNA, 19 nt, Artificial Sequence
  Description of Artificial Sequence: Synthetic oligonucleotide
ugaaccaauauagugggaa

SEQ ID NO: 2296537 - RNA, 19 nt, Artificial Sequence
  Description of Artificial Sequence: Synthetic oligonucleotide
gacccguugaaggacaugg

SEQ ID NO: 2296538 - RNA, 19 nt, Artificial Sequence
  Description of Artificial Sequence: Synthetic oligonucleotide
cugaugaaacaucaauacc

SEQ ID NO: 2296539 - RNA, 19 nt, Artificial Sequence
  Description of Artificial Sequence: Synthetic oligonucleotide
uguuggaggagacggauuc

SEQ ID NO: 2296540 - RNA, 19 nt, Artificial Sequence
  Description of Artificial Sequence: Synthetic oligonucleotide
cacaaaguguuacucuugg

SEQ ID NO: 2296541 - RNA, 19 nt, Artificial Sequence
  Description of Artificial Sequence: Synthetic oligonucleotide
gugguuaaggaaaggaggg

SEQ ID NO: 2296542 - RNA, 19 nt, Artificial Sequence
  Description of Artificial Sequence: Synthetic oligonucleotide
cucauuuguggacauauuc

SEQ ID NO: 2296543 - RNA, 19 nt, Artificial Sequence
  Description of Artificial Sequence: Synthetic oligonucleotide
acaucucagcuguaccucc

SEQ ID NO: 2296544 - RNA, 19 nt, Artificial Sequence
  Description of Artificial Sequence: Synthetic oligonucleotide
uaauuuacccuugagcaaa

SEQ ID NO: 2296545 - RNA, 19 nt, Artificial Sequence
  Description of Artificial Sequence: Synthetic oligonucleotide
agccacuuucuucagggac

SEQ ID NO: 2296546 - RNA, 19 nt, Artificial Sequence
  Description of Artificial Sequence: Synthetic oligonucleotide
ugaucuguggggcaaggac

SEQ ID NO: 2296547 - RNA, 19 nt, Artificial Sequence
  Description of Artificial Sequence: Synthetic oligonucleotide
auagacgaugagcacuuuc

SEQ ID NO: 2296548 - RNA, 19 nt, Artificial Sequence
  Description of Artificial Sequence: Synthetic oligonucleotide
augcuuuaggucucucacc

SEQ ID NO: 2296549 - RNA, 19 nt, Artificial Sequence
  Description of Artificial Sequence: Synthetic oligonucleotide
uucaggauuagagagggaa

SEQ ID NO: 2296550 - RNA, 19 nt, Artificial Sequence
  Description of Artificial Sequence: Synthetic oligonucleotide
ucauaaaagccugggaugu

SEQ ID NO: 2296551 - RNA, 19 nt, Artificial Sequence
  Description of Artificial Sequence: Synthetic oligonucleotide
aauccacagaagugcaaug

SEQ ID NO: 2296552 - RNA, 19 nt, Artificial Sequence
  Description of Artificial Sequence: Synthetic oligonucleotide
aggauaggcucuuccuucc

SEQ ID NO: 2296553 - RNA, 19 nt, Artificial Sequence
  Description of Artificial Sequence: Synthetic oligonucleotide
cugauuugauacaguagcc

SEQ ID NO: 2296554 - RNA, 19 nt, Artificial Sequence
  Description of Artificial Sequence: Synthetic oligonucleotide
ggauucucugauuugauac

SEQ ID NO: 2296555 - RNA, 19 nt, Artificial Sequence
  Description of Artificial Sequence: Synthetic oligonucleotide
uuagagagggaaccaguga

SEQ ID NO: 2296556 - RNA, 19 nt, Artificial Sequence
  Description of Artificial Sequence: Synthetic oligonucleotide
gcugaaccaauauaguggg

SEQ ID NO: 2296557 - RNA, 19 nt, Artificial Sequence
  Description of Artificial Sequence: Synthetic oligonucleotide
uguaccaugcuggaguggc

SEQ ID NO: 2296558 - RNA, 19 nt, Artificial Sequence
  Description of Artificial Sequence: Synthetic oligonucleotide
ucucucaccaugcugcuaa

SEQ ID NO: 2296559 - RNA, 19 nt, Artificial Sequence
  Description of Artificial Sequence: Synthetic oligonucleotide
ucagguacuaucacucuuc

SEQ ID NO: 2296560 - RNA, 19 nt, Artificial Sequence
  Description of Artificial Sequence: Synthetic oligonucleotide
aguagcccaaaguuucagg

SEQ ID NO: 2296561 - RNA, 19 nt, Artificial Sequence
  Description of Artificial Sequence: Synthetic oligonucleotide
ugagcacuuucuuaccugc

SEQ ID NO: 2296562 - RNA, 19 nt, Artificial Sequence
  Description of Artificial Sequence: Synthetic oligonucleotide
agauguuuguugaauaucu

SEQ ID NO: 2296563 - RNA, 19 nt, Artificial Sequence
  Description of Artificial Sequence: Synthetic oligonucleotide
uucauaggcuucuauccca

SEQ ID NO: 2296564 - RNA, 19 nt, Artificial Sequence
  Description of Artificial Sequence: Synthetic oligonucleotide
uacucagagcacaaagugu

SEQ ID NO: 2296565 - RNA, 19 nt, Artificial Sequence
  Description of Artificial Sequence: Synthetic oligonucleotide
uaucugaagacuucaggau

SEQ ID NO: 2296566 - RNA, 19 nt, Artificial Sequence
  Description of Artificial Sequence: Synthetic oligonucleotide
uagaauugcuggcacgcug

SEQ ID NO: 2296567 - RNA, 19 nt, Artificial Sequence
  Description of Artificial Sequence: Synthetic oligonucleotide
gaaaucuccacugacccca

SEQ ID NO: 2296568 - RNA, 19 nt, Artificial Sequence
  Description of Artificial Sequence: Synthetic oligonucleotide
uaucacuagaucagcuucu

SEQ ID NO: 2296569 - RNA, 19 nt, Artificial Sequence
  Description of Artificial Sequence: Synthetic oligonucleotide
auaggaaguaccggaaauc

SEQ ID NO: 2296570 - RNA, 19 nt, Artificial Sequence
  Description of Artificial Sequence: Synthetic oligonucleotide
aguaccggaaaucuccacu

SEQ ID NO: 2296571 - RNA, 19 nt, Artificial Sequence
  Description of Artificial Sequence: Synthetic oligonucleotide
aaauaucacuagaucagcu

SEQ ID NO: 2296572 - RNA, 19 nt, Artificial Sequence
  Description of Artificial Sequence: Synthetic oligonucleotide
aaccaauauagugggaacu

SEQ ID NO: 2296573 - RNA, 19 nt, Artificial Sequence
  Description of Artificial Sequence: Synthetic oligonucleotide
aucugaucuaguugcauga

SEQ ID NO: 2296574 - RNA, 19 nt, Artificial Sequence
  Description of Artificial Sequence: Synthetic oligonucleotide
acuagaucagcuucuugca

SEQ ID NO: 2296575 - RNA, 19 nt, Artificial Sequence
  Description of Artificial Sequence: Synthetic oligonucleotide
acauauucacugcaucucu

SEQ ID NO: 2296576 - RNA, 19 nt, Artificial Sequence
  Description of Artificial Sequence: Synthetic oligonucleotide
aaauccacagaagugcaau

SEQ ID NO: 2296577 - RNA, 19 nt, Artificial Sequence
  Description of Artificial Sequence: Synthetic oligonucleotide
aaguaccggaaaucuccac

SEQ ID NO: 2296578 - RNA, 19 nt, Artificial Sequence
  Description of Artificial Sequence: Synthetic oligonucleotide
cuuuaggucucucaccaug

SEQ ID NO: 2296579 - RNA, 19 nt, Artificial Sequence
  Description of Artificial Sequence: Synthetic oligonucleotide
auagugggaacugaaauau

SEQ ID NO: 2296580 - RNA, 19 nt, Artificial Sequence
  Description of Artificial Sequence: Synthetic oligonucleotide
uccagaugcucuucagccg

SEQ ID NO: 2296581 - RNA, 19 nt, Artificial Sequence
  Description of Artificial Sequence: Synthetic oligonucleotide
aaacacucauuuguggaca

SEQ ID NO: 2296582 - RNA, 19 nt, Artificial Sequence
  Description of Artificial Sequence: Synthetic oligonucleotide
uaucccauaucugaagacu

SEQ ID NO: 2296583 - RNA, 19 nt, Artificial Sequence
  Description of Artificial Sequence: Synthetic oligonucleotide
accggaaaucuccacugac

SEQ ID NO: 2296584 - RNA, 19 nt, Artificial Sequence
  Description of Artificial Sequence: Synthetic oligonucleotide
uuuguacaugcuuuagguc

SEQ ID NO: 2296585 - RNA, 19 nt, Artificial Sequence
  Description of Artificial Sequence: Synthetic oligonucleotide
ucaggauuagagagggaac

SEQ ID NO: 2296586 - RNA, 19 nt, Artificial Sequence
  Description of Artificial Sequence: Synthetic oligonucleotide
uucaacagccacuuucuuc

SEQ ID NO: 2296587 - RNA, 19 nt, Artificial Sequence
  Description of Artificial Sequence: Synthetic oligonucleotide
acaucaauaccaaaacuga

SEQ ID NO: 2296588 - RNA, 19 nt, Artificial Sequence
  Description of Artificial Sequence: Synthetic oligonucleotide
uauucacugcaucucugga

SEQ ID NO: 2296589 - RNA, 19 nt, Artificial Sequence
  Description of Artificial Sequence: Synthetic oligonucleotide
gaaccaauauagugggaac

SEQ ID NO: 2296590 - RNA, 19 nt, Artificial Sequence
  Description of Artificial Sequence: Synthetic oligonucleotide
cacagcacccuauccaucc

SEQ ID NO: 2296591 - RNA, 19 nt, Artificial Sequence
  Description of Artificial Sequence: Synthetic oligonucleotide
aucuaguugcaugaaacug

SEQ ID NO: 2296592 - RNA, 19 nt, Artificial Sequence
  Description of Artificial Sequence: Synthetic oligonucleotide
ggcuaauuuacccuugagc

SEQ ID NO: 2296593 - RNA, 19 nt, Artificial Sequence
  Description of Artificial Sequence: Synthetic oligonucleotide
gauucucugauuugauaca

SEQ ID NO: 2296594 - RNA, 19 nt, Artificial Sequence
  Description of Artificial Sequence: Synthetic oligonucleotide
ugcauagacgaugagcacu

SEQ ID NO: 2296595 - RNA, 19 nt, Artificial Sequence
  Description of Artificial Sequence: Synthetic oligonucleotide
aauauagugggaacugaaa

SEQ ID NO: 2296596 - RNA, 19 nt, Artificial Sequence
  Description of Artificial Sequence: Synthetic oligonucleotide
ucagacacagugacuguac

SEQ ID NO: 2296597 - RNA, 19 nt, Artificial Sequence
  Description of Artificial Sequence: Synthetic oligonucleotide
gugcaauguaccaugcugg

SEQ ID NO: 2296598 - RNA, 19 nt, Artificial Sequence
  Description of Artificial Sequence: Synthetic oligonucleotide
cuuuuagaauugcuggcac

SEQ ID NO: 2296599 - RNA, 19 nt, Artificial Sequence
  Description of Artificial Sequence: Synthetic oligonucleotide
aaccagugaugucauuucu

SEQ ID NO: 2296600 - RNA, 19 nt, Artificial Sequence
  Description of Artificial Sequence: Synthetic oligonucleotide
cagugcaccaagauguuug

SEQ ID NO: 2296601 - RNA, 19 nt, Artificial Sequence
  Description of Artificial Sequence: Synthetic oligonucleotide
ugcuaauuugcuguacuca

SEQ ID NO: 2296602 - RNA, 19 nt, Artificial Sequence
  Description of Artificial Sequence: Synthetic oligonucleotide
caggauuagagagggaacc

SEQ ID NO: 2296603 - RNA, 19 nt, Artificial Sequence
  Description of Artificial Sequence: Synthetic oligonucleotide
uaggaaguaccggaaaucu

SEQ ID NO: 2296604 - RNA, 19 nt, Artificial Sequence
  Description of Artificial Sequence: Synthetic oligonucleotide
caaaguguuacucuuggaa

SEQ ID NO: 2296605 - RNA, 19 nt, Artificial Sequence
  Description of Artificial Sequence: Synthetic oligonucleotide
acucuuggaaguaccaagg

SEQ ID NO: 2296606 - RNA, 19 nt, Artificial Sequence
  Description of Artificial Sequence: Synthetic oligonucleotide
ggaaguaccggaaaucucc

SEQ ID NO: 2296607 - RNA, 19 nt, Artificial Sequence
  Description of Artificial Sequence: Synthetic oligonucleotide
gcauauaagucagacacag

SEQ ID NO: 2296608 - RNA, 19 nt, Artificial Sequence
  Description of Artificial Sequence: Synthetic oligonucleotide
uggggcaaggacuuuaaau

SEQ ID NO: 2296609 - RNA, 19 nt, Artificial Sequence
  Description of Artificial Sequence: Synthetic oligonucleotide
ucgaaggcaaacccuuggc

SEQ ID NO: 2296610 - RNA, 19 nt, Artificial Sequence
  Description of Artificial Sequence: Synthetic oligonucleotide
aauuuacccuugagcaaac

SEQ ID NO: 2296611 - RNA, 19 nt, Artificial Sequence
  Description of Artificial Sequence: Synthetic oligonucleotide
gagggaaccagugauguca

SEQ ID NO: 2296612 - RNA, 19 nt, Artificial Sequence
  Description of Artificial Sequence: Synthetic oligonucleotide
uguacaucccugcuugcuc

SEQ ID NO: 2296613 - RNA, 19 nt, Artificial Sequence
  Description of Artificial Sequence: Synthetic oligonucleotide
uguacaugcuuuaggucuc

SEQ ID NO: 2296614 - RNA, 19 nt, Artificial Sequence
  Description of Artificial Sequence: Synthetic oligonucleotide
uggacauauucacugcauc

SEQ ID NO: 2296615 - RNA, 19 nt, Artificial Sequence
  Description of Artificial Sequence: Synthetic oligonucleotide
ggacuuuaaauccacagaa

SEQ ID NO: 2296616 - RNA, 19 nt, Artificial Sequence
  Description of Artificial Sequence: Synthetic oligonucleotide
auaggcuucuaucccauau

SEQ ID NO: 2296617 - RNA, 19 nt, Artificial Sequence
  Description of Artificial Sequence: Synthetic oligonucleotide
aacccuuggcacagcaccc

SEQ ID NO: 2296618 - RNA, 19 nt, Artificial Sequence
  Description of Artificial Sequence: Synthetic oligonucleotide
guaccggaaaucuccacug

SEQ ID NO: 2296619 - RNA, 19 nt, Artificial Sequence
  Description of Artificial Sequence: Synthetic oligonucleotide
gaggauaggcucuuccuuc

SEQ ID NO: 2296620 - RNA, 19 nt, Artificial Sequence
  Description of Artificial Sequence: Synthetic oligonucleotide
guguacagaggauaggcuc

SEQ ID NO: 2296621 - RNA, 19 nt, Artificial Sequence
  Description of Artificial Sequence: Synthetic oligonucleotide
cucuuggaaguaccaaggg

SEQ ID NO: 2296622 - RNA, 19 nt, Artificial Sequence
  Description of Artificial Sequence: Synthetic oligonucleotide
aggcuucuaucccauaucu

SEQ ID NO: 2296623 - RNA, 19 nt, Artificial Sequence
  Description of Artificial Sequence: Synthetic oligonucleotide
gucgaaggcaaacccuugg

SEQ ID NO: 2296624 - RNA, 19 nt, Artificial Sequence
  Description of Artificial Sequence: Synthetic oligonucleotide
uggugugcauagacgauga

SEQ ID NO: 2296625 - RNA, 19 nt, Artificial Sequence
  Description of Artificial Sequence: Synthetic oligonucleotide
cuuuguacaugcuuuaggu

SEQ ID NO: 2296626 - RNA, 19 nt, Artificial Sequence
  Description of Artificial Sequence: Synthetic oligonucleotide
auuagagagggaaccagug

SEQ ID NO: 2296627 - RNA, 19 nt, Artificial Sequence
  Description of Artificial Sequence: Synthetic oligonucleotide
uuggugugcauagacgaug

SEQ ID NO: 2296628 - RNA, 19 nt, Artificial Sequence
  Description of Artificial Sequence: Synthetic oligonucleotide
gacauauucacugcaucuc

SEQ ID NO: 2296629 - RNA, 19 nt, Artificial Sequence
  Description of Artificial Sequence: Synthetic oligonucleotide
uaaaagccugggaugucga

SEQ ID NO: 2296630 - RNA, 19 nt, Artificial Sequence
  Description of Artificial Sequence: Synthetic oligonucleotide
gcuucuaucccauaucuga

SEQ ID NO: 2296631 - RNA, 19 nt, Artificial Sequence
  Description of Artificial Sequence: Synthetic oligonucleotide
aguggccauaggaaguacc

SEQ ID NO: 2296632 - RNA, 19 nt, Artificial Sequence
  Description of Artificial Sequence: Synthetic oligonucleotide
agcacaaaguguuacucuu

SEQ ID NO: 2296633 - RNA, 19 nt, Artificial Sequence
  Description of Artificial Sequence: Synthetic oligonucleotide
uggaguggccauaggaagu

SEQ ID NO: 2296634 - RNA, 19 nt, Artificial Sequence
  Description of Artificial Sequence: Synthetic oligonucleotide
uuggcucaaaguucauggc

SEQ ID NO: 2296635 - RNA, 19 nt, Artificial Sequence
  Description of Artificial Sequence: Synthetic oligonucleotide
guucuuggugugcauagac

SEQ ID NO: 2296636 - RNA, 19 nt, Artificial Sequence
  Description of Artificial Sequence: Synthetic oligonucleotide
caaaguucauggcauauaa

SEQ ID NO: 2296637 - RNA, 19 nt, Artificial Sequence
  Description of Artificial Sequence: Synthetic oligonucleotide
uaggucucucaccaugcug

SEQ ID NO: 2296638 - RNA, 19 nt, Artificial Sequence
  Description of Artificial Sequence: Synthetic oligonucleotide
acuguacaucccugcuugc

SEQ ID NO: 2296639 - RNA, 19 nt, Artificial Sequence
  Description of Artificial Sequence: Synthetic oligonucleotide
aauugcuggcacgcugaac

SEQ ID NO: 2296640 - RNA, 19 nt, Artificial Sequence
  Description of Artificial Sequence: Synthetic oligonucleotide
aagugcaauguaccaugcu

SEQ ID NO: 2296641 - RNA, 19 nt, Artificial Sequence
  Description of Artificial Sequence: Synthetic oligonucleotide
aauaucugaucuaguugca

SEQ ID NO: 2296642 - RNA, 19 nt, Artificial Sequence
  Description of Artificial Sequence: Synthetic oligonucleotide
uggcccuuggcucaaaguu

SEQ ID NO: 2296643 - RNA, 19 nt, Artificial Sequence
  Description of Artificial Sequence: Synthetic oligonucleotide
guggccauaggaaguaccg

SEQ ID NO: 2296644 - RNA, 19 nt, Artificial Sequence
  Description of Artificial Sequence: Synthetic oligonucleotide
cuaucccauaucugaagac

SEQ ID NO: 2296645 - RNA, 19 nt, Artificial Sequence
  Description of Artificial Sequence: Synthetic oligonucleotide
agcacuuucuuaccugcca

SEQ ID NO: 2296646 - RNA, 19 nt, Artificial Sequence
  Description of Artificial Sequence: Synthetic oligonucleotide
agaucagcuucuugcaccu

SEQ ID NO: 2296647 - RNA, 19 nt, Artificial Sequence
  Description of Artificial Sequence: Synthetic oligonucleotide
gugugcauagacgaugagc

SEQ ID NO: 2296648 - RNA, 19 nt, Artificial Sequence
  Description of Artificial Sequence: Synthetic oligonucleotide
auggcauauaagucagaca

SEQ ID NO: 2296649 - RNA, 19 nt, Artificial Sequence
  Description of Artificial Sequence: Synthetic oligonucleotide
auucacugcaucucuggau

SEQ ID NO: 2296650 - RNA, 19 nt, Artificial Sequence
  Description of Artificial Sequence: Synthetic oligonucleotide
uucagguacuaucacucuu

SEQ ID NO: 2296651 - RNA, 19 nt, Artificial Sequence
  Description of Artificial Sequence: Synthetic oligonucleotide
cgcugaaccaauauagugg

SEQ ID NO: 2296652 - RNA, 19 nt, Artificial Sequence
  Description of Artificial Sequence: Synthetic oligonucleotide
cucuggauacagcaccacc

SEQ ID NO: 2296653 - RNA, 19 nt, Artificial Sequence
  Description of Artificial Sequence: Synthetic oligonucleotide
uaggcuucuaucccauauc

SEQ ID NO: 2296654 - RNA, 19 nt, Artificial Sequence
  Description of Artificial Sequence: Synthetic oligonucleotide
uccacagaagugcaaugua

SEQ ID NO: 2296655 - RNA, 19 nt, Artificial Sequence
  Description of Artificial Sequence: Synthetic oligonucleotide
gggcaaggacuuuaaaucc

SEQ ID NO: 2296656 - RNA, 19 nt, Artificial Sequence
  Description of Artificial Sequence: Synthetic oligonucleotide
uuaaggaaaggagggcuaa

SEQ ID NO: 2296657 - RNA, 19 nt, Artificial Sequence
  Description of Artificial Sequence: Synthetic oligonucleotide
cuuaccugccauguuggag

SEQ ID NO: 2296658 - RNA, 19 nt, Artificial Sequence
  Description of Artificial Sequence: Synthetic oligonucleotide
ucacuagaucagcuucuug

SEQ ID NO: 2296659 - RNA, 19 nt, Artificial Sequence
  Description of Artificial Sequence: Synthetic oligonucleotide
auuuacccuugagcaaacc

SEQ ID NO: 2296660 - RNA, 19 nt, Artificial Sequence
  Description of Artificial Sequence: Synthetic oligonucleotide
uucucugauuugauacagu

SEQ ID NO: 2296661 - RNA, 19 nt, Artificial Sequence
  Description of Artificial Sequence: Synthetic oligonucleotide
ugucgaaggcaaacccuug

SEQ ID NO: 2296662 - RNA, 19 nt, Artificial Sequence
  Description of Artificial Sequence: Synthetic oligonucleotide
ggagucauaaaagccuggg

SEQ ID NO: 2296663 - RNA, 19 nt, Artificial Sequence
  Description of Artificial Sequence: Synthetic oligonucleotide
accggagucauaaaagccu

SEQ ID NO: 2296664 - RNA, 19 nt, Artificial Sequence
  Description of Artificial Sequence: Synthetic oligonucleotide
cauuucuuguggcccuugg

SEQ ID NO: 2296665 - RNA, 19 nt, Artificial Sequence
  Description of Artificial Sequence: Synthetic oligonucleotide
agccgcuucgcccaugaug

SEQ ID NO: 2296666 - RNA, 19 nt, Artificial Sequence
  Description of Artificial Sequence: Synthetic oligonucleotide
gaggagacggauucucuga

SEQ ID NO: 2296667 - RNA, 19 nt, Artificial Sequence
  Description of Artificial Sequence: Synthetic oligonucleotide
caaguaugucacuggucag

SEQ ID NO: 2296668 - RNA, 19 nt, Artificial Sequence
  Description of Artificial Sequence: Synthetic oligonucleotide
gaucuaguugcaugaaacu

SEQ ID NO: 2296669 - RNA, 19 nt, Artificial Sequence
  Description of Artificial Sequence: Synthetic oligonucleotide
auaggcucuuccuuccaga

SEQ ID NO: 2296670 - RNA, 19 nt, Artificial Sequence
  Description of Artificial Sequence: Synthetic oligonucleotide
gagucauaaaagccuggga

SEQ ID NO: 2296671 - RNA, 19 nt, Artificial Sequence
  Description of Artificial Sequence: Synthetic oligonucleotide
gacggauucucugauuuga

SEQ ID NO: 2296672 - RNA, 19 nt, Artificial Sequence
  Description of Artificial Sequence: Synthetic oligonucleotide
gcacgcugaaccaauauag

SEQ ID NO: 2296673 - RNA, 19 nt, Artificial Sequence
  Description of Artificial Sequence: Synthetic oligonucleotide
uuaggucucucaccaugcu

SEQ ID NO: 2296674 - RNA, 19 nt, Artificial Sequence
  Description of Artificial Sequence: Synthetic oligonucleotide
caugaugccaccaucacuu

SEQ ID NO: 2296675 - RNA, 19 nt, Artificial Sequence
  Description of Artificial Sequence: Synthetic oligonucleotide
ggaugucgaaggcaaaccc

SEQ ID NO: 2296676 - RNA, 19 nt, Artificial Sequence
  Description of Artificial Sequence: Synthetic oligonucleotide
uuguugaauaucugaucua

SEQ ID NO: 2296677 - RNA, 19 nt, Artificial Sequence
  Description of Artificial Sequence: Synthetic oligonucleotide
ucauaggcuucuaucccau

SEQ ID NO: 2296678 - RNA, 19 nt, Artificial Sequence
  Description of Artificial Sequence: Synthetic oligonucleotide
caauguaccaugcuggagu

SEQ ID NO: 2296679 - RNA, 19 nt, Artificial Sequence
  Description of Artificial Sequence: Synthetic oligonucleotide
acccuauccauccagccuu

SEQ ID NO: 2296680 - RNA, 19 nt, Artificial Sequence
  Description of Artificial Sequence: Synthetic oligonucleotide
ucccauaucugaagacuuc

SEQ ID NO: 2296681 - RNA, 19 nt, Artificial Sequence
  Description of Artificial Sequence: Synthetic oligonucleotide
acucagagcacaaaguguu

SEQ ID NO: 2296682 - RNA, 19 nt, Artificial Sequence
  Description of Artificial Sequence: Synthetic oligonucleotide
caauaccaaaacugaucug

SEQ ID NO: 2296683 - RNA, 19 nt, Artificial Sequence
  Description of Artificial Sequence: Synthetic oligonucleotide
agagggaaccagugauguc

SEQ ID NO: 2296684 - RNA, 19 nt, Artificial Sequence
  Description of Artificial Sequence: Synthetic oligonucleotide
agugcaccaagauguuugu

SEQ ID NO: 2296685 - RNA, 19 nt, Artificial Sequence
  Description of Artificial Sequence: Synthetic oligonucleotide
uggccauaggaaguaccgg

SEQ ID NO: 2296686 - RNA, 19 nt, Artificial Sequence
  Description of Artificial Sequence: Synthetic oligonucleotide
cuaauuugcuguacucaga

SEQ ID NO: 2296687 - RNA, 19 nt, Artificial Sequence
  Description of Artificial Sequence: Synthetic oligonucleotide
ugggaugucgaaggcaaac

SEQ ID NO: 2296688 - RNA, 19 nt, Artificial Sequence
  Description of Artificial Sequence: Synthetic oligonucleotide
accuccagugguuaaggaa

SEQ ID NO: 2296689 - RNA, 19 nt, Artificial Sequence
  Description of Artificial Sequence: Synthetic oligonucleotide
cugcuaauuugcuguacuc

SEQ ID NO: 2296690 - RNA, 19 nt, Artificial Sequence
  Description of Artificial Sequence: Synthetic oligonucleotide
ucaaaguucauggcauaua

SEQ ID NO: 2296691 - RNA, 19 nt, Artificial Sequence
  Description of Artificial Sequence: Synthetic oligonucleotide
auccacagaagugcaaugu

SEQ ID NO: 2296692 - RNA, 19 nt, Artificial Sequence
  Description of Artificial Sequence: Synthetic oligonucleotide
uacaucucagcuguaccuc

SEQ ID NO: 2296693 - RNA, 19 nt, Artificial Sequence
  Description of Artificial Sequence: Synthetic oligonucleotide
uuacucuuggaaguaccaa

SEQ ID NO: 2296694 - RNA, 19 nt, Artificial Sequence
  Description of Artificial Sequence: Synthetic oligonucleotide
agacacagugacuguacau

SEQ ID NO: 2296695 - RNA, 19 nt, Artificial Sequence
  Description of Artificial Sequence: Synthetic oligonucleotide
cuaguugcaugaaacugaa

SEQ ID NO: 2296696 - RNA, 19 nt, Artificial Sequence
  Description of Artificial Sequence: Synthetic oligonucleotide
uguggcccuuggcucaaag

SEQ ID NO: 2296697 - RNA, 19 nt, Artificial Sequence
  Description of Artificial Sequence: Synthetic oligonucleotide
gacgaugagcacuuucuua

SEQ ID NO: 2296698 - RNA, 19 nt, Artificial Sequence
  Description of Artificial Sequence: Synthetic oligonucleotide
agcacccuauccauccagc

SEQ ID NO: 2296699 - RNA, 19 nt, Artificial Sequence
  Description of Artificial Sequence: Synthetic oligonucleotide
guaccuccagugguuaagg

SEQ ID NO: 2296700 - RNA, 19 nt, Artificial Sequence
  Description of Artificial Sequence: Synthetic oligonucleotide
guagcccaaaguuucaggu

SEQ ID NO: 2296701 - RNA, 19 nt, Artificial Sequence
  Description of Artificial Sequence: Synthetic oligonucleotide
auuuguggacauauucacu

SEQ ID NO: 2296702 - RNA, 19 nt, Artificial Sequence
  Description of Artificial Sequence: Synthetic oligonucleotide
uugcuguacucagagcaca

SEQ ID NO: 2296703 - RNA, 19 nt, Artificial Sequence
  Description of Artificial Sequence: Synthetic oligonucleotide
agaauugcuggcacgcuga

SEQ ID NO: 2296704 - RNA, 19 nt, Artificial Sequence
  Description of Artificial Sequence: Synthetic oligonucleotide
agacggauucucugauuug

SEQ ID NO: 2296705 - RNA, 19 nt, Artificial Sequence
  Description of Artificial Sequence: Synthetic oligonucleotide
uaccggaaaucuccacuga

SEQ ID NO: 2296706 - RNA, 19 nt, Artificial Sequence
  Description of Artificial Sequence: Synthetic oligonucleotide
auaccaaaacugaucugug

SEQ ID NO: 2296707 - RNA, 19 nt, Artificial Sequence
  Description of Artificial Sequence: Synthetic oligonucleotide
guacaucccugcuugcuca

SEQ ID NO: 2296708 - RNA, 19 nt, Artificial Sequence
  Description of Artificial Sequence: Synthetic oligonucleotide
ucagccgcuucgcccauga

SEQ ID NO: 2296709 - RNA, 19 nt, Artificial Sequence
  Description of Artificial Sequence: Synthetic oligonucleotide
uuagaauugcuggcacgcu

SEQ ID NO: 2296710 - RNA, 19 nt, Artificial Sequence
  Description of Artificial Sequence: Synthetic oligonucleotide
ggguguacagaggauaggc

SEQ ID NO: 2296711 - RNA, 19 nt, Artificial Sequence
  Description of Artificial Sequence: Synthetic oligonucleotide
gccuuuuagaauugcuggc

SEQ ID NO: 2296712 - RNA, 19 nt, Artificial Sequence
  Description of Artificial Sequence: Synthetic oligonucleotide
uaccaugcuggaguggcca

SEQ ID NO: 2296713 - RNA, 19 nt, Artificial Sequence
  Description of Artificial Sequence: Synthetic oligonucleotide
aggaaguaccggaaaucuc

SEQ ID NO: 2296714 - RNA, 19 nt, Artificial Sequence
  Description of Artificial Sequence: Synthetic oligonucleotide
ucacuggucagagcugucu

SEQ ID NO: 2296715 - RNA, 19 nt, Artificial Sequence
  Description of Artificial Sequence: Synthetic oligonucleotide
agggcuaauuuacccuuga

SEQ ID NO: 2296716 - RNA, 19 nt, Artificial Sequence
  Description of Artificial Sequence: Synthetic oligonucleotide
uugagcaaaccggagucau

SEQ ID NO: 2296717 - RNA, 19 nt, Artificial Sequence
  Description of Artificial Sequence: Synthetic oligonucleotide
ggguucuuggugugcauag

SEQ ID NO: 2296718 - RNA, 19 nt, Artificial Sequence
  Description of Artificial Sequence: Synthetic oligonucleotide
ugcuguacucagagcacaa

SEQ ID NO: 2296719 - RNA, 19 nt, Artificial Sequence
  Description of Artificial Sequence: Synthetic oligonucleotide
aggauuagagagggaacca

SEQ ID NO: 2296720 - RNA, 19 nt, Artificial Sequence
  Description of Artificial Sequence: Synthetic oligonucleotide
ggauuagagagggaaccag

SEQ ID NO: 2296721 - RNA, 19 nt, Artificial Sequence
  Description of Artificial Sequence: Synthetic oligonucleotide
ucuuaccugccauguugga

SEQ ID NO: 2296722 - RNA, 19 nt, Artificial Sequence
  Description of Artificial Sequence: Synthetic oligonucleotide
uacaucccugcuugcucag

SEQ ID NO: 2296723 - RNA, 19 nt, Artificial Sequence
  Description of Artificial Sequence: Synthetic oligonucleotide
ucacugcaucucuggauac

SEQ ID NO: 2296724 - RNA, 19 nt, Artificial Sequence
  Description of Artificial Sequence: Synthetic oligonucleotide
gagacggauucucugauuu

SEQ ID NO: 2296725 - RNA, 19 nt, Artificial Sequence
  Description of Artificial Sequence: Synthetic oligonucleotide
uuggaggagacggauucuc

SEQ ID NO: 2296726 - RNA, 19 nt, Artificial Sequence
  Description of Artificial Sequence: Synthetic oligonucleotide
uagugggaacugaaauauc

SEQ ID NO: 2296727 - RNA, 19 nt, Artificial Sequence
  Description of Artificial Sequence: Synthetic oligonucleotide
guacaucucagcuguaccu

SEQ ID NO: 2296728 - RNA, 19 nt, Artificial Sequence
  Description of Artificial Sequence: Synthetic oligonucleotide
ucugaucuaguugcaugaa

SEQ ID NO: 2296729 - RNA, 19 nt, Artificial Sequence
  Description of Artificial Sequence: Synthetic oligonucleotide
uagcccaaaguuucaggua

SEQ ID NO: 2296730 - RNA, 19 nt, Artificial Sequence
  Description of Artificial Sequence: Synthetic oligonucleotide
gaaguaccggaaaucucca

SEQ ID NO: 2296731 - RNA, 19 nt, Artificial Sequence
  Description of Artificial Sequence: Synthetic oligonucleotide
gccgcuucgcccaugaugc

SEQ ID NO: 2296732 - RNA, 19 nt, Artificial Sequence
  Description of Artificial Sequence: Synthetic oligonucleotide
ugaagacuucaggauuaga

SEQ ID NO: 2296733 - RNA, 19 nt, Artificial Sequence
  Description of Artificial Sequence: Synthetic oligonucleotide
acugaucuguggggcaagg

SEQ ID NO: 2296734 - RNA, 19 nt, Artificial Sequence
  Description of Artificial Sequence: Synthetic oligonucleotide
caaacccuuggcacagcac

SEQ ID NO: 2296735 - RNA, 19 nt, Artificial Sequence
  Description of Artificial Sequence: Synthetic oligonucleotide
ggaaaggagggcuaauuua

SEQ ID NO: 2296736 - RNA, 19 nt, Artificial Sequence
  Description of Artificial Sequence: Synthetic oligonucleotide
ccacagaagugcaauguac

SEQ ID NO: 2296737 - RNA, 19 nt, Artificial Sequence
  Description of Artificial Sequence: Synthetic oligonucleotide
ggaaaucuccacugacccc

SEQ ID NO: 2296738 - RNA, 19 nt, Artificial Sequence
  Description of Artificial Sequence: Synthetic oligonucleotide
ccagaugcucuucagccgc

SEQ ID NO: 2296739 - RNA, 19 nt, Artificial Sequence
  Description of Artificial Sequence: Synthetic oligonucleotide
cggaaaucuccacugaccc

SEQ ID NO: 2296740 - RNA, 19 nt, Artificial Sequence
  Description of Artificial Sequence: Synthetic oligonucleotide
ccggaaaucuccacugacc

SEQ ID NO: 2296741 - RNA, 19 nt, Artificial Sequence
  Description of Artificial Sequence: Synthetic oligonucleotide
gauuagagagggaaccagu

SEQ ID NO: 2296742 - RNA, 19 nt, Artificial Sequence
  Description of Artificial Sequence: Synthetic oligonucleotide
uccagccuuuuagaauugc

SEQ ID NO: 2296743 - RNA, 19 nt, Artificial Sequence
  Description of Artificial Sequence: Synthetic oligonucleotide
cauccagccuuuuagaauu

SEQ ID NO: 2296744 - RNA, 19 nt, Artificial Sequence
  Description of Artificial Sequence: Synthetic oligonucleotide
aguguuacucuuggaagua

SEQ ID NO: 2296745 - RNA, 19 nt, Artificial Sequence
  Description of Artificial Sequence: Synthetic oligonucleotide
auaucugaucuaguugcau

SEQ ID NO: 2296746 - RNA, 19 nt, Artificial Sequence
  Description of Artificial Sequence: Synthetic oligonucleotide
gaugucgaaggcaaacccu

SEQ ID NO: 2296747 - RNA, 19 nt, Artificial Sequence
  Description of Artificial Sequence: Synthetic oligonucleotide
guguacaucucagcuguac

SEQ ID NO: 2296748 - RNA, 19 nt, Artificial Sequence
  Description of Artificial Sequence: Synthetic oligonucleotide
ggccauaggaaguaccgga

SEQ ID NO: 2296749 - RNA, 19 nt, Artificial Sequence
  Description of Artificial Sequence: Synthetic oligonucleotide
ugagcaaaccggagucaua

SEQ ID NO: 2296750 - RNA, 19 nt, Artificial Sequence
  Description of Artificial Sequence: Synthetic oligonucleotide
gaugcucuucagccgcuuc

SEQ ID NO: 2296751 - RNA, 19 nt, Artificial Sequence
  Description of Artificial Sequence: Synthetic oligonucleotide
gcaaaccggagucauaaaa

SEQ ID NO: 2296752 - RNA, 19 nt, Artificial Sequence
  Description of Artificial Sequence: Synthetic oligonucleotide
aaaucuccacugaccccag

SEQ ID NO: 2296753 - RNA, 19 nt, Artificial Sequence
  Description of Artificial Sequence: Synthetic oligonucleotide
aggcaaacccuuggcacag

SEQ ID NO: 2296754 - RNA, 19 nt, Artificial Sequence
  Description of Artificial Sequence: Synthetic oligonucleotide
uaccuccagugguuaagga

SEQ ID NO: 2296755 - RNA, 19 nt, Artificial Sequence
  Description of Artificial Sequence: Synthetic oligonucleotide
caagauguuuguugaauau

SEQ ID NO: 2296756 - RNA, 19 nt, Artificial Sequence
  Description of Artificial Sequence: Synthetic oligonucleotide
gagagggaaccagugaugu

SEQ ID NO: 2296757 - RNA, 19 nt, Artificial Sequence
  Description of Artificial Sequence: Synthetic oligonucleotide
cagugacuguacaucccug

SEQ ID NO: 2296758 - RNA, 19 nt, Artificial Sequence
  Description of Artificial Sequence: Synthetic oligonucleotide
gagggcuaauuuacccuug

SEQ ID NO: 2296759 - RNA, 19 nt, Artificial Sequence
  Description of Artificial Sequence: Synthetic oligonucleotide
gagcacuuucuuaccugcc

SEQ ID NO: 2296760 - RNA, 19 nt, Artificial Sequence
  Description of Artificial Sequence: Synthetic oligonucleotide
gccacuuucuucagggacc

SEQ ID NO: 2296761 - RNA, 19 nt, Artificial Sequence
  Description of Artificial Sequence: Synthetic oligonucleotide
ucgcccaugaugccaccau

SEQ ID NO: 2296762 - RNA, 19 nt, Artificial Sequence
  Description of Artificial Sequence: Synthetic oligonucleotide
cauaggaaguaccggaaau

SEQ ID NO: 2296763 - RNA, 19 nt, Artificial Sequence
  Description of Artificial Sequence: Synthetic oligonucleotide
gugcauagacgaugagcac

SEQ ID NO: 2296764 - RNA, 19 nt, Artificial Sequence
  Description of Artificial Sequence: Synthetic oligonucleotide
cugaucuaguugcaugaaa

SEQ ID NO: 2296765 - RNA, 19 nt, Artificial Sequence
  Description of Artificial Sequence: Synthetic oligonucleotide
augucgaaggcaaacccuu

SEQ ID NO: 2296766 - RNA, 19 nt, Artificial Sequence
  Description of Artificial Sequence: Synthetic oligonucleotide
ugcugcuaauuugcuguac

SEQ ID NO: 2296767 - RNA, 19 nt, Artificial Sequence
  Description of Artificial Sequence: Synthetic oligonucleotide
uaguugcaugaaacugaaa

SEQ ID NO: 2296768 - RNA, 19 nt, Artificial Sequence
  Description of Artificial Sequence: Synthetic oligonucleotide
gggaugucgaaggcaaacc

SEQ ID NO: 2296769 - RNA, 19 nt, Artificial Sequence
  Description of Artificial Sequence: Synthetic oligonucleotide
caucaauaccaaaacugau

SEQ ID NO: 2296770 - RNA, 19 nt, Artificial Sequence
  Description of Artificial Sequence: Synthetic oligonucleotide
auguaccaugcuggagugg

SEQ ID NO: 2296771 - RNA, 19 nt, Artificial Sequence
  Description of Artificial Sequence: Synthetic oligonucleotide
cauaaaagccugggauguc

SEQ ID NO: 2296772 - RNA, 19 nt, Artificial Sequence
  Description of Artificial Sequence: Synthetic oligonucleotide
guguuacucuuggaaguac

SEQ ID NO: 2296773 - RNA, 19 nt, Artificial Sequence
  Description of Artificial Sequence: Synthetic oligonucleotide
gguuaaggaaaggagggcu

SEQ ID NO: 2296774 - RNA, 19 nt, Artificial Sequence
  Description of Artificial Sequence: Synthetic oligonucleotide
uggguucuuggugugcaua

SEQ ID NO: 2296775 - RNA, 19 nt, Artificial Sequence
  Description of Artificial Sequence: Synthetic oligonucleotide
gaauugcuggcacgcugaa

SEQ ID NO: 2296776 - RNA, 19 nt, Artificial Sequence
  Description of Artificial Sequence: Synthetic oligonucleotide
cagacacagugacuguaca

SEQ ID NO: 2296777 - RNA, 19 nt, Artificial Sequence
  Description of Artificial Sequence: Synthetic oligonucleotide
acaguagcccaaaguuuca

SEQ ID NO: 2296778 - RNA, 19 nt, Artificial Sequence
  Description of Artificial Sequence: Synthetic oligonucleotide
acccguugaaggacauggg

SEQ ID NO: 2296779 - RNA, 19 nt, Artificial Sequence
  Description of Artificial Sequence: Synthetic oligonucleotide
gcacccuauccauccagcc

SEQ ID NO: 2296780 - RNA, 19 nt, Artificial Sequence
  Description of Artificial Sequence: Synthetic oligonucleotide
cucaccaugcugcuaauuu

SEQ ID NO: 2296781 - RNA, 19 nt, Artificial Sequence
  Description of Artificial Sequence: Synthetic oligonucleotide
uucgcccaugaugccacca

SEQ ID NO: 2296782 - RNA, 19 nt, Artificial Sequence
  Description of Artificial Sequence: Synthetic oligonucleotide
gcaauguaccaugcuggag

SEQ ID NO: 2296783 - RNA, 19 nt, Artificial Sequence
  Description of Artificial Sequence: Synthetic oligonucleotide
aggcuucauaggcuucuau

SEQ ID NO: 2296784 - RNA, 19 nt, Artificial Sequence
  Description of Artificial Sequence: Synthetic oligonucleotide
cagggacccguugaaggac

SEQ ID NO: 2296785 - RNA, 19 nt, Artificial Sequence
  Description of Artificial Sequence: Synthetic oligonucleotide
ccuuuuagaauugcuggca

SEQ ID NO: 2296786 - RNA, 19 nt, Artificial Sequence
  Description of Artificial Sequence: Synthetic oligonucleotide
cuauccauccagccuuuua

SEQ ID NO: 2296787 - RNA, 19 nt, Artificial Sequence
  Description of Artificial Sequence: Synthetic oligonucleotide
cagaggauaggcucuuccu

SEQ ID NO: 2296788 - RNA, 19 nt, Artificial Sequence
  Description of Artificial Sequence: Synthetic oligonucleotide
cugaaccaauauaguggga

SEQ ID NO: 2296789 - RNA, 19 nt, Artificial Sequence
  Description of Artificial Sequence: Synthetic oligonucleotide
cacucauuuguggacauau

SEQ ID NO: 2296790 - RNA, 19 nt, Artificial Sequence
  Description of Artificial Sequence: Synthetic oligonucleotide
cacgcugaaccaauauagu

SEQ ID NO: 2296791 - RNA, 19 nt, Artificial Sequence
  Description of Artificial Sequence: Synthetic oligonucleotide
gggguguacagaggauagg

SEQ ID NO: 2296792 - RNA, 19 nt, Artificial Sequence
  Description of Artificial Sequence: Synthetic oligonucleotide
acccuugagcaaaccggag

SEQ ID NO: 2296793 - RNA, 19 nt, Artificial Sequence
  Description of Artificial Sequence: Synthetic oligonucleotide
ggcauauaagucagacaca

SEQ ID NO: 2296794 - RNA, 19 nt, Artificial Sequence
  Description of Artificial Sequence: Synthetic oligonucleotide
ggcacgcugaaccaauaua

SEQ ID NO: 2296795 - RNA, 19 nt, Artificial Sequence
  Description of Artificial Sequence: Synthetic oligonucleotide
ugcuggcacgcugaaccaa

SEQ ID NO: 2296796 - RNA, 19 nt, Artificial Sequence
  Description of Artificial Sequence: Synthetic oligonucleotide
guaccaugcuggaguggcc

SEQ ID NO: 2296797 - RNA, 19 nt, Artificial Sequence
  Description of Artificial Sequence: Synthetic oligonucleotide
cucagagcacaaaguguua

SEQ ID NO: 2296798 - RNA, 19 nt, Artificial Sequence
  Description of Artificial Sequence: Synthetic oligonucleotide
gcaaacccuuggcacagca

SEQ ID NO: 2296799 - RNA, 19 nt, Artificial Sequence
  Description of Artificial Sequence: Synthetic oligonucleotide
ucucaccaugcugcuaauu

SEQ ID NO: 2296800 - RNA, 19 nt, Artificial Sequence
  Description of Artificial Sequence: Synthetic oligonucleotide
gaguggccauaggaaguac

SEQ ID NO: 2296801 - RNA, 19 nt, Artificial Sequence
  Description of Artificial Sequence: Synthetic oligonucleotide
cuucgcccaugaugccacc

SEQ ID NO: 2296802 - RNA, 19 nt, Artificial Sequence
  Description of Artificial Sequence: Synthetic oligonucleotide
ggcuucuaucccauaucug

SEQ ID NO: 2296803 - RNA, 19 nt, Artificial Sequence
  Description of Artificial Sequence: Synthetic oligonucleotide
acggauucucugauuugau

SEQ ID NO: 2296804 - RNA, 19 nt, Artificial Sequence
  Description of Artificial Sequence: Synthetic oligonucleotide
agggacccguugaaggaca

SEQ ID NO: 2296805 - RNA, 19 nt, Artificial Sequence
  Description of Artificial Sequence: Synthetic oligonucleotide
cuucaggauuagagaggga

SEQ ID NO: 2296806 - RNA, 19 nt, Artificial Sequence
  Description of Artificial Sequence: Synthetic oligonucleotide
cgaugagcacuuucuuacc

SEQ ID NO: 2296807 - RNA, 19 nt, Artificial Sequence
  Description of Artificial Sequence: Synthetic oligonucleotide
auccagccuuuuagaauug

SEQ ID NO: 2296808 - RNA, 19 nt, Artificial Sequence
  Description of Artificial Sequence: Synthetic oligonucleotide
gcaugaaacugaaaacacu

SEQ ID NO: 2296809 - RNA, 19 nt, Artificial Sequence
  Description of Artificial Sequence: Synthetic oligonucleotide
acucauuuguggacauauu

SEQ ID NO: 2296810 - RNA, 19 nt, Artificial Sequence
  Description of Artificial Sequence: Synthetic oligonucleotide
caccaagauguuuguugaa

SEQ ID NO: 2296811 - RNA, 19 nt, Artificial Sequence
  Description of Artificial Sequence: Synthetic oligonucleotide
cuuggugugcauagacgau

SEQ ID NO: 2296812 - RNA, 19 nt, Artificial Sequence
  Description of Artificial Sequence: Synthetic oligonucleotide
cauguuggaggagacggau

SEQ ID NO: 2296813 - RNA, 19 nt, Artificial Sequence
  Description of Artificial Sequence: Synthetic oligonucleotide
cacccuauccauccagccu

SEQ ID NO: 2296814 - RNA, 19 nt, Artificial Sequence
  Description of Artificial Sequence: Synthetic oligonucleotide
cucaaaguucauggcauau

SEQ ID NO: 2296815 - RNA, 19 nt, Artificial Sequence
  Description of Artificial Sequence: Synthetic oligonucleotide
cacugcaucucuggauaca

SEQ ID NO: 2296816 - RNA, 19 nt, Artificial Sequence
  Description of Artificial Sequence: Synthetic oligonucleotide
gcuucgcccaugaugccac

SEQ ID NO: 2296817 - RNA, 19 nt, Artificial Sequence
  Description of Artificial Sequence: Synthetic oligonucleotide
ccuuggcucaaaguucaug

SEQ ID NO: 2296818 - RNA, 19 nt, Artificial Sequence
  Description of Artificial Sequence: Synthetic oligonucleotide
ccaauauagugggaacuga

SEQ ID NO: 2296819 - RNA, 19 nt, Artificial Sequence
  Description of Artificial Sequence: Synthetic oligonucleotide
ggagggcuaauuuacccuu

SEQ ID NO: 2296820 - RNA, 19 nt, Artificial Sequence
  Description of Artificial Sequence: Synthetic oligonucleotide
cugaucuguggggcaagga

SEQ ID NO: 2296821 - RNA, 19 nt, Artificial Sequence
  Description of Artificial Sequence: Synthetic oligonucleotide
acaucccugcuugcucagu

SEQ ID NO: 2296822 - RNA, 19 nt, Artificial Sequence
  Description of Artificial Sequence: Synthetic oligonucleotide
gcucaaaguucauggcaua

SEQ ID NO: 2296823 - RNA, 19 nt, Artificial Sequence
  Description of Artificial Sequence: Synthetic oligonucleotide
cauaggcuucuaucccaua

SEQ ID NO: 2296824 - RNA, 19 nt, Artificial Sequence
  Description of Artificial Sequence: Synthetic oligonucleotide
gccauaggaaguaccggaa

SEQ ID NO: 2296825 - RNA, 19 nt, Artificial Sequence
  Description of Artificial Sequence: Synthetic oligonucleotide
cuguacaucccugcuugcu

SEQ ID NO: 2296826 - RNA, 19 nt, Artificial Sequence
  Description of Artificial Sequence: Synthetic oligonucleotide
ccauaggaaguaccggaaa

SEQ ID NO: 2296827 - RNA, 19 nt, Artificial Sequence
  Description of Artificial Sequence: Synthetic oligonucleotide
cuuucuuaccugccauguu

SEQ ID NO: 2296828 - RNA, 19 nt, Artificial Sequence
  Description of Artificial Sequence: Synthetic oligonucleotide
gcacuuucuuaccugccau

SEQ ID NO: 2296829 - RNA, 19 nt, Artificial Sequence
  Description of Artificial Sequence: Synthetic oligonucleotide
ccucaaguaugucacuggu

SEQ ID NO: 2296830 - RNA, 19 nt, Artificial Sequence
  Description of Artificial Sequence: Synthetic oligonucleotide
gcauagacgaugagcacuu

SEQ ID NO: 2296831 - RNA, 19 nt, Artificial Sequence
  Description of Artificial Sequence: Synthetic oligonucleotide
ggacccguugaaggacaug

SEQ ID NO: 2296832 - RNA, 19 nt, Artificial Sequence
  Description of Artificial Sequence: Synthetic oligonucleotide
gcuguacucagagcacaaa

SEQ ID NO: 2296833 - RNA, 19 nt, Artificial Sequence
  Description of Artificial Sequence: Synthetic oligonucleotide
cccguugaaggacaugggu

SEQ ID NO: 2296834 - RNA, 19 nt, Artificial Sequence
  Description of Artificial Sequence: Synthetic oligonucleotide
ggucucucaccaugcugcu

SEQ ID NO: 2296835 - RNA, 19 nt, Artificial Sequence
  Description of Artificial Sequence: Synthetic oligonucleotide
ggcaaacccuuggcacagc

SEQ ID NO: 2296836 - RNA, 19 nt, Artificial Sequence
  Description of Artificial Sequence: Synthetic oligonucleotide
ggagacggauucucugauu

SEQ ID NO: 2296837 - RNA, 19 nt, Artificial Sequence
  Description of Artificial Sequence: Synthetic oligonucleotide
gucucucaccaugcugcua

SEQ ID NO: 2296838 - RNA, 19 nt, Artificial Sequence
  Description of Artificial Sequence: Synthetic oligonucleotide
cggauucucugauuugaua

SEQ ID NO: 2296839 - RNA, 19 nt, Artificial Sequence
  Description of Artificial Sequence: Synthetic oligonucleotide
cccaaaguuucagguacua

SEQ ID NO: 2296840 - RNA, 19 nt, Artificial Sequence
  Description of Artificial Sequence: Synthetic oligonucleotide
gucauuucuuguggcccuu

SEQ ID NO: 2296841 - RNA, 19 nt, Artificial Sequence
  Description of Artificial Sequence: Synthetic oligonucleotide
gcuuuaggucucucaccau

SEQ ID NO: 2296842 - RNA, 19 nt, Artificial Sequence
  Description of Artificial Sequence: Synthetic oligonucleotide
cucucaccaugcugcuaau

SEQ ID NO: 2296843 - RNA, 19 nt, Artificial Sequence
  Description of Artificial Sequence: Synthetic oligonucleotide
gcuggcacgcugaaccaau

SEQ ID NO: 2296844 - RNA, 19 nt, Artificial Sequence
  Description of Artificial Sequence: Synthetic oligonucleotide
ccaaaguuucagguacuau

SEQ ID NO: 2296845 - RNA, 19 nt, Artificial Sequence
  Description of Artificial Sequence: Synthetic oligonucleotide
cauagacgaugagcacuuu

SEQ ID NO: 2296846 - RNA, 19 nt, Artificial Sequence
  Description of Artificial Sequence: Synthetic oligonucleotide
gggaaccagugaugucauu

SEQ ID NO: 2296847 - RNA, 19 nt, Artificial Sequence
  Description of Artificial Sequence: Synthetic oligonucleotide
ccaugcuggaguggccaua

SEQ ID NO: 2296848 - RNA, 19 nt, Artificial Sequence
  Description of Artificial Sequence: Synthetic oligonucleotide
gggacccguugaaggacau

SEQ ID NO: 2296849 - RNA, 19 nt, Artificial Sequence
  Description of Artificial Sequence: Synthetic oligonucleotide
cccuauccauccagccuuu

SEQ ID NO: 2296850 - RNA, 19 nt, Artificial Sequence
  Description of Artificial Sequence: Synthetic oligonucleotide
cagccgcuucgcccaugau

SEQ ID NO: 2296851 - RNA, 19 nt, Artificial Sequence
  Description of Artificial Sequence: Synthetic oligonucleotide
ccuauccauccagccuuuu

SEQ ID NO: 2296852 - RNA, 19 nt, Artificial Sequence
  Description of Artificial Sequence: Synthetic oligonucleotide
uuuuaguacauuaaaauug

SEQ ID NO: 2296853 - RNA, 19 nt, Artificial Sequence
  Description of Artificial Sequence: Synthetic oligonucleotide
aaauuguuguuuuagacug

SEQ ID NO: 2296854 - RNA, 19 nt, Artificial Sequence
  Description of Artificial Sequence: Synthetic oligonucleotide
ucauaaacuaccauguggg

SEQ ID NO: 2296855 - RNA, 19 nt, Artificial Sequence
  Description of Artificial Sequence: Synthetic oligonucleotide
aaacuuucuccuuaaggcc

SEQ ID NO: 2296856 - RNA, 19 nt, Artificial Sequence
  Description of Artificial Sequence: Synthetic oligonucleotide
aauaagaggaauuuucuga

SEQ ID NO: 2296857 - RNA, 19 nt, Artificial Sequence
  Description of Artificial Sequence: Synthetic oligonucleotide
aaauugagggguuugauca

SEQ ID NO: 2296858 - RNA, 19 nt, Artificial Sequence
  Description of Artificial Sequence: Synthetic oligonucleotide
aucuaguuggcuuuuaccc

SEQ ID NO: 2296859 - RNA, 19 nt, Artificial Sequence
  Description of Artificial Sequence: Synthetic oligonucleotide
uuuauugcgucuuugaugu

SEQ ID NO: 2296860 - RNA, 19 nt, Artificial Sequence
  Description of Artificial Sequence: Synthetic oligonucleotide
uacuucuaaacucugagcc

SEQ ID NO: 2296861 - RNA, 19 nt, Artificial Sequence
  Description of Artificial Sequence: Synthetic oligonucleotide
uaguacauuaaaauugagg

SEQ ID NO: 2296862 - RNA, 19 nt, Artificial Sequence
  Description of Artificial Sequence: Synthetic oligonucleotide
aaaauugagggguuugauc

SEQ ID NO: 2296863 - RNA, 19 nt, Artificial Sequence
  Description of Artificial Sequence: Synthetic oligonucleotide
uuuaguacauuaaaauuga

SEQ ID NO: 2296864 - RNA, 19 nt, Artificial Sequence
  Description of Artificial Sequence: Synthetic oligonucleotide
uuuuguucaucaaagcugc

SEQ ID NO: 2296865 - RNA, 19 nt, Artificial Sequence
  Description of Artificial Sequence: Synthetic oligonucleotide
agaauacauauuuuaguac

SEQ ID NO: 2296866 - RNA, 19 nt, Artificial Sequence
  Description of Artificial Sequence: Synthetic oligonucleotide
uaaacuaccaugugggugc

SEQ ID NO: 2296867 - RNA, 19 nt, Artificial Sequence
  Description of Artificial Sequence: Synthetic oligonucleotide
auaauucacuuuucaaagc

SEQ ID NO: 2296868 - RNA, 19 nt, Artificial Sequence
  Description of Artificial Sequence: Synthetic oligonucleotide
uguagaaaguggcagagac

SEQ ID NO: 2296869 - RNA, 19 nt, Artificial Sequence
  Description of Artificial Sequence: Synthetic oligonucleotide
ugagcuaccucuaaaugag

SEQ ID NO: 2296870 - RNA, 19 nt, Artificial Sequence
  Description of Artificial Sequence: Synthetic oligonucleotide
uaauucacuuuucaaagca

SEQ ID NO: 2296871 - RNA, 19 nt, Artificial Sequence
  Description of Artificial Sequence: Synthetic oligonucleotide
uuuuaugccagaagaauac

SEQ ID NO: 2296872 - RNA, 19 nt, Artificial Sequence
  Description of Artificial Sequence: Synthetic oligonucleotide
uugaauaagaggaauuuuc

SEQ ID NO: 2296873 - RNA, 19 nt, Artificial Sequence
  Description of Artificial Sequence: Synthetic oligonucleotide
  modified_base (16)..(16): a, c, u, g, unknown or other
ucuauuuguccaaagnuuu

SEQ ID NO: 2296874 - RNA, 19 nt, Artificial Sequence
  Description of Artificial Sequence: Synthetic oligonucleotide
gaggaauuuucugagauag

SEQ ID NO: 2296875 - RNA, 19 nt, Artificial Sequence
  Description of Artificial Sequence: Synthetic oligonucleotide
ugaauaagaggaauuuucu

SEQ ID NO: 2296876 - RNA, 19 nt, Artificial Sequence
  Description of Artificial Sequence: Synthetic oligonucleotide
acguucguaagcuuauugc

SEQ ID NO: 2296877 - RNA, 19 nt, Artificial Sequence
  Description of Artificial Sequence: Synthetic oligonucleotide
uuguuuuagacugugaagu

SEQ ID NO: 2296878 - RNA, 19 nt, Artificial Sequence
  Description of Artificial Sequence: Synthetic oligonucleotide
auacuucuaaacucugagc

SEQ ID NO: 2296879 - RNA, 19 nt, Artificial Sequence
  Description of Artificial Sequence: Synthetic oligonucleotide
cuaaaugagcuuuuaugcc

SEQ ID NO: 2296880 - RNA, 19 nt, Artificial Sequence
  Description of Artificial Sequence: Synthetic oligonucleotide
gauuccguuccucuggugg

SEQ ID NO: 2296881 - RNA, 19 nt, Artificial Sequence
  Description of Artificial Sequence: Synthetic oligonucleotide
auggucauaaacuaccaug

SEQ ID NO: 2296882 - RNA, 19 nt, Artificial Sequence
  Description of Artificial Sequence: Synthetic oligonucleotide
ucuaguuggcuuuuacccg

SEQ ID NO: 2296883 - RNA, 19 nt, Artificial Sequence
  Description of Artificial Sequence: Synthetic oligonucleotide
ucaaagcacaaaauuguug

SEQ ID NO: 2296884 - RNA, 19 nt, Artificial Sequence
  Description of Artificial Sequence: Synthetic oligonucleotide
uguuguuuuagacugugaa

SEQ ID NO: 2296885 - RNA, 19 nt, Artificial Sequence
  Description of Artificial Sequence: Synthetic oligonucleotide
cucuaaaugagcuuuuaug

SEQ ID NO: 2296886 - RNA, 19 nt, Artificial Sequence
  Description of Artificial Sequence: Synthetic oligonucleotide
aacucguguugcuaacacc

SEQ ID NO: 2296887 - RNA, 19 nt, Artificial Sequence
  Description of Artificial Sequence: Synthetic oligonucleotide
agagauagugacuagugga

SEQ ID NO: 2296888 - RNA, 19 nt, Artificial Sequence
  Description of Artificial Sequence: Synthetic oligonucleotide
aagaggaauuuucugagau

SEQ ID NO: 2296889 - RNA, 19 nt, Artificial Sequence
  Description of Artificial Sequence: Synthetic oligonucleotide
aguucucugugguagacuc

SEQ ID NO: 2296890 - RNA, 19 nt, Artificial Sequence
  Description of Artificial Sequence: Synthetic oligonucleotide
aagcuuauugcucuugcca

SEQ ID NO: 2296891 - RNA, 19 nt, Artificial Sequence
  Description of Artificial Sequence: Synthetic oligonucleotide
uuuacccggaguaauuaag

SEQ ID NO: 2296892 - RNA, 19 nt, Artificial Sequence
  Description of Artificial Sequence: Synthetic oligonucleotide
ucagagauagugacuagug

SEQ ID NO: 2296893 - RNA, 19 nt, Artificial Sequence
  Description of Artificial Sequence: Synthetic oligonucleotide
acucguguugcuaacaccc

SEQ ID NO: 2296894 - RNA, 19 nt, Artificial Sequence
  Description of Artificial Sequence: Synthetic oligonucleotide
gaauaagaggaauuuucug

SEQ ID NO: 2296895 - RNA, 19 nt, Artificial Sequence
  Description of Artificial Sequence: Synthetic oligonucleotide
uggucauaaacuaccaugu

SEQ ID NO: 2296896 - RNA, 19 nt, Artificial Sequence
  Description of Artificial Sequence: Synthetic oligonucleotide
agcuuauugcucuugccac

SEQ ID NO: 2296897 - RNA, 19 nt, Artificial Sequence
  Description of Artificial Sequence: Synthetic oligonucleotide
aacucugagccacacaggu

SEQ ID NO: 2296898 - RNA, 19 nt, Artificial Sequence
  Description of Artificial Sequence: Synthetic oligonucleotide
acugaguagggcuuugagg

SEQ ID NO: 2296899 - RNA, 19 nt, Artificial Sequence
  Description of Artificial Sequence: Synthetic oligonucleotide
uguaccacacucuauuugu

SEQ ID NO: 2296900 - RNA, 19 nt, Artificial Sequence
  Description of Artificial Sequence: Synthetic oligonucleotide
caaagcugcuuguagaaag

SEQ ID NO: 2296901 - RNA, 19 nt, Artificial Sequence
  Description of Artificial Sequence: Synthetic oligonucleotide
guuagagauggucauaaac

SEQ ID NO: 2296902 - RNA, 19 nt, Artificial Sequence
  Description of Artificial Sequence: Synthetic oligonucleotide
agucagugcucucaacugc

SEQ ID NO: 2296903 - RNA, 19 nt, Artificial Sequence
  Description of Artificial Sequence: Synthetic oligonucleotide
uagacugugaaguucucug

SEQ ID NO: 2296904 - RNA, 19 nt, Artificial Sequence
  Description of Artificial Sequence: Synthetic oligonucleotide
cuggaguuggguuucagag

SEQ ID NO: 2296905 - RNA, 19 nt, Artificial Sequence
  Description of Artificial Sequence: Synthetic oligonucleotide
gagauggucauaaacuacc

SEQ ID NO: 2296906 - RNA, 19 nt, Artificial Sequence
  Description of Artificial Sequence: Synthetic oligonucleotide
uauugcucuugccacaugu

SEQ ID NO: 2296907 - RNA, 19 nt, Artificial Sequence
  Description of Artificial Sequence: Synthetic oligonucleotide
cuuccgcagaucuaguugg

SEQ ID NO: 2296908 - RNA, 19 nt, Artificial Sequence
  Description of Artificial Sequence: Synthetic oligonucleotide
cuaguuggcuuuuacccgg

SEQ ID NO: 2296909 - RNA, 19 nt, Artificial Sequence
  Description of Artificial Sequence: Synthetic oligonucleotide
gaucuaguuggcuuuuacc

SEQ ID NO: 2296910 - RNA, 19 nt, Artificial Sequence
  Description of Artificial Sequence: Synthetic oligonucleotide
uuaguacauuaaaauugag

SEQ ID NO: 2296911 - RNA, 19 nt, Artificial Sequence
  Description of Artificial Sequence: Synthetic oligonucleotide
  modified_base (18)..(18): a, c, u, g, unknown or other
acucuauuuguccaaagnu

SEQ ID NO: 2296912 - RNA, 19 nt, Artificial Sequence
  Description of Artificial Sequence: Synthetic oligonucleotide
uucguaagcuuauugcucu

SEQ ID NO: 2296913 - RNA, 19 nt, Artificial Sequence
  Description of Artificial Sequence: Synthetic oligonucleotide
aauugagggguuugaucag

SEQ ID NO: 2296914 - RNA, 19 nt, Artificial Sequence
  Description of Artificial Sequence: Synthetic oligonucleotide
guuguuggagcacaggcug

SEQ ID NO: 2296915 - RNA, 19 nt, Artificial Sequence
  Description of Artificial Sequence: Synthetic oligonucleotide
gauagugacuaguggauuc

SEQ ID NO: 2296916 - RNA, 19 nt, Artificial Sequence
  Description of Artificial Sequence: Synthetic oligonucleotide
cacagagucaggcagaguc

SEQ ID NO: 2296917 - RNA, 19 nt, Artificial Sequence
  Description of Artificial Sequence: Synthetic oligonucleotide
ucaagcucagguccucugg

SEQ ID NO: 2296918 - RNA, 19 nt, Artificial Sequence
  Description of Artificial Sequence: Synthetic oligonucleotide
uuggcuuuuacccggagua

SEQ ID NO: 2296919 - RNA, 19 nt, Artificial Sequence
  Description of Artificial Sequence: Synthetic oligonucleotide
uuuuaacucguguugcuaa

SEQ ID NO: 2296920 - RNA, 19 nt, Artificial Sequence
  Description of Artificial Sequence: Synthetic oligonucleotide
gaaaguggcagagacugag

SEQ ID NO: 2296921 - RNA, 19 nt, Artificial Sequence
  Description of Artificial Sequence: Synthetic oligonucleotide
ugagagggguuccaccugg

SEQ ID NO: 2296922 - RNA, 19 nt, Artificial Sequence
  Description of Artificial Sequence: Synthetic oligonucleotide
agaucuaguuggcuuuuac

SEQ ID NO: 2296923 - RNA, 19 nt, Artificial Sequence
  Description of Artificial Sequence: Synthetic oligonucleotide
uccuguuuccauauuuucu

SEQ ID NO: 2296924 - RNA, 19 nt, Artificial Sequence
  Description of Artificial Sequence: Synthetic oligonucleotide
  modified_base (3)..(3): a, c, u, g, unknown or other
agnuuuauugcgucuuuga

SEQ ID NO: 2296925 - RNA, 19 nt, Artificial Sequence
  Description of Artificial Sequence: Synthetic oligonucleotide
ucaauacuucuaaacucug

SEQ ID NO: 2296926 - RNA, 19 nt, Artificial Sequence
  Description of Artificial Sequence: Synthetic oligonucleotide
uucucugugguagacucgg

SEQ ID NO: 2296927 - RNA, 19 nt, Artificial Sequence
  Description of Artificial Sequence: Synthetic oligonucleotide
auagugacuaguggauucc

SEQ ID NO: 2296928 - RNA, 19 nt, Artificial Sequence
  Description of Artificial Sequence: Synthetic oligonucleotide
ucugacagcaacuguacau

SEQ ID NO: 2296929 - RNA, 19 nt, Artificial Sequence
  Description of Artificial Sequence: Synthetic oligonucleotide
gacuaguggauuccguucc

SEQ ID NO: 2296930 - RNA, 19 nt, Artificial Sequence
  Description of Artificial Sequence: Synthetic oligonucleotide
guugcuaacacccuggagu

SEQ ID NO: 2296931 - RNA, 19 nt, Artificial Sequence
  Description of Artificial Sequence: Synthetic oligonucleotide
uuacccggaguaauuaaga

SEQ ID NO: 2296932 - RNA, 19 nt, Artificial Sequence
  Description of Artificial Sequence: Synthetic oligonucleotide
ugugggaggaaguacaguu

SEQ ID NO: 2296933 - RNA, 19 nt, Artificial Sequence
  Description of Artificial Sequence: Synthetic oligonucleotide
cagagugacacgcugcagg

SEQ ID NO: 2296934 - RNA, 19 nt, Artificial Sequence
  Description of Artificial Sequence: Synthetic oligonucleotide
uaugccagaagaauacaua

SEQ ID NO: 2296935 - RNA, 19 nt, Artificial Sequence
  Description of Artificial Sequence: Synthetic oligonucleotide
gaucccuccacagagucag

SEQ ID NO: 2296936 - RNA, 19 nt, Artificial Sequence
  Description of Artificial Sequence: Synthetic oligonucleotide
uuaaaauugagggguuuga

SEQ ID NO: 2296937 - RNA, 19 nt, Artificial Sequence
  Description of Artificial Sequence: Synthetic oligonucleotide
ugcauaauucacuuuucaa

SEQ ID NO: 2296938 - RNA, 19 nt, Artificial Sequence
  Description of Artificial Sequence: Synthetic oligonucleotide
agggugagccagcugaaac

SEQ ID NO: 2296939 - RNA, 19 nt, Artificial Sequence
  Description of Artificial Sequence: Synthetic oligonucleotide
uuaugccagaagaauacau

SEQ ID NO: 2296940 - RNA, 19 nt, Artificial Sequence
  Description of Artificial Sequence: Synthetic oligonucleotide
  modified_base (4)..(4): a, c, u, g, unknown or other
aagnuuuauugcgucuuug

SEQ ID NO: 2296941 - RNA, 19 nt, Artificial Sequence
  Description of Artificial Sequence: Synthetic oligonucleotide
uagagauggucauaaacua

SEQ ID NO: 2296942 - RNA, 19 nt, Artificial Sequence
  Description of Artificial Sequence: Synthetic oligonucleotide
uacauugacuuuucucagc

SEQ ID NO: 2296943 - RNA, 19 nt, Artificial Sequence
  Description of Artificial Sequence: Synthetic oligonucleotide
aaguuagagauggucauaa

SEQ ID NO: 2296944 - RNA, 19 nt, Artificial Sequence
  Description of Artificial Sequence: Synthetic oligonucleotide
ucggccucaguuuuguuca

SEQ ID NO: 2296945 - RNA, 19 nt, Artificial Sequence
  Description of Artificial Sequence: Synthetic oligonucleotide
cuacauugacuuuucucag

SEQ ID NO: 2296946 - RNA, 19 nt, Artificial Sequence
  Description of Artificial Sequence: Synthetic oligonucleotide
agggguuccaccugggcuc

SEQ ID NO: 2296947 - RNA, 19 nt, Artificial Sequence
  Description of Artificial Sequence: Synthetic oligonucleotide
uaagcuuauugcucuugcc

SEQ ID NO: 2296948 - RNA, 19 nt, Artificial Sequence
  Description of Artificial Sequence: Synthetic oligonucleotide
cagagauagugacuagugg

SEQ ID NO: 2296949 - RNA, 19 nt, Artificial Sequence
  Description of Artificial Sequence: Synthetic oligonucleotide
agagauggucauaaacuac

SEQ ID NO: 2296950 - RNA, 19 nt, Artificial Sequence
  Description of Artificial Sequence: Synthetic oligonucleotide
uggagcacaggcuggcacg

SEQ ID NO: 2296951 - RNA, 19 nt, Artificial Sequence
  Description of Artificial Sequence: Synthetic oligonucleotide
uuucuuggagacugcauaa

SEQ ID NO: 2296952 - RNA, 19 nt, Artificial Sequence
  Description of Artificial Sequence: Synthetic oligonucleotide
  modified_base (8)..(8): a, c, u, g, unknown or other
uccaaagnuuuauugcguc

SEQ ID NO: 2296953 - RNA, 19 nt, Artificial Sequence
  Description of Artificial Sequence: Synthetic oligonucleotide
  modified_base (5)..(5): a, c, u, g, unknown or other
aaagnuuuauugcgucuuu

SEQ ID NO: 2296954 - RNA, 19 nt, Artificial Sequence
  Description of Artificial Sequence: Synthetic oligonucleotide
caaagcacaaaauuguugu

SEQ ID NO: 2296955 - RNA, 19 nt, Artificial Sequence
  Description of Artificial Sequence: Synthetic oligonucleotide
uaacucguguugcuaacac

SEQ ID NO: 2296956 - RNA, 19 nt, Artificial Sequence
  Description of Artificial Sequence: Synthetic oligonucleotide
uucaaagcacaaaauuguu

SEQ ID NO: 2296957 - RNA, 19 nt, Artificial Sequence
  Description of Artificial Sequence: Synthetic oligonucleotide
aguuggguuucagagugac

SEQ ID NO: 2296958 - RNA, 19 nt, Artificial Sequence
  Description of Artificial Sequence: Synthetic oligonucleotide
acuucuaaacucugagcca

SEQ ID NO: 2296959 - RNA, 19 nt, Artificial Sequence
  Description of Artificial Sequence: Synthetic oligonucleotide
uaaggcccgagucaugacu

SEQ ID NO: 2296960 - RNA, 19 nt, Artificial Sequence
  Description of Artificial Sequence: Synthetic oligonucleotide
uaagaggaauuuucugaga

SEQ ID NO: 2296961 - RNA, 19 nt, Artificial Sequence
  Description of Artificial Sequence: Synthetic oligonucleotide
uuuaacucguguugcuaac

SEQ ID NO: 2296962 - RNA, 19 nt, Artificial Sequence
  Description of Artificial Sequence: Synthetic oligonucleotide
acaacagcuugaauaagag

SEQ ID NO: 2296963 - RNA, 19 nt, Artificial Sequence
  Description of Artificial Sequence: Synthetic oligonucleotide
uguugcuaacacccuggag

SEQ ID NO: 2296964 - RNA, 19 nt, Artificial Sequence
  Description of Artificial Sequence: Synthetic oligonucleotide
ucauuguauggaucccucc

SEQ ID NO: 2296965 - RNA, 19 nt, Artificial Sequence
  Description of Artificial Sequence: Synthetic oligonucleotide
uuguuggagcacaggcugg

SEQ ID NO: 2296966 - RNA, 19 nt, Artificial Sequence
  Description of Artificial Sequence: Synthetic oligonucleotide
agauggcaucuuucaauac

SEQ ID NO: 2296967 - RNA, 19 nt, Artificial Sequence
  Description of Artificial Sequence: Synthetic oligonucleotide
cugagcuaccucuaaauga

SEQ ID NO: 2296968 - RNA, 19 nt, Artificial Sequence
  Description of Artificial Sequence: Synthetic oligonucleotide
acucgggaagggaagaugg

SEQ ID NO: 2296969 - RNA, 19 nt, Artificial Sequence
  Description of Artificial Sequence: Synthetic oligonucleotide
cagaagaauacauauuuua

SEQ ID NO: 2296970 - RNA, 19 nt, Artificial Sequence
  Description of Artificial Sequence: Synthetic oligonucleotide
caugacuggagucagucca

SEQ ID NO: 2296971 - RNA, 19 nt, Artificial Sequence
  Description of Artificial Sequence: Synthetic oligonucleotide
gggauucaagcucaggucc

SEQ ID NO: 2296972 - RNA, 19 nt, Artificial Sequence
  Description of Artificial Sequence: Synthetic oligonucleotide
ugcgucuuugauguuagga

SEQ ID NO: 2296973 - RNA, 19 nt, Artificial Sequence
  Description of Artificial Sequence: Synthetic oligonucleotide
gacaacagcuugaauaaga

SEQ ID NO: 2296974 - RNA, 19 nt, Artificial Sequence
  Description of Artificial Sequence: Synthetic oligonucleotide
cucucaacugcugagcuac

SEQ ID NO: 2296975 - RNA, 19 nt, Artificial Sequence
  Description of Artificial Sequence: Synthetic oligonucleotide
ugggauucaagcucagguc

SEQ ID NO: 2296976 - RNA, 19 nt, Artificial Sequence
  Description of Artificial Sequence: Synthetic oligonucleotide
gucuacauugacuuuucuc

SEQ ID NO: 2296977 - RNA, 19 nt, Artificial Sequence
  Description of Artificial Sequence: Synthetic oligonucleotide
ugacuaguggauuccguuc

SEQ ID NO: 2296978 - RNA, 19 nt, Artificial Sequence
  Description of Artificial Sequence: Synthetic oligonucleotide
uuuaugccagaagaauaca

SEQ ID NO: 2296979 - RNA, 19 nt, Artificial Sequence
  Description of Artificial Sequence: Synthetic oligonucleotide
uuuuacccggaguaauuaa

SEQ ID NO: 2296980 - RNA, 19 nt, Artificial Sequence
  Description of Artificial Sequence: Synthetic oligonucleotide
gacuuuucucagcagcuuc

SEQ ID NO: 2296981 - RNA, 19 nt, Artificial Sequence
  Description of Artificial Sequence: Synthetic oligonucleotide
ucuccauggguuguuggag

SEQ ID NO: 2296982 - RNA, 19 nt, Artificial Sequence
  Description of Artificial Sequence: Synthetic oligonucleotide
uggggauucuccauggguu

SEQ ID NO: 2296983 - RNA, 19 nt, Artificial Sequence
  Description of Artificial Sequence: Synthetic oligonucleotide
acccggaguaauuaagaca

SEQ ID NO: 2296984 - RNA, 19 nt, Artificial Sequence
  Description of Artificial Sequence: Synthetic oligonucleotide
ugguaggauggcuggcugg

SEQ ID NO: 2296985 - RNA, 19 nt, Artificial Sequence
  Description of Artificial Sequence: Synthetic oligonucleotide
ucguguugcuaacacccug

SEQ ID NO: 2296986 - RNA, 19 nt, Artificial Sequence
  Description of Artificial Sequence: Synthetic oligonucleotide
agagggguuccaccugggc

SEQ ID NO: 2296987 - RNA, 19 nt, Artificial Sequence
  Description of Artificial Sequence: Synthetic oligonucleotide
uuauuggugagagggguuc

SEQ ID NO: 2296988 - RNA, 19 nt, Artificial Sequence
  Description of Artificial Sequence: Synthetic oligonucleotide
uguuuuagacugugaaguu

SEQ ID NO: 2296989 - RNA, 19 nt, Artificial Sequence
  Description of Artificial Sequence: Synthetic oligonucleotide
ucaugacuggagucagucc

SEQ ID NO: 2296990 - RNA, 19 nt, Artificial Sequence
  Description of Artificial Sequence: Synthetic oligonucleotide
uuuauuggugagagggguu

SEQ ID NO: 2296991 - RNA, 19 nt, Artificial Sequence
  Description of Artificial Sequence: Synthetic oligonucleotide
guuucuuggagacugcaua

SEQ ID NO: 2296992 - RNA, 19 nt, Artificial Sequence
  Description of Artificial Sequence: Synthetic oligonucleotide
ugcugagcuaccucuaaau

SEQ ID NO: 2296993 - RNA, 19 nt, Artificial Sequence
  Description of Artificial Sequence: Synthetic oligonucleotide
uacccggaguaauuaagac

SEQ ID NO: 2296994 - RNA, 19 nt, Artificial Sequence
  Description of Artificial Sequence: Synthetic oligonucleotide
caucaaagcugcuuguaga

SEQ ID NO: 2296995 - RNA, 19 nt, Artificial Sequence
  Description of Artificial Sequence: Synthetic oligonucleotide
uaaaauugagggguuugau

SEQ ID NO: 2296996 - RNA, 19 nt, Artificial Sequence
  Description of Artificial Sequence: Synthetic oligonucleotide
uggaguuggguuucagagu

SEQ ID NO: 2296997 - RNA, 19 nt, Artificial Sequence
  Description of Artificial Sequence: Synthetic oligonucleotide
uuaacucguguugcuaaca

SEQ ID NO: 2296998 - RNA, 19 nt, Artificial Sequence
  Description of Artificial Sequence: Synthetic oligonucleotide
cugugguagacucgggaag

SEQ ID NO: 2296999 - RNA, 19 nt, Artificial Sequence
  Description of Artificial Sequence: Synthetic oligonucleotide
ggaggaaguacaguugggg

SEQ ID NO: 2297000 - RNA, 19 nt, Artificial Sequence
  Description of Artificial Sequence: Synthetic oligonucleotide
uuagacugugaaguucucu

SEQ ID NO: 2297001 - RNA, 19 nt, Artificial Sequence
  Description of Artificial Sequence: Synthetic oligonucleotide
gguuugaucagucauugua

SEQ ID NO: 2297002 - RNA, 19 nt, Artificial Sequence
  Description of Artificial Sequence: Synthetic oligonucleotide
uuguuguuuuagacuguga

SEQ ID NO: 2297003 - RNA, 19 nt, Artificial Sequence
  Description of Artificial Sequence: Synthetic oligonucleotide
uggaucccuccacagaguc

SEQ ID NO: 2297004 - RNA, 19 nt, Artificial Sequence
  Description of Artificial Sequence: Synthetic oligonucleotide
guuuuagacugugaaguuc

SEQ ID NO: 2297005 - RNA, 19 nt, Artificial Sequence
  Description of Artificial Sequence: Synthetic oligonucleotide
agacugugaaguucucugu

SEQ ID NO: 2297006 - RNA, 19 nt, Artificial Sequence
  Description of Artificial Sequence: Synthetic oligonucleotide
gcuaacacccuggaguugg

SEQ ID NO: 2297007 - RNA, 19 nt, Artificial Sequence
  Description of Artificial Sequence: Synthetic oligonucleotide
uugcuaacacccuggaguu

SEQ ID NO: 2297008 - RNA, 19 nt, Artificial Sequence
  Description of Artificial Sequence: Synthetic oligonucleotide
uagugacuaguggauuccg

SEQ ID NO: 2297009 - RNA, 19 nt, Artificial Sequence
  Description of Artificial Sequence: Synthetic oligonucleotide
caacuguacauguaccaca

SEQ ID NO: 2297010 - RNA, 19 nt, Artificial Sequence
  Description of Artificial Sequence: Synthetic oligonucleotide
cuccauggguuguuggagc

SEQ ID NO: 2297011 - RNA, 19 nt, Artificial Sequence
  Description of Artificial Sequence: Synthetic oligonucleotide
  modified_base (2)..(2): a, c, u, g, unknown or other
gnuuuauugcgucuuugau

SEQ ID NO: 2297012 - RNA, 19 nt, Artificial Sequence
  Description of Artificial Sequence: Synthetic oligonucleotide
uucaagcucagguccucug

SEQ ID NO: 2297013 - RNA, 19 nt, Artificial Sequence
  Description of Artificial Sequence: Synthetic oligonucleotide
ucuaaacucugagccacac

SEQ ID NO: 2297014 - RNA, 19 nt, Artificial Sequence
  Description of Artificial Sequence: Synthetic oligonucleotide
aauuguuguuuuagacugu

SEQ ID NO: 2297015 - RNA, 19 nt, Artificial Sequence
  Description of Artificial Sequence: Synthetic oligonucleotide
aaggcccgagucaugacug

SEQ ID NO: 2297016 - RNA, 19 nt, Artificial Sequence
  Description of Artificial Sequence: Synthetic oligonucleotide
cacguucguaagcuuauug

SEQ ID NO: 2297017 - RNA, 19 nt, Artificial Sequence
  Description of Artificial Sequence: Synthetic oligonucleotide
uacauguaccacacucuau

SEQ ID NO: 2297018 - RNA, 19 nt, Artificial Sequence
  Description of Artificial Sequence: Synthetic oligonucleotide
cacauguaugacaacagcu

SEQ ID NO: 2297019 - RNA, 19 nt, Artificial Sequence
  Description of Artificial Sequence: Synthetic oligonucleotide
ucgggaagggaagauggca

SEQ ID NO: 2297020 - RNA, 19 nt, Artificial Sequence
  Description of Artificial Sequence: Synthetic oligonucleotide
ugagggguuugaucaguca

SEQ ID NO: 2297021 - RNA, 19 nt, Artificial Sequence
  Description of Artificial Sequence: Synthetic oligonucleotide
  modified_base (19)..(19): a, c, u, g, unknown or other
cacucuauuuguccaaagn

SEQ ID NO: 2297022 - RNA, 19 nt, Artificial Sequence
  Description of Artificial Sequence: Synthetic oligonucleotide
guacaguuggggauucucc

SEQ ID NO: 2297023 - RNA, 19 nt, Artificial Sequence
  Description of Artificial Sequence: Synthetic oligonucleotide
auuccguuccucugguggu

SEQ ID NO: 2297024 - RNA, 19 nt, Artificial Sequence
  Description of Artificial Sequence: Synthetic oligonucleotide
cagagucaggcagagucgg

SEQ ID NO: 2297025 - RNA, 19 nt, Artificial Sequence
  Description of Artificial Sequence: Synthetic oligonucleotide
uuugagggugagccagcug

SEQ ID NO: 2297026 - RNA, 19 nt, Artificial Sequence
  Description of Artificial Sequence: Synthetic oligonucleotide
uggugagagggguuccacc

SEQ ID NO: 2297027 - RNA, 19 nt, Artificial Sequence
  Description of Artificial Sequence: Synthetic oligonucleotide
guagacucgggaagggaag

SEQ ID NO: 2297028 - RNA, 19 nt, Artificial Sequence
  Description of Artificial Sequence: Synthetic oligonucleotide
uuuagacugugaaguucuc

SEQ ID NO: 2297029 - RNA, 19 nt, Artificial Sequence
  Description of Artificial Sequence: Synthetic oligonucleotide
agucauuguauggaucccu

SEQ ID NO: 2297030 - RNA, 19 nt, Artificial Sequence
  Description of Artificial Sequence: Synthetic oligonucleotide
gagucaugacuggagucag

SEQ ID NO: 2297031 - RNA, 19 nt, Artificial Sequence
  Description of Artificial Sequence: Synthetic oligonucleotide
cauugacuuuucucagcag

SEQ ID NO: 2297032 - RNA, 19 nt, Artificial Sequence
  Description of Artificial Sequence: Synthetic oligonucleotide
ugucuacauugacuuuucu

SEQ ID NO: 2297033 - RNA, 19 nt, Artificial Sequence
  Description of Artificial Sequence: Synthetic oligonucleotide
guucguaagcuuauugcuc

SEQ ID NO: 2297034 - RNA, 19 nt, Artificial Sequence
  Description of Artificial Sequence: Synthetic oligonucleotide
agaggaauuuucugagaua

SEQ ID NO: 2297035 - RNA, 19 nt, Artificial Sequence
  Description of Artificial Sequence: Synthetic oligonucleotide
uugagggguuugaucaguc

SEQ ID NO: 2297036 - RNA, 19 nt, Artificial Sequence
  Description of Artificial Sequence: Synthetic oligonucleotide
guuggggauucuccauggg

SEQ ID NO: 2297037 - RNA, 19 nt, Artificial Sequence
  Description of Artificial Sequence: Synthetic oligonucleotide
agcuaccucuaaaugagcu

SEQ ID NO: 2297038 - RNA, 19 nt, Artificial Sequence
  Description of Artificial Sequence: Synthetic oligonucleotide
gaaguucucugugguagac

SEQ ID NO: 2297039 - RNA, 19 nt, Artificial Sequence
  Description of Artificial Sequence: Synthetic oligonucleotide
gucggccucaguuuuguuc

SEQ ID NO: 2297040 - RNA, 19 nt, Artificial Sequence
  Description of Artificial Sequence: Synthetic oligonucleotide
cuuaaggcccgagucauga

SEQ ID NO: 2297041 - RNA, 19 nt, Artificial Sequence
  Description of Artificial Sequence: Synthetic oligonucleotide
uauuggugagagggguucc

SEQ ID NO: 2297042 - RNA, 19 nt, Artificial Sequence
  Description of Artificial Sequence: Synthetic oligonucleotide
cugucuacauugacuuuuc

SEQ ID NO: 2297043 - RNA, 19 nt, Artificial Sequence
  Description of Artificial Sequence: Synthetic oligonucleotide
uggguuguuggagcacagg

SEQ ID NO: 2297044 - RNA, 19 nt, Artificial Sequence
  Description of Artificial Sequence: Synthetic oligonucleotide
uccuuaaggcccgagucau

SEQ ID NO: 2297045 - RNA, 19 nt, Artificial Sequence
  Description of Artificial Sequence: Synthetic oligonucleotide
agucaggcagagucggccu

SEQ ID NO: 2297046 - RNA, 19 nt, Artificial Sequence
  Description of Artificial Sequence: Synthetic oligonucleotide
acuaguggauuccguuccu

SEQ ID NO: 2297047 - RNA, 19 nt, Artificial Sequence
  Description of Artificial Sequence: Synthetic oligonucleotide
gcugagcuaccucuaaaug

SEQ ID NO: 2297048 - RNA, 19 nt, Artificial Sequence
  Description of Artificial Sequence: Synthetic oligonucleotide
gcuuccgcagaucuaguug

SEQ ID NO: 2297049 - RNA, 19 nt, Artificial Sequence
  Description of Artificial Sequence: Synthetic oligonucleotide
uuccgcagaucuaguuggc

SEQ ID NO: 2297050 - RNA, 19 nt, Artificial Sequence
  Description of Artificial Sequence: Synthetic oligonucleotide
guacauguaccacacucua

SEQ ID NO: 2297051 - RNA, 19 nt, Artificial Sequence
  Description of Artificial Sequence: Synthetic oligonucleotide
cucgggaagggaagauggc

SEQ ID NO: 2297052 - RNA, 19 nt, Artificial Sequence
  Description of Artificial Sequence: Synthetic oligonucleotide
ggucauaaacuaccaugug

SEQ ID NO: 2297053 - RNA, 19 nt, Artificial Sequence
  Description of Artificial Sequence: Synthetic oligonucleotide
cuaacacccuggaguuggg

SEQ ID NO: 2297054 - RNA, 19 nt, Artificial Sequence
  Description of Artificial Sequence: Synthetic oligonucleotide
gacucgggaagggaagaug

SEQ ID NO: 2297055 - RNA, 19 nt, Artificial Sequence
  Description of Artificial Sequence: Synthetic oligonucleotide
uagacucgggaagggaaga

SEQ ID NO: 2297056 - RNA, 19 nt, Artificial Sequence
  Description of Artificial Sequence: Synthetic oligonucleotide
agugugggaggaaguacag

SEQ ID NO: 2297057 - RNA, 19 nt, Artificial Sequence
  Description of Artificial Sequence: Synthetic oligonucleotide
  modified_base (17)..(17): a, c, u, g, unknown or other
cucuauuuguccaaagnuu

SEQ ID NO: 2297058 - RNA, 19 nt, Artificial Sequence
  Description of Artificial Sequence: Synthetic oligonucleotide
agauggucauaaacuacca

SEQ ID NO: 2297059 - RNA, 19 nt, Artificial Sequence
  Description of Artificial Sequence: Synthetic oligonucleotide
aguuagagauggucauaaa

SEQ ID NO: 2297060 - RNA, 19 nt, Artificial Sequence
  Description of Artificial Sequence: Synthetic oligonucleotide
uuaaggcccgagucaugac

SEQ ID NO: 2297061 - RNA, 19 nt, Artificial Sequence
  Description of Artificial Sequence: Synthetic oligonucleotide
ucucaacugcugagcuacc

SEQ ID NO: 2297062 - RNA, 19 nt, Artificial Sequence
  Description of Artificial Sequence: Synthetic oligonucleotide
  modified_base (15)..(15): a, c, u, g, unknown or other
cuauuuguccaaagnuuua

SEQ ID NO: 2297063 - RNA, 19 nt, Artificial Sequence
  Description of Artificial Sequence: Synthetic oligonucleotide
ccacauguaugacaacagc

SEQ ID NO: 2297064 - RNA, 19 nt, Artificial Sequence
  Description of Artificial Sequence: Synthetic oligonucleotide
ugagggugagccagcugaa

SEQ ID NO: 2297065 - RNA, 19 nt, Artificial Sequence
  Description of Artificial Sequence: Synthetic oligonucleotide
uaguuggcuuuuacccgga

SEQ ID NO: 2297066 - RNA, 19 nt, Artificial Sequence
  Description of Artificial Sequence: Synthetic oligonucleotide
gaucagucauuguauggau

SEQ ID NO: 2297067 - RNA, 19 nt, Artificial Sequence
  Description of Artificial Sequence: Synthetic oligonucleotide
uugcgucuuugauguuagg

SEQ ID NO: 2297068 - RNA, 19 nt, Artificial Sequence
  Description of Artificial Sequence: Synthetic oligonucleotide
acagcuugaauaagaggaa

SEQ ID NO: 2297069 - RNA, 19 nt, Artificial Sequence
  Description of Artificial Sequence: Synthetic oligonucleotide
agcuuuuaugccagaagaa

SEQ ID NO: 2297070 - RNA, 19 nt, Artificial Sequence
  Description of Artificial Sequence: Synthetic oligonucleotide
ugagccacacaggucugac

SEQ ID NO: 2297071 - RNA, 19 nt, Artificial Sequence
  Description of Artificial Sequence: Synthetic oligonucleotide
agagucaggcagagucggc

SEQ ID NO: 2297072 - RNA, 19 nt, Artificial Sequence
  Description of Artificial Sequence: Synthetic oligonucleotide
gagggguuugaucagucau

SEQ ID NO: 2297073 - RNA, 19 nt, Artificial Sequence
  Description of Artificial Sequence: Synthetic oligonucleotide
gugggaggaaguacaguug

SEQ ID NO: 2297074 - RNA, 19 nt, Artificial Sequence
  Description of Artificial Sequence: Synthetic oligonucleotide
cguguugcuaacacccugg

SEQ ID NO: 2297075 - RNA, 19 nt, Artificial Sequence
  Description of Artificial Sequence: Synthetic oligonucleotide
gagauagugacuaguggau

SEQ ID NO: 2297076 - RNA, 19 nt, Artificial Sequence
  Description of Artificial Sequence: Synthetic oligonucleotide
agcuugaauaagaggaauu

SEQ ID NO: 2297077 - RNA, 19 nt, Artificial Sequence
  Description of Artificial Sequence: Synthetic oligonucleotide
uucuuggagacugcauaau

SEQ ID NO: 2297078 - RNA, 19 nt, Artificial Sequence
  Description of Artificial Sequence: Synthetic oligonucleotide
caggcuggcacguucguaa

SEQ ID NO: 2297079 - RNA, 19 nt, Artificial Sequence
  Description of Artificial Sequence: Synthetic oligonucleotide
gauggucauaaacuaccau

SEQ ID NO: 2297080 - RNA, 19 nt, Artificial Sequence
  Description of Artificial Sequence: Synthetic oligonucleotide
ggggauucuccauggguug

SEQ ID NO: 2297081 - RNA, 19 nt, Artificial Sequence
  Description of Artificial Sequence: Synthetic oligonucleotide
gaaguacaguuggggauuc

SEQ ID NO: 2297082 - RNA, 19 nt, Artificial Sequence
  Description of Artificial Sequence: Synthetic oligonucleotide
cuuuauuggugagaggggu

SEQ ID NO: 2297083 - RNA, 19 nt, Artificial Sequence
  Description of Artificial Sequence: Synthetic oligonucleotide
cagucauuguauggauccc

SEQ ID NO: 2297084 - RNA, 19 nt, Artificial Sequence
  Description of Artificial Sequence: Synthetic oligonucleotide
cucugugguagacucggga

SEQ ID NO: 2297085 - RNA, 19 nt, Artificial Sequence
  Description of Artificial Sequence: Synthetic oligonucleotide
cacgcugcaggucagagau

SEQ ID NO: 2297086 - RNA, 19 nt, Artificial Sequence
  Description of Artificial Sequence: Synthetic oligonucleotide
ugguagacucgggaaggga

SEQ ID NO: 2297087 - RNA, 19 nt, Artificial Sequence
  Description of Artificial Sequence: Synthetic oligonucleotide
aggcuggcacguucguaag

SEQ ID NO: 2297088 - RNA, 19 nt, Artificial Sequence
  Description of Artificial Sequence: Synthetic oligonucleotide
gguaggauggcuggcuggc

SEQ ID NO: 2297089 - RNA, 19 nt, Artificial Sequence
  Description of Artificial Sequence: Synthetic oligonucleotide
gagcuaccucuaaaugagc

SEQ ID NO: 2297090 - RNA, 19 nt, Artificial Sequence
  Description of Artificial Sequence: Synthetic oligonucleotide
agugacuaguggauuccgu

SEQ ID NO: 2297091 - RNA, 19 nt, Artificial Sequence
  Description of Artificial Sequence: Synthetic oligonucleotide
uccgcagaucuaguuggcu

SEQ ID NO: 2297092 - RNA, 19 nt, Artificial Sequence
  Description of Artificial Sequence: Synthetic oligonucleotide
caagcucagguccucugga

SEQ ID NO: 2297093 - RNA, 19 nt, Artificial Sequence
  Description of Artificial Sequence: Synthetic oligonucleotide
cuuuuacccggaguaauua

SEQ ID NO: 2297094 - RNA, 19 nt, Artificial Sequence
  Description of Artificial Sequence: Synthetic oligonucleotide
cugagauagucuucagugu

SEQ ID NO: 2297095 - RNA, 19 nt, Artificial Sequence
  Description of Artificial Sequence: Synthetic oligonucleotide
gagagggguuccaccuggg

SEQ ID NO: 2297096 - RNA, 19 nt, Artificial Sequence
  Description of Artificial Sequence: Synthetic oligonucleotide
ggucagagauagugacuag

SEQ ID NO: 2297097 - RNA, 19 nt, Artificial Sequence
  Description of Artificial Sequence: Synthetic oligonucleotide
gauagucuucaguguuucu

SEQ ID NO: 2297098 - RNA, 19 nt, Artificial Sequence
  Description of Artificial Sequence: Synthetic oligonucleotide
gucugacagcaacuguaca

SEQ ID NO: 2297099 - RNA, 19 nt, Artificial Sequence
  Description of Artificial Sequence: Synthetic oligonucleotide
ugcuaacacccuggaguug

SEQ ID NO: 2297100 - RNA, 19 nt, Artificial Sequence
  Description of Artificial Sequence: Synthetic oligonucleotide
uggcuuuuacccggaguaa

SEQ ID NO: 2297101 - RNA, 19 nt, Artificial Sequence
  Description of Artificial Sequence: Synthetic oligonucleotide
ggucugacagcaacuguac

SEQ ID NO: 2297102 - RNA, 19 nt, Artificial Sequence
  Description of Artificial Sequence: Synthetic oligonucleotide
gucagagauagugacuagu

SEQ ID NO: 2297103 - RNA, 19 nt, Artificial Sequence
  Description of Artificial Sequence: Synthetic oligonucleotide
aggaauuuucugagauagu

SEQ ID NO: 2297104 - RNA, 19 nt, Artificial Sequence
  Description of Artificial Sequence: Synthetic oligonucleotide
ggugagagggguuccaccu

SEQ ID NO: 2297105 - RNA, 19 nt, Artificial Sequence
  Description of Artificial Sequence: Synthetic oligonucleotide
cuaguggauuccguuccuc

SEQ ID NO: 2297106 - RNA, 19 nt, Artificial Sequence
  Description of Artificial Sequence: Synthetic oligonucleotide
aaguacaguuggggauucu

SEQ ID NO: 2297107 - RNA, 19 nt, Artificial Sequence
  Description of Artificial Sequence: Synthetic oligonucleotide
guguugcuaacacccugga

SEQ ID NO: 2297108 - RNA, 19 nt, Artificial Sequence
  Description of Artificial Sequence: Synthetic oligonucleotide
uaacacccuggaguugggu

SEQ ID NO: 2297109 - RNA, 19 nt, Artificial Sequence
  Description of Artificial Sequence: Synthetic oligonucleotide
gagccacacaggucugaca

SEQ ID NO: 2297110 - RNA, 19 nt, Artificial Sequence
  Description of Artificial Sequence: Synthetic oligonucleotide
gguagacucgggaagggaa

SEQ ID NO: 2297111 - RNA, 19 nt, Artificial Sequence
  Description of Artificial Sequence: Synthetic oligonucleotide
guaccacacucuauuuguc

SEQ ID NO: 2297112 - RNA, 19 nt, Artificial Sequence
  Description of Artificial Sequence: Synthetic oligonucleotide
uccugucuacauugacuuu

SEQ ID NO: 2297113 - RNA, 19 nt, Artificial Sequence
  Description of Artificial Sequence: Synthetic oligonucleotide
guguuucuuggagacugca

SEQ ID NO: 2297114 - RNA, 19 nt, Artificial Sequence
  Description of Artificial Sequence: Synthetic oligonucleotide
ucguaagcuuauugcucuu

SEQ ID NO: 2297115 - RNA, 19 nt, Artificial Sequence
  Description of Artificial Sequence: Synthetic oligonucleotide
gggaagggaagauggcauc

SEQ ID NO: 2297116 - RNA, 19 nt, Artificial Sequence
  Description of Artificial Sequence: Synthetic oligonucleotide
gugacuaguggauuccguu

SEQ ID NO: 2297117 - RNA, 19 nt, Artificial Sequence
  Description of Artificial Sequence: Synthetic oligonucleotide
ucagcagcuuccgcagauc

SEQ ID NO: 2297118 - RNA, 19 nt, Artificial Sequence
  Description of Artificial Sequence: Synthetic oligonucleotide
  modified_base (6)..(6): a, c, u, g, unknown or other
caaagnuuuauugcgucuu

SEQ ID NO: 2297119 - RNA, 19 nt, Artificial Sequence
  Description of Artificial Sequence: Synthetic oligonucleotide
  modified_base (9)..(9): a, c, u, g, unknown or other
guccaaagnuuuauugcgu

SEQ ID NO: 2297120 - RNA, 19 nt, Artificial Sequence
  Description of Artificial Sequence: Synthetic oligonucleotide
cuugaauaagaggaauuuu

SEQ ID NO: 2297121 - RNA, 19 nt, Artificial Sequence
  Description of Artificial Sequence: Synthetic oligonucleotide
gacagcaacuguacaugua

SEQ ID NO: 2297122 - RNA, 19 nt, Artificial Sequence
  Description of Artificial Sequence: Synthetic oligonucleotide
cuaccucuaaaugagcuuu

SEQ ID NO: 2297123 - RNA, 19 nt, Artificial Sequence
  Description of Artificial Sequence: Synthetic oligonucleotide
agacugaguagggcuuuga

SEQ ID NO: 2297124 - RNA, 19 nt, Artificial Sequence
  Description of Artificial Sequence: Synthetic oligonucleotide
agagacugaguagggcuuu

SEQ ID NO: 2297125 - RNA, 19 nt, Artificial Sequence
  Description of Artificial Sequence: Synthetic oligonucleotide
guagaaaguggcagagacu

SEQ ID NO: 2297126 - RNA, 19 nt, Artificial Sequence
  Description of Artificial Sequence: Synthetic oligonucleotide
aacuaccaugugggugcug

SEQ ID NO: 2297127 - RNA, 19 nt, Artificial Sequence
  Description of Artificial Sequence: Synthetic oligonucleotide
agagucggccucaguuuug

SEQ ID NO: 2297128 - RNA, 19 nt, Artificial Sequence
  Description of Artificial Sequence: Synthetic oligonucleotide
cuggcuggcuguggcagug

SEQ ID NO: 2297129 - RNA, 19 nt, Artificial Sequence
  Description of Artificial Sequence: Synthetic oligonucleotide
gcacaggcuggcacguucg

SEQ ID NO: 2297130 - RNA, 19 nt, Artificial Sequence
  Description of Artificial Sequence: Synthetic oligonucleotide
  modified_base (7)..(7): a, c, u, g, unknown or other
ccaaagnuuuauugcgucu

SEQ ID NO: 2297131 - RNA, 19 nt, Artificial Sequence
  Description of Artificial Sequence: Synthetic oligonucleotide
uuauugcgucuuugauguu

SEQ ID NO: 2297132 - RNA, 19 nt, Artificial Sequence
  Description of Artificial Sequence: Synthetic oligonucleotide
gucagugcucucaacugcu

SEQ ID NO: 2297133 - RNA, 19 nt, Artificial Sequence
  Description of Artificial Sequence: Synthetic oligonucleotide
ggagucaguccaguuccug

SEQ ID NO: 2297134 - RNA, 19 nt, Artificial Sequence
  Description of Artificial Sequence: Synthetic oligonucleotide
gcuugaauaagaggaauuu

SEQ ID NO: 2297135 - RNA, 19 nt, Artificial Sequence
  Description of Artificial Sequence: Synthetic oligonucleotide
agacucgggaagggaagau

SEQ ID NO: 2297136 - RNA, 19 nt, Artificial Sequence
  Description of Artificial Sequence: Synthetic oligonucleotide
ccgagucaugacuggaguc

SEQ ID NO: 2297137 - RNA, 19 nt, Artificial Sequence
  Description of Artificial Sequence: Synthetic oligonucleotide
ggcuggcacguucguaagc

SEQ ID NO: 2297138 - RNA, 19 nt, Artificial Sequence
  Description of Artificial Sequence: Synthetic oligonucleotide
cuuauugcucuugccacau

SEQ ID NO: 2297139 - RNA, 19 nt, Artificial Sequence
  Description of Artificial Sequence: Synthetic oligonucleotide
cgucuuugauguuaggaaa

SEQ ID NO: 2297140 - RNA, 19 nt, Artificial Sequence
  Description of Artificial Sequence: Synthetic oligonucleotide
gggugagccagcugaaacu

SEQ ID NO: 2297141 - RNA, 19 nt, Artificial Sequence
  Description of Artificial Sequence: Synthetic oligonucleotide
caccugggcuccugucuac

SEQ ID NO: 2297142 - RNA, 19 nt, Artificial Sequence
  Description of Artificial Sequence: Synthetic oligonucleotide
agucaugacuggagucagu

SEQ ID NO: 2297143 - RNA, 19 nt, Artificial Sequence
  Description of Artificial Sequence: Synthetic oligonucleotide
gguuguuggagcacaggcu

SEQ ID NO: 2297144 - RNA, 19 nt, Artificial Sequence
  Description of Artificial Sequence: Synthetic oligonucleotide
ggauuccguuccucuggug

SEQ ID NO: 2297145 - RNA, 19 nt, Artificial Sequence
  Description of Artificial Sequence: Synthetic oligonucleotide
ggaguaauuaagacauuuu

SEQ ID NO: 2297146 - RNA, 19 nt, Artificial Sequence
  Description of Artificial Sequence: Synthetic oligonucleotide
cauuaaaauugagggguuu

SEQ ID NO: 2297147 - RNA, 19 nt, Artificial Sequence
  Description of Artificial Sequence: Synthetic oligonucleotide
ggaagggaagauggcaucu

SEQ ID NO: 2297148 - RNA, 19 nt, Artificial Sequence
  Description of Artificial Sequence: Synthetic oligonucleotide
cguucguaagcuuauugcu

SEQ ID NO: 2297149 - RNA, 19 nt, Artificial Sequence
  Description of Artificial Sequence: Synthetic oligonucleotide
gagucggccucaguuuugu

SEQ ID NO: 2297150 - RNA, 19 nt, Artificial Sequence
  Description of Artificial Sequence: Synthetic oligonucleotide
cucguguugcuaacacccu

SEQ ID NO: 2297151 - RNA, 19 nt, Artificial Sequence
  Description of Artificial Sequence: Synthetic oligonucleotide
gagggugagccagcugaaa

SEQ ID NO: 2297152 - RNA, 19 nt, Artificial Sequence
  Description of Artificial Sequence: Synthetic oligonucleotide
guaugacaacagcuugaau

SEQ ID NO: 2297153 - RNA, 19 nt, Artificial Sequence
  Description of Artificial Sequence: Synthetic oligonucleotide
ggaaguacaguuggggauu

SEQ ID NO: 2297154 - RNA, 19 nt, Artificial Sequence
  Description of Artificial Sequence: Synthetic oligonucleotide
gaagggaagauggcaucuu

SEQ ID NO: 2297155 - RNA, 19 nt, Artificial Sequence
  Description of Artificial Sequence: Synthetic oligonucleotide
gcuuugagggugagccagc

SEQ ID NO: 2297156 - RNA, 19 nt, Artificial Sequence
  Description of Artificial Sequence: Synthetic oligonucleotide
cgagucaugacuggaguca

SEQ ID NO: 2297157 - RNA, 19 nt, Artificial Sequence
  Description of Artificial Sequence: Synthetic oligonucleotide
gcuccugucuacauugacu

SEQ ID NO: 2297158 - RNA, 19 nt, Artificial Sequence
  Description of Artificial Sequence: Synthetic oligonucleotide
acaggcuggcacguucgua

SEQ ID NO: 2297159 - RNA, 19 nt, Artificial Sequence
  Description of Artificial Sequence: Synthetic oligonucleotide
cguaagcuuauugcucuug

SEQ ID NO: 2297160 - RNA, 19 nt, Artificial Sequence
  Description of Artificial Sequence: Synthetic oligonucleotide
ccuuaaggcccgagucaug

SEQ ID NO: 2297161 - RNA, 19 nt, Artificial Sequence
  Description of Artificial Sequence: Synthetic oligonucleotide
gcuaccucuaaaugagcuu

SEQ ID NO: 2297162 - RNA, 19 nt, Artificial Sequence
  Description of Artificial Sequence: Synthetic oligonucleotide
cucaacugcugagcuaccu

SEQ ID NO: 2297163 - RNA, 19 nt, Artificial Sequence
  Description of Artificial Sequence: Synthetic oligonucleotide
cuuugagggugagccagcu

SEQ ID NO: 2297164 - RNA, 19 nt, Artificial Sequence
  Description of Artificial Sequence: Synthetic oligonucleotide
ggauucaagcucagguccu

SEQ ID NO: 2297165 - RNA, 19 nt, Artificial Sequence
  Description of Artificial Sequence: Synthetic oligonucleotide
agucggccucaguuuuguu

SEQ ID NO: 2297166 - RNA, 19 nt, Artificial Sequence
  Description of Artificial Sequence: Synthetic oligonucleotide
caggucugacagcaacugu

SEQ ID NO: 2297167 - RNA, 19 nt, Artificial Sequence
  Description of Artificial Sequence: Synthetic oligonucleotide
cagagucggccucaguuuu

SEQ ID NO: 2297168 - RNA, 19 nt, Artificial Sequence
  Description of Artificial Sequence: Synthetic oligonucleotide
gguuccaccugggcuccug

SEQ ID NO: 2297169 - RNA, 19 nt, Artificial Sequence
  Description of Artificial Sequence: Synthetic oligonucleotide
gggcuuugagggugagcca

SEQ ID NO: 2297170 - RNA, 19 nt, Artificial Sequence
  Description of Artificial Sequence: Synthetic oligonucleotide
ggugagccagcugaaacuu

SEQ ID NO: 2297171 - RNA, 19 nt, Artificial Sequence
  Description of Artificial Sequence: Synthetic oligonucleotide
ggaucccuccacagaguca

SEQ ID NO: 2297172 - RNA, 19 nt, Artificial Sequence
  Description of Artificial Sequence: Synthetic oligonucleotide
gggguuccaccugggcucc

SEQ ID NO: 2297173 - RNA, 19 nt, Artificial Sequence
  Description of Artificial Sequence: Synthetic oligonucleotide
ccacacucuauuuguccaa

SEQ ID NO: 2297174 - RNA, 19 nt, Artificial Sequence
  Description of Artificial Sequence: Synthetic oligonucleotide
gugugggaggaaguacagu

SEQ ID NO: 2297175 - RNA, 19 nt, Artificial Sequence
  Description of Artificial Sequence: Synthetic oligonucleotide
cuuucuccuuaaggcccga

SEQ ID NO: 2297176 - RNA, 19 nt, Artificial Sequence
  Description of Artificial Sequence: Synthetic oligonucleotide
gguuucagagugacacgcu

SEQ ID NO: 2297177 - RNA, 19 nt, Artificial Sequence
  Description of Artificial Sequence: Synthetic oligonucleotide
ccugucuacauugacuuuu

SEQ ID NO: 2297178 - RNA, 19 nt, Artificial Sequence
  Description of Artificial Sequence: Synthetic oligonucleotide
ccauggguuguuggagcac

SEQ ID NO: 2297179 - RNA, 19 nt, Artificial Sequence
  Description of Artificial Sequence: Synthetic oligonucleotide
ggguuugaucagucauugu

SEQ ID NO: 2297180 - RNA, 19 nt, Artificial Sequence
  Description of Artificial Sequence: Synthetic oligonucleotide
cagaucuaguuggcuuuua

SEQ ID NO: 2297181 - RNA, 19 nt, Artificial Sequence
  Description of Artificial Sequence: Synthetic oligonucleotide
ggcacguucguaagcuuau

SEQ ID NO: 2297182 - RNA, 19 nt, Artificial Sequence
  Description of Artificial Sequence: Synthetic oligonucleotide
ggcccgagucaugacugga

SEQ ID NO: 2297183 - RNA, 19 nt, Artificial Sequence
  Description of Artificial Sequence: Synthetic oligonucleotide
gggauucuccauggguugu

SEQ ID NO: 2297184 - RNA, 19 nt, Artificial Sequence
  Description of Artificial Sequence: Synthetic oligonucleotide
cacaggcuggcacguucgu

SEQ ID NO: 2297185 - RNA, 19 nt, Artificial Sequence
  Description of Artificial Sequence: Synthetic oligonucleotide
cggaguaauuaagacauuu

SEQ ID NO: 2297186 - RNA, 19 nt, Artificial Sequence
  Description of Artificial Sequence: Synthetic oligonucleotide
ccgcagaucuaguuggcuu

SEQ ID NO: 2297187 - RNA, 19 nt, Artificial Sequence
  Description of Artificial Sequence: Synthetic oligonucleotide
gugagccagcugaaacuuu

SEQ ID NO: 2297188 - RNA, 19 nt, Artificial Sequence
  Description of Artificial Sequence: Synthetic oligonucleotide
gcacguucguaagcuuauu

SEQ ID NO: 2297189 - RNA, 19 nt, Artificial Sequence
  Description of Artificial Sequence: Synthetic oligonucleotide
ccggaguaauuaagacauu

SEQ ID NO: 2297190 - RNA, 19 nt, Artificial Sequence
  Description of Artificial Sequence: Synthetic oligonucleotide
aaguucuugcacuaguagc

SEQ ID NO: 2297191 - RNA, 19 nt, Artificial Sequence
  Description of Artificial Sequence: Synthetic oligonucleotide
ucaauagucucccuggugg

SEQ ID NO: 2297192 - RNA, 19 nt, Artificial Sequence
  Description of Artificial Sequence: Synthetic oligonucleotide
aacauggucaaccauaagu

SEQ ID NO: 2297193 - RNA, 19 nt, Artificial Sequence
  Description of Artificial Sequence: Synthetic oligonucleotide
aaucuuuuaacucccacca

SEQ ID NO: 2297194 - RNA, 19 nt, Artificial Sequence
  Description of Artificial Sequence: Synthetic oligonucleotide
gacaaguucccauaggugg

SEQ ID NO: 2297195 - RNA, 19 nt, Artificial Sequence
  Description of Artificial Sequence: Synthetic oligonucleotide
aauuaaucuuuuaacuccc

SEQ ID NO: 2297196 - RNA, 19 nt, Artificial Sequence
  Description of Artificial Sequence: Synthetic oligonucleotide
caauuaaucuuuuaacucc

SEQ ID NO: 2297197 - RNA, 19 nt, Artificial Sequence
  Description of Artificial Sequence: Synthetic oligonucleotide
auuaugaagacuauggaag

SEQ ID NO: 2297198 - RNA, 19 nt, Artificial Sequence
  Description of Artificial Sequence: Synthetic oligonucleotide
uuugagugaguccagggag

SEQ ID NO: 2297199 - RNA, 19 nt, Artificial Sequence
  Description of Artificial Sequence: Synthetic oligonucleotide
ugcaauuaaucuuuuaacu

SEQ ID NO: 2297200 - RNA, 19 nt, Artificial Sequence
  Description of Artificial Sequence: Synthetic oligonucleotide
uauugaaauguacauauua

SEQ ID NO: 2297201 - RNA, 19 nt, Artificial Sequence
  Description of Artificial Sequence: Synthetic oligonucleotide
cauaccaaagcauagaaga

SEQ ID NO: 2297202 - RNA, 19 nt, Artificial Sequence
  Description of Artificial Sequence: Synthetic oligonucleotide
auagaagaucauuugagug

SEQ ID NO: 2297203 - RNA, 19 nt, Artificial Sequence
  Description of Artificial Sequence: Synthetic oligonucleotide
cauauuaugaguaacaagu

SEQ ID NO: 2297204 - RNA, 19 nt, Artificial Sequence
  Description of Artificial Sequence: Synthetic oligonucleotide
uauuaugaguaacaaguga

SEQ ID NO: 2297205 - RNA, 19 nt, Artificial Sequence
  Description of Artificial Sequence: Synthetic oligonucleotide
uugaaauguacauauuaug

SEQ ID NO: 2297206 - RNA, 19 nt, Artificial Sequence
  Description of Artificial Sequence: Synthetic oligonucleotide
aauggcucaucuuccuacc

SEQ ID NO: 2297207 - RNA, 19 nt, Artificial Sequence
  Description of Artificial Sequence: Synthetic oligonucleotide
agauuucucuucuuuggcc

SEQ ID NO: 2297208 - RNA, 19 nt, Artificial Sequence
  Description of Artificial Sequence: Synthetic oligonucleotide
gauaucaucauauaccugu

SEQ ID NO: 2297209 - RNA, 19 nt, Artificial Sequence
  Description of Artificial Sequence: Synthetic oligonucleotide
accauugagauguuuauug

SEQ ID NO: 2297210 - RNA, 19 nt, Artificial Sequence
  Description of Artificial Sequence: Synthetic oligonucleotide
ucauauaccuguuucuuug

SEQ ID NO: 2297211 - RNA, 19 nt, Artificial Sequence
  Description of Artificial Sequence: Synthetic oligonucleotide
uaaucuuuuaacucccacc

SEQ ID NO: 2297212 - RNA, 19 nt, Artificial Sequence
  Description of Artificial Sequence: Synthetic oligonucleotide
uucuuuacagguauugaca

SEQ ID NO: 2297213 - RNA, 19 nt, Artificial Sequence
  Description of Artificial Sequence: Synthetic oligonucleotide
uagaagaucauuugaguga

SEQ ID NO: 2297214 - RNA, 19 nt, Artificial Sequence
  Description of Artificial Sequence: Synthetic oligonucleotide
uaacaagugaucuugcagu

SEQ ID NO: 2297215 - RNA, 19 nt, Artificial Sequence
  Description of Artificial Sequence: Synthetic oligonucleotide
cuugcaguggcccagguag

SEQ ID NO: 2297216 - RNA, 19 nt, Artificial Sequence
  Description of Artificial Sequence: Synthetic oligonucleotide
ucaaccauaagugagcggu

SEQ ID NO: 2297217 - RNA, 19 nt, Artificial Sequence
  Description of Artificial Sequence: Synthetic oligonucleotide
ugaguaacaagugaucuug

SEQ ID NO: 2297218 - RNA, 19 nt, Artificial Sequence
  Description of Artificial Sequence: Synthetic oligonucleotide
agaucauuugagugagucc

SEQ ID NO: 2297219 - RNA, 19 nt, Artificial Sequence
  Description of Artificial Sequence: Synthetic oligonucleotide
gaaguuggggcucuagggg

SEQ ID NO: 2297220 - RNA, 19 nt, Artificial Sequence
  Description of Artificial Sequence: Synthetic oligonucleotide
uguuccagaggucucagca

SEQ ID NO: 2297221 - RNA, 19 nt, Artificial Sequence
  Description of Artificial Sequence: Synthetic oligonucleotide
acggcaauccuccaaugcc

SEQ ID NO: 2297222 - RNA, 19 nt, Artificial Sequence
  Description of Artificial Sequence: Synthetic oligonucleotide
acugaccucaguaacaugg

SEQ ID NO: 2297223 - RNA, 19 nt, Artificial Sequence
  Description of Artificial Sequence: Synthetic oligonucleotide
acauauuaugaguaacaag

SEQ ID NO: 2297224 - RNA, 19 nt, Artificial Sequence
  Description of Artificial Sequence: Synthetic oligonucleotide
gauuaugaagacuauggaa

SEQ ID NO: 2297225 - RNA, 19 nt, Artificial Sequence
  Description of Artificial Sequence: Synthetic oligonucleotide
augaagacuauggaagccc

SEQ ID NO: 2297226 - RNA, 19 nt, Artificial Sequence
  Description of Artificial Sequence: Synthetic oligonucleotide
guaacaagugaucuugcag

SEQ ID NO: 2297227 - RNA, 19 nt, Artificial Sequence
  Description of Artificial Sequence: Synthetic oligonucleotide
aacaagugaucuugcagug

SEQ ID NO: 2297228 - RNA, 19 nt, Artificial Sequence
  Description of Artificial Sequence: Synthetic oligonucleotide
guggaugacccacugaagg

SEQ ID NO: 2297229 - RNA, 19 nt, Artificial Sequence
  Description of Artificial Sequence: Synthetic oligonucleotide
uuuaacucccaccauccac

SEQ ID NO: 2297230 - RNA, 19 nt, Artificial Sequence
  Description of Artificial Sequence: Synthetic oligonucleotide
ugagauguuuauugaaaug

SEQ ID NO: 2297231 - RNA, 19 nt, Artificial Sequence
  Description of Artificial Sequence: Synthetic oligonucleotide
uaugaguaacaagugaucu

SEQ ID NO: 2297232 - RNA, 19 nt, Artificial Sequence
  Description of Artificial Sequence: Synthetic oligonucleotide
auagagcuccgccaucucc

SEQ ID NO: 2297233 - RNA, 19 nt, Artificial Sequence
  Description of Artificial Sequence: Synthetic oligonucleotide
auaagagaacugcggaggg

SEQ ID NO: 2297234 - RNA, 19 nt, Artificial Sequence
  Description of Artificial Sequence: Synthetic oligonucleotide
acuauggaagcccaguacu

SEQ ID NO: 2297235 - RNA, 19 nt, Artificial Sequence
  Description of Artificial Sequence: Synthetic oligonucleotide
gaaguuucugaaguugggg

SEQ ID NO: 2297236 - RNA, 19 nt, Artificial Sequence
  Description of Artificial Sequence: Synthetic oligonucleotide
ucagaauggcucaucuucc

SEQ ID NO: 2297237 - RNA, 19 nt, Artificial Sequence
  Description of Artificial Sequence: Synthetic oligonucleotide
aauguacauauuaugagua

SEQ ID NO: 2297238 - RNA, 19 nt, Artificial Sequence
  Description of Artificial Sequence: Synthetic oligonucleotide
agcggugaaugucaucugc

SEQ ID NO: 2297239 - RNA, 19 nt, Artificial Sequence
  Description of Artificial Sequence: Synthetic oligonucleotide
acucccaccauugagaugu

SEQ ID NO: 2297240 - RNA, 19 nt, Artificial Sequence
  Description of Artificial Sequence: Synthetic oligonucleotide
acaggaucaauagucuccc

SEQ ID NO: 2297241 - RNA, 19 nt, Artificial Sequence
  Description of Artificial Sequence: Synthetic oligonucleotide
uuaugaguaacaagugauc

SEQ ID NO: 2297242 - RNA, 19 nt, Artificial Sequence
  Description of Artificial Sequence: Synthetic oligonucleotide
uagauuucucuucuuuggc

SEQ ID NO: 2297243 - RNA, 19 nt, Artificial Sequence
  Description of Artificial Sequence: Synthetic oligonucleotide
cugcaauuaaucuuuuaac

SEQ ID NO: 2297244 - RNA, 19 nt, Artificial Sequence
  Description of Artificial Sequence: Synthetic oligonucleotide
aggggauccauccugcggg

SEQ ID NO: 2297245 - RNA, 19 nt, Artificial Sequence
  Description of Artificial Sequence: Synthetic oligonucleotide
auaccuguuucuuugugug

SEQ ID NO: 2297246 - RNA, 19 nt, Artificial Sequence
  Description of Artificial Sequence: Synthetic oligonucleotide
uguacauauuaugaguaac

SEQ ID NO: 2297247 - RNA, 19 nt, Artificial Sequence
  Description of Artificial Sequence: Synthetic oligonucleotide
agcauagaagaucauuuga

SEQ ID NO: 2297248 - RNA, 19 nt, Artificial Sequence
  Description of Artificial Sequence: Synthetic oligonucleotide
aguucccauagguggaggc

SEQ ID NO: 2297249 - RNA, 19 nt, Artificial Sequence
  Description of Artificial Sequence: Synthetic oligonucleotide
agaagaucauuugagugag

SEQ ID NO: 2297250 - RNA, 19 nt, Artificial Sequence
  Description of Artificial Sequence: Synthetic oligonucleotide
uggucaaccauaagugagc

SEQ ID NO: 2297251 - RNA, 19 nt, Artificial Sequence
  Description of Artificial Sequence: Synthetic oligonucleotide
aagccuuacuugaaggagg

SEQ ID NO: 2297252 - RNA, 19 nt, Artificial Sequence
  Description of Artificial Sequence: Synthetic oligonucleotide
auuaugaguaacaagugau

SEQ ID NO: 2297253 - RNA, 19 nt, Artificial Sequence
  Description of Artificial Sequence: Synthetic oligonucleotide
ucuuaguaaggggugugcg

SEQ ID NO: 2297254 - RNA, 19 nt, Artificial Sequence
  Description of Artificial Sequence: Synthetic oligonucleotide
ugguguaaaaguucuugca

SEQ ID NO: 2297255 - RNA, 19 nt, Artificial Sequence
  Description of Artificial Sequence: Synthetic oligonucleotide
uccauaccaaagcauagaa

SEQ ID NO: 2297256 - RNA, 19 nt, Artificial Sequence
  Description of Artificial Sequence: Synthetic oligonucleotide
aacugcggagggucguucc

SEQ ID NO: 2297257 - RNA, 19 nt, Artificial Sequence
  Description of Artificial Sequence: Synthetic oligonucleotide
gcugauaucaucauauacc

SEQ ID NO: 2297258 - RNA, 19 nt, Artificial Sequence
  Description of Artificial Sequence: Synthetic oligonucleotide
agcccacuguuccugaagc

SEQ ID NO: 2297259 - RNA, 19 nt, Artificial Sequence
  Description of Artificial Sequence: Synthetic oligonucleotide
aggacaaguucccauaggu

SEQ ID NO: 2297260 - RNA, 19 nt, Artificial Sequence
  Description of Artificial Sequence: Synthetic oligonucleotide
uugagauguuuauugaaau

SEQ ID NO: 2297261 - RNA, 19 nt, Artificial Sequence
  Description of Artificial Sequence: Synthetic oligonucleotide
gagucugcagcccauaaga

SEQ ID NO: 2297262 - RNA, 19 nt, Artificial Sequence
  Description of Artificial Sequence: Synthetic oligonucleotide
uguaaaaguucuugcacua

SEQ ID NO: 2297263 - RNA, 19 nt, Artificial Sequence
  Description of Artificial Sequence: Synthetic oligonucleotide
cauuugagugaguccaggg

SEQ ID NO: 2297264 - RNA, 19 nt, Artificial Sequence
  Description of Artificial Sequence: Synthetic oligonucleotide
acagguauugacagcuucc

SEQ ID NO: 2297265 - RNA, 19 nt, Artificial Sequence
  Description of Artificial Sequence: Synthetic oligonucleotide
gaagccuuacuugaaggag

SEQ ID NO: 2297266 - RNA, 19 nt, Artificial Sequence
  Description of Artificial Sequence: Synthetic oligonucleotide
ugcacuaguagcgccaucc

SEQ ID NO: 2297267 - RNA, 19 nt, Artificial Sequence
  Description of Artificial Sequence: Synthetic oligonucleotide
aguagcgccauccucuucu

SEQ ID NO: 2297268 - RNA, 19 nt, Artificial Sequence
  Description of Artificial Sequence: Synthetic oligonucleotide
gaauggcucaucuuccuac

SEQ ID NO: 2297269 - RNA, 19 nt, Artificial Sequence
  Description of Artificial Sequence: Synthetic oligonucleotide
gaggaaaggccuuccauac

SEQ ID NO: 2297270 - RNA, 19 nt, Artificial Sequence
  Description of Artificial Sequence: Synthetic oligonucleotide
aggaucaauagucucccug

SEQ ID NO: 2297271 - RNA, 19 nt, Artificial Sequence
  Description of Artificial Sequence: Synthetic oligonucleotide
guaaugggagccaagugag

SEQ ID NO: 2297272 - RNA, 19 nt, Artificial Sequence
  Description of Artificial Sequence: Synthetic oligonucleotide
agccaagugaggaaaggcc

SEQ ID NO: 2297273 - RNA, 19 nt, Artificial Sequence
  Description of Artificial Sequence: Synthetic oligonucleotide
aggggugugcguuuggguc

SEQ ID NO: 2297274 - RNA, 19 nt, Artificial Sequence
  Description of Artificial Sequence: Synthetic oligonucleotide
uuccagaggucucagcaca

SEQ ID NO: 2297275 - RNA, 19 nt, Artificial Sequence
  Description of Artificial Sequence: Synthetic oligonucleotide
ucagacucagggacugggg

SEQ ID NO: 2297276 - RNA, 19 nt, Artificial Sequence
  Description of Artificial Sequence: Synthetic oligonucleotide
cuuccauaccaaagcauag

SEQ ID NO: 2297277 - RNA, 19 nt, Artificial Sequence
  Description of Artificial Sequence: Synthetic oligonucleotide
cauaagugagcggugaaug

SEQ ID NO: 2297278 - RNA, 19 nt, Artificial Sequence
  Description of Artificial Sequence: Synthetic oligonucleotide
gagauguuuauugaaaugu

SEQ ID NO: 2297279 - RNA, 19 nt, Artificial Sequence
  Description of Artificial Sequence: Synthetic oligonucleotide
auugaaauguacauauuau

SEQ ID NO: 2297280 - RNA, 19 nt, Artificial Sequence
  Description of Artificial Sequence: Synthetic oligonucleotide
gcaauuaaucuuuuaacuc

SEQ ID NO: 2297281 - RNA, 19 nt, Artificial Sequence
  Description of Artificial Sequence: Synthetic oligonucleotide
ucucaggugucacuguaga

SEQ ID NO: 2297282 - RNA, 19 nt, Artificial Sequence
  Description of Artificial Sequence: Synthetic oligonucleotide
aguaacaagugaucuugca

SEQ ID NO: 2297283 - RNA, 19 nt, Artificial Sequence
  Description of Artificial Sequence: Synthetic oligonucleotide
ucuugcacuaguagcgcca

SEQ ID NO: 2297284 - RNA, 19 nt, Artificial Sequence
  Description of Artificial Sequence: Synthetic oligonucleotide
ugauaucaucauauaccug

SEQ ID NO: 2297285 - RNA, 19 nt, Artificial Sequence
  Description of Artificial Sequence: Synthetic oligonucleotide
ugaggaaaggccuuccaua

SEQ ID NO: 2297286 - RNA, 19 nt, Artificial Sequence
  Description of Artificial Sequence: Synthetic oligonucleotide
gaugacccacugaaggugg

SEQ ID NO: 2297287 - RNA, 19 nt, Artificial Sequence
  Description of Artificial Sequence: Synthetic oligonucleotide
gguaaugggagccaaguga

SEQ ID NO: 2297288 - RNA, 19 nt, Artificial Sequence
  Description of Artificial Sequence: Synthetic oligonucleotide
ucauuugagugaguccagg

SEQ ID NO: 2297289 - RNA, 19 nt, Artificial Sequence
  Description of Artificial Sequence: Synthetic oligonucleotide
auauuaugaguaacaagug

SEQ ID NO: 2297290 - RNA, 19 nt, Artificial Sequence
  Description of Artificial Sequence: Synthetic oligonucleotide
aagacuauggaagcccagu

SEQ ID NO: 2297291 - RNA, 19 nt, Artificial Sequence
  Description of Artificial Sequence: Synthetic oligonucleotide
cuuuacagguauugacagc

SEQ ID NO: 2297292 - RNA, 19 nt, Artificial Sequence
  Description of Artificial Sequence: Synthetic oligonucleotide
auggucaaccauaagugag

SEQ ID NO: 2297293 - RNA, 19 nt, Artificial Sequence
  Description of Artificial Sequence: Synthetic oligonucleotide
uacagguauugacagcuuc

SEQ ID NO: 2297294 - RNA, 19 nt, Artificial Sequence
  Description of Artificial Sequence: Synthetic oligonucleotide
aguggugguguaaaaguuc

SEQ ID NO: 2297295 - RNA, 19 nt, Artificial Sequence
  Description of Artificial Sequence: Synthetic oligonucleotide
auaagugagcggugaaugu

SEQ ID NO: 2297296 - RNA, 19 nt, Artificial Sequence
  Description of Artificial Sequence: Synthetic oligonucleotide
gacuauggaagcccaguac

SEQ ID NO: 2297297 - RNA, 19 nt, Artificial Sequence
  Description of Artificial Sequence: Synthetic oligonucleotide
uugagugaguccagggaga

SEQ ID NO: 2297298 - RNA, 19 nt, Artificial Sequence
  Description of Artificial Sequence: Synthetic oligonucleotide
cugaaguuggggcucuagg

SEQ ID NO: 2297299 - RNA, 19 nt, Artificial Sequence
  Description of Artificial Sequence: Synthetic oligonucleotide
acuaguagcgccauccucu

SEQ ID NO: 2297300 - RNA, 19 nt, Artificial Sequence
  Description of Artificial Sequence: Synthetic oligonucleotide
ucuucuuuacagguauuga

SEQ ID NO: 2297301 - RNA, 19 nt, Artificial Sequence
  Description of Artificial Sequence: Synthetic oligonucleotide
auauaccuguuucuuugug

SEQ ID NO: 2297302 - RNA, 19 nt, Artificial Sequence
  Description of Artificial Sequence: Synthetic oligonucleotide
ucuuuggccuccucugaag

SEQ ID NO: 2297303 - RNA, 19 nt, Artificial Sequence
  Description of Artificial Sequence: Synthetic oligonucleotide
uuuuaacucccaccaucca

SEQ ID NO: 2297304 - RNA, 19 nt, Artificial Sequence
  Description of Artificial Sequence: Synthetic oligonucleotide
gugaaugucaucugcugca

SEQ ID NO: 2297305 - RNA, 19 nt, Artificial Sequence
  Description of Artificial Sequence: Synthetic oligonucleotide
aguaacauggucaaccaua

SEQ ID NO: 2297306 - RNA, 19 nt, Artificial Sequence
  Description of Artificial Sequence: Synthetic oligonucleotide
gguauugacagcuucccuc

SEQ ID NO: 2297307 - RNA, 19 nt, Artificial Sequence
  Description of Artificial Sequence: Synthetic oligonucleotide
aucaauagucucccuggug

SEQ ID NO: 2297308 - RNA, 19 nt, Artificial Sequence
  Description of Artificial Sequence: Synthetic oligonucleotide
guacauauuaugaguaaca

SEQ ID NO: 2297309 - RNA, 19 nt, Artificial Sequence
  Description of Artificial Sequence: Synthetic oligonucleotide
ugcguuuggguccaccagu

SEQ ID NO: 2297310 - RNA, 19 nt, Artificial Sequence
  Description of Artificial Sequence: Synthetic oligonucleotide
uaccaaagcauagaagauc

SEQ ID NO: 2297311 - RNA, 19 nt, Artificial Sequence
  Description of Artificial Sequence: Synthetic oligonucleotide
ugugcguuuggguccacca

SEQ ID NO: 2297312 - RNA, 19 nt, Artificial Sequence
  Description of Artificial Sequence: Synthetic oligonucleotide
uaccuguuucuuugugugg

SEQ ID NO: 2297313 - RNA, 19 nt, Artificial Sequence
  Description of Artificial Sequence: Synthetic oligonucleotide
ccuuacuugaaggaggugg

SEQ ID NO: 2297314 - RNA, 19 nt, Artificial Sequence
  Description of Artificial Sequence: Synthetic oligonucleotide
auugagauguuuauugaaa

SEQ ID NO: 2297315 - RNA, 19 nt, Artificial Sequence
  Description of Artificial Sequence: Synthetic oligonucleotide
uuucuuuguguggccacgg

SEQ ID NO: 2297316 - RNA, 19 nt, Artificial Sequence
  Description of Artificial Sequence: Synthetic oligonucleotide
cuauggaagcccaguacug

SEQ ID NO: 2297317 - RNA, 19 nt, Artificial Sequence
  Description of Artificial Sequence: Synthetic oligonucleotide
gauuucucuucuuuggccu

SEQ ID NO: 2297318 - RNA, 19 nt, Artificial Sequence
  Description of Artificial Sequence: Synthetic oligonucleotide
uacuugaaggagguggaug

SEQ ID NO: 2297319 - RNA, 19 nt, Artificial Sequence
  Description of Artificial Sequence: Synthetic oligonucleotide
ucacuguagauuucucuuc

SEQ ID NO: 2297320 - RNA, 19 nt, Artificial Sequence
  Description of Artificial Sequence: Synthetic oligonucleotide
ucaggugucacuguagauu

SEQ ID NO: 2297321 - RNA, 19 nt, Artificial Sequence
  Description of Artificial Sequence: Synthetic oligonucleotide
cuuccuacccacucccacc

SEQ ID NO: 2297322 - RNA, 19 nt, Artificial Sequence
  Description of Artificial Sequence: Synthetic oligonucleotide
ucuuccuacccacucccac

SEQ ID NO: 2297323 - RNA, 19 nt, Artificial Sequence
  Description of Artificial Sequence: Synthetic oligonucleotide
uccucuuuucugcaauuaa

SEQ ID NO: 2297324 - RNA, 19 nt, Artificial Sequence
  Description of Artificial Sequence: Synthetic oligonucleotide
cccaacaggaucaauaguc

SEQ ID NO: 2297325 - RNA, 19 nt, Artificial Sequence
  Description of Artificial Sequence: Synthetic oligonucleotide
cugauaucaucauauaccu

SEQ ID NO: 2297326 - RNA, 19 nt, Artificial Sequence
  Description of Artificial Sequence: Synthetic oligonucleotide
gcauagaagaucauuugag

SEQ ID NO: 2297327 - RNA, 19 nt, Artificial Sequence
  Description of Artificial Sequence: Synthetic oligonucleotide
ucucccuggugguaauggg

SEQ ID NO: 2297328 - RNA, 19 nt, Artificial Sequence
  Description of Artificial Sequence: Synthetic oligonucleotide
uuccuacccacucccacca

SEQ ID NO: 2297329 - RNA, 19 nt, Artificial Sequence
  Description of Artificial Sequence: Synthetic oligonucleotide
guugcccggcuucacauag

SEQ ID NO: 2297330 - RNA, 19 nt, Artificial Sequence
  Description of Artificial Sequence: Synthetic oligonucleotide
uaaggggugugcguuuggg

SEQ ID NO: 2297331 - RNA, 19 nt, Artificial Sequence
  Description of Artificial Sequence: Synthetic oligonucleotide
aaccauaagugagcgguga

SEQ ID NO: 2297332 - RNA, 19 nt, Artificial Sequence
  Description of Artificial Sequence: Synthetic oligonucleotide
gaccucaguaacaugguca

SEQ ID NO: 2297333 - RNA, 19 nt, Artificial Sequence
  Description of Artificial Sequence: Synthetic oligonucleotide
uucuugcacuaguagcgcc

SEQ ID NO: 2297334 - RNA, 19 nt, Artificial Sequence
  Description of Artificial Sequence: Synthetic oligonucleotide
auguacauauuaugaguaa

SEQ ID NO: 2297335 - RNA, 19 nt, Artificial Sequence
  Description of Artificial Sequence: Synthetic oligonucleotide
ggugaaugucaucugcugc

SEQ ID NO: 2297336 - RNA, 19 nt, Artificial Sequence
  Description of Artificial Sequence: Synthetic oligonucleotide
cagcccauaagagaacugc

SEQ ID NO: 2297337 - RNA, 19 nt, Artificial Sequence
  Description of Artificial Sequence: Synthetic oligonucleotide
aagugagcggugaauguca

SEQ ID NO: 2297338 - RNA, 19 nt, Artificial Sequence
  Description of Artificial Sequence: Synthetic oligonucleotide
guaaaaguucuugcacuag

SEQ ID NO: 2297339 - RNA, 19 nt, Artificial Sequence
  Description of Artificial Sequence: Synthetic oligonucleotide
aaaggccuuccauaccaaa

SEQ ID NO: 2297340 - RNA, 19 nt, Artificial Sequence
  Description of Artificial Sequence: Synthetic oligonucleotide
uuccauaccaaagcauaga

SEQ ID NO: 2297341 - RNA, 19 nt, Artificial Sequence
  Description of Artificial Sequence: Synthetic oligonucleotide
uggcucaucuuccuaccca

SEQ ID NO: 2297342 - RNA, 19 nt, Artificial Sequence
  Description of Artificial Sequence: Synthetic oligonucleotide
uaacauggucaaccauaag

SEQ ID NO: 2297343 - RNA, 19 nt, Artificial Sequence
  Description of Artificial Sequence: Synthetic oligonucleotide
uggaagcccaguacugucu

SEQ ID NO: 2297344 - RNA, 19 nt, Artificial Sequence
  Description of Artificial Sequence: Synthetic oligonucleotide
acaagugaucuugcagugg

SEQ ID NO: 2297345 - RNA, 19 nt, Artificial Sequence
  Description of Artificial Sequence: Synthetic oligonucleotide
uuccgcaccgccagcgggg

SEQ ID NO: 2297346 - RNA, 19 nt, Artificial Sequence
  Description of Artificial Sequence: Synthetic oligonucleotide
aucauauaccuguuucuuu

SEQ ID NO: 2297347 - RNA, 19 nt, Artificial Sequence
  Description of Artificial Sequence: Synthetic oligonucleotide
ggugguguaaaaguucuug

SEQ ID NO: 2297348 - RNA, 19 nt, Artificial Sequence
  Description of Artificial Sequence: Synthetic oligonucleotide
ggaaaggccuuccauacca

SEQ ID NO: 2297349 - RNA, 19 nt, Artificial Sequence
  Description of Artificial Sequence: Synthetic oligonucleotide
cauugagauguuuauugaa

SEQ ID NO: 2297350 - RNA, 19 nt, Artificial Sequence
  Description of Artificial Sequence: Synthetic oligonucleotide
ggcugauaucaucauauac

SEQ ID NO: 2297351 - RNA, 19 nt, Artificial Sequence
  Description of Artificial Sequence: Synthetic oligonucleotide
augaguaacaagugaucuu

SEQ ID NO: 2297352 - RNA, 19 nt, Artificial Sequence
  Description of Artificial Sequence: Synthetic oligonucleotide
cucuaggggauccauccug

SEQ ID NO: 2297353 - RNA, 19 nt, Artificial Sequence
  Description of Artificial Sequence: Synthetic oligonucleotide
ggcucuaggggauccaucc

SEQ ID NO: 2297354 - RNA, 19 nt, Artificial Sequence
  Description of Artificial Sequence: Synthetic oligonucleotide
aaugccuguuccagagguc

SEQ ID NO: 2297355 - RNA, 19 nt, Artificial Sequence
  Description of Artificial Sequence: Synthetic oligonucleotide
cacggcaauccuccaaugc

SEQ ID NO: 2297356 - RNA, 19 nt, Artificial Sequence
  Description of Artificial Sequence: Synthetic oligonucleotide
uucuuuguguggccacggc

SEQ ID NO: 2297357 - RNA, 19 nt, Artificial Sequence
  Description of Artificial Sequence: Synthetic oligonucleotide
guguaaaaguucuugcacu

SEQ ID NO: 2297358 - RNA, 19 nt, Artificial Sequence
  Description of Artificial Sequence: Synthetic oligonucleotide
accauccacugacugaccu

SEQ ID NO: 2297359 - RNA, 19 nt, Artificial Sequence
  Description of Artificial Sequence: Synthetic oligonucleotide
caacaggaucaauagucuc

SEQ ID NO: 2297360 - RNA, 19 nt, Artificial Sequence
  Description of Artificial Sequence: Synthetic oligonucleotide
accccaggauuaugaagac

SEQ ID NO: 2297361 - RNA, 19 nt, Artificial Sequence
  Description of Artificial Sequence: Synthetic oligonucleotide
cagguauugacagcuuccc

SEQ ID NO: 2297362 - RNA, 19 nt, Artificial Sequence
  Description of Artificial Sequence: Synthetic oligonucleotide
cauagaagaucauuugagu

SEQ ID NO: 2297363 - RNA, 19 nt, Artificial Sequence
  Description of Artificial Sequence: Synthetic oligonucleotide
cauggucaaccauaaguga

SEQ ID NO: 2297364 - RNA, 19 nt, Artificial Sequence
  Description of Artificial Sequence: Synthetic oligonucleotide
ugaccucaguaacaugguc

SEQ ID NO: 2297365 - RNA, 19 nt, Artificial Sequence
  Description of Artificial Sequence: Synthetic oligonucleotide
ggcccaacaggaucaauag

SEQ ID NO: 2297366 - RNA, 19 nt, Artificial Sequence
  Description of Artificial Sequence: Synthetic oligonucleotide
agcccauaagagaacugcg

SEQ ID NO: 2297367 - RNA, 19 nt, Artificial Sequence
  Description of Artificial Sequence: Synthetic oligonucleotide
ggauuaugaagacuaugga

SEQ ID NO: 2297368 - RNA, 19 nt, Artificial Sequence
  Description of Artificial Sequence: Synthetic oligonucleotide
ucugaaguuggggcucuag

SEQ ID NO: 2297369 - RNA, 19 nt, Artificial Sequence
  Description of Artificial Sequence: Synthetic oligonucleotide
uuggccuccucugaagaca

SEQ ID NO: 2297370 - RNA, 19 nt, Artificial Sequence
  Description of Artificial Sequence: Synthetic oligonucleotide
ugacugaccucaguaacau

SEQ ID NO: 2297371 - RNA, 19 nt, Artificial Sequence
  Description of Artificial Sequence: Synthetic oligonucleotide
gucaaccauaagugagcgg

SEQ ID NO: 2297372 - RNA, 19 nt, Artificial Sequence
  Description of Artificial Sequence: Synthetic oligonucleotide
aggucucagcacaucuucc

SEQ ID NO: 2297373 - RNA, 19 nt, Artificial Sequence
  Description of Artificial Sequence: Synthetic oligonucleotide
caggacaaguucccauagg

SEQ ID NO: 2297374 - RNA, 19 nt, Artificial Sequence
  Description of Artificial Sequence: Synthetic oligonucleotide
agagcuccgccaucuccac

SEQ ID NO: 2297375 - RNA, 19 nt, Artificial Sequence
  Description of Artificial Sequence: Synthetic oligonucleotide
agugaggaaaggccuucca

SEQ ID NO: 2297376 - RNA, 19 nt, Artificial Sequence
  Description of Artificial Sequence: Synthetic oligonucleotide
uucccauagguggaggccu

SEQ ID NO: 2297377 - RNA, 19 nt, Artificial Sequence
  Description of Artificial Sequence: Synthetic oligonucleotide
ggucaaccauaagugagcg

SEQ ID NO: 2297378 - RNA, 19 nt, Artificial Sequence
  Description of Artificial Sequence: Synthetic oligonucleotide
guaggaucuuuggucaggc

SEQ ID NO: 2297379 - RNA, 19 nt, Artificial Sequence
  Description of Artificial Sequence: Synthetic oligonucleotide
ugcagcccauaagagaacu

SEQ ID NO: 2297380 - RNA, 19 nt, Artificial Sequence
  Description of Artificial Sequence: Synthetic oligonucleotide
uccuccaaugccuguucca

SEQ ID NO: 2297381 - RNA, 19 nt, Artificial Sequence
  Description of Artificial Sequence: Synthetic oligonucleotide
gaagacuauggaagcccag

SEQ ID NO: 2297382 - RNA, 19 nt, Artificial Sequence
  Description of Artificial Sequence: Synthetic oligonucleotide
caagcggcggcugauauca

SEQ ID NO: 2297383 - RNA, 19 nt, Artificial Sequence
  Description of Artificial Sequence: Synthetic oligonucleotide
cuaggggauccauccugcg

SEQ ID NO: 2297384 - RNA, 19 nt, Artificial Sequence
  Description of Artificial Sequence: Synthetic oligonucleotide
ccauaagagaacugcggag

SEQ ID NO: 2297385 - RNA, 19 nt, Artificial Sequence
  Description of Artificial Sequence: Synthetic oligonucleotide
cugacugaccucaguaaca

SEQ ID NO: 2297386 - RNA, 19 nt, Artificial Sequence
  Description of Artificial Sequence: Synthetic oligonucleotide
cucuuaguaaggggugugc

SEQ ID NO: 2297387 - RNA, 19 nt, Artificial Sequence
  Description of Artificial Sequence: Synthetic oligonucleotide
uuguugcccggcuucacau

SEQ ID NO: 2297388 - RNA, 19 nt, Artificial Sequence
  Description of Artificial Sequence: Synthetic oligonucleotide
guaacauggucaaccauaa

SEQ ID NO: 2297389 - RNA, 19 nt, Artificial Sequence
  Description of Artificial Sequence: Synthetic oligonucleotide
agucugagucugcagccca

SEQ ID NO: 2297390 - RNA, 19 nt, Artificial Sequence
  Description of Artificial Sequence: Synthetic oligonucleotide
guuccagaggucucagcac

SEQ ID NO: 2297391 - RNA, 19 nt, Artificial Sequence
  Description of Artificial Sequence: Synthetic oligonucleotide
ugagugaguccagggagac

SEQ ID NO: 2297392 - RNA, 19 nt, Artificial Sequence
  Description of Artificial Sequence: Synthetic oligonucleotide
uccacugacugaccucagu

SEQ ID NO: 2297393 - RNA, 19 nt, Artificial Sequence
  Description of Artificial Sequence: Synthetic oligonucleotide
agacuauggaagcccagua

SEQ ID NO: 2297394 - RNA, 19 nt, Artificial Sequence
  Description of Artificial Sequence: Synthetic oligonucleotide
cacaccaguagcaggacaa

SEQ ID NO: 2297395 - RNA, 19 nt, Artificial Sequence
  Description of Artificial Sequence: Synthetic oligonucleotide
augccuguuccagaggucu

SEQ ID NO: 2297396 - RNA, 19 nt, Artificial Sequence
  Description of Artificial Sequence: Synthetic oligonucleotide
agguauugacagcuucccu

SEQ ID NO: 2297397 - RNA, 19 nt, Artificial Sequence
  Description of Artificial Sequence: Synthetic oligonucleotide
uuuguguggccacggcaau

SEQ ID NO: 2297398 - RNA, 19 nt, Artificial Sequence
  Description of Artificial Sequence: Synthetic oligonucleotide
uaagagaacugcggagggu

SEQ ID NO: 2297399 - RNA, 19 nt, Artificial Sequence
  Description of Artificial Sequence: Synthetic oligonucleotide
agccgcguucuuuguugcc

SEQ ID NO: 2297400 - RNA, 19 nt, Artificial Sequence
  Description of Artificial Sequence: Synthetic oligonucleotide
auaccaaagcauagaagau

SEQ ID NO: 2297401 - RNA, 19 nt, Artificial Sequence
  Description of Artificial Sequence: Synthetic oligonucleotide
caaccauaagugagcggug

SEQ ID NO: 2297402 - RNA, 19 nt, Artificial Sequence
  Description of Artificial Sequence: Synthetic oligonucleotide
ccauaccaaagcauagaag

SEQ ID NO: 2297403 - RNA, 19 nt, Artificial Sequence
  Description of Artificial Sequence: Synthetic oligonucleotide
cuuccgcaccgccagcggg

SEQ ID NO: 2297404 - RNA, 19 nt, Artificial Sequence
  Description of Artificial Sequence: Synthetic oligonucleotide
guaaggggugugcguuugg

SEQ ID NO: 2297405 - RNA, 19 nt, Artificial Sequence
  Description of Artificial Sequence: Synthetic oligonucleotide
guucccauagguggaggcc

SEQ ID NO: 2297406 - RNA, 19 nt, Artificial Sequence
  Description of Artificial Sequence: Synthetic oligonucleotide
aauagucucccugguggua

SEQ ID NO: 2297407 - RNA, 19 nt, Artificial Sequence
  Description of Artificial Sequence: Synthetic oligonucleotide
ggagggucguuccagccgc

SEQ ID NO: 2297408 - RNA, 19 nt, Artificial Sequence
  Description of Artificial Sequence: Synthetic oligonucleotide
uuccugaagcagugccaag

SEQ ID NO: 2297409 - RNA, 19 nt, Artificial Sequence
  Description of Artificial Sequence: Synthetic oligonucleotide
gugcguuuggguccaccag

SEQ ID NO: 2297410 - RNA, 19 nt, Artificial Sequence
  Description of Artificial Sequence: Synthetic oligonucleotide
cuuuggccuccucugaaga

SEQ ID NO: 2297411 - RNA, 19 nt, Artificial Sequence
  Description of Artificial Sequence: Synthetic oligonucleotide
auagucucccuggugguaa

SEQ ID NO: 2297412 - RNA, 19 nt, Artificial Sequence
  Description of Artificial Sequence: Synthetic oligonucleotide
gcccauaagagaacugcgg

SEQ ID NO: 2297413 - RNA, 19 nt, Artificial Sequence
  Description of Artificial Sequence: Synthetic oligonucleotide
cacuaguagcgccauccuc

SEQ ID NO: 2297414 - RNA, 19 nt, Artificial Sequence
  Description of Artificial Sequence: Synthetic oligonucleotide
ugcggagggucguuccagc

SEQ ID NO: 2297415 - RNA, 19 nt, Artificial Sequence
  Description of Artificial Sequence: Synthetic oligonucleotide
agugccaagcggcggcuga

SEQ ID NO: 2297416 - RNA, 19 nt, Artificial Sequence
  Description of Artificial Sequence: Synthetic oligonucleotide
accauaagugagcggugaa

SEQ ID NO: 2297417 - RNA, 19 nt, Artificial Sequence
  Description of Artificial Sequence: Synthetic oligonucleotide
caguggcccagguaggauc

SEQ ID NO: 2297418 - RNA, 19 nt, Artificial Sequence
  Description of Artificial Sequence: Synthetic oligonucleotide
cauccucuucuuuacaggu

SEQ ID NO: 2297419 - RNA, 19 nt, Artificial Sequence
  Description of Artificial Sequence: Synthetic oligonucleotide
gaucaauagucucccuggu

SEQ ID NO: 2297420 - RNA, 19 nt, Artificial Sequence
  Description of Artificial Sequence: Synthetic oligonucleotide
gacccucuuaguaaggggu

SEQ ID NO: 2297421 - RNA, 19 nt, Artificial Sequence
  Description of Artificial Sequence: Synthetic oligonucleotide
augggagccaagugaggaa

SEQ ID NO: 2297422 - RNA, 19 nt, Artificial Sequence
  Description of Artificial Sequence: Synthetic oligonucleotide
ggggccgcgacccucuuag

SEQ ID NO: 2297423 - RNA, 19 nt, Artificial Sequence
  Description of Artificial Sequence: Synthetic oligonucleotide
cuuaguaaggggugugcgu

SEQ ID NO: 2297424 - RNA, 19 nt, Artificial Sequence
  Description of Artificial Sequence: Synthetic oligonucleotide
gagcggugaaugucaucug

SEQ ID NO: 2297425 - RNA, 19 nt, Artificial Sequence
  Description of Artificial Sequence: Synthetic oligonucleotide
accaguagcaggacaaguu

SEQ ID NO: 2297426 - RNA, 19 nt, Artificial Sequence
  Description of Artificial Sequence: Synthetic oligonucleotide
agccuuacuugaaggaggu

SEQ ID NO: 2297427 - RNA, 19 nt, Artificial Sequence
  Description of Artificial Sequence: Synthetic oligonucleotide
ggcucaucuuccuacccac

SEQ ID NO: 2297428 - RNA, 19 nt, Artificial Sequence
  Description of Artificial Sequence: Synthetic oligonucleotide
ggggugugcguuugggucc

SEQ ID NO: 2297429 - RNA, 19 nt, Artificial Sequence
  Description of Artificial Sequence: Synthetic oligonucleotide
cuugaaggagguggaugac

SEQ ID NO: 2297430 - RNA, 19 nt, Artificial Sequence
  Description of Artificial Sequence: Synthetic oligonucleotide
cacuuccgcaccgccagcg

SEQ ID NO: 2297431 - RNA, 19 nt, Artificial Sequence
  Description of Artificial Sequence: Synthetic oligonucleotide
ccaguagcaggacaaguuc

SEQ ID NO: 2297432 - RNA, 19 nt, Artificial Sequence
  Description of Artificial Sequence: Synthetic oligonucleotide
acaccaguagcaggacaag

SEQ ID NO: 2297433 - RNA, 19 nt, Artificial Sequence
  Description of Artificial Sequence: Synthetic oligonucleotide
ugcaguggcccagguagga

SEQ ID NO: 2297434 - RNA, 19 nt, Artificial Sequence
  Description of Artificial Sequence: Synthetic oligonucleotide
uuacuugaaggagguggau

SEQ ID NO: 2297435 - RNA, 19 nt, Artificial Sequence
  Description of Artificial Sequence: Synthetic oligonucleotide
acugcggagggucguucca

SEQ ID NO: 2297436 - RNA, 19 nt, Artificial Sequence
  Description of Artificial Sequence: Synthetic oligonucleotide
gagaccccaggauuaugaa

SEQ ID NO: 2297437 - RNA, 19 nt, Artificial Sequence
  Description of Artificial Sequence: Synthetic oligonucleotide
uccugcggggccgcgaccc

SEQ ID NO: 2297438 - RNA, 19 nt, Artificial Sequence
  Description of Artificial Sequence: Synthetic oligonucleotide
cacugacugaccucaguaa

SEQ ID NO: 2297439 - RNA, 19 nt, Artificial Sequence
  Description of Artificial Sequence: Synthetic oligonucleotide
uuggggcucuaggggaucc

SEQ ID NO: 2297440 - RNA, 19 nt, Artificial Sequence
  Description of Artificial Sequence: Synthetic oligonucleotide
gagguggaugacccacuga

SEQ ID NO: 2297441 - RNA, 19 nt, Artificial Sequence
  Description of Artificial Sequence: Synthetic oligonucleotide
caccagucugagucugcag

SEQ ID NO: 2297442 - RNA, 19 nt, Artificial Sequence
  Description of Artificial Sequence: Synthetic oligonucleotide
acccucuuaguaaggggug

SEQ ID NO: 2297443 - RNA, 19 nt, Artificial Sequence
  Description of Artificial Sequence: Synthetic oligonucleotide
cagccgcguucuuuguugc

SEQ ID NO: 2297444 - RNA, 19 nt, Artificial Sequence
  Description of Artificial Sequence: Synthetic oligonucleotide
uggucaggcccaacaggau

SEQ ID NO: 2297445 - RNA, 19 nt, Artificial Sequence
  Description of Artificial Sequence: Synthetic oligonucleotide
ggagguggaugacccacug

SEQ ID NO: 2297446 - RNA, 19 nt, Artificial Sequence
  Description of Artificial Sequence: Synthetic oligonucleotide
aggcccaacaggaucaaua

SEQ ID NO: 2297447 - RNA, 19 nt, Artificial Sequence
  Description of Artificial Sequence: Synthetic oligonucleotide
ggagaccccaggauuauga

SEQ ID NO: 2297448 - RNA, 19 nt, Artificial Sequence
  Description of Artificial Sequence: Synthetic oligonucleotide
ccaccauccacugacugac

SEQ ID NO: 2297449 - RNA, 19 nt, Artificial Sequence
  Description of Artificial Sequence: Synthetic oligonucleotide
cccauaagagaacugcgga

SEQ ID NO: 2297450 - RNA, 19 nt, Artificial Sequence
  Description of Artificial Sequence: Synthetic oligonucleotide
cauccugcggggccgcgac

SEQ ID NO: 2297451 - RNA, 19 nt, Artificial Sequence
  Description of Artificial Sequence: Synthetic oligonucleotide
ggggcuccacaccaguagc

SEQ ID NO: 2297452 - RNA, 19 nt, Artificial Sequence
  Description of Artificial Sequence: Synthetic oligonucleotide
cugcagcccauaagagaac

SEQ ID NO: 2297453 - RNA, 19 nt, Artificial Sequence
  Description of Artificial Sequence: Synthetic oligonucleotide
ggucguuccagccgcguuc

SEQ ID NO: 2297454 - RNA, 19 nt, Artificial Sequence
  Description of Artificial Sequence: Synthetic oligonucleotide
ccauugagauguuuauuga

SEQ ID NO: 2297455 - RNA, 19 nt, Artificial Sequence
  Description of Artificial Sequence: Synthetic oligonucleotide
gguggaugacccacugaag

SEQ ID NO: 2297456 - RNA, 19 nt, Artificial Sequence
  Description of Artificial Sequence: Synthetic oligonucleotide
gcgacccucuuaguaaggg

SEQ ID NO: 2297457 - RNA, 19 nt, Artificial Sequence
  Description of Artificial Sequence: Synthetic oligonucleotide
ugccuguuccagaggucuc

SEQ ID NO: 2297458 - RNA, 19 nt, Artificial Sequence
  Description of Artificial Sequence: Synthetic oligonucleotide
gacuccucuuuucugcaau

SEQ ID NO: 2297459 - RNA, 19 nt, Artificial Sequence
  Description of Artificial Sequence: Synthetic oligonucleotide
ccagccgcguucuuuguug

SEQ ID NO: 2297460 - RNA, 19 nt, Artificial Sequence
  Description of Artificial Sequence: Synthetic oligonucleotide
cacauagagcuccgccauc

SEQ ID NO: 2297461 - RNA, 19 nt, Artificial Sequence
  Description of Artificial Sequence: Synthetic oligonucleotide
uugcccggcuucacauaga

SEQ ID NO: 2297462 - RNA, 19 nt, Artificial Sequence
  Description of Artificial Sequence: Synthetic oligonucleotide
gagugaguccagggagacc

SEQ ID NO: 2297463 - RNA, 19 nt, Artificial Sequence
  Description of Artificial Sequence: Synthetic oligonucleotide
auccugcggggccgcgacc

SEQ ID NO: 2297464 - RNA, 19 nt, Artificial Sequence
  Description of Artificial Sequence: Synthetic oligonucleotide
cauagagcuccgccaucuc

SEQ ID NO: 2297465 - RNA, 19 nt, Artificial Sequence
  Description of Artificial Sequence: Synthetic oligonucleotide
ggccuuccauaccaaagca

SEQ ID NO: 2297466 - RNA, 19 nt, Artificial Sequence
  Description of Artificial Sequence: Synthetic oligonucleotide
aucccaguggugguguaaa

SEQ ID NO: 2297467 - RNA, 19 nt, Artificial Sequence
  Description of Artificial Sequence: Synthetic oligonucleotide
cagggagaccccaggauua

SEQ ID NO: 2297468 - RNA, 19 nt, Artificial Sequence
  Description of Artificial Sequence: Synthetic oligonucleotide
guagcaggacaaguuccca

SEQ ID NO: 2297469 - RNA, 19 nt, Artificial Sequence
  Description of Artificial Sequence: Synthetic oligonucleotide
aggugguccagaaguuucu

SEQ ID NO: 2297470 - RNA, 19 nt, Artificial Sequence
  Description of Artificial Sequence: Synthetic oligonucleotide
cauagguggaggccuggaa

SEQ ID NO: 2297471 - RNA, 19 nt, Artificial Sequence
  Description of Artificial Sequence: Synthetic oligonucleotide
aucuuuggucaggcccaac

SEQ ID NO: 2297472 - RNA, 19 nt, Artificial Sequence
  Description of Artificial Sequence: Synthetic oligonucleotide
ggggauccauccugcgggg

SEQ ID NO: 2297473 - RNA, 19 nt, Artificial Sequence
  Description of Artificial Sequence: Synthetic oligonucleotide
ggcuccacaccaguagcag

SEQ ID NO: 2297474 - RNA, 19 nt, Artificial Sequence
  Description of Artificial Sequence: Synthetic oligonucleotide
ugcggggccgcgacccucu

SEQ ID NO: 2297475 - RNA, 19 nt, Artificial Sequence
  Description of Artificial Sequence: Synthetic oligonucleotide
uaguagcgccauccucuuc

SEQ ID NO: 2297476 - RNA, 19 nt, Artificial Sequence
  Description of Artificial Sequence: Synthetic oligonucleotide
cccaguggugguguaaaag

SEQ ID NO: 2297477 - RNA, 19 nt, Artificial Sequence
  Description of Artificial Sequence: Synthetic oligonucleotide
gaaaggccuuccauaccaa

SEQ ID NO: 2297478 - RNA, 19 nt, Artificial Sequence
  Description of Artificial Sequence: Synthetic oligonucleotide
aggugucacuguagauuuc

SEQ ID NO: 2297479 - RNA, 19 nt, Artificial Sequence
  Description of Artificial Sequence: Synthetic oligonucleotide
cacucccaccauugagaug

SEQ ID NO: 2297480 - RNA, 19 nt, Artificial Sequence
  Description of Artificial Sequence: Synthetic oligonucleotide
cuccagcccacuguuccug

SEQ ID NO: 2297481 - RNA, 19 nt, Artificial Sequence
  Description of Artificial Sequence: Synthetic oligonucleotide
uugcacuaguagcgccauc

SEQ ID NO: 2297482 - RNA, 19 nt, Artificial Sequence
  Description of Artificial Sequence: Synthetic oligonucleotide
cugcggagggucguuccag

SEQ ID NO: 2297483 - RNA, 19 nt, Artificial Sequence
  Description of Artificial Sequence: Synthetic oligonucleotide
gcccaguacugucugguuc

SEQ ID NO: 2297484 - RNA, 19 nt, Artificial Sequence
  Description of Artificial Sequence: Synthetic oligonucleotide
gaacugcggagggucguuc

SEQ ID NO: 2297485 - RNA, 19 nt, Artificial Sequence
  Description of Artificial Sequence: Synthetic oligonucleotide
ccgcguucuuuguugcccg

SEQ ID NO: 2297486 - RNA, 19 nt, Artificial Sequence
  Description of Artificial Sequence: Synthetic oligonucleotide
cugagucugcagcccauaa

SEQ ID NO: 2297487 - RNA, 19 nt, Artificial Sequence
  Description of Artificial Sequence: Synthetic oligonucleotide
gccgcguucuuuguugccc

SEQ ID NO: 2297488 - RNA, 19 nt, Artificial Sequence
  Description of Artificial Sequence: Synthetic oligonucleotide
cugaccucaguaacauggu

SEQ ID NO: 2297489 - RNA, 19 nt, Artificial Sequence
  Description of Artificial Sequence: Synthetic oligonucleotide
ccaguggugguguaaaagu

SEQ ID NO: 2297490 - RNA, 19 nt, Artificial Sequence
  Description of Artificial Sequence: Synthetic oligonucleotide
acucagggacuggggaacu

SEQ ID NO: 2297491 - RNA, 19 nt, Artificial Sequence
  Description of Artificial Sequence: Synthetic oligonucleotide
aggagguggaugacccacu

SEQ ID NO: 2297492 - RNA, 19 nt, Artificial Sequence
  Description of Artificial Sequence: Synthetic oligonucleotide
gagggucguuccagccgcg

SEQ ID NO: 2297493 - RNA, 19 nt, Artificial Sequence
  Description of Artificial Sequence: Synthetic oligonucleotide
ggcuucacauagagcuccg

SEQ ID NO: 2297494 - RNA, 19 nt, Artificial Sequence
  Description of Artificial Sequence: Synthetic oligonucleotide
gugagcggugaaugucauc

SEQ ID NO: 2297495 - RNA, 19 nt, Artificial Sequence
  Description of Artificial Sequence: Synthetic oligonucleotide
agugagcggugaaugucau

SEQ ID NO: 2297496 - RNA, 19 nt, Artificial Sequence
  Description of Artificial Sequence: Synthetic oligonucleotide
cccaccauugagauguuua

SEQ ID NO: 2297497 - RNA, 19 nt, Artificial Sequence
  Description of Artificial Sequence: Synthetic oligonucleotide
agcccaguacugucugguu

SEQ ID NO: 2297498 - RNA, 19 nt, Artificial Sequence
  Description of Artificial Sequence: Synthetic oligonucleotide
gccgcgacccucuuaguaa

SEQ ID NO: 2297499 - RNA, 19 nt, Artificial Sequence
  Description of Artificial Sequence: Synthetic oligonucleotide
agccucagacucagggacu

SEQ ID NO: 2297500 - RNA, 19 nt, Artificial Sequence
  Description of Artificial Sequence: Synthetic oligonucleotide
uggguccaccagucugagu

SEQ ID NO: 2297501 - RNA, 19 nt, Artificial Sequence
  Description of Artificial Sequence: Synthetic oligonucleotide
cggugaaugucaucugcug

SEQ ID NO: 2297502 - RNA, 19 nt, Artificial Sequence
  Description of Artificial Sequence: Synthetic oligonucleotide
caguggugguguaaaaguu

SEQ ID NO: 2297503 - RNA, 19 nt, Artificial Sequence
  Description of Artificial Sequence: Synthetic oligonucleotide
gaucuuuggucaggcccaa

SEQ ID NO: 2297504 - RNA, 19 nt, Artificial Sequence
  Description of Artificial Sequence: Synthetic oligonucleotide
ccgcgacccucuuaguaag

SEQ ID NO: 2297505 - RNA, 19 nt, Artificial Sequence
  Description of Artificial Sequence: Synthetic oligonucleotide
gugugcguuuggguccacc

SEQ ID NO: 2297506 - RNA, 19 nt, Artificial Sequence
  Description of Artificial Sequence: Synthetic oligonucleotide
gcggcugauaucaucauau

SEQ ID NO: 2297507 - RNA, 19 nt, Artificial Sequence
  Description of Artificial Sequence: Synthetic oligonucleotide
uccuacccacucccaccau

SEQ ID NO: 2297508 - RNA, 19 nt, Artificial Sequence
  Description of Artificial Sequence: Synthetic oligonucleotide
uagcgccauccucuucuuu

SEQ ID NO: 2297509 - RNA, 19 nt, Artificial Sequence
  Description of Artificial Sequence: Synthetic oligonucleotide
gcggagggucguuccagcc

SEQ ID NO: 2297510 - RNA, 19 nt, Artificial Sequence
  Description of Artificial Sequence: Synthetic oligonucleotide
uggggcucuaggggaucca

SEQ ID NO: 2297511 - RNA, 19 nt, Artificial Sequence
  Description of Artificial Sequence: Synthetic oligonucleotide
cggagggucguuccagccg

SEQ ID NO: 2297512 - RNA, 19 nt, Artificial Sequence
  Description of Artificial Sequence: Synthetic oligonucleotide
ccucuuaguaaggggugug

SEQ ID NO: 2297513 - RNA, 19 nt, Artificial Sequence
  Description of Artificial Sequence: Synthetic oligonucleotide
cuccucuuuucugcaauua

SEQ ID NO: 2297514 - RNA, 19 nt, Artificial Sequence
  Description of Artificial Sequence: Synthetic oligonucleotide
uggaggccuggaagccuua

SEQ ID NO: 2297515 - RNA, 19 nt, Artificial Sequence
  Description of Artificial Sequence: Synthetic oligonucleotide
uggccacggcaauccucca

SEQ ID NO: 2297516 - RNA, 19 nt, Artificial Sequence
  Description of Artificial Sequence: Synthetic oligonucleotide
ggcccagguaggaucuuug

SEQ ID NO: 2297517 - RNA, 19 nt, Artificial Sequence
  Description of Artificial Sequence: Synthetic oligonucleotide
cccaccauccacugacuga

SEQ ID NO: 2297518 - RNA, 19 nt, Artificial Sequence
  Description of Artificial Sequence: Synthetic oligonucleotide
ccucuuuucugcaauuaau

SEQ ID NO: 2297519 - RNA, 19 nt, Artificial Sequence
  Description of Artificial Sequence: Synthetic oligonucleotide
guuggggcucuaggggauc

SEQ ID NO: 2297520 - RNA, 19 nt, Artificial Sequence
  Description of Artificial Sequence: Synthetic oligonucleotide
caucagaauggcucaucuu

SEQ ID NO: 2297521 - RNA, 19 nt, Artificial Sequence
  Description of Artificial Sequence: Synthetic oligonucleotide
ucccaccauugagauguuu

SEQ ID NO: 2297522 - RNA, 19 nt, Artificial Sequence
  Description of Artificial Sequence: Synthetic oligonucleotide
cugcugcaucccaguggug

SEQ ID NO: 2297523 - RNA, 19 nt, Artificial Sequence
  Description of Artificial Sequence: Synthetic oligonucleotide
agggucguuccagccgcgu

SEQ ID NO: 2297524 - RNA, 19 nt, Artificial Sequence
  Description of Artificial Sequence: Synthetic oligonucleotide
cccaguacugucugguucu

SEQ ID NO: 2297525 - RNA, 19 nt, Artificial Sequence
  Description of Artificial Sequence: Synthetic oligonucleotide
gcguucuuuguugcccggc

SEQ ID NO: 2297526 - RNA, 19 nt, Artificial Sequence
  Description of Artificial Sequence: Synthetic oligonucleotide
ugccaagcggcggcugaua

SEQ ID NO: 2297527 - RNA, 19 nt, Artificial Sequence
  Description of Artificial Sequence: Synthetic oligonucleotide
caguaacauggucaaccau

SEQ ID NO: 2297528 - RNA, 19 nt, Artificial Sequence
  Description of Artificial Sequence: Synthetic oligonucleotide
cuaguagcgccauccucuu

SEQ ID NO: 2297529 - RNA, 19 nt, Artificial Sequence
  Description of Artificial Sequence: Synthetic oligonucleotide
gcguuuggguccaccaguc

SEQ ID NO: 2297530 - RNA, 19 nt, Artificial Sequence
  Description of Artificial Sequence: Synthetic oligonucleotide
gcccacuguuccugaagca

SEQ ID NO: 2297531 - RNA, 19 nt, Artificial Sequence
  Description of Artificial Sequence: Synthetic oligonucleotide
ccaagcggcggcugauauc

SEQ ID NO: 2297532 - RNA, 19 nt, Artificial Sequence
  Description of Artificial Sequence: Synthetic oligonucleotide
caccaguagcaggacaagu

SEQ ID NO: 2297533 - RNA, 19 nt, Artificial Sequence
  Description of Artificial Sequence: Synthetic oligonucleotide
gucguuccagccgcguucu

SEQ ID NO: 2297534 - RNA, 19 nt, Artificial Sequence
  Description of Artificial Sequence: Synthetic oligonucleotide
ggccgcgacccucuuagua

SEQ ID NO: 2297535 - RNA, 19 nt, Artificial Sequence
  Description of Artificial Sequence: Synthetic oligonucleotide
gggagaccccaggauuaug

SEQ ID NO: 2297536 - RNA, 19 nt, Artificial Sequence
  Description of Artificial Sequence: Synthetic oligonucleotide
gggcuccacaccaguagca

SEQ ID NO: 2297537 - RNA, 19 nt, Artificial Sequence
  Description of Artificial Sequence: Synthetic oligonucleotide
cuugcacuaguagcgccau

SEQ ID NO: 2297538 - RNA, 19 nt, Artificial Sequence
  Description of Artificial Sequence: Synthetic oligonucleotide
cagugccaagcggcggcug

SEQ ID NO: 2297539 - RNA, 19 nt, Artificial Sequence
  Description of Artificial Sequence: Synthetic oligonucleotide
cgcgacccucuuaguaagg

SEQ ID NO: 2297540 - RNA, 19 nt, Artificial Sequence
  Description of Artificial Sequence: Synthetic oligonucleotide
ggaggccuggaagccuuac

SEQ ID NO: 2297541 - RNA, 19 nt, Artificial Sequence
  Description of Artificial Sequence: Synthetic oligonucleotide
ccaccauugagauguuuau

SEQ ID NO: 2297542 - RNA, 19 nt, Artificial Sequence
  Description of Artificial Sequence: Synthetic oligonucleotide
agcggggcagcgcgucauu

SEQ ID NO: 2297543 - RNA, 19 nt, Artificial Sequence
  Description of Artificial Sequence: Synthetic oligonucleotide
caccauugagauguuuauu

SEQ ID NO: 2297544 - RNA, 19 nt, Artificial Sequence
  Description of Artificial Sequence: Synthetic oligonucleotide
caggaucaauagucucccu

SEQ ID NO: 2297545 - RNA, 19 nt, Artificial Sequence
  Description of Artificial Sequence: Synthetic oligonucleotide
gccuuacuugaaggaggug

SEQ ID NO: 2297546 - RNA, 19 nt, Artificial Sequence
  Description of Artificial Sequence: Synthetic oligonucleotide
gcccaacaggaucaauagu

SEQ ID NO: 2297547 - RNA, 19 nt, Artificial Sequence
  Description of Artificial Sequence: Synthetic oligonucleotide
cgcguucuuuguugcccgg

SEQ ID NO: 2297548 - RNA, 19 nt, Artificial Sequence
  Description of Artificial Sequence: Synthetic oligonucleotide
ccacaccaguagcaggaca

SEQ ID NO: 2297549 - RNA, 19 nt, Artificial Sequence
  Description of Artificial Sequence: Synthetic oligonucleotide
gcacuaguagcgccauccu

SEQ ID NO: 2297550 - RNA, 19 nt, Artificial Sequence
  Description of Artificial Sequence: Synthetic oligonucleotide
ccagaggucucagcacauc

SEQ ID NO: 2297551 - RNA, 19 nt, Artificial Sequence
  Description of Artificial Sequence: Synthetic oligonucleotide
gggugugcguuugggucca

SEQ ID NO: 2297552 - RNA, 19 nt, Artificial Sequence
  Description of Artificial Sequence: Synthetic oligonucleotide
gcucuaggggauccauccu

SEQ ID NO: 2297553 - RNA, 19 nt, Artificial Sequence
  Description of Artificial Sequence: Synthetic oligonucleotide
aagcggcggcugauaucau

SEQ ID NO: 2297554 - RNA, 19 nt, Artificial Sequence
  Description of Artificial Sequence: Synthetic oligonucleotide
guagcgccauccucuucuu

SEQ ID NO: 2297555 - RNA, 19 nt, Artificial Sequence
  Description of Artificial Sequence: Synthetic oligonucleotide
cgcaccgccagcggggcag

SEQ ID NO: 2297556 - RNA, 19 nt, Artificial Sequence
  Description of Artificial Sequence: Synthetic oligonucleotide
ccacugaaggugguccaga

SEQ ID NO: 2297557 - RNA, 19 nt, Artificial Sequence
  Description of Artificial Sequence: Synthetic oligonucleotide
ccacuuccgcaccgccagc

SEQ ID NO: 2297558 - RNA, 19 nt, Artificial Sequence
  Description of Artificial Sequence: Synthetic oligonucleotide
caccgccagcggggcagcg

SEQ ID NO: 2297559 - RNA, 19 nt, Artificial Sequence
  Description of Artificial Sequence: Synthetic oligonucleotide
gcccggcuucacauagagc

SEQ ID NO: 2297560 - RNA, 19 nt, Artificial Sequence
  Description of Artificial Sequence: Synthetic oligonucleotide
gccaagcggcggcugauau

SEQ ID NO: 2297561 - RNA, 19 nt, Artificial Sequence
  Description of Artificial Sequence: Synthetic oligonucleotide
ccauaagugagcggugaau

SEQ ID NO: 2297562 - RNA, 19 nt, Artificial Sequence
  Description of Artificial Sequence: Synthetic oligonucleotide
cggggcagcgcgucauuuc

SEQ ID NO: 2297563 - RNA, 19 nt, Artificial Sequence
  Description of Artificial Sequence: Synthetic oligonucleotide
cguucuuuguugcccggcu

SEQ ID NO: 2297564 - RNA, 19 nt, Artificial Sequence
  Description of Artificial Sequence: Synthetic oligonucleotide
ccaaagcauagaagaucau

SEQ ID NO: 2297565 - RNA, 19 nt, Artificial Sequence
  Description of Artificial Sequence: Synthetic oligonucleotide
gccagcggggcagcgcguc

SEQ ID NO: 2297566 - RNA, 19 nt, Artificial Sequence
  Description of Artificial Sequence: Synthetic oligonucleotide
cccucuuaguaaggggugu

SEQ ID NO: 2297567 - RNA, 19 nt, Artificial Sequence
  Description of Artificial Sequence: Synthetic oligonucleotide
cggcugauaucaucauaua

SEQ ID NO: 2297568 - RNA, 19 nt, Artificial Sequence
  Description of Artificial Sequence: Synthetic oligonucleotide
gugccaagcggcggcugau

SEQ ID NO: 2297569 - RNA, 19 nt, Artificial Sequence
  Description of Artificial Sequence: Synthetic oligonucleotide
gggucguuccagccgcguu

SEQ ID NO: 2297570 - RNA, 19 nt, Artificial Sequence
  Description of Artificial Sequence: Synthetic oligonucleotide
ccuccagcccacuguuccu

SEQ ID NO: 2297571 - RNA, 19 nt, Artificial Sequence
  Description of Artificial Sequence: Synthetic oligonucleotide
ggggcucuaggggauccau

SEQ ID NO: 2297572 - RNA, 19 nt, Artificial Sequence
  Description of Artificial Sequence: Synthetic oligonucleotide
cgccauccucuucuuuaca

SEQ ID NO: 2297573 - RNA, 19 nt, Artificial Sequence
  Description of Artificial Sequence: Synthetic oligonucleotide
cucagggacuggggaacuu

SEQ ID NO: 2297574 - RNA, 19 nt, Artificial Sequence
  Description of Artificial Sequence: Synthetic oligonucleotide
gcaguggcccagguaggau

SEQ ID NO: 2297575 - RNA, 19 nt, Artificial Sequence
  Description of Artificial Sequence: Synthetic oligonucleotide
ggccuccucugaagacaga

SEQ ID NO: 2297576 - RNA, 19 nt, Artificial Sequence
  Description of Artificial Sequence: Synthetic oligonucleotide
ccagcggggcagcgcguca

SEQ ID NO: 2297577 - RNA, 19 nt, Artificial Sequence
  Description of Artificial Sequence: Synthetic oligonucleotide
ggugugcguuuggguccac

SEQ ID NO: 2297578 - RNA, 19 nt, Artificial Sequence
  Description of Artificial Sequence: Synthetic oligonucleotide
ccccaggauuaugaagacu

SEQ ID NO: 2297579 - RNA, 19 nt, Artificial Sequence
  Description of Artificial Sequence: Synthetic oligonucleotide
caggcccaacaggaucaau

SEQ ID NO: 2297580 - RNA, 19 nt, Artificial Sequence
  Description of Artificial Sequence: Synthetic oligonucleotide
cguuuggguccaccagucu

SEQ ID NO: 2297581 - RNA, 19 nt, Artificial Sequence
  Description of Artificial Sequence: Synthetic oligonucleotide
cagcggggcagcgcgucau

SEQ ID NO: 2297582 - RNA, 19 nt, Artificial Sequence
  Description of Artificial Sequence: Synthetic oligonucleotide
cucccaccauugagauguu

SEQ ID NO: 2297583 - RNA, 19 nt, Artificial Sequence
  Description of Artificial Sequence: Synthetic oligonucleotide
gggccgcgacccucuuagu

SEQ ID NO: 2297584 - RNA, 19 nt, Artificial Sequence
  Description of Artificial Sequence: Synthetic oligonucleotide
gcggggcagcgcgucauuu

SEQ ID NO: 2297585 - RNA, 19 nt, Artificial Sequence
  Description of Artificial Sequence: Synthetic oligonucleotide
ccgcaccgccagcggggca

SEQ ID NO: 2297586 - RNA, 19 nt, Artificial Sequence
  Description of Artificial Sequence: Synthetic oligonucleotide
ccugcggggccgcgacccu

SEQ ID NO: 2297587 - RNA, 19 nt, Artificial Sequence
  Description of Artificial Sequence: Synthetic oligonucleotide
cggcggcugauaucaucau

SEQ ID NO: 2297588 - RNA, 19 nt, Artificial Sequence
  Description of Artificial Sequence: Synthetic oligonucleotide
cggggccgcgacccucuua

SEQ ID NO: 2297589 - RNA, 19 nt, Artificial Sequence
  Description of Artificial Sequence: Synthetic oligonucleotide
gcggggccgcgacccucuu

SEQ ID NO: 2297590 - RNA, 19 nt, Artificial Sequence
  Description of Artificial Sequence: Synthetic oligonucleotide
agauuuauguaauacagac

SEQ ID NO: 2297591 - RNA, 19 nt, Artificial Sequence
  Description of Artificial Sequence: Synthetic oligonucleotide
uuuacagacauacuggucc

SEQ ID NO: 2297592 - RNA, 19 nt, Artificial Sequence
  Description of Artificial Sequence: Synthetic oligonucleotide
uaauacagacuuuugagag

SEQ ID NO: 2297593 - RNA, 19 nt, Artificial Sequence
  Description of Artificial Sequence: Synthetic oligonucleotide
uucuguagguucaugaggg

SEQ ID NO: 2297594 - RNA, 19 nt, Artificial Sequence
  Description of Artificial Sequence: Synthetic oligonucleotide
agcgcugucauacuucucc

SEQ ID NO: 2297595 - RNA, 19 nt, Artificial Sequence
  Description of Artificial Sequence: Synthetic oligonucleotide
agccaucuuauacacagcc

SEQ ID NO: 2297596 - RNA, 19 nt, Artificial Sequence
  Description of Artificial Sequence: Synthetic oligonucleotide
auacagacuuuugagaggc

SEQ ID NO: 2297597 - RNA, 19 nt, Artificial Sequence
  Description of Artificial Sequence: Synthetic oligonucleotide
aauauaaaauauauuuaga

SEQ ID NO: 2297598 - RNA, 19 nt, Artificial Sequence
  Description of Artificial Sequence: Synthetic oligonucleotide
gaggcuauggcgcaugacg

SEQ ID NO: 2297599 - RNA, 19 nt, Artificial Sequence
  Description of Artificial Sequence: Synthetic oligonucleotide
accuggacgcucuugaagc

SEQ ID NO: 2297600 - RNA, 19 nt, Artificial Sequence
  Description of Artificial Sequence: Synthetic oligonucleotide
auuugaaacaagcccaucu

SEQ ID NO: 2297601 - RNA, 19 nt, Artificial Sequence
  Description of Artificial Sequence: Synthetic oligonucleotide
ucuugcuuauuuaccaucc

SEQ ID NO: 2297602 - RNA, 19 nt, Artificial Sequence
  Description of Artificial Sequence: Synthetic oligonucleotide
cagguuaccagcaaagccc

SEQ ID NO: 2297603 - RNA, 19 nt, Artificial Sequence
  Description of Artificial Sequence: Synthetic oligonucleotide
aaacaagcccaucuccuuc

SEQ ID NO: 2297604 - RNA, 19 nt, Artificial Sequence
  Description of Artificial Sequence: Synthetic oligonucleotide
ugcagauuugaaacaagcc

SEQ ID NO: 2297605 - RNA, 19 nt, Artificial Sequence
  Description of Artificial Sequence: Synthetic oligonucleotide
uugaaacaagcccaucucc

SEQ ID NO: 2297606 - RNA, 19 nt, Artificial Sequence
  Description of Artificial Sequence: Synthetic oligonucleotide
ucuuauacacagcccggcg

SEQ ID NO: 2297607 - RNA, 19 nt, Artificial Sequence
  Description of Artificial Sequence: Synthetic oligonucleotide
auuucucuccacuggcugc

SEQ ID NO: 2297608 - RNA, 19 nt, Artificial Sequence
  Description of Artificial Sequence: Synthetic oligonucleotide
aaacucuuuggcaaagcgg

SEQ ID NO: 2297609 - RNA, 19 nt, Artificial Sequence
  Description of Artificial Sequence: Synthetic oligonucleotide
gacuccgugacauuugcag

SEQ ID NO: 2297610 - RNA, 19 nt, Artificial Sequence
  Description of Artificial Sequence: Synthetic oligonucleotide
uauguaauacagacuuuug

SEQ ID NO: 2297611 - RNA, 19 nt, Artificial Sequence
  Description of Artificial Sequence: Synthetic oligonucleotide
uagauuuauguaauacaga

SEQ ID NO: 2297612 - RNA, 19 nt, Artificial Sequence
  Description of Artificial Sequence: Synthetic oligonucleotide
aacucuuuggcaaagcggu

SEQ ID NO: 2297613 - RNA, 19 nt, Artificial Sequence
  Description of Artificial Sequence: Synthetic oligonucleotide
uguucuguagguucaugag

SEQ ID NO: 2297614 - RNA, 19 nt, Artificial Sequence
  Description of Artificial Sequence: Synthetic oligonucleotide
uuauacacagcccggcggc

SEQ ID NO: 2297615 - RNA, 19 nt, Artificial Sequence
  Description of Artificial Sequence: Synthetic oligonucleotide
gaaagcauggaaaagccca

SEQ ID NO: 2297616 - RNA, 19 nt, Artificial Sequence
  Description of Artificial Sequence: Synthetic oligonucleotide
gcagauuugaaacaagccc

SEQ ID NO: 2297617 - RNA, 19 nt, Artificial Sequence
  Description of Artificial Sequence: Synthetic oligonucleotide
ucuuaaguccuuccucucc

SEQ ID NO: 2297618 - RNA, 19 nt, Artificial Sequence
  Description of Artificial Sequence: Synthetic oligonucleotide
aucucuuaaguccuuccuc

SEQ ID NO: 2297619 - RNA, 19 nt, Artificial Sequence
  Description of Artificial Sequence: Synthetic oligonucleotide
gaaaagcccauuucucucc

SEQ ID NO: 2297620 - RNA, 19 nt, Artificial Sequence
  Description of Artificial Sequence: Synthetic oligonucleotide
aagcccaguccucacagag

SEQ ID NO: 2297621 - RNA, 19 nt, Artificial Sequence
  Description of Artificial Sequence: Synthetic oligonucleotide
ugcuuauuuaccauccguc

SEQ ID NO: 2297622 - RNA, 19 nt, Artificial Sequence
  Description of Artificial Sequence: Synthetic oligonucleotide
uuauuuaccauccguccau

SEQ ID NO: 2297623 - RNA, 19 nt, Artificial Sequence
  Description of Artificial Sequence: Synthetic oligonucleotide
cuuauacacagcccggcgg

SEQ ID NO: 2297624 - RNA, 19 nt, Artificial Sequence
  Description of Artificial Sequence: Synthetic oligonucleotide
cugcagauuugaaacaagc

SEQ ID NO: 2297625 - RNA, 19 nt, Artificial Sequence
  Description of Artificial Sequence: Synthetic oligonucleotide
cagauuugaaacaagccca

SEQ ID NO: 2297626 - RNA, 19 nt, Artificial Sequence
  Description of Artificial Sequence: Synthetic oligonucleotide
gacauacugguccacaauc

SEQ ID NO: 2297627 - RNA, 19 nt, Artificial Sequence
  Description of Artificial Sequence: Synthetic oligonucleotide
guugaagcggcuguuagcc

SEQ ID NO: 2297628 - RNA, 19 nt, Artificial Sequence
  Description of Artificial Sequence: Synthetic oligonucleotide
auacuucuccuucaaccgg

SEQ ID NO: 2297629 - RNA, 19 nt, Artificial Sequence
  Description of Artificial Sequence: Synthetic oligonucleotide
uguagguucaugagggcuc

SEQ ID NO: 2297630 - RNA, 19 nt, Artificial Sequence
  Description of Artificial Sequence: Synthetic oligonucleotide
cuuaccuugcggaacucag

SEQ ID NO: 2297631 - RNA, 19 nt, Artificial Sequence
  Description of Artificial Sequence: Synthetic oligonucleotide
aucuuauacacagcccggc

SEQ ID NO: 2297632 - RNA, 19 nt, Artificial Sequence
  Description of Artificial Sequence: Synthetic oligonucleotide
ccaucuuauacacagcccg

SEQ ID NO: 2297633 - RNA, 19 nt, Artificial Sequence
  Description of Artificial Sequence: Synthetic oligonucleotide
ucuaaucacuuccucuuuc

SEQ ID NO: 2297634 - RNA, 19 nt, Artificial Sequence
  Description of Artificial Sequence: Synthetic oligonucleotide
aacaagcccaucuccuuca

SEQ ID NO: 2297635 - RNA, 19 nt, Artificial Sequence
  Description of Artificial Sequence: Synthetic oligonucleotide
acauuugcaggcgacauca

SEQ ID NO: 2297636 - RNA, 19 nt, Artificial Sequence
  Description of Artificial Sequence: Synthetic oligonucleotide
caacgcuccaccuggacgc

SEQ ID NO: 2297637 - RNA, 19 nt, Artificial Sequence
  Description of Artificial Sequence: Synthetic oligonucleotide
caucuuauacacagcccgg

SEQ ID NO: 2297638 - RNA, 19 nt, Artificial Sequence
  Description of Artificial Sequence: Synthetic oligonucleotide
ucugaggucuuguugcaga

SEQ ID NO: 2297639 - RNA, 19 nt, Artificial Sequence
  Description of Artificial Sequence: Synthetic oligonucleotide
ugucgggugaugcgcacgg

SEQ ID NO: 2297640 - RNA, 19 nt, Artificial Sequence
  Description of Artificial Sequence: Synthetic oligonucleotide
uccucugaucccuugacaa

SEQ ID NO: 2297641 - RNA, 19 nt, Artificial Sequence
  Description of Artificial Sequence: Synthetic oligonucleotide
agccauacuccacauuguc

SEQ ID NO: 2297642 - RNA, 19 nt, Artificial Sequence
  Description of Artificial Sequence: Synthetic oligonucleotide
uuaccauccguccauucau

SEQ ID NO: 2297643 - RNA, 19 nt, Artificial Sequence
  Description of Artificial Sequence: Synthetic oligonucleotide
ucgggugaugcgcacggcg

SEQ ID NO: 2297644 - RNA, 19 nt, Artificial Sequence
  Description of Artificial Sequence: Synthetic oligonucleotide
agacuuuugagaggcagag

SEQ ID NO: 2297645 - RNA, 19 nt, Artificial Sequence
  Description of Artificial Sequence: Synthetic oligonucleotide
caaagcgguagccauacuc

SEQ ID NO: 2297646 - RNA, 19 nt, Artificial Sequence
  Description of Artificial Sequence: Synthetic oligonucleotide
cuccgugacauuugcaggc

SEQ ID NO: 2297647 - RNA, 19 nt, Artificial Sequence
  Description of Artificial Sequence: Synthetic oligonucleotide
acaaaguucuucucacgcu

SEQ ID NO: 2297648 - RNA, 19 nt, Artificial Sequence
  Description of Artificial Sequence: Synthetic oligonucleotide
uuacagacauacuggucca

SEQ ID NO: 2297649 - RNA, 19 nt, Artificial Sequence
  Description of Artificial Sequence: Synthetic oligonucleotide
uuugcaccugacaaagcaa

SEQ ID NO: 2297650 - RNA, 19 nt, Artificial Sequence
  Description of Artificial Sequence: Synthetic oligonucleotide
aaaagcccauuucucucca

SEQ ID NO: 2297651 - RNA, 19 nt, Artificial Sequence
  Description of Artificial Sequence: Synthetic oligonucleotide
uugagaggcagagaggagu

SEQ ID NO: 2297652 - RNA, 19 nt, Artificial Sequence
  Description of Artificial Sequence: Synthetic oligonucleotide
cuugcuuauuuaccauccg

SEQ ID NO: 2297653 - RNA, 19 nt, Artificial Sequence
  Description of Artificial Sequence: Synthetic oligonucleotide
uucaucuaaucacuuccuc

SEQ ID NO: 2297654 - RNA, 19 nt, Artificial Sequence
  Description of Artificial Sequence: Synthetic oligonucleotide
guucaugagggcucggccc

SEQ ID NO: 2297655 - RNA, 19 nt, Artificial Sequence
  Description of Artificial Sequence: Synthetic oligonucleotide
uuagccagcuccagcuugc

SEQ ID NO: 2297656 - RNA, 19 nt, Artificial Sequence
  Description of Artificial Sequence: Synthetic oligonucleotide
uuaccagcaaagcccaguc

SEQ ID NO: 2297657 - RNA, 19 nt, Artificial Sequence
  Description of Artificial Sequence: Synthetic oligonucleotide
aaagcccauuucucuccac

SEQ ID NO: 2297658 - RNA, 19 nt, Artificial Sequence
  Description of Artificial Sequence: Synthetic oligonucleotide
gaagcggucauagccgcgg

SEQ ID NO: 2297659 - RNA, 19 nt, Artificial Sequence
  Description of Artificial Sequence: Synthetic oligonucleotide
caucagccaucuuauacac

SEQ ID NO: 2297660 - RNA, 19 nt, Artificial Sequence
  Description of Artificial Sequence: Synthetic oligonucleotide
ugagacuccgugacauuug

SEQ ID NO: 2297661 - RNA, 19 nt, Artificial Sequence
  Description of Artificial Sequence: Synthetic oligonucleotide
uuaccuugcggaacucagc

SEQ ID NO: 2297662 - RNA, 19 nt, Artificial Sequence
  Description of Artificial Sequence: Synthetic oligonucleotide
gcuuauuuaccauccgucc

SEQ ID NO: 2297663 - RNA, 19 nt, Artificial Sequence
  Description of Artificial Sequence: Synthetic oligonucleotide
ugcgcaggcaguagucagg

SEQ ID NO: 2297664 - RNA, 19 nt, Artificial Sequence
  Description of Artificial Sequence: Synthetic oligonucleotide
uuuauguaauacagacuuu

SEQ ID NO: 2297665 - RNA, 19 nt, Artificial Sequence
  Description of Artificial Sequence: Synthetic oligonucleotide
cuuauuuaccauccgucca

SEQ ID NO: 2297666 - RNA, 19 nt, Artificial Sequence
  Description of Artificial Sequence: Synthetic oligonucleotide
uuuggcaaagcgguagcca

SEQ ID NO: 2297667 - RNA, 19 nt, Artificial Sequence
  Description of Artificial Sequence: Synthetic oligonucleotide
cauagccgcggccacagcc

SEQ ID NO: 2297668 - RNA, 19 nt, Artificial Sequence
  Description of Artificial Sequence: Synthetic oligonucleotide
ucguuguucuguagguuca

SEQ ID NO: 2297669 - RNA, 19 nt, Artificial Sequence
  Description of Artificial Sequence: Synthetic oligonucleotide
caccugacaaagcaacacc

SEQ ID NO: 2297670 - RNA, 19 nt, Artificial Sequence
  Description of Artificial Sequence: Synthetic oligonucleotide
gagacuccgugacauuugc

SEQ ID NO: 2297671 - RNA, 19 nt, Artificial Sequence
  Description of Artificial Sequence: Synthetic oligonucleotide
aggcuauggcgcaugacgc

SEQ ID NO: 2297672 - RNA, 19 nt, Artificial Sequence
  Description of Artificial Sequence: Synthetic oligonucleotide
ggcaucuacaaacucuuug

SEQ ID NO: 2297673 - RNA, 19 nt, Artificial Sequence
  Description of Artificial Sequence: Synthetic oligonucleotide
cauuucucuccacuggcug

SEQ ID NO: 2297674 - RNA, 19 nt, Artificial Sequence
  Description of Artificial Sequence: Synthetic oligonucleotide
ugggugccaucauuuacag

SEQ ID NO: 2297675 - RNA, 19 nt, Artificial Sequence
  Description of Artificial Sequence: Synthetic oligonucleotide
aagcggucauagccgcggc

SEQ ID NO: 2297676 - RNA, 19 nt, Artificial Sequence
  Description of Artificial Sequence: Synthetic oligonucleotide
cucacagagggccagcauc

SEQ ID NO: 2297677 - RNA, 19 nt, Artificial Sequence
  Description of Artificial Sequence: Synthetic oligonucleotide
uguggucucguugcgcagg

SEQ ID NO: 2297678 - RNA, 19 nt, Artificial Sequence
  Description of Artificial Sequence: Synthetic oligonucleotide
aagcgguagccauacucca

SEQ ID NO: 2297679 - RNA, 19 nt, Artificial Sequence
  Description of Artificial Sequence: Synthetic oligonucleotide
ggucuuguugcagaggcgg

SEQ ID NO: 2297680 - RNA, 19 nt, Artificial Sequence
  Description of Artificial Sequence: Synthetic oligonucleotide
ccagaaagcauggaaaagc

SEQ ID NO: 2297681 - RNA, 19 nt, Artificial Sequence
  Description of Artificial Sequence: Synthetic oligonucleotide
gacccugagacuccgugac

SEQ ID NO: 2297682 - RNA, 19 nt, Artificial Sequence
  Description of Artificial Sequence: Synthetic oligonucleotide
ucccuuaccuugcggaacu

SEQ ID NO: 2297683 - RNA, 19 nt, Artificial Sequence
  Description of Artificial Sequence: Synthetic oligonucleotide
ugcaccugacaaagcaaca

SEQ ID NO: 2297684 - RNA, 19 nt, Artificial Sequence
  Description of Artificial Sequence: Synthetic oligonucleotide
ucugaucccuugacaaagu

SEQ ID NO: 2297685 - RNA, 19 nt, Artificial Sequence
  Description of Artificial Sequence: Synthetic oligonucleotide
aguggcaacgcuccaccug

SEQ ID NO: 2297686 - RNA, 19 nt, Artificial Sequence
  Description of Artificial Sequence: Synthetic oligonucleotide
aguagucaggggcuggggu

SEQ ID NO: 2297687 - RNA, 19 nt, Artificial Sequence
  Description of Artificial Sequence: Synthetic oligonucleotide
gcggaacucagccagcugg

SEQ ID NO: 2297688 - RNA, 19 nt, Artificial Sequence
  Description of Artificial Sequence: Synthetic oligonucleotide
ucuggcgugggcugguuga

SEQ ID NO: 2297689 - RNA, 19 nt, Artificial Sequence
  Description of Artificial Sequence: Synthetic oligonucleotide
agcaaagcccaguccucac

SEQ ID NO: 2297690 - RNA, 19 nt, Artificial Sequence
  Description of Artificial Sequence: Synthetic oligonucleotide
ugaagcggucauagccgcg

SEQ ID NO: 2297691 - RNA, 19 nt, Artificial Sequence
  Description of Artificial Sequence: Synthetic oligonucleotide
caugggugccaucauuuac

SEQ ID NO: 2297692 - RNA, 19 nt, Artificial Sequence
  Description of Artificial Sequence: Synthetic oligonucleotide
ucuuguugcagaggcggcc

SEQ ID NO: 2297693 - RNA, 19 nt, Artificial Sequence
  Description of Artificial Sequence: Synthetic oligonucleotide
gcagguuaccagcaaagcc

SEQ ID NO: 2297694 - RNA, 19 nt, Artificial Sequence
  Description of Artificial Sequence: Synthetic oligonucleotide
caugacgcucucaagccuc

SEQ ID NO: 2297695 - RNA, 19 nt, Artificial Sequence
  Description of Artificial Sequence: Synthetic oligonucleotide
ucucgggcaucuacaaacu

SEQ ID NO: 2297696 - RNA, 19 nt, Artificial Sequence
  Description of Artificial Sequence: Synthetic oligonucleotide
uugcgcaggcaguagucag

SEQ ID NO: 2297697 - RNA, 19 nt, Artificial Sequence
  Description of Artificial Sequence: Synthetic oligonucleotide
cauggaaaagcccauuucu

SEQ ID NO: 2297698 - RNA, 19 nt, Artificial Sequence
  Description of Artificial Sequence: Synthetic oligonucleotide
gcggcuguuagccagcucc

SEQ ID NO: 2297699 - RNA, 19 nt, Artificial Sequence
  Description of Artificial Sequence: Synthetic oligonucleotide
ugaggucuuguugcagagg

SEQ ID NO: 2297700 - RNA, 19 nt, Artificial Sequence
  Description of Artificial Sequence: Synthetic oligonucleotide
aggucuugaggcugcagga

SEQ ID NO: 2297701 - RNA, 19 nt, Artificial Sequence
  Description of Artificial Sequence: Synthetic oligonucleotide
uccgugacauuugcaggcg

SEQ ID NO: 2297702 - RNA, 19 nt, Artificial Sequence
  Description of Artificial Sequence: Synthetic oligonucleotide
guagguucaugagggcucg

SEQ ID NO: 2297703 - RNA, 19 nt, Artificial Sequence
  Description of Artificial Sequence: Synthetic oligonucleotide
agcauggaaaagcccauuu

SEQ ID NO: 2297704 - RNA, 19 nt, Artificial Sequence
  Description of Artificial Sequence: Synthetic oligonucleotide
agcggucauagccgcggcc

SEQ ID NO: 2297705 - RNA, 19 nt, Artificial Sequence
  Description of Artificial Sequence: Synthetic oligonucleotide
aaccggucccuuaccuugc

SEQ ID NO: 2297706 - RNA, 19 nt, Artificial Sequence
  Description of Artificial Sequence: Synthetic oligonucleotide
uggacgcucuugaagcggu

SEQ ID NO: 2297707 - RNA, 19 nt, Artificial Sequence
  Description of Artificial Sequence: Synthetic oligonucleotide
acguagaccagguccucug

SEQ ID NO: 2297708 - RNA, 19 nt, Artificial Sequence
  Description of Artificial Sequence: Synthetic oligonucleotide
augggugccaucauuuaca

SEQ ID NO: 2297709 - RNA, 19 nt, Artificial Sequence
  Description of Artificial Sequence: Synthetic oligonucleotide
guagaccagguccucuggc

SEQ ID NO: 2297710 - RNA, 19 nt, Artificial Sequence
  Description of Artificial Sequence: Synthetic oligonucleotide
ugcccugucgggugaugcg

SEQ ID NO: 2297711 - RNA, 19 nt, Artificial Sequence
  Description of Artificial Sequence: Synthetic oligonucleotide
uggcgcaugacgcucucaa

SEQ ID NO: 2297712 - RNA, 19 nt, Artificial Sequence
  Description of Artificial Sequence: Synthetic oligonucleotide
gacauuugcaggcgacauc

SEQ ID NO: 2297713 - RNA, 19 nt, Artificial Sequence
  Description of Artificial Sequence: Synthetic oligonucleotide
gcaacgcuccaccuggacg

SEQ ID NO: 2297714 - RNA, 19 nt, Artificial Sequence
  Description of Artificial Sequence: Synthetic oligonucleotide
agcaucucuuaaguccuuc

SEQ ID NO: 2297715 - RNA, 19 nt, Artificial Sequence
  Description of Artificial Sequence: Synthetic oligonucleotide
acgcucucaagccucugug

SEQ ID NO: 2297716 - RNA, 19 nt, Artificial Sequence
  Description of Artificial Sequence: Synthetic oligonucleotide
ugacauuugcaggcgacau

SEQ ID NO: 2297717 - RNA, 19 nt, Artificial Sequence
  Description of Artificial Sequence: Synthetic oligonucleotide
ucccuugacaaaguucuuc

SEQ ID NO: 2297718 - RNA, 19 nt, Artificial Sequence
  Description of Artificial Sequence: Synthetic oligonucleotide
ugcaggacccugagacucc

SEQ ID NO: 2297719 - RNA, 19 nt, Artificial Sequence
  Description of Artificial Sequence: Synthetic oligonucleotide
acauacugguccacaaucu

SEQ ID NO: 2297720 - RNA, 19 nt, Artificial Sequence
  Description of Artificial Sequence: Synthetic oligonucleotide
acugcagauuugaaacaag

SEQ ID NO: 2297721 - RNA, 19 nt, Artificial Sequence
  Description of Artificial Sequence: Synthetic oligonucleotide
uccacaaucucggugcauu

SEQ ID NO: 2297722 - RNA, 19 nt, Artificial Sequence
  Description of Artificial Sequence: Synthetic oligonucleotide
guagucaggggcugggguc

SEQ ID NO: 2297723 - RNA, 19 nt, Artificial Sequence
  Description of Artificial Sequence: Synthetic oligonucleotide
cuuuggcaaagcgguagcc

SEQ ID NO: 2297724 - RNA, 19 nt, Artificial Sequence
  Description of Artificial Sequence: Synthetic oligonucleotide
ggucucguugcgcaggcag

SEQ ID NO: 2297725 - RNA, 19 nt, Artificial Sequence
  Description of Artificial Sequence: Synthetic oligonucleotide
caccuggacgcucuugaag

SEQ ID NO: 2297726 - RNA, 19 nt, Artificial Sequence
  Description of Artificial Sequence: Synthetic oligonucleotide
acagagggccagcaucucu

SEQ ID NO: 2297727 - RNA, 19 nt, Artificial Sequence
  Description of Artificial Sequence: Synthetic oligonucleotide
gcgcaugacgcucucaagc

SEQ ID NO: 2297728 - RNA, 19 nt, Artificial Sequence
  Description of Artificial Sequence: Synthetic oligonucleotide
guccuggccagaaagcaug

SEQ ID NO: 2297729 - RNA, 19 nt, Artificial Sequence
  Description of Artificial Sequence: Synthetic oligonucleotide
cuugcggaacucagccagc

SEQ ID NO: 2297730 - RNA, 19 nt, Artificial Sequence
  Description of Artificial Sequence: Synthetic oligonucleotide
gaugcgcacggcggcagcg

SEQ ID NO: 2297731 - RNA, 19 nt, Artificial Sequence
  Description of Artificial Sequence: Synthetic oligonucleotide
cucuugaagcggucauagc

SEQ ID NO: 2297732 - RNA, 19 nt, Artificial Sequence
  Description of Artificial Sequence: Synthetic oligonucleotide
acagacauacugguccaca

SEQ ID NO: 2297733 - RNA, 19 nt, Artificial Sequence
  Description of Artificial Sequence: Synthetic oligonucleotide
uccguccauucauuuguac

SEQ ID NO: 2297734 - RNA, 19 nt, Artificial Sequence
  Description of Artificial Sequence: Synthetic oligonucleotide
cuucucacgcucucgggca

SEQ ID NO: 2297735 - RNA, 19 nt, Artificial Sequence
  Description of Artificial Sequence: Synthetic oligonucleotide
gguugaagcggcuguuagc

SEQ ID NO: 2297736 - RNA, 19 nt, Artificial Sequence
  Description of Artificial Sequence: Synthetic oligonucleotide
agauuugaaacaagcccau

SEQ ID NO: 2297737 - RNA, 19 nt, Artificial Sequence
  Description of Artificial Sequence: Synthetic oligonucleotide
gaguccuggccagaaagca

SEQ ID NO: 2297738 - RNA, 19 nt, Artificial Sequence
  Description of Artificial Sequence: Synthetic oligonucleotide
cucuuaaguccuuccucuc

SEQ ID NO: 2297739 - RNA, 19 nt, Artificial Sequence
  Description of Artificial Sequence: Synthetic oligonucleotide
gcucuugaagcggucauag

SEQ ID NO: 2297740 - RNA, 19 nt, Artificial Sequence
  Description of Artificial Sequence: Synthetic oligonucleotide
gaccagguccucuggcgug

SEQ ID NO: 2297741 - RNA, 19 nt, Artificial Sequence
  Description of Artificial Sequence: Synthetic oligonucleotide
cuucaaccggucccuuacc

SEQ ID NO: 2297742 - RNA, 19 nt, Artificial Sequence
  Description of Artificial Sequence: Synthetic oligonucleotide
auccgugcccucugagguc

SEQ ID NO: 2297743 - RNA, 19 nt, Artificial Sequence
  Description of Artificial Sequence: Synthetic oligonucleotide
uugaagcggcuguuagcca

SEQ ID NO: 2297744 - RNA, 19 nt, Artificial Sequence
  Description of Artificial Sequence: Synthetic oligonucleotide
cagacuuuugagaggcaga

SEQ ID NO: 2297745 - RNA, 19 nt, Artificial Sequence
  Description of Artificial Sequence: Synthetic oligonucleotide
uauacacagcccggcggcc

SEQ ID NO: 2297746 - RNA, 19 nt, Artificial Sequence
  Description of Artificial Sequence: Synthetic oligonucleotide
cauccguccauucauuugu

SEQ ID NO: 2297747 - RNA, 19 nt, Artificial Sequence
  Description of Artificial Sequence: Synthetic oligonucleotide
cuggacgcucuugaagcgg

SEQ ID NO: 2297748 - RNA, 19 nt, Artificial Sequence
  Description of Artificial Sequence: Synthetic oligonucleotide
agcgguagccauacuccac

SEQ ID NO: 2297749 - RNA, 19 nt, Artificial Sequence
  Description of Artificial Sequence: Synthetic oligonucleotide
cacgcucucgggcaucuac

SEQ ID NO: 2297750 - RNA, 19 nt, Artificial Sequence
  Description of Artificial Sequence: Synthetic oligonucleotide
ugcggaacucagccagcug

SEQ ID NO: 2297751 - RNA, 19 nt, Artificial Sequence
  Description of Artificial Sequence: Synthetic oligonucleotide
gcaucucuuaaguccuucc

SEQ ID NO: 2297752 - RNA, 19 nt, Artificial Sequence
  Description of Artificial Sequence: Synthetic oligonucleotide
ucaaccggucccuuaccuu

SEQ ID NO: 2297753 - RNA, 19 nt, Artificial Sequence
  Description of Artificial Sequence: Synthetic oligonucleotide
caucuaaucacuuccucuu

SEQ ID NO: 2297754 - RNA, 19 nt, Artificial Sequence
  Description of Artificial Sequence: Synthetic oligonucleotide
agguuaccagcaaagccca

SEQ ID NO: 2297755 - RNA, 19 nt, Artificial Sequence
  Description of Artificial Sequence: Synthetic oligonucleotide
uugcccugucgggugaugc

SEQ ID NO: 2297756 - RNA, 19 nt, Artificial Sequence
  Description of Artificial Sequence: Synthetic oligonucleotide
uccgugcccucugaggucu

SEQ ID NO: 2297757 - RNA, 19 nt, Artificial Sequence
  Description of Artificial Sequence: Synthetic oligonucleotide
auacuccacauugucccca

SEQ ID NO: 2297758 - RNA, 19 nt, Artificial Sequence
  Description of Artificial Sequence: Synthetic oligonucleotide
uggaggcuauggcgcauga

SEQ ID NO: 2297759 - RNA, 19 nt, Artificial Sequence
  Description of Artificial Sequence: Synthetic oligonucleotide
agccuguggucucguugcg

SEQ ID NO: 2297760 - RNA, 19 nt, Artificial Sequence
  Description of Artificial Sequence: Synthetic oligonucleotide
ugaugcgcacggcggcagc

SEQ ID NO: 2297761 - RNA, 19 nt, Artificial Sequence
  Description of Artificial Sequence: Synthetic oligonucleotide
ggcgugggcugguugaagc

SEQ ID NO: 2297762 - RNA, 19 nt, Artificial Sequence
  Description of Artificial Sequence: Synthetic oligonucleotide
accauccguccauucauuu

SEQ ID NO: 2297763 - RNA, 19 nt, Artificial Sequence
  Description of Artificial Sequence: Synthetic oligonucleotide
accggucccuuaccuugcg

SEQ ID NO: 2297764 - RNA, 19 nt, Artificial Sequence
  Description of Artificial Sequence: Synthetic oligonucleotide
uauuuaccauccguccauu

SEQ ID NO: 2297765 - RNA, 19 nt, Artificial Sequence
  Description of Artificial Sequence: Synthetic oligonucleotide
uaccauccguccauucauu

SEQ ID NO: 2297766 - RNA, 19 nt, Artificial Sequence
  Description of Artificial Sequence: Synthetic oligonucleotide
ccuucaaccggucccuuac

SEQ ID NO: 2297767 - RNA, 19 nt, Artificial Sequence
  Description of Artificial Sequence: Synthetic oligonucleotide
gacgcucuugaagcgguca

SEQ ID NO: 2297768 - RNA, 19 nt, Artificial Sequence
  Description of Artificial Sequence: Synthetic oligonucleotide
gccagaaagcauggaaaag

SEQ ID NO: 2297769 - RNA, 19 nt, Artificial Sequence
  Description of Artificial Sequence: Synthetic oligonucleotide
ucucguugcgcaggcagua

SEQ ID NO: 2297770 - RNA, 19 nt, Artificial Sequence
  Description of Artificial Sequence: Synthetic oligonucleotide
ggcaaagcgguagccauac

SEQ ID NO: 2297771 - RNA, 19 nt, Artificial Sequence
  Description of Artificial Sequence: Synthetic oligonucleotide
uauggcgcaugacgcucuc

SEQ ID NO: 2297772 - RNA, 19 nt, Artificial Sequence
  Description of Artificial Sequence: Synthetic oligonucleotide
uucucacgcucucgggcau

SEQ ID NO: 2297773 - RNA, 19 nt, Artificial Sequence
  Description of Artificial Sequence: Synthetic oligonucleotide
gugacauuugcaggcgaca

SEQ ID NO: 2297774 - RNA, 19 nt, Artificial Sequence
  Description of Artificial Sequence: Synthetic oligonucleotide
ccauccgugcccucugagg

SEQ ID NO: 2297775 - RNA, 19 nt, Artificial Sequence
  Description of Artificial Sequence: Synthetic oligonucleotide
gacuuuugagaggcagaga

SEQ ID NO: 2297776 - RNA, 19 nt, Artificial Sequence
  Description of Artificial Sequence: Synthetic oligonucleotide
cgcaugacgcucucaagcc

SEQ ID NO: 2297777 - RNA, 19 nt, Artificial Sequence
  Description of Artificial Sequence: Synthetic oligonucleotide
ugagggcucggcccugcuc

SEQ ID NO: 2297778 - RNA, 19 nt, Artificial Sequence
  Description of Artificial Sequence: Synthetic oligonucleotide
cauccgugcccucugaggu

SEQ ID NO: 2297779 - RNA, 19 nt, Artificial Sequence
  Description of Artificial Sequence: Synthetic oligonucleotide
ggcggcagcgcugucauac

SEQ ID NO: 2297780 - RNA, 19 nt, Artificial Sequence
  Description of Artificial Sequence: Synthetic oligonucleotide
auagccgcggccacagccu

SEQ ID NO: 2297781 - RNA, 19 nt, Artificial Sequence
  Description of Artificial Sequence: Synthetic oligonucleotide
uccuucaaccggucccuua

SEQ ID NO: 2297782 - RNA, 19 nt, Artificial Sequence
  Description of Artificial Sequence: Synthetic oligonucleotide
acgcucuugaagcggucau

SEQ ID NO: 2297783 - RNA, 19 nt, Artificial Sequence
  Description of Artificial Sequence: Synthetic oligonucleotide
augcgcacggcggcagcgc

SEQ ID NO: 2297784 - RNA, 19 nt, Artificial Sequence
  Description of Artificial Sequence: Synthetic oligonucleotide
ccuggacgcucuugaagcg

SEQ ID NO: 2297785 - RNA, 19 nt, Artificial Sequence
  Description of Artificial Sequence: Synthetic oligonucleotide
cugucgggugaugcgcacg

SEQ ID NO: 2297786 - RNA, 19 nt, Artificial Sequence
  Description of Artificial Sequence: Synthetic oligonucleotide
gcgugggcugguugaagcg

SEQ ID NO: 2297787 - RNA, 19 nt, Artificial Sequence
  Description of Artificial Sequence: Synthetic oligonucleotide
gccaucuuauacacagccc

SEQ ID NO: 2297788 - RNA, 19 nt, Artificial Sequence
  Description of Artificial Sequence: Synthetic oligonucleotide
ugcgcacggcggcagcgcu

SEQ ID NO: 2297789 - RNA, 19 nt, Artificial Sequence
  Description of Artificial Sequence: Synthetic oligonucleotide
ucauagccgcggccacagc

SEQ ID NO: 2297790 - RNA, 19 nt, Artificial Sequence
  Description of Artificial Sequence: Synthetic oligonucleotide
gucccuuaccuugcggaac

SEQ ID NO: 2297791 - RNA, 19 nt, Artificial Sequence
  Description of Artificial Sequence: Synthetic oligonucleotide
ccauccguccauucauuug

SEQ ID NO: 2297792 - RNA, 19 nt, Artificial Sequence
  Description of Artificial Sequence: Synthetic oligonucleotide
gcgguagccauacuccaca

SEQ ID NO: 2297793 - RNA, 19 nt, Artificial Sequence
  Description of Artificial Sequence: Synthetic oligonucleotide
acggcggcagcgcugucau

SEQ ID NO: 2297794 - RNA, 19 nt, Artificial Sequence
  Description of Artificial Sequence: Synthetic oligonucleotide
gacgcucucaagccucugu

SEQ ID NO: 2297795 - RNA, 19 nt, Artificial Sequence
  Description of Artificial Sequence: Synthetic oligonucleotide
cuccucugaucccuugaca

SEQ ID NO: 2297796 - RNA, 19 nt, Artificial Sequence
  Description of Artificial Sequence: Synthetic oligonucleotide
auacacagcccggcggcca

SEQ ID NO: 2297797 - RNA, 19 nt, Artificial Sequence
  Description of Artificial Sequence: Synthetic oligonucleotide
cagugagccuguggucucg

SEQ ID NO: 2297798 - RNA, 19 nt, Artificial Sequence
  Description of Artificial Sequence: Synthetic oligonucleotide
ccguccauucauuuguaca

SEQ ID NO: 2297799 - RNA, 19 nt, Artificial Sequence
  Description of Artificial Sequence: Synthetic oligonucleotide
cucguugcgcaggcaguag

SEQ ID NO: 2297800 - RNA, 19 nt, Artificial Sequence
  Description of Artificial Sequence: Synthetic oligonucleotide
agcuugcccugucggguga

SEQ ID NO: 2297801 - RNA, 19 nt, Artificial Sequence
  Description of Artificial Sequence: Synthetic oligonucleotide
guccauucauuuguacaaa

SEQ ID NO: 2297802 - RNA, 19 nt, Artificial Sequence
  Description of Artificial Sequence: Synthetic oligonucleotide
cguccauucauuuguacaa

SEQ ID NO: 2297803 - RNA, 19 nt, Artificial Sequence
  Description of Artificial Sequence: Synthetic oligonucleotide
gugaugcgcacggcggcag

SEQ ID NO: 2297804 - RNA, 19 nt, Artificial Sequence
  Description of Artificial Sequence: Synthetic oligonucleotide
uggcaacgcuccaccugga

SEQ ID NO: 2297805 - RNA, 19 nt, Artificial Sequence
  Description of Artificial Sequence: Synthetic oligonucleotide
cuggaggcuauggcgcaug

SEQ ID NO: 2297806 - RNA, 19 nt, Artificial Sequence
  Description of Artificial Sequence: Synthetic oligonucleotide
cgugacauuugcaggcgac

SEQ ID NO: 2297807 - RNA, 19 nt, Artificial Sequence
  Description of Artificial Sequence: Synthetic oligonucleotide
gcugggguccacguagacc

SEQ ID NO: 2297808 - RNA, 19 nt, Artificial Sequence
  Description of Artificial Sequence: Synthetic oligonucleotide
ugcccucugaggucuuguu

SEQ ID NO: 2297809 - RNA, 19 nt, Artificial Sequence
  Description of Artificial Sequence: Synthetic oligonucleotide
ucaugagggcucggcccug

SEQ ID NO: 2297810 - RNA, 19 nt, Artificial Sequence
  Description of Artificial Sequence: Synthetic oligonucleotide
ggacccugagacuccguga

SEQ ID NO: 2297811 - RNA, 19 nt, Artificial Sequence
  Description of Artificial Sequence: Synthetic oligonucleotide
cugcuccucugaucccuug

SEQ ID NO: 2297812 - RNA, 19 nt, Artificial Sequence
  Description of Artificial Sequence: Synthetic oligonucleotide
gcuauggcgcaugacgcuc

SEQ ID NO: 2297813 - RNA, 19 nt, Artificial Sequence
  Description of Artificial Sequence: Synthetic oligonucleotide
aggcaguagucaggggcug

SEQ ID NO: 2297814 - RNA, 19 nt, Artificial Sequence
  Description of Artificial Sequence: Synthetic oligonucleotide
cagcccggcggccagccuc

SEQ ID NO: 2297815 - RNA, 19 nt, Artificial Sequence
  Description of Artificial Sequence: Synthetic oligonucleotide
guccucuggcgugggcugg

SEQ ID NO: 2297816 - RNA, 19 nt, Artificial Sequence
  Description of Artificial Sequence: Synthetic oligonucleotide
ugacgcucucaagccucug

SEQ ID NO: 2297817 - RNA, 19 nt, Artificial Sequence
  Description of Artificial Sequence: Synthetic oligonucleotide
gggguccacguagaccagg

SEQ ID NO: 2297818 - RNA, 19 nt, Artificial Sequence
  Description of Artificial Sequence: Synthetic oligonucleotide
agacuccgugacauuugca

SEQ ID NO: 2297819 - RNA, 19 nt, Artificial Sequence
  Description of Artificial Sequence: Synthetic oligonucleotide
ggucccuuaccuugcggaa

SEQ ID NO: 2297820 - RNA, 19 nt, Artificial Sequence
  Description of Artificial Sequence: Synthetic oligonucleotide
cuccacuggcugcagguua

SEQ ID NO: 2297821 - RNA, 19 nt, Artificial Sequence
  Description of Artificial Sequence: Synthetic oligonucleotide
agugagccuguggucucgu

SEQ ID NO: 2297822 - RNA, 19 nt, Artificial Sequence
  Description of Artificial Sequence: Synthetic oligonucleotide
gcaggacccugagacuccg

SEQ ID NO: 2297823 - RNA, 19 nt, Artificial Sequence
  Description of Artificial Sequence: Synthetic oligonucleotide
ggcaacgcuccaccuggac

SEQ ID NO: 2297824 - RNA, 19 nt, Artificial Sequence
  Description of Artificial Sequence: Synthetic oligonucleotide
cuauggcgcaugacgcucu

SEQ ID NO: 2297825 - RNA, 19 nt, Artificial Sequence
  Description of Artificial Sequence: Synthetic oligonucleotide
gguccacaaucucggugca

SEQ ID NO: 2297826 - RNA, 19 nt, Artificial Sequence
  Description of Artificial Sequence: Synthetic oligonucleotide
uccucuggcgugggcuggu

SEQ ID NO: 2297827 - RNA, 19 nt, Artificial Sequence
  Description of Artificial Sequence: Synthetic oligonucleotide
gcggucauagccgcggcca

SEQ ID NO: 2297828 - RNA, 19 nt, Artificial Sequence
  Description of Artificial Sequence: Synthetic oligonucleotide
cuugcccugucgggugaug

SEQ ID NO: 2297829 - RNA, 19 nt, Artificial Sequence
  Description of Artificial Sequence: Synthetic oligonucleotide
gcccugucgggugaugcgc

SEQ ID NO: 2297830 - RNA, 19 nt, Artificial Sequence
  Description of Artificial Sequence: Synthetic oligonucleotide
cucuuuccuggaggcuaug

SEQ ID NO: 2297831 - RNA, 19 nt, Artificial Sequence
  Description of Artificial Sequence: Synthetic oligonucleotide
cagccucacagccauccgu

SEQ ID NO: 2297832 - RNA, 19 nt, Artificial Sequence
  Description of Artificial Sequence: Synthetic oligonucleotide
cguugcgcaggcaguaguc

SEQ ID NO: 2297833 - RNA, 19 nt, Artificial Sequence
  Description of Artificial Sequence: Synthetic oligonucleotide
gguuaccagcaaagcccag

SEQ ID NO: 2297834 - RNA, 19 nt, Artificial Sequence
  Description of Artificial Sequence: Synthetic oligonucleotide
caggcgacaucagccaucu

SEQ ID NO: 2297835 - RNA, 19 nt, Artificial Sequence
  Description of Artificial Sequence: Synthetic oligonucleotide
ggcugguugaagcggcugu

SEQ ID NO: 2297836 - RNA, 19 nt, Artificial Sequence
  Description of Artificial Sequence: Synthetic oligonucleotide
gguccacguagaccagguc

SEQ ID NO: 2297837 - RNA, 19 nt, Artificial Sequence
  Description of Artificial Sequence: Synthetic oligonucleotide
cugaucccuugacaaaguu

SEQ ID NO: 2297838 - RNA, 19 nt, Artificial Sequence
  Description of Artificial Sequence: Synthetic oligonucleotide
gucgggugaugcgcacggc

SEQ ID NO: 2297839 - RNA, 19 nt, Artificial Sequence
  Description of Artificial Sequence: Synthetic oligonucleotide
gcgacaucagccaucuuau

SEQ ID NO: 2297840 - RNA, 19 nt, Artificial Sequence
  Description of Artificial Sequence: Synthetic oligonucleotide
gcaugggugccaucauuua

SEQ ID NO: 2297841 - RNA, 19 nt, Artificial Sequence
  Description of Artificial Sequence: Synthetic oligonucleotide
auccguccauucauuugua

SEQ ID NO: 2297842 - RNA, 19 nt, Artificial Sequence
  Description of Artificial Sequence: Synthetic oligonucleotide
ggcuauggcgcaugacgcu

SEQ ID NO: 2297843 - RNA, 19 nt, Artificial Sequence
  Description of Artificial Sequence: Synthetic oligonucleotide
cacggcggcagcgcuguca

SEQ ID NO: 2297844 - RNA, 19 nt, Artificial Sequence
  Description of Artificial Sequence: Synthetic oligonucleotide
gcaugacgcucucaagccu

SEQ ID NO: 2297845 - RNA, 19 nt, Artificial Sequence
  Description of Artificial Sequence: Synthetic oligonucleotide
gcaggcgacaucagccauc

SEQ ID NO: 2297846 - RNA, 19 nt, Artificial Sequence
  Description of Artificial Sequence: Synthetic oligonucleotide
gggugccaucauuuacaga

SEQ ID NO: 2297847 - RNA, 19 nt, Artificial Sequence
  Description of Artificial Sequence: Synthetic oligonucleotide
cccaguccucacagagggc

SEQ ID NO: 2297848 - RNA, 19 nt, Artificial Sequence
  Description of Artificial Sequence: Synthetic oligonucleotide
ccugucgggugaugcgcac

SEQ ID NO: 2297849 - RNA, 19 nt, Artificial Sequence
  Description of Artificial Sequence: Synthetic oligonucleotide
ggcaugggugccaucauuu

SEQ ID NO: 2297850 - RNA, 19 nt, Artificial Sequence
  Description of Artificial Sequence: Synthetic oligonucleotide
ccggucccuuaccuugcgg

SEQ ID NO: 2297851 - RNA, 19 nt, Artificial Sequence
  Description of Artificial Sequence: Synthetic oligonucleotide
gccuguggucucguugcgc

SEQ ID NO: 2297852 - RNA, 19 nt, Artificial Sequence
  Description of Artificial Sequence: Synthetic oligonucleotide
gucucguugcgcaggcagu

SEQ ID NO: 2297853 - RNA, 19 nt, Artificial Sequence
  Description of Artificial Sequence: Synthetic oligonucleotide
gcccagugagccugugguc

SEQ ID NO: 2297854 - RNA, 19 nt, Artificial Sequence
  Description of Artificial Sequence: Synthetic oligonucleotide
ccuuaccuugcggaacuca

SEQ ID NO: 2297855 - RNA, 19 nt, Artificial Sequence
  Description of Artificial Sequence: Synthetic oligonucleotide
gcugcaggacccugagacu

SEQ ID NO: 2297856 - RNA, 19 nt, Artificial Sequence
  Description of Artificial Sequence: Synthetic oligonucleotide
cugcaguggcaacgcucca

SEQ ID NO: 2297857 - RNA, 19 nt, Artificial Sequence
  Description of Artificial Sequence: Synthetic oligonucleotide
cacguagaccagguccucu

SEQ ID NO: 2297858 - RNA, 19 nt, Artificial Sequence
  Description of Artificial Sequence: Synthetic oligonucleotide
caguggcaacgcuccaccu

SEQ ID NO: 2297859 - RNA, 19 nt, Artificial Sequence
  Description of Artificial Sequence: Synthetic oligonucleotide
gguagccauacuccacauu

SEQ ID NO: 2297860 - RNA, 19 nt, Artificial Sequence
  Description of Artificial Sequence: Synthetic oligonucleotide
ggcccugggugcccaguga

SEQ ID NO: 2297861 - RNA, 19 nt, Artificial Sequence
  Description of Artificial Sequence: Synthetic oligonucleotide
gcgcugucauacuucuccu

SEQ ID NO: 2297862 - RNA, 19 nt, Artificial Sequence
  Description of Artificial Sequence: Synthetic oligonucleotide
cccagugagccuguggucu

SEQ ID NO: 2297863 - RNA, 19 nt, Artificial Sequence
  Description of Artificial Sequence: Synthetic oligonucleotide
cuggcgugggcugguugaa

SEQ ID NO: 2297864 - RNA, 19 nt, Artificial Sequence
  Description of Artificial Sequence: Synthetic oligonucleotide
cccugucgggugaugcgca

SEQ ID NO: 2297865 - RNA, 19 nt, Artificial Sequence
  Description of Artificial Sequence: Synthetic oligonucleotide
cucacgcucucgggcaucu

SEQ ID NO: 2297866 - RNA, 19 nt, Artificial Sequence
  Description of Artificial Sequence: Synthetic oligonucleotide
ucacgcucucgggcaucua

SEQ ID NO: 2297867 - RNA, 19 nt, Artificial Sequence
  Description of Artificial Sequence: Synthetic oligonucleotide
ggugcccagugagccugug

SEQ ID NO: 2297868 - RNA, 19 nt, Artificial Sequence
  Description of Artificial Sequence: Synthetic oligonucleotide
ccgugacauuugcaggcga

SEQ ID NO: 2297869 - RNA, 19 nt, Artificial Sequence
  Description of Artificial Sequence: Synthetic oligonucleotide
cgggcaucuacaaacucuu

SEQ ID NO: 2297870 - RNA, 19 nt, Artificial Sequence
  Description of Artificial Sequence: Synthetic oligonucleotide
ccagcuugcccugucgggu

SEQ ID NO: 2297871 - RNA, 19 nt, Artificial Sequence
  Description of Artificial Sequence: Synthetic oligonucleotide
aggcgacaucagccaucuu

SEQ ID NO: 2297872 - RNA, 19 nt, Artificial Sequence
  Description of Artificial Sequence: Synthetic oligonucleotide
cagcaucucuuaaguccuu

SEQ ID NO: 2297873 - RNA, 19 nt, Artificial Sequence
  Description of Artificial Sequence: Synthetic oligonucleotide
guccacaaucucggugcau

SEQ ID NO: 2297874 - RNA, 19 nt, Artificial Sequence
  Description of Artificial Sequence: Synthetic oligonucleotide
cggcuguuagccagcucca

SEQ ID NO: 2297875 - RNA, 19 nt, Artificial Sequence
  Description of Artificial Sequence: Synthetic oligonucleotide
gcugguugaagcggcuguu

SEQ ID NO: 2297876 - RNA, 19 nt, Artificial Sequence
  Description of Artificial Sequence: Synthetic oligonucleotide
caggacccugagacuccgu

SEQ ID NO: 2297877 - RNA, 19 nt, Artificial Sequence
  Description of Artificial Sequence: Synthetic oligonucleotide
gcaaagcgguagccauacu

SEQ ID NO: 2297878 - RNA, 19 nt, Artificial Sequence
  Description of Artificial Sequence: Synthetic oligonucleotide
gcgcacggcggcagcgcug

SEQ ID NO: 2297879 - RNA, 19 nt, Artificial Sequence
  Description of Artificial Sequence: Synthetic oligonucleotide
cccuuaccuugcggaacuc

SEQ ID NO: 2297880 - RNA, 19 nt, Artificial Sequence
  Description of Artificial Sequence: Synthetic oligonucleotide
gcggcagcgcugucauacu

SEQ ID NO: 2297881 - RNA, 19 nt, Artificial Sequence
  Description of Artificial Sequence: Synthetic oligonucleotide
cggccagccucguuguucu

SEQ ID NO: 2297882 - RNA, 19 nt, Artificial Sequence
  Description of Artificial Sequence: Synthetic oligonucleotide
cgcucuugaagcggucaua

SEQ ID NO: 2297883 - RNA, 19 nt, Artificial Sequence
  Description of Artificial Sequence: Synthetic oligonucleotide
cuccuucaaccggucccuu

SEQ ID NO: 2297884 - RNA, 19 nt, Artificial Sequence
  Description of Artificial Sequence: Synthetic oligonucleotide
cgguagccauacuccacau

SEQ ID NO: 2297885 - RNA, 19 nt, Artificial Sequence
  Description of Artificial Sequence: Synthetic oligonucleotide
gcuugcccugucgggugau

SEQ ID NO: 2297886 - RNA, 19 nt, Artificial Sequence
  Description of Artificial Sequence: Synthetic oligonucleotide
gcacggcggcagcgcuguc

SEQ ID NO: 2297887 - RNA, 19 nt, Artificial Sequence
  Description of Artificial Sequence: Synthetic oligonucleotide
cgcacggcggcagcgcugu

SEQ ID NO: 2297888 - RNA, 19 nt, Artificial Sequence
  Description of Artificial Sequence: Synthetic oligonucleotide
cggcagcgcugucauacuu

SEQ ID NO: 2297889 - RNA, 19 nt, Artificial Sequence
  Description of Artificial Sequence: Synthetic oligonucleotide
cggcggccagccucguugu

SEQ ID NO: 2297890 - RNA, 19 nt, Artificial Sequence
  Description of Artificial Sequence: Synthetic oligonucleotide
cggcggcagcgcugucaua

SEQ ID NO: 2297891 - RNA, 19 nt, Artificial Sequence
  Description of Artificial Sequence: Synthetic oligonucleotide
cccggcggccagccucguu

SEQ ID NO: 2297892 - RNA, 19 nt, Artificial Sequence
  Description of Artificial Sequence: Synthetic oligonucleotide
gcccggcggccagccucgu

SEQ ID NO: 2297893 - RNA, 19 nt, Artificial Sequence
  Description of Artificial Sequence: Synthetic oligonucleotide
ugcaguauaacuuaucucc

SEQ ID NO: 2297894 - RNA, 19 nt, Artificial Sequence
  Description of Artificial Sequence: Synthetic oligonucleotide
auugaauccauguaacaac

SEQ ID NO: 2297895 - RNA, 19 nt, Artificial Sequence
  Description of Artificial Sequence: Synthetic oligonucleotide
ucuuaaugcagccuuauca

SEQ ID NO: 2297896 - RNA, 19 nt, Artificial Sequence
  Description of Artificial Sequence: Synthetic oligonucleotide
auuaggaagguauaauuuc

SEQ ID NO: 2297897 - RNA, 19 nt, Artificial Sequence
  Description of Artificial Sequence: Synthetic oligonucleotide
cauuccugaaaauugauag

SEQ ID NO: 2297898 - RNA, 19 nt, Artificial Sequence
  Description of Artificial Sequence: Synthetic oligonucleotide
uuuguugaaguucagcuac

SEQ ID NO: 2297899 - RNA, 19 nt, Artificial Sequence
  Description of Artificial Sequence: Synthetic oligonucleotide
aacuugaagacaaagggag

SEQ ID NO: 2297900 - RNA, 19 nt, Artificial Sequence
  Description of Artificial Sequence: Synthetic oligonucleotide
uagccuuggaucaaguucg

SEQ ID NO: 2297901 - RNA, 19 nt, Artificial Sequence
  Description of Artificial Sequence: Synthetic oligonucleotide
uguuauguacugaacagug

SEQ ID NO: 2297902 - RNA, 19 nt, Artificial Sequence
  Description of Artificial Sequence: Synthetic oligonucleotide
aaagcgauccuuacuaagc

SEQ ID NO: 2297903 - RNA, 19 nt, Artificial Sequence
  Description of Artificial Sequence: Synthetic oligonucleotide
ucaucuauguccauggaac

SEQ ID NO: 2297904 - RNA, 19 nt, Artificial Sequence
  Description of Artificial Sequence: Synthetic oligonucleotide
aagcgauccuuacuaagcc

SEQ ID NO: 2297905 - RNA, 19 nt, Artificial Sequence
  Description of Artificial Sequence: Synthetic oligonucleotide
aaagcuguguauuaaugga

SEQ ID NO: 2297906 - RNA, 19 nt, Artificial Sequence
  Description of Artificial Sequence: Synthetic oligonucleotide
uauacugaaaucuucuggu

SEQ ID NO: 2297907 - RNA, 19 nt, Artificial Sequence
  Description of Artificial Sequence: Synthetic oligonucleotide
ugaaacauaaguacagcac

SEQ ID NO: 2297908 - RNA, 19 nt, Artificial Sequence
  Description of Artificial Sequence: Synthetic oligonucleotide
gcuguuaacaauuagagga

SEQ ID NO: 2297909 - RNA, 19 nt, Artificial Sequence
  Description of Artificial Sequence: Synthetic oligonucleotide
aguguuauguacugaacag

SEQ ID NO: 2297910 - RNA, 19 nt, Artificial Sequence
  Description of Artificial Sequence: Synthetic oligonucleotide
aaaagcgauccuuacuaag

SEQ ID NO: 2297911 - RNA, 19 nt, Artificial Sequence
  Description of Artificial Sequence: Synthetic oligonucleotide
uuaaaugguccacacgugc

SEQ ID NO: 2297912 - RNA, 19 nt, Artificial Sequence
  Description of Artificial Sequence: Synthetic oligonucleotide
uuagguucuauccuuacaa

SEQ ID NO: 2297913 - RNA, 19 nt, Artificial Sequence
  Description of Artificial Sequence: Synthetic oligonucleotide
uguguauuaauggagaguc

SEQ ID NO: 2297914 - RNA, 19 nt, Artificial Sequence
  Description of Artificial Sequence: Synthetic oligonucleotide
aguauaacuuaucucccgg

SEQ ID NO: 2297915 - RNA, 19 nt, Artificial Sequence
  Description of Artificial Sequence: Synthetic oligonucleotide
uuaauggagagucugcagu

SEQ ID NO: 2297916 - RNA, 19 nt, Artificial Sequence
  Description of Artificial Sequence: Synthetic oligonucleotide
ucaauaaugcuguuaacaa

SEQ ID NO: 2297917 - RNA, 19 nt, Artificial Sequence
  Description of Artificial Sequence: Synthetic oligonucleotide
ucuauccuuacaacgcugg

SEQ ID NO: 2297918 - RNA, 19 nt, Artificial Sequence
  Description of Artificial Sequence: Synthetic oligonucleotide
uuaggaagguauaauuuca

SEQ ID NO: 2297919 - RNA, 19 nt, Artificial Sequence
  Description of Artificial Sequence: Synthetic oligonucleotide
uuauguacugaacagugaa

SEQ ID NO: 2297920 - RNA, 19 nt, Artificial Sequence
  Description of Artificial Sequence: Synthetic oligonucleotide
cuauacugaaaucuucugg

SEQ ID NO: 2297921 - RNA, 19 nt, Artificial Sequence
  Description of Artificial Sequence: Synthetic oligonucleotide
aaaguggauaccuucugca

SEQ ID NO: 2297922 - RNA, 19 nt, Artificial Sequence
  Description of Artificial Sequence: Synthetic oligonucleotide
gaaaauugauagguggugg

SEQ ID NO: 2297923 - RNA, 19 nt, Artificial Sequence
  Description of Artificial Sequence: Synthetic oligonucleotide
uauuacaguguuauguacu

SEQ ID NO: 2297924 - RNA, 19 nt, Artificial Sequence
  Description of Artificial Sequence: Synthetic oligonucleotide
uaaaagcuguguauuaaug

SEQ ID NO: 2297925 - RNA, 19 nt, Artificial Sequence
  Description of Artificial Sequence: Synthetic oligonucleotide
acagucauguuuccagucc

SEQ ID NO: 2297926 - RNA, 19 nt, Artificial Sequence
  Description of Artificial Sequence: Synthetic oligonucleotide
guaacaaccugauaaaguc

SEQ ID NO: 2297927 - RNA, 19 nt, Artificial Sequence
  Description of Artificial Sequence: Synthetic oligonucleotide
uguauuaauggagagucug

SEQ ID NO: 2297928 - RNA, 19 nt, Artificial Sequence
  Description of Artificial Sequence: Synthetic oligonucleotide
aauaaugcuguuaacaauu

SEQ ID NO: 2297929 - RNA, 19 nt, Artificial Sequence
  Description of Artificial Sequence: Synthetic oligonucleotide
aauugauaggugguggcgg

SEQ ID NO: 2297930 - RNA, 19 nt, Artificial Sequence
  Description of Artificial Sequence: Synthetic oligonucleotide
caucaguaggucuuaaugc

SEQ ID NO: 2297931 - RNA, 19 nt, Artificial Sequence
  Description of Artificial Sequence: Synthetic oligonucleotide
uugucuguauuuuaucugc

SEQ ID NO: 2297932 - RNA, 19 nt, Artificial Sequence
  Description of Artificial Sequence: Synthetic oligonucleotide
uugaaacauaaguacagca

SEQ ID NO: 2297933 - RNA, 19 nt, Artificial Sequence
  Description of Artificial Sequence: Synthetic oligonucleotide
acaucaguaggucuuaaug

SEQ ID NO: 2297934 - RNA, 19 nt, Artificial Sequence
  Description of Artificial Sequence: Synthetic oligonucleotide
acaagcaucgaagaacggc

SEQ ID NO: 2297935 - RNA, 19 nt, Artificial Sequence
  Description of Artificial Sequence: Synthetic oligonucleotide
aaauugcuaggaaaagugg

SEQ ID NO: 2297936 - RNA, 19 nt, Artificial Sequence
  Description of Artificial Sequence: Synthetic oligonucleotide
cuuggaucaaguucgcagg

SEQ ID NO: 2297937 - RNA, 19 nt, Artificial Sequence
  Description of Artificial Sequence: Synthetic oligonucleotide
aaauugauaggugguggcg

SEQ ID NO: 2297938 - RNA, 19 nt, Artificial Sequence
  Description of Artificial Sequence: Synthetic oligonucleotide
aggaaaaguggauaccuuc

SEQ ID NO: 2297939 - RNA, 19 nt, Artificial Sequence
  Description of Artificial Sequence: Synthetic oligonucleotide
agaacggcaaaucugauuu

SEQ ID NO: 2297940 - RNA, 19 nt, Artificial Sequence
  Description of Artificial Sequence: Synthetic oligonucleotide
ugucacuaaaaccugugcu

SEQ ID NO: 2297941 - RNA, 19 nt, Artificial Sequence
  Description of Artificial Sequence: Synthetic oligonucleotide
uuucaauacaucucccacc

SEQ ID NO: 2297942 - RNA, 19 nt, Artificial Sequence
  Description of Artificial Sequence: Synthetic oligonucleotide
caauacaucucccaccagg

SEQ ID NO: 2297943 - RNA, 19 nt, Artificial Sequence
  Description of Artificial Sequence: Synthetic oligonucleotide
gauagggcaaguuugccac

SEQ ID NO: 2297944 - RNA, 19 nt, Artificial Sequence
  Description of Artificial Sequence: Synthetic oligonucleotide
aaguuugccacacaagcau

SEQ ID NO: 2297945 - RNA, 19 nt, Artificial Sequence
  Description of Artificial Sequence: Synthetic oligonucleotide
auuccugaaaauugauagg

SEQ ID NO: 2297946 - RNA, 19 nt, Artificial Sequence
  Description of Artificial Sequence: Synthetic oligonucleotide
uauuaggaagguauaauuu

SEQ ID NO: 2297947 - RNA, 19 nt, Artificial Sequence
  Description of Artificial Sequence: Synthetic oligonucleotide
ugcagccuuaucaauaaug

SEQ ID NO: 2297948 - RNA, 19 nt, Artificial Sequence
  Description of Artificial Sequence: Synthetic oligonucleotide
aacaaaagcgauccuuacu

SEQ ID NO: 2297949 - RNA, 19 nt, Artificial Sequence
  Description of Artificial Sequence: Synthetic oligonucleotide
ugguauuacaguguuaugu

SEQ ID NO: 2297950 - RNA, 19 nt, Artificial Sequence
  Description of Artificial Sequence: Synthetic oligonucleotide
ucuauguccauggaacggg

SEQ ID NO: 2297951 - RNA, 19 nt, Artificial Sequence
  Description of Artificial Sequence: Synthetic oligonucleotide
ugcuguuaacaauuagagg

SEQ ID NO: 2297952 - RNA, 19 nt, Artificial Sequence
  Description of Artificial Sequence: Synthetic oligonucleotide
uuugucacuaaaaccugug

SEQ ID NO: 2297953 - RNA, 19 nt, Artificial Sequence
  Description of Artificial Sequence: Synthetic oligonucleotide
aaauggucggugaagcaac

SEQ ID NO: 2297954 - RNA, 19 nt, Artificial Sequence
  Description of Artificial Sequence: Synthetic oligonucleotide
ucgaagaacggcaaaucug

SEQ ID NO: 2297955 - RNA, 19 nt, Artificial Sequence
  Description of Artificial Sequence: Synthetic oligonucleotide
ucacuaaaaccugugcugg

SEQ ID NO: 2297956 - RNA, 19 nt, Artificial Sequence
  Description of Artificial Sequence: Synthetic oligonucleotide
aauauuaggaagguauaau

SEQ ID NO: 2297957 - RNA, 19 nt, Artificial Sequence
  Description of Artificial Sequence: Synthetic oligonucleotide
aaguuauucuuccccaccu

SEQ ID NO: 2297958 - RNA, 19 nt, Artificial Sequence
  Description of Artificial Sequence: Synthetic oligonucleotide
uuggccuuuucuaacagcu

SEQ ID NO: 2297959 - RNA, 19 nt, Artificial Sequence
  Description of Artificial Sequence: Synthetic oligonucleotide
ucugauagggcaaguuugc

SEQ ID NO: 2297960 - RNA, 19 nt, Artificial Sequence
  Description of Artificial Sequence: Synthetic oligonucleotide
ucuguauuuuaucugcuau

SEQ ID NO: 2297961 - RNA, 19 nt, Artificial Sequence
  Description of Artificial Sequence: Synthetic oligonucleotide
ugcuauacugaaaucuucu

SEQ ID NO: 2297962 - RNA, 19 nt, Artificial Sequence
  Description of Artificial Sequence: Synthetic oligonucleotide
aaugcagccuuaucaauaa

SEQ ID NO: 2297963 - RNA, 19 nt, Artificial Sequence
  Description of Artificial Sequence: Synthetic oligonucleotide
acaaaagcgauccuuacua

SEQ ID NO: 2297964 - RNA, 19 nt, Artificial Sequence
  Description of Artificial Sequence: Synthetic oligonucleotide
aguacagcacaucugaaaa

SEQ ID NO: 2297965 - RNA, 19 nt, Artificial Sequence
  Description of Artificial Sequence: Synthetic oligonucleotide
ucugguauuacaguguuau

SEQ ID NO: 2297966 - RNA, 19 nt, Artificial Sequence
  Description of Artificial Sequence: Synthetic oligonucleotide
gagaggagaucugauaggg

SEQ ID NO: 2297967 - RNA, 19 nt, Artificial Sequence
  Description of Artificial Sequence: Synthetic oligonucleotide
auaguuccuuuccaacagc

SEQ ID NO: 2297968 - RNA, 19 nt, Artificial Sequence
  Description of Artificial Sequence: Synthetic oligonucleotide
ucagcuacuagccuuggau

SEQ ID NO: 2297969 - RNA, 19 nt, Artificial Sequence
  Description of Artificial Sequence: Synthetic oligonucleotide
aucaguaggucuuaaugca

SEQ ID NO: 2297970 - RNA, 19 nt, Artificial Sequence
  Description of Artificial Sequence: Synthetic oligonucleotide
cugcacuugauuugaaugc

SEQ ID NO: 2297971 - RNA, 19 nt, Artificial Sequence
  Description of Artificial Sequence: Synthetic oligonucleotide
auauuaggaagguauaauu

SEQ ID NO: 2297972 - RNA, 19 nt, Artificial Sequence
  Description of Artificial Sequence: Synthetic oligonucleotide
aacauaaguacagcacauc

SEQ ID NO: 2297973 - RNA, 19 nt, Artificial Sequence
  Description of Artificial Sequence: Synthetic oligonucleotide
aaguucgcaggcaacuacc

SEQ ID NO: 2297974 - RNA, 19 nt, Artificial Sequence
  Description of Artificial Sequence: Synthetic oligonucleotide
auuaauggagagucugcag

SEQ ID NO: 2297975 - RNA, 19 nt, Artificial Sequence
  Description of Artificial Sequence: Synthetic oligonucleotide
ucaguaggucuuaaugcag

SEQ ID NO: 2297976 - RNA, 19 nt, Artificial Sequence
  Description of Artificial Sequence: Synthetic oligonucleotide
gaggagaucugauagggca

SEQ ID NO: 2297977 - RNA, 19 nt, Artificial Sequence
  Description of Artificial Sequence: Synthetic oligonucleotide
uuccgaacaaaagcgaucc

SEQ ID NO: 2297978 - RNA, 19 nt, Artificial Sequence
  Description of Artificial Sequence: Synthetic oligonucleotide
uaaugcuguuaacaauuag

SEQ ID NO: 2297979 - RNA, 19 nt, Artificial Sequence
  Description of Artificial Sequence: Synthetic oligonucleotide
cuugauuugaaugcagcag

SEQ ID NO: 2297980 - RNA, 19 nt, Artificial Sequence
  Description of Artificial Sequence: Synthetic oligonucleotide
uucauuaaaugguccacac

SEQ ID NO: 2297981 - RNA, 19 nt, Artificial Sequence
  Description of Artificial Sequence: Synthetic oligonucleotide
ccugaaaauugauaggugg

SEQ ID NO: 2297982 - RNA, 19 nt, Artificial Sequence
  Description of Artificial Sequence: Synthetic oligonucleotide
auccuuacaacgcuggacu

SEQ ID NO: 2297983 - RNA, 19 nt, Artificial Sequence
  Description of Artificial Sequence: Synthetic oligonucleotide
agccuuaucaauaaugcug

SEQ ID NO: 2297984 - RNA, 19 nt, Artificial Sequence
  Description of Artificial Sequence: Synthetic oligonucleotide
uauuaauggagagucugca

SEQ ID NO: 2297985 - RNA, 19 nt, Artificial Sequence
  Description of Artificial Sequence: Synthetic oligonucleotide
aaaauggucggugaagcaa

SEQ ID NO: 2297986 - RNA, 19 nt, Artificial Sequence
  Description of Artificial Sequence: Synthetic oligonucleotide
gaaaaguggauaccuucug

SEQ ID NO: 2297987 - RNA, 19 nt, Artificial Sequence
  Description of Artificial Sequence: Synthetic oligonucleotide
auccuuacuaagccauccc

SEQ ID NO: 2297988 - RNA, 19 nt, Artificial Sequence
  Description of Artificial Sequence: Synthetic oligonucleotide
uuuuaucugcuauacugaa

SEQ ID NO: 2297989 - RNA, 19 nt, Artificial Sequence
  Description of Artificial Sequence: Synthetic oligonucleotide
acacaagcaucgaagaacg

SEQ ID NO: 2297990 - RNA, 19 nt, Artificial Sequence
  Description of Artificial Sequence: Synthetic oligonucleotide
cuagccuuggaucaaguuc

SEQ ID NO: 2297991 - RNA, 19 nt, Artificial Sequence
  Description of Artificial Sequence: Synthetic oligonucleotide
uucaaauugcuaggaaaag

SEQ ID NO: 2297992 - RNA, 19 nt, Artificial Sequence
  Description of Artificial Sequence: Synthetic oligonucleotide
uaaaugguccacacgugcu

SEQ ID NO: 2297993 - RNA, 19 nt, Artificial Sequence
  Description of Artificial Sequence: Synthetic oligonucleotide
acuugauuugaaugcagca

SEQ ID NO: 2297994 - RNA, 19 nt, Artificial Sequence
  Description of Artificial Sequence: Synthetic oligonucleotide
uuuuccgaacaaaagcgau

SEQ ID NO: 2297995 - RNA, 19 nt, Artificial Sequence
  Description of Artificial Sequence: Synthetic oligonucleotide
ggauucuuagguucuaucc

SEQ ID NO: 2297996 - RNA, 19 nt, Artificial Sequence
  Description of Artificial Sequence: Synthetic oligonucleotide
uugucacuaaaaccugugc

SEQ ID NO: 2297997 - RNA, 19 nt, Artificial Sequence
  Description of Artificial Sequence: Synthetic oligonucleotide
uaaugcagccuuaucaaua

SEQ ID NO: 2297998 - RNA, 19 nt, Artificial Sequence
  Description of Artificial Sequence: Synthetic oligonucleotide
gcaaguuugccacacaagc

SEQ ID NO: 2297999 - RNA, 19 nt, Artificial Sequence
  Description of Artificial Sequence: Synthetic oligonucleotide
ugauuugaaugcagcagac

SEQ ID NO: 2298000 - RNA, 19 nt, Artificial Sequence
  Description of Artificial Sequence: Synthetic oligonucleotide
cauuaaaugguccacacgu

SEQ ID NO: 2298001 - RNA, 19 nt, Artificial Sequence
  Description of Artificial Sequence: Synthetic oligonucleotide
caucuauguccauggaacg

SEQ ID NO: 2298002 - RNA, 19 nt, Artificial Sequence
  Description of Artificial Sequence: Synthetic oligonucleotide
caguauaacuuaucucccg

SEQ ID NO: 2298003 - RNA, 19 nt, Artificial Sequence
  Description of Artificial Sequence: Synthetic oligonucleotide
uuacuaagccaucccauuc

SEQ ID NO: 2298004 - RNA, 19 nt, Artificial Sequence
  Description of Artificial Sequence: Synthetic oligonucleotide
aacgcuggacuccaccuug

SEQ ID NO: 2298005 - RNA, 19 nt, Artificial Sequence
  Description of Artificial Sequence: Synthetic oligonucleotide
ugauaaagucaucuauguc

SEQ ID NO: 2298006 - RNA, 19 nt, Artificial Sequence
  Description of Artificial Sequence: Synthetic oligonucleotide
aucugcuauacugaaaucu

SEQ ID NO: 2298007 - RNA, 19 nt, Artificial Sequence
  Description of Artificial Sequence: Synthetic oligonucleotide
uuaggauuugucuguauuu

SEQ ID NO: 2298008 - RNA, 19 nt, Artificial Sequence
  Description of Artificial Sequence: Synthetic oligonucleotide
uccuuacuaagccauccca

SEQ ID NO: 2298009 - RNA, 19 nt, Artificial Sequence
  Description of Artificial Sequence: Synthetic oligonucleotide
uccacacgugcuaaaagcu

SEQ ID NO: 2298010 - RNA, 19 nt, Artificial Sequence
  Description of Artificial Sequence: Synthetic oligonucleotide
uugggaggcggucugaagu

SEQ ID NO: 2298011 - RNA, 19 nt, Artificial Sequence
  Description of Artificial Sequence: Synthetic oligonucleotide
cuguguugaacaugagucc

SEQ ID NO: 2298012 - RNA, 19 nt, Artificial Sequence
  Description of Artificial Sequence: Synthetic oligonucleotide
gcaaaucugauuucaauac

SEQ ID NO: 2298013 - RNA, 19 nt, Artificial Sequence
  Description of Artificial Sequence: Synthetic oligonucleotide
gaauucuauaguuccuuuc

SEQ ID NO: 2298014 - RNA, 19 nt, Artificial Sequence
  Description of Artificial Sequence: Synthetic oligonucleotide
uccugaaaauugauaggug

SEQ ID NO: 2298015 - RNA, 19 nt, Artificial Sequence
  Description of Artificial Sequence: Synthetic oligonucleotide
uauaacuuaucucccgguu

SEQ ID NO: 2298016 - RNA, 19 nt, Artificial Sequence
  Description of Artificial Sequence: Synthetic oligonucleotide
cacuugauuugaaugcagc

SEQ ID NO: 2298017 - RNA, 19 nt, Artificial Sequence
  Description of Artificial Sequence: Synthetic oligonucleotide
aagcuguguauuaauggag

SEQ ID NO: 2298018 - RNA, 19 nt, Artificial Sequence
  Description of Artificial Sequence: Synthetic oligonucleotide
aucgaagaacggcaaaucu

SEQ ID NO: 2298019 - RNA, 19 nt, Artificial Sequence
  Description of Artificial Sequence: Synthetic oligonucleotide
gauuugucuguauuuuauc

SEQ ID NO: 2298020 - RNA, 19 nt, Artificial Sequence
  Description of Artificial Sequence: Synthetic oligonucleotide
uguacugaacagugaauuc

SEQ ID NO: 2298021 - RNA, 19 nt, Artificial Sequence
  Description of Artificial Sequence: Synthetic oligonucleotide
uuuaucugcuauacugaaa

SEQ ID NO: 2298022 - RNA, 19 nt, Artificial Sequence
  Description of Artificial Sequence: Synthetic oligonucleotide
ucggugaagcaacaacuug

SEQ ID NO: 2298023 - RNA, 19 nt, Artificial Sequence
  Description of Artificial Sequence: Synthetic oligonucleotide
ugcugguuaggauuugucu

SEQ ID NO: 2298024 - RNA, 19 nt, Artificial Sequence
  Description of Artificial Sequence: Synthetic oligonucleotide
uuuccgaacaaaagcgauc

SEQ ID NO: 2298025 - RNA, 19 nt, Artificial Sequence
  Description of Artificial Sequence: Synthetic oligonucleotide
cacacaagcaucgaagaac

SEQ ID NO: 2298026 - RNA, 19 nt, Artificial Sequence
  Description of Artificial Sequence: Synthetic oligonucleotide
ucccauuccugaaaauuga

SEQ ID NO: 2298027 - RNA, 19 nt, Artificial Sequence
  Description of Artificial Sequence: Synthetic oligonucleotide
gggagaggagaucugauag

SEQ ID NO: 2298028 - RNA, 19 nt, Artificial Sequence
  Description of Artificial Sequence: Synthetic oligonucleotide
uuggaucaaguucgcaggc

SEQ ID NO: 2298029 - RNA, 19 nt, Artificial Sequence
  Description of Artificial Sequence: Synthetic oligonucleotide
aacggcaaaucugauuuca

SEQ ID NO: 2298030 - RNA, 19 nt, Artificial Sequence
  Description of Artificial Sequence: Synthetic oligonucleotide
uaggucuuaaugcagccuu

SEQ ID NO: 2298031 - RNA, 19 nt, Artificial Sequence
  Description of Artificial Sequence: Synthetic oligonucleotide
uucuauccuuacaacgcug

SEQ ID NO: 2298032 - RNA, 19 nt, Artificial Sequence
  Description of Artificial Sequence: Synthetic oligonucleotide
gauccuuacuaagccaucc

SEQ ID NO: 2298033 - RNA, 19 nt, Artificial Sequence
  Description of Artificial Sequence: Synthetic oligonucleotide
caaacgaagagcaaauucu

SEQ ID NO: 2298034 - RNA, 19 nt, Artificial Sequence
  Description of Artificial Sequence: Synthetic oligonucleotide
caguaggucuuaaugcagc

SEQ ID NO: 2298035 - RNA, 19 nt, Artificial Sequence
  Description of Artificial Sequence: Synthetic oligonucleotide
caagcaucgaagaacggca

SEQ ID NO: 2298036 - RNA, 19 nt, Artificial Sequence
  Description of Artificial Sequence: Synthetic oligonucleotide
uacaacgcuggacuccacc

SEQ ID NO: 2298037 - RNA, 19 nt, Artificial Sequence
  Description of Artificial Sequence: Synthetic oligonucleotide
gaacaaaagcgauccuuac

SEQ ID NO: 2298038 - RNA, 19 nt, Artificial Sequence
  Description of Artificial Sequence: Synthetic oligonucleotide
aucuauguccauggaacgg

SEQ ID NO: 2298039 - RNA, 19 nt, Artificial Sequence
  Description of Artificial Sequence: Synthetic oligonucleotide
aagaacggcaaaucugauu

SEQ ID NO: 2298040 - RNA, 19 nt, Artificial Sequence
  Description of Artificial Sequence: Synthetic oligonucleotide
uuaucucccgguuuugcaa

SEQ ID NO: 2298041 - RNA, 19 nt, Artificial Sequence
  Description of Artificial Sequence: Synthetic oligonucleotide
acuuaucucccgguuuugc

SEQ ID NO: 2298042 - RNA, 19 nt, Artificial Sequence
  Description of Artificial Sequence: Synthetic oligonucleotide
aaguggauaccuucugcau

SEQ ID NO: 2298043 - RNA, 19 nt, Artificial Sequence
  Description of Artificial Sequence: Synthetic oligonucleotide
uucaaaaugugcugcccaa

SEQ ID NO: 2298044 - RNA, 19 nt, Artificial Sequence
  Description of Artificial Sequence: Synthetic oligonucleotide
acugaaaucuucugguauu

SEQ ID NO: 2298045 - RNA, 19 nt, Artificial Sequence
  Description of Artificial Sequence: Synthetic oligonucleotide
auaacuuaucucccgguuu

SEQ ID NO: 2298046 - RNA, 19 nt, Artificial Sequence
  Description of Artificial Sequence: Synthetic oligonucleotide
uucgcaggcaacuaccuuu

SEQ ID NO: 2298047 - RNA, 19 nt, Artificial Sequence
  Description of Artificial Sequence: Synthetic oligonucleotide
uuccccaccuucauuaaau

SEQ ID NO: 2298048 - RNA, 19 nt, Artificial Sequence
  Description of Artificial Sequence: Synthetic oligonucleotide
gguucuauccuuacaacgc

SEQ ID NO: 2298049 - RNA, 19 nt, Artificial Sequence
  Description of Artificial Sequence: Synthetic oligonucleotide
uggucggugaagcaacaac

SEQ ID NO: 2298050 - RNA, 19 nt, Artificial Sequence
  Description of Artificial Sequence: Synthetic oligonucleotide
aaaugguccacacgugcua

SEQ ID NO: 2298051 - RNA, 19 nt, Artificial Sequence
  Description of Artificial Sequence: Synthetic oligonucleotide
uauccuuacaacgcuggac

SEQ ID NO: 2298052 - RNA, 19 nt, Artificial Sequence
  Description of Artificial Sequence: Synthetic oligonucleotide
uaccuucugcauugaaucc

SEQ ID NO: 2298053 - RNA, 19 nt, Artificial Sequence
  Description of Artificial Sequence: Synthetic oligonucleotide
caacuugaagacaaaggga

SEQ ID NO: 2298054 - RNA, 19 nt, Artificial Sequence
  Description of Artificial Sequence: Synthetic oligonucleotide
uaggaagguauaauuucau

SEQ ID NO: 2298055 - RNA, 19 nt, Artificial Sequence
  Description of Artificial Sequence: Synthetic oligonucleotide
uggagagucugcaguauaa

SEQ ID NO: 2298056 - RNA, 19 nt, Artificial Sequence
  Description of Artificial Sequence: Synthetic oligonucleotide
ugcacuugauuugaaugca

SEQ ID NO: 2298057 - RNA, 19 nt, Artificial Sequence
  Description of Artificial Sequence: Synthetic oligonucleotide
uaauggagagucugcagua

SEQ ID NO: 2298058 - RNA, 19 nt, Artificial Sequence
  Description of Artificial Sequence: Synthetic oligonucleotide
guauuaauggagagucugc

SEQ ID NO: 2298059 - RNA, 19 nt, Artificial Sequence
  Description of Artificial Sequence: Synthetic oligonucleotide
uaucaauaaugcuguuaac

SEQ ID NO: 2298060 - RNA, 19 nt, Artificial Sequence
  Description of Artificial Sequence: Synthetic oligonucleotide
acgaagagcaaauucucuu

SEQ ID NO: 2298061 - RNA, 19 nt, Artificial Sequence
  Description of Artificial Sequence: Synthetic oligonucleotide
aaucccuguguugaacaug

SEQ ID NO: 2298062 - RNA, 19 nt, Artificial Sequence
  Description of Artificial Sequence: Synthetic oligonucleotide
caacaacuugaagacaaag

SEQ ID NO: 2298063 - RNA, 19 nt, Artificial Sequence
  Description of Artificial Sequence: Synthetic oligonucleotide
auugauaggugguggcgga

SEQ ID NO: 2298064 - RNA, 19 nt, Artificial Sequence
  Description of Artificial Sequence: Synthetic oligonucleotide
cauggaacgggcccguuug

SEQ ID NO: 2298065 - RNA, 19 nt, Artificial Sequence
  Description of Artificial Sequence: Synthetic oligonucleotide
cagucauguuuccaguccc

SEQ ID NO: 2298066 - RNA, 19 nt, Artificial Sequence
  Description of Artificial Sequence: Synthetic oligonucleotide
cauguaacaaccugauaaa

SEQ ID NO: 2298067 - RNA, 19 nt, Artificial Sequence
  Description of Artificial Sequence: Synthetic oligonucleotide
acaacgcuggacuccaccu

SEQ ID NO: 2298068 - RNA, 19 nt, Artificial Sequence
  Description of Artificial Sequence: Synthetic oligonucleotide
ucuuagguucuauccuuac

SEQ ID NO: 2298069 - RNA, 19 nt, Artificial Sequence
  Description of Artificial Sequence: Synthetic oligonucleotide
aucucccgguuuugcaacc

SEQ ID NO: 2298070 - RNA, 19 nt, Artificial Sequence
  Description of Artificial Sequence: Synthetic oligonucleotide
ccuuggaucaaguucgcag

SEQ ID NO: 2298071 - RNA, 19 nt, Artificial Sequence
  Description of Artificial Sequence: Synthetic oligonucleotide
ugcuaaaagcuguguauua

SEQ ID NO: 2298072 - RNA, 19 nt, Artificial Sequence
  Description of Artificial Sequence: Synthetic oligonucleotide
ugacagucauguuuccagu

SEQ ID NO: 2298073 - RNA, 19 nt, Artificial Sequence
  Description of Artificial Sequence: Synthetic oligonucleotide
gagucugcaguauaacuua

SEQ ID NO: 2298074 - RNA, 19 nt, Artificial Sequence
  Description of Artificial Sequence: Synthetic oligonucleotide
aaccaaacgaagagcaaau

SEQ ID NO: 2298075 - RNA, 19 nt, Artificial Sequence
  Description of Artificial Sequence: Synthetic oligonucleotide
cugaaguuauucuucccca

SEQ ID NO: 2298076 - RNA, 19 nt, Artificial Sequence
  Description of Artificial Sequence: Synthetic oligonucleotide
ggagaggagaucugauagg

SEQ ID NO: 2298077 - RNA, 19 nt, Artificial Sequence
  Description of Artificial Sequence: Synthetic oligonucleotide
agaggagaucugauagggc

SEQ ID NO: 2298078 - RNA, 19 nt, Artificial Sequence
  Description of Artificial Sequence: Synthetic oligonucleotide
cauugaauccauguaacaa

SEQ ID NO: 2298079 - RNA, 19 nt, Artificial Sequence
  Description of Artificial Sequence: Synthetic oligonucleotide
aucaaguucgcaggcaacu

SEQ ID NO: 2298080 - RNA, 19 nt, Artificial Sequence
  Description of Artificial Sequence: Synthetic oligonucleotide
auuaaaugguccacacgug

SEQ ID NO: 2298081 - RNA, 19 nt, Artificial Sequence
  Description of Artificial Sequence: Synthetic oligonucleotide
ugguggcggauucuuaggu

SEQ ID NO: 2298082 - RNA, 19 nt, Artificial Sequence
  Description of Artificial Sequence: Synthetic oligonucleotide
gcagccuuaucaauaaugc

SEQ ID NO: 2298083 - RNA, 19 nt, Artificial Sequence
  Description of Artificial Sequence: Synthetic oligonucleotide
caaguucgcaggcaacuac

SEQ ID NO: 2298084 - RNA, 19 nt, Artificial Sequence
  Description of Artificial Sequence: Synthetic oligonucleotide
gauaggugguggcggauuc

SEQ ID NO: 2298085 - RNA, 19 nt, Artificial Sequence
  Description of Artificial Sequence: Synthetic oligonucleotide
uuguugaaguucagcuacu

SEQ ID NO: 2298086 - RNA, 19 nt, Artificial Sequence
  Description of Artificial Sequence: Synthetic oligonucleotide
uggaguuugcuggccagag

SEQ ID NO: 2298087 - RNA, 19 nt, Artificial Sequence
  Description of Artificial Sequence: Synthetic oligonucleotide
cugcuauacugaaaucuuc

SEQ ID NO: 2298088 - RNA, 19 nt, Artificial Sequence
  Description of Artificial Sequence: Synthetic oligonucleotide
cugcauugaauccauguaa

SEQ ID NO: 2298089 - RNA, 19 nt, Artificial Sequence
  Description of Artificial Sequence: Synthetic oligonucleotide
agagucugcaguauaacuu

SEQ ID NO: 2298090 - RNA, 19 nt, Artificial Sequence
  Description of Artificial Sequence: Synthetic oligonucleotide
uaggauuugucuguauuuu

SEQ ID NO: 2298091 - RNA, 19 nt, Artificial Sequence
  Description of Artificial Sequence: Synthetic oligonucleotide
uucuaacagcuugacaguc

SEQ ID NO: 2298092 - RNA, 19 nt, Artificial Sequence
  Description of Artificial Sequence: Synthetic oligonucleotide
guggcggauucuuagguuc

SEQ ID NO: 2298093 - RNA, 19 nt, Artificial Sequence
  Description of Artificial Sequence: Synthetic oligonucleotide
guuuugcaaccaaacgaag

SEQ ID NO: 2298094 - RNA, 19 nt, Artificial Sequence
  Description of Artificial Sequence: Synthetic oligonucleotide
accugugcugguuaggauu

SEQ ID NO: 2298095 - RNA, 19 nt, Artificial Sequence
  Description of Artificial Sequence: Synthetic oligonucleotide
ugaaaucuucugguauuac

SEQ ID NO: 2298096 - RNA, 19 nt, Artificial Sequence
  Description of Artificial Sequence: Synthetic oligonucleotide
gucaucuauguccauggaa

SEQ ID NO: 2298097 - RNA, 19 nt, Artificial Sequence
  Description of Artificial Sequence: Synthetic oligonucleotide
aaugguccacacgugcuaa

SEQ ID NO: 2298098 - RNA, 19 nt, Artificial Sequence
  Description of Artificial Sequence: Synthetic oligonucleotide
agcgauccuuacuaagcca

SEQ ID NO: 2298099 - RNA, 19 nt, Artificial Sequence
  Description of Artificial Sequence: Synthetic oligonucleotide
uguuaacaauuagaggauu

SEQ ID NO: 2298100 - RNA, 19 nt, Artificial Sequence
  Description of Artificial Sequence: Synthetic oligonucleotide
aggaagguauaauuucauu

SEQ ID NO: 2298101 - RNA, 19 nt, Artificial Sequence
  Description of Artificial Sequence: Synthetic oligonucleotide
uaggaaaaguggauaccuu

SEQ ID NO: 2298102 - RNA, 19 nt, Artificial Sequence
  Description of Artificial Sequence: Synthetic oligonucleotide
gauuugaaugcagcagaca

SEQ ID NO: 2298103 - RNA, 19 nt, Artificial Sequence
  Description of Artificial Sequence: Synthetic oligonucleotide
agcuguguauuaauggaga

SEQ ID NO: 2298104 - RNA, 19 nt, Artificial Sequence
  Description of Artificial Sequence: Synthetic oligonucleotide
ccaaacgaagagcaaauuc

SEQ ID NO: 2298105 - RNA, 19 nt, Artificial Sequence
  Description of Artificial Sequence: Synthetic oligonucleotide
gcuauacugaaaucuucug

SEQ ID NO: 2298106 - RNA, 19 nt, Artificial Sequence
  Description of Artificial Sequence: Synthetic oligonucleotide
cccguuugucacuaaaacc

SEQ ID NO: 2298107 - RNA, 19 nt, Artificial Sequence
  Description of Artificial Sequence: Synthetic oligonucleotide
gugguggcggauucuuagg

SEQ ID NO: 2298108 - RNA, 19 nt, Artificial Sequence
  Description of Artificial Sequence: Synthetic oligonucleotide
gaacgggcccguuugucac

SEQ ID NO: 2298109 - RNA, 19 nt, Artificial Sequence
  Description of Artificial Sequence: Synthetic oligonucleotide
cagcuacuagccuuggauc

SEQ ID NO: 2298110 - RNA, 19 nt, Artificial Sequence
  Description of Artificial Sequence: Synthetic oligonucleotide
cugaaaauugauagguggu

SEQ ID NO: 2298111 - RNA, 19 nt, Artificial Sequence
  Description of Artificial Sequence: Synthetic oligonucleotide
cuucauuaaaugguccaca

SEQ ID NO: 2298112 - RNA, 19 nt, Artificial Sequence
  Description of Artificial Sequence: Synthetic oligonucleotide
aggauuugucuguauuuua

SEQ ID NO: 2298113 - RNA, 19 nt, Artificial Sequence
  Description of Artificial Sequence: Synthetic oligonucleotide
ggaagguauaauuucauuu

SEQ ID NO: 2298114 - RNA, 19 nt, Artificial Sequence
  Description of Artificial Sequence: Synthetic oligonucleotide
aagcaacaacuugaagaca

SEQ ID NO: 2298115 - RNA, 19 nt, Artificial Sequence
  Description of Artificial Sequence: Synthetic oligonucleotide
aacuuaucucccgguuuug

SEQ ID NO: 2298116 - RNA, 19 nt, Artificial Sequence
  Description of Artificial Sequence: Synthetic oligonucleotide
cuuaucaauaaugcuguua

SEQ ID NO: 2298117 - RNA, 19 nt, Artificial Sequence
  Description of Artificial Sequence: Synthetic oligonucleotide
uucagcuacuagccuugga

SEQ ID NO: 2298118 - RNA, 19 nt, Artificial Sequence
  Description of Artificial Sequence: Synthetic oligonucleotide
gguuuugcaaccaaacgaa

SEQ ID NO: 2298119 - RNA, 19 nt, Artificial Sequence
  Description of Artificial Sequence: Synthetic oligonucleotide
uugccacacaagcaucgaa

SEQ ID NO: 2298120 - RNA, 19 nt, Artificial Sequence
  Description of Artificial Sequence: Synthetic oligonucleotide
caaagggagaggagaucug

SEQ ID NO: 2298121 - RNA, 19 nt, Artificial Sequence
  Description of Artificial Sequence: Synthetic oligonucleotide
gaucugauagggcaaguuu

SEQ ID NO: 2298122 - RNA, 19 nt, Artificial Sequence
  Description of Artificial Sequence: Synthetic oligonucleotide
aggcggucugaaguuauuc

SEQ ID NO: 2298123 - RNA, 19 nt, Artificial Sequence
  Description of Artificial Sequence: Synthetic oligonucleotide
guuauguacugaacaguga

SEQ ID NO: 2298124 - RNA, 19 nt, Artificial Sequence
  Description of Artificial Sequence: Synthetic oligonucleotide
cacaagcaucgaagaacgg

SEQ ID NO: 2298125 - RNA, 19 nt, Artificial Sequence
  Description of Artificial Sequence: Synthetic oligonucleotide
caucgaagaacggcaaauc

SEQ ID NO: 2298126 - RNA, 19 nt, Artificial Sequence
  Description of Artificial Sequence: Synthetic oligonucleotide
guacugaacagugaauucu

SEQ ID NO: 2298127 - RNA, 19 nt, Artificial Sequence
  Description of Artificial Sequence: Synthetic oligonucleotide
uacuagccuuggaucaagu

SEQ ID NO: 2298128 - RNA, 19 nt, Artificial Sequence
  Description of Artificial Sequence: Synthetic oligonucleotide
aguuugcuggccagaggcg

SEQ ID NO: 2298129 - RNA, 19 nt, Artificial Sequence
  Description of Artificial Sequence: Synthetic oligonucleotide
acgugcuaaaagcugugua

SEQ ID NO: 2298130 - RNA, 19 nt, Artificial Sequence
  Description of Artificial Sequence: Synthetic oligonucleotide
uccauguaacaaccugaua

SEQ ID NO: 2298131 - RNA, 19 nt, Artificial Sequence
  Description of Artificial Sequence: Synthetic oligonucleotide
cugguauuacaguguuaug

SEQ ID NO: 2298132 - RNA, 19 nt, Artificial Sequence
  Description of Artificial Sequence: Synthetic oligonucleotide
cuuacaacgcuggacucca

SEQ ID NO: 2298133 - RNA, 19 nt, Artificial Sequence
  Description of Artificial Sequence: Synthetic oligonucleotide
cuaggaaaaguggauaccu

SEQ ID NO: 2298134 - RNA, 19 nt, Artificial Sequence
  Description of Artificial Sequence: Synthetic oligonucleotide
aguuauucuuccccaccuu

SEQ ID NO: 2298135 - RNA, 19 nt, Artificial Sequence
  Description of Artificial Sequence: Synthetic oligonucleotide
uguugaaguucagcuacua

SEQ ID NO: 2298136 - RNA, 19 nt, Artificial Sequence
  Description of Artificial Sequence: Synthetic oligonucleotide
uccuuacaacgcuggacuc

SEQ ID NO: 2298137 - RNA, 19 nt, Artificial Sequence
  Description of Artificial Sequence: Synthetic oligonucleotide
agucaucuauguccaugga

SEQ ID NO: 2298138 - RNA, 19 nt, Artificial Sequence
  Description of Artificial Sequence: Synthetic oligonucleotide
acuagccuuggaucaaguu

SEQ ID NO: 2298139 - RNA, 19 nt, Artificial Sequence
  Description of Artificial Sequence: Synthetic oligonucleotide
gaucaaguucgcaggcaac

SEQ ID NO: 2298140 - RNA, 19 nt, Artificial Sequence
  Description of Artificial Sequence: Synthetic oligonucleotide
aauggucggugaagcaaca

SEQ ID NO: 2298141 - RNA, 19 nt, Artificial Sequence
  Description of Artificial Sequence: Synthetic oligonucleotide
ccgguuuugcaaccaaacg

SEQ ID NO: 2298142 - RNA, 19 nt, Artificial Sequence
  Description of Artificial Sequence: Synthetic oligonucleotide
uagggcaaguuugccacac

SEQ ID NO: 2298143 - RNA, 19 nt, Artificial Sequence
  Description of Artificial Sequence: Synthetic oligonucleotide
guuaggauuugucuguauu

SEQ ID NO: 2298144 - RNA, 19 nt, Artificial Sequence
  Description of Artificial Sequence: Synthetic oligonucleotide
gcaguauaacuuaucuccc

SEQ ID NO: 2298145 - RNA, 19 nt, Artificial Sequence
  Description of Artificial Sequence: Synthetic oligonucleotide
ccguuugucacuaaaaccu

SEQ ID NO: 2298146 - RNA, 19 nt, Artificial Sequence
  Description of Artificial Sequence: Synthetic oligonucleotide
acuugaagacaaagggaga

SEQ ID NO: 2298147 - RNA, 19 nt, Artificial Sequence
  Description of Artificial Sequence: Synthetic oligonucleotide
gaacggcaaaucugauuuc

SEQ ID NO: 2298148 - RNA, 19 nt, Artificial Sequence
  Description of Artificial Sequence: Synthetic oligonucleotide
uccgaacaaaagcgauccu

SEQ ID NO: 2298149 - RNA, 19 nt, Artificial Sequence
  Description of Artificial Sequence: Synthetic oligonucleotide
guucuauccuuacaacgcu

SEQ ID NO: 2298150 - RNA, 19 nt, Artificial Sequence
  Description of Artificial Sequence: Synthetic oligonucleotide
acaaccugauaaagucauc

SEQ ID NO: 2298151 - RNA, 19 nt, Artificial Sequence
  Description of Artificial Sequence: Synthetic oligonucleotide
cuacuagccuuggaucaag

SEQ ID NO: 2298152 - RNA, 19 nt, Artificial Sequence
  Description of Artificial Sequence: Synthetic oligonucleotide
ucccgguuuugcaaccaaa

SEQ ID NO: 2298153 - RNA, 19 nt, Artificial Sequence
  Description of Artificial Sequence: Synthetic oligonucleotide
agcaucgaagaacggcaaa

SEQ ID NO: 2298154 - RNA, 19 nt, Artificial Sequence
  Description of Artificial Sequence: Synthetic oligonucleotide
ucaaguucgcaggcaacua

SEQ ID NO: 2298155 - RNA, 19 nt, Artificial Sequence
  Description of Artificial Sequence: Synthetic oligonucleotide
auccauguaacaaccugau

SEQ ID NO: 2298156 - RNA, 19 nt, Artificial Sequence
  Description of Artificial Sequence: Synthetic oligonucleotide
gucuuaaugcagccuuauc

SEQ ID NO: 2298157 - RNA, 19 nt, Artificial Sequence
  Description of Artificial Sequence: Synthetic oligonucleotide
guauaacuuaucucccggu

SEQ ID NO: 2298158 - RNA, 19 nt, Artificial Sequence
  Description of Artificial Sequence: Synthetic oligonucleotide
auggagagucugcaguaua

SEQ ID NO: 2298159 - RNA, 19 nt, Artificial Sequence
  Description of Artificial Sequence: Synthetic oligonucleotide
gcuaggaaaaguggauacc

SEQ ID NO: 2298160 - RNA, 19 nt, Artificial Sequence
  Description of Artificial Sequence: Synthetic oligonucleotide
ucgcaggcaacuaccuuuu

SEQ ID NO: 2298161 - RNA, 19 nt, Artificial Sequence
  Description of Artificial Sequence: Synthetic oligonucleotide
auagggcaaguuugccaca

SEQ ID NO: 2298162 - RNA, 19 nt, Artificial Sequence
  Description of Artificial Sequence: Synthetic oligonucleotide
aacgggcccguuugucacu

SEQ ID NO: 2298163 - RNA, 19 nt, Artificial Sequence
  Description of Artificial Sequence: Synthetic oligonucleotide
ggaguuugcuggccagagg

SEQ ID NO: 2298164 - RNA, 19 nt, Artificial Sequence
  Description of Artificial Sequence: Synthetic oligonucleotide
guauuuuaucugcuauacu

SEQ ID NO: 2298165 - RNA, 19 nt, Artificial Sequence
  Description of Artificial Sequence: Synthetic oligonucleotide
gacuccaccuugggaggcg

SEQ ID NO: 2298166 - RNA, 19 nt, Artificial Sequence
  Description of Artificial Sequence: Synthetic oligonucleotide
cugguuaggauuugucugu

SEQ ID NO: 2298167 - RNA, 19 nt, Artificial Sequence
  Description of Artificial Sequence: Synthetic oligonucleotide
gcccguuugucacuaaaac

SEQ ID NO: 2298168 - RNA, 19 nt, Artificial Sequence
  Description of Artificial Sequence: Synthetic oligonucleotide
cuguuaacaauuagaggau

SEQ ID NO: 2298169 - RNA, 19 nt, Artificial Sequence
  Description of Artificial Sequence: Synthetic oligonucleotide
cgaagaacggcaaaucuga

SEQ ID NO: 2298170 - RNA, 19 nt, Artificial Sequence
  Description of Artificial Sequence: Synthetic oligonucleotide
caaaagcgauccuuacuaa

SEQ ID NO: 2298171 - RNA, 19 nt, Artificial Sequence
  Description of Artificial Sequence: Synthetic oligonucleotide
agaucugauagggcaaguu

SEQ ID NO: 2298172 - RNA, 19 nt, Artificial Sequence
  Description of Artificial Sequence: Synthetic oligonucleotide
ugggaggcggucugaaguu

SEQ ID NO: 2298173 - RNA, 19 nt, Artificial Sequence
  Description of Artificial Sequence: Synthetic oligonucleotide
ggaucaaguucgcaggcaa

SEQ ID NO: 2298174 - RNA, 19 nt, Artificial Sequence
  Description of Artificial Sequence: Synthetic oligonucleotide
cacacgugcuaaaagcugu

SEQ ID NO: 2298175 - RNA, 19 nt, Artificial Sequence
  Description of Artificial Sequence: Synthetic oligonucleotide
aagcaucgaagaacggcaa

SEQ ID NO: 2298176 - RNA, 19 nt, Artificial Sequence
  Description of Artificial Sequence: Synthetic oligonucleotide
ugguccacacgugcuaaaa

SEQ ID NO: 2298177 - RNA, 19 nt, Artificial Sequence
  Description of Artificial Sequence: Synthetic oligonucleotide
cccgguuuugcaaccaaac

SEQ ID NO: 2298178 - RNA, 19 nt, Artificial Sequence
  Description of Artificial Sequence: Synthetic oligonucleotide
ggcaaguuugccacacaag

SEQ ID NO: 2298179 - RNA, 19 nt, Artificial Sequence
  Description of Artificial Sequence: Synthetic oligonucleotide
cuugacagucauguuucca

SEQ ID NO: 2298180 - RNA, 19 nt, Artificial Sequence
  Description of Artificial Sequence: Synthetic oligonucleotide
aguucgcaggcaacuaccu

SEQ ID NO: 2298181 - RNA, 19 nt, Artificial Sequence
  Description of Artificial Sequence: Synthetic oligonucleotide
gcugcuguacugcacuuga

SEQ ID NO: 2298182 - RNA, 19 nt, Artificial Sequence
  Description of Artificial Sequence: Synthetic oligonucleotide
agccaucccauuccugaaa

SEQ ID NO: 2298183 - RNA, 19 nt, Artificial Sequence
  Description of Artificial Sequence: Synthetic oligonucleotide
ugauaggugguggcggauu

SEQ ID NO: 2298184 - RNA, 19 nt, Artificial Sequence
  Description of Artificial Sequence: Synthetic oligonucleotide
agccuuggaucaaguucgc

SEQ ID NO: 2298185 - RNA, 19 nt, Artificial Sequence
  Description of Artificial Sequence: Synthetic oligonucleotide
cuauccuuacaacgcugga

SEQ ID NO: 2298186 - RNA, 19 nt, Artificial Sequence
  Description of Artificial Sequence: Synthetic oligonucleotide
cuuacuaagccaucccauu

SEQ ID NO: 2298187 - RNA, 19 nt, Artificial Sequence
  Description of Artificial Sequence: Synthetic oligonucleotide
cuaacagcuugacagucau

SEQ ID NO: 2298188 - RNA, 19 nt, Artificial Sequence
  Description of Artificial Sequence: Synthetic oligonucleotide
guguuauguacugaacagu

SEQ ID NO: 2298189 - RNA, 19 nt, Artificial Sequence
  Description of Artificial Sequence: Synthetic oligonucleotide
acuccaccuugggaggcgg

SEQ ID NO: 2298190 - RNA, 19 nt, Artificial Sequence
  Description of Artificial Sequence: Synthetic oligonucleotide
ccacacgugcuaaaagcug

SEQ ID NO: 2298191 - RNA, 19 nt, Artificial Sequence
  Description of Artificial Sequence: Synthetic oligonucleotide
gcuaaaagcuguguauuaa

SEQ ID NO: 2298192 - RNA, 19 nt, Artificial Sequence
  Description of Artificial Sequence: Synthetic oligonucleotide
acacgugcuaaaagcugug

SEQ ID NO: 2298193 - RNA, 19 nt, Artificial Sequence
  Description of Artificial Sequence: Synthetic oligonucleotide
cgguuuugcaaccaaacga

SEQ ID NO: 2298194 - RNA, 19 nt, Artificial Sequence
  Description of Artificial Sequence: Synthetic oligonucleotide
ggaacgggcccguuuguca

SEQ ID NO: 2298195 - RNA, 19 nt, Artificial Sequence
  Description of Artificial Sequence: Synthetic oligonucleotide
ucucccgguuuugcaacca

SEQ ID NO: 2298196 - RNA, 19 nt, Artificial Sequence
  Description of Artificial Sequence: Synthetic oligonucleotide
aggagaucugauagggcaa

SEQ ID NO: 2298197 - RNA, 19 nt, Artificial Sequence
  Description of Artificial Sequence: Synthetic oligonucleotide
ggaaaaguggauaccuucu

SEQ ID NO: 2298198 - RNA, 19 nt, Artificial Sequence
  Description of Artificial Sequence: Synthetic oligonucleotide
uuacaacgcuggacuccac

SEQ ID NO: 2298199 - RNA, 19 nt, Artificial Sequence
  Description of Artificial Sequence: Synthetic oligonucleotide
ggugaagcaacaacuugaa

SEQ ID NO: 2298200 - RNA, 19 nt, Artificial Sequence
  Description of Artificial Sequence: Synthetic oligonucleotide
ugguuaggauuugucugua

SEQ ID NO: 2298201 - RNA, 19 nt, Artificial Sequence
  Description of Artificial Sequence: Synthetic oligonucleotide
gucugcaguauaacuuauc

SEQ ID NO: 2298202 - RNA, 19 nt, Artificial Sequence
  Description of Artificial Sequence: Synthetic oligonucleotide
cguuugucacuaaaaccug

SEQ ID NO: 2298203 - RNA, 19 nt, Artificial Sequence
  Description of Artificial Sequence: Synthetic oligonucleotide
accaaacgaagagcaaauu

SEQ ID NO: 2298204 - RNA, 19 nt, Artificial Sequence
  Description of Artificial Sequence: Synthetic oligonucleotide
agggcaaguuugccacaca

SEQ ID NO: 2298205 - RNA, 19 nt, Artificial Sequence
  Description of Artificial Sequence: Synthetic oligonucleotide
auaggugguggcggauucu

SEQ ID NO: 2298206 - RNA, 19 nt, Artificial Sequence
  Description of Artificial Sequence: Synthetic oligonucleotide
gccuuaucaauaaugcugu

SEQ ID NO: 2298207 - RNA, 19 nt, Artificial Sequence
  Description of Artificial Sequence: Synthetic oligonucleotide
ccaaucccuguguugaaca

SEQ ID NO: 2298208 - RNA, 19 nt, Artificial Sequence
  Description of Artificial Sequence: Synthetic oligonucleotide
uggaacgggcccguuuguc

SEQ ID NO: 2298209 - RNA, 19 nt, Artificial Sequence
  Description of Artificial Sequence: Synthetic oligonucleotide
gggcaaguuugccacacaa

SEQ ID NO: 2298210 - RNA, 19 nt, Artificial Sequence
  Description of Artificial Sequence: Synthetic oligonucleotide
uugauaggugguggcggau

SEQ ID NO: 2298211 - RNA, 19 nt, Artificial Sequence
  Description of Artificial Sequence: Synthetic oligonucleotide
guuuccagucccaggccca

SEQ ID NO: 2298212 - RNA, 19 nt, Artificial Sequence
  Description of Artificial Sequence: Synthetic oligonucleotide
gcuguacugcacuugauuu

SEQ ID NO: 2298213 - RNA, 19 nt, Artificial Sequence
  Description of Artificial Sequence: Synthetic oligonucleotide
ggucggugaagcaacaacu

SEQ ID NO: 2298214 - RNA, 19 nt, Artificial Sequence
  Description of Artificial Sequence: Synthetic oligonucleotide
cggugaagcaacaacuuga

SEQ ID NO: 2298215 - RNA, 19 nt, Artificial Sequence
  Description of Artificial Sequence: Synthetic oligonucleotide
cuguguauuaauggagagu

SEQ ID NO: 2298216 - RNA, 19 nt, Artificial Sequence
  Description of Artificial Sequence: Synthetic oligonucleotide
cagccuuaucaauaaugcu

SEQ ID NO: 2298217 - RNA, 19 nt, Artificial Sequence
  Description of Artificial Sequence: Synthetic oligonucleotide
augcagccuuaucaauaau

SEQ ID NO: 2298218 - RNA, 19 nt, Artificial Sequence
  Description of Artificial Sequence: Synthetic oligonucleotide
caccuugggaggcggucug

SEQ ID NO: 2298219 - RNA, 19 nt, Artificial Sequence
  Description of Artificial Sequence: Synthetic oligonucleotide
cuucugguauuacaguguu

SEQ ID NO: 2298220 - RNA, 19 nt, Artificial Sequence
  Description of Artificial Sequence: Synthetic oligonucleotide
ccuggaguuugcuggccag

SEQ ID NO: 2298221 - RNA, 19 nt, Artificial Sequence
  Description of Artificial Sequence: Synthetic oligonucleotide
augguccacacgugcuaaa

SEQ ID NO: 2298222 - RNA, 19 nt, Artificial Sequence
  Description of Artificial Sequence: Synthetic oligonucleotide
ccuuuucuaacagcuugac

SEQ ID NO: 2298223 - RNA, 19 nt, Artificial Sequence
  Description of Artificial Sequence: Synthetic oligonucleotide
cggucugaaguuauucuuc

SEQ ID NO: 2298224 - RNA, 19 nt, Artificial Sequence
  Description of Artificial Sequence: Synthetic oligonucleotide
acgcuggacuccaccuugg

SEQ ID NO: 2298225 - RNA, 19 nt, Artificial Sequence
  Description of Artificial Sequence: Synthetic oligonucleotide
ccaacuuccagcaccacau

SEQ ID NO: 2298226 - RNA, 19 nt, Artificial Sequence
  Description of Artificial Sequence: Synthetic oligonucleotide
accacaucaguaggucuua

SEQ ID NO: 2298227 - RNA, 19 nt, Artificial Sequence
  Description of Artificial Sequence: Synthetic oligonucleotide
acggcaaaucugauuucaa

SEQ ID NO: 2298228 - RNA, 19 nt, Artificial Sequence
  Description of Artificial Sequence: Synthetic oligonucleotide
cgaacaaaagcgauccuua

SEQ ID NO: 2298229 - RNA, 19 nt, Artificial Sequence
  Description of Artificial Sequence: Synthetic oligonucleotide
caccacaucaguaggucuu

SEQ ID NO: 2298230 - RNA, 19 nt, Artificial Sequence
  Description of Artificial Sequence: Synthetic oligonucleotide
ggcggucugaaguuauucu

SEQ ID NO: 2298231 - RNA, 19 nt, Artificial Sequence
  Description of Artificial Sequence: Synthetic oligonucleotide
gccuuuucuaacagcuuga

SEQ ID NO: 2298232 - RNA, 19 nt, Artificial Sequence
  Description of Artificial Sequence: Synthetic oligonucleotide
auggucggugaagcaacaa

SEQ ID NO: 2298233 - RNA, 19 nt, Artificial Sequence
  Description of Artificial Sequence: Synthetic oligonucleotide
ccauuccugaaaauugaua

SEQ ID NO: 2298234 - RNA, 19 nt, Artificial Sequence
  Description of Artificial Sequence: Synthetic oligonucleotide
guguauuaauggagagucu

SEQ ID NO: 2298235 - RNA, 19 nt, Artificial Sequence
  Description of Artificial Sequence: Synthetic oligonucleotide
cagaggcgugcccugaacu

SEQ ID NO: 2298236 - RNA, 19 nt, Artificial Sequence
  Description of Artificial Sequence: Synthetic oligonucleotide
aggucuuaaugcagccuua

SEQ ID NO: 2298237 - RNA, 19 nt, Artificial Sequence
  Description of Artificial Sequence: Synthetic oligonucleotide
cacaucaguaggucuuaau

SEQ ID NO: 2298238 - RNA, 19 nt, Artificial Sequence
  Description of Artificial Sequence: Synthetic oligonucleotide
cuggaguuugcuggccaga

SEQ ID NO: 2298239 - RNA, 19 nt, Artificial Sequence
  Description of Artificial Sequence: Synthetic oligonucleotide
cccaacuuccagcaccaca

SEQ ID NO: 2298240 - RNA, 19 nt, Artificial Sequence
  Description of Artificial Sequence: Synthetic oligonucleotide
caaucccuguguugaacau

SEQ ID NO: 2298241 - RNA, 19 nt, Artificial Sequence
  Description of Artificial Sequence: Synthetic oligonucleotide
gcagcagacagagucuugu

SEQ ID NO: 2298242 - RNA, 19 nt, Artificial Sequence
  Description of Artificial Sequence: Synthetic oligonucleotide
gucggugaagcaacaacuu

SEQ ID NO: 2298243 - RNA, 19 nt, Artificial Sequence
  Description of Artificial Sequence: Synthetic oligonucleotide
ggacuccaccuugggaggc

SEQ ID NO: 2298244 - RNA, 19 nt, Artificial Sequence
  Description of Artificial Sequence: Synthetic oligonucleotide
cgugcuaaaagcuguguau

SEQ ID NO: 2298245 - RNA, 19 nt, Artificial Sequence
  Description of Artificial Sequence: Synthetic oligonucleotide
gcaucgaagaacggcaaau

SEQ ID NO: 2298246 - RNA, 19 nt, Artificial Sequence
  Description of Artificial Sequence: Synthetic oligonucleotide
ccuuacuaagccaucccau

SEQ ID NO: 2298247 - RNA, 19 nt, Artificial Sequence
  Description of Artificial Sequence: Synthetic oligonucleotide
cccaaucccuguguugaac

SEQ ID NO: 2298248 - RNA, 19 nt, Artificial Sequence
  Description of Artificial Sequence: Synthetic oligonucleotide
gcuacuagccuuggaucaa

SEQ ID NO: 2298249 - RNA, 19 nt, Artificial Sequence
  Description of Artificial Sequence: Synthetic oligonucleotide
cucccgguuuugcaaccaa

SEQ ID NO: 2298250 - RNA, 19 nt, Artificial Sequence
  Description of Artificial Sequence: Synthetic oligonucleotide
gcggucugaaguuauucuu

SEQ ID NO: 2298251 - RNA, 19 nt, Artificial Sequence
  Description of Artificial Sequence: Synthetic oligonucleotide
ggcccguuugucacuaaaa

SEQ ID NO: 2298252 - RNA, 19 nt, Artificial Sequence
  Description of Artificial Sequence: Synthetic oligonucleotide
guucgcaggcaacuaccuu

SEQ ID NO: 2298253 - RNA, 19 nt, Artificial Sequence
  Description of Artificial Sequence: Synthetic oligonucleotide
ccagaggcgugcccugaac

SEQ ID NO: 2298254 - RNA, 19 nt, Artificial Sequence
  Description of Artificial Sequence: Synthetic oligonucleotide
gcgauccuuacuaagccau

SEQ ID NO: 2298255 - RNA, 19 nt, Artificial Sequence
  Description of Artificial Sequence: Synthetic oligonucleotide
cgauccuuacuaagccauc

SEQ ID NO: 2298256 - RNA, 19 nt, Artificial Sequence
  Description of Artificial Sequence: Synthetic oligonucleotide
guacugcacuugauuugaa

SEQ ID NO: 2298257 - RNA, 19 nt, Artificial Sequence
  Description of Artificial Sequence: Synthetic oligonucleotide
gguuaggauuugucuguau

SEQ ID NO: 2298258 - RNA, 19 nt, Artificial Sequence
  Description of Artificial Sequence: Synthetic oligonucleotide
gggcccguuugucacuaaa

SEQ ID NO: 2298259 - RNA, 19 nt, Artificial Sequence
  Description of Artificial Sequence: Synthetic oligonucleotide
cacgugcuaaaagcugugu

SEQ ID NO: 2298260 - RNA, 19 nt, Artificial Sequence
  Description of Artificial Sequence: Synthetic oligonucleotide
ggucuuaaugcagccuuau

SEQ ID NO: 2298261 - RNA, 19 nt, Artificial Sequence
  Description of Artificial Sequence: Synthetic oligonucleotide
acgggcccguuugucacua

SEQ ID NO: 2298262 - RNA, 19 nt, Artificial Sequence
  Description of Artificial Sequence: Synthetic oligonucleotide
gguggcggauucuuagguu

SEQ ID NO: 2298263 - RNA, 19 nt, Artificial Sequence
  Description of Artificial Sequence: Synthetic oligonucleotide
uccauggaacgggcccguu

SEQ ID NO: 2298264 - RNA, 19 nt, Artificial Sequence
  Description of Artificial Sequence: Synthetic oligonucleotide
aggcgugcccugaacucuu

SEQ ID NO: 2298265 - RNA, 19 nt, Artificial Sequence
  Description of Artificial Sequence: Synthetic oligonucleotide
caacgcuggacuccaccuu

SEQ ID NO: 2298266 - RNA, 19 nt, Artificial Sequence
  Description of Artificial Sequence: Synthetic oligonucleotide
cugcuguacugcacuugau

SEQ ID NO: 2298267 - RNA, 19 nt, Artificial Sequence
  Description of Artificial Sequence: Synthetic oligonucleotide
cccauuccugaaaauugau

SEQ ID NO: 2298268 - RNA, 19 nt, Artificial Sequence
  Description of Artificial Sequence: Synthetic oligonucleotide
ccgaacaaaagcgauccuu

SEQ ID NO: 2298269 - RNA, 19 nt, Artificial Sequence
  Description of Artificial Sequence: Synthetic oligonucleotide
gccuuggaucaaguucgca

SEQ ID NO: 2298270 - RNA, 19 nt, Artificial Sequence
  Description of Artificial Sequence: Synthetic oligonucleotide
gaggcggucugaaguuauu

SEQ ID NO: 2298271 - RNA, 19 nt, Artificial Sequence
  Description of Artificial Sequence: Synthetic oligonucleotide
guccauggaacgggcccgu

SEQ ID NO: 2298272 - RNA, 19 nt, Artificial Sequence
  Description of Artificial Sequence: Synthetic oligonucleotide
gcccaaucccuguguugaa

SEQ ID NO: 2298273 - RNA, 19 nt, Artificial Sequence
  Description of Artificial Sequence: Synthetic oligonucleotide
gccagaggcgugcccugaa

SEQ ID NO: 2298274 - RNA, 19 nt, Artificial Sequence
  Description of Artificial Sequence: Synthetic oligonucleotide
ggcggauucuuagguucua

SEQ ID NO: 2298275 - RNA, 19 nt, Artificial Sequence
  Description of Artificial Sequence: Synthetic oligonucleotide
cggcaaaucugauuucaau

SEQ ID NO: 2298276 - RNA, 19 nt, Artificial Sequence
  Description of Artificial Sequence: Synthetic oligonucleotide
cagcugcuguacugcacuu

SEQ ID NO: 2298277 - RNA, 19 nt, Artificial Sequence
  Description of Artificial Sequence: Synthetic oligonucleotide
gcggauucuuagguucuau

SEQ ID NO: 2298278 - RNA, 19 nt, Artificial Sequence
  Description of Artificial Sequence: Synthetic oligonucleotide
ccuugggaggcggucugaa

SEQ ID NO: 2298279 - RNA, 19 nt, Artificial Sequence
  Description of Artificial Sequence: Synthetic oligonucleotide
ccuuaucaauaaugcuguu

SEQ ID NO: 2298280 - RNA, 19 nt, Artificial Sequence
  Description of Artificial Sequence: Synthetic oligonucleotide
ccacaucaguaggucuuaa

SEQ ID NO: 2298281 - RNA, 19 nt, Artificial Sequence
  Description of Artificial Sequence: Synthetic oligonucleotide
gcccaacuuccagcaccac

SEQ ID NO: 2298282 - RNA, 19 nt, Artificial Sequence
  Description of Artificial Sequence: Synthetic oligonucleotide
gcgugcccugaacucuuuu

SEQ ID NO: 2298283 - RNA, 19 nt, Artificial Sequence
  Description of Artificial Sequence: Synthetic oligonucleotide
ggcgugcccugaacucuuu

SEQ ID NO: 2298284 - RNA, 19 nt, Artificial Sequence
  Description of Artificial Sequence: Synthetic oligonucleotide
cgggcccguuugucacuaa

SEQ ID NO: 2298285 - RNA, 19 nt, Artificial Sequence
  Description of Artificial Sequence: Synthetic oligonucleotide
cauguuaugaacauguugg

SEQ ID NO: 2298286 - RNA, 19 nt, Artificial Sequence
  Description of Artificial Sequence: Synthetic oligonucleotide
uuaauaagcccacuaaagg

SEQ ID NO: 2298287 - RNA, 19 nt, Artificial Sequence
  Description of Artificial Sequence: Synthetic oligonucleotide
aaggagaucaagcaguaac

SEQ ID NO: 2298288 - RNA, 19 nt, Artificial Sequence
  Description of Artificial Sequence: Synthetic oligonucleotide
ugaaagauuagaaaagggc

SEQ ID NO: 2298289 - RNA, 19 nt, Artificial Sequence
  Description of Artificial Sequence: Synthetic oligonucleotide
aguguuugaucauaaacgc

SEQ ID NO: 2298290 - RNA, 19 nt, Artificial Sequence
  Description of Artificial Sequence: Synthetic oligonucleotide
aguauaaucuggcacauuc

SEQ ID NO: 2298291 - RNA, 19 nt, Artificial Sequence
  Description of Artificial Sequence: Synthetic oligonucleotide
guugauauucuccugaagg

SEQ ID NO: 2298292 - RNA, 19 nt, Artificial Sequence
  Description of Artificial Sequence: Synthetic oligonucleotide
uguuugauaaaggagauca

SEQ ID NO: 2298293 - RNA, 19 nt, Artificial Sequence
  Description of Artificial Sequence: Synthetic oligonucleotide
aaaucuacuucugugaaag

SEQ ID NO: 2298294 - RNA, 19 nt, Artificial Sequence
  Description of Artificial Sequence: Synthetic oligonucleotide
agauaguauaaucuggcac

SEQ ID NO: 2298295 - RNA, 19 nt, Artificial Sequence
  Description of Artificial Sequence: Synthetic oligonucleotide
guuaugaacauguuggaag

SEQ ID NO: 2298296 - RNA, 19 nt, Artificial Sequence
  Description of Artificial Sequence: Synthetic oligonucleotide
aguagaagguucuugcccc

SEQ ID NO: 2298297 - RNA, 19 nt, Artificial Sequence
  Description of Artificial Sequence: Synthetic oligonucleotide
gaguguuugaucauaaacg

SEQ ID NO: 2298298 - RNA, 19 nt, Artificial Sequence
  Description of Artificial Sequence: Synthetic oligonucleotide
aguucuggagcccagauag

SEQ ID NO: 2298299 - RNA, 19 nt, Artificial Sequence
  Description of Artificial Sequence: Synthetic oligonucleotide
gauaaaggagaucaagcag

SEQ ID NO: 2298300 - RNA, 19 nt, Artificial Sequence
  Description of Artificial Sequence: Synthetic oligonucleotide
cacuaaaggaucucgaacg

SEQ ID NO: 2298301 - RNA, 19 nt, Artificial Sequence
  Description of Artificial Sequence: Synthetic oligonucleotide
agugagaaaaucuacuucu

SEQ ID NO: 2298302 - RNA, 19 nt, Artificial Sequence
  Description of Artificial Sequence: Synthetic oligonucleotide
gauaguauaaucuggcaca

SEQ ID NO: 2298303 - RNA, 19 nt, Artificial Sequence
  Description of Artificial Sequence: Synthetic oligonucleotide
agaacaagaaucuacccug

SEQ ID NO: 2298304 - RNA, 19 nt, Artificial Sequence
  Description of Artificial Sequence: Synthetic oligonucleotide
uauggaacuguuuaauaag

SEQ ID NO: 2298305 - RNA, 19 nt, Artificial Sequence
  Description of Artificial Sequence: Synthetic oligonucleotide
aaagauuagaaaagggcuc

SEQ ID NO: 2298306 - RNA, 19 nt, Artificial Sequence
  Description of Artificial Sequence: Synthetic oligonucleotide
ucaaagauugcuuauggaa

SEQ ID NO: 2298307 - RNA, 19 nt, Artificial Sequence
  Description of Artificial Sequence: Synthetic oligonucleotide
ucaagcaguaacuucagca

SEQ ID NO: 2298308 - RNA, 19 nt, Artificial Sequence
  Description of Artificial Sequence: Synthetic oligonucleotide
aaagauugcuuauggaacu

SEQ ID NO: 2298309 - RNA, 19 nt, Artificial Sequence
  Description of Artificial Sequence: Synthetic oligonucleotide
uugagaacaagaaucuacc

SEQ ID NO: 2298310 - RNA, 19 nt, Artificial Sequence
  Description of Artificial Sequence: Synthetic oligonucleotide
uggauuuucagugagaaaa

SEQ ID NO: 2298311 - RNA, 19 nt, Artificial Sequence
  Description of Artificial Sequence: Synthetic oligonucleotide
uaauaagcccacuaaagga

SEQ ID NO: 2298312 - RNA, 19 nt, Artificial Sequence
  Description of Artificial Sequence: Synthetic oligonucleotide
ugauaaaggagaucaagca

SEQ ID NO: 2298313 - RNA, 19 nt, Artificial Sequence
  Description of Artificial Sequence: Synthetic oligonucleotide
gaucauaaacgccaucccg

SEQ ID NO: 2298314 - RNA, 19 nt, Artificial Sequence
  Description of Artificial Sequence: Synthetic oligonucleotide
caagaaucuacccuguucc

SEQ ID NO: 2298315 - RNA, 19 nt, Artificial Sequence
  Description of Artificial Sequence: Synthetic oligonucleotide
uaaaggaucucgaacgggc

SEQ ID NO: 2298316 - RNA, 19 nt, Artificial Sequence
  Description of Artificial Sequence: Synthetic oligonucleotide
aaaaguuuacuugggagug

SEQ ID NO: 2298317 - RNA, 19 nt, Artificial Sequence
  Description of Artificial Sequence: Synthetic oligonucleotide
ucugacaucaucugauugc

SEQ ID NO: 2298318 - RNA, 19 nt, Artificial Sequence
  Description of Artificial Sequence: Synthetic oligonucleotide
caugacaugagguugucag

SEQ ID NO: 2298319 - RNA, 19 nt, Artificial Sequence
  Description of Artificial Sequence: Synthetic oligonucleotide
uugaucauaaacgccaucc

SEQ ID NO: 2298320 - RNA, 19 nt, Artificial Sequence
  Description of Artificial Sequence: Synthetic oligonucleotide
agucaaagauugcuuaugg

SEQ ID NO: 2298321 - RNA, 19 nt, Artificial Sequence
  Description of Artificial Sequence: Synthetic oligonucleotide
aaggcucuuucacaugggc

SEQ ID NO: 2298322 - RNA, 19 nt, Artificial Sequence
  Description of Artificial Sequence: Synthetic oligonucleotide
cuauguauccuccaucucc

SEQ ID NO: 2298323 - RNA, 19 nt, Artificial Sequence
  Description of Artificial Sequence: Synthetic oligonucleotide
aagcaguaacuucagcagg

SEQ ID NO: 2298324 - RNA, 19 nt, Artificial Sequence
  Description of Artificial Sequence: Synthetic oligonucleotide
auggggugcaaacauaagg

SEQ ID NO: 2298325 - RNA, 19 nt, Artificial Sequence
  Description of Artificial Sequence: Synthetic oligonucleotide
caaagauugcuuauggaac

SEQ ID NO: 2298326 - RNA, 19 nt, Artificial Sequence
  Description of Artificial Sequence: Synthetic oligonucleotide
acacuugaguucuggagcc

SEQ ID NO: 2298327 - RNA, 19 nt, Artificial Sequence
  Description of Artificial Sequence: Synthetic oligonucleotide
uuugcgcuuaauaagccca

SEQ ID NO: 2298328 - RNA, 19 nt, Artificial Sequence
  Description of Artificial Sequence: Synthetic oligonucleotide
uuuucugacaucaucugau

SEQ ID NO: 2298329 - RNA, 19 nt, Artificial Sequence
  Description of Artificial Sequence: Synthetic oligonucleotide
aguaacuucagcagguuac

SEQ ID NO: 2298330 - RNA, 19 nt, Artificial Sequence
  Description of Artificial Sequence: Synthetic oligonucleotide
uuccaugguagacacaagc

SEQ ID NO: 2298331 - RNA, 19 nt, Artificial Sequence
  Description of Artificial Sequence: Synthetic oligonucleotide
uucagugagaaaaucuacu

SEQ ID NO: 2298332 - RNA, 19 nt, Artificial Sequence
  Description of Artificial Sequence: Synthetic oligonucleotide
uggcauguuaugaacaugu

SEQ ID NO: 2298333 - RNA, 19 nt, Artificial Sequence
  Description of Artificial Sequence: Synthetic oligonucleotide
aacauguuggaagagcucu

SEQ ID NO: 2298334 - RNA, 19 nt, Artificial Sequence
  Description of Artificial Sequence: Synthetic oligonucleotide
uccucgauagcccaccucc

SEQ ID NO: 2298335 - RNA, 19 nt, Artificial Sequence
  Description of Artificial Sequence: Synthetic oligonucleotide
ugcugaaaggccuugggug

SEQ ID NO: 2298336 - RNA, 19 nt, Artificial Sequence
  Description of Artificial Sequence: Synthetic oligonucleotide
cacauucccgaauauaagc

SEQ ID NO: 2298337 - RNA, 19 nt, Artificial Sequence
  Description of Artificial Sequence: Synthetic oligonucleotide
acuaaaggaucucgaacgg

SEQ ID NO: 2298338 - RNA, 19 nt, Artificial Sequence
  Description of Artificial Sequence: Synthetic oligonucleotide
uucgcuguuugauaaagga

SEQ ID NO: 2298339 - RNA, 19 nt, Artificial Sequence
  Description of Artificial Sequence: Synthetic oligonucleotide
aaacauaagggcaagguua

SEQ ID NO: 2298340 - RNA, 19 nt, Artificial Sequence
  Description of Artificial Sequence: Synthetic oligonucleotide
aagaaucuacccuguuccg

SEQ ID NO: 2298341 - RNA, 19 nt, Artificial Sequence
  Description of Artificial Sequence: Synthetic oligonucleotide
uaaucuggcacauucccga

SEQ ID NO: 2298342 - RNA, 19 nt, Artificial Sequence
  Description of Artificial Sequence: Synthetic oligonucleotide
cauaagggcaagguuaugg

SEQ ID NO: 2298343 - RNA, 19 nt, Artificial Sequence
  Description of Artificial Sequence: Synthetic oligonucleotide
cuuauucuugucuugcuuc

SEQ ID NO: 2298344 - RNA, 19 nt, Artificial Sequence
  Description of Artificial Sequence: Synthetic oligonucleotide
augaacauguuggaagagc

SEQ ID NO: 2298345 - RNA, 19 nt, Artificial Sequence
  Description of Artificial Sequence: Synthetic oligonucleotide
uagacacaagcacucaggc

SEQ ID NO: 2298346 - RNA, 19 nt, Artificial Sequence
  Description of Artificial Sequence: Synthetic oligonucleotide
aagauuagaaaagggcuca

SEQ ID NO: 2298347 - RNA, 19 nt, Artificial Sequence
  Description of Artificial Sequence: Synthetic oligonucleotide
uguuccguuucugagaucu

SEQ ID NO: 2298348 - RNA, 19 nt, Artificial Sequence
  Description of Artificial Sequence: Synthetic oligonucleotide
uauguauccuccaucuccu

SEQ ID NO: 2298349 - RNA, 19 nt, Artificial Sequence
  Description of Artificial Sequence: Synthetic oligonucleotide
gagagaaugcccuuccuac

SEQ ID NO: 2298350 - RNA, 19 nt, Artificial Sequence
  Description of Artificial Sequence: Synthetic oligonucleotide
gacaaggcaugacaugagg

SEQ ID NO: 2298351 - RNA, 19 nt, Artificial Sequence
  Description of Artificial Sequence: Synthetic oligonucleotide
acuugggaguguuugauca

SEQ ID NO: 2298352 - RNA, 19 nt, Artificial Sequence
  Description of Artificial Sequence: Synthetic oligonucleotide
aucauaaacgccaucccgg

SEQ ID NO: 2298353 - RNA, 19 nt, Artificial Sequence
  Description of Artificial Sequence: Synthetic oligonucleotide
cugaaggucauuugcagug

SEQ ID NO: 2298354 - RNA, 19 nt, Artificial Sequence
  Description of Artificial Sequence: Synthetic oligonucleotide
ugaucauaaacgccauccc

SEQ ID NO: 2298355 - RNA, 19 nt, Artificial Sequence
  Description of Artificial Sequence: Synthetic oligonucleotide
gaagagcucuuucagugcc

SEQ ID NO: 2298356 - RNA, 19 nt, Artificial Sequence
  Description of Artificial Sequence: Synthetic oligonucleotide
ccgaauauaagcaggaagc

SEQ ID NO: 2298357 - RNA, 19 nt, Artificial Sequence
  Description of Artificial Sequence: Synthetic oligonucleotide
uugcuuauggaacuguuua

SEQ ID NO: 2298358 - RNA, 19 nt, Artificial Sequence
  Description of Artificial Sequence: Synthetic oligonucleotide
ugagaacaagaaucuaccc

SEQ ID NO: 2298359 - RNA, 19 nt, Artificial Sequence
  Description of Artificial Sequence: Synthetic oligonucleotide
aacuucagcagguuacggu

SEQ ID NO: 2298360 - RNA, 19 nt, Artificial Sequence
  Description of Artificial Sequence: Synthetic oligonucleotide
gacuuugcgcuuaauaagc

SEQ ID NO: 2298361 - RNA, 19 nt, Artificial Sequence
  Description of Artificial Sequence: Synthetic oligonucleotide
uccuacagcccacuggucc

SEQ ID NO: 2298362 - RNA, 19 nt, Artificial Sequence
  Description of Artificial Sequence: Synthetic oligonucleotide
aaggaucucgaacgggcuc

SEQ ID NO: 2298363 - RNA, 19 nt, Artificial Sequence
  Description of Artificial Sequence: Synthetic oligonucleotide
ucgcuguuugauaaaggag

SEQ ID NO: 2298364 - RNA, 19 nt, Artificial Sequence
  Description of Artificial Sequence: Synthetic oligonucleotide
agguugucagaucaagauc

SEQ ID NO: 2298365 - RNA, 19 nt, Artificial Sequence
  Description of Artificial Sequence: Synthetic oligonucleotide
gacaucaucugauugccca

SEQ ID NO: 2298366 - RNA, 19 nt, Artificial Sequence
  Description of Artificial Sequence: Synthetic oligonucleotide
uuugacacuugaguucugg

SEQ ID NO: 2298367 - RNA, 19 nt, Artificial Sequence
  Description of Artificial Sequence: Synthetic oligonucleotide
gagaaugcccuuccuacag

SEQ ID NO: 2298368 - RNA, 19 nt, Artificial Sequence
  Description of Artificial Sequence: Synthetic oligonucleotide
acaugagguugucagauca

SEQ ID NO: 2298369 - RNA, 19 nt, Artificial Sequence
  Description of Artificial Sequence: Synthetic oligonucleotide
guuacgguuggcuggaggc

SEQ ID NO: 2298370 - RNA, 19 nt, Artificial Sequence
  Description of Artificial Sequence: Synthetic oligonucleotide
uucugugaaagauuagaaa

SEQ ID NO: 2298371 - RNA, 19 nt, Artificial Sequence
  Description of Artificial Sequence: Synthetic oligonucleotide
guugagaacaagaaucuac

SEQ ID NO: 2298372 - RNA, 19 nt, Artificial Sequence
  Description of Artificial Sequence: Synthetic oligonucleotide
aaaaucuacuucugugaaa

SEQ ID NO: 2298373 - RNA, 19 nt, Artificial Sequence
  Description of Artificial Sequence: Synthetic oligonucleotide
uuugagucaaagauugcuu

SEQ ID NO: 2298374 - RNA, 19 nt, Artificial Sequence
  Description of Artificial Sequence: Synthetic oligonucleotide
uguugauauucuccugaag

SEQ ID NO: 2298375 - RNA, 19 nt, Artificial Sequence
  Description of Artificial Sequence: Synthetic oligonucleotide
uucuguauguugcuggguc

SEQ ID NO: 2298376 - RNA, 19 nt, Artificial Sequence
  Description of Artificial Sequence: Synthetic oligonucleotide
auaaacgccaucccgguau

SEQ ID NO: 2298377 - RNA, 19 nt, Artificial Sequence
  Description of Artificial Sequence: Synthetic oligonucleotide
ucuacuucugugaaagauu

SEQ ID NO: 2298378 - RNA, 19 nt, Artificial Sequence
  Description of Artificial Sequence: Synthetic oligonucleotide
aaggcaugacaugagguug

SEQ ID NO: 2298379 - RNA, 19 nt, Artificial Sequence
  Description of Artificial Sequence: Synthetic oligonucleotide
cacacuccaguuuccaugg

SEQ ID NO: 2298380 - RNA, 19 nt, Artificial Sequence
  Description of Artificial Sequence: Synthetic oligonucleotide
uucagcagguuacgguugg

SEQ ID NO: 2298381 - RNA, 19 nt, Artificial Sequence
  Description of Artificial Sequence: Synthetic oligonucleotide
agaggcauacuccaaggcu

SEQ ID NO: 2298382 - RNA, 19 nt, Artificial Sequence
  Description of Artificial Sequence: Synthetic oligonucleotide
aagcacucaggcuauguau

SEQ ID NO: 2298383 - RNA, 19 nt, Artificial Sequence
  Description of Artificial Sequence: Synthetic oligonucleotide
ucgauagcccaccuccagg

SEQ ID NO: 2298384 - RNA, 19 nt, Artificial Sequence
  Description of Artificial Sequence: Synthetic oligonucleotide
gauauucuccugaagguca

SEQ ID NO: 2298385 - RNA, 19 nt, Artificial Sequence
  Description of Artificial Sequence: Synthetic oligonucleotide
uuauucuugucuugcuucu

SEQ ID NO: 2298386 - RNA, 19 nt, Artificial Sequence
  Description of Artificial Sequence: Synthetic oligonucleotide
uccugaaggucauuugcag

SEQ ID NO: 2298387 - RNA, 19 nt, Artificial Sequence
  Description of Artificial Sequence: Synthetic oligonucleotide
auagcccaccuccagguuc

SEQ ID NO: 2298388 - RNA, 19 nt, Artificial Sequence
  Description of Artificial Sequence: Synthetic oligonucleotide
agaucuugccagcugggag

SEQ ID NO: 2298389 - RNA, 19 nt, Artificial Sequence
  Description of Artificial Sequence: Synthetic oligonucleotide
agaaugcccuuccuacagc

SEQ ID NO: 2298390 - RNA, 19 nt, Artificial Sequence
  Description of Artificial Sequence: Synthetic oligonucleotide
acuucugugaaagauuaga

SEQ ID NO: 2298391 - RNA, 19 nt, Artificial Sequence
  Description of Artificial Sequence: Synthetic oligonucleotide
uucaaaccugaucacugga

SEQ ID NO: 2298392 - RNA, 19 nt, Artificial Sequence
  Description of Artificial Sequence: Synthetic oligonucleotide
aucaagcaguaacuucagc

SEQ ID NO: 2298393 - RNA, 19 nt, Artificial Sequence
  Description of Artificial Sequence: Synthetic oligonucleotide
cauucccgaauauaagcag

SEQ ID NO: 2298394 - RNA, 19 nt, Artificial Sequence
  Description of Artificial Sequence: Synthetic oligonucleotide
aaaccugaucacuggauuu

SEQ ID NO: 2298395 - RNA, 19 nt, Artificial Sequence
  Description of Artificial Sequence: Synthetic oligonucleotide
ugagguugucagaucaaga

SEQ ID NO: 2298396 - RNA, 19 nt, Artificial Sequence
  Description of Artificial Sequence: Synthetic oligonucleotide
ucuucgcuguuugauaaag

SEQ ID NO: 2298397 - RNA, 19 nt, Artificial Sequence
  Description of Artificial Sequence: Synthetic oligonucleotide
cuuugcgcuuaauaagccc

SEQ ID NO: 2298398 - RNA, 19 nt, Artificial Sequence
  Description of Artificial Sequence: Synthetic oligonucleotide
uugagucaaagauugcuua

SEQ ID NO: 2298399 - RNA, 19 nt, Artificial Sequence
  Description of Artificial Sequence: Synthetic oligonucleotide
uccguuucugagaucuugc

SEQ ID NO: 2298400 - RNA, 19 nt, Artificial Sequence
  Description of Artificial Sequence: Synthetic oligonucleotide
ugguccaagcaucccagag

SEQ ID NO: 2298401 - RNA, 19 nt, Artificial Sequence
  Description of Artificial Sequence: Synthetic oligonucleotide
ugaucacuggauuuucagu

SEQ ID NO: 2298402 - RNA, 19 nt, Artificial Sequence
  Description of Artificial Sequence: Synthetic oligonucleotide
uccuuugacacuugaguuc

SEQ ID NO: 2298403 - RNA, 19 nt, Artificial Sequence
  Description of Artificial Sequence: Synthetic oligonucleotide
gagaucaagcaguaacuuc

SEQ ID NO: 2298404 - RNA, 19 nt, Artificial Sequence
  Description of Artificial Sequence: Synthetic oligonucleotide
caucccagaggcauacucc

SEQ ID NO: 2298405 - RNA, 19 nt, Artificial Sequence
  Description of Artificial Sequence: Synthetic oligonucleotide
gagaacaagaaucuacccu

SEQ ID NO: 2298406 - RNA, 19 nt, Artificial Sequence
  Description of Artificial Sequence: Synthetic oligonucleotide
caucuuauucuugucuugc

SEQ ID NO: 2298407 - RNA, 19 nt, Artificial Sequence
  Description of Artificial Sequence: Synthetic oligonucleotide
uucacaugggcuguggccu

SEQ ID NO: 2298408 - RNA, 19 nt, Artificial Sequence
  Description of Artificial Sequence: Synthetic oligonucleotide
ucaaaccugaucacuggau

SEQ ID NO: 2298409 - RNA, 19 nt, Artificial Sequence
  Description of Artificial Sequence: Synthetic oligonucleotide
auaaucuggcacauucccg

SEQ ID NO: 2298410 - RNA, 19 nt, Artificial Sequence
  Description of Artificial Sequence: Synthetic oligonucleotide
aggcaagaugaggaaaagc

SEQ ID NO: 2298411 - RNA, 19 nt, Artificial Sequence
  Description of Artificial Sequence: Synthetic oligonucleotide
guaacuucagcagguuacg

SEQ ID NO: 2298412 - RNA, 19 nt, Artificial Sequence
  Description of Artificial Sequence: Synthetic oligonucleotide
gauugcccaggacuuugcg

SEQ ID NO: 2298413 - RNA, 19 nt, Artificial Sequence
  Description of Artificial Sequence: Synthetic oligonucleotide
acaucuuauucuugucuug

SEQ ID NO: 2298414 - RNA, 19 nt, Artificial Sequence
  Description of Artificial Sequence: Synthetic oligonucleotide
ugagagaaugcccuuccua

SEQ ID NO: 2298415 - RNA, 19 nt, Artificial Sequence
  Description of Artificial Sequence: Synthetic oligonucleotide
ugaggaaaagcagcugcag

SEQ ID NO: 2298416 - RNA, 19 nt, Artificial Sequence
  Description of Artificial Sequence: Synthetic oligonucleotide
ucauaaacgccaucccggu

SEQ ID NO: 2298417 - RNA, 19 nt, Artificial Sequence
  Description of Artificial Sequence: Synthetic oligonucleotide
acuuugcgcuuaauaagcc

SEQ ID NO: 2298418 - RNA, 19 nt, Artificial Sequence
  Description of Artificial Sequence: Synthetic oligonucleotide
ccagauaguauaaucuggc

SEQ ID NO: 2298419 - RNA, 19 nt, Artificial Sequence
  Description of Artificial Sequence: Synthetic oligonucleotide
uaagcccacuaaaggaucu

SEQ ID NO: 2298420 - RNA, 19 nt, Artificial Sequence
  Description of Artificial Sequence: Synthetic oligonucleotide
uguuugagucaaagauugc

SEQ ID NO: 2298421 - RNA, 19 nt, Artificial Sequence
  Description of Artificial Sequence: Synthetic oligonucleotide
gguugucagaucaagauca

SEQ ID NO: 2298422 - RNA, 19 nt, Artificial Sequence
  Description of Artificial Sequence: Synthetic oligonucleotide
uccuguugagaacaagaau

SEQ ID NO: 2298423 - RNA, 19 nt, Artificial Sequence
  Description of Artificial Sequence: Synthetic oligonucleotide
augguagacacaagcacuc

SEQ ID NO: 2298424 - RNA, 19 nt, Artificial Sequence
  Description of Artificial Sequence: Synthetic oligonucleotide
uguuaugaacauguuggaa

SEQ ID NO: 2298425 - RNA, 19 nt, Artificial Sequence
  Description of Artificial Sequence: Synthetic oligonucleotide
cuucgcuguuugauaaagg

SEQ ID NO: 2298426 - RNA, 19 nt, Artificial Sequence
  Description of Artificial Sequence: Synthetic oligonucleotide
aagauugcuuauggaacug

SEQ ID NO: 2298427 - RNA, 19 nt, Artificial Sequence
  Description of Artificial Sequence: Synthetic oligonucleotide
uaugaacauguuggaagag

SEQ ID NO: 2298428 - RNA, 19 nt, Artificial Sequence
  Description of Artificial Sequence: Synthetic oligonucleotide
uugcugaaaggccuugggu

SEQ ID NO: 2298429 - RNA, 19 nt, Artificial Sequence
  Description of Artificial Sequence: Synthetic oligonucleotide
aacauaagggcaagguuau

SEQ ID NO: 2298430 - RNA, 19 nt, Artificial Sequence
  Description of Artificial Sequence: Synthetic oligonucleotide
guuuccaugguagacacaa

SEQ ID NO: 2298431 - RNA, 19 nt, Artificial Sequence
  Description of Artificial Sequence: Synthetic oligonucleotide
cuaaaggaucucgaacggg

SEQ ID NO: 2298432 - RNA, 19 nt, Artificial Sequence
  Description of Artificial Sequence: Synthetic oligonucleotide
ucagaucaagaucauccuu

SEQ ID NO: 2298433 - RNA, 19 nt, Artificial Sequence
  Description of Artificial Sequence: Synthetic oligonucleotide
auccuuugacacuugaguu

SEQ ID NO: 2298434 - RNA, 19 nt, Artificial Sequence
  Description of Artificial Sequence: Synthetic oligonucleotide
ucuguauguugcugggucu

SEQ ID NO: 2298435 - RNA, 19 nt, Artificial Sequence
  Description of Artificial Sequence: Synthetic oligonucleotide
gagucaaagauugcuuaug

SEQ ID NO: 2298436 - RNA, 19 nt, Artificial Sequence
  Description of Artificial Sequence: Synthetic oligonucleotide
auguuaugaacauguugga

SEQ ID NO: 2298437 - RNA, 19 nt, Artificial Sequence
  Description of Artificial Sequence: Synthetic oligonucleotide
aggcuauguauccuccauc

SEQ ID NO: 2298438 - RNA, 19 nt, Artificial Sequence
  Description of Artificial Sequence: Synthetic oligonucleotide
ggcaagaugaggaaaagca

SEQ ID NO: 2298439 - RNA, 19 nt, Artificial Sequence
  Description of Artificial Sequence: Synthetic oligonucleotide
agcagguuacgguuggcug

SEQ ID NO: 2298440 - RNA, 19 nt, Artificial Sequence
  Description of Artificial Sequence: Synthetic oligonucleotide
cagugagaaaaucuacuuc

SEQ ID NO: 2298441 - RNA, 19 nt, Artificial Sequence
  Description of Artificial Sequence: Synthetic oligonucleotide
gggaguagaagguucuugc

SEQ ID NO: 2298442 - RNA, 19 nt, Artificial Sequence
  Description of Artificial Sequence: Synthetic oligonucleotide
aaucuacuucugugaaaga

SEQ ID NO: 2298443 - RNA, 19 nt, Artificial Sequence
  Description of Artificial Sequence: Synthetic oligonucleotide
cuuuguugauauucuccug

SEQ ID NO: 2298444 - RNA, 19 nt, Artificial Sequence
  Description of Artificial Sequence: Synthetic oligonucleotide
ggcucuuucacaugggcug

SEQ ID NO: 2298445 - RNA, 19 nt, Artificial Sequence
  Description of Artificial Sequence: Synthetic oligonucleotide
caguuuccaugguagacac

SEQ ID NO: 2298446 - RNA, 19 nt, Artificial Sequence
  Description of Artificial Sequence: Synthetic oligonucleotide
gcauguuaugaacauguug

SEQ ID NO: 2298447 - RNA, 19 nt, Artificial Sequence
  Description of Artificial Sequence: Synthetic oligonucleotide
auaagcccacuaaaggauc

SEQ ID NO: 2298448 - RNA, 19 nt, Artificial Sequence
  Description of Artificial Sequence: Synthetic oligonucleotide
uaacuucagcagguuacgg

SEQ ID NO: 2298449 - RNA, 19 nt, Artificial Sequence
  Description of Artificial Sequence: Synthetic oligonucleotide
agcacucaggcuauguauc

SEQ ID NO: 2298450 - RNA, 19 nt, Artificial Sequence
  Description of Artificial Sequence: Synthetic oligonucleotide
ugcuuauggaacuguuuaa

SEQ ID NO: 2298451 - RNA, 19 nt, Artificial Sequence
  Description of Artificial Sequence: Synthetic oligonucleotide
gaggcauacuccaaggcuc

SEQ ID NO: 2298452 - RNA, 19 nt, Artificial Sequence
  Description of Artificial Sequence: Synthetic oligonucleotide
ccagguucaaaccugauca

SEQ ID NO: 2298453 - RNA, 19 nt, Artificial Sequence
  Description of Artificial Sequence: Synthetic oligonucleotide
acauucccgaauauaagca

SEQ ID NO: 2298454 - RNA, 19 nt, Artificial Sequence
  Description of Artificial Sequence: Synthetic oligonucleotide
uuguugauauucuccugaa

SEQ ID NO: 2298455 - RNA, 19 nt, Artificial Sequence
  Description of Artificial Sequence: Synthetic oligonucleotide
guauaaucuggcacauucc

SEQ ID NO: 2298456 - RNA, 19 nt, Artificial Sequence
  Description of Artificial Sequence: Synthetic oligonucleotide
aaaguuuacuugggagugu

SEQ ID NO: 2298457 - RNA, 19 nt, Artificial Sequence
  Description of Artificial Sequence: Synthetic oligonucleotide
gguccaagcaucccagagg

SEQ ID NO: 2298458 - RNA, 19 nt, Artificial Sequence
  Description of Artificial Sequence: Synthetic oligonucleotide
uugacacuugaguucugga

SEQ ID NO: 2298459 - RNA, 19 nt, Artificial Sequence
  Description of Artificial Sequence: Synthetic oligonucleotide
guagaagguucuugccccg

SEQ ID NO: 2298460 - RNA, 19 nt, Artificial Sequence
  Description of Artificial Sequence: Synthetic oligonucleotide
agagaaugcccuuccuaca

SEQ ID NO: 2298461 - RNA, 19 nt, Artificial Sequence
  Description of Artificial Sequence: Synthetic oligonucleotide
agauuagaaaagggcucac

SEQ ID NO: 2298462 - RNA, 19 nt, Artificial Sequence
  Description of Artificial Sequence: Synthetic oligonucleotide
cccagauaguauaaucugg

SEQ ID NO: 2298463 - RNA, 19 nt, Artificial Sequence
  Description of Artificial Sequence: Synthetic oligonucleotide
gagcccagauaguauaauc

SEQ ID NO: 2298464 - RNA, 19 nt, Artificial Sequence
  Description of Artificial Sequence: Synthetic oligonucleotide
guuaugggcagacaucuua

SEQ ID NO: 2298465 - RNA, 19 nt, Artificial Sequence
  Description of Artificial Sequence: Synthetic oligonucleotide
gcagguuacgguuggcugg

SEQ ID NO: 2298466 - RNA, 19 nt, Artificial Sequence
  Description of Artificial Sequence: Synthetic oligonucleotide
agcccagauaguauaaucu

SEQ ID NO: 2298467 - RNA, 19 nt, Artificial Sequence
  Description of Artificial Sequence: Synthetic oligonucleotide
gagguugucagaucaagau

SEQ ID NO: 2298468 - RNA, 19 nt, Artificial Sequence
  Description of Artificial Sequence: Synthetic oligonucleotide
ccgguauuuaacuuuguug

SEQ ID NO: 2298469 - RNA, 19 nt, Artificial Sequence
  Description of Artificial Sequence: Synthetic oligonucleotide
acagcccacugguccaagc

SEQ ID NO: 2298470 - RNA, 19 nt, Artificial Sequence
  Description of Artificial Sequence: Synthetic oligonucleotide
ucaucugauugcccaggac

SEQ ID NO: 2298471 - RNA, 19 nt, Artificial Sequence
  Description of Artificial Sequence: Synthetic oligonucleotide
caggacauggggugcaaac

SEQ ID NO: 2298472 - RNA, 19 nt, Artificial Sequence
  Description of Artificial Sequence: Synthetic oligonucleotide
ccaaggcucuuucacaugg

SEQ ID NO: 2298473 - RNA, 19 nt, Artificial Sequence
  Description of Artificial Sequence: Synthetic oligonucleotide
ugauugcccaggacuuugc

SEQ ID NO: 2298474 - RNA, 19 nt, Artificial Sequence
  Description of Artificial Sequence: Synthetic oligonucleotide
agacacaagcacucaggcu

SEQ ID NO: 2298475 - RNA, 19 nt, Artificial Sequence
  Description of Artificial Sequence: Synthetic oligonucleotide
ugggaguagaagguucuug

SEQ ID NO: 2298476 - RNA, 19 nt, Artificial Sequence
  Description of Artificial Sequence: Synthetic oligonucleotide
cuuucacaugggcuguggc

SEQ ID NO: 2298477 - RNA, 19 nt, Artificial Sequence
  Description of Artificial Sequence: Synthetic oligonucleotide
ugggaguguuugaucauaa

SEQ ID NO: 2298478 - RNA, 19 nt, Artificial Sequence
  Description of Artificial Sequence: Synthetic oligonucleotide
aaaggaucucgaacgggcu

SEQ ID NO: 2298479 - RNA, 19 nt, Artificial Sequence
  Description of Artificial Sequence: Synthetic oligonucleotide
aggagaucaagcaguaacu

SEQ ID NO: 2298480 - RNA, 19 nt, Artificial Sequence
  Description of Artificial Sequence: Synthetic oligonucleotide
acccuguuccguuucugag

SEQ ID NO: 2298481 - RNA, 19 nt, Artificial Sequence
  Description of Artificial Sequence: Synthetic oligonucleotide
ucucgaacgggcucuuuuc

SEQ ID NO: 2298482 - RNA, 19 nt, Artificial Sequence
  Description of Artificial Sequence: Synthetic oligonucleotide
ucgaacgggcucuuuucug

SEQ ID NO: 2298483 - RNA, 19 nt, Artificial Sequence
  Description of Artificial Sequence: Synthetic oligonucleotide
gauuagaaaagggcucaca

SEQ ID NO: 2298484 - RNA, 19 nt, Artificial Sequence
  Description of Artificial Sequence: Synthetic oligonucleotide
cuuauggaacuguuuaaua

SEQ ID NO: 2298485 - RNA, 19 nt, Artificial Sequence
  Description of Artificial Sequence: Synthetic oligonucleotide
gucaaagauugcuuaugga

SEQ ID NO: 2298486 - RNA, 19 nt, Artificial Sequence
  Description of Artificial Sequence: Synthetic oligonucleotide
augacaugagguugucaga

SEQ ID NO: 2298487 - RNA, 19 nt, Artificial Sequence
  Description of Artificial Sequence: Synthetic oligonucleotide
uuacuugggaguguuugau

SEQ ID NO: 2298488 - RNA, 19 nt, Artificial Sequence
  Description of Artificial Sequence: Synthetic oligonucleotide
augcccuuccuacagccca

SEQ ID NO: 2298489 - RNA, 19 nt, Artificial Sequence
  Description of Artificial Sequence: Synthetic oligonucleotide
ucaggcuauguauccucca

SEQ ID NO: 2298490 - RNA, 19 nt, Artificial Sequence
  Description of Artificial Sequence: Synthetic oligonucleotide
gaauauaagcaggaagccu

SEQ ID NO: 2298491 - RNA, 19 nt, Artificial Sequence
  Description of Artificial Sequence: Synthetic oligonucleotide
cuucuucgcuguuugauaa

SEQ ID NO: 2298492 - RNA, 19 nt, Artificial Sequence
  Description of Artificial Sequence: Synthetic oligonucleotide
aaguuuacuugggaguguu

SEQ ID NO: 2298493 - RNA, 19 nt, Artificial Sequence
  Description of Artificial Sequence: Synthetic oligonucleotide
uugcgcuuaauaagcccac

SEQ ID NO: 2298494 - RNA, 19 nt, Artificial Sequence
  Description of Artificial Sequence: Synthetic oligonucleotide
caugguagacacaagcacu

SEQ ID NO: 2298495 - RNA, 19 nt, Artificial Sequence
  Description of Artificial Sequence: Synthetic oligonucleotide
uuucugacaucaucugauu

SEQ ID NO: 2298496 - RNA, 19 nt, Artificial Sequence
  Description of Artificial Sequence: Synthetic oligonucleotide
ugaaggucauuugcaguga

SEQ ID NO: 2298497 - RNA, 19 nt, Artificial Sequence
  Description of Artificial Sequence: Synthetic oligonucleotide
agagcucuuucagugccuc

SEQ ID NO: 2298498 - RNA, 19 nt, Artificial Sequence
  Description of Artificial Sequence: Synthetic oligonucleotide
agcccacuaaaggaucucg

SEQ ID NO: 2298499 - RNA, 19 nt, Artificial Sequence
  Description of Artificial Sequence: Synthetic oligonucleotide
caaggcucuuucacauggg

SEQ ID NO: 2298500 - RNA, 19 nt, Artificial Sequence
  Description of Artificial Sequence: Synthetic oligonucleotide
aaucuggcacauucccgaa

SEQ ID NO: 2298501 - RNA, 19 nt, Artificial Sequence
  Description of Artificial Sequence: Synthetic oligonucleotide
guuugagucaaagauugcu

SEQ ID NO: 2298502 - RNA, 19 nt, Artificial Sequence
  Description of Artificial Sequence: Synthetic oligonucleotide
uggagucuggcauguuaug

SEQ ID NO: 2298503 - RNA, 19 nt, Artificial Sequence
  Description of Artificial Sequence: Synthetic oligonucleotide
agcaguaacuucagcaggu

SEQ ID NO: 2298504 - RNA, 19 nt, Artificial Sequence
  Description of Artificial Sequence: Synthetic oligonucleotide
ggaguagaagguucuugcc

SEQ ID NO: 2298505 - RNA, 19 nt, Artificial Sequence
  Description of Artificial Sequence: Synthetic oligonucleotide
aagcccacuaaaggaucuc

SEQ ID NO: 2298506 - RNA, 19 nt, Artificial Sequence
  Description of Artificial Sequence: Synthetic oligonucleotide
cgguauuuaacuuuguuga

SEQ ID NO: 2298507 - RNA, 19 nt, Artificial Sequence
  Description of Artificial Sequence: Synthetic oligonucleotide
uguauguugcugggucucc

SEQ ID NO: 2298508 - RNA, 19 nt, Artificial Sequence
  Description of Artificial Sequence: Synthetic oligonucleotide
agaaucuacccuguuccgu

SEQ ID NO: 2298509 - RNA, 19 nt, Artificial Sequence
  Description of Artificial Sequence: Synthetic oligonucleotide
ggugagagaaugcccuucc

SEQ ID NO: 2298510 - RNA, 19 nt, Artificial Sequence
  Description of Artificial Sequence: Synthetic oligonucleotide
auaguauaaucuggcacau

SEQ ID NO: 2298511 - RNA, 19 nt, Artificial Sequence
  Description of Artificial Sequence: Synthetic oligonucleotide
cagauaguauaaucuggca

SEQ ID NO: 2298512 - RNA, 19 nt, Artificial Sequence
  Description of Artificial Sequence: Synthetic oligonucleotide
cuugaguucuggagcccag

SEQ ID NO: 2298513 - RNA, 19 nt, Artificial Sequence
  Description of Artificial Sequence: Synthetic oligonucleotide
aaccugaucacuggauuuu

SEQ ID NO: 2298514 - RNA, 19 nt, Artificial Sequence
  Description of Artificial Sequence: Synthetic oligonucleotide
cauggggugcaaacauaag

SEQ ID NO: 2298515 - RNA, 19 nt, Artificial Sequence
  Description of Artificial Sequence: Synthetic oligonucleotide
cucacacacuccaguuucc

SEQ ID NO: 2298516 - RNA, 19 nt, Artificial Sequence
  Description of Artificial Sequence: Synthetic oligonucleotide
uuuugggccacaggacaug

SEQ ID NO: 2298517 - RNA, 19 nt, Artificial Sequence
  Description of Artificial Sequence: Synthetic oligonucleotide
uacuugggaguguuugauc

SEQ ID NO: 2298518 - RNA, 19 nt, Artificial Sequence
  Description of Artificial Sequence: Synthetic oligonucleotide
cuucguggagucuggcaug

SEQ ID NO: 2298519 - RNA, 19 nt, Artificial Sequence
  Description of Artificial Sequence: Synthetic oligonucleotide
uucuggagcccagauagua

SEQ ID NO: 2298520 - RNA, 19 nt, Artificial Sequence
  Description of Artificial Sequence: Synthetic oligonucleotide
gcccagauaguauaaucug

SEQ ID NO: 2298521 - RNA, 19 nt, Artificial Sequence
  Description of Artificial Sequence: Synthetic oligonucleotide
aaucuacccuguuccguuu

SEQ ID NO: 2298522 - RNA, 19 nt, Artificial Sequence
  Description of Artificial Sequence: Synthetic oligonucleotide
uggagcccagauaguauaa

SEQ ID NO: 2298523 - RNA, 19 nt, Artificial Sequence
  Description of Artificial Sequence: Synthetic oligonucleotide
gucauuugcagugacauuu

SEQ ID NO: 2298524 - RNA, 19 nt, Artificial Sequence
  Description of Artificial Sequence: Synthetic oligonucleotide
gcuuaauaagcccacuaaa

SEQ ID NO: 2298525 - RNA, 19 nt, Artificial Sequence
  Description of Artificial Sequence: Synthetic oligonucleotide
cucgauagcccaccuccag

SEQ ID NO: 2298526 - RNA, 19 nt, Artificial Sequence
  Description of Artificial Sequence: Synthetic oligonucleotide
ggggugcaaacauaagggc

SEQ ID NO: 2298527 - RNA, 19 nt, Artificial Sequence
  Description of Artificial Sequence: Synthetic oligonucleotide
ugggucuccuccuguugag

SEQ ID NO: 2298528 - RNA, 19 nt, Artificial Sequence
  Description of Artificial Sequence: Synthetic oligonucleotide
ggaagagcucuuucagugc

SEQ ID NO: 2298529 - RNA, 19 nt, Artificial Sequence
  Description of Artificial Sequence: Synthetic oligonucleotide
cuguugagaacaagaaucu

SEQ ID NO: 2298530 - RNA, 19 nt, Artificial Sequence
  Description of Artificial Sequence: Synthetic oligonucleotide
aaggucauuugcagugaca

SEQ ID NO: 2298531 - RNA, 19 nt, Artificial Sequence
  Description of Artificial Sequence: Synthetic oligonucleotide
gacaugagguugucagauc

SEQ ID NO: 2298532 - RNA, 19 nt, Artificial Sequence
  Description of Artificial Sequence: Synthetic oligonucleotide
uguugagaacaagaaucua

SEQ ID NO: 2298533 - RNA, 19 nt, Artificial Sequence
  Description of Artificial Sequence: Synthetic oligonucleotide
agauugcuuauggaacugu

SEQ ID NO: 2298534 - RNA, 19 nt, Artificial Sequence
  Description of Artificial Sequence: Synthetic oligonucleotide
cuccuguugagaacaagaa

SEQ ID NO: 2298535 - RNA, 19 nt, Artificial Sequence
  Description of Artificial Sequence: Synthetic oligonucleotide
acauggggugcaaacauaa

SEQ ID NO: 2298536 - RNA, 19 nt, Artificial Sequence
  Description of Artificial Sequence: Synthetic oligonucleotide
gguuacgguuggcuggagg

SEQ ID NO: 2298537 - RNA, 19 nt, Artificial Sequence
  Description of Artificial Sequence: Synthetic oligonucleotide
aucccgguauuuaacuuug

SEQ ID NO: 2298538 - RNA, 19 nt, Artificial Sequence
  Description of Artificial Sequence: Synthetic oligonucleotide
uggacccugggaguagaag

SEQ ID NO: 2298539 - RNA, 19 nt, Artificial Sequence
  Description of Artificial Sequence: Synthetic oligonucleotide
cuuccuacagcccacuggu

SEQ ID NO: 2298540 - RNA, 19 nt, Artificial Sequence
  Description of Artificial Sequence: Synthetic oligonucleotide
ccacuaaaggaucucgaac

SEQ ID NO: 2298541 - RNA, 19 nt, Artificial Sequence
  Description of Artificial Sequence: Synthetic oligonucleotide
aggacauggggugcaaaca

SEQ ID NO: 2298542 - RNA, 19 nt, Artificial Sequence
  Description of Artificial Sequence: Synthetic oligonucleotide
acuugaguucuggagccca

SEQ ID NO: 2298543 - RNA, 19 nt, Artificial Sequence
  Description of Artificial Sequence: Synthetic oligonucleotide
cugauugcccaggacuuug

SEQ ID NO: 2298544 - RNA, 19 nt, Artificial Sequence
  Description of Artificial Sequence: Synthetic oligonucleotide
uggaggcaagaugaggaaa

SEQ ID NO: 2298545 - RNA, 19 nt, Artificial Sequence
  Description of Artificial Sequence: Synthetic oligonucleotide
aacgccaucccgguauuua

SEQ ID NO: 2298546 - RNA, 19 nt, Artificial Sequence
  Description of Artificial Sequence: Synthetic oligonucleotide
ggcacauucccgaauauaa

SEQ ID NO: 2298547 - RNA, 19 nt, Artificial Sequence
  Description of Artificial Sequence: Synthetic oligonucleotide
ccuuccuacagcccacugg

SEQ ID NO: 2298548 - RNA, 19 nt, Artificial Sequence
  Description of Artificial Sequence: Synthetic oligonucleotide
auacuccaaggcucuuuca

SEQ ID NO: 2298549 - RNA, 19 nt, Artificial Sequence
  Description of Artificial Sequence: Synthetic oligonucleotide
uucuucgcuguuugauaaa

SEQ ID NO: 2298550 - RNA, 19 nt, Artificial Sequence
  Description of Artificial Sequence: Synthetic oligonucleotide
auugcuuauggaacuguuu

SEQ ID NO: 2298551 - RNA, 19 nt, Artificial Sequence
  Description of Artificial Sequence: Synthetic oligonucleotide
gaaucuacccuguuccguu

SEQ ID NO: 2298552 - RNA, 19 nt, Artificial Sequence
  Description of Artificial Sequence: Synthetic oligonucleotide
uucguggagucuggcaugu

SEQ ID NO: 2298553 - RNA, 19 nt, Artificial Sequence
  Description of Artificial Sequence: Synthetic oligonucleotide
caagguuaugggcagacau

SEQ ID NO: 2298554 - RNA, 19 nt, Artificial Sequence
  Description of Artificial Sequence: Synthetic oligonucleotide
gucagaucaagaucauccu

SEQ ID NO: 2298555 - RNA, 19 nt, Artificial Sequence
  Description of Artificial Sequence: Synthetic oligonucleotide
ggugcaaacauaagggcaa

SEQ ID NO: 2298556 - RNA, 19 nt, Artificial Sequence
  Description of Artificial Sequence: Synthetic oligonucleotide
acaagcacucaggcuaugu

SEQ ID NO: 2298557 - RNA, 19 nt, Artificial Sequence
  Description of Artificial Sequence: Synthetic oligonucleotide
gaacgggcucuuuucugga

SEQ ID NO: 2298558 - RNA, 19 nt, Artificial Sequence
  Description of Artificial Sequence: Synthetic oligonucleotide
uuucuggacccugggagua

SEQ ID NO: 2298559 - RNA, 19 nt, Artificial Sequence
  Description of Artificial Sequence: Synthetic oligonucleotide
ugguagacacaagcacuca

SEQ ID NO: 2298560 - RNA, 19 nt, Artificial Sequence
  Description of Artificial Sequence: Synthetic oligonucleotide
uugccccgguguuugaguc

SEQ ID NO: 2298561 - RNA, 19 nt, Artificial Sequence
  Description of Artificial Sequence: Synthetic oligonucleotide
cuguauguugcugggucuc

SEQ ID NO: 2298562 - RNA, 19 nt, Artificial Sequence
  Description of Artificial Sequence: Synthetic oligonucleotide
ucuccucgauagcccaccu

SEQ ID NO: 2298563 - RNA, 19 nt, Artificial Sequence
  Description of Artificial Sequence: Synthetic oligonucleotide
ggcuauguauccuccaucu

SEQ ID NO: 2298564 - RNA, 19 nt, Artificial Sequence
  Description of Artificial Sequence: Synthetic oligonucleotide
uaaacgccaucccgguauu

SEQ ID NO: 2298565 - RNA, 19 nt, Artificial Sequence
  Description of Artificial Sequence: Synthetic oligonucleotide
aucugauugcccaggacuu

SEQ ID NO: 2298566 - RNA, 19 nt, Artificial Sequence
  Description of Artificial Sequence: Synthetic oligonucleotide
cuguuugauaaaggagauc

SEQ ID NO: 2298567 - RNA, 19 nt, Artificial Sequence
  Description of Artificial Sequence: Synthetic oligonucleotide
ucuggacccugggaguaga

SEQ ID NO: 2298568 - RNA, 19 nt, Artificial Sequence
  Description of Artificial Sequence: Synthetic oligonucleotide
ugcccuuccuacagcccac

SEQ ID NO: 2298569 - RNA, 19 nt, Artificial Sequence
  Description of Artificial Sequence: Synthetic oligonucleotide
ugcgcuuaauaagcccacu

SEQ ID NO: 2298570 - RNA, 19 nt, Artificial Sequence
  Description of Artificial Sequence: Synthetic oligonucleotide
aggcucuuucacaugggcu

SEQ ID NO: 2298571 - RNA, 19 nt, Artificial Sequence
  Description of Artificial Sequence: Synthetic oligonucleotide
cuggagcccagauaguaua

SEQ ID NO: 2298572 - RNA, 19 nt, Artificial Sequence
  Description of Artificial Sequence: Synthetic oligonucleotide
aggcaugacaugagguugu

SEQ ID NO: 2298573 - RNA, 19 nt, Artificial Sequence
  Description of Artificial Sequence: Synthetic oligonucleotide
gcacauucccgaauauaag

SEQ ID NO: 2298574 - RNA, 19 nt, Artificial Sequence
  Description of Artificial Sequence: Synthetic oligonucleotide
acgccaucccgguauuuaa

SEQ ID NO: 2298575 - RNA, 19 nt, Artificial Sequence
  Description of Artificial Sequence: Synthetic oligonucleotide
guuugauaaaggagaucaa

SEQ ID NO: 2298576 - RNA, 19 nt, Artificial Sequence
  Description of Artificial Sequence: Synthetic oligonucleotide
ucccgguauuuaacuuugu

SEQ ID NO: 2298577 - RNA, 19 nt, Artificial Sequence
  Description of Artificial Sequence: Synthetic oligonucleotide
cugggucuccuccuguuga

SEQ ID NO: 2298578 - RNA, 19 nt, Artificial Sequence
  Description of Artificial Sequence: Synthetic oligonucleotide
ucccgaauauaagcaggaa

SEQ ID NO: 2298579 - RNA, 19 nt, Artificial Sequence
  Description of Artificial Sequence: Synthetic oligonucleotide
cuuugacacuugaguucug

SEQ ID NO: 2298580 - RNA, 19 nt, Artificial Sequence
  Description of Artificial Sequence: Synthetic oligonucleotide
caugagguugucagaucaa

SEQ ID NO: 2298581 - RNA, 19 nt, Artificial Sequence
  Description of Artificial Sequence: Synthetic oligonucleotide
cccagaggcauacuccaag

SEQ ID NO: 2298582 - RNA, 19 nt, Artificial Sequence
  Description of Artificial Sequence: Synthetic oligonucleotide
ggagucuggcauguuauga

SEQ ID NO: 2298583 - RNA, 19 nt, Artificial Sequence
  Description of Artificial Sequence: Synthetic oligonucleotide
ucccagaggcauacuccaa

SEQ ID NO: 2298584 - RNA, 19 nt, Artificial Sequence
  Description of Artificial Sequence: Synthetic oligonucleotide
cacuggauuuucagugaga

SEQ ID NO: 2298585 - RNA, 19 nt, Artificial Sequence
  Description of Artificial Sequence: Synthetic oligonucleotide
gcaucccagaggcauacuc

SEQ ID NO: 2298586 - RNA, 19 nt, Artificial Sequence
  Description of Artificial Sequence: Synthetic oligonucleotide
cuucuucguggagucuggc

SEQ ID NO: 2298587 - RNA, 19 nt, Artificial Sequence
  Description of Artificial Sequence: Synthetic oligonucleotide
gaacaagaaucuacccugu

SEQ ID NO: 2298588 - RNA, 19 nt, Artificial Sequence
  Description of Artificial Sequence: Synthetic oligonucleotide
uuccuacagcccacugguc

SEQ ID NO: 2298589 - RNA, 19 nt, Artificial Sequence
  Description of Artificial Sequence: Synthetic oligonucleotide
aggcauacuccaaggcucu

SEQ ID NO: 2298590 - RNA, 19 nt, Artificial Sequence
  Description of Artificial Sequence: Synthetic oligonucleotide
ggccuugggugagagaaug

SEQ ID NO: 2298591 - RNA, 19 nt, Artificial Sequence
  Description of Artificial Sequence: Synthetic oligonucleotide
gcucuuuucuggacccugg

SEQ ID NO: 2298592 - RNA, 19 nt, Artificial Sequence
  Description of Artificial Sequence: Synthetic oligonucleotide
caagcacucaggcuaugua

SEQ ID NO: 2298593 - RNA, 19 nt, Artificial Sequence
  Description of Artificial Sequence: Synthetic oligonucleotide
cacuugaguucuggagccc

SEQ ID NO: 2298594 - RNA, 19 nt, Artificial Sequence
  Description of Artificial Sequence: Synthetic oligonucleotide
caaaccugaucacuggauu

SEQ ID NO: 2298595 - RNA, 19 nt, Artificial Sequence
  Description of Artificial Sequence: Synthetic oligonucleotide
gacauggggugcaaacaua

SEQ ID NO: 2298596 - RNA, 19 nt, Artificial Sequence
  Description of Artificial Sequence: Synthetic oligonucleotide
gauugcuuauggaacuguu

SEQ ID NO: 2298597 - RNA, 19 nt, Artificial Sequence
  Description of Artificial Sequence: Synthetic oligonucleotide
cagcccacugguccaagca

SEQ ID NO: 2298598 - RNA, 19 nt, Artificial Sequence
  Description of Artificial Sequence: Synthetic oligonucleotide
uacagcccacugguccaag

SEQ ID NO: 2298599 - RNA, 19 nt, Artificial Sequence
  Description of Artificial Sequence: Synthetic oligonucleotide
uaguauaaucuggcacauu

SEQ ID NO: 2298600 - RNA, 19 nt, Artificial Sequence
  Description of Artificial Sequence: Synthetic oligonucleotide
gacccugggaguagaaggu

SEQ ID NO: 2298601 - RNA, 19 nt, Artificial Sequence
  Description of Artificial Sequence: Synthetic oligonucleotide
gcuauguauccuccaucuc

SEQ ID NO: 2298602 - RNA, 19 nt, Artificial Sequence
  Description of Artificial Sequence: Synthetic oligonucleotide
gcuucuucgcuguuugaua

SEQ ID NO: 2298603 - RNA, 19 nt, Artificial Sequence
  Description of Artificial Sequence: Synthetic oligonucleotide
cuguggccucacacacucc

SEQ ID NO: 2298604 - RNA, 19 nt, Artificial Sequence
  Description of Artificial Sequence: Synthetic oligonucleotide
ccaguuuccaugguagaca

SEQ ID NO: 2298605 - RNA, 19 nt, Artificial Sequence
  Description of Artificial Sequence: Synthetic oligonucleotide
cucuuucacaugggcugug

SEQ ID NO: 2298606 - RNA, 19 nt, Artificial Sequence
  Description of Artificial Sequence: Synthetic oligonucleotide
gguguuugagucaaagauu

SEQ ID NO: 2298607 - RNA, 19 nt, Artificial Sequence
  Description of Artificial Sequence: Synthetic oligonucleotide
cuccucgauagcccaccuc

SEQ ID NO: 2298608 - RNA, 19 nt, Artificial Sequence
  Description of Artificial Sequence: Synthetic oligonucleotide
cagguuacgguuggcugga

SEQ ID NO: 2298609 - RNA, 19 nt, Artificial Sequence
  Description of Artificial Sequence: Synthetic oligonucleotide
ggacauggggugcaaacau

SEQ ID NO: 2298610 - RNA, 19 nt, Artificial Sequence
  Description of Artificial Sequence: Synthetic oligonucleotide
cccgguguuugagucaaag

SEQ ID NO: 2298611 - RNA, 19 nt, Artificial Sequence
  Description of Artificial Sequence: Synthetic oligonucleotide
cauaaacgccaucccggua

SEQ ID NO: 2298612 - RNA, 19 nt, Artificial Sequence
  Description of Artificial Sequence: Synthetic oligonucleotide
aaacgccaucccgguauuu

SEQ ID NO: 2298613 - RNA, 19 nt, Artificial Sequence
  Description of Artificial Sequence: Synthetic oligonucleotide
cucgaacgggcucuuuucu

SEQ ID NO: 2298614 - RNA, 19 nt, Artificial Sequence
  Description of Artificial Sequence: Synthetic oligonucleotide
gcuuauggaacuguuuaau

SEQ ID NO: 2298615 - RNA, 19 nt, Artificial Sequence
  Description of Artificial Sequence: Synthetic oligonucleotide
ccuacagcccacuggucca

SEQ ID NO: 2298616 - RNA, 19 nt, Artificial Sequence
  Description of Artificial Sequence: Synthetic oligonucleotide
aguuuacuugggaguguuu

SEQ ID NO: 2298617 - RNA, 19 nt, Artificial Sequence
  Description of Artificial Sequence: Synthetic oligonucleotide
acgguuggcuggaggcaag

SEQ ID NO: 2298618 - RNA, 19 nt, Artificial Sequence
  Description of Artificial Sequence: Synthetic oligonucleotide
gugagagaaugcccuuccu

SEQ ID NO: 2298619 - RNA, 19 nt, Artificial Sequence
  Description of Artificial Sequence: Synthetic oligonucleotide
cuugccccgguguuugagu

SEQ ID NO: 2298620 - RNA, 19 nt, Artificial Sequence
  Description of Artificial Sequence: Synthetic oligonucleotide
gcgcuuaauaagcccacua

SEQ ID NO: 2298621 - RNA, 19 nt, Artificial Sequence
  Description of Artificial Sequence: Synthetic oligonucleotide
ccugaucacuggauuuuca

SEQ ID NO: 2298622 - RNA, 19 nt, Artificial Sequence
  Description of Artificial Sequence: Synthetic oligonucleotide
acaggacauggggugcaaa

SEQ ID NO: 2298623 - RNA, 19 nt, Artificial Sequence
  Description of Artificial Sequence: Synthetic oligonucleotide
cuugggaguguuugaucau

SEQ ID NO: 2298624 - RNA, 19 nt, Artificial Sequence
  Description of Artificial Sequence: Synthetic oligonucleotide
ggauuuucagugagaaaau

SEQ ID NO: 2298625 - RNA, 19 nt, Artificial Sequence
  Description of Artificial Sequence: Synthetic oligonucleotide
caggcuauguauccuccau

SEQ ID NO: 2298626 - RNA, 19 nt, Artificial Sequence
  Description of Artificial Sequence: Synthetic oligonucleotide
ccaucuccucgauagccca

SEQ ID NO: 2298627 - RNA, 19 nt, Artificial Sequence
  Description of Artificial Sequence: Synthetic oligonucleotide
gcagggccucaaucugccg

SEQ ID NO: 2298628 - RNA, 19 nt, Artificial Sequence
  Description of Artificial Sequence: Synthetic oligonucleotide
gggugagagaaugcccuuc

SEQ ID NO: 2298629 - RNA, 19 nt, Artificial Sequence
  Description of Artificial Sequence: Synthetic oligonucleotide
cuguuccguuucugagauc

SEQ ID NO: 2298630 - RNA, 19 nt, Artificial Sequence
  Description of Artificial Sequence: Synthetic oligonucleotide
cgcuuaauaagcccacuaa

SEQ ID NO: 2298631 - RNA, 19 nt, Artificial Sequence
  Description of Artificial Sequence: Synthetic oligonucleotide
cacaagcacucaggcuaug

SEQ ID NO: 2298632 - RNA, 19 nt, Artificial Sequence
  Description of Artificial Sequence: Synthetic oligonucleotide
acccugggaguagaagguu

SEQ ID NO: 2298633 - RNA, 19 nt, Artificial Sequence
  Description of Artificial Sequence: Synthetic oligonucleotide
ggagaucaagcaguaacuu

SEQ ID NO: 2298634 - RNA, 19 nt, Artificial Sequence
  Description of Artificial Sequence: Synthetic oligonucleotide
guugucagaucaagaucau

SEQ ID NO: 2298635 - RNA, 19 nt, Artificial Sequence
  Description of Artificial Sequence: Synthetic oligonucleotide
ccugaaggucauuugcagu

SEQ ID NO: 2298636 - RNA, 19 nt, Artificial Sequence
  Description of Artificial Sequence: Synthetic oligonucleotide
agguuacgguuggcuggag

SEQ ID NO: 2298637 - RNA, 19 nt, Artificial Sequence
  Description of Artificial Sequence: Synthetic oligonucleotide
gccuugggugagagaaugc

SEQ ID NO: 2298638 - RNA, 19 nt, Artificial Sequence
  Description of Artificial Sequence: Synthetic oligonucleotide
caggcaagccuugcugaaa

SEQ ID NO: 2298639 - RNA, 19 nt, Artificial Sequence
  Description of Artificial Sequence: Synthetic oligonucleotide
gcccacuaaaggaucucga

SEQ ID NO: 2298640 - RNA, 19 nt, Artificial Sequence
  Description of Artificial Sequence: Synthetic oligonucleotide
gcccacugguccaagcauc

SEQ ID NO: 2298641 - RNA, 19 nt, Artificial Sequence
  Description of Artificial Sequence: Synthetic oligonucleotide
gcaagguuaugggcagaca

SEQ ID NO: 2298642 - RNA, 19 nt, Artificial Sequence
  Description of Artificial Sequence: Synthetic oligonucleotide
ggcaugacaugagguuguc

SEQ ID NO: 2298643 - RNA, 19 nt, Artificial Sequence
  Description of Artificial Sequence: Synthetic oligonucleotide
cuggacccugggaguagaa

SEQ ID NO: 2298644 - RNA, 19 nt, Artificial Sequence
  Description of Artificial Sequence: Synthetic oligonucleotide
cgccaucccgguauuuaac

SEQ ID NO: 2298645 - RNA, 19 nt, Artificial Sequence
  Description of Artificial Sequence: Synthetic oligonucleotide
cacaugggcuguggccuca

SEQ ID NO: 2298646 - RNA, 19 nt, Artificial Sequence
  Description of Artificial Sequence: Synthetic oligonucleotide
cuacagcccacugguccaa

SEQ ID NO: 2298647 - RNA, 19 nt, Artificial Sequence
  Description of Artificial Sequence: Synthetic oligonucleotide
ccucgauagcccaccucca

SEQ ID NO: 2298648 - RNA, 19 nt, Artificial Sequence
  Description of Artificial Sequence: Synthetic oligonucleotide
cccuuccuacagcccacug

SEQ ID NO: 2298649 - RNA, 19 nt, Artificial Sequence
  Description of Artificial Sequence: Synthetic oligonucleotide
gcucuuucacaugggcugu

SEQ ID NO: 2298650 - RNA, 19 nt, Artificial Sequence
  Description of Artificial Sequence: Synthetic oligonucleotide
gccccgguguuugagucaa

SEQ ID NO: 2298651 - RNA, 19 nt, Artificial Sequence
  Description of Artificial Sequence: Synthetic oligonucleotide
cuccagguucaaaccugau

SEQ ID NO: 2298652 - RNA, 19 nt, Artificial Sequence
  Description of Artificial Sequence: Synthetic oligonucleotide
ucguggagucuggcauguu

SEQ ID NO: 2298653 - RNA, 19 nt, Artificial Sequence
  Description of Artificial Sequence: Synthetic oligonucleotide
cccgguauuuaacuuuguu

SEQ ID NO: 2298654 - RNA, 19 nt, Artificial Sequence
  Description of Artificial Sequence: Synthetic oligonucleotide
gguucuugccccgguguuu

SEQ ID NO: 2298655 - RNA, 19 nt, Artificial Sequence
  Description of Artificial Sequence: Synthetic oligonucleotide
gcauacuccaaggcucuuu

SEQ ID NO: 2298656 - RNA, 19 nt, Artificial Sequence
  Description of Artificial Sequence: Synthetic oligonucleotide
gaucucgaacgggcucuuu

SEQ ID NO: 2298657 - RNA, 19 nt, Artificial Sequence
  Description of Artificial Sequence: Synthetic oligonucleotide
gcaguaacuucagcagguu

SEQ ID NO: 2298658 - RNA, 19 nt, Artificial Sequence
  Description of Artificial Sequence: Synthetic oligonucleotide
cugggaguagaagguucuu

SEQ ID NO: 2298659 - RNA, 19 nt, Artificial Sequence
  Description of Artificial Sequence: Synthetic oligonucleotide
gguuggcuggaggcaagau

SEQ ID NO: 2298660 - RNA, 19 nt, Artificial Sequence
  Description of Artificial Sequence: Synthetic oligonucleotide
gguuaugggcagacaucuu

SEQ ID NO: 2298661 - RNA, 19 nt, Artificial Sequence
  Description of Artificial Sequence: Synthetic oligonucleotide
cccaggacuuugcgcuuaa

SEQ ID NO: 2298662 - RNA, 19 nt, Artificial Sequence
  Description of Artificial Sequence: Synthetic oligonucleotide
gggcucuuuucuggacccu

SEQ ID NO: 2298663 - RNA, 19 nt, Artificial Sequence
  Description of Artificial Sequence: Synthetic oligonucleotide
gcccuuccuacagcccacu

SEQ ID NO: 2298664 - RNA, 19 nt, Artificial Sequence
  Description of Artificial Sequence: Synthetic oligonucleotide
ggcauacuccaaggcucuu

SEQ ID NO: 2298665 - RNA, 19 nt, Artificial Sequence
  Description of Artificial Sequence: Synthetic oligonucleotide
ccccgguguuugagucaaa

SEQ ID NO: 2298666 - RNA, 19 nt, Artificial Sequence
  Description of Artificial Sequence: Synthetic oligonucleotide
agaaauaugauauggccgc

SEQ ID NO: 2298667 - RNA, 19 nt, Artificial Sequence
  Description of Artificial Sequence: Synthetic oligonucleotide
guaagaguaaguuugacag

SEQ ID NO: 2298668 - RNA, 19 nt, Artificial Sequence
  Description of Artificial Sequence: Synthetic oligonucleotide
uuaaacacuggccugaugc

SEQ ID NO: 2298669 - RNA, 19 nt, Artificial Sequence
  Description of Artificial Sequence: Synthetic oligonucleotide
gaauauauuuaccauuugg

SEQ ID NO: 2298670 - RNA, 19 nt, Artificial Sequence
  Description of Artificial Sequence: Synthetic oligonucleotide
uuuaacaaaagacacggga

SEQ ID NO: 2298671 - RNA, 19 nt, Artificial Sequence
  Description of Artificial Sequence: Synthetic oligonucleotide
aagcgaaugguuuugauug

SEQ ID NO: 2298672 - RNA, 19 nt, Artificial Sequence
  Description of Artificial Sequence: Synthetic oligonucleotide
cuugacacuaucaaggacc

SEQ ID NO: 2298673 - RNA, 19 nt, Artificial Sequence
  Description of Artificial Sequence: Synthetic oligonucleotide
cuuuccaccaguaacagag

SEQ ID NO: 2298674 - RNA, 19 nt, Artificial Sequence
  Description of Artificial Sequence: Synthetic oligonucleotide
uuucuaaugcugcugaugc

SEQ ID NO: 2298675 - RNA, 19 nt, Artificial Sequence
  Description of Artificial Sequence: Synthetic oligonucleotide
aaacuugccguucgaaagc

SEQ ID NO: 2298676 - RNA, 19 nt, Artificial Sequence
  Description of Artificial Sequence: Synthetic oligonucleotide
aauuuuaacaaaagacacg

SEQ ID NO: 2298677 - RNA, 19 nt, Artificial Sequence
  Description of Artificial Sequence: Synthetic oligonucleotide
aaucauguuuucuguaggg

SEQ ID NO: 2298678 - RNA, 19 nt, Artificial Sequence
  Description of Artificial Sequence: Synthetic oligonucleotide
auauuuaccauuuggagaa

SEQ ID NO: 2298679 - RNA, 19 nt, Artificial Sequence
  Description of Artificial Sequence: Synthetic oligonucleotide
agugagaauauauuuacca

SEQ ID NO: 2298680 - RNA, 19 nt, Artificial Sequence
  Description of Artificial Sequence: Synthetic oligonucleotide
aaaaggacuaggccauccc

SEQ ID NO: 2298681 - RNA, 19 nt, Artificial Sequence
  Description of Artificial Sequence: Synthetic oligonucleotide
acccauuacaauuaaaaug

SEQ ID NO: 2298682 - RNA, 19 nt, Artificial Sequence
  Description of Artificial Sequence: Synthetic oligonucleotide
aucauagcucccuugacac

SEQ ID NO: 2298683 - RNA, 19 nt, Artificial Sequence
  Description of Artificial Sequence: Synthetic oligonucleotide
uuuuagaacaaugccagag

SEQ ID NO: 2298684 - RNA, 19 nt, Artificial Sequence
  Description of Artificial Sequence: Synthetic oligonucleotide
aaauguacagcagaaauau

SEQ ID NO: 2298685 - RNA, 19 nt, Artificial Sequence
  Description of Artificial Sequence: Synthetic oligonucleotide
uuggagaaaauuuuaacaa

SEQ ID NO: 2298686 - RNA, 19 nt, Artificial Sequence
  Description of Artificial Sequence: Synthetic oligonucleotide
cagaaauaugauauggccg

SEQ ID NO: 2298687 - RNA, 19 nt, Artificial Sequence
  Description of Artificial Sequence: Synthetic oligonucleotide
cauggguucgucuuuaggg

SEQ ID NO: 2298688 - RNA, 19 nt, Artificial Sequence
  Description of Artificial Sequence: Synthetic oligonucleotide
aucacaaccauccugugug

SEQ ID NO: 2298689 - RNA, 19 nt, Artificial Sequence
  Description of Artificial Sequence: Synthetic oligonucleotide
uguaacuucuguacaaucu

SEQ ID NO: 2298690 - RNA, 19 nt, Artificial Sequence
  Description of Artificial Sequence: Synthetic oligonucleotide
aaaggacuaggccaucccg

SEQ ID NO: 2298691 - RNA, 19 nt, Artificial Sequence
  Description of Artificial Sequence: Synthetic oligonucleotide
uuugauuguaacauggguu

SEQ ID NO: 2298692 - RNA, 19 nt, Artificial Sequence
  Description of Artificial Sequence: Synthetic oligonucleotide
uaugauauggccgccgacg

SEQ ID NO: 2298693 - RNA, 19 nt, Artificial Sequence
  Description of Artificial Sequence: Synthetic oligonucleotide
gaugcagcaucccagauuc

SEQ ID NO: 2298694 - RNA, 19 nt, Artificial Sequence
  Description of Artificial Sequence: Synthetic oligonucleotide
acaguuuaagaguacuguc

SEQ ID NO: 2298695 - RNA, 19 nt, Artificial Sequence
  Description of Artificial Sequence: Synthetic oligonucleotide
ugacaaguugcugagauca

SEQ ID NO: 2298696 - RNA, 19 nt, Artificial Sequence
  Description of Artificial Sequence: Synthetic oligonucleotide
cacggaacauuacagaagg

SEQ ID NO: 2298697 - RNA, 19 nt, Artificial Sequence
  Description of Artificial Sequence: Synthetic oligonucleotide
uuucucauucuuauggcca

SEQ ID NO: 2298698 - RNA, 19 nt, Artificial Sequence
  Description of Artificial Sequence: Synthetic oligonucleotide
uugauuguaacauggguuc

SEQ ID NO: 2298699 - RNA, 19 nt, Artificial Sequence
  Description of Artificial Sequence: Synthetic oligonucleotide
acuaucaaggacccauuac

SEQ ID NO: 2298700 - RNA, 19 nt, Artificial Sequence
  Description of Artificial Sequence: Synthetic oligonucleotide
uuaagaguacuguccaaag

SEQ ID NO: 2298701 - RNA, 19 nt, Artificial Sequence
  Description of Artificial Sequence: Synthetic oligonucleotide
uuuuaacaaaagacacggg

SEQ ID NO: 2298702 - RNA, 19 nt, Artificial Sequence
  Description of Artificial Sequence: Synthetic oligonucleotide
acacaacccacuuuccacc

SEQ ID NO: 2298703 - RNA, 19 nt, Artificial Sequence
  Description of Artificial Sequence: Synthetic oligonucleotide
caguuuaagaguacugucc

SEQ ID NO: 2298704 - RNA, 19 nt, Artificial Sequence
  Description of Artificial Sequence: Synthetic oligonucleotide
ucuacaguuugcacaggcg

SEQ ID NO: 2298705 - RNA, 19 nt, Artificial Sequence
  Description of Artificial Sequence: Synthetic oligonucleotide
uuacagaaggugaaacuug

SEQ ID NO: 2298706 - RNA, 19 nt, Artificial Sequence
  Description of Artificial Sequence: Synthetic oligonucleotide
uguccaaaguugcagugag

SEQ ID NO: 2298707 - RNA, 19 nt, Artificial Sequence
  Description of Artificial Sequence: Synthetic oligonucleotide
gaagguuccagauguaaac

SEQ ID NO: 2298708 - RNA, 19 nt, Artificial Sequence
  Description of Artificial Sequence: Synthetic oligonucleotide
uccugugugaccuuguaac

SEQ ID NO: 2298709 - RNA, 19 nt, Artificial Sequence
  Description of Artificial Sequence: Synthetic oligonucleotide
aaauaugauauggccgccg

SEQ ID NO: 2298710 - RNA, 19 nt, Artificial Sequence
  Description of Artificial Sequence: Synthetic oligonucleotide
accaguaacagagaaacug

SEQ ID NO: 2298711 - RNA, 19 nt, Artificial Sequence
  Description of Artificial Sequence: Synthetic oligonucleotide
uacgucuucaggcaucugc

SEQ ID NO: 2298712 - RNA, 19 nt, Artificial Sequence
  Description of Artificial Sequence: Synthetic oligonucleotide
uauuucucauucuuauggc

SEQ ID NO: 2298713 - RNA, 19 nt, Artificial Sequence
  Description of Artificial Sequence: Synthetic oligonucleotide
aauaugauauggccgccga

SEQ ID NO: 2298714 - RNA, 19 nt, Artificial Sequence
  Description of Artificial Sequence: Synthetic oligonucleotide
gagaucgguacucuugccg

SEQ ID NO: 2298715 - RNA, 19 nt, Artificial Sequence
  Description of Artificial Sequence: Synthetic oligonucleotide
acaaccauccugugugacc

SEQ ID NO: 2298716 - RNA, 19 nt, Artificial Sequence
  Description of Artificial Sequence: Synthetic oligonucleotide
ucguccauaguuuaauugu

SEQ ID NO: 2298717 - RNA, 19 nt, Artificial Sequence
  Description of Artificial Sequence: Synthetic oligonucleotide
aaagacacgggaggguuac

SEQ ID NO: 2298718 - RNA, 19 nt, Artificial Sequence
  Description of Artificial Sequence: Synthetic oligonucleotide
agaucgguacucuugccgg

SEQ ID NO: 2298719 - RNA, 19 nt, Artificial Sequence
  Description of Artificial Sequence: Synthetic oligonucleotide
ucuuuagucugaagguucc

SEQ ID NO: 2298720 - RNA, 19 nt, Artificial Sequence
  Description of Artificial Sequence: Synthetic oligonucleotide
agaaggugaaacuugccgu

SEQ ID NO: 2298721 - RNA, 19 nt, Artificial Sequence
  Description of Artificial Sequence: Synthetic oligonucleotide
caaagaccaucauagcucc

SEQ ID NO: 2298722 - RNA, 19 nt, Artificial Sequence
  Description of Artificial Sequence: Synthetic oligonucleotide
aaagcgaaugguuuugauu

SEQ ID NO: 2298723 - RNA, 19 nt, Artificial Sequence
  Description of Artificial Sequence: Synthetic oligonucleotide
ucaaggacccauuacaauu

SEQ ID NO: 2298724 - RNA, 19 nt, Artificial Sequence
  Description of Artificial Sequence: Synthetic oligonucleotide
aaggacuaggccaucccgc

SEQ ID NO: 2298725 - RNA, 19 nt, Artificial Sequence
  Description of Artificial Sequence: Synthetic oligonucleotide
uugacacuaucaaggaccc

SEQ ID NO: 2298726 - RNA, 19 nt, Artificial Sequence
  Description of Artificial Sequence: Synthetic oligonucleotide
uccgagaaccagaucacag

SEQ ID NO: 2298727 - RNA, 19 nt, Artificial Sequence
  Description of Artificial Sequence: Synthetic oligonucleotide
agauucuacaaagaccauc

SEQ ID NO: 2298728 - RNA, 19 nt, Artificial Sequence
  Description of Artificial Sequence: Synthetic oligonucleotide
uuugacagcauaguugggu

SEQ ID NO: 2298729 - RNA, 19 nt, Artificial Sequence
  Description of Artificial Sequence: Synthetic oligonucleotide
uuagggucggcacaggauc

SEQ ID NO: 2298730 - RNA, 19 nt, Artificial Sequence
  Description of Artificial Sequence: Synthetic oligonucleotide
agaacaaugccagagacuu

SEQ ID NO: 2298731 - RNA, 19 nt, Artificial Sequence
  Description of Artificial Sequence: Synthetic oligonucleotide
ucuguagggugacaaguug

SEQ ID NO: 2298732 - RNA, 19 nt, Artificial Sequence
  Description of Artificial Sequence: Synthetic oligonucleotide
ucugcuguaaucccacagu

SEQ ID NO: 2298733 - RNA, 19 nt, Artificial Sequence
  Description of Artificial Sequence: Synthetic oligonucleotide
gcagaaauaugauauggcc

SEQ ID NO: 2298734 - RNA, 19 nt, Artificial Sequence
  Description of Artificial Sequence: Synthetic oligonucleotide
uuuaagaguacuguccaaa

SEQ ID NO: 2298735 - RNA, 19 nt, Artificial Sequence
  Description of Artificial Sequence: Synthetic oligonucleotide
agauguaaaccauguuguc

SEQ ID NO: 2298736 - RNA, 19 nt, Artificial Sequence
  Description of Artificial Sequence: Synthetic oligonucleotide
caaucauguuuucuguagg

SEQ ID NO: 2298737 - RNA, 19 nt, Artificial Sequence
  Description of Artificial Sequence: Synthetic oligonucleotide
uaagaguacuguccaaagu

SEQ ID NO: 2298738 - RNA, 19 nt, Artificial Sequence
  Description of Artificial Sequence: Synthetic oligonucleotide
gaaugguuuugauuguaac

SEQ ID NO: 2298739 - RNA, 19 nt, Artificial Sequence
  Description of Artificial Sequence: Synthetic oligonucleotide
aggguuaccaucaucagca

SEQ ID NO: 2298740 - RNA, 19 nt, Artificial Sequence
  Description of Artificial Sequence: Synthetic oligonucleotide
uaucaaggacccauuacaa

SEQ ID NO: 2298741 - RNA, 19 nt, Artificial Sequence
  Description of Artificial Sequence: Synthetic oligonucleotide
uccaaaguugcagugagaa

SEQ ID NO: 2298742 - RNA, 19 nt, Artificial Sequence
  Description of Artificial Sequence: Synthetic oligonucleotide
gauauggccgccgacgugc

SEQ ID NO: 2298743 - RNA, 19 nt, Artificial Sequence
  Description of Artificial Sequence: Synthetic oligonucleotide
uuuagucugaagguuccag

SEQ ID NO: 2298744 - RNA, 19 nt, Artificial Sequence
  Description of Artificial Sequence: Synthetic oligonucleotide
cuaucaaggacccauuaca

SEQ ID NO: 2298745 - RNA, 19 nt, Artificial Sequence
  Description of Artificial Sequence: Synthetic oligonucleotide
guacaaucucuuuagucug

SEQ ID NO: 2298746 - RNA, 19 nt, Artificial Sequence
  Description of Artificial Sequence: Synthetic oligonucleotide
aguauuucucauucuuaug

SEQ ID NO: 2298747 - RNA, 19 nt, Artificial Sequence
  Description of Artificial Sequence: Synthetic oligonucleotide
gacacaacccacuuuccac

SEQ ID NO: 2298748 - RNA, 19 nt, Artificial Sequence
  Description of Artificial Sequence: Synthetic oligonucleotide
aacaaugccagagacuuua

SEQ ID NO: 2298749 - RNA, 19 nt, Artificial Sequence
  Description of Artificial Sequence: Synthetic oligonucleotide
cagcagaaauaugauaugg

SEQ ID NO: 2298750 - RNA, 19 nt, Artificial Sequence
  Description of Artificial Sequence: Synthetic oligonucleotide
cauagcucgggcucuacag

SEQ ID NO: 2298751 - RNA, 19 nt, Artificial Sequence
  Description of Artificial Sequence: Synthetic oligonucleotide
cugugaaaaggacuaggcc

SEQ ID NO: 2298752 - RNA, 19 nt, Artificial Sequence
  Description of Artificial Sequence: Synthetic oligonucleotide
ugaaacuugccguucgaaa

SEQ ID NO: 2298753 - RNA, 19 nt, Artificial Sequence
  Description of Artificial Sequence: Synthetic oligonucleotide
ugcaguauuucucauucuu

SEQ ID NO: 2298754 - RNA, 19 nt, Artificial Sequence
  Description of Artificial Sequence: Synthetic oligonucleotide
ucuaaugcugcugaugcaa

SEQ ID NO: 2298755 - RNA, 19 nt, Artificial Sequence
  Description of Artificial Sequence: Synthetic oligonucleotide
ucgguagcauccgagaacc

SEQ ID NO: 2298756 - RNA, 19 nt, Artificial Sequence
  Description of Artificial Sequence: Synthetic oligonucleotide
uaaaccauguuguccucug

SEQ ID NO: 2298757 - RNA, 19 nt, Artificial Sequence
  Description of Artificial Sequence: Synthetic oligonucleotide
uucuuauggccaguguacg

SEQ ID NO: 2298758 - RNA, 19 nt, Artificial Sequence
  Description of Artificial Sequence: Synthetic oligonucleotide
gaggguuaccaucaucagc

SEQ ID NO: 2298759 - RNA, 19 nt, Artificial Sequence
  Description of Artificial Sequence: Synthetic oligonucleotide
guuuugauuguaacauggg

SEQ ID NO: 2298760 - RNA, 19 nt, Artificial Sequence
  Description of Artificial Sequence: Synthetic oligonucleotide
agaauauauuuaccauuug

SEQ ID NO: 2298761 - RNA, 19 nt, Artificial Sequence
  Description of Artificial Sequence: Synthetic oligonucleotide
uucuucgguagcauccgag

SEQ ID NO: 2298762 - RNA, 19 nt, Artificial Sequence
  Description of Artificial Sequence: Synthetic oligonucleotide
cuguagggugacaaguugc

SEQ ID NO: 2298763 - RNA, 19 nt, Artificial Sequence
  Description of Artificial Sequence: Synthetic oligonucleotide
auuacagaaggugaaacuu

SEQ ID NO: 2298764 - RNA, 19 nt, Artificial Sequence
  Description of Artificial Sequence: Synthetic oligonucleotide
acuggccugaugcagcauc

SEQ ID NO: 2298765 - RNA, 19 nt, Artificial Sequence
  Description of Artificial Sequence: Synthetic oligonucleotide
gcugagaucacaaccaucc

SEQ ID NO: 2298766 - RNA, 19 nt, Artificial Sequence
  Description of Artificial Sequence: Synthetic oligonucleotide
ugauuguaacauggguucg

SEQ ID NO: 2298767 - RNA, 19 nt, Artificial Sequence
  Description of Artificial Sequence: Synthetic oligonucleotide
cucguccauaguuuaauug

SEQ ID NO: 2298768 - RNA, 19 nt, Artificial Sequence
  Description of Artificial Sequence: Synthetic oligonucleotide
uaacagagaaacuggcaaa

SEQ ID NO: 2298769 - RNA, 19 nt, Artificial Sequence
  Description of Artificial Sequence: Synthetic oligonucleotide
cugagaucgguacucuugc

SEQ ID NO: 2298770 - RNA, 19 nt, Artificial Sequence
  Description of Artificial Sequence: Synthetic oligonucleotide
uucgguagcauccgagaac

SEQ ID NO: 2298771 - RNA, 19 nt, Artificial Sequence
  Description of Artificial Sequence: Synthetic oligonucleotide
auaugauauggccgccgac

SEQ ID NO: 2298772 - RNA, 19 nt, Artificial Sequence
  Description of Artificial Sequence: Synthetic oligonucleotide
uugcagugagaauauauuu

SEQ ID NO: 2298773 - RNA, 19 nt, Artificial Sequence
  Description of Artificial Sequence: Synthetic oligonucleotide
ugagccagacacaacccac

SEQ ID NO: 2298774 - RNA, 19 nt, Artificial Sequence
  Description of Artificial Sequence: Synthetic oligonucleotide
aggugaaacuugccguucg

SEQ ID NO: 2298775 - RNA, 19 nt, Artificial Sequence
  Description of Artificial Sequence: Synthetic oligonucleotide
gcauccgagaaccagauca

SEQ ID NO: 2298776 - RNA, 19 nt, Artificial Sequence
  Description of Artificial Sequence: Synthetic oligonucleotide
cucuacaguuugcacaggc

SEQ ID NO: 2298777 - RNA, 19 nt, Artificial Sequence
  Description of Artificial Sequence: Synthetic oligonucleotide
gcaaucauguuuucuguag

SEQ ID NO: 2298778 - RNA, 19 nt, Artificial Sequence
  Description of Artificial Sequence: Synthetic oligonucleotide
ucuucgguagcauccgaga

SEQ ID NO: 2298779 - RNA, 19 nt, Artificial Sequence
  Description of Artificial Sequence: Synthetic oligonucleotide
accaucauagcucccuuga

SEQ ID NO: 2298780 - RNA, 19 nt, Artificial Sequence
  Description of Artificial Sequence: Synthetic oligonucleotide
cauguuuucuguaggguga

SEQ ID NO: 2298781 - RNA, 19 nt, Artificial Sequence
  Description of Artificial Sequence: Synthetic oligonucleotide
gcagugagaauauauuuac

SEQ ID NO: 2298782 - RNA, 19 nt, Artificial Sequence
  Description of Artificial Sequence: Synthetic oligonucleotide
gagaaccagaucacagugg

SEQ ID NO: 2298783 - RNA, 19 nt, Artificial Sequence
  Description of Artificial Sequence: Synthetic oligonucleotide
aaggugaaacuugccguuc

SEQ ID NO: 2298784 - RNA, 19 nt, Artificial Sequence
  Description of Artificial Sequence: Synthetic oligonucleotide
gcauaguuggguuucgugc

SEQ ID NO: 2298785 - RNA, 19 nt, Artificial Sequence
  Description of Artificial Sequence: Synthetic oligonucleotide
cagugagaauauauuuacc

SEQ ID NO: 2298786 - RNA, 19 nt, Artificial Sequence
  Description of Artificial Sequence: Synthetic oligonucleotide
uuuagggucggcacaggau

SEQ ID NO: 2298787 - RNA, 19 nt, Artificial Sequence
  Description of Artificial Sequence: Synthetic oligonucleotide
ucuguacaaucucuuuagu

SEQ ID NO: 2298788 - RNA, 19 nt, Artificial Sequence
  Description of Artificial Sequence: Synthetic oligonucleotide
acauggguucgucuuuagg

SEQ ID NO: 2298789 - RNA, 19 nt, Artificial Sequence
  Description of Artificial Sequence: Synthetic oligonucleotide
ucggcacaggaucagcagc

SEQ ID NO: 2298790 - RNA, 19 nt, Artificial Sequence
  Description of Artificial Sequence: Synthetic oligonucleotide
gaaaaggacuaggccaucc

SEQ ID NO: 2298791 - RNA, 19 nt, Artificial Sequence
  Description of Artificial Sequence: Synthetic oligonucleotide
auggguucgucuuuagggu

SEQ ID NO: 2298792 - RNA, 19 nt, Artificial Sequence
  Description of Artificial Sequence: Synthetic oligonucleotide
agcauaguuggguuucgug

SEQ ID NO: 2298793 - RNA, 19 nt, Artificial Sequence
  Description of Artificial Sequence: Synthetic oligonucleotide
gacuuuagcagucacucgu

SEQ ID NO: 2298794 - RNA, 19 nt, Artificial Sequence
  Description of Artificial Sequence: Synthetic oligonucleotide
agguuccagauguaaacca

SEQ ID NO: 2298795 - RNA, 19 nt, Artificial Sequence
  Description of Artificial Sequence: Synthetic oligonucleotide
guugcugagaucacaacca

SEQ ID NO: 2298796 - RNA, 19 nt, Artificial Sequence
  Description of Artificial Sequence: Synthetic oligonucleotide
aacauuacagaaggugaaa

SEQ ID NO: 2298797 - RNA, 19 nt, Artificial Sequence
  Description of Artificial Sequence: Synthetic oligonucleotide
aaaguugcagugagaauau

SEQ ID NO: 2298798 - RNA, 19 nt, Artificial Sequence
  Description of Artificial Sequence: Synthetic oligonucleotide
accaucaucagcaaguguu

SEQ ID NO: 2298799 - RNA, 19 nt, Artificial Sequence
  Description of Artificial Sequence: Synthetic oligonucleotide
aacauggguucgucuuuag

SEQ ID NO: 2298800 - RNA, 19 nt, Artificial Sequence
  Description of Artificial Sequence: Synthetic oligonucleotide
gaguacuguccaaaguugc

SEQ ID NO: 2298801 - RNA, 19 nt, Artificial Sequence
  Description of Artificial Sequence: Synthetic oligonucleotide
ggcucuacaguuugcacag

SEQ ID NO: 2298802 - RNA, 19 nt, Artificial Sequence
  Description of Artificial Sequence: Synthetic oligonucleotide
acacgggaggguuaccauc

SEQ ID NO: 2298803 - RNA, 19 nt, Artificial Sequence
  Description of Artificial Sequence: Synthetic oligonucleotide
uuauggccaguguacgucu

SEQ ID NO: 2298804 - RNA, 19 nt, Artificial Sequence
  Description of Artificial Sequence: Synthetic oligonucleotide
gaucgguacucuugccggg

SEQ ID NO: 2298805 - RNA, 19 nt, Artificial Sequence
  Description of Artificial Sequence: Synthetic oligonucleotide
ucgucuuuagggucggcac

SEQ ID NO: 2298806 - RNA, 19 nt, Artificial Sequence
  Description of Artificial Sequence: Synthetic oligonucleotide
uuccaccaguaacagagaa

SEQ ID NO: 2298807 - RNA, 19 nt, Artificial Sequence
  Description of Artificial Sequence: Synthetic oligonucleotide
uuaccaucaucagcaagug

SEQ ID NO: 2298808 - RNA, 19 nt, Artificial Sequence
  Description of Artificial Sequence: Synthetic oligonucleotide
ugccguucgaaagcgaaug

SEQ ID NO: 2298809 - RNA, 19 nt, Artificial Sequence
  Description of Artificial Sequence: Synthetic oligonucleotide
cuuucuucgguagcauccg

SEQ ID NO: 2298810 - RNA, 19 nt, Artificial Sequence
  Description of Artificial Sequence: Synthetic oligonucleotide
ucuuauggccaguguacgu

SEQ ID NO: 2298811 - RNA, 19 nt, Artificial Sequence
  Description of Artificial Sequence: Synthetic oligonucleotide
guuaccaucaucagcaagu

SEQ ID NO: 2298812 - RNA, 19 nt, Artificial Sequence
  Description of Artificial Sequence: Synthetic oligonucleotide
agacacaacccacuuucca

SEQ ID NO: 2298813 - RNA, 19 nt, Artificial Sequence
  Description of Artificial Sequence: Synthetic oligonucleotide
gugguucugagaucgguac

SEQ ID NO: 2298814 - RNA, 19 nt, Artificial Sequence
  Description of Artificial Sequence: Synthetic oligonucleotide
cccauuacaauuaaaaugu

SEQ ID NO: 2298815 - RNA, 19 nt, Artificial Sequence
  Description of Artificial Sequence: Synthetic oligonucleotide
cucccuugacacuaucaag

SEQ ID NO: 2298816 - RNA, 19 nt, Artificial Sequence
  Description of Artificial Sequence: Synthetic oligonucleotide
gaaauaugauauggccgcc

SEQ ID NO: 2298817 - RNA, 19 nt, Artificial Sequence
  Description of Artificial Sequence: Synthetic oligonucleotide
agaguacuguccaaaguug

SEQ ID NO: 2298818 - RNA, 19 nt, Artificial Sequence
  Description of Artificial Sequence: Synthetic oligonucleotide
ucgaaagcgaaugguuuug

SEQ ID NO: 2298819 - RNA, 19 nt, Artificial Sequence
  Description of Artificial Sequence: Synthetic oligonucleotide
aggaucagcagcaagguuu

SEQ ID NO: 2298820 - RNA, 19 nt, Artificial Sequence
  Description of Artificial Sequence: Synthetic oligonucleotide
uccaccaguaacagagaaa

SEQ ID NO: 2298821 - RNA, 19 nt, Artificial Sequence
  Description of Artificial Sequence: Synthetic oligonucleotide
ugcucggucgccauagcuc

SEQ ID NO: 2298822 - RNA, 19 nt, Artificial Sequence
  Description of Artificial Sequence: Synthetic oligonucleotide
aaagaccaucauagcuccc

SEQ ID NO: 2298823 - RNA, 19 nt, Artificial Sequence
  Description of Artificial Sequence: Synthetic oligonucleotide
aguaacagagaaacuggca

SEQ ID NO: 2298824 - RNA, 19 nt, Artificial Sequence
  Description of Artificial Sequence: Synthetic oligonucleotide
cuuauggccaguguacguc

SEQ ID NO: 2298825 - RNA, 19 nt, Artificial Sequence
  Description of Artificial Sequence: Synthetic oligonucleotide
uugcacaggcgucuggcac

SEQ ID NO: 2298826 - RNA, 19 nt, Artificial Sequence
  Description of Artificial Sequence: Synthetic oligonucleotide
augauauggccgccgacgu

SEQ ID NO: 2298827 - RNA, 19 nt, Artificial Sequence
  Description of Artificial Sequence: Synthetic oligonucleotide
ugaugcaaucauguuuucu

SEQ ID NO: 2298828 - RNA, 19 nt, Artificial Sequence
  Description of Artificial Sequence: Synthetic oligonucleotide
gagaucacaaccauccugu

SEQ ID NO: 2298829 - RNA, 19 nt, Artificial Sequence
  Description of Artificial Sequence: Synthetic oligonucleotide
uggcacggaacauuacaga

SEQ ID NO: 2298830 - RNA, 19 nt, Artificial Sequence
  Description of Artificial Sequence: Synthetic oligonucleotide
uucgucuuuagggucggca

SEQ ID NO: 2298831 - RNA, 19 nt, Artificial Sequence
  Description of Artificial Sequence: Synthetic oligonucleotide
ugcaaucauguuuucugua

SEQ ID NO: 2298832 - RNA, 19 nt, Artificial Sequence
  Description of Artificial Sequence: Synthetic oligonucleotide
aucaaggacccauuacaau

SEQ ID NO: 2298833 - RNA, 19 nt, Artificial Sequence
  Description of Artificial Sequence: Synthetic oligonucleotide
ccccguaagaguaaguuug

SEQ ID NO: 2298834 - RNA, 19 nt, Artificial Sequence
  Description of Artificial Sequence: Synthetic oligonucleotide
ccaccaguaacagagaaac

SEQ ID NO: 2298835 - RNA, 19 nt, Artificial Sequence
  Description of Artificial Sequence: Synthetic oligonucleotide
ccauguuguccucugagcc

SEQ ID NO: 2298836 - RNA, 19 nt, Artificial Sequence
  Description of Artificial Sequence: Synthetic oligonucleotide
uuugcacaggcgucuggca

SEQ ID NO: 2298837 - RNA, 19 nt, Artificial Sequence
  Description of Artificial Sequence: Synthetic oligonucleotide
uguacgucuucaggcaucu

SEQ ID NO: 2298838 - RNA, 19 nt, Artificial Sequence
  Description of Artificial Sequence: Synthetic oligonucleotide
cauccgagaaccagaucac

SEQ ID NO: 2298839 - RNA, 19 nt, Artificial Sequence
  Description of Artificial Sequence: Synthetic oligonucleotide
ugagaucgguacucuugcc

SEQ ID NO: 2298840 - RNA, 19 nt, Artificial Sequence
  Description of Artificial Sequence: Synthetic oligonucleotide
cauucuuauggccagugua

SEQ ID NO: 2298841 - RNA, 19 nt, Artificial Sequence
  Description of Artificial Sequence: Synthetic oligonucleotide
aucauguuuucuguagggu

SEQ ID NO: 2298842 - RNA, 19 nt, Artificial Sequence
  Description of Artificial Sequence: Synthetic oligonucleotide
auagcucgggcucuacagu

SEQ ID NO: 2298843 - RNA, 19 nt, Artificial Sequence
  Description of Artificial Sequence: Synthetic oligonucleotide
ucucuuuagucugaagguu

SEQ ID NO: 2298844 - RNA, 19 nt, Artificial Sequence
  Description of Artificial Sequence: Synthetic oligonucleotide
gaguaaguuugacagcaua

SEQ ID NO: 2298845 - RNA, 19 nt, Artificial Sequence
  Description of Artificial Sequence: Synthetic oligonucleotide
cagcagcaagguuuggacc

SEQ ID NO: 2298846 - RNA, 19 nt, Artificial Sequence
  Description of Artificial Sequence: Synthetic oligonucleotide
cucccguuuggguuggcag

SEQ ID NO: 2298847 - RNA, 19 nt, Artificial Sequence
  Description of Artificial Sequence: Synthetic oligonucleotide
caaguugcugagaucacaa

SEQ ID NO: 2298848 - RNA, 19 nt, Artificial Sequence
  Description of Artificial Sequence: Synthetic oligonucleotide
ucccguuuggguuggcaga

SEQ ID NO: 2298849 - RNA, 19 nt, Artificial Sequence
  Description of Artificial Sequence: Synthetic oligonucleotide
guuugcacaggcgucuggc

SEQ ID NO: 2298850 - RNA, 19 nt, Artificial Sequence
  Description of Artificial Sequence: Synthetic oligonucleotide
ugauauggccgccgacgug

SEQ ID NO: 2298851 - RNA, 19 nt, Artificial Sequence
  Description of Artificial Sequence: Synthetic oligonucleotide
aucugccucugcuguaauc

SEQ ID NO: 2298852 - RNA, 19 nt, Artificial Sequence
  Description of Artificial Sequence: Synthetic oligonucleotide
ugguucugagaucgguacu

SEQ ID NO: 2298853 - RNA, 19 nt, Artificial Sequence
  Description of Artificial Sequence: Synthetic oligonucleotide
gcucggucgccauagcucg

SEQ ID NO: 2298854 - RNA, 19 nt, Artificial Sequence
  Description of Artificial Sequence: Synthetic oligonucleotide
gacccauuacaauuaaaau

SEQ ID NO: 2298855 - RNA, 19 nt, Artificial Sequence
  Description of Artificial Sequence: Synthetic oligonucleotide
gcuguaaucccacaguuua

SEQ ID NO: 2298856 - RNA, 19 nt, Artificial Sequence
  Description of Artificial Sequence: Synthetic oligonucleotide
uuucuucgguagcauccga

SEQ ID NO: 2298857 - RNA, 19 nt, Artificial Sequence
  Description of Artificial Sequence: Synthetic oligonucleotide
gaccaucauagcucccuug

SEQ ID NO: 2298858 - RNA, 19 nt, Artificial Sequence
  Description of Artificial Sequence: Synthetic oligonucleotide
uagcauccgagaaccagau

SEQ ID NO: 2298859 - RNA, 19 nt, Artificial Sequence
  Description of Artificial Sequence: Synthetic oligonucleotide
uuggaccgcucuccucucg

SEQ ID NO: 2298860 - RNA, 19 nt, Artificial Sequence
  Description of Artificial Sequence: Synthetic oligonucleotide
ccauaguuuaauuguuuug

SEQ ID NO: 2298861 - RNA, 19 nt, Artificial Sequence
  Description of Artificial Sequence: Synthetic oligonucleotide
uugcugagaucacaaccau

SEQ ID NO: 2298862 - RNA, 19 nt, Artificial Sequence
  Description of Artificial Sequence: Synthetic oligonucleotide
ugcuguaaucccacaguuu

SEQ ID NO: 2298863 - RNA, 19 nt, Artificial Sequence
  Description of Artificial Sequence: Synthetic oligonucleotide
acaaaagacacgggagggu

SEQ ID NO: 2298864 - RNA, 19 nt, Artificial Sequence
  Description of Artificial Sequence: Synthetic oligonucleotide
gcuuucuucgguagcaucc

SEQ ID NO: 2298865 - RNA, 19 nt, Artificial Sequence
  Description of Artificial Sequence: Synthetic oligonucleotide
cucucgcuuucuucgguag

SEQ ID NO: 2298866 - RNA, 19 nt, Artificial Sequence
  Description of Artificial Sequence: Synthetic oligonucleotide
gucggcacaggaucagcag

SEQ ID NO: 2298867 - RNA, 19 nt, Artificial Sequence
  Description of Artificial Sequence: Synthetic oligonucleotide
aguguacgucuucaggcau

SEQ ID NO: 2298868 - RNA, 19 nt, Artificial Sequence
  Description of Artificial Sequence: Synthetic oligonucleotide
gguagcauccgagaaccag

SEQ ID NO: 2298869 - RNA, 19 nt, Artificial Sequence
  Description of Artificial Sequence: Synthetic oligonucleotide
cauguuguccucugagcca

SEQ ID NO: 2298870 - RNA, 19 nt, Artificial Sequence
  Description of Artificial Sequence: Synthetic oligonucleotide
uggguucgucuuuaggguc

SEQ ID NO: 2298871 - RNA, 19 nt, Artificial Sequence
  Description of Artificial Sequence: Synthetic oligonucleotide
uguaaaccauguuguccuc

SEQ ID NO: 2298872 - RNA, 19 nt, Artificial Sequence
  Description of Artificial Sequence: Synthetic oligonucleotide
gguuaccaucaucagcaag

SEQ ID NO: 2298873 - RNA, 19 nt, Artificial Sequence
  Description of Artificial Sequence: Synthetic oligonucleotide
gcugugaaaaggacuaggc

SEQ ID NO: 2298874 - RNA, 19 nt, Artificial Sequence
  Description of Artificial Sequence: Synthetic oligonucleotide
guuuucuguagggugacaa

SEQ ID NO: 2298875 - RNA, 19 nt, Artificial Sequence
  Description of Artificial Sequence: Synthetic oligonucleotide
aagacacgggaggguuacc

SEQ ID NO: 2298876 - RNA, 19 nt, Artificial Sequence
  Description of Artificial Sequence: Synthetic oligonucleotide
ggacccauuacaauuaaaa

SEQ ID NO: 2298877 - RNA, 19 nt, Artificial Sequence
  Description of Artificial Sequence: Synthetic oligonucleotide
uggaccgcucuccucucgc

SEQ ID NO: 2298878 - RNA, 19 nt, Artificial Sequence
  Description of Artificial Sequence: Synthetic oligonucleotide
gucgccauagcucgggcuc

SEQ ID NO: 2298879 - RNA, 19 nt, Artificial Sequence
  Description of Artificial Sequence: Synthetic oligonucleotide
caagguuuggaccgcucuc

SEQ ID NO: 2298880 - RNA, 19 nt, Artificial Sequence
  Description of Artificial Sequence: Synthetic oligonucleotide
agaucacaaccauccugug

SEQ ID NO: 2298881 - RNA, 19 nt, Artificial Sequence
  Description of Artificial Sequence: Synthetic oligonucleotide
ucacucguccauaguuuaa

SEQ ID NO: 2298882 - RNA, 19 nt, Artificial Sequence
  Description of Artificial Sequence: Synthetic oligonucleotide
agagacuuuagcagucacu

SEQ ID NO: 2298883 - RNA, 19 nt, Artificial Sequence
  Description of Artificial Sequence: Synthetic oligonucleotide
guagcauccgagaaccaga

SEQ ID NO: 2298884 - RNA, 19 nt, Artificial Sequence
  Description of Artificial Sequence: Synthetic oligonucleotide
ucauagcucccuugacacu

SEQ ID NO: 2298885 - RNA, 19 nt, Artificial Sequence
  Description of Artificial Sequence: Synthetic oligonucleotide
guacagcagaaauaugaua

SEQ ID NO: 2298886 - RNA, 19 nt, Artificial Sequence
  Description of Artificial Sequence: Synthetic oligonucleotide
ugcagcaucccagauucua

SEQ ID NO: 2298887 - RNA, 19 nt, Artificial Sequence
  Description of Artificial Sequence: Synthetic oligonucleotide
cuugccguucgaaagcgaa

SEQ ID NO: 2298888 - RNA, 19 nt, Artificial Sequence
  Description of Artificial Sequence: Synthetic oligonucleotide
gaucacaaccauccugugu

SEQ ID NO: 2298889 - RNA, 19 nt, Artificial Sequence
  Description of Artificial Sequence: Synthetic oligonucleotide
agagggccggacugggcuc

SEQ ID NO: 2298890 - RNA, 19 nt, Artificial Sequence
  Description of Artificial Sequence: Synthetic oligonucleotide
cuacaguuugcacaggcgu

SEQ ID NO: 2298891 - RNA, 19 nt, Artificial Sequence
  Description of Artificial Sequence: Synthetic oligonucleotide
acaacccacuuuccaccag

SEQ ID NO: 2298892 - RNA, 19 nt, Artificial Sequence
  Description of Artificial Sequence: Synthetic oligonucleotide
ucggucgccauagcucggg

SEQ ID NO: 2298893 - RNA, 19 nt, Artificial Sequence
  Description of Artificial Sequence: Synthetic oligonucleotide
ucgggcucuacaguuugca

SEQ ID NO: 2298894 - RNA, 19 nt, Artificial Sequence
  Description of Artificial Sequence: Synthetic oligonucleotide
guaaguuugacagcauagu

SEQ ID NO: 2298895 - RNA, 19 nt, Artificial Sequence
  Description of Artificial Sequence: Synthetic oligonucleotide
cacgggaggguuaccauca

SEQ ID NO: 2298896 - RNA, 19 nt, Artificial Sequence
  Description of Artificial Sequence: Synthetic oligonucleotide
agcauccgagaaccagauc

SEQ ID NO: 2298897 - RNA, 19 nt, Artificial Sequence
  Description of Artificial Sequence: Synthetic oligonucleotide
acuaggccaucccgcgggg

SEQ ID NO: 2298898 - RNA, 19 nt, Artificial Sequence
  Description of Artificial Sequence: Synthetic oligonucleotide
ggcacggaacauuacagaa

SEQ ID NO: 2298899 - RNA, 19 nt, Artificial Sequence
  Description of Artificial Sequence: Synthetic oligonucleotide
ucgguacucuugccgggug

SEQ ID NO: 2298900 - RNA, 19 nt, Artificial Sequence
  Description of Artificial Sequence: Synthetic oligonucleotide
uccucucgcuuucuucggu

SEQ ID NO: 2298901 - RNA, 19 nt, Artificial Sequence
  Description of Artificial Sequence: Synthetic oligonucleotide
guuuaagaguacuguccaa

SEQ ID NO: 2298902 - RNA, 19 nt, Artificial Sequence
  Description of Artificial Sequence: Synthetic oligonucleotide
ugccccguaagaguaaguu

SEQ ID NO: 2298903 - RNA, 19 nt, Artificial Sequence
  Description of Artificial Sequence: Synthetic oligonucleotide
ugacagcauaguuggguuu

SEQ ID NO: 2298904 - RNA, 19 nt, Artificial Sequence
  Description of Artificial Sequence: Synthetic oligonucleotide
agacacgggaggguuacca

SEQ ID NO: 2298905 - RNA, 19 nt, Artificial Sequence
  Description of Artificial Sequence: Synthetic oligonucleotide
ggaggguuaccaucaucag

SEQ ID NO: 2298906 - RNA, 19 nt, Artificial Sequence
  Description of Artificial Sequence: Synthetic oligonucleotide
uugccguucgaaagcgaau

SEQ ID NO: 2298907 - RNA, 19 nt, Artificial Sequence
  Description of Artificial Sequence: Synthetic oligonucleotide
ggugcugugaaaaggacua

SEQ ID NO: 2298908 - RNA, 19 nt, Artificial Sequence
  Description of Artificial Sequence: Synthetic oligonucleotide
uagcucgggcucuacaguu

SEQ ID NO: 2298909 - RNA, 19 nt, Artificial Sequence
  Description of Artificial Sequence: Synthetic oligonucleotide
gaaggugaaacuugccguu

SEQ ID NO: 2298910 - RNA, 19 nt, Artificial Sequence
  Description of Artificial Sequence: Synthetic oligonucleotide
cuuuagggucggcacagga

SEQ ID NO: 2298911 - RNA, 19 nt, Artificial Sequence
  Description of Artificial Sequence: Synthetic oligonucleotide
gggcucuacaguuugcaca

SEQ ID NO: 2298912 - RNA, 19 nt, Artificial Sequence
  Description of Artificial Sequence: Synthetic oligonucleotide
aggcgucuggcacggaaca

SEQ ID NO: 2298913 - RNA, 19 nt, Artificial Sequence
  Description of Artificial Sequence: Synthetic oligonucleotide
guuugacagcauaguuggg

SEQ ID NO: 2298914 - RNA, 19 nt, Artificial Sequence
  Description of Artificial Sequence: Synthetic oligonucleotide
aaaagacacgggaggguua

SEQ ID NO: 2298915 - RNA, 19 nt, Artificial Sequence
  Description of Artificial Sequence: Synthetic oligonucleotide
uaguuggguuucgugcggc

SEQ ID NO: 2298916 - RNA, 19 nt, Artificial Sequence
  Description of Artificial Sequence: Synthetic oligonucleotide
uugccgggugcugugaaaa

SEQ ID NO: 2298917 - RNA, 19 nt, Artificial Sequence
  Description of Artificial Sequence: Synthetic oligonucleotide
ugccgggugcugugaaaag

SEQ ID NO: 2298918 - RNA, 19 nt, Artificial Sequence
  Description of Artificial Sequence: Synthetic oligonucleotide
ggguucgucuuuagggucg

SEQ ID NO: 2298919 - RNA, 19 nt, Artificial Sequence
  Description of Artificial Sequence: Synthetic oligonucleotide
cacaguuuaagaguacugu

SEQ ID NO: 2298920 - RNA, 19 nt, Artificial Sequence
  Description of Artificial Sequence: Synthetic oligonucleotide
gugacaaguugcugagauc

SEQ ID NO: 2298921 - RNA, 19 nt, Artificial Sequence
  Description of Artificial Sequence: Synthetic oligonucleotide
acaggcgucuggcacggaa

SEQ ID NO: 2298922 - RNA, 19 nt, Artificial Sequence
  Description of Artificial Sequence: Synthetic oligonucleotide
acucguccauaguuuaauu

SEQ ID NO: 2298923 - RNA, 19 nt, Artificial Sequence
  Description of Artificial Sequence: Synthetic oligonucleotide
cauagcucccuugacacua

SEQ ID NO: 2298924 - RNA, 19 nt, Artificial Sequence
  Description of Artificial Sequence: Synthetic oligonucleotide
ucuugccgggugcugugaa

SEQ ID NO: 2298925 - RNA, 19 nt, Artificial Sequence
  Description of Artificial Sequence: Synthetic oligonucleotide
gauuguaacauggguucgu

SEQ ID NO: 2298926 - RNA, 19 nt, Artificial Sequence
  Description of Artificial Sequence: Synthetic oligonucleotide
caggcgucuggcacggaac

SEQ ID NO: 2298927 - RNA, 19 nt, Artificial Sequence
  Description of Artificial Sequence: Synthetic oligonucleotide
agguuuggaccgcucuccu

SEQ ID NO: 2298928 - RNA, 19 nt, Artificial Sequence
  Description of Artificial Sequence: Synthetic oligonucleotide
gaugcucggucgccauagc

SEQ ID NO: 2298929 - RNA, 19 nt, Artificial Sequence
  Description of Artificial Sequence: Synthetic oligonucleotide
cugagccagacacaaccca

SEQ ID NO: 2298930 - RNA, 19 nt, Artificial Sequence
  Description of Artificial Sequence: Synthetic oligonucleotide
gacaaguugcugagaucac

SEQ ID NO: 2298931 - RNA, 19 nt, Artificial Sequence
  Description of Artificial Sequence: Synthetic oligonucleotide
gcacggaacauuacagaag

SEQ ID NO: 2298932 - RNA, 19 nt, Artificial Sequence
  Description of Artificial Sequence: Synthetic oligonucleotide
ggaugcucggucgccauag

SEQ ID NO: 2298933 - RNA, 19 nt, Artificial Sequence
  Description of Artificial Sequence: Synthetic oligonucleotide
gagagggccggacugggcu

SEQ ID NO: 2298934 - RNA, 19 nt, Artificial Sequence
  Description of Artificial Sequence: Synthetic oligonucleotide
gucacucguccauaguuua

SEQ ID NO: 2298935 - RNA, 19 nt, Artificial Sequence
  Description of Artificial Sequence: Synthetic oligonucleotide
ggugacaaguugcugagau

SEQ ID NO: 2298936 - RNA, 19 nt, Artificial Sequence
  Description of Artificial Sequence: Synthetic oligonucleotide
uucugagaucgguacucuu

SEQ ID NO: 2298937 - RNA, 19 nt, Artificial Sequence
  Description of Artificial Sequence: Synthetic oligonucleotide
gccguucgaaagcgaaugg

SEQ ID NO: 2298938 - RNA, 19 nt, Artificial Sequence
  Description of Artificial Sequence: Synthetic oligonucleotide
cuucgguagcauccgagaa

SEQ ID NO: 2298939 - RNA, 19 nt, Artificial Sequence
  Description of Artificial Sequence: Synthetic oligonucleotide
ucucauucuuauggccagu

SEQ ID NO: 2298940 - RNA, 19 nt, Artificial Sequence
  Description of Artificial Sequence: Synthetic oligonucleotide
gaaagcgaaugguuuugau

SEQ ID NO: 2298941 - RNA, 19 nt, Artificial Sequence
  Description of Artificial Sequence: Synthetic oligonucleotide
cguaagaguaaguuugaca

SEQ ID NO: 2298942 - RNA, 19 nt, Artificial Sequence
  Description of Artificial Sequence: Synthetic oligonucleotide
uuuggaccgcucuccucuc

SEQ ID NO: 2298943 - RNA, 19 nt, Artificial Sequence
  Description of Artificial Sequence: Synthetic oligonucleotide
ucgugcggcuuuuccuccc

SEQ ID NO: 2298944 - RNA, 19 nt, Artificial Sequence
  Description of Artificial Sequence: Synthetic oligonucleotide
agucacucguccauaguuu

SEQ ID NO: 2298945 - RNA, 19 nt, Artificial Sequence
  Description of Artificial Sequence: Synthetic oligonucleotide
cugaugcaaucauguuuuc

SEQ ID NO: 2298946 - RNA, 19 nt, Artificial Sequence
  Description of Artificial Sequence: Synthetic oligonucleotide
aucccagauucuacaaaga

SEQ ID NO: 2298947 - RNA, 19 nt, Artificial Sequence
  Description of Artificial Sequence: Synthetic oligonucleotide
cugaagguuccagauguaa

SEQ ID NO: 2298948 - RNA, 19 nt, Artificial Sequence
  Description of Artificial Sequence: Synthetic oligonucleotide
cucgggcucuacaguuugc

SEQ ID NO: 2298949 - RNA, 19 nt, Artificial Sequence
  Description of Artificial Sequence: Synthetic oligonucleotide
agccagacacaacccacuu

SEQ ID NO: 2298950 - RNA, 19 nt, Artificial Sequence
  Description of Artificial Sequence: Synthetic oligonucleotide
uauggccaguguacgucuu

SEQ ID NO: 2298951 - RNA, 19 nt, Artificial Sequence
  Description of Artificial Sequence: Synthetic oligonucleotide
cagaucacagugguucuga

SEQ ID NO: 2298952 - RNA, 19 nt, Artificial Sequence
  Description of Artificial Sequence: Synthetic oligonucleotide
cacaaccauccugugugac

SEQ ID NO: 2298953 - RNA, 19 nt, Artificial Sequence
  Description of Artificial Sequence: Synthetic oligonucleotide
cuguaaucccacaguuuaa

SEQ ID NO: 2298954 - RNA, 19 nt, Artificial Sequence
  Description of Artificial Sequence: Synthetic oligonucleotide
gacgugccccguaagagua

SEQ ID NO: 2298955 - RNA, 19 nt, Artificial Sequence
  Description of Artificial Sequence: Synthetic oligonucleotide
auccgagaaccagaucaca

SEQ ID NO: 2298956 - RNA, 19 nt, Artificial Sequence
  Description of Artificial Sequence: Synthetic oligonucleotide
agcucccuugacacuauca

SEQ ID NO: 2298957 - RNA, 19 nt, Artificial Sequence
  Description of Artificial Sequence: Synthetic oligonucleotide
agcaagguuuggaccgcuc

SEQ ID NO: 2298958 - RNA, 19 nt, Artificial Sequence
  Description of Artificial Sequence: Synthetic oligonucleotide
cuguccaaaguugcaguga

SEQ ID NO: 2298959 - RNA, 19 nt, Artificial Sequence
  Description of Artificial Sequence: Synthetic oligonucleotide
ugggcucccucugccgggg

SEQ ID NO: 2298960 - RNA, 19 nt, Artificial Sequence
  Description of Artificial Sequence: Synthetic oligonucleotide
uauggccgccgacgugccc

SEQ ID NO: 2298961 - RNA, 19 nt, Artificial Sequence
  Description of Artificial Sequence: Synthetic oligonucleotide
ccuuguaacuucuguacaa

SEQ ID NO: 2298962 - RNA, 19 nt, Artificial Sequence
  Description of Artificial Sequence: Synthetic oligonucleotide
aucgguacucuugccgggu

SEQ ID NO: 2298963 - RNA, 19 nt, Artificial Sequence
  Description of Artificial Sequence: Synthetic oligonucleotide
uuccucccguuuggguugg

SEQ ID NO: 2298964 - RNA, 19 nt, Artificial Sequence
  Description of Artificial Sequence: Synthetic oligonucleotide
gccgggugcugugaaaagg

SEQ ID NO: 2298965 - RNA, 19 nt, Artificial Sequence
  Description of Artificial Sequence: Synthetic oligonucleotide
gugcugugaaaaggacuag

SEQ ID NO: 2298966 - RNA, 19 nt, Artificial Sequence
  Description of Artificial Sequence: Synthetic oligonucleotide
cucggucgccauagcucgg

SEQ ID NO: 2298967 - RNA, 19 nt, Artificial Sequence
  Description of Artificial Sequence: Synthetic oligonucleotide
gcugaugcaaucauguuuu

SEQ ID NO: 2298968 - RNA, 19 nt, Artificial Sequence
  Description of Artificial Sequence: Synthetic oligonucleotide
guucgaaagcgaaugguuu

SEQ ID NO: 2298969 - RNA, 19 nt, Artificial Sequence
  Description of Artificial Sequence: Synthetic oligonucleotide
ggugaaacuugccguucga

SEQ ID NO: 2298970 - RNA, 19 nt, Artificial Sequence
  Description of Artificial Sequence: Synthetic oligonucleotide
ugacacuaucaaggaccca

SEQ ID NO: 2298971 - RNA, 19 nt, Artificial Sequence
  Description of Artificial Sequence: Synthetic oligonucleotide
aaguugcagugagaauaua

SEQ ID NO: 2298972 - RNA, 19 nt, Artificial Sequence
  Description of Artificial Sequence: Synthetic oligonucleotide
gcucgggcucuacaguuug

SEQ ID NO: 2298973 - RNA, 19 nt, Artificial Sequence
  Description of Artificial Sequence: Synthetic oligonucleotide
gguucgucuuuagggucgg

SEQ ID NO: 2298974 - RNA, 19 nt, Artificial Sequence
  Description of Artificial Sequence: Synthetic oligonucleotide
gugaaacuugccguucgaa

SEQ ID NO: 2298975 - RNA, 19 nt, Artificial Sequence
  Description of Artificial Sequence: Synthetic oligonucleotide
aacccacuuuccaccagua

SEQ ID NO: 2298976 - RNA, 19 nt, Artificial Sequence
  Description of Artificial Sequence: Synthetic oligonucleotide
agaguaaguuugacagcau

SEQ ID NO: 2298977 - RNA, 19 nt, Artificial Sequence
  Description of Artificial Sequence: Synthetic oligonucleotide
cuuuagucugaagguucca

SEQ ID NO: 2298978 - RNA, 19 nt, Artificial Sequence
  Description of Artificial Sequence: Synthetic oligonucleotide
ugcggcuuuuccucccguu

SEQ ID NO: 2298979 - RNA, 19 nt, Artificial Sequence
  Description of Artificial Sequence: Synthetic oligonucleotide
ucgccauagcucgggcucu

SEQ ID NO: 2298980 - RNA, 19 nt, Artificial Sequence
  Description of Artificial Sequence: Synthetic oligonucleotide
ucgcuuucuucgguagcau

SEQ ID NO: 2298981 - RNA, 19 nt, Artificial Sequence
  Description of Artificial Sequence: Synthetic oligonucleotide
gcaguauuucucauucuua

SEQ ID NO: 2298982 - RNA, 19 nt, Artificial Sequence
  Description of Artificial Sequence: Synthetic oligonucleotide
gacacgggaggguuaccau

SEQ ID NO: 2298983 - RNA, 19 nt, Artificial Sequence
  Description of Artificial Sequence: Synthetic oligonucleotide
guacucuugccgggugcug

SEQ ID NO: 2298984 - RNA, 19 nt, Artificial Sequence
  Description of Artificial Sequence: Synthetic oligonucleotide
aggacccauuacaauuaaa

SEQ ID NO: 2298985 - RNA, 19 nt, Artificial Sequence
  Description of Artificial Sequence: Synthetic oligonucleotide
ccgacgugccccguaagag

SEQ ID NO: 2298986 - RNA, 19 nt, Artificial Sequence
  Description of Artificial Sequence: Synthetic oligonucleotide
ccgggugcugugaaaagga

SEQ ID NO: 2298987 - RNA, 19 nt, Artificial Sequence
  Description of Artificial Sequence: Synthetic oligonucleotide
guccaaaguugcagugaga

SEQ ID NO: 2298988 - RNA, 19 nt, Artificial Sequence
  Description of Artificial Sequence: Synthetic oligonucleotide
ggucggcacaggaucagca

SEQ ID NO: 2298989 - RNA, 19 nt, Artificial Sequence
  Description of Artificial Sequence: Synthetic oligonucleotide
uggguuucgugcggcuuuu

SEQ ID NO: 2298990 - RNA, 19 nt, Artificial Sequence
  Description of Artificial Sequence: Synthetic oligonucleotide
guucugagaucgguacucu

SEQ ID NO: 2298991 - RNA, 19 nt, Artificial Sequence
  Description of Artificial Sequence: Synthetic oligonucleotide
auagcucccuugacacuau

SEQ ID NO: 2298992 - RNA, 19 nt, Artificial Sequence
  Description of Artificial Sequence: Synthetic oligonucleotide
acuugccguucgaaagcga

SEQ ID NO: 2298993 - RNA, 19 nt, Artificial Sequence
  Description of Artificial Sequence: Synthetic oligonucleotide
acgggaggguuaccaucau

SEQ ID NO: 2298994 - RNA, 19 nt, Artificial Sequence
  Description of Artificial Sequence: Synthetic oligonucleotide
gcagcaagguuuggaccgc

SEQ ID NO: 2298995 - RNA, 19 nt, Artificial Sequence
  Description of Artificial Sequence: Synthetic oligonucleotide
cccguaagaguaaguuuga

SEQ ID NO: 2298996 - RNA, 19 nt, Artificial Sequence
  Description of Artificial Sequence: Synthetic oligonucleotide
ccguaagaguaaguuugac

SEQ ID NO: 2298997 - RNA, 19 nt, Artificial Sequence
  Description of Artificial Sequence: Synthetic oligonucleotide
gucuggcacggaacauuac

SEQ ID NO: 2298998 - RNA, 19 nt, Artificial Sequence
  Description of Artificial Sequence: Synthetic oligonucleotide
gccgacgugccccguaaga

SEQ ID NO: 2298999 - RNA, 19 nt, Artificial Sequence
  Description of Artificial Sequence: Synthetic oligonucleotide
caccaguaacagagaaacu

SEQ ID NO: 2299000 - RNA, 19 nt, Artificial Sequence
  Description of Artificial Sequence: Synthetic oligonucleotide
cacucguccauaguuuaau

SEQ ID NO: 2299001 - RNA, 19 nt, Artificial Sequence
  Description of Artificial Sequence: Synthetic oligonucleotide
cggcuuuuccucccguuug

SEQ ID NO: 2299002 - RNA, 19 nt, Artificial Sequence
  Description of Artificial Sequence: Synthetic oligonucleotide
gugugaccuuguaacuucu

SEQ ID NO: 2299003 - RNA, 19 nt, Artificial Sequence
  Description of Artificial Sequence: Synthetic oligonucleotide
agcucgggcucuacaguuu

SEQ ID NO: 2299004 - RNA, 19 nt, Artificial Sequence
  Description of Artificial Sequence: Synthetic oligonucleotide
ccgagaaccagaucacagu

SEQ ID NO: 2299005 - RNA, 19 nt, Artificial Sequence
  Description of Artificial Sequence: Synthetic oligonucleotide
cagugguucugagaucggu

SEQ ID NO: 2299006 - RNA, 19 nt, Artificial Sequence
  Description of Artificial Sequence: Synthetic oligonucleotide
gggucggcacaggaucagc

SEQ ID NO: 2299007 - RNA, 19 nt, Artificial Sequence
  Description of Artificial Sequence: Synthetic oligonucleotide
cagauucuacaaagaccau

SEQ ID NO: 2299008 - RNA, 19 nt, Artificial Sequence
  Description of Artificial Sequence: Synthetic oligonucleotide
gguacucuugccgggugcu

SEQ ID NO: 2299009 - RNA, 19 nt, Artificial Sequence
  Description of Artificial Sequence: Synthetic oligonucleotide
gcgaaugguuuugauugua

SEQ ID NO: 2299010 - RNA, 19 nt, Artificial Sequence
  Description of Artificial Sequence: Synthetic oligonucleotide
cgucuuuagggucggcaca

SEQ ID NO: 2299011 - RNA, 19 nt, Artificial Sequence
  Description of Artificial Sequence: Synthetic oligonucleotide
cgguacucuugccgggugc

SEQ ID NO: 2299012 - RNA, 19 nt, Artificial Sequence
  Description of Artificial Sequence: Synthetic oligonucleotide
cgggcucuacaguuugcac

SEQ ID NO: 2299013 - RNA, 19 nt, Artificial Sequence
  Description of Artificial Sequence: Synthetic oligonucleotide
caucaucagcaaguguuuu

SEQ ID NO: 2299014 - RNA, 19 nt, Artificial Sequence
  Description of Artificial Sequence: Synthetic oligonucleotide
gaacaaugccagagacuuu

SEQ ID NO: 2299015 - RNA, 19 nt, Artificial Sequence
  Description of Artificial Sequence: Synthetic oligonucleotide
ggucgccauagcucgggcu

SEQ ID NO: 2299016 - RNA, 19 nt, Artificial Sequence
  Description of Artificial Sequence: Synthetic oligonucleotide
ccauagcucgggcucuaca

SEQ ID NO: 2299017 - RNA, 19 nt, Artificial Sequence
  Description of Artificial Sequence: Synthetic oligonucleotide
cgugccccguaagaguaag

SEQ ID NO: 2299018 - RNA, 19 nt, Artificial Sequence
  Description of Artificial Sequence: Synthetic oligonucleotide
guuggguuucgugcggcuu

SEQ ID NO: 2299019 - RNA, 19 nt, Artificial Sequence
  Description of Artificial Sequence: Synthetic oligonucleotide
ccggacugggcucccucug

SEQ ID NO: 2299020 - RNA, 19 nt, Artificial Sequence
  Description of Artificial Sequence: Synthetic oligonucleotide
ggcaucugccucugcugua

SEQ ID NO: 2299021 - RNA, 19 nt, Artificial Sequence
  Description of Artificial Sequence: Synthetic oligonucleotide
cguucgaaagcgaaugguu

SEQ ID NO: 2299022 - RNA, 19 nt, Artificial Sequence
  Description of Artificial Sequence: Synthetic oligonucleotide
acgugccccguaagaguaa

SEQ ID NO: 2299023 - RNA, 19 nt, Artificial Sequence
  Description of Artificial Sequence: Synthetic oligonucleotide
gccccguaagaguaaguuu

SEQ ID NO: 2299024 - RNA, 19 nt, Artificial Sequence
  Description of Artificial Sequence: Synthetic oligonucleotide
ggccggacugggcucccuc

SEQ ID NO: 2299025 - RNA, 19 nt, Artificial Sequence
  Description of Artificial Sequence: Synthetic oligonucleotide
gggugacaaguugcugaga

SEQ ID NO: 2299026 - RNA, 19 nt, Artificial Sequence
  Description of Artificial Sequence: Synthetic oligonucleotide
cgucuggcacggaacauua

SEQ ID NO: 2299027 - RNA, 19 nt, Artificial Sequence
  Description of Artificial Sequence: Synthetic oligonucleotide
ccucucgcuuucuucggua

SEQ ID NO: 2299028 - RNA, 19 nt, Artificial Sequence
  Description of Artificial Sequence: Synthetic oligonucleotide
uccucccguuuggguuggc

SEQ ID NO: 2299029 - RNA, 19 nt, Artificial Sequence
  Description of Artificial Sequence: Synthetic oligonucleotide
cgaaagcgaaugguuuuga

SEQ ID NO: 2299030 - RNA, 19 nt, Artificial Sequence
  Description of Artificial Sequence: Synthetic oligonucleotide
cagcauaguuggguuucgu

SEQ ID NO: 2299031 - RNA, 19 nt, Artificial Sequence
  Description of Artificial Sequence: Synthetic oligonucleotide
cguccauaguuuaauuguu

SEQ ID NO: 2299032 - RNA, 19 nt, Artificial Sequence
  Description of Artificial Sequence: Synthetic oligonucleotide
ggaccgcucuccucucgcu

SEQ ID NO: 2299033 - RNA, 19 nt, Artificial Sequence
  Description of Artificial Sequence: Synthetic oligonucleotide
ccguucgaaagcgaauggu

SEQ ID NO: 2299034 - RNA, 19 nt, Artificial Sequence
  Description of Artificial Sequence: Synthetic oligonucleotide
ccgcucuccucucgcuuuc

SEQ ID NO: 2299035 - RNA, 19 nt, Artificial Sequence
  Description of Artificial Sequence: Synthetic oligonucleotide
cagcaagguuuggaccgcu

SEQ ID NO: 2299036 - RNA, 19 nt, Artificial Sequence
  Description of Artificial Sequence: Synthetic oligonucleotide
cggucgccauagcucgggc

SEQ ID NO: 2299037 - RNA, 19 nt, Artificial Sequence
  Description of Artificial Sequence: Synthetic oligonucleotide
gugccccguaagaguaagu

SEQ ID NO: 2299038 - RNA, 19 nt, Artificial Sequence
  Description of Artificial Sequence: Synthetic oligonucleotide
ggguuucgugcggcuuuuc

SEQ ID NO: 2299039 - RNA, 19 nt, Artificial Sequence
  Description of Artificial Sequence: Synthetic oligonucleotide
gcgucuggcacggaacauu

SEQ ID NO: 2299040 - RNA, 19 nt, Artificial Sequence
  Description of Artificial Sequence: Synthetic oligonucleotide
cgacgugccccguaagagu

SEQ ID NO: 2299041 - RNA, 19 nt, Artificial Sequence
  Description of Artificial Sequence: Synthetic oligonucleotide
ccucccguuuggguuggca

SEQ ID NO: 2299042 - RNA, 19 nt, Artificial Sequence
  Description of Artificial Sequence: Synthetic oligonucleotide
ggcgucuggcacggaacau

SEQ ID NO: 2299043 - RNA, 19 nt, Artificial Sequence
  Description of Artificial Sequence: Synthetic oligonucleotide
gccgccgacgugccccgua

SEQ ID NO: 2299044 - RNA, 19 nt, Artificial Sequence
  Description of Artificial Sequence: Synthetic oligonucleotide
ccgccgacgugccccguaa

SEQ ID NO: 2299045 - RNA, 19 nt, Artificial Sequence
  Description of Artificial Sequence: Synthetic oligonucleotide
cgguagcauccgagaacca

SEQ ID NO: 2299046 - RNA, 19 nt, Artificial Sequence
  Description of Artificial Sequence: Synthetic oligonucleotide
cacaggcgucuggcacgga

SEQ ID NO: 2299047 - RNA, 19 nt, Artificial Sequence
  Description of Artificial Sequence: Synthetic oligonucleotide
cgccauagcucgggcucua

SEQ ID NO: 2299048 - RNA, 19 nt, Artificial Sequence
  Description of Artificial Sequence: Synthetic oligonucleotide
ggccgccgacgugccccgu

SEQ ID NO: 2299049 - RNA, 19 nt, Artificial Sequence
  Description of Artificial Sequence: Synthetic oligonucleotide
uaaaacaggacaaugauca

SEQ ID NO: 2299050 - RNA, 19 nt, Artificial Sequence
  Description of Artificial Sequence: Synthetic oligonucleotide
aauaaagucgcaccggagc

SEQ ID NO: 2299051 - RNA, 19 nt, Artificial Sequence
  Description of Artificial Sequence: Synthetic oligonucleotide
aauaguaccauuauaauca

SEQ ID NO: 2299052 - RNA, 19 nt, Artificial Sequence
  Description of Artificial Sequence: Synthetic oligonucleotide
acaaguuuaauguaguaac

SEQ ID NO: 2299053 - RNA, 19 nt, Artificial Sequence
  Description of Artificial Sequence: Synthetic oligonucleotide
uuauguucuauuaucagag

SEQ ID NO: 2299054 - RNA, 19 nt, Artificial Sequence
  Description of Artificial Sequence: Synthetic oligonucleotide
uguaauuuucuucagacac

SEQ ID NO: 2299055 - RNA, 19 nt, Artificial Sequence
  Description of Artificial Sequence: Synthetic oligonucleotide
aauagaaaagcuuuuacua

SEQ ID NO: 2299056 - RNA, 19 nt, Artificial Sequence
  Description of Artificial Sequence: Synthetic oligonucleotide
aacugugacauaguaaucc

SEQ ID NO: 2299057 - RNA, 19 nt, Artificial Sequence
  Description of Artificial Sequence: Synthetic oligonucleotide
aaucacauugaauagaaaa

SEQ ID NO: 2299058 - RNA, 19 nt, Artificial Sequence
  Description of Artificial Sequence: Synthetic oligonucleotide
aguggauaaauuuauguuc

SEQ ID NO: 2299059 - RNA, 19 nt, Artificial Sequence
  Description of Artificial Sequence: Synthetic oligonucleotide
aaauauauuccuuugguua

SEQ ID NO: 2299060 - RNA, 19 nt, Artificial Sequence
  Description of Artificial Sequence: Synthetic oligonucleotide
ugaaaauauauuccuuugg

SEQ ID NO: 2299061 - RNA, 19 nt, Artificial Sequence
  Description of Artificial Sequence: Synthetic oligonucleotide
caucuuuccaauaaagucg

SEQ ID NO: 2299062 - RNA, 19 nt, Artificial Sequence
  Description of Artificial Sequence: Synthetic oligonucleotide
uuuguaacaguuaagcuuc

SEQ ID NO: 2299063 - RNA, 19 nt, Artificial Sequence
  Description of Artificial Sequence: Synthetic oligonucleotide
uaccauuauaaucacauug

SEQ ID NO: 2299064 - RNA, 19 nt, Artificial Sequence
  Description of Artificial Sequence: Synthetic oligonucleotide
uuuacuuuaggaaccuccg

SEQ ID NO: 2299065 - RNA, 19 nt, Artificial Sequence
  Description of Artificial Sequence: Synthetic oligonucleotide
gauuuuguaacaguuaagc

SEQ ID NO: 2299066 - RNA, 19 nt, Artificial Sequence
  Description of Artificial Sequence: Synthetic oligonucleotide
aaacauaggcguuucauca

SEQ ID NO: 2299067 - RNA, 19 nt, Artificial Sequence
  Description of Artificial Sequence: Synthetic oligonucleotide
aacaauguaauuuuacuuu

SEQ ID NO: 2299068 - RNA, 19 nt, Artificial Sequence
  Description of Artificial Sequence: Synthetic oligonucleotide
gauaacaacaguuugccga

SEQ ID NO: 2299069 - RNA, 19 nt, Artificial Sequence
  Description of Artificial Sequence: Synthetic oligonucleotide
ucuucauacgcucaaaagu

SEQ ID NO: 2299070 - RNA, 19 nt, Artificial Sequence
  Description of Artificial Sequence: Synthetic oligonucleotide
ugagaguugauaacaacag

SEQ ID NO: 2299071 - RNA, 19 nt, Artificial Sequence
  Description of Artificial Sequence: Synthetic oligonucleotide
uugugguagacauucaagg

SEQ ID NO: 2299072 - RNA, 19 nt, Artificial Sequence
  Description of Artificial Sequence: Synthetic oligonucleotide
ucuugcuuagcaaagugag

SEQ ID NO: 2299073 - RNA, 19 nt, Artificial Sequence
  Description of Artificial Sequence: Synthetic oligonucleotide
aaagauuagaaccauuguu

SEQ ID NO: 2299074 - RNA, 19 nt, Artificial Sequence
  Description of Artificial Sequence: Synthetic oligonucleotide
caaguugaaaauauauucc

SEQ ID NO: 2299075 - RNA, 19 nt, Artificial Sequence
  Description of Artificial Sequence: Synthetic oligonucleotide
acaaugaucagaguaauag

SEQ ID NO: 2299076 - RNA, 19 nt, Artificial Sequence
  Description of Artificial Sequence: Synthetic oligonucleotide
ucuauuaucagaguugcug

SEQ ID NO: 2299077 - RNA, 19 nt, Artificial Sequence
  Description of Artificial Sequence: Synthetic oligonucleotide
uuauaaucacauugaauag

SEQ ID NO: 2299078 - RNA, 19 nt, Artificial Sequence
  Description of Artificial Sequence: Synthetic oligonucleotide
aaaccuuuauucaagucgg

SEQ ID NO: 2299079 - RNA, 19 nt, Artificial Sequence
  Description of Artificial Sequence: Synthetic oligonucleotide
uuuauguucuauuaucaga

SEQ ID NO: 2299080 - RNA, 19 nt, Artificial Sequence
  Description of Artificial Sequence: Synthetic oligonucleotide
aagucggcaguacagagag

SEQ ID NO: 2299081 - RNA, 19 nt, Artificial Sequence
  Description of Artificial Sequence: Synthetic oligonucleotide
caaaagauuagaaccauug

SEQ ID NO: 2299082 - RNA, 19 nt, Artificial Sequence
  Description of Artificial Sequence: Synthetic oligonucleotide
uuuuguaacaguuaagcuu

SEQ ID NO: 2299083 - RNA, 19 nt, Artificial Sequence
  Description of Artificial Sequence: Synthetic oligonucleotide
aauauauuccuuugguuaa

SEQ ID NO: 2299084 - RNA, 19 nt, Artificial Sequence
  Description of Artificial Sequence: Synthetic oligonucleotide
aagcuuuuacuacccauac

SEQ ID NO: 2299085 - RNA, 19 nt, Artificial Sequence
  Description of Artificial Sequence: Synthetic oligonucleotide
auuagaaccauuguuaaca

SEQ ID NO: 2299086 - RNA, 19 nt, Artificial Sequence
  Description of Artificial Sequence: Synthetic oligonucleotide
aauguggcuguauucugac

SEQ ID NO: 2299087 - RNA, 19 nt, Artificial Sequence
  Description of Artificial Sequence: Synthetic oligonucleotide
uguauucugacuccagucc

SEQ ID NO: 2299088 - RNA, 19 nt, Artificial Sequence
  Description of Artificial Sequence: Synthetic oligonucleotide
cauguaauuuucuucagac

SEQ ID NO: 2299089 - RNA, 19 nt, Artificial Sequence
  Description of Artificial Sequence: Synthetic oligonucleotide
uuuuacuuuacaaaaucau

SEQ ID NO: 2299090 - RNA, 19 nt, Artificial Sequence
  Description of Artificial Sequence: Synthetic oligonucleotide
uaacaguuaagcuucuugc

SEQ ID NO: 2299091 - RNA, 19 nt, Artificial Sequence
  Description of Artificial Sequence: Synthetic oligonucleotide
uuuaauguaguaacaugga

SEQ ID NO: 2299092 - RNA, 19 nt, Artificial Sequence
  Description of Artificial Sequence: Synthetic oligonucleotide
aacguuuugugguagacau

SEQ ID NO: 2299093 - RNA, 19 nt, Artificial Sequence
  Description of Artificial Sequence: Synthetic oligonucleotide
ugugguagacauucaaggg

SEQ ID NO: 2299094 - RNA, 19 nt, Artificial Sequence
  Description of Artificial Sequence: Synthetic oligonucleotide
aaaagauuagaaccauugu

SEQ ID NO: 2299095 - RNA, 19 nt, Artificial Sequence
  Description of Artificial Sequence: Synthetic oligonucleotide
uaauguaguaacauggaau

SEQ ID NO: 2299096 - RNA, 19 nt, Artificial Sequence
  Description of Artificial Sequence: Synthetic oligonucleotide
ucucuuagcacaugagugg

SEQ ID NO: 2299097 - RNA, 19 nt, Artificial Sequence
  Description of Artificial Sequence: Synthetic oligonucleotide
aaaguuuucaugaacugcu

SEQ ID NO: 2299098 - RNA, 19 nt, Artificial Sequence
  Description of Artificial Sequence: Synthetic oligonucleotide
uuuacuacccauacucuug

SEQ ID NO: 2299099 - RNA, 19 nt, Artificial Sequence
  Description of Artificial Sequence: Synthetic oligonucleotide
ucaagggugauuuuguaac

SEQ ID NO: 2299100 - RNA, 19 nt, Artificial Sequence
  Description of Artificial Sequence: Synthetic oligonucleotide
caaacuuuugguagaagcc

SEQ ID NO: 2299101 - RNA, 19 nt, Artificial Sequence
  Description of Artificial Sequence: Synthetic oligonucleotide
ugucaacugacccaguacc

SEQ ID NO: 2299102 - RNA, 19 nt, Artificial Sequence
  Description of Artificial Sequence: Synthetic oligonucleotide
aaagugagaguugauaaca

SEQ ID NO: 2299103 - RNA, 19 nt, Artificial Sequence
  Description of Artificial Sequence: Synthetic oligonucleotide
gaaugcaaaagauuagaac

SEQ ID NO: 2299104 - RNA, 19 nt, Artificial Sequence
  Description of Artificial Sequence: Synthetic oligonucleotide
auaaacaaguuuaauguag

SEQ ID NO: 2299105 - RNA, 19 nt, Artificial Sequence
  Description of Artificial Sequence: Synthetic oligonucleotide
auaaagucgcaccggagcg

SEQ ID NO: 2299106 - RNA, 19 nt, Artificial Sequence
  Description of Artificial Sequence: Synthetic oligonucleotide
aguaauaguaccauuauaa

SEQ ID NO: 2299107 - RNA, 19 nt, Artificial Sequence
  Description of Artificial Sequence: Synthetic oligonucleotide
uugcuuagcaaagugagag

SEQ ID NO: 2299108 - RNA, 19 nt, Artificial Sequence
  Description of Artificial Sequence: Synthetic oligonucleotide
agaaaauguggcuguauuc

SEQ ID NO: 2299109 - RNA, 19 nt, Artificial Sequence
  Description of Artificial Sequence: Synthetic oligonucleotide
uucauuggagaaauggcug

SEQ ID NO: 2299110 - RNA, 19 nt, Artificial Sequence
  Description of Artificial Sequence: Synthetic oligonucleotide
aaaauauauuccuuugguu

SEQ ID NO: 2299111 - RNA, 19 nt, Artificial Sequence
  Description of Artificial Sequence: Synthetic oligonucleotide
aauuuauguucuauuauca

SEQ ID NO: 2299112 - RNA, 19 nt, Artificial Sequence
  Description of Artificial Sequence: Synthetic oligonucleotide
ugaucagaguaauaguacc

SEQ ID NO: 2299113 - RNA, 19 nt, Artificial Sequence
  Description of Artificial Sequence: Synthetic oligonucleotide
auuuauguucuauuaucag

SEQ ID NO: 2299114 - RNA, 19 nt, Artificial Sequence
  Description of Artificial Sequence: Synthetic oligonucleotide
uaaacaaguuuaauguagu

SEQ ID NO: 2299115 - RNA, 19 nt, Artificial Sequence
  Description of Artificial Sequence: Synthetic oligonucleotide
uugauaacaacaguuugcc

SEQ ID NO: 2299116 - RNA, 19 nt, Artificial Sequence
  Description of Artificial Sequence: Synthetic oligonucleotide
uuacaaaaucauuaaaaua

SEQ ID NO: 2299117 - RNA, 19 nt, Artificial Sequence
  Description of Artificial Sequence: Synthetic oligonucleotide
agaaccauuguuaacaaug

SEQ ID NO: 2299118 - RNA, 19 nt, Artificial Sequence
  Description of Artificial Sequence: Synthetic oligonucleotide
ucauuggagaaauggcugg

SEQ ID NO: 2299119 - RNA, 19 nt, Artificial Sequence
  Description of Artificial Sequence: Synthetic oligonucleotide
aagaaaagauucaaguuga

SEQ ID NO: 2299120 - RNA, 19 nt, Artificial Sequence
  Description of Artificial Sequence: Synthetic oligonucleotide
aaaucauccccuuuauuaa

SEQ ID NO: 2299121 - RNA, 19 nt, Artificial Sequence
  Description of Artificial Sequence: Synthetic oligonucleotide
uguaguaacauggaaugca

SEQ ID NO: 2299122 - RNA, 19 nt, Artificial Sequence
  Description of Artificial Sequence: Synthetic oligonucleotide
gacauaguaauccccagac

SEQ ID NO: 2299123 - RNA, 19 nt, Artificial Sequence
  Description of Artificial Sequence: Synthetic oligonucleotide
auaacaacaguuugccgag

SEQ ID NO: 2299124 - RNA, 19 nt, Artificial Sequence
  Description of Artificial Sequence: Synthetic oligonucleotide
acaaccacgucuucuacuc

SEQ ID NO: 2299125 - RNA, 19 nt, Artificial Sequence
  Description of Artificial Sequence: Synthetic oligonucleotide
uucuccuagggucacaucu

SEQ ID NO: 2299126 - RNA, 19 nt, Artificial Sequence
  Description of Artificial Sequence: Synthetic oligonucleotide
ucuacucucccucucuuag

SEQ ID NO: 2299127 - RNA, 19 nt, Artificial Sequence
  Description of Artificial Sequence: Synthetic oligonucleotide
uauaaucacauugaauaga

SEQ ID NO: 2299128 - RNA, 19 nt, Artificial Sequence
  Description of Artificial Sequence: Synthetic oligonucleotide
ucuugaagcagacuugggu

SEQ ID NO: 2299129 - RNA, 19 nt, Artificial Sequence
  Description of Artificial Sequence: Synthetic oligonucleotide
ugguagacauucaagggug

SEQ ID NO: 2299130 - RNA, 19 nt, Artificial Sequence
  Description of Artificial Sequence: Synthetic oligonucleotide
aaaauguggcuguauucug

SEQ ID NO: 2299131 - RNA, 19 nt, Artificial Sequence
  Description of Artificial Sequence: Synthetic oligonucleotide
uacuuuaggaaccuccgac

SEQ ID NO: 2299132 - RNA, 19 nt, Artificial Sequence
  Description of Artificial Sequence: Synthetic oligonucleotide
aaacuuuugguagaagcca

SEQ ID NO: 2299133 - RNA, 19 nt, Artificial Sequence
  Description of Artificial Sequence: Synthetic oligonucleotide
aagauuagaaccauuguua

SEQ ID NO: 2299134 - RNA, 19 nt, Artificial Sequence
  Description of Artificial Sequence: Synthetic oligonucleotide
aucuuuccaauaaagucgc

SEQ ID NO: 2299135 - RNA, 19 nt, Artificial Sequence
  Description of Artificial Sequence: Synthetic oligonucleotide
aacaaguuuaauguaguaa

SEQ ID NO: 2299136 - RNA, 19 nt, Artificial Sequence
  Description of Artificial Sequence: Synthetic oligonucleotide
uaacaauguaauuuuacuu

SEQ ID NO: 2299137 - RNA, 19 nt, Artificial Sequence
  Description of Artificial Sequence: Synthetic oligonucleotide
agaaaagcuuuuacuaccc

SEQ ID NO: 2299138 - RNA, 19 nt, Artificial Sequence
  Description of Artificial Sequence: Synthetic oligonucleotide
gauucauuggagaaauggc

SEQ ID NO: 2299139 - RNA, 19 nt, Artificial Sequence
  Description of Artificial Sequence: Synthetic oligonucleotide
cucucuuagcacaugagug

SEQ ID NO: 2299140 - RNA, 19 nt, Artificial Sequence
  Description of Artificial Sequence: Synthetic oligonucleotide
auaguaccauuauaaucac

SEQ ID NO: 2299141 - RNA, 19 nt, Artificial Sequence
  Description of Artificial Sequence: Synthetic oligonucleotide
cuugaagcagacuuggguc

SEQ ID NO: 2299142 - RNA, 19 nt, Artificial Sequence
  Description of Artificial Sequence: Synthetic oligonucleotide
guaacaguuaagcuucuug

SEQ ID NO: 2299143 - RNA, 19 nt, Artificial Sequence
  Description of Artificial Sequence: Synthetic oligonucleotide
gacacauguaauuuucuuc

SEQ ID NO: 2299144 - RNA, 19 nt, Artificial Sequence
  Description of Artificial Sequence: Synthetic oligonucleotide
ucaucacuaacaaccacgu

SEQ ID NO: 2299145 - RNA, 19 nt, Artificial Sequence
  Description of Artificial Sequence: Synthetic oligonucleotide
ucagacacuguauagccaa

SEQ ID NO: 2299146 - RNA, 19 nt, Artificial Sequence
  Description of Artificial Sequence: Synthetic oligonucleotide
ucuucagacacuguauagc

SEQ ID NO: 2299147 - RNA, 19 nt, Artificial Sequence
  Description of Artificial Sequence: Synthetic oligonucleotide
auaaaacaggacaaugauc

SEQ ID NO: 2299148 - RNA, 19 nt, Artificial Sequence
  Description of Artificial Sequence: Synthetic oligonucleotide
uauucaagucggcaguaca

SEQ ID NO: 2299149 - RNA, 19 nt, Artificial Sequence
  Description of Artificial Sequence: Synthetic oligonucleotide
uuacuacccauacucuugc

SEQ ID NO: 2299150 - RNA, 19 nt, Artificial Sequence
  Description of Artificial Sequence: Synthetic oligonucleotide
aacaacaguuugccgagcu

SEQ ID NO: 2299151 - RNA, 19 nt, Artificial Sequence
  Description of Artificial Sequence: Synthetic oligonucleotide
augaucagaguaauaguac

SEQ ID NO: 2299152 - RNA, 19 nt, Artificial Sequence
  Description of Artificial Sequence: Synthetic oligonucleotide
uuuugugguagacauucaa

SEQ ID NO: 2299153 - RNA, 19 nt, Artificial Sequence
  Description of Artificial Sequence: Synthetic oligonucleotide
ugauaacaacaguuugccg

SEQ ID NO: 2299154 - RNA, 19 nt, Artificial Sequence
  Description of Artificial Sequence: Synthetic oligonucleotide
aauggcuggagaaaaugug

SEQ ID NO: 2299155 - RNA, 19 nt, Artificial Sequence
  Description of Artificial Sequence: Synthetic oligonucleotide
acauaggcguuucaucagg

SEQ ID NO: 2299156 - RNA, 19 nt, Artificial Sequence
  Description of Artificial Sequence: Synthetic oligonucleotide
uggaaugcaaaagauuaga

SEQ ID NO: 2299157 - RNA, 19 nt, Artificial Sequence
  Description of Artificial Sequence: Synthetic oligonucleotide
ucagaguugcuguagcaac

SEQ ID NO: 2299158 - RNA, 19 nt, Artificial Sequence
  Description of Artificial Sequence: Synthetic oligonucleotide
ucaagucggcaguacagag

SEQ ID NO: 2299159 - RNA, 19 nt, Artificial Sequence
  Description of Artificial Sequence: Synthetic oligonucleotide
uugccuaccaagaaaugaa

SEQ ID NO: 2299160 - RNA, 19 nt, Artificial Sequence
  Description of Artificial Sequence: Synthetic oligonucleotide
uccaauaaagucgcaccgg

SEQ ID NO: 2299161 - RNA, 19 nt, Artificial Sequence
  Description of Artificial Sequence: Synthetic oligonucleotide
aacaaccacgucuucuacu

SEQ ID NO: 2299162 - RNA, 19 nt, Artificial Sequence
  Description of Artificial Sequence: Synthetic oligonucleotide
agauuagaaccauuguuaa

SEQ ID NO: 2299163 - RNA, 19 nt, Artificial Sequence
  Description of Artificial Sequence: Synthetic oligonucleotide
uugaagcagacuuggguca

SEQ ID NO: 2299164 - RNA, 19 nt, Artificial Sequence
  Description of Artificial Sequence: Synthetic oligonucleotide
aagggugauuuuguaacag

SEQ ID NO: 2299165 - RNA, 19 nt, Artificial Sequence
  Description of Artificial Sequence: Synthetic oligonucleotide
cuucuugaagcagacuugg

SEQ ID NO: 2299166 - RNA, 19 nt, Artificial Sequence
  Description of Artificial Sequence: Synthetic oligonucleotide
gauuagaaccauuguuaac

SEQ ID NO: 2299167 - RNA, 19 nt, Artificial Sequence
  Description of Artificial Sequence: Synthetic oligonucleotide
aguuugccgagcugcuucc

SEQ ID NO: 2299168 - RNA, 19 nt, Artificial Sequence
  Description of Artificial Sequence: Synthetic oligonucleotide
gugauuuuguaacaguuaa

SEQ ID NO: 2299169 - RNA, 19 nt, Artificial Sequence
  Description of Artificial Sequence: Synthetic oligonucleotide
agucgcaccggagcgaucc

SEQ ID NO: 2299170 - RNA, 19 nt, Artificial Sequence
  Description of Artificial Sequence: Synthetic oligonucleotide
uuaggaaccuccgacacau

SEQ ID NO: 2299171 - RNA, 19 nt, Artificial Sequence
  Description of Artificial Sequence: Synthetic oligonucleotide
uggcuggagaaaauguggc

SEQ ID NO: 2299172 - RNA, 19 nt, Artificial Sequence
  Description of Artificial Sequence: Synthetic oligonucleotide
ugccuaccaagaaaugaag

SEQ ID NO: 2299173 - RNA, 19 nt, Artificial Sequence
  Description of Artificial Sequence: Synthetic oligonucleotide
uugguagaagccaacguuu

SEQ ID NO: 2299174 - RNA, 19 nt, Artificial Sequence
  Description of Artificial Sequence: Synthetic oligonucleotide
agaguaauaguaccauuau

SEQ ID NO: 2299175 - RNA, 19 nt, Artificial Sequence
  Description of Artificial Sequence: Synthetic oligonucleotide
accauuauaaucacauuga

SEQ ID NO: 2299176 - RNA, 19 nt, Artificial Sequence
  Description of Artificial Sequence: Synthetic oligonucleotide
caaacauaggcguuucauc

SEQ ID NO: 2299177 - RNA, 19 nt, Artificial Sequence
  Description of Artificial Sequence: Synthetic oligonucleotide
auguaguaacauggaaugc

SEQ ID NO: 2299178 - RNA, 19 nt, Artificial Sequence
  Description of Artificial Sequence: Synthetic oligonucleotide
acuuuaggaaccuccgaca

SEQ ID NO: 2299179 - RNA, 19 nt, Artificial Sequence
  Description of Artificial Sequence: Synthetic oligonucleotide
aucauccccuuuauuaagc

SEQ ID NO: 2299180 - RNA, 19 nt, Artificial Sequence
  Description of Artificial Sequence: Synthetic oligonucleotide
uuuuacuacccauacucuu

SEQ ID NO: 2299181 - RNA, 19 nt, Artificial Sequence
  Description of Artificial Sequence: Synthetic oligonucleotide
uccgacacauguaauuuuc

SEQ ID NO: 2299182 - RNA, 19 nt, Artificial Sequence
  Description of Artificial Sequence: Synthetic oligonucleotide
aagauucaaguugaaaaua

SEQ ID NO: 2299183 - RNA, 19 nt, Artificial Sequence
  Description of Artificial Sequence: Synthetic oligonucleotide
aacauggaaugcaaaagau

SEQ ID NO: 2299184 - RNA, 19 nt, Artificial Sequence
  Description of Artificial Sequence: Synthetic oligonucleotide
gaagccaacguuuuguggu

SEQ ID NO: 2299185 - RNA, 19 nt, Artificial Sequence
  Description of Artificial Sequence: Synthetic oligonucleotide
accggagcgauccacgcuc

SEQ ID NO: 2299186 - RNA, 19 nt, Artificial Sequence
  Description of Artificial Sequence: Synthetic oligonucleotide
aguuaagcuucuugcuuag

SEQ ID NO: 2299187 - RNA, 19 nt, Artificial Sequence
  Description of Artificial Sequence: Synthetic oligonucleotide
ugguugucuuuacuuuagg

SEQ ID NO: 2299188 - RNA, 19 nt, Artificial Sequence
  Description of Artificial Sequence: Synthetic oligonucleotide
agaguugauaacaacaguu

SEQ ID NO: 2299189 - RNA, 19 nt, Artificial Sequence
  Description of Artificial Sequence: Synthetic oligonucleotide
uguuaacaauguaauuuua

SEQ ID NO: 2299190 - RNA, 19 nt, Artificial Sequence
  Description of Artificial Sequence: Synthetic oligonucleotide
acgcucaaaaguuuucaug

SEQ ID NO: 2299191 - RNA, 19 nt, Artificial Sequence
  Description of Artificial Sequence: Synthetic oligonucleotide
accauuguuaacaauguaa

SEQ ID NO: 2299192 - RNA, 19 nt, Artificial Sequence
  Description of Artificial Sequence: Synthetic oligonucleotide
auaguaauccccagacuuc

SEQ ID NO: 2299193 - RNA, 19 nt, Artificial Sequence
  Description of Artificial Sequence: Synthetic oligonucleotide
uuacuuuaggaaccuccga

SEQ ID NO: 2299194 - RNA, 19 nt, Artificial Sequence
  Description of Artificial Sequence: Synthetic oligonucleotide
uccaggauucauuggagaa

SEQ ID NO: 2299195 - RNA, 19 nt, Artificial Sequence
  Description of Artificial Sequence: Synthetic oligonucleotide
auguucuauuaucagaguu

SEQ ID NO: 2299196 - RNA, 19 nt, Artificial Sequence
  Description of Artificial Sequence: Synthetic oligonucleotide
cuuuccaauaaagucgcac

SEQ ID NO: 2299197 - RNA, 19 nt, Artificial Sequence
  Description of Artificial Sequence: Synthetic oligonucleotide
agacuugggucaaacauag

SEQ ID NO: 2299198 - RNA, 19 nt, Artificial Sequence
  Description of Artificial Sequence: Synthetic oligonucleotide
ccuuuauuaagccuuggag

SEQ ID NO: 2299199 - RNA, 19 nt, Artificial Sequence
  Description of Artificial Sequence: Synthetic oligonucleotide
ucauccccuuuauuaagcc

SEQ ID NO: 2299200 - RNA, 19 nt, Artificial Sequence
  Description of Artificial Sequence: Synthetic oligonucleotide
gucggcaguacagagaggc

SEQ ID NO: 2299201 - RNA, 19 nt, Artificial Sequence
  Description of Artificial Sequence: Synthetic oligonucleotide
ucaaacauaggcguuucau

SEQ ID NO: 2299202 - RNA, 19 nt, Artificial Sequence
  Description of Artificial Sequence: Synthetic oligonucleotide
aaagcuuuuacuacccaua

SEQ ID NO: 2299203 - RNA, 19 nt, Artificial Sequence
  Description of Artificial Sequence: Synthetic oligonucleotide
gaaaauguggcuguauucu

SEQ ID NO: 2299204 - RNA, 19 nt, Artificial Sequence
  Description of Artificial Sequence: Synthetic oligonucleotide
caacaguuugccgagcugc

SEQ ID NO: 2299205 - RNA, 19 nt, Artificial Sequence
  Description of Artificial Sequence: Synthetic oligonucleotide
gugagaguugauaacaaca

SEQ ID NO: 2299206 - RNA, 19 nt, Artificial Sequence
  Description of Artificial Sequence: Synthetic oligonucleotide
acuacccauacucuugccu

SEQ ID NO: 2299207 - RNA, 19 nt, Artificial Sequence
  Description of Artificial Sequence: Synthetic oligonucleotide
aagcagacuugggucaaac

SEQ ID NO: 2299208 - RNA, 19 nt, Artificial Sequence
  Description of Artificial Sequence: Synthetic oligonucleotide
cuguauucugacuccaguc

SEQ ID NO: 2299209 - RNA, 19 nt, Artificial Sequence
  Description of Artificial Sequence: Synthetic oligonucleotide
cuucuugcuuagcaaagug

SEQ ID NO: 2299210 - RNA, 19 nt, Artificial Sequence
  Description of Artificial Sequence: Synthetic oligonucleotide
uaucagaguugcuguagca

SEQ ID NO: 2299211 - RNA, 19 nt, Artificial Sequence
  Description of Artificial Sequence: Synthetic oligonucleotide
uucagacacuguauagcca

SEQ ID NO: 2299212 - RNA, 19 nt, Artificial Sequence
  Description of Artificial Sequence: Synthetic oligonucleotide
agacgcgucagucucccag

SEQ ID NO: 2299213 - RNA, 19 nt, Artificial Sequence
  Description of Artificial Sequence: Synthetic oligonucleotide
acacuguauagccaaacuu

SEQ ID NO: 2299214 - RNA, 19 nt, Artificial Sequence
  Description of Artificial Sequence: Synthetic oligonucleotide
ucauacgcucaaaaguuuu

SEQ ID NO: 2299215 - RNA, 19 nt, Artificial Sequence
  Description of Artificial Sequence: Synthetic oligonucleotide
aaauguggcuguauucuga

SEQ ID NO: 2299216 - RNA, 19 nt, Artificial Sequence
  Description of Artificial Sequence: Synthetic oligonucleotide
cugugacauaguaaucccc

SEQ ID NO: 2299217 - RNA, 19 nt, Artificial Sequence
  Description of Artificial Sequence: Synthetic oligonucleotide
acaguuaagcuucuugcuu

SEQ ID NO: 2299218 - RNA, 19 nt, Artificial Sequence
  Description of Artificial Sequence: Synthetic oligonucleotide
aaccuuuauucaagucggc

SEQ ID NO: 2299219 - RNA, 19 nt, Artificial Sequence
  Description of Artificial Sequence: Synthetic oligonucleotide
acuaacaaccacgucuucu

SEQ ID NO: 2299220 - RNA, 19 nt, Artificial Sequence
  Description of Artificial Sequence: Synthetic oligonucleotide
gaggccucaaaaccaggcc

SEQ ID NO: 2299221 - RNA, 19 nt, Artificial Sequence
  Description of Artificial Sequence: Synthetic oligonucleotide
agauucaaguugaaaauau

SEQ ID NO: 2299222 - RNA, 19 nt, Artificial Sequence
  Description of Artificial Sequence: Synthetic oligonucleotide
ucugucaacugacccagua

SEQ ID NO: 2299223 - RNA, 19 nt, Artificial Sequence
  Description of Artificial Sequence: Synthetic oligonucleotide
ugcaaucaucacuaacaac

SEQ ID NO: 2299224 - RNA, 19 nt, Artificial Sequence
  Description of Artificial Sequence: Synthetic oligonucleotide
aggaaccuccgacacaugu

SEQ ID NO: 2299225 - RNA, 19 nt, Artificial Sequence
  Description of Artificial Sequence: Synthetic oligonucleotide
uagcaacaauuucuccuag

SEQ ID NO: 2299226 - RNA, 19 nt, Artificial Sequence
  Description of Artificial Sequence: Synthetic oligonucleotide
uuagcacaugaguggauaa

SEQ ID NO: 2299227 - RNA, 19 nt, Artificial Sequence
  Description of Artificial Sequence: Synthetic oligonucleotide
gaaccuccgacacauguaa

SEQ ID NO: 2299228 - RNA, 19 nt, Artificial Sequence
  Description of Artificial Sequence: Synthetic oligonucleotide
cuaccaagaaaugaagaca

SEQ ID NO: 2299229 - RNA, 19 nt, Artificial Sequence
  Description of Artificial Sequence: Synthetic oligonucleotide
uauuaucagaguugcugua

SEQ ID NO: 2299230 - RNA, 19 nt, Artificial Sequence
  Description of Artificial Sequence: Synthetic oligonucleotide
ucuugccuaccaagaaaug

SEQ ID NO: 2299231 - RNA, 19 nt, Artificial Sequence
  Description of Artificial Sequence: Synthetic oligonucleotide
auugucuuggugguugucu

SEQ ID NO: 2299232 - RNA, 19 nt, Artificial Sequence
  Description of Artificial Sequence: Synthetic oligonucleotide
uggagcauucauugucuug

SEQ ID NO: 2299233 - RNA, 19 nt, Artificial Sequence
  Description of Artificial Sequence: Synthetic oligonucleotide
ucaucagguuucaucuuuc

SEQ ID NO: 2299234 - RNA, 19 nt, Artificial Sequence
  Description of Artificial Sequence: Synthetic oligonucleotide
aggccucaaaaccaggccu

SEQ ID NO: 2299235 - RNA, 19 nt, Artificial Sequence
  Description of Artificial Sequence: Synthetic oligonucleotide
cuguauagccaaacuuuug

SEQ ID NO: 2299236 - RNA, 19 nt, Artificial Sequence
  Description of Artificial Sequence: Synthetic oligonucleotide
caucagguuucaucuuucc

SEQ ID NO: 2299237 - RNA, 19 nt, Artificial Sequence
  Description of Artificial Sequence: Synthetic oligonucleotide
uucaagucggcaguacaga

SEQ ID NO: 2299238 - RNA, 19 nt, Artificial Sequence
  Description of Artificial Sequence: Synthetic oligonucleotide
aaccauuguuaacaaugua

SEQ ID NO: 2299239 - RNA, 19 nt, Artificial Sequence
  Description of Artificial Sequence: Synthetic oligonucleotide
caaugcaagaaaagauuca

SEQ ID NO: 2299240 - RNA, 19 nt, Artificial Sequence
  Description of Artificial Sequence: Synthetic oligonucleotide
cauacgcucaaaaguuuuc

SEQ ID NO: 2299241 - RNA, 19 nt, Artificial Sequence
  Description of Artificial Sequence: Synthetic oligonucleotide
uucauacgcucaaaaguuu

SEQ ID NO: 2299242 - RNA, 19 nt, Artificial Sequence
  Description of Artificial Sequence: Synthetic oligonucleotide
uaguaccauuauaaucaca

SEQ ID NO: 2299243 - RNA, 19 nt, Artificial Sequence
  Description of Artificial Sequence: Synthetic oligonucleotide
ucccucucuuagcacauga

SEQ ID NO: 2299244 - RNA, 19 nt, Artificial Sequence
  Description of Artificial Sequence: Synthetic oligonucleotide
caggacaaugaucagagua

SEQ ID NO: 2299245 - RNA, 19 nt, Artificial Sequence
  Description of Artificial Sequence: Synthetic oligonucleotide
aggcguuucaucagguuuc

SEQ ID NO: 2299246 - RNA, 19 nt, Artificial Sequence
  Description of Artificial Sequence: Synthetic oligonucleotide
uaacaaccacgucuucuac

SEQ ID NO: 2299247 - RNA, 19 nt, Artificial Sequence
  Description of Artificial Sequence: Synthetic oligonucleotide
acaauuucuccuaggguca

SEQ ID NO: 2299248 - RNA, 19 nt, Artificial Sequence
  Description of Artificial Sequence: Synthetic oligonucleotide
uccuagggucacaucuucc

SEQ ID NO: 2299249 - RNA, 19 nt, Artificial Sequence
  Description of Artificial Sequence: Synthetic oligonucleotide
aggacaaugaucagaguaa

SEQ ID NO: 2299250 - RNA, 19 nt, Artificial Sequence
  Description of Artificial Sequence: Synthetic oligonucleotide
auggaaugcaaaagauuag

SEQ ID NO: 2299251 - RNA, 19 nt, Artificial Sequence
  Description of Artificial Sequence: Synthetic oligonucleotide
aacuuuugguagaagccaa

SEQ ID NO: 2299252 - RNA, 19 nt, Artificial Sequence
  Description of Artificial Sequence: Synthetic oligonucleotide
gacuccaguccacuucuug

SEQ ID NO: 2299253 - RNA, 19 nt, Artificial Sequence
  Description of Artificial Sequence: Synthetic oligonucleotide
uccccuuuauuaagccuug

SEQ ID NO: 2299254 - RNA, 19 nt, Artificial Sequence
  Description of Artificial Sequence: Synthetic oligonucleotide
gcaaagugagaguugauaa

SEQ ID NO: 2299255 - RNA, 19 nt, Artificial Sequence
  Description of Artificial Sequence: Synthetic oligonucleotide
guaauccccagacuucuuc

SEQ ID NO: 2299256 - RNA, 19 nt, Artificial Sequence
  Description of Artificial Sequence: Synthetic oligonucleotide
ugcaaaagauuagaaccau

SEQ ID NO: 2299257 - RNA, 19 nt, Artificial Sequence
  Description of Artificial Sequence: Synthetic oligonucleotide
gaguaauaguaccauuaua

SEQ ID NO: 2299258 - RNA, 19 nt, Artificial Sequence
  Description of Artificial Sequence: Synthetic oligonucleotide
gaguggauaaauuuauguu

SEQ ID NO: 2299259 - RNA, 19 nt, Artificial Sequence
  Description of Artificial Sequence: Synthetic oligonucleotide
accagucucugucaacuga

SEQ ID NO: 2299260 - RNA, 19 nt, Artificial Sequence
  Description of Artificial Sequence: Synthetic oligonucleotide
uauauuccuuugguuaaaa

SEQ ID NO: 2299261 - RNA, 19 nt, Artificial Sequence
  Description of Artificial Sequence: Synthetic oligonucleotide
cuauuaucagaguugcugu

SEQ ID NO: 2299262 - RNA, 19 nt, Artificial Sequence
  Description of Artificial Sequence: Synthetic oligonucleotide
cuugccuaccaagaaauga

SEQ ID NO: 2299263 - RNA, 19 nt, Artificial Sequence
  Description of Artificial Sequence: Synthetic oligonucleotide
cuguagcaacaauuucucc

SEQ ID NO: 2299264 - RNA, 19 nt, Artificial Sequence
  Description of Artificial Sequence: Synthetic oligonucleotide
auacgcucaaaaguuuuca

SEQ ID NO: 2299265 - RNA, 19 nt, Artificial Sequence
  Description of Artificial Sequence: Synthetic oligonucleotide
acaacaguuugccgagcug

SEQ ID NO: 2299266 - RNA, 19 nt, Artificial Sequence
  Description of Artificial Sequence: Synthetic oligonucleotide
uuuauucaagucggcagua

SEQ ID NO: 2299267 - RNA, 19 nt, Artificial Sequence
  Description of Artificial Sequence: Synthetic oligonucleotide
cugucaacugacccaguac

SEQ ID NO: 2299268 - RNA, 19 nt, Artificial Sequence
  Description of Artificial Sequence: Synthetic oligonucleotide
cuaacaaccacgucuucua

SEQ ID NO: 2299269 - RNA, 19 nt, Artificial Sequence
  Description of Artificial Sequence: Synthetic oligonucleotide
uucuauuaucagaguugcu

SEQ ID NO: 2299270 - RNA, 19 nt, Artificial Sequence
  Description of Artificial Sequence: Synthetic oligonucleotide
cucugcaaucaucacuaac

SEQ ID NO: 2299271 - RNA, 19 nt, Artificial Sequence
  Description of Artificial Sequence: Synthetic oligonucleotide
uacgcucaaaaguuuucau

SEQ ID NO: 2299272 - RNA, 19 nt, Artificial Sequence
  Description of Artificial Sequence: Synthetic oligonucleotide
agagaggccucaaaaccag

SEQ ID NO: 2299273 - RNA, 19 nt, Artificial Sequence
  Description of Artificial Sequence: Synthetic oligonucleotide
agcuuuuacuacccauacu

SEQ ID NO: 2299274 - RNA, 19 nt, Artificial Sequence
  Description of Artificial Sequence: Synthetic oligonucleotide
auugaauagaaaagcuuuu

SEQ ID NO: 2299275 - RNA, 19 nt, Artificial Sequence
  Description of Artificial Sequence: Synthetic oligonucleotide
agggucacaucuuccacaa

SEQ ID NO: 2299276 - RNA, 19 nt, Artificial Sequence
  Description of Artificial Sequence: Synthetic oligonucleotide
accuuuauucaagucggca

SEQ ID NO: 2299277 - RNA, 19 nt, Artificial Sequence
  Description of Artificial Sequence: Synthetic oligonucleotide
cuucauacgcucaaaaguu

SEQ ID NO: 2299278 - RNA, 19 nt, Artificial Sequence
  Description of Artificial Sequence: Synthetic oligonucleotide
gugguagacauucaagggu

SEQ ID NO: 2299279 - RNA, 19 nt, Artificial Sequence
  Description of Artificial Sequence: Synthetic oligonucleotide
uauuaagccuuggagcauu

SEQ ID NO: 2299280 - RNA, 19 nt, Artificial Sequence
  Description of Artificial Sequence: Synthetic oligonucleotide
ugguagaagccaacguuuu

SEQ ID NO: 2299281 - RNA, 19 nt, Artificial Sequence
  Description of Artificial Sequence: Synthetic oligonucleotide
gacgcgucagucucccagc

SEQ ID NO: 2299282 - RNA, 19 nt, Artificial Sequence
  Description of Artificial Sequence: Synthetic oligonucleotide
aagugagaguugauaacaa

SEQ ID NO: 2299283 - RNA, 19 nt, Artificial Sequence
  Description of Artificial Sequence: Synthetic oligonucleotide
acucucccucucuuagcac

SEQ ID NO: 2299284 - RNA, 19 nt, Artificial Sequence
  Description of Artificial Sequence: Synthetic oligonucleotide
aagccaacguuuuguggua

SEQ ID NO: 2299285 - RNA, 19 nt, Artificial Sequence
  Description of Artificial Sequence: Synthetic oligonucleotide
cuuuauucaagucggcagu

SEQ ID NO: 2299286 - RNA, 19 nt, Artificial Sequence
  Description of Artificial Sequence: Synthetic oligonucleotide
cauuauaaucacauugaau

SEQ ID NO: 2299287 - RNA, 19 nt, Artificial Sequence
  Description of Artificial Sequence: Synthetic oligonucleotide
gguugucuuuacuuuagga

SEQ ID NO: 2299288 - RNA, 19 nt, Artificial Sequence
  Description of Artificial Sequence: Synthetic oligonucleotide
cuacucucccucucuuagc

SEQ ID NO: 2299289 - RNA, 19 nt, Artificial Sequence
  Description of Artificial Sequence: Synthetic oligonucleotide
aaagucgcaccggagcgau

SEQ ID NO: 2299290 - RNA, 19 nt, Artificial Sequence
  Description of Artificial Sequence: Synthetic oligonucleotide
caguuugccgagcugcuuc

SEQ ID NO: 2299291 - RNA, 19 nt, Artificial Sequence
  Description of Artificial Sequence: Synthetic oligonucleotide
gauucaaguugaaaauaua

SEQ ID NO: 2299292 - RNA, 19 nt, Artificial Sequence
  Description of Artificial Sequence: Synthetic oligonucleotide
uacccauacucuugccuac

SEQ ID NO: 2299293 - RNA, 19 nt, Artificial Sequence
  Description of Artificial Sequence: Synthetic oligonucleotide
auacucuugccuaccaaga

SEQ ID NO: 2299294 - RNA, 19 nt, Artificial Sequence
  Description of Artificial Sequence: Synthetic oligonucleotide
cuugcuuagcaaagugaga

SEQ ID NO: 2299295 - RNA, 19 nt, Artificial Sequence
  Description of Artificial Sequence: Synthetic oligonucleotide
uagaaccauuguuaacaau

SEQ ID NO: 2299296 - RNA, 19 nt, Artificial Sequence
  Description of Artificial Sequence: Synthetic oligonucleotide
acccauacucuugccuacc

SEQ ID NO: 2299297 - RNA, 19 nt, Artificial Sequence
  Description of Artificial Sequence: Synthetic oligonucleotide
accuccgacacauguaauu

SEQ ID NO: 2299298 - RNA, 19 nt, Artificial Sequence
  Description of Artificial Sequence: Synthetic oligonucleotide
gagaaaauguggcuguauu

SEQ ID NO: 2299299 - RNA, 19 nt, Artificial Sequence
  Description of Artificial Sequence: Synthetic oligonucleotide
uuguaacaguuaagcuucu

SEQ ID NO: 2299300 - RNA, 19 nt, Artificial Sequence
  Description of Artificial Sequence: Synthetic oligonucleotide
uaaagucgcaccggagcga

SEQ ID NO: 2299301 - RNA, 19 nt, Artificial Sequence
  Description of Artificial Sequence: Synthetic oligonucleotide
ucuuuccaauaaagucgca

SEQ ID NO: 2299302 - RNA, 19 nt, Artificial Sequence
  Description of Artificial Sequence: Synthetic oligonucleotide
gaaccauuguuaacaaugu

SEQ ID NO: 2299303 - RNA, 19 nt, Artificial Sequence
  Description of Artificial Sequence: Synthetic oligonucleotide
guaguaacauggaaugcaa

SEQ ID NO: 2299304 - RNA, 19 nt, Artificial Sequence
  Description of Artificial Sequence: Synthetic oligonucleotide
ccaguccacuucuugaagc

SEQ ID NO: 2299305 - RNA, 19 nt, Artificial Sequence
  Description of Artificial Sequence: Synthetic oligonucleotide
caguuaagcuucuugcuua

SEQ ID NO: 2299306 - RNA, 19 nt, Artificial Sequence
  Description of Artificial Sequence: Synthetic oligonucleotide
uccacgcucuccugcagac

SEQ ID NO: 2299307 - RNA, 19 nt, Artificial Sequence
  Description of Artificial Sequence: Synthetic oligonucleotide
uuauuaagccuuggagcau

SEQ ID NO: 2299308 - RNA, 19 nt, Artificial Sequence
  Description of Artificial Sequence: Synthetic oligonucleotide
cuacccauacucuugccua

SEQ ID NO: 2299309 - RNA, 19 nt, Artificial Sequence
  Description of Artificial Sequence: Synthetic oligonucleotide
ugcagacgcgucagucucc

SEQ ID NO: 2299310 - RNA, 19 nt, Artificial Sequence
  Description of Artificial Sequence: Synthetic oligonucleotide
cucucccucucuuagcaca

SEQ ID NO: 2299311 - RNA, 19 nt, Artificial Sequence
  Description of Artificial Sequence: Synthetic oligonucleotide
acauggaaugcaaaagauu

SEQ ID NO: 2299312 - RNA, 19 nt, Artificial Sequence
  Description of Artificial Sequence: Synthetic oligonucleotide
cacuguauagccaaacuuu

SEQ ID NO: 2299313 - RNA, 19 nt, Artificial Sequence
  Description of Artificial Sequence: Synthetic oligonucleotide
caagggugauuuuguaaca

SEQ ID NO: 2299314 - RNA, 19 nt, Artificial Sequence
  Description of Artificial Sequence: Synthetic oligonucleotide
auccccuuuauuaagccuu

SEQ ID NO: 2299315 - RNA, 19 nt, Artificial Sequence
  Description of Artificial Sequence: Synthetic oligonucleotide
cugcagacgcgucagucuc

SEQ ID NO: 2299316 - RNA, 19 nt, Artificial Sequence
  Description of Artificial Sequence: Synthetic oligonucleotide
aauuucuccuagggucaca

SEQ ID NO: 2299317 - RNA, 19 nt, Artificial Sequence
  Description of Artificial Sequence: Synthetic oligonucleotide
cagacuugggucaaacaua

SEQ ID NO: 2299318 - RNA, 19 nt, Artificial Sequence
  Description of Artificial Sequence: Synthetic oligonucleotide
auuaagccuuggagcauuc

SEQ ID NO: 2299319 - RNA, 19 nt, Artificial Sequence
  Description of Artificial Sequence: Synthetic oligonucleotide
cuuggagcauucauugucu

SEQ ID NO: 2299320 - RNA, 19 nt, Artificial Sequence
  Description of Artificial Sequence: Synthetic oligonucleotide
cauucauugucuugguggu

SEQ ID NO: 2299321 - RNA, 19 nt, Artificial Sequence
  Description of Artificial Sequence: Synthetic oligonucleotide
acgcgucagucucccagcg

SEQ ID NO: 2299322 - RNA, 19 nt, Artificial Sequence
  Description of Artificial Sequence: Synthetic oligonucleotide
cagaguugcuguagcaaca

SEQ ID NO: 2299323 - RNA, 19 nt, Artificial Sequence
  Description of Artificial Sequence: Synthetic oligonucleotide
caaugaucagaguaauagu

SEQ ID NO: 2299324 - RNA, 19 nt, Artificial Sequence
  Description of Artificial Sequence: Synthetic oligonucleotide
ucucccucucuuagcacau

SEQ ID NO: 2299325 - RNA, 19 nt, Artificial Sequence
  Description of Artificial Sequence: Synthetic oligonucleotide
caagucggcaguacagaga

SEQ ID NO: 2299326 - RNA, 19 nt, Artificial Sequence
  Description of Artificial Sequence: Synthetic oligonucleotide
ugggucaaacauaggcguu

SEQ ID NO: 2299327 - RNA, 19 nt, Artificial Sequence
  Description of Artificial Sequence: Synthetic oligonucleotide
cugcaaucaucacuaacaa

SEQ ID NO: 2299328 - RNA, 19 nt, Artificial Sequence
  Description of Artificial Sequence: Synthetic oligonucleotide
cuuuuacuacccauacucu

SEQ ID NO: 2299329 - RNA, 19 nt, Artificial Sequence
  Description of Artificial Sequence: Synthetic oligonucleotide
cacaugaguggauaaauuu

SEQ ID NO: 2299330 - RNA, 19 nt, Artificial Sequence
  Description of Artificial Sequence: Synthetic oligonucleotide
auauauuccuuugguuaaa

SEQ ID NO: 2299331 - RNA, 19 nt, Artificial Sequence
  Description of Artificial Sequence: Synthetic oligonucleotide
uuaagccuuggagcauuca

SEQ ID NO: 2299332 - RNA, 19 nt, Artificial Sequence
  Description of Artificial Sequence: Synthetic oligonucleotide
uagcacaugaguggauaaa

SEQ ID NO: 2299333 - RNA, 19 nt, Artificial Sequence
  Description of Artificial Sequence: Synthetic oligonucleotide
uucuacucucccucucuua

SEQ ID NO: 2299334 - RNA, 19 nt, Artificial Sequence
  Description of Artificial Sequence: Synthetic oligonucleotide
agaguugcuguagcaacaa

SEQ ID NO: 2299335 - RNA, 19 nt, Artificial Sequence
  Description of Artificial Sequence: Synthetic oligonucleotide
cguuucaucagguuucauc

SEQ ID NO: 2299336 - RNA, 19 nt, Artificial Sequence
  Description of Artificial Sequence: Synthetic oligonucleotide
gaguugauaacaacaguuu

SEQ ID NO: 2299337 - RNA, 19 nt, Artificial Sequence
  Description of Artificial Sequence: Synthetic oligonucleotide
uaacaacaguuugccgagc

SEQ ID NO: 2299338 - RNA, 19 nt, Artificial Sequence
  Description of Artificial Sequence: Synthetic oligonucleotide
cucuugccuaccaagaaau

SEQ ID NO: 2299339 - RNA, 19 nt, Artificial Sequence
  Description of Artificial Sequence: Synthetic oligonucleotide
gcuguagcaacaauuucuc

SEQ ID NO: 2299340 - RNA, 19 nt, Artificial Sequence
  Description of Artificial Sequence: Synthetic oligonucleotide
cuccaggauucauuggaga

SEQ ID NO: 2299341 - RNA, 19 nt, Artificial Sequence
  Description of Artificial Sequence: Synthetic oligonucleotide
cuuagcacaugaguggaua

SEQ ID NO: 2299342 - RNA, 19 nt, Artificial Sequence
  Description of Artificial Sequence: Synthetic oligonucleotide
aacugacccaguaccuuaa

SEQ ID NO: 2299343 - RNA, 19 nt, Artificial Sequence
  Description of Artificial Sequence: Synthetic oligonucleotide
auccacgcucuccugcaga

SEQ ID NO: 2299344 - RNA, 19 nt, Artificial Sequence
  Description of Artificial Sequence: Synthetic oligonucleotide
uuggagcauucauugucuu

SEQ ID NO: 2299345 - RNA, 19 nt, Artificial Sequence
  Description of Artificial Sequence: Synthetic oligonucleotide
ggaaugcaaaagauuagaa

SEQ ID NO: 2299346 - RNA, 19 nt, Artificial Sequence
  Description of Artificial Sequence: Synthetic oligonucleotide
guuaagcuucuugcuuagc

SEQ ID NO: 2299347 - RNA, 19 nt, Artificial Sequence
  Description of Artificial Sequence: Synthetic oligonucleotide
uugccgagcugcuucccuc

SEQ ID NO: 2299348 - RNA, 19 nt, Artificial Sequence
  Description of Artificial Sequence: Synthetic oligonucleotide
gcagacuugggucaaacau

SEQ ID NO: 2299349 - RNA, 19 nt, Artificial Sequence
  Description of Artificial Sequence: Synthetic oligonucleotide
agaaaagauucaaguugaa

SEQ ID NO: 2299350 - RNA, 19 nt, Artificial Sequence
  Description of Artificial Sequence: Synthetic oligonucleotide
ggugguugucuuuacuuua

SEQ ID NO: 2299351 - RNA, 19 nt, Artificial Sequence
  Description of Artificial Sequence: Synthetic oligonucleotide
caauuucuccuagggucac

SEQ ID NO: 2299352 - RNA, 19 nt, Artificial Sequence
  Description of Artificial Sequence: Synthetic oligonucleotide
gucaaacauaggcguuuca

SEQ ID NO: 2299353 - RNA, 19 nt, Artificial Sequence
  Description of Artificial Sequence: Synthetic oligonucleotide
gacaaugaucagaguaaua

SEQ ID NO: 2299354 - RNA, 19 nt, Artificial Sequence
  Description of Artificial Sequence: Synthetic oligonucleotide
gaacugcucggggcugacg

SEQ ID NO: 2299355 - RNA, 19 nt, Artificial Sequence
  Description of Artificial Sequence: Synthetic oligonucleotide
caacguuuugugguagaca

SEQ ID NO: 2299356 - RNA, 19 nt, Artificial Sequence
  Description of Artificial Sequence: Synthetic oligonucleotide
caacugacccaguaccuua

SEQ ID NO: 2299357 - RNA, 19 nt, Artificial Sequence
  Description of Artificial Sequence: Synthetic oligonucleotide
ccaauaaagucgcaccgga

SEQ ID NO: 2299358 - RNA, 19 nt, Artificial Sequence
  Description of Artificial Sequence: Synthetic oligonucleotide
ggugauuuuguaacaguua

SEQ ID NO: 2299359 - RNA, 19 nt, Artificial Sequence
  Description of Artificial Sequence: Synthetic oligonucleotide
cauuggagaaauggcugga

SEQ ID NO: 2299360 - RNA, 19 nt, Artificial Sequence
  Description of Artificial Sequence: Synthetic oligonucleotide
gucuucuacucucccucuc

SEQ ID NO: 2299361 - RNA, 19 nt, Artificial Sequence
  Description of Artificial Sequence: Synthetic oligonucleotide
uaggaaccuccgacacaug

SEQ ID NO: 2299362 - RNA, 19 nt, Artificial Sequence
  Description of Artificial Sequence: Synthetic oligonucleotide
agcgauccacgcucuccug

SEQ ID NO: 2299363 - RNA, 19 nt, Artificial Sequence
  Description of Artificial Sequence: Synthetic oligonucleotide
gagcgauccacgcucuccu

SEQ ID NO: 2299364 - RNA, 19 nt, Artificial Sequence
  Description of Artificial Sequence: Synthetic oligonucleotide
cugacccaguaccuuaaaa

SEQ ID NO: 2299365 - RNA, 19 nt, Artificial Sequence
  Description of Artificial Sequence: Synthetic oligonucleotide
ggagcgauccacgcucucc

SEQ ID NO: 2299366 - RNA, 19 nt, Artificial Sequence
  Description of Artificial Sequence: Synthetic oligonucleotide
gcucaaaaguuuucaugaa

SEQ ID NO: 2299367 - RNA, 19 nt, Artificial Sequence
  Description of Artificial Sequence: Synthetic oligonucleotide
guuuugugguagacauuca

SEQ ID NO: 2299368 - RNA, 19 nt, Artificial Sequence
  Description of Artificial Sequence: Synthetic oligonucleotide
cagguuucaucuuuccaau

SEQ ID NO: 2299369 - RNA, 19 nt, Artificial Sequence
  Description of Artificial Sequence: Synthetic oligonucleotide
gcgauccacgcucuccugc

SEQ ID NO: 2299370 - RNA, 19 nt, Artificial Sequence
  Description of Artificial Sequence: Synthetic oligonucleotide
cucggggcugacgacacca

SEQ ID NO: 2299371 - RNA, 19 nt, Artificial Sequence
  Description of Artificial Sequence: Synthetic oligonucleotide
cauaggcguuucaucaggu

SEQ ID NO: 2299372 - RNA, 19 nt, Artificial Sequence
  Description of Artificial Sequence: Synthetic oligonucleotide
gccuaccaagaaaugaaga

SEQ ID NO: 2299373 - RNA, 19 nt, Artificial Sequence
  Description of Artificial Sequence: Synthetic oligonucleotide
cacuaacaaccacgucuuc

SEQ ID NO: 2299374 - RNA, 19 nt, Artificial Sequence
  Description of Artificial Sequence: Synthetic oligonucleotide
cauccccuuuauuaagccu

SEQ ID NO: 2299375 - RNA, 19 nt, Artificial Sequence
  Description of Artificial Sequence: Synthetic oligonucleotide
cuuggugguugucuuuacu

SEQ ID NO: 2299376 - RNA, 19 nt, Artificial Sequence
  Description of Artificial Sequence: Synthetic oligonucleotide
aaccuccgacacauguaau

SEQ ID NO: 2299377 - RNA, 19 nt, Artificial Sequence
  Description of Artificial Sequence: Synthetic oligonucleotide
cccucucuuagcacaugag

SEQ ID NO: 2299378 - RNA, 19 nt, Artificial Sequence
  Description of Artificial Sequence: Synthetic oligonucleotide
cauugucuuggugguuguc

SEQ ID NO: 2299379 - RNA, 19 nt, Artificial Sequence
  Description of Artificial Sequence: Synthetic oligonucleotide
ggucaaacauaggcguuuc

SEQ ID NO: 2299380 - RNA, 19 nt, Artificial Sequence
  Description of Artificial Sequence: Synthetic oligonucleotide
ccaacguuuugugguagac

SEQ ID NO: 2299381 - RNA, 19 nt, Artificial Sequence
  Description of Artificial Sequence: Synthetic oligonucleotide
guuugccgagcugcuuccc

SEQ ID NO: 2299382 - RNA, 19 nt, Artificial Sequence
  Description of Artificial Sequence: Synthetic oligonucleotide
ggggcugacgacaccaguc

SEQ ID NO: 2299383 - RNA, 19 nt, Artificial Sequence
  Description of Artificial Sequence: Synthetic oligonucleotide
gucaacugacccaguaccu

SEQ ID NO: 2299384 - RNA, 19 nt, Artificial Sequence
  Description of Artificial Sequence: Synthetic oligonucleotide
cccuuuauuaagccuugga

SEQ ID NO: 2299385 - RNA, 19 nt, Artificial Sequence
  Description of Artificial Sequence: Synthetic oligonucleotide
aagucgcaccggagcgauc

SEQ ID NO: 2299386 - RNA, 19 nt, Artificial Sequence
  Description of Artificial Sequence: Synthetic oligonucleotide
agucggcaguacagagagg

SEQ ID NO: 2299387 - RNA, 19 nt, Artificial Sequence
  Description of Artificial Sequence: Synthetic oligonucleotide
ggcaguacagagaggccuc

SEQ ID NO: 2299388 - RNA, 19 nt, Artificial Sequence
  Description of Artificial Sequence: Synthetic oligonucleotide
ugacuccaguccacuucuu

SEQ ID NO: 2299389 - RNA, 19 nt, Artificial Sequence
  Description of Artificial Sequence: Synthetic oligonucleotide
ucgcaccggagcgauccac

SEQ ID NO: 2299390 - RNA, 19 nt, Artificial Sequence
  Description of Artificial Sequence: Synthetic oligonucleotide
gcaccggagcgauccacgc

SEQ ID NO: 2299391 - RNA, 19 nt, Artificial Sequence
  Description of Artificial Sequence: Synthetic oligonucleotide
gguagacauucaaggguga

SEQ ID NO: 2299392 - RNA, 19 nt, Artificial Sequence
  Description of Artificial Sequence: Synthetic oligonucleotide
cagacacuguauagccaaa

SEQ ID NO: 2299393 - RNA, 19 nt, Artificial Sequence
  Description of Artificial Sequence: Synthetic oligonucleotide
cacgucuucuacucucccu

SEQ ID NO: 2299394 - RNA, 19 nt, Artificial Sequence
  Description of Artificial Sequence: Synthetic oligonucleotide
gcagacgcgucagucuccc

SEQ ID NO: 2299395 - RNA, 19 nt, Artificial Sequence
  Description of Artificial Sequence: Synthetic oligonucleotide
ggcuggagaaaauguggcu

SEQ ID NO: 2299396 - RNA, 19 nt, Artificial Sequence
  Description of Artificial Sequence: Synthetic oligonucleotide
acgcucuccugcagacgcg

SEQ ID NO: 2299397 - RNA, 19 nt, Artificial Sequence
  Description of Artificial Sequence: Synthetic oligonucleotide
gaagcagacuugggucaaa

SEQ ID NO: 2299398 - RNA, 19 nt, Artificial Sequence
  Description of Artificial Sequence: Synthetic oligonucleotide
gacauucaagggugauuuu

SEQ ID NO: 2299399 - RNA, 19 nt, Artificial Sequence
  Description of Artificial Sequence: Synthetic oligonucleotide
aguaauccccagacuucuu

SEQ ID NO: 2299400 - RNA, 19 nt, Artificial Sequence
  Description of Artificial Sequence: Synthetic oligonucleotide
cugcucggggcugacgaca

SEQ ID NO: 2299401 - RNA, 19 nt, Artificial Sequence
  Description of Artificial Sequence: Synthetic oligonucleotide
cgcaccggagcgauccacg

SEQ ID NO: 2299402 - RNA, 19 nt, Artificial Sequence
  Description of Artificial Sequence: Synthetic oligonucleotide
ccucucuuagcacaugagu

SEQ ID NO: 2299403 - RNA, 19 nt, Artificial Sequence
  Description of Artificial Sequence: Synthetic oligonucleotide
gccaacguuuugugguaga

SEQ ID NO: 2299404 - RNA, 19 nt, Artificial Sequence
  Description of Artificial Sequence: Synthetic oligonucleotide
ccacgucuucuacucuccc

SEQ ID NO: 2299405 - RNA, 19 nt, Artificial Sequence
  Description of Artificial Sequence: Synthetic oligonucleotide
ggaaccuccgacacaugua

SEQ ID NO: 2299406 - RNA, 19 nt, Artificial Sequence
  Description of Artificial Sequence: Synthetic oligonucleotide
gggcugacgacaccagucu

SEQ ID NO: 2299407 - RNA, 19 nt, Artificial Sequence
  Description of Artificial Sequence: Synthetic oligonucleotide
cucccucucuuagcacaug

SEQ ID NO: 2299408 - RNA, 19 nt, Artificial Sequence
  Description of Artificial Sequence: Synthetic oligonucleotide
ggacaaugaucagaguaau

SEQ ID NO: 2299409 - RNA, 19 nt, Artificial Sequence
  Description of Artificial Sequence: Synthetic oligonucleotide
cuccgacacauguaauuuu

SEQ ID NO: 2299410 - RNA, 19 nt, Artificial Sequence
  Description of Artificial Sequence: Synthetic oligonucleotide
ggcguuucaucagguuuca

SEQ ID NO: 2299411 - RNA, 19 nt, Artificial Sequence
  Description of Artificial Sequence: Synthetic oligonucleotide
acguuuugugguagacauu

SEQ ID NO: 2299412 - RNA, 19 nt, Artificial Sequence
  Description of Artificial Sequence: Synthetic oligonucleotide
ccgagcugcuucccucugc

SEQ ID NO: 2299413 - RNA, 19 nt, Artificial Sequence
  Description of Artificial Sequence: Synthetic oligonucleotide
gucgcaccggagcgaucca

SEQ ID NO: 2299414 - RNA, 19 nt, Artificial Sequence
  Description of Artificial Sequence: Synthetic oligonucleotide
caaccacgucuucuacucu

SEQ ID NO: 2299415 - RNA, 19 nt, Artificial Sequence
  Description of Artificial Sequence: Synthetic oligonucleotide
gcaguacagagaggccuca

SEQ ID NO: 2299416 - RNA, 19 nt, Artificial Sequence
  Description of Artificial Sequence: Synthetic oligonucleotide
ccauacucuugccuaccaa

SEQ ID NO: 2299417 - RNA, 19 nt, Artificial Sequence
  Description of Artificial Sequence: Synthetic oligonucleotide
gccucaaaaccaggccuuc

SEQ ID NO: 2299418 - RNA, 19 nt, Artificial Sequence
  Description of Artificial Sequence: Synthetic oligonucleotide
gcaaaagauuagaaccauu

SEQ ID NO: 2299419 - RNA, 19 nt, Artificial Sequence
  Description of Artificial Sequence: Synthetic oligonucleotide
caguacagagaggccucaa

SEQ ID NO: 2299420 - RNA, 19 nt, Artificial Sequence
  Description of Artificial Sequence: Synthetic oligonucleotide
gggucaaacauaggcguuu

SEQ ID NO: 2299421 - RNA, 19 nt, Artificial Sequence
  Description of Artificial Sequence: Synthetic oligonucleotide
ccacgcucuccugcagacg

SEQ ID NO: 2299422 - RNA, 19 nt, Artificial Sequence
  Description of Artificial Sequence: Synthetic oligonucleotide
gccgagcugcuucccucug

SEQ ID NO: 2299423 - RNA, 19 nt, Artificial Sequence
  Description of Artificial Sequence: Synthetic oligonucleotide
cgauccacgcucuccugca

SEQ ID NO: 2299424 - RNA, 19 nt, Artificial Sequence
  Description of Artificial Sequence: Synthetic oligonucleotide
ccgacacauguaauuuucu

SEQ ID NO: 2299425 - RNA, 19 nt, Artificial Sequence
  Description of Artificial Sequence: Synthetic oligonucleotide
gccuuggagcauucauugu

SEQ ID NO: 2299426 - RNA, 19 nt, Artificial Sequence
  Description of Artificial Sequence: Synthetic oligonucleotide
caccggagcgauccacgcu

SEQ ID NO: 2299427 - RNA, 19 nt, Artificial Sequence
  Description of Artificial Sequence: Synthetic oligonucleotide
gcucggggcugacgacacc

SEQ ID NO: 2299428 - RNA, 19 nt, Artificial Sequence
  Description of Artificial Sequence: Synthetic oligonucleotide
cagacgcgucagucuccca

SEQ ID NO: 2299429 - RNA, 19 nt, Artificial Sequence
  Description of Artificial Sequence: Synthetic oligonucleotide
cgacacauguaauuuucuu

SEQ ID NO: 2299430 - RNA, 19 nt, Artificial Sequence
  Description of Artificial Sequence: Synthetic oligonucleotide
ccuccgacacauguaauuu

SEQ ID NO: 2299431 - RNA, 19 nt, Artificial Sequence
  Description of Artificial Sequence: Synthetic oligonucleotide
ccucugcaaucaucacuaa

SEQ ID NO: 2299432 - RNA, 19 nt, Artificial Sequence
  Description of Artificial Sequence: Synthetic oligonucleotide
cgucuucuacucucccucu

SEQ ID NO: 2299433 - RNA, 19 nt, Artificial Sequence
  Description of Artificial Sequence: Synthetic oligonucleotide
cggagcgauccacgcucuc

SEQ ID NO: 2299434 - RNA, 19 nt, Artificial Sequence
  Description of Artificial Sequence: Synthetic oligonucleotide
ccggagcgauccacgcucu

SEQ ID NO: 2299435 - RNA, 19 nt, Artificial Sequence
  Description of Artificial Sequence: Synthetic oligonucleotide
gcguuucaucagguuucau

SEQ ID NO: 2299436 - RNA, 19 nt, Artificial Sequence
  Description of Artificial Sequence: Synthetic oligonucleotide
cggggcugacgacaccagu

SEQ ID NO: 2299437 - RNA, 19 nt, Artificial Sequence
  Description of Artificial Sequence: Synthetic oligonucleotide
cgcucuccugcagacgcgu

SEQ ID NO: 2299438 - RNA, 19 nt, Artificial Sequence
  Description of Artificial Sequence: Synthetic oligonucleotide
aaaguauugacuugugucc

SEQ ID NO: 2299439 - RNA, 19 nt, Artificial Sequence
  Description of Artificial Sequence: Synthetic oligonucleotide
acuacaugcacauugaggc

SEQ ID NO: 2299440 - RNA, 19 nt, Artificial Sequence
  Description of Artificial Sequence: Synthetic oligonucleotide
aaguuuugcuacuacaugc

SEQ ID NO: 2299441 - RNA, 19 nt, Artificial Sequence
  Description of Artificial Sequence: Synthetic oligonucleotide
uuaguuaaauuuuauauga

SEQ ID NO: 2299442 - RNA, 19 nt, Artificial Sequence
  Description of Artificial Sequence: Synthetic oligonucleotide
aacaauaucuaguaaaaga

SEQ ID NO: 2299443 - RNA, 19 nt, Artificial Sequence
  Description of Artificial Sequence: Synthetic oligonucleotide
uauaguugcaauuuuagga

SEQ ID NO: 2299444 - RNA, 19 nt, Artificial Sequence
  Description of Artificial Sequence: Synthetic oligonucleotide
aaacucuugaugcugaaag

SEQ ID NO: 2299445 - RNA, 19 nt, Artificial Sequence
  Description of Artificial Sequence: Synthetic oligonucleotide
uuuaguuaaauuuuauaug

SEQ ID NO: 2299446 - RNA, 19 nt, Artificial Sequence
  Description of Artificial Sequence: Synthetic oligonucleotide
aaggagauaauagaaacuc

SEQ ID NO: 2299447 - RNA, 19 nt, Artificial Sequence
  Description of Artificial Sequence: Synthetic oligonucleotide
aaauaucgcaguuuaagug

SEQ ID NO: 2299448 - RNA, 19 nt, Artificial Sequence
  Description of Artificial Sequence: Synthetic oligonucleotide
aauaucguagccuugaguu

SEQ ID NO: 2299449 - RNA, 19 nt, Artificial Sequence
  Description of Artificial Sequence: Synthetic oligonucleotide
cuaguaaaagagcauaucg

SEQ ID NO: 2299450 - RNA, 19 nt, Artificial Sequence
  Description of Artificial Sequence: Synthetic oligonucleotide
ucauuaagagauuugaaga

SEQ ID NO: 2299451 - RNA, 19 nt, Artificial Sequence
  Description of Artificial Sequence: Synthetic oligonucleotide
uuaaguguugacaacuuag

SEQ ID NO: 2299452 - RNA, 19 nt, Artificial Sequence
  Description of Artificial Sequence: Synthetic oligonucleotide
aauaucgcaguuuaagugu

SEQ ID NO: 2299453 - RNA, 19 nt, Artificial Sequence
  Description of Artificial Sequence: Synthetic oligonucleotide
aucauuaagagauuugaag

SEQ ID NO: 2299454 - RNA, 19 nt, Artificial Sequence
  Description of Artificial Sequence: Synthetic oligonucleotide
uuuggaauaccgaagggag

SEQ ID NO: 2299455 - RNA, 19 nt, Artificial Sequence
  Description of Artificial Sequence: Synthetic oligonucleotide
uuacccauuaaaaugcuag

SEQ ID NO: 2299456 - RNA, 19 nt, Artificial Sequence
  Description of Artificial Sequence: Synthetic oligonucleotide
aaaucuuuuagaauuacug

SEQ ID NO: 2299457 - RNA, 19 nt, Artificial Sequence
  Description of Artificial Sequence: Synthetic oligonucleotide
gaugcugaaagccacaggc

SEQ ID NO: 2299458 - RNA, 19 nt, Artificial Sequence
  Description of Artificial Sequence: Synthetic oligonucleotide
aucuuuuagaauuacuguc

SEQ ID NO: 2299459 - RNA, 19 nt, Artificial Sequence
  Description of Artificial Sequence: Synthetic oligonucleotide
uguauaguugcaauuuuag

SEQ ID NO: 2299460 - RNA, 19 nt, Artificial Sequence
  Description of Artificial Sequence: Synthetic oligonucleotide
aaucuuuuagaauuacugu

SEQ ID NO: 2299461 - RNA, 19 nt, Artificial Sequence
  Description of Artificial Sequence: Synthetic oligonucleotide
uucaagaaaaucuuuuagc

SEQ ID NO: 2299462 - RNA, 19 nt, Artificial Sequence
  Description of Artificial Sequence: Synthetic oligonucleotide
auaauagaaacucuugaug

SEQ ID NO: 2299463 - RNA, 19 nt, Artificial Sequence
  Description of Artificial Sequence: Synthetic oligonucleotide
uggaggaacacuaugacac

SEQ ID NO: 2299464 - RNA, 19 nt, Artificial Sequence
  Description of Artificial Sequence: Synthetic oligonucleotide
ugcaauuuuaggaaacucc

SEQ ID NO: 2299465 - RNA, 19 nt, Artificial Sequence
  Description of Artificial Sequence: Synthetic oligonucleotide
ugaagcuuugcaaugagga

SEQ ID NO: 2299466 - RNA, 19 nt, Artificial Sequence
  Description of Artificial Sequence: Synthetic oligonucleotide
aacacuaugacaccucuca

SEQ ID NO: 2299467 - RNA, 19 nt, Artificial Sequence
  Description of Artificial Sequence: Synthetic oligonucleotide
agaauuacugucuagaauu

SEQ ID NO: 2299468 - RNA, 19 nt, Artificial Sequence
  Description of Artificial Sequence: Synthetic oligonucleotide
uuugguaaagcacauggac

SEQ ID NO: 2299469 - RNA, 19 nt, Artificial Sequence
  Description of Artificial Sequence: Synthetic oligonucleotide
ugaaauaucgcaguuuaag

SEQ ID NO: 2299470 - RNA, 19 nt, Artificial Sequence
  Description of Artificial Sequence: Synthetic oligonucleotide
agcauaucgaagcaguaac

SEQ ID NO: 2299471 - RNA, 19 nt, Artificial Sequence
  Description of Artificial Sequence: Synthetic oligonucleotide
aaaucauuaagagauuuga

SEQ ID NO: 2299472 - RNA, 19 nt, Artificial Sequence
  Description of Artificial Sequence: Synthetic oligonucleotide
acaauaucuaguaaaagag

SEQ ID NO: 2299473 - RNA, 19 nt, Artificial Sequence
  Description of Artificial Sequence: Synthetic oligonucleotide
uuugcaaugaggaaauauc

SEQ ID NO: 2299474 - RNA, 19 nt, Artificial Sequence
  Description of Artificial Sequence: Synthetic oligonucleotide
uaucgaagcaguaacuuug

SEQ ID NO: 2299475 - RNA, 19 nt, Artificial Sequence
  Description of Artificial Sequence: Synthetic oligonucleotide
ucaguaucugaucaggggc

SEQ ID NO: 2299476 - RNA, 19 nt, Artificial Sequence
  Description of Artificial Sequence: Synthetic oligonucleotide
uacuacaugcacauugagg

SEQ ID NO: 2299477 - RNA, 19 nt, Artificial Sequence
  Description of Artificial Sequence: Synthetic oligonucleotide
uuuagaauuacugucuaga

SEQ ID NO: 2299478 - RNA, 19 nt, Artificial Sequence
  Description of Artificial Sequence: Synthetic oligonucleotide
aaauucuggaggaaauccc

SEQ ID NO: 2299479 - RNA, 19 nt, Artificial Sequence
  Description of Artificial Sequence: Synthetic oligonucleotide
ugcuacuacaugcacauug

SEQ ID NO: 2299480 - RNA, 19 nt, Artificial Sequence
  Description of Artificial Sequence: Synthetic oligonucleotide
uaucguuuguaucagcagc

SEQ ID NO: 2299481 - RNA, 19 nt, Artificial Sequence
  Description of Artificial Sequence: Synthetic oligonucleotide
acaaauuauucacacagga

SEQ ID NO: 2299482 - RNA, 19 nt, Artificial Sequence
  Description of Artificial Sequence: Synthetic oligonucleotide
gaguuuggaauaccgaagg

SEQ ID NO: 2299483 - RNA, 19 nt, Artificial Sequence
  Description of Artificial Sequence: Synthetic oligonucleotide
aauuauucacacaggauug

SEQ ID NO: 2299484 - RNA, 19 nt, Artificial Sequence
  Description of Artificial Sequence: Synthetic oligonucleotide
agguuaaaggcucugacug

SEQ ID NO: 2299485 - RNA, 19 nt, Artificial Sequence
  Description of Artificial Sequence: Synthetic oligonucleotide
cuaucuuuucuucuggagg

SEQ ID NO: 2299486 - RNA, 19 nt, Artificial Sequence
  Description of Artificial Sequence: Synthetic oligonucleotide
uaguaaaagagcauaucga

SEQ ID NO: 2299487 - RNA, 19 nt, Artificial Sequence
  Description of Artificial Sequence: Synthetic oligonucleotide
ugcaguuucaagcuuaaaa

SEQ ID NO: 2299488 - RNA, 19 nt, Artificial Sequence
  Description of Artificial Sequence: Synthetic oligonucleotide
ucuaucguuuguaucagca

SEQ ID NO: 2299489 - RNA, 19 nt, Artificial Sequence
  Description of Artificial Sequence: Synthetic oligonucleotide
cucuaggugugaaauaucg

SEQ ID NO: 2299490 - RNA, 19 nt, Artificial Sequence
  Description of Artificial Sequence: Synthetic oligonucleotide
aauuaguucaaaucuuuua

SEQ ID NO: 2299491 - RNA, 19 nt, Artificial Sequence
  Description of Artificial Sequence: Synthetic oligonucleotide
auuggaggaacacuaugac

SEQ ID NO: 2299492 - RNA, 19 nt, Artificial Sequence
  Description of Artificial Sequence: Synthetic oligonucleotide
aauuuuauaugaauuaguu

SEQ ID NO: 2299493 - RNA, 19 nt, Artificial Sequence
  Description of Artificial Sequence: Synthetic oligonucleotide
ugugaaauaucgcaguuua

SEQ ID NO: 2299494 - RNA, 19 nt, Artificial Sequence
  Description of Artificial Sequence: Synthetic oligonucleotide
uaguaaaauacuuuaguua

SEQ ID NO: 2299495 - RNA, 19 nt, Artificial Sequence
  Description of Artificial Sequence: Synthetic oligonucleotide
aagcacauggaccuucuag

SEQ ID NO: 2299496 - RNA, 19 nt, Artificial Sequence
  Description of Artificial Sequence: Synthetic oligonucleotide
caauguagcuuccauaccc

SEQ ID NO: 2299497 - RNA, 19 nt, Artificial Sequence
  Description of Artificial Sequence: Synthetic oligonucleotide
agauaauagaaacucuuga

SEQ ID NO: 2299498 - RNA, 19 nt, Artificial Sequence
  Description of Artificial Sequence: Synthetic oligonucleotide
cauuaagagauuugaagac

SEQ ID NO: 2299499 - RNA, 19 nt, Artificial Sequence
  Description of Artificial Sequence: Synthetic oligonucleotide
aguaaaagagcauaucgaa

SEQ ID NO: 2299500 - RNA, 19 nt, Artificial Sequence
  Description of Artificial Sequence: Synthetic oligonucleotide
cuuaacaauaucuaguaaa

SEQ ID NO: 2299501 - RNA, 19 nt, Artificial Sequence
  Description of Artificial Sequence: Synthetic oligonucleotide
caauaucuaguaaaagagc

SEQ ID NO: 2299502 - RNA, 19 nt, Artificial Sequence
  Description of Artificial Sequence: Synthetic oligonucleotide
uuaaaaugcuaguaaaaua

SEQ ID NO: 2299503 - RNA, 19 nt, Artificial Sequence
  Description of Artificial Sequence: Synthetic oligonucleotide
uaaguguugacaacuuagc

SEQ ID NO: 2299504 - RNA, 19 nt, Artificial Sequence
  Description of Artificial Sequence: Synthetic oligonucleotide
uuaggaaacuccaucagua

SEQ ID NO: 2299505 - RNA, 19 nt, Artificial Sequence
  Description of Artificial Sequence: Synthetic oligonucleotide
aguuaaauuuuauaugaau

SEQ ID NO: 2299506 - RNA, 19 nt, Artificial Sequence
  Description of Artificial Sequence: Synthetic oligonucleotide
auugugauaaguuuugcua

SEQ ID NO: 2299507 - RNA, 19 nt, Artificial Sequence
  Description of Artificial Sequence: Synthetic oligonucleotide
agagaggucauuguccugc

SEQ ID NO: 2299508 - RNA, 19 nt, Artificial Sequence
  Description of Artificial Sequence: Synthetic oligonucleotide
uuaagagauuugaagacau

SEQ ID NO: 2299509 - RNA, 19 nt, Artificial Sequence
  Description of Artificial Sequence: Synthetic oligonucleotide
uguguccucaucuucaaga

SEQ ID NO: 2299510 - RNA, 19 nt, Artificial Sequence
  Description of Artificial Sequence: Synthetic oligonucleotide
uuagcuaucuuuucuucug

SEQ ID NO: 2299511 - RNA, 19 nt, Artificial Sequence
  Description of Artificial Sequence: Synthetic oligonucleotide
ucuagaagugggcuuaaca

SEQ ID NO: 2299512 - RNA, 19 nt, Artificial Sequence
  Description of Artificial Sequence: Synthetic oligonucleotide
aucaguaucugaucagggg

SEQ ID NO: 2299513 - RNA, 19 nt, Artificial Sequence
  Description of Artificial Sequence: Synthetic oligonucleotide
auaguugcaauuuuaggaa

SEQ ID NO: 2299514 - RNA, 19 nt, Artificial Sequence
  Description of Artificial Sequence: Synthetic oligonucleotide
caaugaggaaauaucguag

SEQ ID NO: 2299515 - RNA, 19 nt, Artificial Sequence
  Description of Artificial Sequence: Synthetic oligonucleotide
guauaguugcaauuuuagg

SEQ ID NO: 2299516 - RNA, 19 nt, Artificial Sequence
  Description of Artificial Sequence: Synthetic oligonucleotide
guaugcacaaauuauucac

SEQ ID NO: 2299517 - RNA, 19 nt, Artificial Sequence
  Description of Artificial Sequence: Synthetic oligonucleotide
uaaaggcucugacugaagc

SEQ ID NO: 2299518 - RNA, 19 nt, Artificial Sequence
  Description of Artificial Sequence: Synthetic oligonucleotide
uaugcacaaauuauucaca

SEQ ID NO: 2299519 - RNA, 19 nt, Artificial Sequence
  Description of Artificial Sequence: Synthetic oligonucleotide
caggaaauccaaauucugg

SEQ ID NO: 2299520 - RNA, 19 nt, Artificial Sequence
  Description of Artificial Sequence: Synthetic oligonucleotide
uucgcaauuucucuaggug

SEQ ID NO: 2299521 - RNA, 19 nt, Artificial Sequence
  Description of Artificial Sequence: Synthetic oligonucleotide
uugugauaaguuuugcuac

SEQ ID NO: 2299522 - RNA, 19 nt, Artificial Sequence
  Description of Artificial Sequence: Synthetic oligonucleotide
uuuauaugaauuaguucaa

SEQ ID NO: 2299523 - RNA, 19 nt, Artificial Sequence
  Description of Artificial Sequence: Synthetic oligonucleotide
ucuugcaacuacugcauag

SEQ ID NO: 2299524 - RNA, 19 nt, Artificial Sequence
  Description of Artificial Sequence: Synthetic oligonucleotide
aagguuaaaggcucugacu

SEQ ID NO: 2299525 - RNA, 19 nt, Artificial Sequence
  Description of Artificial Sequence: Synthetic oligonucleotide
aauaccgaagggaggaagg

SEQ ID NO: 2299526 - RNA, 19 nt, Artificial Sequence
  Description of Artificial Sequence: Synthetic oligonucleotide
uauaugaauuaguucaaau

SEQ ID NO: 2299527 - RNA, 19 nt, Artificial Sequence
  Description of Artificial Sequence: Synthetic oligonucleotide
aauuggaggaacacuauga

SEQ ID NO: 2299528 - RNA, 19 nt, Artificial Sequence
  Description of Artificial Sequence: Synthetic oligonucleotide
uguaucagcagcccucuug

SEQ ID NO: 2299529 - RNA, 19 nt, Artificial Sequence
  Description of Artificial Sequence: Synthetic oligonucleotide
agaaugcuauccuuucugg

SEQ ID NO: 2299530 - RNA, 19 nt, Artificial Sequence
  Description of Artificial Sequence: Synthetic oligonucleotide
aaauaucguagccuugagu

SEQ ID NO: 2299531 - RNA, 19 nt, Artificial Sequence
  Description of Artificial Sequence: Synthetic oligonucleotide
uuaucuucucaggaaaucc

SEQ ID NO: 2299532 - RNA, 19 nt, Artificial Sequence
  Description of Artificial Sequence: Synthetic oligonucleotide
aggaaauccaaauucugga

SEQ ID NO: 2299533 - RNA, 19 nt, Artificial Sequence
  Description of Artificial Sequence: Synthetic oligonucleotide
aauacugugugcugcugcu

SEQ ID NO: 2299534 - RNA, 19 nt, Artificial Sequence
  Description of Artificial Sequence: Synthetic oligonucleotide
uugaguuuggaauaccgaa

SEQ ID NO: 2299535 - RNA, 19 nt, Artificial Sequence
  Description of Artificial Sequence: Synthetic oligonucleotide
aggcaaaucauuaagagau

SEQ ID NO: 2299536 - RNA, 19 nt, Artificial Sequence
  Description of Artificial Sequence: Synthetic oligonucleotide
aaggagacgguaacgcugc

SEQ ID NO: 2299537 - RNA, 19 nt, Artificial Sequence
  Description of Artificial Sequence: Synthetic oligonucleotide
uuuuagaauuacugucuag

SEQ ID NO: 2299538 - RNA, 19 nt, Artificial Sequence
  Description of Artificial Sequence: Synthetic oligonucleotide
cuuugugucuguauaguug

SEQ ID NO: 2299539 - RNA, 19 nt, Artificial Sequence
  Description of Artificial Sequence: Synthetic oligonucleotide
guaacacugagccuguccc

SEQ ID NO: 2299540 - RNA, 19 nt, Artificial Sequence
  Description of Artificial Sequence: Synthetic oligonucleotide
uguaacacugagccugucc

SEQ ID NO: 2299541 - RNA, 19 nt, Artificial Sequence
  Description of Artificial Sequence: Synthetic oligonucleotide
uauucacacaggauuguga

SEQ ID NO: 2299542 - RNA, 19 nt, Artificial Sequence
  Description of Artificial Sequence: Synthetic oligonucleotide
cugaucaggggccugaaag

SEQ ID NO: 2299543 - RNA, 19 nt, Artificial Sequence
  Description of Artificial Sequence: Synthetic oligonucleotide
uuagaauuacugucuagaa

SEQ ID NO: 2299544 - RNA, 19 nt, Artificial Sequence
  Description of Artificial Sequence: Synthetic oligonucleotide
cuaggugugaaauaucgca

SEQ ID NO: 2299545 - RNA, 19 nt, Artificial Sequence
  Description of Artificial Sequence: Synthetic oligonucleotide
uuggaauaccgaagggagg

SEQ ID NO: 2299546 - RNA, 19 nt, Artificial Sequence
  Description of Artificial Sequence: Synthetic oligonucleotide
aguuuaaguguugacaacu

SEQ ID NO: 2299547 - RNA, 19 nt, Artificial Sequence
  Description of Artificial Sequence: Synthetic oligonucleotide
uuuuagcaucugcacagag

SEQ ID NO: 2299548 - RNA, 19 nt, Artificial Sequence
  Description of Artificial Sequence: Synthetic oligonucleotide
aucguuuguaucagcagcc

SEQ ID NO: 2299549 - RNA, 19 nt, Artificial Sequence
  Description of Artificial Sequence: Synthetic oligonucleotide
uagaauuacugucuagaau

SEQ ID NO: 2299550 - RNA, 19 nt, Artificial Sequence
  Description of Artificial Sequence: Synthetic oligonucleotide
uggaggcaaaucauuaaga

SEQ ID NO: 2299551 - RNA, 19 nt, Artificial Sequence
  Description of Artificial Sequence: Synthetic oligonucleotide
ucuugaugcugaaagccac

SEQ ID NO: 2299552 - RNA, 19 nt, Artificial Sequence
  Description of Artificial Sequence: Synthetic oligonucleotide
uagcuaucuuuucuucugg

SEQ ID NO: 2299553 - RNA, 19 nt, Artificial Sequence
  Description of Artificial Sequence: Synthetic oligonucleotide
aguuuggaauaccgaaggg

SEQ ID NO: 2299554 - RNA, 19 nt, Artificial Sequence
  Description of Artificial Sequence: Synthetic oligonucleotide
ugugauaaguuuugcuacu

SEQ ID NO: 2299555 - RNA, 19 nt, Artificial Sequence
  Description of Artificial Sequence: Synthetic oligonucleotide
gucuguaacacugagccug

SEQ ID NO: 2299556 - RNA, 19 nt, Artificial Sequence
  Description of Artificial Sequence: Synthetic oligonucleotide
guaaaagagcauaucgaag

SEQ ID NO: 2299557 - RNA, 19 nt, Artificial Sequence
  Description of Artificial Sequence: Synthetic oligonucleotide
ucgcaauuucucuaggugu

SEQ ID NO: 2299558 - RNA, 19 nt, Artificial Sequence
  Description of Artificial Sequence: Synthetic oligonucleotide
auuaagagauuugaagaca

SEQ ID NO: 2299559 - RNA, 19 nt, Artificial Sequence
  Description of Artificial Sequence: Synthetic oligonucleotide
aacuuagcuaucuuuucuu

SEQ ID NO: 2299560 - RNA, 19 nt, Artificial Sequence
  Description of Artificial Sequence: Synthetic oligonucleotide
ccuuugguaaagcacaugg

SEQ ID NO: 2299561 - RNA, 19 nt, Artificial Sequence
  Description of Artificial Sequence: Synthetic oligonucleotide
aggugcuugguucaggucu

SEQ ID NO: 2299562 - RNA, 19 nt, Artificial Sequence
  Description of Artificial Sequence: Synthetic oligonucleotide
uggaauaccgaagggagga

SEQ ID NO: 2299563 - RNA, 19 nt, Artificial Sequence
  Description of Artificial Sequence: Synthetic oligonucleotide
aguucaaaucuuuuagaau

SEQ ID NO: 2299564 - RNA, 19 nt, Artificial Sequence
  Description of Artificial Sequence: Synthetic oligonucleotide
uaucguagccuugaguuug

SEQ ID NO: 2299565 - RNA, 19 nt, Artificial Sequence
  Description of Artificial Sequence: Synthetic oligonucleotide
aaucccuggagauucgcaa

SEQ ID NO: 2299566 - RNA, 19 nt, Artificial Sequence
  Description of Artificial Sequence: Synthetic oligonucleotide
uggagauucgcaauuucuc

SEQ ID NO: 2299567 - RNA, 19 nt, Artificial Sequence
  Description of Artificial Sequence: Synthetic oligonucleotide
uaucuaguaaaagagcaua

SEQ ID NO: 2299568 - RNA, 19 nt, Artificial Sequence
  Description of Artificial Sequence: Synthetic oligonucleotide
agcacauggaccuucuaga

SEQ ID NO: 2299569 - RNA, 19 nt, Artificial Sequence
  Description of Artificial Sequence: Synthetic oligonucleotide
aucagcagcccucuuguag

SEQ ID NO: 2299570 - RNA, 19 nt, Artificial Sequence
  Description of Artificial Sequence: Synthetic oligonucleotide
aguugcaauuuuaggaaac

SEQ ID NO: 2299571 - RNA, 19 nt, Artificial Sequence
  Description of Artificial Sequence: Synthetic oligonucleotide
uagaaacucuugaugcuga

SEQ ID NO: 2299572 - RNA, 19 nt, Artificial Sequence
  Description of Artificial Sequence: Synthetic oligonucleotide
aagcuuugcaaugaggaaa

SEQ ID NO: 2299573 - RNA, 19 nt, Artificial Sequence
  Description of Artificial Sequence: Synthetic oligonucleotide
ugauaaguuuugcuacuac

SEQ ID NO: 2299574 - RNA, 19 nt, Artificial Sequence
  Description of Artificial Sequence: Synthetic oligonucleotide
auucacacaggauugugau

SEQ ID NO: 2299575 - RNA, 19 nt, Artificial Sequence
  Description of Artificial Sequence: Synthetic oligonucleotide
aagagcauaucgaagcagu

SEQ ID NO: 2299576 - RNA, 19 nt, Artificial Sequence
  Description of Artificial Sequence: Synthetic oligonucleotide
caucaguaucugaucaggg

SEQ ID NO: 2299577 - RNA, 19 nt, Artificial Sequence
  Description of Artificial Sequence: Synthetic oligonucleotide
accucucagagguaugcac

SEQ ID NO: 2299578 - RNA, 19 nt, Artificial Sequence
  Description of Artificial Sequence: Synthetic oligonucleotide
aacuccaucaguaucugau

SEQ ID NO: 2299579 - RNA, 19 nt, Artificial Sequence
  Description of Artificial Sequence: Synthetic oligonucleotide
uuuaaguguugacaacuua

SEQ ID NO: 2299580 - RNA, 19 nt, Artificial Sequence
  Description of Artificial Sequence: Synthetic oligonucleotide
gaggcaaaucauuaagaga

SEQ ID NO: 2299581 - RNA, 19 nt, Artificial Sequence
  Description of Artificial Sequence: Synthetic oligonucleotide
caaagcaggugcuugguuc

SEQ ID NO: 2299582 - RNA, 19 nt, Artificial Sequence
  Description of Artificial Sequence: Synthetic oligonucleotide
gaaauaucguagccuugag

SEQ ID NO: 2299583 - RNA, 19 nt, Artificial Sequence
  Description of Artificial Sequence: Synthetic oligonucleotide
agguaugcacaaauuauuc

SEQ ID NO: 2299584 - RNA, 19 nt, Artificial Sequence
  Description of Artificial Sequence: Synthetic oligonucleotide
guagcuuccauacccuuug

SEQ ID NO: 2299585 - RNA, 19 nt, Artificial Sequence
  Description of Artificial Sequence: Synthetic oligonucleotide
auacccuuugguaaagcac

SEQ ID NO: 2299586 - RNA, 19 nt, Artificial Sequence
  Description of Artificial Sequence: Synthetic oligonucleotide
acuguuaucuucucaggaa

SEQ ID NO: 2299587 - RNA, 19 nt, Artificial Sequence
  Description of Artificial Sequence: Synthetic oligonucleotide
gagacgguaacgcugcuuc

SEQ ID NO: 2299588 - RNA, 19 nt, Artificial Sequence
  Description of Artificial Sequence: Synthetic oligonucleotide
gaaauaucgcaguuuaagu

SEQ ID NO: 2299589 - RNA, 19 nt, Artificial Sequence
  Description of Artificial Sequence: Synthetic oligonucleotide
uagcuuugugucuguauag

SEQ ID NO: 2299590 - RNA, 19 nt, Artificial Sequence
  Description of Artificial Sequence: Synthetic oligonucleotide
gauucgcaauuucucuagg

SEQ ID NO: 2299591 - RNA, 19 nt, Artificial Sequence
  Description of Artificial Sequence: Synthetic oligonucleotide
uacaugcacauugaggcug

SEQ ID NO: 2299592 - RNA, 19 nt, Artificial Sequence
  Description of Artificial Sequence: Synthetic oligonucleotide
auagcuuugugucuguaua

SEQ ID NO: 2299593 - RNA, 19 nt, Artificial Sequence
  Description of Artificial Sequence: Synthetic oligonucleotide
uuggaggaacacuaugaca

SEQ ID NO: 2299594 - RNA, 19 nt, Artificial Sequence
  Description of Artificial Sequence: Synthetic oligonucleotide
ucuagaauuggaggaacac

SEQ ID NO: 2299595 - RNA, 19 nt, Artificial Sequence
  Description of Artificial Sequence: Synthetic oligonucleotide
caaggagacgguaacgcug

SEQ ID NO: 2299596 - RNA, 19 nt, Artificial Sequence
  Description of Artificial Sequence: Synthetic oligonucleotide
caguaucugaucaggggcc

SEQ ID NO: 2299597 - RNA, 19 nt, Artificial Sequence
  Description of Artificial Sequence: Synthetic oligonucleotide
aaaugcuaguaaaauacuu

SEQ ID NO: 2299598 - RNA, 19 nt, Artificial Sequence
  Description of Artificial Sequence: Synthetic oligonucleotide
cuaucguuuguaucagcag

SEQ ID NO: 2299599 - RNA, 19 nt, Artificial Sequence
  Description of Artificial Sequence: Synthetic oligonucleotide
uucucuaggugugaaauau

SEQ ID NO: 2299600 - RNA, 19 nt, Artificial Sequence
  Description of Artificial Sequence: Synthetic oligonucleotide
uagaagugggcuuaacaau

SEQ ID NO: 2299601 - RNA, 19 nt, Artificial Sequence
  Description of Artificial Sequence: Synthetic oligonucleotide
aaguauugacuuguguccu

SEQ ID NO: 2299602 - RNA, 19 nt, Artificial Sequence
  Description of Artificial Sequence: Synthetic oligonucleotide
aguauugacuuguguccuc

SEQ ID NO: 2299603 - RNA, 19 nt, Artificial Sequence
  Description of Artificial Sequence: Synthetic oligonucleotide
gcuucuaucguuuguauca

SEQ ID NO: 2299604 - RNA, 19 nt, Artificial Sequence
  Description of Artificial Sequence: Synthetic oligonucleotide
ugcacaaauuauucacaca

SEQ ID NO: 2299605 - RNA, 19 nt, Artificial Sequence
  Description of Artificial Sequence: Synthetic oligonucleotide
uuaaaggcucugacugaag

SEQ ID NO: 2299606 - RNA, 19 nt, Artificial Sequence
  Description of Artificial Sequence: Synthetic oligonucleotide
acaccucucagagguaugc

SEQ ID NO: 2299607 - RNA, 19 nt, Artificial Sequence
  Description of Artificial Sequence: Synthetic oligonucleotide
agugggcuuaacaauaucu

SEQ ID NO: 2299608 - RNA, 19 nt, Artificial Sequence
  Description of Artificial Sequence: Synthetic oligonucleotide
ugaggcuguugccaaggag

SEQ ID NO: 2299609 - RNA, 19 nt, Artificial Sequence
  Description of Artificial Sequence: Synthetic oligonucleotide
gucccuucaauguagcuuc

SEQ ID NO: 2299610 - RNA, 19 nt, Artificial Sequence
  Description of Artificial Sequence: Synthetic oligonucleotide
aauguagcuuccauacccu

SEQ ID NO: 2299611 - RNA, 19 nt, Artificial Sequence
  Description of Artificial Sequence: Synthetic oligonucleotide
ugcugaaagccacaggcuu

SEQ ID NO: 2299612 - RNA, 19 nt, Artificial Sequence
  Description of Artificial Sequence: Synthetic oligonucleotide
auucgcaauuucucuaggu

SEQ ID NO: 2299613 - RNA, 19 nt, Artificial Sequence
  Description of Artificial Sequence: Synthetic oligonucleotide
gaauaccgaagggaggaag

SEQ ID NO: 2299614 - RNA, 19 nt, Artificial Sequence
  Description of Artificial Sequence: Synthetic oligonucleotide
aggugugaaauaucgcagu

SEQ ID NO: 2299615 - RNA, 19 nt, Artificial Sequence
  Description of Artificial Sequence: Synthetic oligonucleotide
ugacaacuuagcuaucuuu

SEQ ID NO: 2299616 - RNA, 19 nt, Artificial Sequence
  Description of Artificial Sequence: Synthetic oligonucleotide
gauugugauaaguuuugcu

SEQ ID NO: 2299617 - RNA, 19 nt, Artificial Sequence
  Description of Artificial Sequence: Synthetic oligonucleotide
uuauaugaauuaguucaaa

SEQ ID NO: 2299618 - RNA, 19 nt, Artificial Sequence
  Description of Artificial Sequence: Synthetic oligonucleotide
acugcauagcuuugugucu

SEQ ID NO: 2299619 - RNA, 19 nt, Artificial Sequence
  Description of Artificial Sequence: Synthetic oligonucleotide
guguugacaacuuagcuau

SEQ ID NO: 2299620 - RNA, 19 nt, Artificial Sequence
  Description of Artificial Sequence: Synthetic oligonucleotide
uucugcaguuucaagcuua

SEQ ID NO: 2299621 - RNA, 19 nt, Artificial Sequence
  Description of Artificial Sequence: Synthetic oligonucleotide
aauuacccauuaaaaugcu

SEQ ID NO: 2299622 - RNA, 19 nt, Artificial Sequence
  Description of Artificial Sequence: Synthetic oligonucleotide
cuuccauacccuuugguaa

SEQ ID NO: 2299623 - RNA, 19 nt, Artificial Sequence
  Description of Artificial Sequence: Synthetic oligonucleotide
auaucgaagcaguaacuuu

SEQ ID NO: 2299624 - RNA, 19 nt, Artificial Sequence
  Description of Artificial Sequence: Synthetic oligonucleotide
gaaugcuauccuuucugga

SEQ ID NO: 2299625 - RNA, 19 nt, Artificial Sequence
  Description of Artificial Sequence: Synthetic oligonucleotide
cuggaauacugugugcugc

SEQ ID NO: 2299626 - RNA, 19 nt, Artificial Sequence
  Description of Artificial Sequence: Synthetic oligonucleotide
guagccuugaguuuggaau

SEQ ID NO: 2299627 - RNA, 19 nt, Artificial Sequence
  Description of Artificial Sequence: Synthetic oligonucleotide
aagcaguaacuuugguggu

SEQ ID NO: 2299628 - RNA, 19 nt, Artificial Sequence
  Description of Artificial Sequence: Synthetic oligonucleotide
uuuguaucagcagcccucu

SEQ ID NO: 2299629 - RNA, 19 nt, Artificial Sequence
  Description of Artificial Sequence: Synthetic oligonucleotide
uaguugcaauuuuaggaaa

SEQ ID NO: 2299630 - RNA, 19 nt, Artificial Sequence
  Description of Artificial Sequence: Synthetic oligonucleotide
aggauugugauaaguuuug

SEQ ID NO: 2299631 - RNA, 19 nt, Artificial Sequence
  Description of Artificial Sequence: Synthetic oligonucleotide
gucuuuucacucuuaaugu

SEQ ID NO: 2299632 - RNA, 19 nt, Artificial Sequence
  Description of Artificial Sequence: Synthetic oligonucleotide
acacuaugacaccucucag

SEQ ID NO: 2299633 - RNA, 19 nt, Artificial Sequence
  Description of Artificial Sequence: Synthetic oligonucleotide
cuugaguuuggaauaccga

SEQ ID NO: 2299634 - RNA, 19 nt, Artificial Sequence
  Description of Artificial Sequence: Synthetic oligonucleotide
uggaauacugugugcugcu

SEQ ID NO: 2299635 - RNA, 19 nt, Artificial Sequence
  Description of Artificial Sequence: Synthetic oligonucleotide
uuccauacccuuugguaaa

SEQ ID NO: 2299636 - RNA, 19 nt, Artificial Sequence
  Description of Artificial Sequence: Synthetic oligonucleotide
gaagcuuugcaaugaggaa

SEQ ID NO: 2299637 - RNA, 19 nt, Artificial Sequence
  Description of Artificial Sequence: Synthetic oligonucleotide
uugccaaggagacgguaac

SEQ ID NO: 2299638 - RNA, 19 nt, Artificial Sequence
  Description of Artificial Sequence: Synthetic oligonucleotide
uguagcuuccauacccuuu

SEQ ID NO: 2299639 - RNA, 19 nt, Artificial Sequence
  Description of Artificial Sequence: Synthetic oligonucleotide
uacugugugcugcugcuau

SEQ ID NO: 2299640 - RNA, 19 nt, Artificial Sequence
  Description of Artificial Sequence: Synthetic oligonucleotide
ugucuagaauuggaggaac

SEQ ID NO: 2299641 - RNA, 19 nt, Artificial Sequence
  Description of Artificial Sequence: Synthetic oligonucleotide
guuuguaucagcagcccuc

SEQ ID NO: 2299642 - RNA, 19 nt, Artificial Sequence
  Description of Artificial Sequence: Synthetic oligonucleotide
cuacuacaugcacauugag

SEQ ID NO: 2299643 - RNA, 19 nt, Artificial Sequence
  Description of Artificial Sequence: Synthetic oligonucleotide
auuauucacacaggauugu

SEQ ID NO: 2299644 - RNA, 19 nt, Artificial Sequence
  Description of Artificial Sequence: Synthetic oligonucleotide
gcaguuuaaguguugacaa

SEQ ID NO: 2299645 - RNA, 19 nt, Artificial Sequence
  Description of Artificial Sequence: Synthetic oligonucleotide
gcuaucuuuucuucuggag

SEQ ID NO: 2299646 - RNA, 19 nt, Artificial Sequence
  Description of Artificial Sequence: Synthetic oligonucleotide
aucgaagcaguaacuuugg

SEQ ID NO: 2299647 - RNA, 19 nt, Artificial Sequence
  Description of Artificial Sequence: Synthetic oligonucleotide
cuaugacaccucucagagg

SEQ ID NO: 2299648 - RNA, 19 nt, Artificial Sequence
  Description of Artificial Sequence: Synthetic oligonucleotide
gguaugcacaaauuauuca

SEQ ID NO: 2299649 - RNA, 19 nt, Artificial Sequence
  Description of Artificial Sequence: Synthetic oligonucleotide
uaucgcaguuuaaguguug

SEQ ID NO: 2299650 - RNA, 19 nt, Artificial Sequence
  Description of Artificial Sequence: Synthetic oligonucleotide
uucuaucguuuguaucagc

SEQ ID NO: 2299651 - RNA, 19 nt, Artificial Sequence
  Description of Artificial Sequence: Synthetic oligonucleotide
gaaagguuaaaggcucuga

SEQ ID NO: 2299652 - RNA, 19 nt, Artificial Sequence
  Description of Artificial Sequence: Synthetic oligonucleotide
uugcaauuuuaggaaacuc

SEQ ID NO: 2299653 - RNA, 19 nt, Artificial Sequence
  Description of Artificial Sequence: Synthetic oligonucleotide
aguaacuuuggugguaaaa

SEQ ID NO: 2299654 - RNA, 19 nt, Artificial Sequence
  Description of Artificial Sequence: Synthetic oligonucleotide
caguuuaaguguugacaac

SEQ ID NO: 2299655 - RNA, 19 nt, Artificial Sequence
  Description of Artificial Sequence: Synthetic oligonucleotide
uuucucuaggugugaaaua

SEQ ID NO: 2299656 - RNA, 19 nt, Artificial Sequence
  Description of Artificial Sequence: Synthetic oligonucleotide
uugacaacuuagcuaucuu

SEQ ID NO: 2299657 - RNA, 19 nt, Artificial Sequence
  Description of Artificial Sequence: Synthetic oligonucleotide
cuuugguaaagcacaugga

SEQ ID NO: 2299658 - RNA, 19 nt, Artificial Sequence
  Description of Artificial Sequence: Synthetic oligonucleotide
cuucuaucguuuguaucag

SEQ ID NO: 2299659 - RNA, 19 nt, Artificial Sequence
  Description of Artificial Sequence: Synthetic oligonucleotide
agcuaucuuuucuucugga

SEQ ID NO: 2299660 - RNA, 19 nt, Artificial Sequence
  Description of Artificial Sequence: Synthetic oligonucleotide
gcaauuuuaggaaacucca

SEQ ID NO: 2299661 - RNA, 19 nt, Artificial Sequence
  Description of Artificial Sequence: Synthetic oligonucleotide
cacuaugacaccucucaga

SEQ ID NO: 2299662 - RNA, 19 nt, Artificial Sequence
  Description of Artificial Sequence: Synthetic oligonucleotide
ugccaaggagacgguaacg

SEQ ID NO: 2299663 - RNA, 19 nt, Artificial Sequence
  Description of Artificial Sequence: Synthetic oligonucleotide
gacuuguguccucaucuuc

SEQ ID NO: 2299664 - RNA, 19 nt, Artificial Sequence
  Description of Artificial Sequence: Synthetic oligonucleotide
agccuugaguuuggaauac

SEQ ID NO: 2299665 - RNA, 19 nt, Artificial Sequence
  Description of Artificial Sequence: Synthetic oligonucleotide
uaccgaagggaggaaggag

SEQ ID NO: 2299666 - RNA, 19 nt, Artificial Sequence
  Description of Artificial Sequence: Synthetic oligonucleotide
uucaggucuuuucacucuu

SEQ ID NO: 2299667 - RNA, 19 nt, Artificial Sequence
  Description of Artificial Sequence: Synthetic oligonucleotide
auaucuaguaaaagagcau

SEQ ID NO: 2299668 - RNA, 19 nt, Artificial Sequence
  Description of Artificial Sequence: Synthetic oligonucleotide
gaaggagauaauagaaacu

SEQ ID NO: 2299669 - RNA, 19 nt, Artificial Sequence
  Description of Artificial Sequence: Synthetic oligonucleotide
aaaucccuggagauucgca

SEQ ID NO: 2299670 - RNA, 19 nt, Artificial Sequence
  Description of Artificial Sequence: Synthetic oligonucleotide
gaaaucccuggagauucgc

SEQ ID NO: 2299671 - RNA, 19 nt, Artificial Sequence
  Description of Artificial Sequence: Synthetic oligonucleotide
uaacacugagccugucccu

SEQ ID NO: 2299672 - RNA, 19 nt, Artificial Sequence
  Description of Artificial Sequence: Synthetic oligonucleotide
ggcuuaacaauaucuagua

SEQ ID NO: 2299673 - RNA, 19 nt, Artificial Sequence
  Description of Artificial Sequence: Synthetic oligonucleotide
ucguuuguaucagcagccc

SEQ ID NO: 2299674 - RNA, 19 nt, Artificial Sequence
  Description of Artificial Sequence: Synthetic oligonucleotide
ggaaauaucguagccuuga

SEQ ID NO: 2299675 - RNA, 19 nt, Artificial Sequence
  Description of Artificial Sequence: Synthetic oligonucleotide
aggagauaauagaaacucu

SEQ ID NO: 2299676 - RNA, 19 nt, Artificial Sequence
  Description of Artificial Sequence: Synthetic oligonucleotide
gcaaugaggaaauaucgua

SEQ ID NO: 2299677 - RNA, 19 nt, Artificial Sequence
  Description of Artificial Sequence: Synthetic oligonucleotide
aucgcaguuuaaguguuga

SEQ ID NO: 2299678 - RNA, 19 nt, Artificial Sequence
  Description of Artificial Sequence: Synthetic oligonucleotide
aucuaguaaaagagcauau

SEQ ID NO: 2299679 - RNA, 19 nt, Artificial Sequence
  Description of Artificial Sequence: Synthetic oligonucleotide
ucgaagcaguaacuuuggu

SEQ ID NO: 2299680 - RNA, 19 nt, Artificial Sequence
  Description of Artificial Sequence: Synthetic oligonucleotide
ugcugcuaucaaagcaggu

SEQ ID NO: 2299681 - RNA, 19 nt, Artificial Sequence
  Description of Artificial Sequence: Synthetic oligonucleotide
guuaaaggcucugacugaa

SEQ ID NO: 2299682 - RNA, 19 nt, Artificial Sequence
  Description of Artificial Sequence: Synthetic oligonucleotide
cugcauagcuuugugucug

SEQ ID NO: 2299683 - RNA, 19 nt, Artificial Sequence
  Description of Artificial Sequence: Synthetic oligonucleotide
agcuuugugucuguauagu

SEQ ID NO: 2299684 - RNA, 19 nt, Artificial Sequence
  Description of Artificial Sequence: Synthetic oligonucleotide
gguucaggucuuuucacuc

SEQ ID NO: 2299685 - RNA, 19 nt, Artificial Sequence
  Description of Artificial Sequence: Synthetic oligonucleotide
gacgguaacgcugcuucac

SEQ ID NO: 2299686 - RNA, 19 nt, Artificial Sequence
  Description of Artificial Sequence: Synthetic oligonucleotide
guaaagcacauggaccuuc

SEQ ID NO: 2299687 - RNA, 19 nt, Artificial Sequence
  Description of Artificial Sequence: Synthetic oligonucleotide
accgaagggaggaaggaga

SEQ ID NO: 2299688 - RNA, 19 nt, Artificial Sequence
  Description of Artificial Sequence: Synthetic oligonucleotide
cuuagcuaucuuuucuucu

SEQ ID NO: 2299689 - RNA, 19 nt, Artificial Sequence
  Description of Artificial Sequence: Synthetic oligonucleotide
acacugagccugucccuuc

SEQ ID NO: 2299690 - RNA, 19 nt, Artificial Sequence
  Description of Artificial Sequence: Synthetic oligonucleotide
auccaaauucuggaggaaa

SEQ ID NO: 2299691 - RNA, 19 nt, Artificial Sequence
  Description of Artificial Sequence: Synthetic oligonucleotide
acgguaacgcugcuucacu

SEQ ID NO: 2299692 - RNA, 19 nt, Artificial Sequence
  Description of Artificial Sequence: Synthetic oligonucleotide
ugacaccucucagagguau

SEQ ID NO: 2299693 - RNA, 19 nt, Artificial Sequence
  Description of Artificial Sequence: Synthetic oligonucleotide
ucgcaguuuaaguguugac

SEQ ID NO: 2299694 - RNA, 19 nt, Artificial Sequence
  Description of Artificial Sequence: Synthetic oligonucleotide
ugcuauccuuucuggaaua

SEQ ID NO: 2299695 - RNA, 19 nt, Artificial Sequence
  Description of Artificial Sequence: Synthetic oligonucleotide
guaucagcagcccucuugu

SEQ ID NO: 2299696 - RNA, 19 nt, Artificial Sequence
  Description of Artificial Sequence: Synthetic oligonucleotide
gagcauaucgaagcaguaa

SEQ ID NO: 2299697 - RNA, 19 nt, Artificial Sequence
  Description of Artificial Sequence: Synthetic oligonucleotide
agaaacucuugaugcugaa

SEQ ID NO: 2299698 - RNA, 19 nt, Artificial Sequence
  Description of Artificial Sequence: Synthetic oligonucleotide
cgaagcaguaacuuuggug

SEQ ID NO: 2299699 - RNA, 19 nt, Artificial Sequence
  Description of Artificial Sequence: Synthetic oligonucleotide
ccaucaguaucugaucagg

SEQ ID NO: 2299700 - RNA, 19 nt, Artificial Sequence
  Description of Artificial Sequence: Synthetic oligonucleotide
ggaggaacacuaugacacc

SEQ ID NO: 2299701 - RNA, 19 nt, Artificial Sequence
  Description of Artificial Sequence: Synthetic oligonucleotide
aguaucugaucaggggccu

SEQ ID NO: 2299702 - RNA, 19 nt, Artificial Sequence
  Description of Artificial Sequence: Synthetic oligonucleotide
guauugacuuguguccuca

SEQ ID NO: 2299703 - RNA, 19 nt, Artificial Sequence
  Description of Artificial Sequence: Synthetic oligonucleotide
auaccgaagggaggaagga

SEQ ID NO: 2299704 - RNA, 19 nt, Artificial Sequence
  Description of Artificial Sequence: Synthetic oligonucleotide
aaagcacauggaccuucua

SEQ ID NO: 2299705 - RNA, 19 nt, Artificial Sequence
  Description of Artificial Sequence: Synthetic oligonucleotide
guguccucaucuucaagaa

SEQ ID NO: 2299706 - RNA, 19 nt, Artificial Sequence
  Description of Artificial Sequence: Synthetic oligonucleotide
ugcauagcuuugugucugu

SEQ ID NO: 2299707 - RNA, 19 nt, Artificial Sequence
  Description of Artificial Sequence: Synthetic oligonucleotide
ucccuucaauguagcuucc

SEQ ID NO: 2299708 - RNA, 19 nt, Artificial Sequence
  Description of Artificial Sequence: Synthetic oligonucleotide
uguugacaacuuagcuauc

SEQ ID NO: 2299709 - RNA, 19 nt, Artificial Sequence
  Description of Artificial Sequence: Synthetic oligonucleotide
gaaacucuugaugcugaaa

SEQ ID NO: 2299710 - RNA, 19 nt, Artificial Sequence
  Description of Artificial Sequence: Synthetic oligonucleotide
ucaggucuuuucacucuua

SEQ ID NO: 2299711 - RNA, 19 nt, Artificial Sequence
  Description of Artificial Sequence: Synthetic oligonucleotide
gcagcccucuuguagauga

SEQ ID NO: 2299712 - RNA, 19 nt, Artificial Sequence
  Description of Artificial Sequence: Synthetic oligonucleotide
agaauuggaggaacacuau

SEQ ID NO: 2299713 - RNA, 19 nt, Artificial Sequence
  Description of Artificial Sequence: Synthetic oligonucleotide
uaacgcugcuucacuguua

SEQ ID NO: 2299714 - RNA, 19 nt, Artificial Sequence
  Description of Artificial Sequence: Synthetic oligonucleotide
agccacaggcuucuaucgu

SEQ ID NO: 2299715 - RNA, 19 nt, Artificial Sequence
  Description of Artificial Sequence: Synthetic oligonucleotide
uauugacuuguguccucau

SEQ ID NO: 2299716 - RNA, 19 nt, Artificial Sequence
  Description of Artificial Sequence: Synthetic oligonucleotide
guugccaaggagacgguaa

SEQ ID NO: 2299717 - RNA, 19 nt, Artificial Sequence
  Description of Artificial Sequence: Synthetic oligonucleotide
gguuaaaggcucugacuga

SEQ ID NO: 2299718 - RNA, 19 nt, Artificial Sequence
  Description of Artificial Sequence: Synthetic oligonucleotide
gccaaggagacgguaacgc

SEQ ID NO: 2299719 - RNA, 19 nt, Artificial Sequence
  Description of Artificial Sequence: Synthetic oligonucleotide
ggagauucgcaauuucucu

SEQ ID NO: 2299720 - RNA, 19 nt, Artificial Sequence
  Description of Artificial Sequence: Synthetic oligonucleotide
aggcuucuaucguuuguau

SEQ ID NO: 2299721 - RNA, 19 nt, Artificial Sequence
  Description of Artificial Sequence: Synthetic oligonucleotide
aggaaauaucguagccuug

SEQ ID NO: 2299722 - RNA, 19 nt, Artificial Sequence
  Description of Artificial Sequence: Synthetic oligonucleotide
gcuuccauacccuuuggua

SEQ ID NO: 2299723 - RNA, 19 nt, Artificial Sequence
  Description of Artificial Sequence: Synthetic oligonucleotide
cacaggcuucuaucguuug

SEQ ID NO: 2299724 - RNA, 19 nt, Artificial Sequence
  Description of Artificial Sequence: Synthetic oligonucleotide
ggggccugaaagguuaaag

SEQ ID NO: 2299725 - RNA, 19 nt, Artificial Sequence
  Description of Artificial Sequence: Synthetic oligonucleotide
gaacacuaugacaccucuc

SEQ ID NO: 2299726 - RNA, 19 nt, Artificial Sequence
  Description of Artificial Sequence: Synthetic oligonucleotide
cuagaauuggaggaacacu

SEQ ID NO: 2299727 - RNA, 19 nt, Artificial Sequence
  Description of Artificial Sequence: Synthetic oligonucleotide
caggauugugauaaguuuu

SEQ ID NO: 2299728 - RNA, 19 nt, Artificial Sequence
  Description of Artificial Sequence: Synthetic oligonucleotide
ggauugugauaaguuuugc

SEQ ID NO: 2299729 - RNA, 19 nt, Artificial Sequence
  Description of Artificial Sequence: Synthetic oligonucleotide
aucguagccuugaguuugg

SEQ ID NO: 2299730 - RNA, 19 nt, Artificial Sequence
  Description of Artificial Sequence: Synthetic oligonucleotide
gucuagaauuggaggaaca

SEQ ID NO: 2299731 - RNA, 19 nt, Artificial Sequence
  Description of Artificial Sequence: Synthetic oligonucleotide
agacgguaacgcugcuuca

SEQ ID NO: 2299732 - RNA, 19 nt, Artificial Sequence
  Description of Artificial Sequence: Synthetic oligonucleotide
gaggaacacuaugacaccu

SEQ ID NO: 2299733 - RNA, 19 nt, Artificial Sequence
  Description of Artificial Sequence: Synthetic oligonucleotide
auaucgcaguuuaaguguu

SEQ ID NO: 2299734 - RNA, 19 nt, Artificial Sequence
  Description of Artificial Sequence: Synthetic oligonucleotide
cuuugcaaugaggaaauau

SEQ ID NO: 2299735 - RNA, 19 nt, Artificial Sequence
  Description of Artificial Sequence: Synthetic oligonucleotide
gaucaggggccugaaaggu

SEQ ID NO: 2299736 - RNA, 19 nt, Artificial Sequence
  Description of Artificial Sequence: Synthetic oligonucleotide
ggcuucuaucguuuguauc

SEQ ID NO: 2299737 - RNA, 19 nt, Artificial Sequence
  Description of Artificial Sequence: Synthetic oligonucleotide
uucuagaagugggcuuaac

SEQ ID NO: 2299738 - RNA, 19 nt, Artificial Sequence
  Description of Artificial Sequence: Synthetic oligonucleotide
cucagagguaugcacaaau

SEQ ID NO: 2299739 - RNA, 19 nt, Artificial Sequence
  Description of Artificial Sequence: Synthetic oligonucleotide
gacaccucucagagguaug

SEQ ID NO: 2299740 - RNA, 19 nt, Artificial Sequence
  Description of Artificial Sequence: Synthetic oligonucleotide
gugucuguauaguugcaau

SEQ ID NO: 2299741 - RNA, 19 nt, Artificial Sequence
  Description of Artificial Sequence: Synthetic oligonucleotide
gcuacuacaugcacauuga

SEQ ID NO: 2299742 - RNA, 19 nt, Artificial Sequence
  Description of Artificial Sequence: Synthetic oligonucleotide
uguugccaaggagacggua

SEQ ID NO: 2299743 - RNA, 19 nt, Artificial Sequence
  Description of Artificial Sequence: Synthetic oligonucleotide
gcuuaacaauaucuaguaa

SEQ ID NO: 2299744 - RNA, 19 nt, Artificial Sequence
  Description of Artificial Sequence: Synthetic oligonucleotide
ggaaaucccuggagauucg

SEQ ID NO: 2299745 - RNA, 19 nt, Artificial Sequence
  Description of Artificial Sequence: Synthetic oligonucleotide
cugucuagaauuggaggaa

SEQ ID NO: 2299746 - RNA, 19 nt, Artificial Sequence
  Description of Artificial Sequence: Synthetic oligonucleotide
acaugcacauugaggcugu

SEQ ID NO: 2299747 - RNA, 19 nt, Artificial Sequence
  Description of Artificial Sequence: Synthetic oligonucleotide
ucucagagguaugcacaaa

SEQ ID NO: 2299748 - RNA, 19 nt, Artificial Sequence
  Description of Artificial Sequence: Synthetic oligonucleotide
agcaguaacuuugguggua

SEQ ID NO: 2299749 - RNA, 19 nt, Artificial Sequence
  Description of Artificial Sequence: Synthetic oligonucleotide
cagagaggucauuguccug

SEQ ID NO: 2299750 - RNA, 19 nt, Artificial Sequence
  Description of Artificial Sequence: Synthetic oligonucleotide
caggucuuuucacucuuaa

SEQ ID NO: 2299751 - RNA, 19 nt, Artificial Sequence
  Description of Artificial Sequence: Synthetic oligonucleotide
cuuuuagcaucugcacaga

SEQ ID NO: 2299752 - RNA, 19 nt, Artificial Sequence
  Description of Artificial Sequence: Synthetic oligonucleotide
gcccucuuguagaugauac

SEQ ID NO: 2299753 - RNA, 19 nt, Artificial Sequence
  Description of Artificial Sequence: Synthetic oligonucleotide
gugauaaguuuugcuacua

SEQ ID NO: 2299754 - RNA, 19 nt, Artificial Sequence
  Description of Artificial Sequence: Synthetic oligonucleotide
gaccuucuagaagugggcu

SEQ ID NO: 2299755 - RNA, 19 nt, Artificial Sequence
  Description of Artificial Sequence: Synthetic oligonucleotide
cauaucgaagcaguaacuu

SEQ ID NO: 2299756 - RNA, 19 nt, Artificial Sequence
  Description of Artificial Sequence: Synthetic oligonucleotide
agagcauaucgaagcagua

SEQ ID NO: 2299757 - RNA, 19 nt, Artificial Sequence
  Description of Artificial Sequence: Synthetic oligonucleotide
ccugucccuucaauguagc

SEQ ID NO: 2299758 - RNA, 19 nt, Artificial Sequence
  Description of Artificial Sequence: Synthetic oligonucleotide
ccucucagagguaugcaca

SEQ ID NO: 2299759 - RNA, 19 nt, Artificial Sequence
  Description of Artificial Sequence: Synthetic oligonucleotide
cuacaugcacauugaggcu

SEQ ID NO: 2299760 - RNA, 19 nt, Artificial Sequence
  Description of Artificial Sequence: Synthetic oligonucleotide
gggcuuaacaauaucuagu

SEQ ID NO: 2299761 - RNA, 19 nt, Artificial Sequence
  Description of Artificial Sequence: Synthetic oligonucleotide
caggugcuugguucagguc

SEQ ID NO: 2299762 - RNA, 19 nt, Artificial Sequence
  Description of Artificial Sequence: Synthetic oligonucleotide
gguaacgcugcuucacugu

SEQ ID NO: 2299763 - RNA, 19 nt, Artificial Sequence
  Description of Artificial Sequence: Synthetic oligonucleotide
gugaaauaucgcaguuuaa

SEQ ID NO: 2299764 - RNA, 19 nt, Artificial Sequence
  Description of Artificial Sequence: Synthetic oligonucleotide
ggaauacugugugcugcug

SEQ ID NO: 2299765 - RNA, 19 nt, Artificial Sequence
  Description of Artificial Sequence: Synthetic oligonucleotide
acgcugcuucacuguuauc

SEQ ID NO: 2299766 - RNA, 19 nt, Artificial Sequence
  Description of Artificial Sequence: Synthetic oligonucleotide
gcuauccuuucuggaauac

SEQ ID NO: 2299767 - RNA, 19 nt, Artificial Sequence
  Description of Artificial Sequence: Synthetic oligonucleotide
guaacgcugcuucacuguu

SEQ ID NO: 2299768 - RNA, 19 nt, Artificial Sequence
  Description of Artificial Sequence: Synthetic oligonucleotide
uuguaucagcagcccucuu

SEQ ID NO: 2299769 - RNA, 19 nt, Artificial Sequence
  Description of Artificial Sequence: Synthetic oligonucleotide
aucugcacagagaggucau

SEQ ID NO: 2299770 - RNA, 19 nt, Artificial Sequence
  Description of Artificial Sequence: Synthetic oligonucleotide
agcagcccucuuguagaug

SEQ ID NO: 2299771 - RNA, 19 nt, Artificial Sequence
  Description of Artificial Sequence: Synthetic oligonucleotide
gcaaaucauuaagagauuu

SEQ ID NO: 2299772 - RNA, 19 nt, Artificial Sequence
  Description of Artificial Sequence: Synthetic oligonucleotide
ggugugaaauaucgcaguu

SEQ ID NO: 2299773 - RNA, 19 nt, Artificial Sequence
  Description of Artificial Sequence: Synthetic oligonucleotide
ggcuguugccaaggagacg

SEQ ID NO: 2299774 - RNA, 19 nt, Artificial Sequence
  Description of Artificial Sequence: Synthetic oligonucleotide
gaggaaaucccuggagauu

SEQ ID NO: 2299775 - RNA, 19 nt, Artificial Sequence
  Description of Artificial Sequence: Synthetic oligonucleotide
agcccucuuguagaugaua

SEQ ID NO: 2299776 - RNA, 19 nt, Artificial Sequence
  Description of Artificial Sequence: Synthetic oligonucleotide
auacugugugcugcugcua

SEQ ID NO: 2299777 - RNA, 19 nt, Artificial Sequence
  Description of Artificial Sequence: Synthetic oligonucleotide
gugugaaauaucgcaguuu

SEQ ID NO: 2299778 - RNA, 19 nt, Artificial Sequence
  Description of Artificial Sequence: Synthetic oligonucleotide
aucugaucaggggccugaa

SEQ ID NO: 2299779 - RNA, 19 nt, Artificial Sequence
  Description of Artificial Sequence: Synthetic oligonucleotide
gccuugaguuuggaauacc

SEQ ID NO: 2299780 - RNA, 19 nt, Artificial Sequence
  Description of Artificial Sequence: Synthetic oligonucleotide
gcuuugugucuguauaguu

SEQ ID NO: 2299781 - RNA, 19 nt, Artificial Sequence
  Description of Artificial Sequence: Synthetic oligonucleotide
gcauaucgaagcaguaacu

SEQ ID NO: 2299782 - RNA, 19 nt, Artificial Sequence
  Description of Artificial Sequence: Synthetic oligonucleotide
caguaacuuuggugguaaa

SEQ ID NO: 2299783 - RNA, 19 nt, Artificial Sequence
  Description of Artificial Sequence: Synthetic oligonucleotide
cgguaacgcugcuucacug

SEQ ID NO: 2299784 - RNA, 19 nt, Artificial Sequence
  Description of Artificial Sequence: Synthetic oligonucleotide
uugcuacuacaugcacauu

SEQ ID NO: 2299785 - RNA, 19 nt, Artificial Sequence
  Description of Artificial Sequence: Synthetic oligonucleotide
ggaauaccgaagggaggaa

SEQ ID NO: 2299786 - RNA, 19 nt, Artificial Sequence
  Description of Artificial Sequence: Synthetic oligonucleotide
cgcugcuucacuguuaucu

SEQ ID NO: 2299787 - RNA, 19 nt, Artificial Sequence
  Description of Artificial Sequence: Synthetic oligonucleotide
aggggccugaaagguuaaa

SEQ ID NO: 2299788 - RNA, 19 nt, Artificial Sequence
  Description of Artificial Sequence: Synthetic oligonucleotide
cuucugcaguuucaagcuu

SEQ ID NO: 2299789 - RNA, 19 nt, Artificial Sequence
  Description of Artificial Sequence: Synthetic oligonucleotide
cccuuugguaaagcacaug

SEQ ID NO: 2299790 - RNA, 19 nt, Artificial Sequence
  Description of Artificial Sequence: Synthetic oligonucleotide
ccaaggagacgguaacgcu

SEQ ID NO: 2299791 - RNA, 19 nt, Artificial Sequence
  Description of Artificial Sequence: Synthetic oligonucleotide
caggggccugaaagguuaa

SEQ ID NO: 2299792 - RNA, 19 nt, Artificial Sequence
  Description of Artificial Sequence: Synthetic oligonucleotide
augacaccucucagaggua

SEQ ID NO: 2299793 - RNA, 19 nt, Artificial Sequence
  Description of Artificial Sequence: Synthetic oligonucleotide
gccacaggcuucuaucguu

SEQ ID NO: 2299794 - RNA, 19 nt, Artificial Sequence
  Description of Artificial Sequence: Synthetic oligonucleotide
cugagccugucccuucaau

SEQ ID NO: 2299795 - RNA, 19 nt, Artificial Sequence
  Description of Artificial Sequence: Synthetic oligonucleotide
cugcaguuucaagcuuaaa

SEQ ID NO: 2299796 - RNA, 19 nt, Artificial Sequence
  Description of Artificial Sequence: Synthetic oligonucleotide
gcuaucaaagcaggugcuu

SEQ ID NO: 2299797 - RNA, 19 nt, Artificial Sequence
  Description of Artificial Sequence: Synthetic oligonucleotide
ggcaaaucauuaagagauu

SEQ ID NO: 2299798 - RNA, 19 nt, Artificial Sequence
  Description of Artificial Sequence: Synthetic oligonucleotide
cuggugcuuccugucaauu

SEQ ID NO: 2299799 - RNA, 19 nt, Artificial Sequence
  Description of Artificial Sequence: Synthetic oligonucleotide
cguuuguaucagcagcccu

SEQ ID NO: 2299800 - RNA, 19 nt, Artificial Sequence
  Description of Artificial Sequence: Synthetic oligonucleotide
gcuuugcaaugaggaaaua

SEQ ID NO: 2299801 - RNA, 19 nt, Artificial Sequence
  Description of Artificial Sequence: Synthetic oligonucleotide
ccacaggcuucuaucguuu

SEQ ID NO: 2299802 - RNA, 19 nt, Artificial Sequence
  Description of Artificial Sequence: Synthetic oligonucleotide
ggagacgguaacgcugcuu

SEQ ID NO: 2299803 - RNA, 19 nt, Artificial Sequence
  Description of Artificial Sequence: Synthetic oligonucleotide
cagcccucuuguagaugau

SEQ ID NO: 2299804 - RNA, 19 nt, Artificial Sequence
  Description of Artificial Sequence: Synthetic oligonucleotide
cccuggagauucgcaauuu

SEQ ID NO: 2299805 - RNA, 19 nt, Artificial Sequence
  Description of Artificial Sequence: Synthetic oligonucleotide
aauaguaucauauaucagu

SEQ ID NO: 2299806 - RNA, 19 nt, Artificial Sequence
  Description of Artificial Sequence: Synthetic oligonucleotide
aaaccaaugcuccaggugc

SEQ ID NO: 2299807 - RNA, 19 nt, Artificial Sequence
  Description of Artificial Sequence: Synthetic oligonucleotide
uaaaagucaacccuaaggc

SEQ ID NO: 2299808 - RNA, 19 nt, Artificial Sequence
  Description of Artificial Sequence: Synthetic oligonucleotide
aaaacaagaguauuccuag

SEQ ID NO: 2299809 - RNA, 19 nt, Artificial Sequence
  Description of Artificial Sequence: Synthetic oligonucleotide
aguaucauauaucaguguc

SEQ ID NO: 2299810 - RNA, 19 nt, Artificial Sequence
  Description of Artificial Sequence: Synthetic oligonucleotide
aagacgaaggacuggaagg

SEQ ID NO: 2299811 - RNA, 19 nt, Artificial Sequence
  Description of Artificial Sequence: Synthetic oligonucleotide
auaucuacaguguauaucu

SEQ ID NO: 2299812 - RNA, 19 nt, Artificial Sequence
  Description of Artificial Sequence: Synthetic oligonucleotide
aucuauaacagauccugcc

SEQ ID NO: 2299813 - RNA, 19 nt, Artificial Sequence
  Description of Artificial Sequence: Synthetic oligonucleotide
uaauuuuccauucuaacau

SEQ ID NO: 2299814 - RNA, 19 nt, Artificial Sequence
  Description of Artificial Sequence: Synthetic oligonucleotide
uacaguguauaucugauga

SEQ ID NO: 2299815 - RNA, 19 nt, Artificial Sequence
  Description of Artificial Sequence: Synthetic oligonucleotide
aucagaauagcuccagugc

SEQ ID NO: 2299816 - RNA, 19 nt, Artificial Sequence
  Description of Artificial Sequence: Synthetic oligonucleotide
aauaaagaggcaggcauac

SEQ ID NO: 2299817 - RNA, 19 nt, Artificial Sequence
  Description of Artificial Sequence: Synthetic oligonucleotide
uaaagaggcaggcauacag

SEQ ID NO: 2299818 - RNA, 19 nt, Artificial Sequence
  Description of Artificial Sequence: Synthetic oligonucleotide
acuguaguaguucaagcac

SEQ ID NO: 2299819 - RNA, 19 nt, Artificial Sequence
  Description of Artificial Sequence: Synthetic oligonucleotide
uauaucaguguccacauaa

SEQ ID NO: 2299820 - RNA, 19 nt, Artificial Sequence
  Description of Artificial Sequence: Synthetic oligonucleotide
aacaagaguauuccuagug

SEQ ID NO: 2299821 - RNA, 19 nt, Artificial Sequence
  Description of Artificial Sequence: Synthetic oligonucleotide
ucuguggauaucuacagug

SEQ ID NO: 2299822 - RNA, 19 nt, Artificial Sequence
  Description of Artificial Sequence: Synthetic oligonucleotide
ugauucuuuucauuagugg

SEQ ID NO: 2299823 - RNA, 19 nt, Artificial Sequence
  Description of Artificial Sequence: Synthetic oligonucleotide
uuuaucgaagucacggucc

SEQ ID NO: 2299824 - RNA, 19 nt, Artificial Sequence
  Description of Artificial Sequence: Synthetic oligonucleotide
aaugcaccccaauuaaaag

SEQ ID NO: 2299825 - RNA, 19 nt, Artificial Sequence
  Description of Artificial Sequence: Synthetic oligonucleotide
augucauuaauagugcagc

SEQ ID NO: 2299826 - RNA, 19 nt, Artificial Sequence
  Description of Artificial Sequence: Synthetic oligonucleotide
aaagugacagcauguacca

SEQ ID NO: 2299827 - RNA, 19 nt, Artificial Sequence
  Description of Artificial Sequence: Synthetic oligonucleotide
uuggagguaaacuuguccc

SEQ ID NO: 2299828 - RNA, 19 nt, Artificial Sequence
  Description of Artificial Sequence: Synthetic oligonucleotide
gaaguaaggaugcugcgcc

SEQ ID NO: 2299829 - RNA, 19 nt, Artificial Sequence
  Description of Artificial Sequence: Synthetic oligonucleotide
uccugaugggcauaaauag

SEQ ID NO: 2299830 - RNA, 19 nt, Artificial Sequence
  Description of Artificial Sequence: Synthetic oligonucleotide
uuugcuguucucauaaccu

SEQ ID NO: 2299831 - RNA, 19 nt, Artificial Sequence
  Description of Artificial Sequence: Synthetic oligonucleotide
aagaguauuccuagugugc

SEQ ID NO: 2299832 - RNA, 19 nt, Artificial Sequence
  Description of Artificial Sequence: Synthetic oligonucleotide
auuugcuaauuuuccauuc

SEQ ID NO: 2299833 - RNA, 19 nt, Artificial Sequence
  Description of Artificial Sequence: Synthetic oligonucleotide
uguaguaguucaagcacag

SEQ ID NO: 2299834 - RNA, 19 nt, Artificial Sequence
  Description of Artificial Sequence: Synthetic oligonucleotide
uccuacaucuauaacagau

SEQ ID NO: 2299835 - RNA, 19 nt, Artificial Sequence
  Description of Artificial Sequence: Synthetic oligonucleotide
gacagcauguaccagucag

SEQ ID NO: 2299836 - RNA, 19 nt, Artificial Sequence
  Description of Artificial Sequence: Synthetic oligonucleotide
guugaaaugucuccagcgg

SEQ ID NO: 2299837 - RNA, 19 nt, Artificial Sequence
  Description of Artificial Sequence: Synthetic oligonucleotide
aacgugauucuuuucauua

SEQ ID NO: 2299838 - RNA, 19 nt, Artificial Sequence
  Description of Artificial Sequence: Synthetic oligonucleotide
acaucuauaacagauccug

SEQ ID NO: 2299839 - RNA, 19 nt, Artificial Sequence
  Description of Artificial Sequence: Synthetic oligonucleotide
uuccauucuaacaucuuca

SEQ ID NO: 2299840 - RNA, 19 nt, Artificial Sequence
  Description of Artificial Sequence: Synthetic oligonucleotide
gcuaacugaggccagaacg

SEQ ID NO: 2299841 - RNA, 19 nt, Artificial Sequence
  Description of Artificial Sequence: Synthetic oligonucleotide
cacgcaucagaauagcucc

SEQ ID NO: 2299842 - RNA, 19 nt, Artificial Sequence
  Description of Artificial Sequence: Synthetic oligonucleotide
uuuuaucgaagucacgguc

SEQ ID NO: 2299843 - RNA, 19 nt, Artificial Sequence
  Description of Artificial Sequence: Synthetic oligonucleotide
uugaaaugucuccagcggc

SEQ ID NO: 2299844 - RNA, 19 nt, Artificial Sequence
  Description of Artificial Sequence: Synthetic oligonucleotide
cuaauuuuccauucuaaca

SEQ ID NO: 2299845 - RNA, 19 nt, Artificial Sequence
  Description of Artificial Sequence: Synthetic oligonucleotide
agaaguaaggaugcugcgc

SEQ ID NO: 2299846 - RNA, 19 nt, Artificial Sequence
  Description of Artificial Sequence: Synthetic oligonucleotide
aaguaaugcaccccaauua

SEQ ID NO: 2299847 - RNA, 19 nt, Artificial Sequence
  Description of Artificial Sequence: Synthetic oligonucleotide
aauagugcagccugcucca

SEQ ID NO: 2299848 - RNA, 19 nt, Artificial Sequence
  Description of Artificial Sequence: Synthetic oligonucleotide
cauucuaacaucuucaggu

SEQ ID NO: 2299849 - RNA, 19 nt, Artificial Sequence
  Description of Artificial Sequence: Synthetic oligonucleotide
aacccuaaggcuaacugag

SEQ ID NO: 2299850 - RNA, 19 nt, Artificial Sequence
  Description of Artificial Sequence: Synthetic oligonucleotide
aguguauaucugaugagcg

SEQ ID NO: 2299851 - RNA, 19 nt, Artificial Sequence
  Description of Artificial Sequence: Synthetic oligonucleotide
ugaaaugucuccagcggca

SEQ ID NO: 2299852 - RNA, 19 nt, Artificial Sequence
  Description of Artificial Sequence: Synthetic oligonucleotide
uuugcuaauuuuccauucu

SEQ ID NO: 2299853 - RNA, 19 nt, Artificial Sequence
  Description of Artificial Sequence: Synthetic oligonucleotide
ugauagcagaccauccaag

SEQ ID NO: 2299854 - RNA, 19 nt, Artificial Sequence
  Description of Artificial Sequence: Synthetic oligonucleotide
uaacagauccugccuaugc

SEQ ID NO: 2299855 - RNA, 19 nt, Artificial Sequence
  Description of Artificial Sequence: Synthetic oligonucleotide
caggaaaacagccugguuc

SEQ ID NO: 2299856 - RNA, 19 nt, Artificial Sequence
  Description of Artificial Sequence: Synthetic oligonucleotide
uagcagaccauccaaguaa

SEQ ID NO: 2299857 - RNA, 19 nt, Artificial Sequence
  Description of Artificial Sequence: Synthetic oligonucleotide
agaguauuccuagugugcg

SEQ ID NO: 2299858 - RNA, 19 nt, Artificial Sequence
  Description of Artificial Sequence: Synthetic oligonucleotide
agguugaaaugucuccagc

SEQ ID NO: 2299859 - RNA, 19 nt, Artificial Sequence
  Description of Artificial Sequence: Synthetic oligonucleotide
ucuacaguguauaucugau

SEQ ID NO: 2299860 - RNA, 19 nt, Artificial Sequence
  Description of Artificial Sequence: Synthetic oligonucleotide
gguugaaaugucuccagcg

SEQ ID NO: 2299861 - RNA, 19 nt, Artificial Sequence
  Description of Artificial Sequence: Synthetic oligonucleotide
auaguaucauauaucagug

SEQ ID NO: 2299862 - RNA, 19 nt, Artificial Sequence
  Description of Artificial Sequence: Synthetic oligonucleotide
auggcuauacuguaguagu

SEQ ID NO: 2299863 - RNA, 19 nt, Artificial Sequence
  Description of Artificial Sequence: Synthetic oligonucleotide
acgacaagaaguaaggaug

SEQ ID NO: 2299864 - RNA, 19 nt, Artificial Sequence
  Description of Artificial Sequence: Synthetic oligonucleotide
aaauaguaucauauaucag

SEQ ID NO: 2299865 - RNA, 19 nt, Artificial Sequence
  Description of Artificial Sequence: Synthetic oligonucleotide
ugguucagcggccaaacca

SEQ ID NO: 2299866 - RNA, 19 nt, Artificial Sequence
  Description of Artificial Sequence: Synthetic oligonucleotide
ugcaccccaauuaaaaguc

SEQ ID NO: 2299867 - RNA, 19 nt, Artificial Sequence
  Description of Artificial Sequence: Synthetic oligonucleotide
ugauuugcuaauuuuccau

SEQ ID NO: 2299868 - RNA, 19 nt, Artificial Sequence
  Description of Artificial Sequence: Synthetic oligonucleotide
aguaaugcaccccaauuaa

SEQ ID NO: 2299869 - RNA, 19 nt, Artificial Sequence
  Description of Artificial Sequence: Synthetic oligonucleotide
caagaguauuccuagugug

SEQ ID NO: 2299870 - RNA, 19 nt, Artificial Sequence
  Description of Artificial Sequence: Synthetic oligonucleotide
ccacaugucauuaauagug

SEQ ID NO: 2299871 - RNA, 19 nt, Artificial Sequence
  Description of Artificial Sequence: Synthetic oligonucleotide
uggucuguggauaucuaca

SEQ ID NO: 2299872 - RNA, 19 nt, Artificial Sequence
  Description of Artificial Sequence: Synthetic oligonucleotide
cuuuucauuaguggguagg

SEQ ID NO: 2299873 - RNA, 19 nt, Artificial Sequence
  Description of Artificial Sequence: Synthetic oligonucleotide
guuggagguaaacuugucc

SEQ ID NO: 2299874 - RNA, 19 nt, Artificial Sequence
  Description of Artificial Sequence: Synthetic oligonucleotide
caucagaauagcuccagug

SEQ ID NO: 2299875 - RNA, 19 nt, Artificial Sequence
  Description of Artificial Sequence: Synthetic oligonucleotide
aacagauccugccuaugcu

SEQ ID NO: 2299876 - RNA, 19 nt, Artificial Sequence
  Description of Artificial Sequence: Synthetic oligonucleotide
uuaucgaagucacgguccc

SEQ ID NO: 2299877 - RNA, 19 nt, Artificial Sequence
  Description of Artificial Sequence: Synthetic oligonucleotide
agaccauccaaguaaugca

SEQ ID NO: 2299878 - RNA, 19 nt, Artificial Sequence
  Description of Artificial Sequence: Synthetic oligonucleotide
ccacaaauuuccaaggacg

SEQ ID NO: 2299879 - RNA, 19 nt, Artificial Sequence
  Description of Artificial Sequence: Synthetic oligonucleotide
aauagcuccagugccaaaa

SEQ ID NO: 2299880 - RNA, 19 nt, Artificial Sequence
  Description of Artificial Sequence: Synthetic oligonucleotide
gauaucuacaguguauauc

SEQ ID NO: 2299881 - RNA, 19 nt, Artificial Sequence
  Description of Artificial Sequence: Synthetic oligonucleotide
ucauuaguggguaggugac

SEQ ID NO: 2299882 - RNA, 19 nt, Artificial Sequence
  Description of Artificial Sequence: Synthetic oligonucleotide
uugauagcagaccauccaa

SEQ ID NO: 2299883 - RNA, 19 nt, Artificial Sequence
  Description of Artificial Sequence: Synthetic oligonucleotide
ugcuccacgcaucagaaua

SEQ ID NO: 2299884 - RNA, 19 nt, Artificial Sequence
  Description of Artificial Sequence: Synthetic oligonucleotide
ugcuaauuuuccauucuaa

SEQ ID NO: 2299885 - RNA, 19 nt, Artificial Sequence
  Description of Artificial Sequence: Synthetic oligonucleotide
gugacgacaagaaguaagg

SEQ ID NO: 2299886 - RNA, 19 nt, Artificial Sequence
  Description of Artificial Sequence: Synthetic oligonucleotide
aguucaagcacaggagaac

SEQ ID NO: 2299887 - RNA, 19 nt, Artificial Sequence
  Description of Artificial Sequence: Synthetic oligonucleotide
aucuacaguguauaucuga

SEQ ID NO: 2299888 - RNA, 19 nt, Artificial Sequence
  Description of Artificial Sequence: Synthetic oligonucleotide
gagugcaccaccaaguuca

SEQ ID NO: 2299889 - RNA, 19 nt, Artificial Sequence
  Description of Artificial Sequence: Synthetic oligonucleotide
acaggagaacucccagugc

SEQ ID NO: 2299890 - RNA, 19 nt, Artificial Sequence
  Description of Artificial Sequence: Synthetic oligonucleotide
cagaccauccaaguaaugc

SEQ ID NO: 2299891 - RNA, 19 nt, Artificial Sequence
  Description of Artificial Sequence: Synthetic oligonucleotide
caggagaacucccagugcc

SEQ ID NO: 2299892 - RNA, 19 nt, Artificial Sequence
  Description of Artificial Sequence: Synthetic oligonucleotide
aagucacggucccacaugu

SEQ ID NO: 2299893 - RNA, 19 nt, Artificial Sequence
  Description of Artificial Sequence: Synthetic oligonucleotide
uaaacuugucccagcaguc

SEQ ID NO: 2299894 - RNA, 19 nt, Artificial Sequence
  Description of Artificial Sequence: Synthetic oligonucleotide
caaugcuccaggugcaagg

SEQ ID NO: 2299895 - RNA, 19 nt, Artificial Sequence
  Description of Artificial Sequence: Synthetic oligonucleotide
caguguauaucugaugagc

SEQ ID NO: 2299896 - RNA, 19 nt, Artificial Sequence
  Description of Artificial Sequence: Synthetic oligonucleotide
gaugggcauaaauaguauc

SEQ ID NO: 2299897 - RNA, 19 nt, Artificial Sequence
  Description of Artificial Sequence: Synthetic oligonucleotide
auuccuagugugcgguugg

SEQ ID NO: 2299898 - RNA, 19 nt, Artificial Sequence
  Description of Artificial Sequence: Synthetic oligonucleotide
acaguguauaucugaugag

SEQ ID NO: 2299899 - RNA, 19 nt, Artificial Sequence
  Description of Artificial Sequence: Synthetic oligonucleotide
agcgagguggguuccuacc

SEQ ID NO: 2299900 - RNA, 19 nt, Artificial Sequence
  Description of Artificial Sequence: Synthetic oligonucleotide
guaucauauaucagugucc

SEQ ID NO: 2299901 - RNA, 19 nt, Artificial Sequence
  Description of Artificial Sequence: Synthetic oligonucleotide
aauagggcgauuugcuguu

SEQ ID NO: 2299902 - RNA, 19 nt, Artificial Sequence
  Description of Artificial Sequence: Synthetic oligonucleotide
uuuccaaggacgauuccua

SEQ ID NO: 2299903 - RNA, 19 nt, Artificial Sequence
  Description of Artificial Sequence: Synthetic oligonucleotide
agauccugccuaugcuucc

SEQ ID NO: 2299904 - RNA, 19 nt, Artificial Sequence
  Description of Artificial Sequence: Synthetic oligonucleotide
cauggcuauacuguaguag

SEQ ID NO: 2299905 - RNA, 19 nt, Artificial Sequence
  Description of Artificial Sequence: Synthetic oligonucleotide
aguaggggagggucugacc

SEQ ID NO: 2299906 - RNA, 19 nt, Artificial Sequence
  Description of Artificial Sequence: Synthetic oligonucleotide
uguggauaucuacagugua

SEQ ID NO: 2299907 - RNA, 19 nt, Artificial Sequence
  Description of Artificial Sequence: Synthetic oligonucleotide
cauuaauagugcagccugc

SEQ ID NO: 2299908 - RNA, 19 nt, Artificial Sequence
  Description of Artificial Sequence: Synthetic oligonucleotide
acaagaaguaaggaugcug

SEQ ID NO: 2299909 - RNA, 19 nt, Artificial Sequence
  Description of Artificial Sequence: Synthetic oligonucleotide
uaggugacgacaagaagua

SEQ ID NO: 2299910 - RNA, 19 nt, Artificial Sequence
  Description of Artificial Sequence: Synthetic oligonucleotide
gaguauuccuagugugcgg

SEQ ID NO: 2299911 - RNA, 19 nt, Artificial Sequence
  Description of Artificial Sequence: Synthetic oligonucleotide
gacuucaggccaaucacag

SEQ ID NO: 2299912 - RNA, 19 nt, Artificial Sequence
  Description of Artificial Sequence: Synthetic oligonucleotide
aucgaagucacggucccac

SEQ ID NO: 2299913 - RNA, 19 nt, Artificial Sequence
  Description of Artificial Sequence: Synthetic oligonucleotide
caucuauaacagauccugc

SEQ ID NO: 2299914 - RNA, 19 nt, Artificial Sequence
  Description of Artificial Sequence: Synthetic oligonucleotide
aaacagccugguucagcgg

SEQ ID NO: 2299915 - RNA, 19 nt, Artificial Sequence
  Description of Artificial Sequence: Synthetic oligonucleotide
guaguucaagcacaggaga

SEQ ID NO: 2299916 - RNA, 19 nt, Artificial Sequence
  Description of Artificial Sequence: Synthetic oligonucleotide
uguccugaugggcauaaau

SEQ ID NO: 2299917 - RNA, 19 nt, Artificial Sequence
  Description of Artificial Sequence: Synthetic oligonucleotide
cccaauuaaaagucaaccc

SEQ ID NO: 2299918 - RNA, 19 nt, Artificial Sequence
  Description of Artificial Sequence: Synthetic oligonucleotide
ggaagguugaaaugucucc

SEQ ID NO: 2299919 - RNA, 19 nt, Artificial Sequence
  Description of Artificial Sequence: Synthetic oligonucleotide
uauaucugaugagcgaggu

SEQ ID NO: 2299920 - RNA, 19 nt, Artificial Sequence
  Description of Artificial Sequence: Synthetic oligonucleotide
uaguaucauauaucagugu

SEQ ID NO: 2299921 - RNA, 19 nt, Artificial Sequence
  Description of Artificial Sequence: Synthetic oligonucleotide
cagaacgugauucuuuuca

SEQ ID NO: 2299922 - RNA, 19 nt, Artificial Sequence
  Description of Artificial Sequence: Synthetic oligonucleotide
gaagguugaaaugucucca

SEQ ID NO: 2299923 - RNA, 19 nt, Artificial Sequence
  Description of Artificial Sequence: Synthetic oligonucleotide
uggagguaaacuuguccca

SEQ ID NO: 2299924 - RNA, 19 nt, Artificial Sequence
  Description of Artificial Sequence: Synthetic oligonucleotide
auaucaguguccacauaac

SEQ ID NO: 2299925 - RNA, 19 nt, Artificial Sequence
  Description of Artificial Sequence: Synthetic oligonucleotide
gaagucacggucccacaug

SEQ ID NO: 2299926 - RNA, 19 nt, Artificial Sequence
  Description of Artificial Sequence: Synthetic oligonucleotide
caauuaaaagucaacccua

SEQ ID NO: 2299927 - RNA, 19 nt, Artificial Sequence
  Description of Artificial Sequence: Synthetic oligonucleotide
aacucccagugccaacguc

SEQ ID NO: 2299928 - RNA, 19 nt, Artificial Sequence
  Description of Artificial Sequence: Synthetic oligonucleotide
uugcuaauuuuccauucua

SEQ ID NO: 2299929 - RNA, 19 nt, Artificial Sequence
  Description of Artificial Sequence: Synthetic oligonucleotide
guaaacuugucccagcagu

SEQ ID NO: 2299930 - RNA, 19 nt, Artificial Sequence
  Description of Artificial Sequence: Synthetic oligonucleotide
uaucuacaguguauaucug

SEQ ID NO: 2299931 - RNA, 19 nt, Artificial Sequence
  Description of Artificial Sequence: Synthetic oligonucleotide
cacaaauuuccaaggacga

SEQ ID NO: 2299932 - RNA, 19 nt, Artificial Sequence
  Description of Artificial Sequence: Synthetic oligonucleotide
auuaguggguaggugacga

SEQ ID NO: 2299933 - RNA, 19 nt, Artificial Sequence
  Description of Artificial Sequence: Synthetic oligonucleotide
guaggggagggucugacca

SEQ ID NO: 2299934 - RNA, 19 nt, Artificial Sequence
  Description of Artificial Sequence: Synthetic oligonucleotide
agguaaacuugucccagca

SEQ ID NO: 2299935 - RNA, 19 nt, Artificial Sequence
  Description of Artificial Sequence: Synthetic oligonucleotide
gugcaaggcaaguacagca

SEQ ID NO: 2299936 - RNA, 19 nt, Artificial Sequence
  Description of Artificial Sequence: Synthetic oligonucleotide
ggugacgacaagaaguaag

SEQ ID NO: 2299937 - RNA, 19 nt, Artificial Sequence
  Description of Artificial Sequence: Synthetic oligonucleotide
ugaugggcauaaauaguau

SEQ ID NO: 2299938 - RNA, 19 nt, Artificial Sequence
  Description of Artificial Sequence: Synthetic oligonucleotide
uauuccuagugugcgguug

SEQ ID NO: 2299939 - RNA, 19 nt, Artificial Sequence
  Description of Artificial Sequence: Synthetic oligonucleotide
uggauaucuacaguguaua

SEQ ID NO: 2299940 - RNA, 19 nt, Artificial Sequence
  Description of Artificial Sequence: Synthetic oligonucleotide
agguuguuuuguuucuucu

SEQ ID NO: 2299941 - RNA, 19 nt, Artificial Sequence
  Description of Artificial Sequence: Synthetic oligonucleotide
cuugauagcagaccaucca

SEQ ID NO: 2299942 - RNA, 19 nt, Artificial Sequence
  Description of Artificial Sequence: Synthetic oligonucleotide
gugauucuuuucauuagug

SEQ ID NO: 2299943 - RNA, 19 nt, Artificial Sequence
  Description of Artificial Sequence: Synthetic oligonucleotide
aguauuccuagugugcggu

SEQ ID NO: 2299944 - RNA, 19 nt, Artificial Sequence
  Description of Artificial Sequence: Synthetic oligonucleotide
cugaugggcauaaauagua

SEQ ID NO: 2299945 - RNA, 19 nt, Artificial Sequence
  Description of Artificial Sequence: Synthetic oligonucleotide
guaggugacgacaagaagu

SEQ ID NO: 2299946 - RNA, 19 nt, Artificial Sequence
  Description of Artificial Sequence: Synthetic oligonucleotide
uccagcggcaauagggcga

SEQ ID NO: 2299947 - RNA, 19 nt, Artificial Sequence
  Description of Artificial Sequence: Synthetic oligonucleotide
ugaugagcgagguggguuc

SEQ ID NO: 2299948 - RNA, 19 nt, Artificial Sequence
  Description of Artificial Sequence: Synthetic oligonucleotide
uaaggcuaacugaggccag

SEQ ID NO: 2299949 - RNA, 19 nt, Artificial Sequence
  Description of Artificial Sequence: Synthetic oligonucleotide
uucagcggccaaaccaaug

SEQ ID NO: 2299950 - RNA, 19 nt, Artificial Sequence
  Description of Artificial Sequence: Synthetic oligonucleotide
gagguaaacuugucccagc

SEQ ID NO: 2299951 - RNA, 19 nt, Artificial Sequence
  Description of Artificial Sequence: Synthetic oligonucleotide
cuacaguguauaucugaug

SEQ ID NO: 2299952 - RNA, 19 nt, Artificial Sequence
  Description of Artificial Sequence: Synthetic oligonucleotide
gccacagcaguguaguagg

SEQ ID NO: 2299953 - RNA, 19 nt, Artificial Sequence
  Description of Artificial Sequence: Synthetic oligonucleotide
uguccacauaacuccagaa

SEQ ID NO: 2299954 - RNA, 19 nt, Artificial Sequence
  Description of Artificial Sequence: Synthetic oligonucleotide
cuaaggcuaacugaggcca

SEQ ID NO: 2299955 - RNA, 19 nt, Artificial Sequence
  Description of Artificial Sequence: Synthetic oligonucleotide
agaacgugauucuuuucau

SEQ ID NO: 2299956 - RNA, 19 nt, Artificial Sequence
  Description of Artificial Sequence: Synthetic oligonucleotide
gacgacaagaaguaaggau

SEQ ID NO: 2299957 - RNA, 19 nt, Artificial Sequence
  Description of Artificial Sequence: Synthetic oligonucleotide
aaucacagcgucaucuuuu

SEQ ID NO: 2299958 - RNA, 19 nt, Artificial Sequence
  Description of Artificial Sequence: Synthetic oligonucleotide
ggucuguggauaucuacag

SEQ ID NO: 2299959 - RNA, 19 nt, Artificial Sequence
  Description of Artificial Sequence: Synthetic oligonucleotide
ugcgcccauggcuauacug

SEQ ID NO: 2299960 - RNA, 19 nt, Artificial Sequence
  Description of Artificial Sequence: Synthetic oligonucleotide
cuguaguaguucaagcaca

SEQ ID NO: 2299961 - RNA, 19 nt, Artificial Sequence
  Description of Artificial Sequence: Synthetic oligonucleotide
uucuuuucauuagugggua

SEQ ID NO: 2299962 - RNA, 19 nt, Artificial Sequence
  Description of Artificial Sequence: Synthetic oligonucleotide
ccuagugugcgguuggagg

SEQ ID NO: 2299963 - RNA, 19 nt, Artificial Sequence
  Description of Artificial Sequence: Synthetic oligonucleotide
auaucugaugagcgaggug

SEQ ID NO: 2299964 - RNA, 19 nt, Artificial Sequence
  Description of Artificial Sequence: Synthetic oligonucleotide
gucacggucccacauguca

SEQ ID NO: 2299965 - RNA, 19 nt, Artificial Sequence
  Description of Artificial Sequence: Synthetic oligonucleotide
ucuucagguuguuuuguuu

SEQ ID NO: 2299966 - RNA, 19 nt, Artificial Sequence
  Description of Artificial Sequence: Synthetic oligonucleotide
ugagugcaccaccaaguuc

SEQ ID NO: 2299967 - RNA, 19 nt, Artificial Sequence
  Description of Artificial Sequence: Synthetic oligonucleotide
acaggagcccuugauagca

SEQ ID NO: 2299968 - RNA, 19 nt, Artificial Sequence
  Description of Artificial Sequence: Synthetic oligonucleotide
ugcuguucucauaaccuuu

SEQ ID NO: 2299969 - RNA, 19 nt, Artificial Sequence
  Description of Artificial Sequence: Synthetic oligonucleotide
cuggucuguggauaucuac

SEQ ID NO: 2299970 - RNA, 19 nt, Artificial Sequence
  Description of Artificial Sequence: Synthetic oligonucleotide
uucuugguguucucccuga

SEQ ID NO: 2299971 - RNA, 19 nt, Artificial Sequence
  Description of Artificial Sequence: Synthetic oligonucleotide
uccacgcaucagaauagcu

SEQ ID NO: 2299972 - RNA, 19 nt, Artificial Sequence
  Description of Artificial Sequence: Synthetic oligonucleotide
accccaauuaaaagucaac

SEQ ID NO: 2299973 - RNA, 19 nt, Artificial Sequence
  Description of Artificial Sequence: Synthetic oligonucleotide
guguauaucugaugagcga

SEQ ID NO: 2299974 - RNA, 19 nt, Artificial Sequence
  Description of Artificial Sequence: Synthetic oligonucleotide
acagcauguaccagucagg

SEQ ID NO: 2299975 - RNA, 19 nt, Artificial Sequence
  Description of Artificial Sequence: Synthetic oligonucleotide
agcugggucacaggagccc

SEQ ID NO: 2299976 - RNA, 19 nt, Artificial Sequence
  Description of Artificial Sequence: Synthetic oligonucleotide
uccaaggacgauuccuaaa

SEQ ID NO: 2299977 - RNA, 19 nt, Artificial Sequence
  Description of Artificial Sequence: Synthetic oligonucleotide
gguaggugacgacaagaag

SEQ ID NO: 2299978 - RNA, 19 nt, Artificial Sequence
  Description of Artificial Sequence: Synthetic oligonucleotide
uaacugaggccagaacgug

SEQ ID NO: 2299979 - RNA, 19 nt, Artificial Sequence
  Description of Artificial Sequence: Synthetic oligonucleotide
caacccuaaggcuaacuga

SEQ ID NO: 2299980 - RNA, 19 nt, Artificial Sequence
  Description of Artificial Sequence: Synthetic oligonucleotide
uucaggccaaucacagcgu

SEQ ID NO: 2299981 - RNA, 19 nt, Artificial Sequence
  Description of Artificial Sequence: Synthetic oligonucleotide
uggguuccuaccacagcca

SEQ ID NO: 2299982 - RNA, 19 nt, Artificial Sequence
  Description of Artificial Sequence: Synthetic oligonucleotide
agacgaaggacuggaaggu

SEQ ID NO: 2299983 - RNA, 19 nt, Artificial Sequence
  Description of Artificial Sequence: Synthetic oligonucleotide
ugggcauaaauaguaucau

SEQ ID NO: 2299984 - RNA, 19 nt, Artificial Sequence
  Description of Artificial Sequence: Synthetic oligonucleotide
ccccaauuaaaagucaacc

SEQ ID NO: 2299985 - RNA, 19 nt, Artificial Sequence
  Description of Artificial Sequence: Synthetic oligonucleotide
cauccaaguaaugcacccc

SEQ ID NO: 2299986 - RNA, 19 nt, Artificial Sequence
  Description of Artificial Sequence: Synthetic oligonucleotide
agugccaacgucagcuguc

SEQ ID NO: 2299987 - RNA, 19 nt, Artificial Sequence
  Description of Artificial Sequence: Synthetic oligonucleotide
gguaaacuugucccagcag

SEQ ID NO: 2299988 - RNA, 19 nt, Artificial Sequence
  Description of Artificial Sequence: Synthetic oligonucleotide
cauuaguggguaggugacg

SEQ ID NO: 2299989 - RNA, 19 nt, Artificial Sequence
  Description of Artificial Sequence: Synthetic oligonucleotide
guccacauaacuccagaaa

SEQ ID NO: 2299990 - RNA, 19 nt, Artificial Sequence
  Description of Artificial Sequence: Synthetic oligonucleotide
agggcgauuugcuguucuc

SEQ ID NO: 2299991 - RNA, 19 nt, Artificial Sequence
  Description of Artificial Sequence: Synthetic oligonucleotide
cuaacugaggccagaacgu

SEQ ID NO: 2299992 - RNA, 19 nt, Artificial Sequence
  Description of Artificial Sequence: Synthetic oligonucleotide
ucacggucccacaugucau

SEQ ID NO: 2299993 - RNA, 19 nt, Artificial Sequence
  Description of Artificial Sequence: Synthetic oligonucleotide
aagucaacccuaaggcuaa

SEQ ID NO: 2299994 - RNA, 19 nt, Artificial Sequence
  Description of Artificial Sequence: Synthetic oligonucleotide
cuauaacagauccugccua

SEQ ID NO: 2299995 - RNA, 19 nt, Artificial Sequence
  Description of Artificial Sequence: Synthetic oligonucleotide
acgaaggacuggaagguug

SEQ ID NO: 2299996 - RNA, 19 nt, Artificial Sequence
  Description of Artificial Sequence: Synthetic oligonucleotide
guaguaguucaagcacagg

SEQ ID NO: 2299997 - RNA, 19 nt, Artificial Sequence
  Description of Artificial Sequence: Synthetic oligonucleotide
uagggcgauuugcuguucu

SEQ ID NO: 2299998 - RNA, 19 nt, Artificial Sequence
  Description of Artificial Sequence: Synthetic oligonucleotide
ccuaaggcuaacugaggcc

SEQ ID NO: 2299999 - RNA, 19 nt, Artificial Sequence
  Description of Artificial Sequence: Synthetic oligonucleotide
uuccuacaucuauaacaga

SEQ ID NO: 2300000 - RNA, 19 nt, Artificial Sequence
  Description of Artificial Sequence: Synthetic oligonucleotide
aggugcaaggcaaguacag

SEQ ID NO: 2300001 - RNA, 19 nt, Artificial Sequence
  Description of Artificial Sequence: Synthetic oligonucleotide
aggaugcugcgcccauggc

SEQ ID NO: 2300002 - RNA, 19 nt, Artificial Sequence
  Description of Artificial Sequence: Synthetic oligonucleotide
aguaaggaugcugcgccca

SEQ ID NO: 2300003 - RNA, 19 nt, Artificial Sequence
  Description of Artificial Sequence: Synthetic oligonucleotide
gagcccuugauagcagacc

SEQ ID NO: 2300004 - RNA, 19 nt, Artificial Sequence
  Description of Artificial Sequence: Synthetic oligonucleotide
guuggcuccugcaaggcuc

SEQ ID NO: 2300005 - RNA, 19 nt, Artificial Sequence
  Description of Artificial Sequence: Synthetic oligonucleotide
uuaguggguaggugacgac

SEQ ID NO: 2300006 - RNA, 19 nt, Artificial Sequence
  Description of Artificial Sequence: Synthetic oligonucleotide
ccuacaucuauaacagauc

SEQ ID NO: 2300007 - RNA, 19 nt, Artificial Sequence
  Description of Artificial Sequence: Synthetic oligonucleotide
ccauccaaguaaugcaccc

SEQ ID NO: 2300008 - RNA, 19 nt, Artificial Sequence
  Description of Artificial Sequence: Synthetic oligonucleotide
ggcauaaauaguaucauau

SEQ ID NO: 2300009 - RNA, 19 nt, Artificial Sequence
  Description of Artificial Sequence: Synthetic oligonucleotide
auaacagauccugccuaug

SEQ ID NO: 2300010 - RNA, 19 nt, Artificial Sequence
  Description of Artificial Sequence: Synthetic oligonucleotide
gaugcugcgcccauggcua

SEQ ID NO: 2300011 - RNA, 19 nt, Artificial Sequence
  Description of Artificial Sequence: Synthetic oligonucleotide
caauagggcgauuugcugu

SEQ ID NO: 2300012 - RNA, 19 nt, Artificial Sequence
  Description of Artificial Sequence: Synthetic oligonucleotide
ugugcgguuggagguaaac

SEQ ID NO: 2300013 - RNA, 19 nt, Artificial Sequence
  Description of Artificial Sequence: Synthetic oligonucleotide
aguuggcuccugcaaggcu

SEQ ID NO: 2300014 - RNA, 19 nt, Artificial Sequence
  Description of Artificial Sequence: Synthetic oligonucleotide
ggagguaaacuugucccag

SEQ ID NO: 2300015 - RNA, 19 nt, Artificial Sequence
  Description of Artificial Sequence: Synthetic oligonucleotide
cauguaccagucaggaaaa

SEQ ID NO: 2300016 - RNA, 19 nt, Artificial Sequence
  Description of Artificial Sequence: Synthetic oligonucleotide
ccaauuaaaagucaacccu

SEQ ID NO: 2300017 - RNA, 19 nt, Artificial Sequence
  Description of Artificial Sequence: Synthetic oligonucleotide
ccuugauagcagaccaucc

SEQ ID NO: 2300018 - RNA, 19 nt, Artificial Sequence
  Description of Artificial Sequence: Synthetic oligonucleotide
aagcacaggagaacuccca

SEQ ID NO: 2300019 - RNA, 19 nt, Artificial Sequence
  Description of Artificial Sequence: Synthetic oligonucleotide
uggcuauacuguaguaguu

SEQ ID NO: 2300020 - RNA, 19 nt, Artificial Sequence
  Description of Artificial Sequence: Synthetic oligonucleotide
uccuagugugcgguuggag

SEQ ID NO: 2300021 - RNA, 19 nt, Artificial Sequence
  Description of Artificial Sequence: Synthetic oligonucleotide
acaaauuuccaaggacgau

SEQ ID NO: 2300022 - RNA, 19 nt, Artificial Sequence
  Description of Artificial Sequence: Synthetic oligonucleotide
agaauagcuccagugccaa

SEQ ID NO: 2300023 - RNA, 19 nt, Artificial Sequence
  Description of Artificial Sequence: Synthetic oligonucleotide
gcaauagggcgauuugcug

SEQ ID NO: 2300024 - RNA, 19 nt, Artificial Sequence
  Description of Artificial Sequence: Synthetic oligonucleotide
aaggcuaacugaggccaga

SEQ ID NO: 2300025 - RNA, 19 nt, Artificial Sequence
  Description of Artificial Sequence: Synthetic oligonucleotide
gcaaggcaaguacagcagc

SEQ ID NO: 2300026 - RNA, 19 nt, Artificial Sequence
  Description of Artificial Sequence: Synthetic oligonucleotide
gagguggguuccuaccaca

SEQ ID NO: 2300027 - RNA, 19 nt, Artificial Sequence
  Description of Artificial Sequence: Synthetic oligonucleotide
ucuggucuguggauaucua

SEQ ID NO: 2300028 - RNA, 19 nt, Artificial Sequence
  Description of Artificial Sequence: Synthetic oligonucleotide
uccucuggucuguggauau

SEQ ID NO: 2300029 - RNA, 19 nt, Artificial Sequence
  Description of Artificial Sequence: Synthetic oligonucleotide
ccacgcaucagaauagcuc

SEQ ID NO: 2300030 - RNA, 19 nt, Artificial Sequence
  Description of Artificial Sequence: Synthetic oligonucleotide
guguccacauaacuccaga

SEQ ID NO: 2300031 - RNA, 19 nt, Artificial Sequence
  Description of Artificial Sequence: Synthetic oligonucleotide
cccaaagccacugagccac

SEQ ID NO: 2300032 - RNA, 19 nt, Artificial Sequence
  Description of Artificial Sequence: Synthetic oligonucleotide
auguaccagucaggaaaac

SEQ ID NO: 2300033 - RNA, 19 nt, Artificial Sequence
  Description of Artificial Sequence: Synthetic oligonucleotide
gaugagcgagguggguucc

SEQ ID NO: 2300034 - RNA, 19 nt, Artificial Sequence
  Description of Artificial Sequence: Synthetic oligonucleotide
ucgaagucacggucccaca

SEQ ID NO: 2300035 - RNA, 19 nt, Artificial Sequence
  Description of Artificial Sequence: Synthetic oligonucleotide
cuauacuguaguaguucaa

SEQ ID NO: 2300036 - RNA, 19 nt, Artificial Sequence
  Description of Artificial Sequence: Synthetic oligonucleotide
cuagugugcgguuggaggu

SEQ ID NO: 2300037 - RNA, 19 nt, Artificial Sequence
  Description of Artificial Sequence: Synthetic oligonucleotide
gucacaggagcccuugaua

SEQ ID NO: 2300038 - RNA, 19 nt, Artificial Sequence
  Description of Artificial Sequence: Synthetic oligonucleotide
guccugaugggcauaaaua

SEQ ID NO: 2300039 - RNA, 19 nt, Artificial Sequence
  Description of Artificial Sequence: Synthetic oligonucleotide
aguccucuggucuguggau

SEQ ID NO: 2300040 - RNA, 19 nt, Artificial Sequence
  Description of Artificial Sequence: Synthetic oligonucleotide
gccaacgucagcugucccc

SEQ ID NO: 2300041 - RNA, 19 nt, Artificial Sequence
  Description of Artificial Sequence: Synthetic oligonucleotide
auaaagaggcaggcauaca

SEQ ID NO: 2300042 - RNA, 19 nt, Artificial Sequence
  Description of Artificial Sequence: Synthetic oligonucleotide
ggcuauacuguaguaguuc

SEQ ID NO: 2300043 - RNA, 19 nt, Artificial Sequence
  Description of Artificial Sequence: Synthetic oligonucleotide
agcauguaccagucaggaa

SEQ ID NO: 2300044 - RNA, 19 nt, Artificial Sequence
  Description of Artificial Sequence: Synthetic oligonucleotide
guucaagcacaggagaacu

SEQ ID NO: 2300045 - RNA, 19 nt, Artificial Sequence
  Description of Artificial Sequence: Synthetic oligonucleotide
aguggguaggugacgacaa

SEQ ID NO: 2300046 - RNA, 19 nt, Artificial Sequence
  Description of Artificial Sequence: Synthetic oligonucleotide
uaaggaugcugcgcccaug

SEQ ID NO: 2300047 - RNA, 19 nt, Artificial Sequence
  Description of Artificial Sequence: Synthetic oligonucleotide
caggugcaaggcaaguaca

SEQ ID NO: 2300048 - RNA, 19 nt, Artificial Sequence
  Description of Artificial Sequence: Synthetic oligonucleotide
guggguaggugacgacaag

SEQ ID NO: 2300049 - RNA, 19 nt, Artificial Sequence
  Description of Artificial Sequence: Synthetic oligonucleotide
caccccaauuaaaagucaa

SEQ ID NO: 2300050 - RNA, 19 nt, Artificial Sequence
  Description of Artificial Sequence: Synthetic oligonucleotide
uaguaggggagggucugac

SEQ ID NO: 2300051 - RNA, 19 nt, Artificial Sequence
  Description of Artificial Sequence: Synthetic oligonucleotide
caaauuuccaaggacgauu

SEQ ID NO: 2300052 - RNA, 19 nt, Artificial Sequence
  Description of Artificial Sequence: Synthetic oligonucleotide
cugguucagcggccaaacc

SEQ ID NO: 2300053 - RNA, 19 nt, Artificial Sequence
  Description of Artificial Sequence: Synthetic oligonucleotide
cagcauguaccagucagga

SEQ ID NO: 2300054 - RNA, 19 nt, Artificial Sequence
  Description of Artificial Sequence: Synthetic oligonucleotide
ggugcaaggcaaguacagc

SEQ ID NO: 2300055 - RNA, 19 nt, Artificial Sequence
  Description of Artificial Sequence: Synthetic oligonucleotide
cauggccaccccaaagcca

SEQ ID NO: 2300056 - RNA, 19 nt, Artificial Sequence
  Description of Artificial Sequence: Synthetic oligonucleotide
agguggguuccuaccacag

SEQ ID NO: 2300057 - RNA, 19 nt, Artificial Sequence
  Description of Artificial Sequence: Synthetic oligonucleotide
gaggccagaacgugauucu

SEQ ID NO: 2300058 - RNA, 19 nt, Artificial Sequence
  Description of Artificial Sequence: Synthetic oligonucleotide
uccaggugcaaggcaagua

SEQ ID NO: 2300059 - RNA, 19 nt, Artificial Sequence
  Description of Artificial Sequence: Synthetic oligonucleotide
auagugcagccugcuccac

SEQ ID NO: 2300060 - RNA, 19 nt, Artificial Sequence
  Description of Artificial Sequence: Synthetic oligonucleotide
guaaugcaccccaauuaaa

SEQ ID NO: 2300061 - RNA, 19 nt, Artificial Sequence
  Description of Artificial Sequence: Synthetic oligonucleotide
ccaaggacgauuccuaaaa

SEQ ID NO: 2300062 - RNA, 19 nt, Artificial Sequence
  Description of Artificial Sequence: Synthetic oligonucleotide
caaguaaugcaccccaauu

SEQ ID NO: 2300063 - RNA, 19 nt, Artificial Sequence
  Description of Artificial Sequence: Synthetic oligonucleotide
gagcgagguggguuccuac

SEQ ID NO: 2300064 - RNA, 19 nt, Artificial Sequence
  Description of Artificial Sequence: Synthetic oligonucleotide
agcagaccauccaaguaau

SEQ ID NO: 2300065 - RNA, 19 nt, Artificial Sequence
  Description of Artificial Sequence: Synthetic oligonucleotide
cagcgcucccagcauggcc

SEQ ID NO: 2300066 - RNA, 19 nt, Artificial Sequence
  Description of Artificial Sequence: Synthetic oligonucleotide
agcggcaauagggcgauuu

SEQ ID NO: 2300067 - RNA, 19 nt, Artificial Sequence
  Description of Artificial Sequence: Synthetic oligonucleotide
caguguccacauaacucca

SEQ ID NO: 2300068 - RNA, 19 nt, Artificial Sequence
  Description of Artificial Sequence: Synthetic oligonucleotide
gugccaacgucagcugucc

SEQ ID NO: 2300069 - RNA, 19 nt, Artificial Sequence
  Description of Artificial Sequence: Synthetic oligonucleotide
gaacgugauucuuuucauu

SEQ ID NO: 2300070 - RNA, 19 nt, Artificial Sequence
  Description of Artificial Sequence: Synthetic oligonucleotide
augcuuccugagugcacca

SEQ ID NO: 2300071 - RNA, 19 nt, Artificial Sequence
  Description of Artificial Sequence: Synthetic oligonucleotide
uaucgaagucacgguccca

SEQ ID NO: 2300072 - RNA, 19 nt, Artificial Sequence
  Description of Artificial Sequence: Synthetic oligonucleotide
auagggcgauuugcuguuc

SEQ ID NO: 2300073 - RNA, 19 nt, Artificial Sequence
  Description of Artificial Sequence: Synthetic oligonucleotide
ggcaaguacagcagccaug

SEQ ID NO: 2300074 - RNA, 19 nt, Artificial Sequence
  Description of Artificial Sequence: Synthetic oligonucleotide
agucaacccuaaggcuaac

SEQ ID NO: 2300075 - RNA, 19 nt, Artificial Sequence
  Description of Artificial Sequence: Synthetic oligonucleotide
gcgguuggagguaaacuug

SEQ ID NO: 2300076 - RNA, 19 nt, Artificial Sequence
  Description of Artificial Sequence: Synthetic oligonucleotide
uuccuaccacagccacagc

SEQ ID NO: 2300077 - RNA, 19 nt, Artificial Sequence
  Description of Artificial Sequence: Synthetic oligonucleotide
gcaaguacagcagccaugu

SEQ ID NO: 2300078 - RNA, 19 nt, Artificial Sequence
  Description of Artificial Sequence: Synthetic oligonucleotide
uuccuagugugcgguugga

SEQ ID NO: 2300079 - RNA, 19 nt, Artificial Sequence
  Description of Artificial Sequence: Synthetic oligonucleotide
guggauaucuacaguguau

SEQ ID NO: 2300080 - RNA, 19 nt, Artificial Sequence
  Description of Artificial Sequence: Synthetic oligonucleotide
gaauagcuccagugccaaa

SEQ ID NO: 2300081 - RNA, 19 nt, Artificial Sequence
  Description of Artificial Sequence: Synthetic oligonucleotide
ucagcgcucccagcauggc

SEQ ID NO: 2300082 - RNA, 19 nt, Artificial Sequence
  Description of Artificial Sequence: Synthetic oligonucleotide
uguggacuucaggccaauc

SEQ ID NO: 2300083 - RNA, 19 nt, Artificial Sequence
  Description of Artificial Sequence: Synthetic oligonucleotide
cccaaggaagacgaaggac

SEQ ID NO: 2300084 - RNA, 19 nt, Artificial Sequence
  Description of Artificial Sequence: Synthetic oligonucleotide
cugagccacuucuuggugu

SEQ ID NO: 2300085 - RNA, 19 nt, Artificial Sequence
  Description of Artificial Sequence: Synthetic oligonucleotide
agucacggucccacauguc

SEQ ID NO: 2300086 - RNA, 19 nt, Artificial Sequence
  Description of Artificial Sequence: Synthetic oligonucleotide
gcggcaauagggcgauuug

SEQ ID NO: 2300087 - RNA, 19 nt, Artificial Sequence
  Description of Artificial Sequence: Synthetic oligonucleotide
cgauuugcuguucucauaa

SEQ ID NO: 2300088 - RNA, 19 nt, Artificial Sequence
  Description of Artificial Sequence: Synthetic oligonucleotide
agugugcgguuggagguaa

SEQ ID NO: 2300089 - RNA, 19 nt, Artificial Sequence
  Description of Artificial Sequence: Synthetic oligonucleotide
gucaggaaaacagccuggu

SEQ ID NO: 2300090 - RNA, 19 nt, Artificial Sequence
  Description of Artificial Sequence: Synthetic oligonucleotide
guucucccugaacagcagu

SEQ ID NO: 2300091 - RNA, 19 nt, Artificial Sequence
  Description of Artificial Sequence: Synthetic oligonucleotide
cccuugauagcagaccauc

SEQ ID NO: 2300092 - RNA, 19 nt, Artificial Sequence
  Description of Artificial Sequence: Synthetic oligonucleotide
ggaaaacagccugguucag

SEQ ID NO: 2300093 - RNA, 19 nt, Artificial Sequence
  Description of Artificial Sequence: Synthetic oligonucleotide
aggcuaacugaggccagaa

SEQ ID NO: 2300094 - RNA, 19 nt, Artificial Sequence
  Description of Artificial Sequence: Synthetic oligonucleotide
ggguaggugacgacaagaa

SEQ ID NO: 2300095 - RNA, 19 nt, Artificial Sequence
  Description of Artificial Sequence: Synthetic oligonucleotide
caaguucagcugauuugcu

SEQ ID NO: 2300096 - RNA, 19 nt, Artificial Sequence
  Description of Artificial Sequence: Synthetic oligonucleotide
cucuggucuguggauaucu

SEQ ID NO: 2300097 - RNA, 19 nt, Artificial Sequence
  Description of Artificial Sequence: Synthetic oligonucleotide
ggagggucugaccacaguu

SEQ ID NO: 2300098 - RNA, 19 nt, Artificial Sequence
  Description of Artificial Sequence: Synthetic oligonucleotide
ggauaucuacaguguauau

SEQ ID NO: 2300099 - RNA, 19 nt, Artificial Sequence
  Description of Artificial Sequence: Synthetic oligonucleotide
gcgagguggguuccuacca

SEQ ID NO: 2300100 - RNA, 19 nt, Artificial Sequence
  Description of Artificial Sequence: Synthetic oligonucleotide
caccaaguucagcugauuu

SEQ ID NO: 2300101 - RNA, 19 nt, Artificial Sequence
  Description of Artificial Sequence: Synthetic oligonucleotide
ucccagcaguccucugguc

SEQ ID NO: 2300102 - RNA, 19 nt, Artificial Sequence
  Description of Artificial Sequence: Synthetic oligonucleotide
cagccugcuccacgcauca

SEQ ID NO: 2300103 - RNA, 19 nt, Artificial Sequence
  Description of Artificial Sequence: Synthetic oligonucleotide
cucccugaacagcagugcu

SEQ ID NO: 2300104 - RNA, 19 nt, Artificial Sequence
  Description of Artificial Sequence: Synthetic oligonucleotide
aggugacgacaagaaguaa

SEQ ID NO: 2300105 - RNA, 19 nt, Artificial Sequence
  Description of Artificial Sequence: Synthetic oligonucleotide
gaacucccagugccaacgu

SEQ ID NO: 2300106 - RNA, 19 nt, Artificial Sequence
  Description of Artificial Sequence: Synthetic oligonucleotide
gggcgauuugcuguucuca

SEQ ID NO: 2300107 - RNA, 19 nt, Artificial Sequence
  Description of Artificial Sequence: Synthetic oligonucleotide
gcccauggcuauacuguag

SEQ ID NO: 2300108 - RNA, 19 nt, Artificial Sequence
  Description of Artificial Sequence: Synthetic oligonucleotide
ccagaacgugauucuuuuc

SEQ ID NO: 2300109 - RNA, 19 nt, Artificial Sequence
  Description of Artificial Sequence: Synthetic oligonucleotide
ggagaacucccagugccaa

SEQ ID NO: 2300110 - RNA, 19 nt, Artificial Sequence
  Description of Artificial Sequence: Synthetic oligonucleotide
ccugaugggcauaaauagu

SEQ ID NO: 2300111 - RNA, 19 nt, Artificial Sequence
  Description of Artificial Sequence: Synthetic oligonucleotide
gugcgguuggagguaaacu

SEQ ID NO: 2300112 - RNA, 19 nt, Artificial Sequence
  Description of Artificial Sequence: Synthetic oligonucleotide
ggcgauuugcuguucucau

SEQ ID NO: 2300113 - RNA, 19 nt, Artificial Sequence
  Description of Artificial Sequence: Synthetic oligonucleotide
ccaaugcuccaggugcaag

SEQ ID NO: 2300114 - RNA, 19 nt, Artificial Sequence
  Description of Artificial Sequence: Synthetic oligonucleotide
augagcgagguggguuccu

SEQ ID NO: 2300115 - RNA, 19 nt, Artificial Sequence
  Description of Artificial Sequence: Synthetic oligonucleotide
guaaggaugcugcgcccau

SEQ ID NO: 2300116 - RNA, 19 nt, Artificial Sequence
  Description of Artificial Sequence: Synthetic oligonucleotide
aggccagaacgugauucuu

SEQ ID NO: 2300117 - RNA, 19 nt, Artificial Sequence
  Description of Artificial Sequence: Synthetic oligonucleotide
cggcaauagggcgauuugc

SEQ ID NO: 2300118 - RNA, 19 nt, Artificial Sequence
  Description of Artificial Sequence: Synthetic oligonucleotide
ugaccacaguuggcuccug

SEQ ID NO: 2300119 - RNA, 19 nt, Artificial Sequence
  Description of Artificial Sequence: Synthetic oligonucleotide
ccuaugcuuccugagugca

SEQ ID NO: 2300120 - RNA, 19 nt, Artificial Sequence
  Description of Artificial Sequence: Synthetic oligonucleotide
caaucacagcgucaucuuu

SEQ ID NO: 2300121 - RNA, 19 nt, Artificial Sequence
  Description of Artificial Sequence: Synthetic oligonucleotide
guccucuggucuguggaua

SEQ ID NO: 2300122 - RNA, 19 nt, Artificial Sequence
  Description of Artificial Sequence: Synthetic oligonucleotide
gucaacccuaaggcuaacu

SEQ ID NO: 2300123 - RNA, 19 nt, Artificial Sequence
  Description of Artificial Sequence: Synthetic oligonucleotide
cgaaggacuggaagguuga

SEQ ID NO: 2300124 - RNA, 19 nt, Artificial Sequence
  Description of Artificial Sequence: Synthetic oligonucleotide
gguuccuaccacagccaca

SEQ ID NO: 2300125 - RNA, 19 nt, Artificial Sequence
  Description of Artificial Sequence: Synthetic oligonucleotide
gcugcgcccauggcuauac

SEQ ID NO: 2300126 - RNA, 19 nt, Artificial Sequence
  Description of Artificial Sequence: Synthetic oligonucleotide
cgcaucagaauagcuccag

SEQ ID NO: 2300127 - RNA, 19 nt, Artificial Sequence
  Description of Artificial Sequence: Synthetic oligonucleotide
gccagaacgugauucuuuu

SEQ ID NO: 2300128 - RNA, 19 nt, Artificial Sequence
  Description of Artificial Sequence: Synthetic oligonucleotide
gcgauuugcuguucucaua

SEQ ID NO: 2300129 - RNA, 19 nt, Artificial Sequence
  Description of Artificial Sequence: Synthetic oligonucleotide
cugaugagcgagguggguu

SEQ ID NO: 2300130 - RNA, 19 nt, Artificial Sequence
  Description of Artificial Sequence: Synthetic oligonucleotide
gacgaaggacuggaagguu

SEQ ID NO: 2300131 - RNA, 19 nt, Artificial Sequence
  Description of Artificial Sequence: Synthetic oligonucleotide
cgugauucuuuucauuagu

SEQ ID NO: 2300132 - RNA, 19 nt, Artificial Sequence
  Description of Artificial Sequence: Synthetic oligonucleotide
cccauggcuauacuguagu

SEQ ID NO: 2300133 - RNA, 19 nt, Artificial Sequence
  Description of Artificial Sequence: Synthetic oligonucleotide
agccugcuccacgcaucag

SEQ ID NO: 2300134 - RNA, 19 nt, Artificial Sequence
  Description of Artificial Sequence: Synthetic oligonucleotide
ccccaaggaagacgaagga

SEQ ID NO: 2300135 - RNA, 19 nt, Artificial Sequence
  Description of Artificial Sequence: Synthetic oligonucleotide
cagcggccaaaccaaugcu

SEQ ID NO: 2300136 - RNA, 19 nt, Artificial Sequence
  Description of Artificial Sequence: Synthetic oligonucleotide
ccugaacagcagugcugug

SEQ ID NO: 2300137 - RNA, 19 nt, Artificial Sequence
  Description of Artificial Sequence: Synthetic oligonucleotide
ggggagggucugaccacag

SEQ ID NO: 2300138 - RNA, 19 nt, Artificial Sequence
  Description of Artificial Sequence: Synthetic oligonucleotide
agccacugagccacuucuu

SEQ ID NO: 2300139 - RNA, 19 nt, Artificial Sequence
  Description of Artificial Sequence: Synthetic oligonucleotide
gcgcccauggcuauacugu

SEQ ID NO: 2300140 - RNA, 19 nt, Artificial Sequence
  Description of Artificial Sequence: Synthetic oligonucleotide
gccaccccaaagccacuga

SEQ ID NO: 2300141 - RNA, 19 nt, Artificial Sequence
  Description of Artificial Sequence: Synthetic oligonucleotide
ccaaaccaaugcuccaggu

SEQ ID NO: 2300142 - RNA, 19 nt, Artificial Sequence
  Description of Artificial Sequence: Synthetic oligonucleotide
cuaacaucuucagguuguu

SEQ ID NO: 2300143 - RNA, 19 nt, Artificial Sequence
  Description of Artificial Sequence: Synthetic oligonucleotide
ccccaaagccacugagcca

SEQ ID NO: 2300144 - RNA, 19 nt, Artificial Sequence
  Description of Artificial Sequence: Synthetic oligonucleotide
cccugaacagcagugcugu

SEQ ID NO: 2300145 - RNA, 19 nt, Artificial Sequence
  Description of Artificial Sequence: Synthetic oligonucleotide
gcagugcuguggacuucag

SEQ ID NO: 2300146 - RNA, 19 nt, Artificial Sequence
  Description of Artificial Sequence: Synthetic oligonucleotide
caguguaguaggggagggu

SEQ ID NO: 2300147 - RNA, 19 nt, Artificial Sequence
  Description of Artificial Sequence: Synthetic oligonucleotide
guucagcggccaaaccaau

SEQ ID NO: 2300148 - RNA, 19 nt, Artificial Sequence
  Description of Artificial Sequence: Synthetic oligonucleotide
cuccaggugcaaggcaagu

SEQ ID NO: 2300149 - RNA, 19 nt, Artificial Sequence
  Description of Artificial Sequence: Synthetic oligonucleotide
gcugggucacaggagcccu

SEQ ID NO: 2300150 - RNA, 19 nt, Artificial Sequence
  Description of Artificial Sequence: Synthetic oligonucleotide
ggccagaacgugauucuuu

SEQ ID NO: 2300151 - RNA, 19 nt, Artificial Sequence
  Description of Artificial Sequence: Synthetic oligonucleotide
gcgcucccagcauggccac

SEQ ID NO: 2300152 - RNA, 19 nt, Artificial Sequence
  Description of Artificial Sequence: Synthetic oligonucleotide
gccugguucagcggccaaa

SEQ ID NO: 2300153 - RNA, 19 nt, Artificial Sequence
  Description of Artificial Sequence: Synthetic oligonucleotide
caaagccacugagccacuu

SEQ ID NO: 2300154 - RNA, 19 nt, Artificial Sequence
  Description of Artificial Sequence: Synthetic oligonucleotide
gugugcgguuggagguaaa

SEQ ID NO: 2300155 - RNA, 19 nt, Artificial Sequence
  Description of Artificial Sequence: Synthetic oligonucleotide
caaguacagcagccauguu

SEQ ID NO: 2300156 - RNA, 19 nt, Artificial Sequence
  Description of Artificial Sequence: Synthetic oligonucleotide
ggcucagcgcucccagcau

SEQ ID NO: 2300157 - RNA, 19 nt, Artificial Sequence
  Description of Artificial Sequence: Synthetic oligonucleotide
cggccaaaccaaugcucca

SEQ ID NO: 2300158 - RNA, 19 nt, Artificial Sequence
  Description of Artificial Sequence: Synthetic oligonucleotide
cugcgcccauggcuauacu

SEQ ID NO: 2300159 - RNA, 19 nt, Artificial Sequence
  Description of Artificial Sequence: Synthetic oligonucleotide
cggucccacaugucauuaa

SEQ ID NO: 2300160 - RNA, 19 nt, Artificial Sequence
  Description of Artificial Sequence: Synthetic oligonucleotide
gcccuugauagcagaccau

SEQ ID NO: 2300161 - RNA, 19 nt, Artificial Sequence
  Description of Artificial Sequence: Synthetic oligonucleotide
ccaccaaguucagcugauu

SEQ ID NO: 2300162 - RNA, 19 nt, Artificial Sequence
  Description of Artificial Sequence: Synthetic oligonucleotide
cagcggcaauagggcgauu

SEQ ID NO: 2300163 - RNA, 19 nt, Artificial Sequence
  Description of Artificial Sequence: Synthetic oligonucleotide
ucuccagaagacaagagcc

SEQ ID NO: 2300164 - RNA, 19 nt, Artificial Sequence
  Description of Artificial Sequence: Synthetic oligonucleotide
aaagaauggaggcuaagca

SEQ ID NO: 2300165 - RNA, 19 nt, Artificial Sequence
  Description of Artificial Sequence: Synthetic oligonucleotide
gauaugagcaucuggcagg

SEQ ID NO: 2300166 - RNA, 19 nt, Artificial Sequence
  Description of Artificial Sequence: Synthetic oligonucleotide
aguaagccaauaaugaagc

SEQ ID NO: 2300167 - RNA, 19 nt, Artificial Sequence
  Description of Artificial Sequence: Synthetic oligonucleotide
ucucauaggggccacggcg

SEQ ID NO: 2300168 - RNA, 19 nt, Artificial Sequence
  Description of Artificial Sequence: Synthetic oligonucleotide
auugagaacauuguugcgg

SEQ ID NO: 2300169 - RNA, 19 nt, Artificial Sequence
  Description of Artificial Sequence: Synthetic oligonucleotide
aggacauccacacaagcuc

SEQ ID NO: 2300170 - RNA, 19 nt, Artificial Sequence
  Description of Artificial Sequence: Synthetic oligonucleotide
uggaggcuaagcaugacag

SEQ ID NO: 2300171 - RNA, 19 nt, Artificial Sequence
  Description of Artificial Sequence: Synthetic oligonucleotide
gaaaguaagccaauaauga

SEQ ID NO: 2300172 - RNA, 19 nt, Artificial Sequence
  Description of Artificial Sequence: Synthetic oligonucleotide
cuucagacaaagaauggag

SEQ ID NO: 2300173 - RNA, 19 nt, Artificial Sequence
  Description of Artificial Sequence: Synthetic oligonucleotide
ucugagaccaagcucugcc

SEQ ID NO: 2300174 - RNA, 19 nt, Artificial Sequence
  Description of Artificial Sequence: Synthetic oligonucleotide
uguuagaggacauccacac

SEQ ID NO: 2300175 - RNA, 19 nt, Artificial Sequence
  Description of Artificial Sequence: Synthetic oligonucleotide
agauaugagcaucuggcag

SEQ ID NO: 2300176 - RNA, 19 nt, Artificial Sequence
  Description of Artificial Sequence: Synthetic oligonucleotide
ugaccucacucacugaagg

SEQ ID NO: 2300177 - RNA, 19 nt, Artificial Sequence
  Description of Artificial Sequence: Synthetic oligonucleotide
agugcagggagacaggcag

SEQ ID NO: 2300178 - RNA, 19 nt, Artificial Sequence
  Description of Artificial Sequence: Synthetic oligonucleotide
uugucuguugucuucagac

SEQ ID NO: 2300179 - RNA, 19 nt, Artificial Sequence
  Description of Artificial Sequence: Synthetic oligonucleotide
agaacauuguugcgguccc

SEQ ID NO: 2300180 - RNA, 19 nt, Artificial Sequence
  Description of Artificial Sequence: Synthetic oligonucleotide
aaggcguagauguccauug

SEQ ID NO: 2300181 - RNA, 19 nt, Artificial Sequence
  Description of Artificial Sequence: Synthetic oligonucleotide
cacaguacugacaagccag

SEQ ID NO: 2300182 - RNA, 19 nt, Artificial Sequence
  Description of Artificial Sequence: Synthetic oligonucleotide
uggaaaguaagccaauaau

SEQ ID NO: 2300183 - RNA, 19 nt, Artificial Sequence
  Description of Artificial Sequence: Synthetic oligonucleotide
aacuuggacaccauggcag

SEQ ID NO: 2300184 - RNA, 19 nt, Artificial Sequence
  Description of Artificial Sequence: Synthetic oligonucleotide
aagccaauaaugaagccug

SEQ ID NO: 2300185 - RNA, 19 nt, Artificial Sequence
  Description of Artificial Sequence: Synthetic oligonucleotide
ugccucagaguccagagug

SEQ ID NO: 2300186 - RNA, 19 nt, Artificial Sequence
  Description of Artificial Sequence: Synthetic oligonucleotide
cuagccaccucucugagac

SEQ ID NO: 2300187 - RNA, 19 nt, Artificial Sequence
  Description of Artificial Sequence: Synthetic oligonucleotide
agaggacauccacacaagc

SEQ ID NO: 2300188 - RNA, 19 nt, Artificial Sequence
  Description of Artificial Sequence: Synthetic oligonucleotide
ugaugaggggaccagacuc

SEQ ID NO: 2300189 - RNA, 19 nt, Artificial Sequence
  Description of Artificial Sequence: Synthetic oligonucleotide
guagauguccauugugagg

SEQ ID NO: 2300190 - RNA, 19 nt, Artificial Sequence
  Description of Artificial Sequence: Synthetic oligonucleotide
gaagccugaaaucacaucu

SEQ ID NO: 2300191 - RNA, 19 nt, Artificial Sequence
  Description of Artificial Sequence: Synthetic oligonucleotide
gauugagaacauuguugcg

SEQ ID NO: 2300192 - RNA, 19 nt, Artificial Sequence
  Description of Artificial Sequence: Synthetic oligonucleotide
gaggcuaagcaugacagcc

SEQ ID NO: 2300193 - RNA, 19 nt, Artificial Sequence
  Description of Artificial Sequence: Synthetic oligonucleotide
uaagcuucuggacuccagc

SEQ ID NO: 2300194 - RNA, 19 nt, Artificial Sequence
  Description of Artificial Sequence: Synthetic oligonucleotide
agcaugacagcccauguga

SEQ ID NO: 2300195 - RNA, 19 nt, Artificial Sequence
  Description of Artificial Sequence: Synthetic oligonucleotide
uccauugugagguagucua

SEQ ID NO: 2300196 - RNA, 19 nt, Artificial Sequence
  Description of Artificial Sequence: Synthetic oligonucleotide
uagucuaggaguccagggc

SEQ ID NO: 2300197 - RNA, 19 nt, Artificial Sequence
  Description of Artificial Sequence: Synthetic oligonucleotide
gacucugccccuccuaugg

SEQ ID NO: 2300198 - RNA, 19 nt, Artificial Sequence
  Description of Artificial Sequence: Synthetic oligonucleotide
ugucaugaugucaugcagu

SEQ ID NO: 2300199 - RNA, 19 nt, Artificial Sequence
  Description of Artificial Sequence: Synthetic oligonucleotide
accucacucacugaaggcc

SEQ ID NO: 2300200 - RNA, 19 nt, Artificial Sequence
  Description of Artificial Sequence: Synthetic oligonucleotide
uuggaaaguaagccaauaa

SEQ ID NO: 2300201 - RNA, 19 nt, Artificial Sequence
  Description of Artificial Sequence: Synthetic oligonucleotide
guugagucaguccaucccc

SEQ ID NO: 2300202 - RNA, 19 nt, Artificial Sequence
  Description of Artificial Sequence: Synthetic oligonucleotide
caccaggugacucaggaag

SEQ ID NO: 2300203 - RNA, 19 nt, Artificial Sequence
  Description of Artificial Sequence: Synthetic oligonucleotide
gaagacaagagccgccacc

SEQ ID NO: 2300204 - RNA, 19 nt, Artificial Sequence
  Description of Artificial Sequence: Synthetic oligonucleotide
uccuaccugagcuucuggg

SEQ ID NO: 2300205 - RNA, 19 nt, Artificial Sequence
  Description of Artificial Sequence: Synthetic oligonucleotide
cuaccugagcuucugggcg

SEQ ID NO: 2300206 - RNA, 19 nt, Artificial Sequence
  Description of Artificial Sequence: Synthetic oligonucleotide
augacagcccaugugaguc

SEQ ID NO: 2300207 - RNA, 19 nt, Artificial Sequence
  Description of Artificial Sequence: Synthetic oligonucleotide
gaaaucacaucugugaugu

SEQ ID NO: 2300208 - RNA, 19 nt, Artificial Sequence
  Description of Artificial Sequence: Synthetic oligonucleotide
aaugaagccugaaaucaca

SEQ ID NO: 2300209 - RNA, 19 nt, Artificial Sequence
  Description of Artificial Sequence: Synthetic oligonucleotide
aagcaugacagcccaugug

SEQ ID NO: 2300210 - RNA, 19 nt, Artificial Sequence
  Description of Artificial Sequence: Synthetic oligonucleotide
agggaaggcguagaugucc

SEQ ID NO: 2300211 - RNA, 19 nt, Artificial Sequence
  Description of Artificial Sequence: Synthetic oligonucleotide
agaauggaggcuaagcaug

SEQ ID NO: 2300212 - RNA, 19 nt, Artificial Sequence
  Description of Artificial Sequence: Synthetic oligonucleotide
gaagaacuuggacaccaug

SEQ ID NO: 2300213 - RNA, 19 nt, Artificial Sequence
  Description of Artificial Sequence: Synthetic oligonucleotide
aguacugacaagccagccu

SEQ ID NO: 2300214 - RNA, 19 nt, Artificial Sequence
  Description of Artificial Sequence: Synthetic oligonucleotide
agucuaggaguccagggcu

SEQ ID NO: 2300215 - RNA, 19 nt, Artificial Sequence
  Description of Artificial Sequence: Synthetic oligonucleotide
uccagggcucgucucauag

SEQ ID NO: 2300216 - RNA, 19 nt, Artificial Sequence
  Description of Artificial Sequence: Synthetic oligonucleotide
ugugucgagggcccugagg

SEQ ID NO: 2300217 - RNA, 19 nt, Artificial Sequence
  Description of Artificial Sequence: Synthetic oligonucleotide
ugagaccaagcucugccca

SEQ ID NO: 2300218 - RNA, 19 nt, Artificial Sequence
  Description of Artificial Sequence: Synthetic oligonucleotide
ugugagucguccuggcugc

SEQ ID NO: 2300219 - RNA, 19 nt, Artificial Sequence
  Description of Artificial Sequence: Synthetic oligonucleotide
guacugacaagccagccuc

SEQ ID NO: 2300220 - RNA, 19 nt, Artificial Sequence
  Description of Artificial Sequence: Synthetic oligonucleotide
gaggggaccagacucugcc

SEQ ID NO: 2300221 - RNA, 19 nt, Artificial Sequence
  Description of Artificial Sequence: Synthetic oligonucleotide
agagugcagggagacaggc

SEQ ID NO: 2300222 - RNA, 19 nt, Artificial Sequence
  Description of Artificial Sequence: Synthetic oligonucleotide
cagggcucgucucauaggg

SEQ ID NO: 2300223 - RNA, 19 nt, Artificial Sequence
  Description of Artificial Sequence: Synthetic oligonucleotide
gcagauaugagcaucuggc

SEQ ID NO: 2300224 - RNA, 19 nt, Artificial Sequence
  Description of Artificial Sequence: Synthetic oligonucleotide
uggcguccgaucaucaccc

SEQ ID NO: 2300225 - RNA, 19 nt, Artificial Sequence
  Description of Artificial Sequence: Synthetic oligonucleotide
aacauuguugcggucccug

SEQ ID NO: 2300226 - RNA, 19 nt, Artificial Sequence
  Description of Artificial Sequence: Synthetic oligonucleotide
uaagcaugacagcccaugu

SEQ ID NO: 2300227 - RNA, 19 nt, Artificial Sequence
  Description of Artificial Sequence: Synthetic oligonucleotide
acuggcgacgcucccgggc

SEQ ID NO: 2300228 - RNA, 19 nt, Artificial Sequence
  Description of Artificial Sequence: Synthetic oligonucleotide
cacaagcuccaccaggcgg

SEQ ID NO: 2300229 - RNA, 19 nt, Artificial Sequence
  Description of Artificial Sequence: Synthetic oligonucleotide
auugugagguagucuagga

SEQ ID NO: 2300230 - RNA, 19 nt, Artificial Sequence
  Description of Artificial Sequence: Synthetic oligonucleotide
augucaugcaguccuccuc

SEQ ID NO: 2300231 - RNA, 19 nt, Artificial Sequence
  Description of Artificial Sequence: Synthetic oligonucleotide
ugucuguugucuucagaca

SEQ ID NO: 2300232 - RNA, 19 nt, Artificial Sequence
  Description of Artificial Sequence: Synthetic oligonucleotide
uccagaagacaagagccgc

SEQ ID NO: 2300233 - RNA, 19 nt, Artificial Sequence
  Description of Artificial Sequence: Synthetic oligonucleotide
auuguugcggucccuggca

SEQ ID NO: 2300234 - RNA, 19 nt, Artificial Sequence
  Description of Artificial Sequence: Synthetic oligonucleotide
cauugugagguagucuagg

SEQ ID NO: 2300235 - RNA, 19 nt, Artificial Sequence
  Description of Artificial Sequence: Synthetic oligonucleotide
aauggaggcuaagcaugac

SEQ ID NO: 2300236 - RNA, 19 nt, Artificial Sequence
  Description of Artificial Sequence: Synthetic oligonucleotide
cucauaggggccacggcgc

SEQ ID NO: 2300237 - RNA, 19 nt, Artificial Sequence
  Description of Artificial Sequence: Synthetic oligonucleotide
ucaugcaguccuccucggg

SEQ ID NO: 2300238 - RNA, 19 nt, Artificial Sequence
  Description of Artificial Sequence: Synthetic oligonucleotide
cgauugagaacauuguugc

SEQ ID NO: 2300239 - RNA, 19 nt, Artificial Sequence
  Description of Artificial Sequence: Synthetic oligonucleotide
agaagacaagagccgccac

SEQ ID NO: 2300240 - RNA, 19 nt, Artificial Sequence
  Description of Artificial Sequence: Synthetic oligonucleotide
acugaaggccagucccagc

SEQ ID NO: 2300241 - RNA, 19 nt, Artificial Sequence
  Description of Artificial Sequence: Synthetic oligonucleotide
uccuauggccaucuuguuc

SEQ ID NO: 2300242 - RNA, 19 nt, Artificial Sequence
  Description of Artificial Sequence: Synthetic oligonucleotide
acccgugacaggcccacgc

SEQ ID NO: 2300243 - RNA, 19 nt, Artificial Sequence
  Description of Artificial Sequence: Synthetic oligonucleotide
caauaaugaagccugaaau

SEQ ID NO: 2300244 - RNA, 19 nt, Artificial Sequence
  Description of Artificial Sequence: Synthetic oligonucleotide
ucuguugucuucagacaaa

SEQ ID NO: 2300245 - RNA, 19 nt, Artificial Sequence
  Description of Artificial Sequence: Synthetic oligonucleotide
ucugugaugugauggcguc

SEQ ID NO: 2300246 - RNA, 19 nt, Artificial Sequence
  Description of Artificial Sequence: Synthetic oligonucleotide
gacaagagccgccaccuuc

SEQ ID NO: 2300247 - RNA, 19 nt, Artificial Sequence
  Description of Artificial Sequence: Synthetic oligonucleotide
acaguacugacaagccagc

SEQ ID NO: 2300248 - RNA, 19 nt, Artificial Sequence
  Description of Artificial Sequence: Synthetic oligonucleotide
auggaggcuaagcaugaca

SEQ ID NO: 2300249 - RNA, 19 nt, Artificial Sequence
  Description of Artificial Sequence: Synthetic oligonucleotide
ugacagcccaugugagucg

SEQ ID NO: 2300250 - RNA, 19 nt, Artificial Sequence
  Description of Artificial Sequence: Synthetic oligonucleotide
ggcagauaugagcaucugg

SEQ ID NO: 2300251 - RNA, 19 nt, Artificial Sequence
  Description of Artificial Sequence: Synthetic oligonucleotide
aggaagaacuuggacacca

SEQ ID NO: 2300252 - RNA, 19 nt, Artificial Sequence
  Description of Artificial Sequence: Synthetic oligonucleotide
gguguuagaggacauccac

SEQ ID NO: 2300253 - RNA, 19 nt, Artificial Sequence
  Description of Artificial Sequence: Synthetic oligonucleotide
uucuagccaccucucugag

SEQ ID NO: 2300254 - RNA, 19 nt, Artificial Sequence
  Description of Artificial Sequence: Synthetic oligonucleotide
ccgauugagaacauuguug

SEQ ID NO: 2300255 - RNA, 19 nt, Artificial Sequence
  Description of Artificial Sequence: Synthetic oligonucleotide
accucucugagaccaagcu

SEQ ID NO: 2300256 - RNA, 19 nt, Artificial Sequence
  Description of Artificial Sequence: Synthetic oligonucleotide
ucccagcccaguugcaagg

SEQ ID NO: 2300257 - RNA, 19 nt, Artificial Sequence
  Description of Artificial Sequence: Synthetic oligonucleotide
agccugaaaucacaucugu

SEQ ID NO: 2300258 - RNA, 19 nt, Artificial Sequence
  Description of Artificial Sequence: Synthetic oligonucleotide
ucacugaaggccaguccca

SEQ ID NO: 2300259 - RNA, 19 nt, Artificial Sequence
  Description of Artificial Sequence: Synthetic oligonucleotide
ccugaaaucacaucuguga

SEQ ID NO: 2300260 - RNA, 19 nt, Artificial Sequence
  Description of Artificial Sequence: Synthetic oligonucleotide
ugaagccugaaaucacauc

SEQ ID NO: 2300261 - RNA, 19 nt, Artificial Sequence
  Description of Artificial Sequence: Synthetic oligonucleotide
gaccucacucacugaaggc

SEQ ID NO: 2300262 - RNA, 19 nt, Artificial Sequence
  Description of Artificial Sequence: Synthetic oligonucleotide
uuccuaccugagcuucugg

SEQ ID NO: 2300263 - RNA, 19 nt, Artificial Sequence
  Description of Artificial Sequence: Synthetic oligonucleotide
cauuguugcggucccuggc

SEQ ID NO: 2300264 - RNA, 19 nt, Artificial Sequence
  Description of Artificial Sequence: Synthetic oligonucleotide
ucugccccuccuauggcca

SEQ ID NO: 2300265 - RNA, 19 nt, Artificial Sequence
  Description of Artificial Sequence: Synthetic oligonucleotide
cacugacccgcuucuagcc

SEQ ID NO: 2300266 - RNA, 19 nt, Artificial Sequence
  Description of Artificial Sequence: Synthetic oligonucleotide
cuggacuccagccacuguc

SEQ ID NO: 2300267 - RNA, 19 nt, Artificial Sequence
  Description of Artificial Sequence: Synthetic oligonucleotide
aagccugaaaucacaucug

SEQ ID NO: 2300268 - RNA, 19 nt, Artificial Sequence
  Description of Artificial Sequence: Synthetic oligonucleotide
cucaccaggcagauaugag

SEQ ID NO: 2300269 - RNA, 19 nt, Artificial Sequence
  Description of Artificial Sequence: Synthetic oligonucleotide
gucuguugucuucagacaa

SEQ ID NO: 2300270 - RNA, 19 nt, Artificial Sequence
  Description of Artificial Sequence: Synthetic oligonucleotide
agcccgauugagaacauug

SEQ ID NO: 2300271 - RNA, 19 nt, Artificial Sequence
  Description of Artificial Sequence: Synthetic oligonucleotide
agacaaagaauggaggcua

SEQ ID NO: 2300272 - RNA, 19 nt, Artificial Sequence
  Description of Artificial Sequence: Synthetic oligonucleotide
caggcaggaagucccacag

SEQ ID NO: 2300273 - RNA, 19 nt, Artificial Sequence
  Description of Artificial Sequence: Synthetic oligonucleotide
caucuggcagguguuagag

SEQ ID NO: 2300274 - RNA, 19 nt, Artificial Sequence
  Description of Artificial Sequence: Synthetic oligonucleotide
uguugcggucccuggcacg

SEQ ID NO: 2300275 - RNA, 19 nt, Artificial Sequence
  Description of Artificial Sequence: Synthetic oligonucleotide
uggcauggugaccucacuc

SEQ ID NO: 2300276 - RNA, 19 nt, Artificial Sequence
  Description of Artificial Sequence: Synthetic oligonucleotide
aggggaccagacucugccc

SEQ ID NO: 2300277 - RNA, 19 nt, Artificial Sequence
  Description of Artificial Sequence: Synthetic oligonucleotide
aggcuaagcaugacagccc

SEQ ID NO: 2300278 - RNA, 19 nt, Artificial Sequence
  Description of Artificial Sequence: Synthetic oligonucleotide
aucuggcagguguuagagg

SEQ ID NO: 2300279 - RNA, 19 nt, Artificial Sequence
  Description of Artificial Sequence: Synthetic oligonucleotide
gacaccauggcagcacggc

SEQ ID NO: 2300280 - RNA, 19 nt, Artificial Sequence
  Description of Artificial Sequence: Synthetic oligonucleotide
cagcccaguugcaagggcc

SEQ ID NO: 2300281 - RNA, 19 nt, Artificial Sequence
  Description of Artificial Sequence: Synthetic oligonucleotide
uccucgggcagcugcugcg

SEQ ID NO: 2300282 - RNA, 19 nt, Artificial Sequence
  Description of Artificial Sequence: Synthetic oligonucleotide
acucagcccgauugagaac

SEQ ID NO: 2300283 - RNA, 19 nt, Artificial Sequence
  Description of Artificial Sequence: Synthetic oligonucleotide
ucaucacccgugacaggcc

SEQ ID NO: 2300284 - RNA, 19 nt, Artificial Sequence
  Description of Artificial Sequence: Synthetic oligonucleotide
agcacggcuggcauggccg

SEQ ID NO: 2300285 - RNA, 19 nt, Artificial Sequence
  Description of Artificial Sequence: Synthetic oligonucleotide
uacugacaagccagccucc

SEQ ID NO: 2300286 - RNA, 19 nt, Artificial Sequence
  Description of Artificial Sequence: Synthetic oligonucleotide
agggccuucuccagaagac

SEQ ID NO: 2300287 - RNA, 19 nt, Artificial Sequence
  Description of Artificial Sequence: Synthetic oligonucleotide
cacgcagaaggccccagag

SEQ ID NO: 2300288 - RNA, 19 nt, Artificial Sequence
  Description of Artificial Sequence: Synthetic oligonucleotide
ugauaagcuucuggacucc

SEQ ID NO: 2300289 - RNA, 19 nt, Artificial Sequence
  Description of Artificial Sequence: Synthetic oligonucleotide
gaaguugagucaguccauc

SEQ ID NO: 2300290 - RNA, 19 nt, Artificial Sequence
  Description of Artificial Sequence: Synthetic oligonucleotide
ugauggcguccgaucauca

SEQ ID NO: 2300291 - RNA, 19 nt, Artificial Sequence
  Description of Artificial Sequence: Synthetic oligonucleotide
ugugauggcguccgaucau

SEQ ID NO: 2300292 - RNA, 19 nt, Artificial Sequence
  Description of Artificial Sequence: Synthetic oligonucleotide
caccauggcagcacggcug

SEQ ID NO: 2300293 - RNA, 19 nt, Artificial Sequence
  Description of Artificial Sequence: Synthetic oligonucleotide
cagaaggccccagagcacc

SEQ ID NO: 2300294 - RNA, 19 nt, Artificial Sequence
  Description of Artificial Sequence: Synthetic oligonucleotide
cagauaugagcaucuggca

SEQ ID NO: 2300295 - RNA, 19 nt, Artificial Sequence
  Description of Artificial Sequence: Synthetic oligonucleotide
gauggcguccgaucaucac

SEQ ID NO: 2300296 - RNA, 19 nt, Artificial Sequence
  Description of Artificial Sequence: Synthetic oligonucleotide
cucagcccgauugagaaca

SEQ ID NO: 2300297 - RNA, 19 nt, Artificial Sequence
  Description of Artificial Sequence: Synthetic oligonucleotide
gcuugauaagcuucuggac

SEQ ID NO: 2300298 - RNA, 19 nt, Artificial Sequence
  Description of Artificial Sequence: Synthetic oligonucleotide
gaauggaggcuaagcauga

SEQ ID NO: 2300299 - RNA, 19 nt, Artificial Sequence
  Description of Artificial Sequence: Synthetic oligonucleotide
ucuagccaccucucugaga

SEQ ID NO: 2300300 - RNA, 19 nt, Artificial Sequence
  Description of Artificial Sequence: Synthetic oligonucleotide
ugaggccuuccuaccugag

SEQ ID NO: 2300301 - RNA, 19 nt, Artificial Sequence
  Description of Artificial Sequence: Synthetic oligonucleotide
auaugagcaucuggcaggu

SEQ ID NO: 2300302 - RNA, 19 nt, Artificial Sequence
  Description of Artificial Sequence: Synthetic oligonucleotide
gagguagucuaggagucca

SEQ ID NO: 2300303 - RNA, 19 nt, Artificial Sequence
  Description of Artificial Sequence: Synthetic oligonucleotide
ugaggggaccagacucugc

SEQ ID NO: 2300304 - RNA, 19 nt, Artificial Sequence
  Description of Artificial Sequence: Synthetic oligonucleotide
cagagugcagggagacagg

SEQ ID NO: 2300305 - RNA, 19 nt, Artificial Sequence
  Description of Artificial Sequence: Synthetic oligonucleotide
uuguugcggucccuggcac

SEQ ID NO: 2300306 - RNA, 19 nt, Artificial Sequence
  Description of Artificial Sequence: Synthetic oligonucleotide
gggcucgucucauaggggc

SEQ ID NO: 2300307 - RNA, 19 nt, Artificial Sequence
  Description of Artificial Sequence: Synthetic oligonucleotide
cugacccgcuucuagccac

SEQ ID NO: 2300308 - RNA, 19 nt, Artificial Sequence
  Description of Artificial Sequence: Synthetic oligonucleotide
acaccauggcagcacggcu

SEQ ID NO: 2300309 - RNA, 19 nt, Artificial Sequence
  Description of Artificial Sequence: Synthetic oligonucleotide
uguccauugugagguaguc

SEQ ID NO: 2300310 - RNA, 19 nt, Artificial Sequence
  Description of Artificial Sequence: Synthetic oligonucleotide
ucauaggggccacggcgcu

SEQ ID NO: 2300311 - RNA, 19 nt, Artificial Sequence
  Description of Artificial Sequence: Synthetic oligonucleotide
cucacucacugaaggccag

SEQ ID NO: 2300312 - RNA, 19 nt, Artificial Sequence
  Description of Artificial Sequence: Synthetic oligonucleotide
agcaucuggcagguguuag

SEQ ID NO: 2300313 - RNA, 19 nt, Artificial Sequence
  Description of Artificial Sequence: Synthetic oligonucleotide
acugacccgcuucuagcca

SEQ ID NO: 2300314 - RNA, 19 nt, Artificial Sequence
  Description of Artificial Sequence: Synthetic oligonucleotide
ccagagugcagggagacag

SEQ ID NO: 2300315 - RNA, 19 nt, Artificial Sequence
  Description of Artificial Sequence: Synthetic oligonucleotide
uaccugagcuucugggcgu

SEQ ID NO: 2300316 - RNA, 19 nt, Artificial Sequence
  Description of Artificial Sequence: Synthetic oligonucleotide
ccuaccugagcuucugggc

SEQ ID NO: 2300317 - RNA, 19 nt, Artificial Sequence
  Description of Artificial Sequence: Synthetic oligonucleotide
ggcauggugaccucacuca

SEQ ID NO: 2300318 - RNA, 19 nt, Artificial Sequence
  Description of Artificial Sequence: Synthetic oligonucleotide
guuagaggacauccacaca

SEQ ID NO: 2300319 - RNA, 19 nt, Artificial Sequence
  Description of Artificial Sequence: Synthetic oligonucleotide
cuggcgacgcucccgggcc

SEQ ID NO: 2300320 - RNA, 19 nt, Artificial Sequence
  Description of Artificial Sequence: Synthetic oligonucleotide
ugucgagggcccugaggcc

SEQ ID NO: 2300321 - RNA, 19 nt, Artificial Sequence
  Description of Artificial Sequence: Synthetic oligonucleotide
gugagguagucuaggaguc

SEQ ID NO: 2300322 - RNA, 19 nt, Artificial Sequence
  Description of Artificial Sequence: Synthetic oligonucleotide
uggccggcagggaaggcgu

SEQ ID NO: 2300323 - RNA, 19 nt, Artificial Sequence
  Description of Artificial Sequence: Synthetic oligonucleotide
gaggacauccacacaagcu

SEQ ID NO: 2300324 - RNA, 19 nt, Artificial Sequence
  Description of Artificial Sequence: Synthetic oligonucleotide
gcgcuugauaagcuucugg

SEQ ID NO: 2300325 - RNA, 19 nt, Artificial Sequence
  Description of Artificial Sequence: Synthetic oligonucleotide
aggaagucccacaguacug

SEQ ID NO: 2300326 - RNA, 19 nt, Artificial Sequence
  Description of Artificial Sequence: Synthetic oligonucleotide
uccccacugacccgcuucu

SEQ ID NO: 2300327 - RNA, 19 nt, Artificial Sequence
  Description of Artificial Sequence: Synthetic oligonucleotide
ggggaaguugagucagucc

SEQ ID NO: 2300328 - RNA, 19 nt, Artificial Sequence
  Description of Artificial Sequence: Synthetic oligonucleotide
ugaugugauggcguccgau

SEQ ID NO: 2300329 - RNA, 19 nt, Artificial Sequence
  Description of Artificial Sequence: Synthetic oligonucleotide
uucugggcgucuugggguc

SEQ ID NO: 2300330 - RNA, 19 nt, Artificial Sequence
  Description of Artificial Sequence: Synthetic oligonucleotide
uccgaucaucacccgugac

SEQ ID NO: 2300331 - RNA, 19 nt, Artificial Sequence
  Description of Artificial Sequence: Synthetic oligonucleotide
ugacccgcuucuagccacc

SEQ ID NO: 2300332 - RNA, 19 nt, Artificial Sequence
  Description of Artificial Sequence: Synthetic oligonucleotide
gugaccucacucacugaag

SEQ ID NO: 2300333 - RNA, 19 nt, Artificial Sequence
  Description of Artificial Sequence: Synthetic oligonucleotide
gauaagcuucuggacucca

SEQ ID NO: 2300334 - RNA, 19 nt, Artificial Sequence
  Description of Artificial Sequence: Synthetic oligonucleotide
gaacucagcccgauugaga

SEQ ID NO: 2300335 - RNA, 19 nt, Artificial Sequence
  Description of Artificial Sequence: Synthetic oligonucleotide
caguacugacaagccagcc

SEQ ID NO: 2300336 - RNA, 19 nt, Artificial Sequence
  Description of Artificial Sequence: Synthetic oligonucleotide
ggaggcuaagcaugacagc

SEQ ID NO: 2300337 - RNA, 19 nt, Artificial Sequence
  Description of Artificial Sequence: Synthetic oligonucleotide
ggagacaggcaggaagucc

SEQ ID NO: 2300338 - RNA, 19 nt, Artificial Sequence
  Description of Artificial Sequence: Synthetic oligonucleotide
gcugcugcgacuggcgacg

SEQ ID NO: 2300339 - RNA, 19 nt, Artificial Sequence
  Description of Artificial Sequence: Synthetic oligonucleotide
gagucguccuggcugccuc

SEQ ID NO: 2300340 - RNA, 19 nt, Artificial Sequence
  Description of Artificial Sequence: Synthetic oligonucleotide
augaagccugaaaucacau

SEQ ID NO: 2300341 - RNA, 19 nt, Artificial Sequence
  Description of Artificial Sequence: Synthetic oligonucleotide
caggaagucccacaguacu

SEQ ID NO: 2300342 - RNA, 19 nt, Artificial Sequence
  Description of Artificial Sequence: Synthetic oligonucleotide
aggcguagauguccauugu

SEQ ID NO: 2300343 - RNA, 19 nt, Artificial Sequence
  Description of Artificial Sequence: Synthetic oligonucleotide
ccuauggccaucuuguucu

SEQ ID NO: 2300344 - RNA, 19 nt, Artificial Sequence
  Description of Artificial Sequence: Synthetic oligonucleotide
gaccagacucugccccucc

SEQ ID NO: 2300345 - RNA, 19 nt, Artificial Sequence
  Description of Artificial Sequence: Synthetic oligonucleotide
cacugaaggccagucccag

SEQ ID NO: 2300346 - RNA, 19 nt, Artificial Sequence
  Description of Artificial Sequence: Synthetic oligonucleotide
cagaagacaagagccgcca

SEQ ID NO: 2300347 - RNA, 19 nt, Artificial Sequence
  Description of Artificial Sequence: Synthetic oligonucleotide
acugacaagccagccucca

SEQ ID NO: 2300348 - RNA, 19 nt, Artificial Sequence
  Description of Artificial Sequence: Synthetic oligonucleotide
ugacaggcccacgcagaag

SEQ ID NO: 2300349 - RNA, 19 nt, Artificial Sequence
  Description of Artificial Sequence: Synthetic oligonucleotide
cugcgacuggcgacgcucc

SEQ ID NO: 2300350 - RNA, 19 nt, Artificial Sequence
  Description of Artificial Sequence: Synthetic oligonucleotide
cacgcaggggcaccgccag

SEQ ID NO: 2300351 - RNA, 19 nt, Artificial Sequence
  Description of Artificial Sequence: Synthetic oligonucleotide
cuuggaaaguaagccaaua

SEQ ID NO: 2300352 - RNA, 19 nt, Artificial Sequence
  Description of Artificial Sequence: Synthetic oligonucleotide
gaugaggggaccagacucu

SEQ ID NO: 2300353 - RNA, 19 nt, Artificial Sequence
  Description of Artificial Sequence: Synthetic oligonucleotide
auguccauugugagguagu

SEQ ID NO: 2300354 - RNA, 19 nt, Artificial Sequence
  Description of Artificial Sequence: Synthetic oligonucleotide
gacauccacacaagcucca

SEQ ID NO: 2300355 - RNA, 19 nt, Artificial Sequence
  Description of Artificial Sequence: Synthetic oligonucleotide
guccauccccacugacccg

SEQ ID NO: 2300356 - RNA, 19 nt, Artificial Sequence
  Description of Artificial Sequence: Synthetic oligonucleotide
agguguuagaggacaucca

SEQ ID NO: 2300357 - RNA, 19 nt, Artificial Sequence
  Description of Artificial Sequence: Synthetic oligonucleotide
gcggaacuuggaaaguaag

SEQ ID NO: 2300358 - RNA, 19 nt, Artificial Sequence
  Description of Artificial Sequence: Synthetic oligonucleotide
ucacccgugacaggcccac

SEQ ID NO: 2300359 - RNA, 19 nt, Artificial Sequence
  Description of Artificial Sequence: Synthetic oligonucleotide
guccagagugcagggagac

SEQ ID NO: 2300360 - RNA, 19 nt, Artificial Sequence
  Description of Artificial Sequence: Synthetic oligonucleotide
cucugagaccaagcucugc

SEQ ID NO: 2300361 - RNA, 19 nt, Artificial Sequence
  Description of Artificial Sequence: Synthetic oligonucleotide
ccacugacccgcuucuagc

SEQ ID NO: 2300362 - RNA, 19 nt, Artificial Sequence
  Description of Artificial Sequence: Synthetic oligonucleotide
cacucacugaaggccaguc

SEQ ID NO: 2300363 - RNA, 19 nt, Artificial Sequence
  Description of Artificial Sequence: Synthetic oligonucleotide
ucgucucauaggggccacg

SEQ ID NO: 2300364 - RNA, 19 nt, Artificial Sequence
  Description of Artificial Sequence: Synthetic oligonucleotide
ccauugugagguagucuag

SEQ ID NO: 2300365 - RNA, 19 nt, Artificial Sequence
  Description of Artificial Sequence: Synthetic oligonucleotide
gccacggcgcuugauaagc

SEQ ID NO: 2300366 - RNA, 19 nt, Artificial Sequence
  Description of Artificial Sequence: Synthetic oligonucleotide
agggcucgucucauagggg

SEQ ID NO: 2300367 - RNA, 19 nt, Artificial Sequence
  Description of Artificial Sequence: Synthetic oligonucleotide
uccagagugcagggagaca

SEQ ID NO: 2300368 - RNA, 19 nt, Artificial Sequence
  Description of Artificial Sequence: Synthetic oligonucleotide
ugagucguccuggcugccu

SEQ ID NO: 2300369 - RNA, 19 nt, Artificial Sequence
  Description of Artificial Sequence: Synthetic oligonucleotide
aaggggaaguugagucagu

SEQ ID NO: 2300370 - RNA, 19 nt, Artificial Sequence
  Description of Artificial Sequence: Synthetic oligonucleotide
gcauggugaccucacucac

SEQ ID NO: 2300371 - RNA, 19 nt, Artificial Sequence
  Description of Artificial Sequence: Synthetic oligonucleotide
gugauggcguccgaucauc

SEQ ID NO: 2300372 - RNA, 19 nt, Artificial Sequence
  Description of Artificial Sequence: Synthetic oligonucleotide
caggcagauaugagcaucu

SEQ ID NO: 2300373 - RNA, 19 nt, Artificial Sequence
  Description of Artificial Sequence: Synthetic oligonucleotide
acccgcuucuagccaccuc

SEQ ID NO: 2300374 - RNA, 19 nt, Artificial Sequence
  Description of Artificial Sequence: Synthetic oligonucleotide
acaggaacucagcccgauu

SEQ ID NO: 2300375 - RNA, 19 nt, Artificial Sequence
  Description of Artificial Sequence: Synthetic oligonucleotide
agucguccuggcugccuca

SEQ ID NO: 2300376 - RNA, 19 nt, Artificial Sequence
  Description of Artificial Sequence: Synthetic oligonucleotide
agguagucuaggaguccag

SEQ ID NO: 2300377 - RNA, 19 nt, Artificial Sequence
  Description of Artificial Sequence: Synthetic oligonucleotide
agaccaagcucugcccaga

SEQ ID NO: 2300378 - RNA, 19 nt, Artificial Sequence
  Description of Artificial Sequence: Synthetic oligonucleotide
gcaugacagcccaugugag

SEQ ID NO: 2300379 - RNA, 19 nt, Artificial Sequence
  Description of Artificial Sequence: Synthetic oligonucleotide
gugacaggcccacgcagaa

SEQ ID NO: 2300380 - RNA, 19 nt, Artificial Sequence
  Description of Artificial Sequence: Synthetic oligonucleotide
gacuggcgacgcucccggg

SEQ ID NO: 2300381 - RNA, 19 nt, Artificial Sequence
  Description of Artificial Sequence: Synthetic oligonucleotide
guccgaucaucacccguga

SEQ ID NO: 2300382 - RNA, 19 nt, Artificial Sequence
  Description of Artificial Sequence: Synthetic oligonucleotide
aggcagauaugagcaucug

SEQ ID NO: 2300383 - RNA, 19 nt, Artificial Sequence
  Description of Artificial Sequence: Synthetic oligonucleotide
uaggaguccagggcucguc

SEQ ID NO: 2300384 - RNA, 19 nt, Artificial Sequence
  Description of Artificial Sequence: Synthetic oligonucleotide
ccgaucaucacccgugaca

SEQ ID NO: 2300385 - RNA, 19 nt, Artificial Sequence
  Description of Artificial Sequence: Synthetic oligonucleotide
cguccgaucaucacccgug

SEQ ID NO: 2300386 - RNA, 19 nt, Artificial Sequence
  Description of Artificial Sequence: Synthetic oligonucleotide
caugacagcccaugugagu

SEQ ID NO: 2300387 - RNA, 19 nt, Artificial Sequence
  Description of Artificial Sequence: Synthetic oligonucleotide
acgggcccggcucugggaa

SEQ ID NO: 2300388 - RNA, 19 nt, Artificial Sequence
  Description of Artificial Sequence: Synthetic oligonucleotide
ccuccuauggccaucuugu

SEQ ID NO: 2300389 - RNA, 19 nt, Artificial Sequence
  Description of Artificial Sequence: Synthetic oligonucleotide
gcccaugugagucguccug

SEQ ID NO: 2300390 - RNA, 19 nt, Artificial Sequence
  Description of Artificial Sequence: Synthetic oligonucleotide
agcccaguugcaagggccu

SEQ ID NO: 2300391 - RNA, 19 nt, Artificial Sequence
  Description of Artificial Sequence: Synthetic oligonucleotide
gccugaaaucacaucugug

SEQ ID NO: 2300392 - RNA, 19 nt, Artificial Sequence
  Description of Artificial Sequence: Synthetic oligonucleotide
gugaugaggggaccagacu

SEQ ID NO: 2300393 - RNA, 19 nt, Artificial Sequence
  Description of Artificial Sequence: Synthetic oligonucleotide
aggcggaacuuggaaagua

SEQ ID NO: 2300394 - RNA, 19 nt, Artificial Sequence
  Description of Artificial Sequence: Synthetic oligonucleotide
gucuaggaguccagggcuc

SEQ ID NO: 2300395 - RNA, 19 nt, Artificial Sequence
  Description of Artificial Sequence: Synthetic oligonucleotide
acgcucccgggccccgucg

SEQ ID NO: 2300396 - RNA, 19 nt, Artificial Sequence
  Description of Artificial Sequence: Synthetic oligonucleotide
ucugggcgucuuggggucc

SEQ ID NO: 2300397 - RNA, 19 nt, Artificial Sequence
  Description of Artificial Sequence: Synthetic oligonucleotide
cccuccuauggccaucuug

SEQ ID NO: 2300398 - RNA, 19 nt, Artificial Sequence
  Description of Artificial Sequence: Synthetic oligonucleotide
gaaggcguagauguccauu

SEQ ID NO: 2300399 - RNA, 19 nt, Artificial Sequence
  Description of Artificial Sequence: Synthetic oligonucleotide
ccucacucacugaaggcca

SEQ ID NO: 2300400 - RNA, 19 nt, Artificial Sequence
  Description of Artificial Sequence: Synthetic oligonucleotide
gcucaccaggcagauauga

SEQ ID NO: 2300401 - RNA, 19 nt, Artificial Sequence
  Description of Artificial Sequence: Synthetic oligonucleotide
ccugaggccuuccuaccug

SEQ ID NO: 2300402 - RNA, 19 nt, Artificial Sequence
  Description of Artificial Sequence: Synthetic oligonucleotide
ccuucuccagaagacaaga

SEQ ID NO: 2300403 - RNA, 19 nt, Artificial Sequence
  Description of Artificial Sequence: Synthetic oligonucleotide
ggacaccauggcagcacgg

SEQ ID NO: 2300404 - RNA, 19 nt, Artificial Sequence
  Description of Artificial Sequence: Synthetic oligonucleotide
ugcugcgacuggcgacgcu

SEQ ID NO: 2300405 - RNA, 19 nt, Artificial Sequence
  Description of Artificial Sequence: Synthetic oligonucleotide
ggccacggcgcuugauaag

SEQ ID NO: 2300406 - RNA, 19 nt, Artificial Sequence
  Description of Artificial Sequence: Synthetic oligonucleotide
gcugcgacuggcgacgcuc

SEQ ID NO: 2300407 - RNA, 19 nt, Artificial Sequence
  Description of Artificial Sequence: Synthetic oligonucleotide
ggcucgucucauaggggcc

SEQ ID NO: 2300408 - RNA, 19 nt, Artificial Sequence
  Description of Artificial Sequence: Synthetic oligonucleotide
acacgcaggggcaccgcca

SEQ ID NO: 2300409 - RNA, 19 nt, Artificial Sequence
  Description of Artificial Sequence: Synthetic oligonucleotide
cugugucgagggcccugag

SEQ ID NO: 2300410 - RNA, 19 nt, Artificial Sequence
  Description of Artificial Sequence: Synthetic oligonucleotide
cugacaagccagccuccaa

SEQ ID NO: 2300411 - RNA, 19 nt, Artificial Sequence
  Description of Artificial Sequence: Synthetic oligonucleotide
cugggcgucuugggguccc

SEQ ID NO: 2300412 - RNA, 19 nt, Artificial Sequence
  Description of Artificial Sequence: Synthetic oligonucleotide
gggaaggcguagaugucca

SEQ ID NO: 2300413 - RNA, 19 nt, Artificial Sequence
  Description of Artificial Sequence: Synthetic oligonucleotide
ccgugacaggcccacgcag

SEQ ID NO: 2300414 - RNA, 19 nt, Artificial Sequence
  Description of Artificial Sequence: Synthetic oligonucleotide
aggccccagagcaccagca

SEQ ID NO: 2300415 - RNA, 19 nt, Artificial Sequence
  Description of Artificial Sequence: Synthetic oligonucleotide
uggguggguggugggugcu

SEQ ID NO: 2300416 - RNA, 19 nt, Artificial Sequence
  Description of Artificial Sequence: Synthetic oligonucleotide
cucgucucauaggggccac

SEQ ID NO: 2300417 - RNA, 19 nt, Artificial Sequence
  Description of Artificial Sequence: Synthetic oligonucleotide
gcgacuggcgacgcucccg

SEQ ID NO: 2300418 - RNA, 19 nt, Artificial Sequence
  Description of Artificial Sequence: Synthetic oligonucleotide
ggcguccgaucaucacccg

SEQ ID NO: 2300419 - RNA, 19 nt, Artificial Sequence
  Description of Artificial Sequence: Synthetic oligonucleotide
gacagcccaugugagucgu

SEQ ID NO: 2300420 - RNA, 19 nt, Artificial Sequence
  Description of Artificial Sequence: Synthetic oligonucleotide
ucgagggcccugaggccuu

SEQ ID NO: 2300421 - RNA, 19 nt, Artificial Sequence
  Description of Artificial Sequence: Synthetic oligonucleotide
gcuggcauggugaccucac

SEQ ID NO: 2300422 - RNA, 19 nt, Artificial Sequence
  Description of Artificial Sequence: Synthetic oligonucleotide
ggcggaacuuggaaaguaa

SEQ ID NO: 2300423 - RNA, 19 nt, Artificial Sequence
  Description of Artificial Sequence: Synthetic oligonucleotide
ccagcccaguugcaagggc

SEQ ID NO: 2300424 - RNA, 19 nt, Artificial Sequence
  Description of Artificial Sequence: Synthetic oligonucleotide
gcccugaggccuuccuacc

SEQ ID NO: 2300425 - RNA, 19 nt, Artificial Sequence
  Description of Artificial Sequence: Synthetic oligonucleotide
ccuggcacgggcccggcuc

SEQ ID NO: 2300426 - RNA, 19 nt, Artificial Sequence
  Description of Artificial Sequence: Synthetic oligonucleotide
cgacuggcgacgcucccgg

SEQ ID NO: 2300427 - RNA, 19 nt, Artificial Sequence
  Description of Artificial Sequence: Synthetic oligonucleotide
aucacccgugacaggccca

SEQ ID NO: 2300428 - RNA, 19 nt, Artificial Sequence
  Description of Artificial Sequence: Synthetic oligonucleotide
gcagguguuagaggacauc

SEQ ID NO: 2300429 - RNA, 19 nt, Artificial Sequence
  Description of Artificial Sequence: Synthetic oligonucleotide
ggcgcuugauaagcuucug

SEQ ID NO: 2300430 - RNA, 19 nt, Artificial Sequence
  Description of Artificial Sequence: Synthetic oligonucleotide
gaacauuguugcggucccu

SEQ ID NO: 2300431 - RNA, 19 nt, Artificial Sequence
  Description of Artificial Sequence: Synthetic oligonucleotide
uaggggccacggcgcuuga

SEQ ID NO: 2300432 - RNA, 19 nt, Artificial Sequence
  Description of Artificial Sequence: Synthetic oligonucleotide
gcucgucucauaggggcca

SEQ ID NO: 2300433 - RNA, 19 nt, Artificial Sequence
  Description of Artificial Sequence: Synthetic oligonucleotide
ggggccacggcgcuugaua

SEQ ID NO: 2300434 - RNA, 19 nt, Artificial Sequence
  Description of Artificial Sequence: Synthetic oligonucleotide
gcacgggcccggcucuggg

SEQ ID NO: 2300435 - RNA, 19 nt, Artificial Sequence
  Description of Artificial Sequence: Synthetic oligonucleotide
gcagaaggccccagagcac

SEQ ID NO: 2300436 - RNA, 19 nt, Artificial Sequence
  Description of Artificial Sequence: Synthetic oligonucleotide
cccgcuucuagccaccucu

SEQ ID NO: 2300437 - RNA, 19 nt, Artificial Sequence
  Description of Artificial Sequence: Synthetic oligonucleotide
gccccgucgccagagggug

SEQ ID NO: 2300438 - RNA, 19 nt, Artificial Sequence
  Description of Artificial Sequence: Synthetic oligonucleotide
cccgucgccagaggguggg

SEQ ID NO: 2300439 - RNA, 19 nt, Artificial Sequence
  Description of Artificial Sequence: Synthetic oligonucleotide
ugggcgucuuggggucccc

SEQ ID NO: 2300440 - RNA, 19 nt, Artificial Sequence
  Description of Artificial Sequence: Synthetic oligonucleotide
ccggcucugggaagcuggc

SEQ ID NO: 2300441 - RNA, 19 nt, Artificial Sequence
  Description of Artificial Sequence: Synthetic oligonucleotide
cugcugcgacuggcgacgc

SEQ ID NO: 2300442 - RNA, 19 nt, Artificial Sequence
  Description of Artificial Sequence: Synthetic oligonucleotide
cacccgugacaggcccacg

SEQ ID NO: 2300443 - RNA, 19 nt, Artificial Sequence
  Description of Artificial Sequence: Synthetic oligonucleotide
gcagcacacgcaggggcac

SEQ ID NO: 2300444 - RNA, 19 nt, Artificial Sequence
  Description of Artificial Sequence: Synthetic oligonucleotide
gcugugucgagggcccuga

SEQ ID NO: 2300445 - RNA, 19 nt, Artificial Sequence
  Description of Artificial Sequence: Synthetic oligonucleotide
cacgggcccggcucuggga

SEQ ID NO: 2300446 - RNA, 19 nt, Artificial Sequence
  Description of Artificial Sequence: Synthetic oligonucleotide
ggcacgggcccggcucugg

SEQ ID NO: 2300447 - RNA, 19 nt, Artificial Sequence
  Description of Artificial Sequence: Synthetic oligonucleotide
cccaguugcaagggccuuc

SEQ ID NO: 2300448 - RNA, 19 nt, Artificial Sequence
  Description of Artificial Sequence: Synthetic oligonucleotide
ggcccacgcagaaggcccc

SEQ ID NO: 2300449 - RNA, 19 nt, Artificial Sequence
  Description of Artificial Sequence: Synthetic oligonucleotide
cacggcgcuugauaagcuu

SEQ ID NO: 2300450 - RNA, 19 nt, Artificial Sequence
  Description of Artificial Sequence: Synthetic oligonucleotide
ccgcuucuagccaccucuc

SEQ ID NO: 2300451 - RNA, 19 nt, Artificial Sequence
  Description of Artificial Sequence: Synthetic oligonucleotide
gggaccagacucugccccu

SEQ ID NO: 2300452 - RNA, 19 nt, Artificial Sequence
  Description of Artificial Sequence: Synthetic oligonucleotide
gcccgauugagaacauugu

SEQ ID NO: 2300453 - RNA, 19 nt, Artificial Sequence
  Description of Artificial Sequence: Synthetic oligonucleotide
caagcuccaccaggcggaa

SEQ ID NO: 2300454 - RNA, 19 nt, Artificial Sequence
  Description of Artificial Sequence: Synthetic oligonucleotide
cuggcauggccggcaggga

SEQ ID NO: 2300455 - RNA, 19 nt, Artificial Sequence
  Description of Artificial Sequence: Synthetic oligonucleotide
ucccuggcacgggcccggc

SEQ ID NO: 2300456 - RNA, 19 nt, Artificial Sequence
  Description of Artificial Sequence: Synthetic oligonucleotide
cccgauugagaacauuguu

SEQ ID NO: 2300457 - RNA, 19 nt, Artificial Sequence
  Description of Artificial Sequence: Synthetic oligonucleotide
guccagggcucgucucaua

SEQ ID NO: 2300458 - RNA, 19 nt, Artificial Sequence
  Description of Artificial Sequence: Synthetic oligonucleotide
cuccuauggccaucuuguu

SEQ ID NO: 2300459 - RNA, 19 nt, Artificial Sequence
  Description of Artificial Sequence: Synthetic oligonucleotide
caggcggaacuuggaaagu

SEQ ID NO: 2300460 - RNA, 19 nt, Artificial Sequence
  Description of Artificial Sequence: Synthetic oligonucleotide
cuggcacgggcccggcucu

SEQ ID NO: 2300461 - RNA, 19 nt, Artificial Sequence
  Description of Artificial Sequence: Synthetic oligonucleotide
ccccgucgccagagggugg

SEQ ID NO: 2300462 - RNA, 19 nt, Artificial Sequence
  Description of Artificial Sequence: Synthetic oligonucleotide
gcguccgaucaucacccgu

SEQ ID NO: 2300463 - RNA, 19 nt, Artificial Sequence
  Description of Artificial Sequence: Synthetic oligonucleotide
gacccgcuucuagccaccu

SEQ ID NO: 2300464 - RNA, 19 nt, Artificial Sequence
  Description of Artificial Sequence: Synthetic oligonucleotide
gcggucccuggcacgggcc

SEQ ID NO: 2300465 - RNA, 19 nt, Artificial Sequence
  Description of Artificial Sequence: Synthetic oligonucleotide
gggcccugaggccuuccua

SEQ ID NO: 2300466 - RNA, 19 nt, Artificial Sequence
  Description of Artificial Sequence: Synthetic oligonucleotide
cuaggaguccagggcucgu

SEQ ID NO: 2300467 - RNA, 19 nt, Artificial Sequence
  Description of Artificial Sequence: Synthetic oligonucleotide
ccacgcagaaggccccaga

SEQ ID NO: 2300468 - RNA, 19 nt, Artificial Sequence
  Description of Artificial Sequence: Synthetic oligonucleotide
aggggccacggcgcuugau

SEQ ID NO: 2300469 - RNA, 19 nt, Artificial Sequence
  Description of Artificial Sequence: Synthetic oligonucleotide
cccacgcagaaggccccag

SEQ ID NO: 2300470 - RNA, 19 nt, Artificial Sequence
  Description of Artificial Sequence: Synthetic oligonucleotide
ccgggccccgucgccagag

SEQ ID NO: 2300471 - RNA, 19 nt, Artificial Sequence
  Description of Artificial Sequence: Synthetic oligonucleotide
gcgacgcucccgggccccg

SEQ ID NO: 2300472 - RNA, 19 nt, Artificial Sequence
  Description of Artificial Sequence: Synthetic oligonucleotide
cuggcucaccaggcagaua

SEQ ID NO: 2300473 - RNA, 19 nt, Artificial Sequence
  Description of Artificial Sequence: Synthetic oligonucleotide
ccggcagggaaggcguaga

SEQ ID NO: 2300474 - RNA, 19 nt, Artificial Sequence
  Description of Artificial Sequence: Synthetic oligonucleotide
gcccggcucugggaagcug

SEQ ID NO: 2300475 - RNA, 19 nt, Artificial Sequence
  Description of Artificial Sequence: Synthetic oligonucleotide
ggccccgucgccagagggu

SEQ ID NO: 2300476 - RNA, 19 nt, Artificial Sequence
  Description of Artificial Sequence: Synthetic oligonucleotide
gcuaagcaugacagcccau

SEQ ID NO: 2300477 - RNA, 19 nt, Artificial Sequence
  Description of Artificial Sequence: Synthetic oligonucleotide
cgggcccggcucugggaag

SEQ ID NO: 2300478 - RNA, 19 nt, Artificial Sequence
  Description of Artificial Sequence: Synthetic oligonucleotide
cauaggggccacggcgcuu

SEQ ID NO: 2300479 - RNA, 19 nt, Artificial Sequence
  Description of Artificial Sequence: Synthetic oligonucleotide
ccgucgccagagggugggg

SEQ ID NO: 2300480 - RNA, 19 nt, Artificial Sequence
  Description of Artificial Sequence: Synthetic oligonucleotide
ccacggcgcuugauaagcu

SEQ ID NO: 2300481 - RNA, 19 nt, Artificial Sequence
  Description of Artificial Sequence: Synthetic oligonucleotide
gcccacgcagaaggcccca

SEQ ID NO: 2300482 - RNA, 19 nt, Artificial Sequence
  Description of Artificial Sequence: Synthetic oligonucleotide
cagcccgauugagaacauu

SEQ ID NO: 2300483 - RNA, 19 nt, Artificial Sequence
  Description of Artificial Sequence: Synthetic oligonucleotide
gggcgucuugggguccccu

SEQ ID NO: 2300484 - RNA, 19 nt, Artificial Sequence
  Description of Artificial Sequence: Synthetic oligonucleotide
ccugagcuucugggcgucu

SEQ ID NO: 2300485 - RNA, 19 nt, Artificial Sequence
  Description of Artificial Sequence: Synthetic oligonucleotide
cccgggccccgucgccaga

SEQ ID NO: 2300486 - RNA, 19 nt, Artificial Sequence
  Description of Artificial Sequence: Synthetic oligonucleotide
ccgccagcaccaggugacu

SEQ ID NO: 2300487 - RNA, 19 nt, Artificial Sequence
  Description of Artificial Sequence: Synthetic oligonucleotide
ccccuccuauggccaucuu

SEQ ID NO: 2300488 - RNA, 19 nt, Artificial Sequence
  Description of Artificial Sequence: Synthetic oligonucleotide
agaguagacagugagaucc

SEQ ID NO: 2300489 - RNA, 19 nt, Artificial Sequence
  Description of Artificial Sequence: Synthetic oligonucleotide
aauuucagggugcaguauc

SEQ ID NO: 2300490 - RNA, 19 nt, Artificial Sequence
  Description of Artificial Sequence: Synthetic oligonucleotide
aggacugaugccuagcucc

SEQ ID NO: 2300491 - RNA, 19 nt, Artificial Sequence
  Description of Artificial Sequence: Synthetic oligonucleotide
aaaagaagaaacaaaggca

SEQ ID NO: 2300492 - RNA, 19 nt, Artificial Sequence
  Description of Artificial Sequence: Synthetic oligonucleotide
auacucacggcccagagag

SEQ ID NO: 2300493 - RNA, 19 nt, Artificial Sequence
  Description of Artificial Sequence: Synthetic oligonucleotide
ucauaguagagguugagga

SEQ ID NO: 2300494 - RNA, 19 nt, Artificial Sequence
  Description of Artificial Sequence: Synthetic oligonucleotide
gaagcggagauacucacgg

SEQ ID NO: 2300495 - RNA, 19 nt, Artificial Sequence
  Description of Artificial Sequence: Synthetic oligonucleotide
acugcaaccaugucguggc

SEQ ID NO: 2300496 - RNA, 19 nt, Artificial Sequence
  Description of Artificial Sequence: Synthetic oligonucleotide
uuaggucaagaguagacag

SEQ ID NO: 2300497 - RNA, 19 nt, Artificial Sequence
  Description of Artificial Sequence: Synthetic oligonucleotide
aaagagugcucccaggaug

SEQ ID NO: 2300498 - RNA, 19 nt, Artificial Sequence
  Description of Artificial Sequence: Synthetic oligonucleotide
gagggguacaucuacaacc

SEQ ID NO: 2300499 - RNA, 19 nt, Artificial Sequence
  Description of Artificial Sequence: Synthetic oligonucleotide
uucauauccaggaagcgga

SEQ ID NO: 2300500 - RNA, 19 nt, Artificial Sequence
  Description of Artificial Sequence: Synthetic oligonucleotide
agcaacaucuuuugcagcg

SEQ ID NO: 2300501 - RNA, 19 nt, Artificial Sequence
  Description of Artificial Sequence: Synthetic oligonucleotide
cuauucauauccaggaagc

SEQ ID NO: 2300502 - RNA, 19 nt, Artificial Sequence
  Description of Artificial Sequence: Synthetic oligonucleotide
auaggcuaguuccucaucg

SEQ ID NO: 2300503 - RNA, 19 nt, Artificial Sequence
  Description of Artificial Sequence: Synthetic oligonucleotide
guaucucuggaucacauag

SEQ ID NO: 2300504 - RNA, 19 nt, Artificial Sequence
  Description of Artificial Sequence: Synthetic oligonucleotide
ucuacaaccagccgcagac

SEQ ID NO: 2300505 - RNA, 19 nt, Artificial Sequence
  Description of Artificial Sequence: Synthetic oligonucleotide
aaucucuccuagcauauug

SEQ ID NO: 2300506 - RNA, 19 nt, Artificial Sequence
  Description of Artificial Sequence: Synthetic oligonucleotide
ucugaauugcccaagggau

SEQ ID NO: 2300507 - RNA, 19 nt, Artificial Sequence
  Description of Artificial Sequence: Synthetic oligonucleotide
agcggagauacucacggcc

SEQ ID NO: 2300508 - RNA, 19 nt, Artificial Sequence
  Description of Artificial Sequence: Synthetic oligonucleotide
cagagaacaacacuuguag

SEQ ID NO: 2300509 - RNA, 19 nt, Artificial Sequence
  Description of Artificial Sequence: Synthetic oligonucleotide
ucaucguccacgaaacgag

SEQ ID NO: 2300510 - RNA, 19 nt, Artificial Sequence
  Description of Artificial Sequence: Synthetic oligonucleotide
uguggucuccccuagaacu

SEQ ID NO: 2300511 - RNA, 19 nt, Artificial Sequence
  Description of Artificial Sequence: Synthetic oligonucleotide
uagagugccauucccgccg

SEQ ID NO: 2300512 - RNA, 19 nt, Artificial Sequence
  Description of Artificial Sequence: Synthetic oligonucleotide
acacuuguagguucugggc

SEQ ID NO: 2300513 - RNA, 19 nt, Artificial Sequence
  Description of Artificial Sequence: Synthetic oligonucleotide
ugacacucugaguucaagg

SEQ ID NO: 2300514 - RNA, 19 nt, Artificial Sequence
  Description of Artificial Sequence: Synthetic oligonucleotide
acacauggggccuuucgcc

SEQ ID NO: 2300515 - RNA, 19 nt, Artificial Sequence
  Description of Artificial Sequence: Synthetic oligonucleotide
uacaaccagccgcagacgg

SEQ ID NO: 2300516 - RNA, 19 nt, Artificial Sequence
  Description of Artificial Sequence: Synthetic oligonucleotide
agagaacaacacuuguagg

SEQ ID NO: 2300517 - RNA, 19 nt, Artificial Sequence
  Description of Artificial Sequence: Synthetic oligonucleotide
uuuugcagcgagguggugg

SEQ ID NO: 2300518 - RNA, 19 nt, Artificial Sequence
  Description of Artificial Sequence: Synthetic oligonucleotide
uuugcagcgaggugguggg

SEQ ID NO: 2300519 - RNA, 19 nt, Artificial Sequence
  Description of Artificial Sequence: Synthetic oligonucleotide
auagggguuguagagugcc

SEQ ID NO: 2300520 - RNA, 19 nt, Artificial Sequence
  Description of Artificial Sequence: Synthetic oligonucleotide
uguagagugccauucccgc

SEQ ID NO: 2300521 - RNA, 19 nt, Artificial Sequence
  Description of Artificial Sequence: Synthetic oligonucleotide
ucccuugucccaaggaagg

SEQ ID NO: 2300522 - RNA, 19 nt, Artificial Sequence
  Description of Artificial Sequence: Synthetic oligonucleotide
aagaguagacagugagauc

SEQ ID NO: 2300523 - RNA, 19 nt, Artificial Sequence
  Description of Artificial Sequence: Synthetic oligonucleotide
aacugcaaccaugucgugg

SEQ ID NO: 2300524 - RNA, 19 nt, Artificial Sequence
  Description of Artificial Sequence: Synthetic oligonucleotide
aaguggacuaggcccuccc

SEQ ID NO: 2300525 - RNA, 19 nt, Artificial Sequence
  Description of Artificial Sequence: Synthetic oligonucleotide
aaccacuucaccacaaucu

SEQ ID NO: 2300526 - RNA, 19 nt, Artificial Sequence
  Description of Artificial Sequence: Synthetic oligonucleotide
guugaggacacauggggcc

SEQ ID NO: 2300527 - RNA, 19 nt, Artificial Sequence
  Description of Artificial Sequence: Synthetic oligonucleotide
ucuggaucacauaggcuag

SEQ ID NO: 2300528 - RNA, 19 nt, Artificial Sequence
  Description of Artificial Sequence: Synthetic oligonucleotide
agcauauuggugggcaucc

SEQ ID NO: 2300529 - RNA, 19 nt, Artificial Sequence
  Description of Artificial Sequence: Synthetic oligonucleotide
ucaagaguagacagugaga

SEQ ID NO: 2300530 - RNA, 19 nt, Artificial Sequence
  Description of Artificial Sequence: Synthetic oligonucleotide
auucugaauugcccaaggg

SEQ ID NO: 2300531 - RNA, 19 nt, Artificial Sequence
  Description of Artificial Sequence: Synthetic oligonucleotide
aaccaugucguggcgauag

SEQ ID NO: 2300532 - RNA, 19 nt, Artificial Sequence
  Description of Artificial Sequence: Synthetic oligonucleotide
caugucguggcgauagggg

SEQ ID NO: 2300533 - RNA, 19 nt, Artificial Sequence
  Description of Artificial Sequence: Synthetic oligonucleotide
agaacugcaaccaugucgu

SEQ ID NO: 2300534 - RNA, 19 nt, Artificial Sequence
  Description of Artificial Sequence: Synthetic oligonucleotide
uggagaaguggacuaggcc

SEQ ID NO: 2300535 - RNA, 19 nt, Artificial Sequence
  Description of Artificial Sequence: Synthetic oligonucleotide
gagaacaacacuuguaggu

SEQ ID NO: 2300536 - RNA, 19 nt, Artificial Sequence
  Description of Artificial Sequence: Synthetic oligonucleotide
cauaguagagguugaggac

SEQ ID NO: 2300537 - RNA, 19 nt, Artificial Sequence
  Description of Artificial Sequence: Synthetic oligonucleotide
aacgaguaggugcucgugu

SEQ ID NO: 2300538 - RNA, 19 nt, Artificial Sequence
  Description of Artificial Sequence: Synthetic oligonucleotide
cauaucgugcaccucucgg

SEQ ID NO: 2300539 - RNA, 19 nt, Artificial Sequence
  Description of Artificial Sequence: Synthetic oligonucleotide
cuuccuuaggucaagagua

SEQ ID NO: 2300540 - RNA, 19 nt, Artificial Sequence
  Description of Artificial Sequence: Synthetic oligonucleotide
ucagagaacaacacuugua

SEQ ID NO: 2300541 - RNA, 19 nt, Artificial Sequence
  Description of Artificial Sequence: Synthetic oligonucleotide
acccuauucauauccagga

SEQ ID NO: 2300542 - RNA, 19 nt, Artificial Sequence
  Description of Artificial Sequence: Synthetic oligonucleotide
auuucagggugcaguaucc

SEQ ID NO: 2300543 - RNA, 19 nt, Artificial Sequence
  Description of Artificial Sequence: Synthetic oligonucleotide
agccucaaaccacuucacc

SEQ ID NO: 2300544 - RNA, 19 nt, Artificial Sequence
  Description of Artificial Sequence: Synthetic oligonucleotide
ucagggugcaguauccugu

SEQ ID NO: 2300545 - RNA, 19 nt, Artificial Sequence
  Description of Artificial Sequence: Synthetic oligonucleotide
aagcggagauacucacggc

SEQ ID NO: 2300546 - RNA, 19 nt, Artificial Sequence
  Description of Artificial Sequence: Synthetic oligonucleotide
uccucaucguccacgaaac

SEQ ID NO: 2300547 - RNA, 19 nt, Artificial Sequence
  Description of Artificial Sequence: Synthetic oligonucleotide
aggaagcggagauacucac

SEQ ID NO: 2300548 - RNA, 19 nt, Artificial Sequence
  Description of Artificial Sequence: Synthetic oligonucleotide
gagacugcucccaacgccg

SEQ ID NO: 2300549 - RNA, 19 nt, Artificial Sequence
  Description of Artificial Sequence: Synthetic oligonucleotide
cucagacuaggccaggccc

SEQ ID NO: 2300550 - RNA, 19 nt, Artificial Sequence
  Description of Artificial Sequence: Synthetic oligonucleotide
ggagacccuauucauaucc

SEQ ID NO: 2300551 - RNA, 19 nt, Artificial Sequence
  Description of Artificial Sequence: Synthetic oligonucleotide
uuccuuaggucaagaguag

SEQ ID NO: 2300552 - RNA, 19 nt, Artificial Sequence
  Description of Artificial Sequence: Synthetic oligonucleotide
ugcacagccucaaaccacu

SEQ ID NO: 2300553 - RNA, 19 nt, Artificial Sequence
  Description of Artificial Sequence: Synthetic oligonucleotide
auauccaggaagcggagau

SEQ ID NO: 2300554 - RNA, 19 nt, Artificial Sequence
  Description of Artificial Sequence: Synthetic oligonucleotide
gacacauggggccuuucgc

SEQ ID NO: 2300555 - RNA, 19 nt, Artificial Sequence
  Description of Artificial Sequence: Synthetic oligonucleotide
cucuggaucacauaggcua

SEQ ID NO: 2300556 - RNA, 19 nt, Artificial Sequence
  Description of Artificial Sequence: Synthetic oligonucleotide
cauauuggugggcaucccc

SEQ ID NO: 2300557 - RNA, 19 nt, Artificial Sequence
  Description of Artificial Sequence: Synthetic oligonucleotide
gguacaucuacaaccagcc

SEQ ID NO: 2300558 - RNA, 19 nt, Artificial Sequence
  Description of Artificial Sequence: Synthetic oligonucleotide
aguucaagguucaaaagaa

SEQ ID NO: 2300559 - RNA, 19 nt, Artificial Sequence
  Description of Artificial Sequence: Synthetic oligonucleotide
aggaauuucagggugcagu

SEQ ID NO: 2300560 - RNA, 19 nt, Artificial Sequence
  Description of Artificial Sequence: Synthetic oligonucleotide
aggucaagaguagacagug

SEQ ID NO: 2300561 - RNA, 19 nt, Artificial Sequence
  Description of Artificial Sequence: Synthetic oligonucleotide
agacccuauucauauccag

SEQ ID NO: 2300562 - RNA, 19 nt, Artificial Sequence
  Description of Artificial Sequence: Synthetic oligonucleotide
aguggaagggucucccuug

SEQ ID NO: 2300563 - RNA, 19 nt, Artificial Sequence
  Description of Artificial Sequence: Synthetic oligonucleotide
gaacaacacuuguagguuc

SEQ ID NO: 2300564 - RNA, 19 nt, Artificial Sequence
  Description of Artificial Sequence: Synthetic oligonucleotide
uuggugggcauccccagca

SEQ ID NO: 2300565 - RNA, 19 nt, Artificial Sequence
  Description of Artificial Sequence: Synthetic oligonucleotide
cugaguucaagguucaaaa

SEQ ID NO: 2300566 - RNA, 19 nt, Artificial Sequence
  Description of Artificial Sequence: Synthetic oligonucleotide
ucuuuugcagcgagguggu

SEQ ID NO: 2300567 - RNA, 19 nt, Artificial Sequence
  Description of Artificial Sequence: Synthetic oligonucleotide
guagguucugggcacggag

SEQ ID NO: 2300568 - RNA, 19 nt, Artificial Sequence
  Description of Artificial Sequence: Synthetic oligonucleotide
uaggucaagaguagacagu

SEQ ID NO: 2300569 - RNA, 19 nt, Artificial Sequence
  Description of Artificial Sequence: Synthetic oligonucleotide
ucagacuaggccaggcccu

SEQ ID NO: 2300570 - RNA, 19 nt, Artificial Sequence
  Description of Artificial Sequence: Synthetic oligonucleotide
uccggggacgcucuuggag

SEQ ID NO: 2300571 - RNA, 19 nt, Artificial Sequence
  Description of Artificial Sequence: Synthetic oligonucleotide
ugagggguacaucuacaac

SEQ ID NO: 2300572 - RNA, 19 nt, Artificial Sequence
  Description of Artificial Sequence: Synthetic oligonucleotide
ucucgguaucucuggauca

SEQ ID NO: 2300573 - RNA, 19 nt, Artificial Sequence
  Description of Artificial Sequence: Synthetic oligonucleotide
uauuggugggcauccccag

SEQ ID NO: 2300574 - RNA, 19 nt, Artificial Sequence
  Description of Artificial Sequence: Synthetic oligonucleotide
uucagggugcaguauccug

SEQ ID NO: 2300575 - RNA, 19 nt, Artificial Sequence
  Description of Artificial Sequence: Synthetic oligonucleotide
gaagggcugucagagacug

SEQ ID NO: 2300576 - RNA, 19 nt, Artificial Sequence
  Description of Artificial Sequence: Synthetic oligonucleotide
cucccuugucccaaggaag

SEQ ID NO: 2300577 - RNA, 19 nt, Artificial Sequence
  Description of Artificial Sequence: Synthetic oligonucleotide
ucucuccuagcauauuggu

SEQ ID NO: 2300578 - RNA, 19 nt, Artificial Sequence
  Description of Artificial Sequence: Synthetic oligonucleotide
ucccgaagggcugucagag

SEQ ID NO: 2300579 - RNA, 19 nt, Artificial Sequence
  Description of Artificial Sequence: Synthetic oligonucleotide
gagguugaggacacauggg

SEQ ID NO: 2300580 - RNA, 19 nt, Artificial Sequence
  Description of Artificial Sequence: Synthetic oligonucleotide
ccacgaaacgaguaggugc

SEQ ID NO: 2300581 - RNA, 19 nt, Artificial Sequence
  Description of Artificial Sequence: Synthetic oligonucleotide
cucccaacgccgcucauag

SEQ ID NO: 2300582 - RNA, 19 nt, Artificial Sequence
  Description of Artificial Sequence: Synthetic oligonucleotide
cucuccuagcauauuggug

SEQ ID NO: 2300583 - RNA, 19 nt, Artificial Sequence
  Description of Artificial Sequence: Synthetic oligonucleotide
ggcgauagggguuguagag

SEQ ID NO: 2300584 - RNA, 19 nt, Artificial Sequence
  Description of Artificial Sequence: Synthetic oligonucleotide
ucuccccuagaacugcaac

SEQ ID NO: 2300585 - RNA, 19 nt, Artificial Sequence
  Description of Artificial Sequence: Synthetic oligonucleotide
ucgcccauucugaauugcc

SEQ ID NO: 2300586 - RNA, 19 nt, Artificial Sequence
  Description of Artificial Sequence: Synthetic oligonucleotide
guacaucuacaaccagccg

SEQ ID NO: 2300587 - RNA, 19 nt, Artificial Sequence
  Description of Artificial Sequence: Synthetic oligonucleotide
aguguguggagaaguggac

SEQ ID NO: 2300588 - RNA, 19 nt, Artificial Sequence
  Description of Artificial Sequence: Synthetic oligonucleotide
accagccgcagacggagcg

SEQ ID NO: 2300589 - RNA, 19 nt, Artificial Sequence
  Description of Artificial Sequence: Synthetic oligonucleotide
augucguggcgauaggggu

SEQ ID NO: 2300590 - RNA, 19 nt, Artificial Sequence
  Description of Artificial Sequence: Synthetic oligonucleotide
ggcggauggguccaaagag

SEQ ID NO: 2300591 - RNA, 19 nt, Artificial Sequence
  Description of Artificial Sequence: Synthetic oligonucleotide
ugcaguauccuguggucuc

SEQ ID NO: 2300592 - RNA, 19 nt, Artificial Sequence
  Description of Artificial Sequence: Synthetic oligonucleotide
cugaauugcccaagggauc

SEQ ID NO: 2300593 - RNA, 19 nt, Artificial Sequence
  Description of Artificial Sequence: Synthetic oligonucleotide
uaucgugcaccucucggua

SEQ ID NO: 2300594 - RNA, 19 nt, Artificial Sequence
  Description of Artificial Sequence: Synthetic oligonucleotide
ugaggaauuucagggugca

SEQ ID NO: 2300595 - RNA, 19 nt, Artificial Sequence
  Description of Artificial Sequence: Synthetic oligonucleotide
cucucgguaucucuggauc

SEQ ID NO: 2300596 - RNA, 19 nt, Artificial Sequence
  Description of Artificial Sequence: Synthetic oligonucleotide
agguucaaaagaagaaaca

SEQ ID NO: 2300597 - RNA, 19 nt, Artificial Sequence
  Description of Artificial Sequence: Synthetic oligonucleotide
caacaucuuuugcagcgag

SEQ ID NO: 2300598 - RNA, 19 nt, Artificial Sequence
  Description of Artificial Sequence: Synthetic oligonucleotide
cuccuagcauauugguggg

SEQ ID NO: 2300599 - RNA, 19 nt, Artificial Sequence
  Description of Artificial Sequence: Synthetic oligonucleotide
agcucagagaacaacacuu

SEQ ID NO: 2300600 - RNA, 19 nt, Artificial Sequence
  Description of Artificial Sequence: Synthetic oligonucleotide
gagcauaucgugcaccucu

SEQ ID NO: 2300601 - RNA, 19 nt, Artificial Sequence
  Description of Artificial Sequence: Synthetic oligonucleotide
gaucugggcacccucugga

SEQ ID NO: 2300602 - RNA, 19 nt, Artificial Sequence
  Description of Artificial Sequence: Synthetic oligonucleotide
aaacgaguaggugcucgug

SEQ ID NO: 2300603 - RNA, 19 nt, Artificial Sequence
  Description of Artificial Sequence: Synthetic oligonucleotide
cuuaggucaagaguagaca

SEQ ID NO: 2300604 - RNA, 19 nt, Artificial Sequence
  Description of Artificial Sequence: Synthetic oligonucleotide
uccacgaaacgaguaggug

SEQ ID NO: 2300605 - RNA, 19 nt, Artificial Sequence
  Description of Artificial Sequence: Synthetic oligonucleotide
gaguagacagugagauccg

SEQ ID NO: 2300606 - RNA, 19 nt, Artificial Sequence
  Description of Artificial Sequence: Synthetic oligonucleotide
uguggagcauaucgugcac

SEQ ID NO: 2300607 - RNA, 19 nt, Artificial Sequence
  Description of Artificial Sequence: Synthetic oligonucleotide
gacggagcgggagacugcg

SEQ ID NO: 2300608 - RNA, 19 nt, Artificial Sequence
  Description of Artificial Sequence: Synthetic oligonucleotide
gauacucacggcccagaga

SEQ ID NO: 2300609 - RNA, 19 nt, Artificial Sequence
  Description of Artificial Sequence: Synthetic oligonucleotide
gauggguccaaagagugcu

SEQ ID NO: 2300610 - RNA, 19 nt, Artificial Sequence
  Description of Artificial Sequence: Synthetic oligonucleotide
gaucagcucagagaacaac

SEQ ID NO: 2300611 - RNA, 19 nt, Artificial Sequence
  Description of Artificial Sequence: Synthetic oligonucleotide
ugcucgugugucuggggag

SEQ ID NO: 2300612 - RNA, 19 nt, Artificial Sequence
  Description of Artificial Sequence: Synthetic oligonucleotide
agacagugagauccgggga

SEQ ID NO: 2300613 - RNA, 19 nt, Artificial Sequence
  Description of Artificial Sequence: Synthetic oligonucleotide
uuucgcccauucugaauug

SEQ ID NO: 2300614 - RNA, 19 nt, Artificial Sequence
  Description of Artificial Sequence: Synthetic oligonucleotide
cacuuguagguucugggca

SEQ ID NO: 2300615 - RNA, 19 nt, Artificial Sequence
  Description of Artificial Sequence: Synthetic oligonucleotide
uggcgauagggguuguaga

SEQ ID NO: 2300616 - RNA, 19 nt, Artificial Sequence
  Description of Artificial Sequence: Synthetic oligonucleotide
gagcgggagacugcggugg

SEQ ID NO: 2300617 - RNA, 19 nt, Artificial Sequence
  Description of Artificial Sequence: Synthetic oligonucleotide
ugcacaugggcagaccggu

SEQ ID NO: 2300618 - RNA, 19 nt, Artificial Sequence
  Description of Artificial Sequence: Synthetic oligonucleotide
agcucagacuaggccaggc

SEQ ID NO: 2300619 - RNA, 19 nt, Artificial Sequence
  Description of Artificial Sequence: Synthetic oligonucleotide
guguggagcauaucgugca

SEQ ID NO: 2300620 - RNA, 19 nt, Artificial Sequence
  Description of Artificial Sequence: Synthetic oligonucleotide
gugccauucccgccgagcc

SEQ ID NO: 2300621 - RNA, 19 nt, Artificial Sequence
  Description of Artificial Sequence: Synthetic oligonucleotide
gaggcggauggguccaaag

SEQ ID NO: 2300622 - RNA, 19 nt, Artificial Sequence
  Description of Artificial Sequence: Synthetic oligonucleotide
auauuggugggcaucccca

SEQ ID NO: 2300623 - RNA, 19 nt, Artificial Sequence
  Description of Artificial Sequence: Synthetic oligonucleotide
uaggcuaguuccucaucgu

SEQ ID NO: 2300624 - RNA, 19 nt, Artificial Sequence
  Description of Artificial Sequence: Synthetic oligonucleotide
ucugggcacccucuggauc

SEQ ID NO: 2300625 - RNA, 19 nt, Artificial Sequence
  Description of Artificial Sequence: Synthetic oligonucleotide
guggcgauagggguuguag

SEQ ID NO: 2300626 - RNA, 19 nt, Artificial Sequence
  Description of Artificial Sequence: Synthetic oligonucleotide
aacgccgcucauaguagag

SEQ ID NO: 2300627 - RNA, 19 nt, Artificial Sequence
  Description of Artificial Sequence: Synthetic oligonucleotide
caccucucgguaucucugg

SEQ ID NO: 2300628 - RNA, 19 nt, Artificial Sequence
  Description of Artificial Sequence: Synthetic oligonucleotide
acauaggcuaguuccucau

SEQ ID NO: 2300629 - RNA, 19 nt, Artificial Sequence
  Description of Artificial Sequence: Synthetic oligonucleotide
cccuggauauguuuugggg

SEQ ID NO: 2300630 - RNA, 19 nt, Artificial Sequence
  Description of Artificial Sequence: Synthetic oligonucleotide
cagaccggucugcacagcc

SEQ ID NO: 2300631 - RNA, 19 nt, Artificial Sequence
  Description of Artificial Sequence: Synthetic oligonucleotide
aggcggauggguccaaaga

SEQ ID NO: 2300632 - RNA, 19 nt, Artificial Sequence
  Description of Artificial Sequence: Synthetic oligonucleotide
gguuguagagugccauucc

SEQ ID NO: 2300633 - RNA, 19 nt, Artificial Sequence
  Description of Artificial Sequence: Synthetic oligonucleotide
cacggaggcggaugggucc

SEQ ID NO: 2300634 - RNA, 19 nt, Artificial Sequence
  Description of Artificial Sequence: Synthetic oligonucleotide
agggguacaucuacaacca

SEQ ID NO: 2300635 - RNA, 19 nt, Artificial Sequence
  Description of Artificial Sequence: Synthetic oligonucleotide
agaaacaaaggcaguggaa

SEQ ID NO: 2300636 - RNA, 19 nt, Artificial Sequence
  Description of Artificial Sequence: Synthetic oligonucleotide
cagcaacaucuuuugcagc

SEQ ID NO: 2300637 - RNA, 19 nt, Artificial Sequence
  Description of Artificial Sequence: Synthetic oligonucleotide
ggacacauggggccuuucg

SEQ ID NO: 2300638 - RNA, 19 nt, Artificial Sequence
  Description of Artificial Sequence: Synthetic oligonucleotide
auucccgccgagccugcgg

SEQ ID NO: 2300639 - RNA, 19 nt, Artificial Sequence
  Description of Artificial Sequence: Synthetic oligonucleotide
ggguacaucuacaaccagc

SEQ ID NO: 2300640 - RNA, 19 nt, Artificial Sequence
  Description of Artificial Sequence: Synthetic oligonucleotide
cucaucguccacgaaacga

SEQ ID NO: 2300641 - RNA, 19 nt, Artificial Sequence
  Description of Artificial Sequence: Synthetic oligonucleotide
caagaguagacagugagau

SEQ ID NO: 2300642 - RNA, 19 nt, Artificial Sequence
  Description of Artificial Sequence: Synthetic oligonucleotide
uuguagguucugggcacgg

SEQ ID NO: 2300643 - RNA, 19 nt, Artificial Sequence
  Description of Artificial Sequence: Synthetic oligonucleotide
ucccugugcagcagcucag

SEQ ID NO: 2300644 - RNA, 19 nt, Artificial Sequence
  Description of Artificial Sequence: Synthetic oligonucleotide
uccuuaggucaagaguaga

SEQ ID NO: 2300645 - RNA, 19 nt, Artificial Sequence
  Description of Artificial Sequence: Synthetic oligonucleotide
gggccuuucgcccauucug

SEQ ID NO: 2300646 - RNA, 19 nt, Artificial Sequence
  Description of Artificial Sequence: Synthetic oligonucleotide
uggggagacccuauucaua

SEQ ID NO: 2300647 - RNA, 19 nt, Artificial Sequence
  Description of Artificial Sequence: Synthetic oligonucleotide
ugucguggcgauagggguu

SEQ ID NO: 2300648 - RNA, 19 nt, Artificial Sequence
  Description of Artificial Sequence: Synthetic oligonucleotide
agggucaccauggcagcgg

SEQ ID NO: 2300649 - RNA, 19 nt, Artificial Sequence
  Description of Artificial Sequence: Synthetic oligonucleotide
ugcaaccaugucguggcga

SEQ ID NO: 2300650 - RNA, 19 nt, Artificial Sequence
  Description of Artificial Sequence: Synthetic oligonucleotide
uagcauauuggugggcauc

SEQ ID NO: 2300651 - RNA, 19 nt, Artificial Sequence
  Description of Artificial Sequence: Synthetic oligonucleotide
cugaugccuagcuccuccc

SEQ ID NO: 2300652 - RNA, 19 nt, Artificial Sequence
  Description of Artificial Sequence: Synthetic oligonucleotide
caucuuuugcagcgaggug

SEQ ID NO: 2300653 - RNA, 19 nt, Artificial Sequence
  Description of Artificial Sequence: Synthetic oligonucleotide
gagcgaagcagcaggguca

SEQ ID NO: 2300654 - RNA, 19 nt, Artificial Sequence
  Description of Artificial Sequence: Synthetic oligonucleotide
ccaggaugcacaugggcag

SEQ ID NO: 2300655 - RNA, 19 nt, Artificial Sequence
  Description of Artificial Sequence: Synthetic oligonucleotide
ugccuagcuccucccgaag

SEQ ID NO: 2300656 - RNA, 19 nt, Artificial Sequence
  Description of Artificial Sequence: Synthetic oligonucleotide
cuagcuccucccgaagggc

SEQ ID NO: 2300657 - RNA, 19 nt, Artificial Sequence
  Description of Artificial Sequence: Synthetic oligonucleotide
caccacaaucucuccuagc

SEQ ID NO: 2300658 - RNA, 19 nt, Artificial Sequence
  Description of Artificial Sequence: Synthetic oligonucleotide
gaccggucugcacagccuc

SEQ ID NO: 2300659 - RNA, 19 nt, Artificial Sequence
  Description of Artificial Sequence: Synthetic oligonucleotide
ucgugcaccucucgguauc

SEQ ID NO: 2300660 - RNA, 19 nt, Artificial Sequence
  Description of Artificial Sequence: Synthetic oligonucleotide
gguugaggacacauggggc

SEQ ID NO: 2300661 - RNA, 19 nt, Artificial Sequence
  Description of Artificial Sequence: Synthetic oligonucleotide
agcauaucgugcaccucuc

SEQ ID NO: 2300662 - RNA, 19 nt, Artificial Sequence
  Description of Artificial Sequence: Synthetic oligonucleotide
cacgaaacgaguaggugcu

SEQ ID NO: 2300663 - RNA, 19 nt, Artificial Sequence
  Description of Artificial Sequence: Synthetic oligonucleotide
acaaucucuccuagcauau

SEQ ID NO: 2300664 - RNA, 19 nt, Artificial Sequence
  Description of Artificial Sequence: Synthetic oligonucleotide
uucgcccauucugaauugc

SEQ ID NO: 2300665 - RNA, 19 nt, Artificial Sequence
  Description of Artificial Sequence: Synthetic oligonucleotide
cacauaggcuaguuccuca

SEQ ID NO: 2300666 - RNA, 19 nt, Artificial Sequence
  Description of Artificial Sequence: Synthetic oligonucleotide
gcuaguuccucaucgucca

SEQ ID NO: 2300667 - RNA, 19 nt, Artificial Sequence
  Description of Artificial Sequence: Synthetic oligonucleotide
gguguggagcauaucgugc

SEQ ID NO: 2300668 - RNA, 19 nt, Artificial Sequence
  Description of Artificial Sequence: Synthetic oligonucleotide
augcacaugggcagaccgg

SEQ ID NO: 2300669 - RNA, 19 nt, Artificial Sequence
  Description of Artificial Sequence: Synthetic oligonucleotide
cauaggcuaguuccucauc

SEQ ID NO: 2300670 - RNA, 19 nt, Artificial Sequence
  Description of Artificial Sequence: Synthetic oligonucleotide
cuuggaggaucugggcacc

SEQ ID NO: 2300671 - RNA, 19 nt, Artificial Sequence
  Description of Artificial Sequence: Synthetic oligonucleotide
aggcucugaagcuuccuua

SEQ ID NO: 2300672 - RNA, 19 nt, Artificial Sequence
  Description of Artificial Sequence: Synthetic oligonucleotide
gguggggacgcagggagcg

SEQ ID NO: 2300673 - RNA, 19 nt, Artificial Sequence
  Description of Artificial Sequence: Synthetic oligonucleotide
cuacaaccagccgcagacg

SEQ ID NO: 2300674 - RNA, 19 nt, Artificial Sequence
  Description of Artificial Sequence: Synthetic oligonucleotide
guggagcauaucgugcacc

SEQ ID NO: 2300675 - RNA, 19 nt, Artificial Sequence
  Description of Artificial Sequence: Synthetic oligonucleotide
ggaucugggcacccucugg

SEQ ID NO: 2300676 - RNA, 19 nt, Artificial Sequence
  Description of Artificial Sequence: Synthetic oligonucleotide
aagggcugucagagacugc

SEQ ID NO: 2300677 - RNA, 19 nt, Artificial Sequence
  Description of Artificial Sequence: Synthetic oligonucleotide
auccuguggucuccccuag

SEQ ID NO: 2300678 - RNA, 19 nt, Artificial Sequence
  Description of Artificial Sequence: Synthetic oligonucleotide
cagacggagcgggagacug

SEQ ID NO: 2300679 - RNA, 19 nt, Artificial Sequence
  Description of Artificial Sequence: Synthetic oligonucleotide
ccuagcuccucccgaaggg

SEQ ID NO: 2300680 - RNA, 19 nt, Artificial Sequence
  Description of Artificial Sequence: Synthetic oligonucleotide
gaaacgaguaggugcucgu

SEQ ID NO: 2300681 - RNA, 19 nt, Artificial Sequence
  Description of Artificial Sequence: Synthetic oligonucleotide
cuagaacugcaaccauguc

SEQ ID NO: 2300682 - RNA, 19 nt, Artificial Sequence
  Description of Artificial Sequence: Synthetic oligonucleotide
acauggggccuuucgccca

SEQ ID NO: 2300683 - RNA, 19 nt, Artificial Sequence
  Description of Artificial Sequence: Synthetic oligonucleotide
ggggauguggcccggguac

SEQ ID NO: 2300684 - RNA, 19 nt, Artificial Sequence
  Description of Artificial Sequence: Synthetic oligonucleotide
cucgguaucucuggaucac

SEQ ID NO: 2300685 - RNA, 19 nt, Artificial Sequence
  Description of Artificial Sequence: Synthetic oligonucleotide
cuguggucuccccuagaac

SEQ ID NO: 2300686 - RNA, 19 nt, Artificial Sequence
  Description of Artificial Sequence: Synthetic oligonucleotide
aaccagccgcagacggagc

SEQ ID NO: 2300687 - RNA, 19 nt, Artificial Sequence
  Description of Artificial Sequence: Synthetic oligonucleotide
guguggagaaguggacuag

SEQ ID NO: 2300688 - RNA, 19 nt, Artificial Sequence
  Description of Artificial Sequence: Synthetic oligonucleotide
ccgaagggcugucagagac

SEQ ID NO: 2300689 - RNA, 19 nt, Artificial Sequence
  Description of Artificial Sequence: Synthetic oligonucleotide
cucugaagcuuccuuaggu

SEQ ID NO: 2300690 - RNA, 19 nt, Artificial Sequence
  Description of Artificial Sequence: Synthetic oligonucleotide
agacugcucccaacgccgc

SEQ ID NO: 2300691 - RNA, 19 nt, Artificial Sequence
  Description of Artificial Sequence: Synthetic oligonucleotide
cuuucgcccauucugaauu

SEQ ID NO: 2300692 - RNA, 19 nt, Artificial Sequence
  Description of Artificial Sequence: Synthetic oligonucleotide
cucccugugcagcagcuca

SEQ ID NO: 2300693 - RNA, 19 nt, Artificial Sequence
  Description of Artificial Sequence: Synthetic oligonucleotide
cagccucaaaccacuucac

SEQ ID NO: 2300694 - RNA, 19 nt, Artificial Sequence
  Description of Artificial Sequence: Synthetic oligonucleotide
ggaagcggagauacucacg

SEQ ID NO: 2300695 - RNA, 19 nt, Artificial Sequence
  Description of Artificial Sequence: Synthetic oligonucleotide
ucgguaucucuggaucaca

SEQ ID NO: 2300696 - RNA, 19 nt, Artificial Sequence
  Description of Artificial Sequence: Synthetic oligonucleotide
uugucccaaggaaggcagu

SEQ ID NO: 2300697 - RNA, 19 nt, Artificial Sequence
  Description of Artificial Sequence: Synthetic oligonucleotide
gcucugaagcuuccuuagg

SEQ ID NO: 2300698 - RNA, 19 nt, Artificial Sequence
  Description of Artificial Sequence: Synthetic oligonucleotide
gagacccuauucauaucca

SEQ ID NO: 2300699 - RNA, 19 nt, Artificial Sequence
  Description of Artificial Sequence: Synthetic oligonucleotide
uacucacggcccagagagc

SEQ ID NO: 2300700 - RNA, 19 nt, Artificial Sequence
  Description of Artificial Sequence: Synthetic oligonucleotide
aggugcucgugugucuggg

SEQ ID NO: 2300701 - RNA, 19 nt, Artificial Sequence
  Description of Artificial Sequence: Synthetic oligonucleotide
gaaguggacuaggcccucc

SEQ ID NO: 2300702 - RNA, 19 nt, Artificial Sequence
  Description of Artificial Sequence: Synthetic oligonucleotide
gucguggcgauagggguug

SEQ ID NO: 2300703 - RNA, 19 nt, Artificial Sequence
  Description of Artificial Sequence: Synthetic oligonucleotide
gcugucagagacugcuccc

SEQ ID NO: 2300704 - RNA, 19 nt, Artificial Sequence
  Description of Artificial Sequence: Synthetic oligonucleotide
gagaaguggacuaggcccu

SEQ ID NO: 2300705 - RNA, 19 nt, Artificial Sequence
  Description of Artificial Sequence: Synthetic oligonucleotide
agaaguggacuaggcccuc

SEQ ID NO: 2300706 - RNA, 19 nt, Artificial Sequence
  Description of Artificial Sequence: Synthetic oligonucleotide
gugcucgugugucugggga

SEQ ID NO: 2300707 - RNA, 19 nt, Artificial Sequence
  Description of Artificial Sequence: Synthetic oligonucleotide
agggagcgaagcagcaggg

SEQ ID NO: 2300708 - RNA, 19 nt, Artificial Sequence
  Description of Artificial Sequence: Synthetic oligonucleotide
guggucuccccuagaacug

SEQ ID NO: 2300709 - RNA, 19 nt, Artificial Sequence
  Description of Artificial Sequence: Synthetic oligonucleotide
gcauaucgugcaccucucg

SEQ ID NO: 2300710 - RNA, 19 nt, Artificial Sequence
  Description of Artificial Sequence: Synthetic oligonucleotide
gaacugcaaccaugucgug

SEQ ID NO: 2300711 - RNA, 19 nt, Artificial Sequence
  Description of Artificial Sequence: Synthetic oligonucleotide
ccggggacgcucuuggagg

SEQ ID NO: 2300712 - RNA, 19 nt, Artificial Sequence
  Description of Artificial Sequence: Synthetic oligonucleotide
uccuagcauauuggugggc

SEQ ID NO: 2300713 - RNA, 19 nt, Artificial Sequence
  Description of Artificial Sequence: Synthetic oligonucleotide
agacggagcgggagacugc

SEQ ID NO: 2300714 - RNA, 19 nt, Artificial Sequence
  Description of Artificial Sequence: Synthetic oligonucleotide
gcccuggauauguuuuggg

SEQ ID NO: 2300715 - RNA, 19 nt, Artificial Sequence
  Description of Artificial Sequence: Synthetic oligonucleotide
ggagacugcgguggggacg

SEQ ID NO: 2300716 - RNA, 19 nt, Artificial Sequence
  Description of Artificial Sequence: Synthetic oligonucleotide
cccuagaacugcaaccaug

SEQ ID NO: 2300717 - RNA, 19 nt, Artificial Sequence
  Description of Artificial Sequence: Synthetic oligonucleotide
gcgguggggacgcagggag

SEQ ID NO: 2300718 - RNA, 19 nt, Artificial Sequence
  Description of Artificial Sequence: Synthetic oligonucleotide
uggaucacauaggcuaguu

SEQ ID NO: 2300719 - RNA, 19 nt, Artificial Sequence
  Description of Artificial Sequence: Synthetic oligonucleotide
gcucagagaacaacacuug

SEQ ID NO: 2300720 - RNA, 19 nt, Artificial Sequence
  Description of Artificial Sequence: Synthetic oligonucleotide
auccccagcagggugugga

SEQ ID NO: 2300721 - RNA, 19 nt, Artificial Sequence
  Description of Artificial Sequence: Synthetic oligonucleotide
accucucgguaucucugga

SEQ ID NO: 2300722 - RNA, 19 nt, Artificial Sequence
  Description of Artificial Sequence: Synthetic oligonucleotide
aucgugcaccucucgguau

SEQ ID NO: 2300723 - RNA, 19 nt, Artificial Sequence
  Description of Artificial Sequence: Synthetic oligonucleotide
ggcagaccggucugcacag

SEQ ID NO: 2300724 - RNA, 19 nt, Artificial Sequence
  Description of Artificial Sequence: Synthetic oligonucleotide
uggggauguggcccgggua

SEQ ID NO: 2300725 - RNA, 19 nt, Artificial Sequence
  Description of Artificial Sequence: Synthetic oligonucleotide
cucagagaacaacacuugu

SEQ ID NO: 2300726 - RNA, 19 nt, Artificial Sequence
  Description of Artificial Sequence: Synthetic oligonucleotide
ugucuggggagacccuauu

SEQ ID NO: 2300727 - RNA, 19 nt, Artificial Sequence
  Description of Artificial Sequence: Synthetic oligonucleotide
uccuguggucuccccuaga

SEQ ID NO: 2300728 - RNA, 19 nt, Artificial Sequence
  Description of Artificial Sequence: Synthetic oligonucleotide
gagccugcggccagcaaca

SEQ ID NO: 2300729 - RNA, 19 nt, Artificial Sequence
  Description of Artificial Sequence: Synthetic oligonucleotide
agggaucagcucagagaac

SEQ ID NO: 2300730 - RNA, 19 nt, Artificial Sequence
  Description of Artificial Sequence: Synthetic oligonucleotide
cugcgguggggacgcaggg

SEQ ID NO: 2300731 - RNA, 19 nt, Artificial Sequence
  Description of Artificial Sequence: Synthetic oligonucleotide
agagugccauucccgccga

SEQ ID NO: 2300732 - RNA, 19 nt, Artificial Sequence
  Description of Artificial Sequence: Synthetic oligonucleotide
gcucagacuaggccaggcc

SEQ ID NO: 2300733 - RNA, 19 nt, Artificial Sequence
  Description of Artificial Sequence: Synthetic oligonucleotide
ccaagggaucagcucagag

SEQ ID NO: 2300734 - RNA, 19 nt, Artificial Sequence
  Description of Artificial Sequence: Synthetic oligonucleotide
ggugcucgugugucugggg

SEQ ID NO: 2300735 - RNA, 19 nt, Artificial Sequence
  Description of Artificial Sequence: Synthetic oligonucleotide
cugcaaccaugucguggcg

SEQ ID NO: 2300736 - RNA, 19 nt, Artificial Sequence
  Description of Artificial Sequence: Synthetic oligonucleotide
cuaguuccucaucguccac

SEQ ID NO: 2300737 - RNA, 19 nt, Artificial Sequence
  Description of Artificial Sequence: Synthetic oligonucleotide
ccaacgccgcucauaguag

SEQ ID NO: 2300738 - RNA, 19 nt, Artificial Sequence
  Description of Artificial Sequence: Synthetic oligonucleotide
acgaaacgaguaggugcuc

SEQ ID NO: 2300739 - RNA, 19 nt, Artificial Sequence
  Description of Artificial Sequence: Synthetic oligonucleotide
ccuagaacugcaaccaugu

SEQ ID NO: 2300740 - RNA, 19 nt, Artificial Sequence
  Description of Artificial Sequence: Synthetic oligonucleotide
cggauggguccaaagagug

SEQ ID NO: 2300741 - RNA, 19 nt, Artificial Sequence
  Description of Artificial Sequence: Synthetic oligonucleotide
gcggagauacucacggccc

SEQ ID NO: 2300742 - RNA, 19 nt, Artificial Sequence
  Description of Artificial Sequence: Synthetic oligonucleotide
ggguccaaagagugcuccc

SEQ ID NO: 2300743 - RNA, 19 nt, Artificial Sequence
  Description of Artificial Sequence: Synthetic oligonucleotide
ccaugucguggcgauaggg

SEQ ID NO: 2300744 - RNA, 19 nt, Artificial Sequence
  Description of Artificial Sequence: Synthetic oligonucleotide
guauccuguggucuccccu

SEQ ID NO: 2300745 - RNA, 19 nt, Artificial Sequence
  Description of Artificial Sequence: Synthetic oligonucleotide
ggggagacccuauucauau

SEQ ID NO: 2300746 - RNA, 19 nt, Artificial Sequence
  Description of Artificial Sequence: Synthetic oligonucleotide
caacgccgcucauaguaga

SEQ ID NO: 2300747 - RNA, 19 nt, Artificial Sequence
  Description of Artificial Sequence: Synthetic oligonucleotide
ggagauacucacggcccag

SEQ ID NO: 2300748 - RNA, 19 nt, Artificial Sequence
  Description of Artificial Sequence: Synthetic oligonucleotide
cauauccaggaagcggaga

SEQ ID NO: 2300749 - RNA, 19 nt, Artificial Sequence
  Description of Artificial Sequence: Synthetic oligonucleotide
cccggguacagcaggcggg

SEQ ID NO: 2300750 - RNA, 19 nt, Artificial Sequence
  Description of Artificial Sequence: Synthetic oligonucleotide
cuaggcccucccugugcag

SEQ ID NO: 2300751 - RNA, 19 nt, Artificial Sequence
  Description of Artificial Sequence: Synthetic oligonucleotide
ugcggccagcaacaucuuu

SEQ ID NO: 2300752 - RNA, 19 nt, Artificial Sequence
  Description of Artificial Sequence: Synthetic oligonucleotide
cgaaacgaguaggugcucg

SEQ ID NO: 2300753 - RNA, 19 nt, Artificial Sequence
  Description of Artificial Sequence: Synthetic oligonucleotide
ggauggguccaaagagugc

SEQ ID NO: 2300754 - RNA, 19 nt, Artificial Sequence
  Description of Artificial Sequence: Synthetic oligonucleotide
ugcgguggggacgcaggga

SEQ ID NO: 2300755 - RNA, 19 nt, Artificial Sequence
  Description of Artificial Sequence: Synthetic oligonucleotide
cugugcagcagcucagacu

SEQ ID NO: 2300756 - RNA, 19 nt, Artificial Sequence
  Description of Artificial Sequence: Synthetic oligonucleotide
acaaccagccgcagacgga

SEQ ID NO: 2300757 - RNA, 19 nt, Artificial Sequence
  Description of Artificial Sequence: Synthetic oligonucleotide
gcccggguacagcaggcgg

SEQ ID NO: 2300758 - RNA, 19 nt, Artificial Sequence
  Description of Artificial Sequence: Synthetic oligonucleotide
cuaggccaggcccuggaua

SEQ ID NO: 2300759 - RNA, 19 nt, Artificial Sequence
  Description of Artificial Sequence: Synthetic oligonucleotide
aucguccacgaaacgagua

SEQ ID NO: 2300760 - RNA, 19 nt, Artificial Sequence
  Description of Artificial Sequence: Synthetic oligonucleotide
ggcccugagggguacaucu

SEQ ID NO: 2300761 - RNA, 19 nt, Artificial Sequence
  Description of Artificial Sequence: Synthetic oligonucleotide
ccuagcauauuggugggca

SEQ ID NO: 2300762 - RNA, 19 nt, Artificial Sequence
  Description of Artificial Sequence: Synthetic oligonucleotide
caucuacaaccagccgcag

SEQ ID NO: 2300763 - RNA, 19 nt, Artificial Sequence
  Description of Artificial Sequence: Synthetic oligonucleotide
ucacggcccagagagccuu

SEQ ID NO: 2300764 - RNA, 19 nt, Artificial Sequence
  Description of Artificial Sequence: Synthetic oligonucleotide
guguguggagaaguggacu

SEQ ID NO: 2300765 - RNA, 19 nt, Artificial Sequence
  Description of Artificial Sequence: Synthetic oligonucleotide
uugcagcgagguggugggg

SEQ ID NO: 2300766 - RNA, 19 nt, Artificial Sequence
  Description of Artificial Sequence: Synthetic oligonucleotide
ccauucugaauugcccaag

SEQ ID NO: 2300767 - RNA, 19 nt, Artificial Sequence
  Description of Artificial Sequence: Synthetic oligonucleotide
gacgcucuuggaggaucug

SEQ ID NO: 2300768 - RNA, 19 nt, Artificial Sequence
  Description of Artificial Sequence: Synthetic oligonucleotide
cccaacgccgcucauagua

SEQ ID NO: 2300769 - RNA, 19 nt, Artificial Sequence
  Description of Artificial Sequence: Synthetic oligonucleotide
cccugagggguacaucuac

SEQ ID NO: 2300770 - RNA, 19 nt, Artificial Sequence
  Description of Artificial Sequence: Synthetic oligonucleotide
ggccagcaacaucuuuugc

SEQ ID NO: 2300771 - RNA, 19 nt, Artificial Sequence
  Description of Artificial Sequence: Synthetic oligonucleotide
gagugccauucccgccgag

SEQ ID NO: 2300772 - RNA, 19 nt, Artificial Sequence
  Description of Artificial Sequence: Synthetic oligonucleotide
gggugcaguauccuguggu

SEQ ID NO: 2300773 - RNA, 19 nt, Artificial Sequence
  Description of Artificial Sequence: Synthetic oligonucleotide
aggacacauggggccuuuc

SEQ ID NO: 2300774 - RNA, 19 nt, Artificial Sequence
  Description of Artificial Sequence: Synthetic oligonucleotide
cguccacgaaacgaguagg

SEQ ID NO: 2300775 - RNA, 19 nt, Artificial Sequence
  Description of Artificial Sequence: Synthetic oligonucleotide
agaccggucugcacagccu

SEQ ID NO: 2300776 - RNA, 19 nt, Artificial Sequence
  Description of Artificial Sequence: Synthetic oligonucleotide
cucgugugucuggggagac

SEQ ID NO: 2300777 - RNA, 19 nt, Artificial Sequence
  Description of Artificial Sequence: Synthetic oligonucleotide
cagcucagagaacaacacu

SEQ ID NO: 2300778 - RNA, 19 nt, Artificial Sequence
  Description of Artificial Sequence: Synthetic oligonucleotide
gcaccucucgguaucucug

SEQ ID NO: 2300779 - RNA, 19 nt, Artificial Sequence
  Description of Artificial Sequence: Synthetic oligonucleotide
ggacuaggcccucccugug

SEQ ID NO: 2300780 - RNA, 19 nt, Artificial Sequence
  Description of Artificial Sequence: Synthetic oligonucleotide
ccucaucguccacgaaacg

SEQ ID NO: 2300781 - RNA, 19 nt, Artificial Sequence
  Description of Artificial Sequence: Synthetic oligonucleotide
ugaggacacauggggccuu

SEQ ID NO: 2300782 - RNA, 19 nt, Artificial Sequence
  Description of Artificial Sequence: Synthetic oligonucleotide
gacugaugccuagcuccuc

SEQ ID NO: 2300783 - RNA, 19 nt, Artificial Sequence
  Description of Artificial Sequence: Synthetic oligonucleotide
acggaggcggaugggucca

SEQ ID NO: 2300784 - RNA, 19 nt, Artificial Sequence
  Description of Artificial Sequence: Synthetic oligonucleotide
gggaggacugaugccuagc

SEQ ID NO: 2300785 - RNA, 19 nt, Artificial Sequence
  Description of Artificial Sequence: Synthetic oligonucleotide
uccucccgaagggcuguca

SEQ ID NO: 2300786 - RNA, 19 nt, Artificial Sequence
  Description of Artificial Sequence: Synthetic oligonucleotide
ucccaacgccgcucauagu

SEQ ID NO: 2300787 - RNA, 19 nt, Artificial Sequence
  Description of Artificial Sequence: Synthetic oligonucleotide
caucguccacgaaacgagu

SEQ ID NO: 2300788 - RNA, 19 nt, Artificial Sequence
  Description of Artificial Sequence: Synthetic oligonucleotide
cuggggagacccuauucau

SEQ ID NO: 2300789 - RNA, 19 nt, Artificial Sequence
  Description of Artificial Sequence: Synthetic oligonucleotide
cuagcauauuggugggcau

SEQ ID NO: 2300790 - RNA, 19 nt, Artificial Sequence
  Description of Artificial Sequence: Synthetic oligonucleotide
ggccuuucgcccauucuga

SEQ ID NO: 2300791 - RNA, 19 nt, Artificial Sequence
  Description of Artificial Sequence: Synthetic oligonucleotide
cuuuugcagcgagguggug

SEQ ID NO: 2300792 - RNA, 19 nt, Artificial Sequence
  Description of Artificial Sequence: Synthetic oligonucleotide
caaaccacuucaccacaau

SEQ ID NO: 2300793 - RNA, 19 nt, Artificial Sequence
  Description of Artificial Sequence: Synthetic oligonucleotide
auccggggacgcucuugga

SEQ ID NO: 2300794 - RNA, 19 nt, Artificial Sequence
  Description of Artificial Sequence: Synthetic oligonucleotide
ucccgccgagccugcggcc

SEQ ID NO: 2300795 - RNA, 19 nt, Artificial Sequence
  Description of Artificial Sequence: Synthetic oligonucleotide
guccacgaaacgaguaggu

SEQ ID NO: 2300796 - RNA, 19 nt, Artificial Sequence
  Description of Artificial Sequence: Synthetic oligonucleotide
caggaugcacaugggcaga

SEQ ID NO: 2300797 - RNA, 19 nt, Artificial Sequence
  Description of Artificial Sequence: Synthetic oligonucleotide
ggucaagaguagacaguga

SEQ ID NO: 2300798 - RNA, 19 nt, Artificial Sequence
  Description of Artificial Sequence: Synthetic oligonucleotide
cauucccgccgagccugcg

SEQ ID NO: 2300799 - RNA, 19 nt, Artificial Sequence
  Description of Artificial Sequence: Synthetic oligonucleotide
gggagacccuauucauauc

SEQ ID NO: 2300800 - RNA, 19 nt, Artificial Sequence
  Description of Artificial Sequence: Synthetic oligonucleotide
gcauauuggugggcauccc

SEQ ID NO: 2300801 - RNA, 19 nt, Artificial Sequence
  Description of Artificial Sequence: Synthetic oligonucleotide
gccgcagacggagcgggag

SEQ ID NO: 2300802 - RNA, 19 nt, Artificial Sequence
  Description of Artificial Sequence: Synthetic oligonucleotide
ccuguggucuccccuagaa

SEQ ID NO: 2300803 - RNA, 19 nt, Artificial Sequence
  Description of Artificial Sequence: Synthetic oligonucleotide
ccggguacagcaggcgggg

SEQ ID NO: 2300804 - RNA, 19 nt, Artificial Sequence
  Description of Artificial Sequence: Synthetic oligonucleotide
gcaaccaugucguggcgau

SEQ ID NO: 2300805 - RNA, 19 nt, Artificial Sequence
  Description of Artificial Sequence: Synthetic oligonucleotide
acggcccagagagccuuca

SEQ ID NO: 2300806 - RNA, 19 nt, Artificial Sequence
  Description of Artificial Sequence: Synthetic oligonucleotide
gcccaagggaucagcucag

SEQ ID NO: 2300807 - RNA, 19 nt, Artificial Sequence
  Description of Artificial Sequence: Synthetic oligonucleotide
ccuugucccaaggaaggca

SEQ ID NO: 2300808 - RNA, 19 nt, Artificial Sequence
  Description of Artificial Sequence: Synthetic oligonucleotide
cccagagagccuucaggca

SEQ ID NO: 2300809 - RNA, 19 nt, Artificial Sequence
  Description of Artificial Sequence: Synthetic oligonucleotide
gucccaaggaaggcagugu

SEQ ID NO: 2300810 - RNA, 19 nt, Artificial Sequence
  Description of Artificial Sequence: Synthetic oligonucleotide
gggacgcucuuggaggauc

SEQ ID NO: 2300811 - RNA, 19 nt, Artificial Sequence
  Description of Artificial Sequence: Synthetic oligonucleotide
accggucugcacagccuca

SEQ ID NO: 2300812 - RNA, 19 nt, Artificial Sequence
  Description of Artificial Sequence: Synthetic oligonucleotide
ggcccggguacagcaggcg

SEQ ID NO: 2300813 - RNA, 19 nt, Artificial Sequence
  Description of Artificial Sequence: Synthetic oligonucleotide
ugcucccaacgccgcucau

SEQ ID NO: 2300814 - RNA, 19 nt, Artificial Sequence
  Description of Artificial Sequence: Synthetic oligonucleotide
ccuucaggcaggcucugaa

SEQ ID NO: 2300815 - RNA, 19 nt, Artificial Sequence
  Description of Artificial Sequence: Synthetic oligonucleotide
gcucgugugucuggggaga

SEQ ID NO: 2300816 - RNA, 19 nt, Artificial Sequence
  Description of Artificial Sequence: Synthetic oligonucleotide
cccuauucauauccaggaa

SEQ ID NO: 2300817 - RNA, 19 nt, Artificial Sequence
  Description of Artificial Sequence: Synthetic oligonucleotide
cagcgaggugguggggaug

SEQ ID NO: 2300818 - RNA, 19 nt, Artificial Sequence
  Description of Artificial Sequence: Synthetic oligonucleotide
ggaucagcucagagaacaa

SEQ ID NO: 2300819 - RNA, 19 nt, Artificial Sequence
  Description of Artificial Sequence: Synthetic oligonucleotide
cacggcccagagagccuuc

SEQ ID NO: 2300820 - RNA, 19 nt, Artificial Sequence
  Description of Artificial Sequence: Synthetic oligonucleotide
caguggaagggucucccuu

SEQ ID NO: 2300821 - RNA, 19 nt, Artificial Sequence
  Description of Artificial Sequence: Synthetic oligonucleotide
gucuccccuagaacugcaa

SEQ ID NO: 2300822 - RNA, 19 nt, Artificial Sequence
  Description of Artificial Sequence: Synthetic oligonucleotide
gccuuucgcccauucugaa

SEQ ID NO: 2300823 - RNA, 19 nt, Artificial Sequence
  Description of Artificial Sequence: Synthetic oligonucleotide
gcggauggguccaaagagu

SEQ ID NO: 2300824 - RNA, 19 nt, Artificial Sequence
  Description of Artificial Sequence: Synthetic oligonucleotide
gcgauagggguuguagagu

SEQ ID NO: 2300825 - RNA, 19 nt, Artificial Sequence
  Description of Artificial Sequence: Synthetic oligonucleotide
ggcacccucuggauccuuc

SEQ ID NO: 2300826 - RNA, 19 nt, Artificial Sequence
  Description of Artificial Sequence: Synthetic oligonucleotide
gugcaccucucgguaucuc

SEQ ID NO: 2300827 - RNA, 19 nt, Artificial Sequence
  Description of Artificial Sequence: Synthetic oligonucleotide
gcacggaggcggauggguc

SEQ ID NO: 2300828 - RNA, 19 nt, Artificial Sequence
  Description of Artificial Sequence: Synthetic oligonucleotide
ggacugaugccuagcuccu

SEQ ID NO: 2300829 - RNA, 19 nt, Artificial Sequence
  Description of Artificial Sequence: Synthetic oligonucleotide
ucguggcgauagggguugu

SEQ ID NO: 2300830 - RNA, 19 nt, Artificial Sequence
  Description of Artificial Sequence: Synthetic oligonucleotide
ccauucccgccgagccugc

SEQ ID NO: 2300831 - RNA, 19 nt, Artificial Sequence
  Description of Artificial Sequence: Synthetic oligonucleotide
ggcacggaggcggaugggu

SEQ ID NO: 2300832 - RNA, 19 nt, Artificial Sequence
  Description of Artificial Sequence: Synthetic oligonucleotide
ucccggcccugagggguac

SEQ ID NO: 2300833 - RNA, 19 nt, Artificial Sequence
  Description of Artificial Sequence: Synthetic oligonucleotide
gcggccagcaacaucuuuu

SEQ ID NO: 2300834 - RNA, 19 nt, Artificial Sequence
  Description of Artificial Sequence: Synthetic oligonucleotide
cgcucauaguagagguuga

SEQ ID NO: 2300835 - RNA, 19 nt, Artificial Sequence
  Description of Artificial Sequence: Synthetic oligonucleotide
cgcagacggagcgggagac

SEQ ID NO: 2300836 - RNA, 19 nt, Artificial Sequence
  Description of Artificial Sequence: Synthetic oligonucleotide
cccaaggaaggcagugugu

SEQ ID NO: 2300837 - RNA, 19 nt, Artificial Sequence
  Description of Artificial Sequence: Synthetic oligonucleotide
caggcaggcucugaagcuu

SEQ ID NO: 2300838 - RNA, 19 nt, Artificial Sequence
  Description of Artificial Sequence: Synthetic oligonucleotide
cggagauacucacggccca

SEQ ID NO: 2300839 - RNA, 19 nt, Artificial Sequence
  Description of Artificial Sequence: Synthetic oligonucleotide
ggggccuuucgcccauucu

SEQ ID NO: 2300840 - RNA, 19 nt, Artificial Sequence
  Description of Artificial Sequence: Synthetic oligonucleotide
ggacgcucuuggaggaucu

SEQ ID NO: 2300841 - RNA, 19 nt, Artificial Sequence
  Description of Artificial Sequence: Synthetic oligonucleotide
gcacaugggcagaccgguc

SEQ ID NO: 2300842 - RNA, 19 nt, Artificial Sequence
  Description of Artificial Sequence: Synthetic oligonucleotide
agccgcagacggagcggga

SEQ ID NO: 2300843 - RNA, 19 nt, Artificial Sequence
  Description of Artificial Sequence: Synthetic oligonucleotide
cauggggccuuucgcccau

SEQ ID NO: 2300844 - RNA, 19 nt, Artificial Sequence
  Description of Artificial Sequence: Synthetic oligonucleotide
caaccaugucguggcgaua

SEQ ID NO: 2300845 - RNA, 19 nt, Artificial Sequence
  Description of Artificial Sequence: Synthetic oligonucleotide
gcucccaacgccgcucaua

SEQ ID NO: 2300846 - RNA, 19 nt, Artificial Sequence
  Description of Artificial Sequence: Synthetic oligonucleotide
agccugcggccagcaacau

SEQ ID NO: 2300847 - RNA, 19 nt, Artificial Sequence
  Description of Artificial Sequence: Synthetic oligonucleotide
gaggacacauggggccuuu

SEQ ID NO: 2300848 - RNA, 19 nt, Artificial Sequence
  Description of Artificial Sequence: Synthetic oligonucleotide
ccacaaucucuccuagcau

SEQ ID NO: 2300849 - RNA, 19 nt, Artificial Sequence
  Description of Artificial Sequence: Synthetic oligonucleotide
cgccgcucauaguagaggu

SEQ ID NO: 2300850 - RNA, 19 nt, Artificial Sequence
  Description of Artificial Sequence: Synthetic oligonucleotide
ccuuucgcccauucugaau

SEQ ID NO: 2300851 - RNA, 19 nt, Artificial Sequence
  Description of Artificial Sequence: Synthetic oligonucleotide
caaucucuccuagcauauu

SEQ ID NO: 2300852 - RNA, 19 nt, Artificial Sequence
  Description of Artificial Sequence: Synthetic oligonucleotide
gcagcgaggugguggggau

SEQ ID NO: 2300853 - RNA, 19 nt, Artificial Sequence
  Description of Artificial Sequence: Synthetic oligonucleotide
gagauccggggacgcucuu

SEQ ID NO: 2300854 - RNA, 19 nt, Artificial Sequence
  Description of Artificial Sequence: Synthetic oligonucleotide
ccgcagacggagcgggaga

SEQ ID NO: 2300855 - RNA, 19 nt, Artificial Sequence
  Description of Artificial Sequence: Synthetic oligonucleotide
gggagcgaagcagcagggu

SEQ ID NO: 2300856 - RNA, 19 nt, Artificial Sequence
  Description of Artificial Sequence: Synthetic oligonucleotide
cgggagacugcggugggga

SEQ ID NO: 2300857 - RNA, 19 nt, Artificial Sequence
  Description of Artificial Sequence: Synthetic oligonucleotide
ccucucgguaucucuggau

SEQ ID NO: 2300858 - RNA, 19 nt, Artificial Sequence
  Description of Artificial Sequence: Synthetic oligonucleotide
ccgccgagccugcggccag

SEQ ID NO: 2300859 - RNA, 19 nt, Artificial Sequence
  Description of Artificial Sequence: Synthetic oligonucleotide
cgaguaggugcucgugugu

SEQ ID NO: 2300860 - RNA, 19 nt, Artificial Sequence
  Description of Artificial Sequence: Synthetic oligonucleotide
cggagcgggagacugcggu

SEQ ID NO: 2300861 - RNA, 19 nt, Artificial Sequence
  Description of Artificial Sequence: Synthetic oligonucleotide
auggggccuuucgcccauu

SEQ ID NO: 2300862 - RNA, 19 nt, Artificial Sequence
  Description of Artificial Sequence: Synthetic oligonucleotide
gcgaggugguggggaugug

SEQ ID NO: 2300863 - RNA, 19 nt, Artificial Sequence
  Description of Artificial Sequence: Synthetic oligonucleotide
cccaagggaucagcucaga

SEQ ID NO: 2300864 - RNA, 19 nt, Artificial Sequence
  Description of Artificial Sequence: Synthetic oligonucleotide
ccggucugcacagccucaa

SEQ ID NO: 2300865 - RNA, 19 nt, Artificial Sequence
  Description of Artificial Sequence: Synthetic oligonucleotide
gcagacggagcgggagacu

SEQ ID NO: 2300866 - RNA, 19 nt, Artificial Sequence
  Description of Artificial Sequence: Synthetic oligonucleotide
ccucuggauccuucuucau

SEQ ID NO: 2300867 - RNA, 19 nt, Artificial Sequence
  Description of Artificial Sequence: Synthetic oligonucleotide
gccgcucauaguagagguu

SEQ ID NO: 2300868 - RNA, 19 nt, Artificial Sequence
  Description of Artificial Sequence: Synthetic oligonucleotide
cggucugcacagccucaaa

SEQ ID NO: 2300869 - RNA, 19 nt, Artificial Sequence
  Description of Artificial Sequence: Synthetic oligonucleotide
cgugcaccucucgguaucu

SEQ ID NO: 2300870 - RNA, 19 nt, Artificial Sequence
  Description of Artificial Sequence: Synthetic oligonucleotide
ccgagccugcggccagcaa

SEQ ID NO: 2300871 - RNA, 19 nt, Artificial Sequence
  Description of Artificial Sequence: Synthetic oligonucleotide
cguggcgauagggguugua

SEQ ID NO: 2300872 - RNA, 19 nt, Artificial Sequence
  Description of Artificial Sequence: Synthetic oligonucleotide
gccaggcccuggauauguu

SEQ ID NO: 2300873 - RNA, 19 nt, Artificial Sequence
  Description of Artificial Sequence: Synthetic oligonucleotide
ccggcccugagggguacau

SEQ ID NO: 2300874 - RNA, 19 nt, Artificial Sequence
  Description of Artificial Sequence: Synthetic oligonucleotide
aaggcaguacacuucaucc

SEQ ID NO: 2300875 - RNA, 19 nt, Artificial Sequence
  Description of Artificial Sequence: Synthetic oligonucleotide
aaagacacgcuucuggugg

SEQ ID NO: 2300876 - RNA, 19 nt, Artificial Sequence
  Description of Artificial Sequence: Synthetic oligonucleotide
agaaccuccgcucagacag

SEQ ID NO: 2300877 - RNA, 19 nt, Artificial Sequence
  Description of Artificial Sequence: Synthetic oligonucleotide
agaagcgugaaugugugcc

SEQ ID NO: 2300878 - RNA, 19 nt, Artificial Sequence
  Description of Artificial Sequence: Synthetic oligonucleotide
gacaugaugcucucggugg

SEQ ID NO: 2300879 - RNA, 19 nt, Artificial Sequence
  Description of Artificial Sequence: Synthetic oligonucleotide
ugccguagaaacuggagcg

SEQ ID NO: 2300880 - RNA, 19 nt, Artificial Sequence
  Description of Artificial Sequence: Synthetic oligonucleotide
aagucguuaaggcaguaca

SEQ ID NO: 2300881 - RNA, 19 nt, Artificial Sequence
  Description of Artificial Sequence: Synthetic oligonucleotide
agacagguaguucucacgg

SEQ ID NO: 2300882 - RNA, 19 nt, Artificial Sequence
  Description of Artificial Sequence: Synthetic oligonucleotide
uccaggaguaugcuguugg

SEQ ID NO: 2300883 - RNA, 19 nt, Artificial Sequence
  Description of Artificial Sequence: Synthetic oligonucleotide
aagugcugucuccaggucg

SEQ ID NO: 2300884 - RNA, 19 nt, Artificial Sequence
  Description of Artificial Sequence: Synthetic oligonucleotide
ucgugaagcaucuccaugc

SEQ ID NO: 2300885 - RNA, 19 nt, Artificial Sequence
  Description of Artificial Sequence: Synthetic oligonucleotide
cucaaagacacgcuucugg

SEQ ID NO: 2300886 - RNA, 19 nt, Artificial Sequence
  Description of Artificial Sequence: Synthetic oligonucleotide
gaaaccggugaacucagag

SEQ ID NO: 2300887 - RNA, 19 nt, Artificial Sequence
  Description of Artificial Sequence: Synthetic oligonucleotide
cauguugccgacaucacug

SEQ ID NO: 2300888 - RNA, 19 nt, Artificial Sequence
  Description of Artificial Sequence: Synthetic oligonucleotide
aaagucguuaaggcaguac

SEQ ID NO: 2300889 - RNA, 19 nt, Artificial Sequence
  Description of Artificial Sequence: Synthetic oligonucleotide
cuuauugcgcuccucauuc

SEQ ID NO: 2300890 - RNA, 19 nt, Artificial Sequence
  Description of Artificial Sequence: Synthetic oligonucleotide
aggaguaugcuguuggucu

SEQ ID NO: 2300891 - RNA, 19 nt, Artificial Sequence
  Description of Artificial Sequence: Synthetic oligonucleotide
acguccaauguccggaagc

SEQ ID NO: 2300892 - RNA, 19 nt, Artificial Sequence
  Description of Artificial Sequence: Synthetic oligonucleotide
aaaccggugaacucagaga

SEQ ID NO: 2300893 - RNA, 19 nt, Artificial Sequence
  Description of Artificial Sequence: Synthetic oligonucleotide
ugugaguugccgcugggca

SEQ ID NO: 2300894 - RNA, 19 nt, Artificial Sequence
  Description of Artificial Sequence: Synthetic oligonucleotide
uugggcaccgucuuauucc

SEQ ID NO: 2300895 - RNA, 19 nt, Artificial Sequence
  Description of Artificial Sequence: Synthetic oligonucleotide
uugucuuccagcucgcgca

SEQ ID NO: 2300896 - RNA, 19 nt, Artificial Sequence
  Description of Artificial Sequence: Synthetic oligonucleotide
guuggagccucucaaagac

SEQ ID NO: 2300897 - RNA, 19 nt, Artificial Sequence
  Description of Artificial Sequence: Synthetic oligonucleotide
agacucaggcucuuccagc

SEQ ID NO: 2300898 - RNA, 19 nt, Artificial Sequence
  Description of Artificial Sequence: Synthetic oligonucleotide
ugguuggagccucucaaag

SEQ ID NO: 2300899 - RNA, 19 nt, Artificial Sequence
  Description of Artificial Sequence: Synthetic oligonucleotide
gauuuccgcagccaaugag

SEQ ID NO: 2300900 - RNA, 19 nt, Artificial Sequence
  Description of Artificial Sequence: Synthetic oligonucleotide
uggagccucucaaagacac

SEQ ID NO: 2300901 - RNA, 19 nt, Artificial Sequence
  Description of Artificial Sequence: Synthetic oligonucleotide
gauguccggagacucaggc

SEQ ID NO: 2300902 - RNA, 19 nt, Artificial Sequence
  Description of Artificial Sequence: Synthetic oligonucleotide
ucauuuuccaccgcacaag

SEQ ID NO: 2300903 - RNA, 19 nt, Artificial Sequence
  Description of Artificial Sequence: Synthetic oligonucleotide
ugaacucagagaagcguga

SEQ ID NO: 2300904 - RNA, 19 nt, Artificial Sequence
  Description of Artificial Sequence: Synthetic oligonucleotide
uauugcgcuccucauuccc

SEQ ID NO: 2300905 - RNA, 19 nt, Artificial Sequence
  Description of Artificial Sequence: Synthetic oligonucleotide
guuaaggcaguacacuuca

SEQ ID NO: 2300906 - RNA, 19 nt, Artificial Sequence
  Description of Artificial Sequence: Synthetic oligonucleotide
cuuacgcauaguucccucg

SEQ ID NO: 2300907 - RNA, 19 nt, Artificial Sequence
  Description of Artificial Sequence: Synthetic oligonucleotide
acgaucugcagcuucucag

SEQ ID NO: 2300908 - RNA, 19 nt, Artificial Sequence
  Description of Artificial Sequence: Synthetic oligonucleotide
guuggucuuguugucaagg

SEQ ID NO: 2300909 - RNA, 19 nt, Artificial Sequence
  Description of Artificial Sequence: Synthetic oligonucleotide
gcuccuuacgcauaguucc

SEQ ID NO: 2300910 - RNA, 19 nt, Artificial Sequence
  Description of Artificial Sequence: Synthetic oligonucleotide
acggcgcagggacagacgc

SEQ ID NO: 2300911 - RNA, 19 nt, Artificial Sequence
  Description of Artificial Sequence: Synthetic oligonucleotide
ucuucauuuuccaccgcac

SEQ ID NO: 2300912 - RNA, 19 nt, Artificial Sequence
  Description of Artificial Sequence: Synthetic oligonucleotide
ucaacguccaauguccgga

SEQ ID NO: 2300913 - RNA, 19 nt, Artificial Sequence
  Description of Artificial Sequence: Synthetic oligonucleotide
auguugccgacaucacugc

SEQ ID NO: 2300914 - RNA, 19 nt, Artificial Sequence
  Description of Artificial Sequence: Synthetic oligonucleotide
auuccgcagguucuucagc

SEQ ID NO: 2300915 - RNA, 19 nt, Artificial Sequence
  Description of Artificial Sequence: Synthetic oligonucleotide
uauuccgcagguucuucag

SEQ ID NO: 2300916 - RNA, 19 nt, Artificial Sequence
  Description of Artificial Sequence: Synthetic oligonucleotide
cauuccccagaucagcugc

SEQ ID NO: 2300917 - RNA, 19 nt, Artificial Sequence
  Description of Artificial Sequence: Synthetic oligonucleotide
uuacgcauaguucccucga

SEQ ID NO: 2300918 - RNA, 19 nt, Artificial Sequence
  Description of Artificial Sequence: Synthetic oligonucleotide
ucaaagucguuaaggcagu

SEQ ID NO: 2300919 - RNA, 19 nt, Artificial Sequence
  Description of Artificial Sequence: Synthetic oligonucleotide
cugccguagaaacuggagc

SEQ ID NO: 2300920 - RNA, 19 nt, Artificial Sequence
  Description of Artificial Sequence: Synthetic oligonucleotide
gaagcgugaaugugugccc

SEQ ID NO: 2300921 - RNA, 19 nt, Artificial Sequence
  Description of Artificial Sequence: Synthetic oligonucleotide
gagccucucaaagacacgc

SEQ ID NO: 2300922 - RNA, 19 nt, Artificial Sequence
  Description of Artificial Sequence: Synthetic oligonucleotide
gggacagacgccuaagugc

SEQ ID NO: 2300923 - RNA, 19 nt, Artificial Sequence
  Description of Artificial Sequence: Synthetic oligonucleotide
ugggcaccgucuuauuccg

SEQ ID NO: 2300924 - RNA, 19 nt, Artificial Sequence
  Description of Artificial Sequence: Synthetic oligonucleotide
acgccuaagugcugucucc

SEQ ID NO: 2300925 - RNA, 19 nt, Artificial Sequence
  Description of Artificial Sequence: Synthetic oligonucleotide
cagacagguaguucucacg

SEQ ID NO: 2300926 - RNA, 19 nt, Artificial Sequence
  Description of Artificial Sequence: Synthetic oligonucleotide
cagccaaugaguccauggg

SEQ ID NO: 2300927 - RNA, 19 nt, Artificial Sequence
  Description of Artificial Sequence: Synthetic oligonucleotide
ucgauuuccgcagccaaug

SEQ ID NO: 2300928 - RNA, 19 nt, Artificial Sequence
  Description of Artificial Sequence: Synthetic oligonucleotide
ugcagcucgccuuucucag

SEQ ID NO: 2300929 - RNA, 19 nt, Artificial Sequence
  Description of Artificial Sequence: Synthetic oligonucleotide
ugccuggcuucuuauugcg

SEQ ID NO: 2300930 - RNA, 19 nt, Artificial Sequence
  Description of Artificial Sequence: Synthetic oligonucleotide
guucccucgauuuccgcag

SEQ ID NO: 2300931 - RNA, 19 nt, Artificial Sequence
  Description of Artificial Sequence: Synthetic oligonucleotide
uuauuccgcagguucuuca

SEQ ID NO: 2300932 - RNA, 19 nt, Artificial Sequence
  Description of Artificial Sequence: Synthetic oligonucleotide
ggagccacugugcagcucg

SEQ ID NO: 2300933 - RNA, 19 nt, Artificial Sequence
  Description of Artificial Sequence: Synthetic oligonucleotide
agucguuaaggcaguacac

SEQ ID NO: 2300934 - RNA, 19 nt, Artificial Sequence
  Description of Artificial Sequence: Synthetic oligonucleotide
guugccgacaucacugccg

SEQ ID NO: 2300935 - RNA, 19 nt, Artificial Sequence
  Description of Artificial Sequence: Synthetic oligonucleotide
guucucacggcgcagggac

SEQ ID NO: 2300936 - RNA, 19 nt, Artificial Sequence
  Description of Artificial Sequence: Synthetic oligonucleotide
agggacagacgccuaagug

SEQ ID NO: 2300937 - RNA, 19 nt, Artificial Sequence
  Description of Artificial Sequence: Synthetic oligonucleotide
uuuccgcagccaaugaguc

SEQ ID NO: 2300938 - RNA, 19 nt, Artificial Sequence
  Description of Artificial Sequence: Synthetic oligonucleotide
agcccuuggugacuacacc

SEQ ID NO: 2300939 - RNA, 19 nt, Artificial Sequence
  Description of Artificial Sequence: Synthetic oligonucleotide
ugcugugaguugccgcugg

SEQ ID NO: 2300940 - RNA, 19 nt, Artificial Sequence
  Description of Artificial Sequence: Synthetic oligonucleotide
aguuuccaggaguaugcug

SEQ ID NO: 2300941 - RNA, 19 nt, Artificial Sequence
  Description of Artificial Sequence: Synthetic oligonucleotide
uuccgcagguucuucagcu

SEQ ID NO: 2300942 - RNA, 19 nt, Artificial Sequence
  Description of Artificial Sequence: Synthetic oligonucleotide
gaagcaucuccaugcacuc

SEQ ID NO: 2300943 - RNA, 19 nt, Artificial Sequence
  Description of Artificial Sequence: Synthetic oligonucleotide
ucagacagguaguucucac

SEQ ID NO: 2300944 - RNA, 19 nt, Artificial Sequence
  Description of Artificial Sequence: Synthetic oligonucleotide
ggcaguacacuucauccag

SEQ ID NO: 2300945 - RNA, 19 nt, Artificial Sequence
  Description of Artificial Sequence: Synthetic oligonucleotide
aacguccaauguccggaag

SEQ ID NO: 2300946 - RNA, 19 nt, Artificial Sequence
  Description of Artificial Sequence: Synthetic oligonucleotide
uaguucucacggcgcaggg

SEQ ID NO: 2300947 - RNA, 19 nt, Artificial Sequence
  Description of Artificial Sequence: Synthetic oligonucleotide
ucgagcggcuucacgaucu

SEQ ID NO: 2300948 - RNA, 19 nt, Artificial Sequence
  Description of Artificial Sequence: Synthetic oligonucleotide
ggacaugccggagaaaccg

SEQ ID NO: 2300949 - RNA, 19 nt, Artificial Sequence
  Description of Artificial Sequence: Synthetic oligonucleotide
aacucagagaagcgugaau

SEQ ID NO: 2300950 - RNA, 19 nt, Artificial Sequence
  Description of Artificial Sequence: Synthetic oligonucleotide
ugcguacuugucuuccagc

SEQ ID NO: 2300951 - RNA, 19 nt, Artificial Sequence
  Description of Artificial Sequence: Synthetic oligonucleotide
ugugugcccagggacauga

SEQ ID NO: 2300952 - RNA, 19 nt, Artificial Sequence
  Description of Artificial Sequence: Synthetic oligonucleotide
gugaacucagagaagcgug

SEQ ID NO: 2300953 - RNA, 19 nt, Artificial Sequence
  Description of Artificial Sequence: Synthetic oligonucleotide
ucguuaaggcaguacacuu

SEQ ID NO: 2300954 - RNA, 19 nt, Artificial Sequence
  Description of Artificial Sequence: Synthetic oligonucleotide
aagaaccuccgcucagaca

SEQ ID NO: 2300955 - RNA, 19 nt, Artificial Sequence
  Description of Artificial Sequence: Synthetic oligonucleotide
caaagacacgcuucuggug

SEQ ID NO: 2300956 - RNA, 19 nt, Artificial Sequence
  Description of Artificial Sequence: Synthetic oligonucleotide
auugcgcuccucauucccc

SEQ ID NO: 2300957 - RNA, 19 nt, Artificial Sequence
  Description of Artificial Sequence: Synthetic oligonucleotide
gucaacguccaauguccgg

SEQ ID NO: 2300958 - RNA, 19 nt, Artificial Sequence
  Description of Artificial Sequence: Synthetic oligonucleotide
cucaguuuccaggaguaug

SEQ ID NO: 2300959 - RNA, 19 nt, Artificial Sequence
  Description of Artificial Sequence: Synthetic oligonucleotide
ugauguccggagacucagg

SEQ ID NO: 2300960 - RNA, 19 nt, Artificial Sequence
  Description of Artificial Sequence: Synthetic oligonucleotide
gucaaggaccauguugccg

SEQ ID NO: 2300961 - RNA, 19 nt, Artificial Sequence
  Description of Artificial Sequence: Synthetic oligonucleotide
uguugccgacaucacugcc

SEQ ID NO: 2300962 - RNA, 19 nt, Artificial Sequence
  Description of Artificial Sequence: Synthetic oligonucleotide
uugccgacaucacugccgu

SEQ ID NO: 2300963 - RNA, 19 nt, Artificial Sequence
  Description of Artificial Sequence: Synthetic oligonucleotide
caggucaacguccaauguc

SEQ ID NO: 2300964 - RNA, 19 nt, Artificial Sequence
  Description of Artificial Sequence: Synthetic oligonucleotide
cuuggugacuacaccagga

SEQ ID NO: 2300965 - RNA, 19 nt, Artificial Sequence
  Description of Artificial Sequence: Synthetic oligonucleotide
aucuccaugcacucugcgu

SEQ ID NO: 2300966 - RNA, 19 nt, Artificial Sequence
  Description of Artificial Sequence: Synthetic oligonucleotide
agcuccuuacgcauaguuc

SEQ ID NO: 2300967 - RNA, 19 nt, Artificial Sequence
  Description of Artificial Sequence: Synthetic oligonucleotide
aggaccauguugccgacau

SEQ ID NO: 2300968 - RNA, 19 nt, Artificial Sequence
  Description of Artificial Sequence: Synthetic oligonucleotide
uuauugcgcuccucauucc

SEQ ID NO: 2300969 - RNA, 19 nt, Artificial Sequence
  Description of Artificial Sequence: Synthetic oligonucleotide
gagaaaccggugaacucag

SEQ ID NO: 2300970 - RNA, 19 nt, Artificial Sequence
  Description of Artificial Sequence: Synthetic oligonucleotide
cagguaguucucacggcgc

SEQ ID NO: 2300971 - RNA, 19 nt, Artificial Sequence
  Description of Artificial Sequence: Synthetic oligonucleotide
ugucaaggaccauguugcc

SEQ ID NO: 2300972 - RNA, 19 nt, Artificial Sequence
  Description of Artificial Sequence: Synthetic oligonucleotide
gugugagggagccacugug

SEQ ID NO: 2300973 - RNA, 19 nt, Artificial Sequence
  Description of Artificial Sequence: Synthetic oligonucleotide
aggcaguacacuucaucca

SEQ ID NO: 2300974 - RNA, 19 nt, Artificial Sequence
  Description of Artificial Sequence: Synthetic oligonucleotide
aaugugugcccagggacau

SEQ ID NO: 2300975 - RNA, 19 nt, Artificial Sequence
  Description of Artificial Sequence: Synthetic oligonucleotide
cuccuuacgcauaguuccc

SEQ ID NO: 2300976 - RNA, 19 nt, Artificial Sequence
  Description of Artificial Sequence: Synthetic oligonucleotide
gagugguagcgccgggacg

SEQ ID NO: 2300977 - RNA, 19 nt, Artificial Sequence
  Description of Artificial Sequence: Synthetic oligonucleotide
uuggagccucucaaagaca

SEQ ID NO: 2300978 - RNA, 19 nt, Artificial Sequence
  Description of Artificial Sequence: Synthetic oligonucleotide
gaaugugugcccagggaca

SEQ ID NO: 2300979 - RNA, 19 nt, Artificial Sequence
  Description of Artificial Sequence: Synthetic oligonucleotide
cucgugaagcaucuccaug

SEQ ID NO: 2300980 - RNA, 19 nt, Artificial Sequence
  Description of Artificial Sequence: Synthetic oligonucleotide
agccuggggugccuggucg

SEQ ID NO: 2300981 - RNA, 19 nt, Artificial Sequence
  Description of Artificial Sequence: Synthetic oligonucleotide
gacaugccggagaaaccgg

SEQ ID NO: 2300982 - RNA, 19 nt, Artificial Sequence
  Description of Artificial Sequence: Synthetic oligonucleotide
agcucacgcagcuuccucu

SEQ ID NO: 2300983 - RNA, 19 nt, Artificial Sequence
  Description of Artificial Sequence: Synthetic oligonucleotide
ggcgcagcuggacaggagg

SEQ ID NO: 2300984 - RNA, 19 nt, Artificial Sequence
  Description of Artificial Sequence: Synthetic oligonucleotide
gacgccuaagugcugucuc

SEQ ID NO: 2300985 - RNA, 19 nt, Artificial Sequence
  Description of Artificial Sequence: Synthetic oligonucleotide
uucuuauugcgcuccucau

SEQ ID NO: 2300986 - RNA, 19 nt, Artificial Sequence
  Description of Artificial Sequence: Synthetic oligonucleotide
ggacaugaugcucucggug

SEQ ID NO: 2300987 - RNA, 19 nt, Artificial Sequence
  Description of Artificial Sequence: Synthetic oligonucleotide
cucugcugugaguugccgc

SEQ ID NO: 2300988 - RNA, 19 nt, Artificial Sequence
  Description of Artificial Sequence: Synthetic oligonucleotide
ugcgccucgugaagcaucu

SEQ ID NO: 2300989 - RNA, 19 nt, Artificial Sequence
  Description of Artificial Sequence: Synthetic oligonucleotide
accgucuuauuccgcaggu

SEQ ID NO: 2300990 - RNA, 19 nt, Artificial Sequence
  Description of Artificial Sequence: Synthetic oligonucleotide
acugccguagaaacuggag

SEQ ID NO: 2300991 - RNA, 19 nt, Artificial Sequence
  Description of Artificial Sequence: Synthetic oligonucleotide
ugcuggacaagcucuucau

SEQ ID NO: 2300992 - RNA, 19 nt, Artificial Sequence
  Description of Artificial Sequence: Synthetic oligonucleotide
augccggagaaaccgguga

SEQ ID NO: 2300993 - RNA, 19 nt, Artificial Sequence
  Description of Artificial Sequence: Synthetic oligonucleotide
gugauguccggagacucag

SEQ ID NO: 2300994 - RNA, 19 nt, Artificial Sequence
  Description of Artificial Sequence: Synthetic oligonucleotide
cauuuuccaccgcacaaga

SEQ ID NO: 2300995 - RNA, 19 nt, Artificial Sequence
  Description of Artificial Sequence: Synthetic oligonucleotide
aagcgugaaugugugccca

SEQ ID NO: 2300996 - RNA, 19 nt, Artificial Sequence
  Description of Artificial Sequence: Synthetic oligonucleotide
caccgucuuauuccgcagg

SEQ ID NO: 2300997 - RNA, 19 nt, Artificial Sequence
  Description of Artificial Sequence: Synthetic oligonucleotide
gugggugauguccggagac

SEQ ID NO: 2300998 - RNA, 19 nt, Artificial Sequence
  Description of Artificial Sequence: Synthetic oligonucleotide
gugccuggcuucuuauugc

SEQ ID NO: 2300999 - RNA, 19 nt, Artificial Sequence
  Description of Artificial Sequence: Synthetic oligonucleotide
agguaguucucacggcgca

SEQ ID NO: 2301000 - RNA, 19 nt, Artificial Sequence
  Description of Artificial Sequence: Synthetic oligonucleotide
gaugcucucggugggugug

SEQ ID NO: 2301001 - RNA, 19 nt, Artificial Sequence
  Description of Artificial Sequence: Synthetic oligonucleotide
gugacuacaccaggacggg

SEQ ID NO: 2301002 - RNA, 19 nt, Artificial Sequence
  Description of Artificial Sequence: Synthetic oligonucleotide
ugacuacaccaggacgggg

SEQ ID NO: 2301003 - RNA, 19 nt, Artificial Sequence
  Description of Artificial Sequence: Synthetic oligonucleotide
guccggaagcccuugguga

SEQ ID NO: 2301004 - RNA, 19 nt, Artificial Sequence
  Description of Artificial Sequence: Synthetic oligonucleotide
gacaucacugccguagaaa

SEQ ID NO: 2301005 - RNA, 19 nt, Artificial Sequence
  Description of Artificial Sequence: Synthetic oligonucleotide
guugggcaccgucuuauuc

SEQ ID NO: 2301006 - RNA, 19 nt, Artificial Sequence
  Description of Artificial Sequence: Synthetic oligonucleotide
cucugcguacuugucuucc

SEQ ID NO: 2301007 - RNA, 19 nt, Artificial Sequence
  Description of Artificial Sequence: Synthetic oligonucleotide
accuucgagcggcuucacg

SEQ ID NO: 2301008 - RNA, 19 nt, Artificial Sequence
  Description of Artificial Sequence: Synthetic oligonucleotide
cuaagugcugucuccaggu

SEQ ID NO: 2301009 - RNA, 19 nt, Artificial Sequence
  Description of Artificial Sequence: Synthetic oligonucleotide
caugccggagaaaccggug

SEQ ID NO: 2301010 - RNA, 19 nt, Artificial Sequence
  Description of Artificial Sequence: Synthetic oligonucleotide
caguggugaaguguggcug

SEQ ID NO: 2301011 - RNA, 19 nt, Artificial Sequence
  Description of Artificial Sequence: Synthetic oligonucleotide
uacgcauaguucccucgau

SEQ ID NO: 2301012 - RNA, 19 nt, Artificial Sequence
  Description of Artificial Sequence: Synthetic oligonucleotide
acagacgccuaagugcugu

SEQ ID NO: 2301013 - RNA, 19 nt, Artificial Sequence
  Description of Artificial Sequence: Synthetic oligonucleotide
ugccggagaaaccggugaa

SEQ ID NO: 2301014 - RNA, 19 nt, Artificial Sequence
  Description of Artificial Sequence: Synthetic oligonucleotide
ugaguugccgcugggcauc

SEQ ID NO: 2301015 - RNA, 19 nt, Artificial Sequence
  Description of Artificial Sequence: Synthetic oligonucleotide
gaaguguggcugaaccuuc

SEQ ID NO: 2301016 - RNA, 19 nt, Artificial Sequence
  Description of Artificial Sequence: Synthetic oligonucleotide
agcgugaaugugugcccag

SEQ ID NO: 2301017 - RNA, 19 nt, Artificial Sequence
  Description of Artificial Sequence: Synthetic oligonucleotide
ccuaagugcugucuccagg

SEQ ID NO: 2301018 - RNA, 19 nt, Artificial Sequence
  Description of Artificial Sequence: Synthetic oligonucleotide
gaguaugcuguuggucuug

SEQ ID NO: 2301019 - RNA, 19 nt, Artificial Sequence
  Description of Artificial Sequence: Synthetic oligonucleotide
guaggagcggcugcugaag

SEQ ID NO: 2301020 - RNA, 19 nt, Artificial Sequence
  Description of Artificial Sequence: Synthetic oligonucleotide
gaaccuucgagcggcuuca

SEQ ID NO: 2301021 - RNA, 19 nt, Artificial Sequence
  Description of Artificial Sequence: Synthetic oligonucleotide
ugcacucugcguacuuguc

SEQ ID NO: 2301022 - RNA, 19 nt, Artificial Sequence
  Description of Artificial Sequence: Synthetic oligonucleotide
cagagaagcgugaaugugu

SEQ ID NO: 2301023 - RNA, 19 nt, Artificial Sequence
  Description of Artificial Sequence: Synthetic oligonucleotide
uuaaggcaguacacuucau

SEQ ID NO: 2301024 - RNA, 19 nt, Artificial Sequence
  Description of Artificial Sequence: Synthetic oligonucleotide
cauccuuggcagcucccag

SEQ ID NO: 2301025 - RNA, 19 nt, Artificial Sequence
  Description of Artificial Sequence: Synthetic oligonucleotide
ccggugaacucagagaagc

SEQ ID NO: 2301026 - RNA, 19 nt, Artificial Sequence
  Description of Artificial Sequence: Synthetic oligonucleotide
aguguggcugaaccuucga

SEQ ID NO: 2301027 - RNA, 19 nt, Artificial Sequence
  Description of Artificial Sequence: Synthetic oligonucleotide
uucgagcggcuucacgauc

SEQ ID NO: 2301028 - RNA, 19 nt, Artificial Sequence
  Description of Artificial Sequence: Synthetic oligonucleotide
gacucaggcucuuccagcu

SEQ ID NO: 2301029 - RNA, 19 nt, Artificial Sequence
  Description of Artificial Sequence: Synthetic oligonucleotide
uggggugccuggucgugcc

SEQ ID NO: 2301030 - RNA, 19 nt, Artificial Sequence
  Description of Artificial Sequence: Synthetic oligonucleotide
aggucgugggagccugggg

SEQ ID NO: 2301031 - RNA, 19 nt, Artificial Sequence
  Description of Artificial Sequence: Synthetic oligonucleotide
ccuccgcucagacagguag

SEQ ID NO: 2301032 - RNA, 19 nt, Artificial Sequence
  Description of Artificial Sequence: Synthetic oligonucleotide
accauguugccgacaucac

SEQ ID NO: 2301033 - RNA, 19 nt, Artificial Sequence
  Description of Artificial Sequence: Synthetic oligonucleotide
ugcuguuggucuuguuguc

SEQ ID NO: 2301034 - RNA, 19 nt, Artificial Sequence
  Description of Artificial Sequence: Synthetic oligonucleotide
cucgaagaaccuccgcuca

SEQ ID NO: 2301035 - RNA, 19 nt, Artificial Sequence
  Description of Artificial Sequence: Synthetic oligonucleotide
gacugguuggagccucuca

SEQ ID NO: 2301036 - RNA, 19 nt, Artificial Sequence
  Description of Artificial Sequence: Synthetic oligonucleotide
caugcacucugcguacuug

SEQ ID NO: 2301037 - RNA, 19 nt, Artificial Sequence
  Description of Artificial Sequence: Synthetic oligonucleotide
gacgcgguguugggcaccg

SEQ ID NO: 2301038 - RNA, 19 nt, Artificial Sequence
  Description of Artificial Sequence: Synthetic oligonucleotide
uccuuacgcauaguucccu

SEQ ID NO: 2301039 - RNA, 19 nt, Artificial Sequence
  Description of Artificial Sequence: Synthetic oligonucleotide
auguccggaagcccuuggu

SEQ ID NO: 2301040 - RNA, 19 nt, Artificial Sequence
  Description of Artificial Sequence: Synthetic oligonucleotide
uguugucaaggaccauguu

SEQ ID NO: 2301041 - RNA, 19 nt, Artificial Sequence
  Description of Artificial Sequence: Synthetic oligonucleotide
uccaggucgugggagccug

SEQ ID NO: 2301042 - RNA, 19 nt, Artificial Sequence
  Description of Artificial Sequence: Synthetic oligonucleotide
aaccuccgcucagacaggu

SEQ ID NO: 2301043 - RNA, 19 nt, Artificial Sequence
  Description of Artificial Sequence: Synthetic oligonucleotide
augaugcucucggugggug

SEQ ID NO: 2301044 - RNA, 19 nt, Artificial Sequence
  Description of Artificial Sequence: Synthetic oligonucleotide
gaagcccuuggugacuaca

SEQ ID NO: 2301045 - RNA, 19 nt, Artificial Sequence
  Description of Artificial Sequence: Synthetic oligonucleotide
caggaguaugcuguugguc

SEQ ID NO: 2301046 - RNA, 19 nt, Artificial Sequence
  Description of Artificial Sequence: Synthetic oligonucleotide
uucucacggcgcagggaca

SEQ ID NO: 2301047 - RNA, 19 nt, Artificial Sequence
  Description of Artificial Sequence: Synthetic oligonucleotide
cagggagugguagcgccgg

SEQ ID NO: 2301048 - RNA, 19 nt, Artificial Sequence
  Description of Artificial Sequence: Synthetic oligonucleotide
cuuauuccgcagguucuuc

SEQ ID NO: 2301049 - RNA, 19 nt, Artificial Sequence
  Description of Artificial Sequence: Synthetic oligonucleotide
acgcauaguucccucgauu

SEQ ID NO: 2301050 - RNA, 19 nt, Artificial Sequence
  Description of Artificial Sequence: Synthetic oligonucleotide
cuggacaagcucuucauuu

SEQ ID NO: 2301051 - RNA, 19 nt, Artificial Sequence
  Description of Artificial Sequence: Synthetic oligonucleotide
aguaugcuguuggucuugu

SEQ ID NO: 2301052 - RNA, 19 nt, Artificial Sequence
  Description of Artificial Sequence: Synthetic oligonucleotide
cugugaguugccgcugggc

SEQ ID NO: 2301053 - RNA, 19 nt, Artificial Sequence
  Description of Artificial Sequence: Synthetic oligonucleotide
ggccaauugcugccagugg

SEQ ID NO: 2301054 - RNA, 19 nt, Artificial Sequence
  Description of Artificial Sequence: Synthetic oligonucleotide
cuguuggucuuguugucaa

SEQ ID NO: 2301055 - RNA, 19 nt, Artificial Sequence
  Description of Artificial Sequence: Synthetic oligonucleotide
ugcgcuccucauuccccag

SEQ ID NO: 2301056 - RNA, 19 nt, Artificial Sequence
  Description of Artificial Sequence: Synthetic oligonucleotide
cacggcgcagggacagacg

SEQ ID NO: 2301057 - RNA, 19 nt, Artificial Sequence
  Description of Artificial Sequence: Synthetic oligonucleotide
ccaauugcugccaguggug

SEQ ID NO: 2301058 - RNA, 19 nt, Artificial Sequence
  Description of Artificial Sequence: Synthetic oligonucleotide
ccuucgagcggcuucacga

SEQ ID NO: 2301059 - RNA, 19 nt, Artificial Sequence
  Description of Artificial Sequence: Synthetic oligonucleotide
aaccuucgagcggcuucac

SEQ ID NO: 2301060 - RNA, 19 nt, Artificial Sequence
  Description of Artificial Sequence: Synthetic oligonucleotide
cgucuuauuccgcagguuc

SEQ ID NO: 2301061 - RNA, 19 nt, Artificial Sequence
  Description of Artificial Sequence: Synthetic oligonucleotide
gaaccuccgcucagacagg

SEQ ID NO: 2301062 - RNA, 19 nt, Artificial Sequence
  Description of Artificial Sequence: Synthetic oligonucleotide
ugccuggucgugccuggcu

SEQ ID NO: 2301063 - RNA, 19 nt, Artificial Sequence
  Description of Artificial Sequence: Synthetic oligonucleotide
gccaaugaguccaugggga

SEQ ID NO: 2301064 - RNA, 19 nt, Artificial Sequence
  Description of Artificial Sequence: Synthetic oligonucleotide
ccuuggugacuacaccagg

SEQ ID NO: 2301065 - RNA, 19 nt, Artificial Sequence
  Description of Artificial Sequence: Synthetic oligonucleotide
gaacucagagaagcgugaa

SEQ ID NO: 2301066 - RNA, 19 nt, Artificial Sequence
  Description of Artificial Sequence: Synthetic oligonucleotide
gucguuaaggcaguacacu

SEQ ID NO: 2301067 - RNA, 19 nt, Artificial Sequence
  Description of Artificial Sequence: Synthetic oligonucleotide
ggcaccgucuuauuccgca

SEQ ID NO: 2301068 - RNA, 19 nt, Artificial Sequence
  Description of Artificial Sequence: Synthetic oligonucleotide
ggagugguagcgccgggac

SEQ ID NO: 2301069 - RNA, 19 nt, Artificial Sequence
  Description of Artificial Sequence: Synthetic oligonucleotide
agccacugugcagcucgcc

SEQ ID NO: 2301070 - RNA, 19 nt, Artificial Sequence
  Description of Artificial Sequence: Synthetic oligonucleotide
ugggccaauugcugccagu

SEQ ID NO: 2301071 - RNA, 19 nt, Artificial Sequence
  Description of Artificial Sequence: Synthetic oligonucleotide
ucacggcgcagggacagac

SEQ ID NO: 2301072 - RNA, 19 nt, Artificial Sequence
  Description of Artificial Sequence: Synthetic oligonucleotide
agcucgcgcagcucugcug

SEQ ID NO: 2301073 - RNA, 19 nt, Artificial Sequence
  Description of Artificial Sequence: Synthetic oligonucleotide
caauugcugccagugguga

SEQ ID NO: 2301074 - RNA, 19 nt, Artificial Sequence
  Description of Artificial Sequence: Synthetic oligonucleotide
ggcuucacgaucugcagcu

SEQ ID NO: 2301075 - RNA, 19 nt, Artificial Sequence
  Description of Artificial Sequence: Synthetic oligonucleotide
cacgcagcuuccucuccug

SEQ ID NO: 2301076 - RNA, 19 nt, Artificial Sequence
  Description of Artificial Sequence: Synthetic oligonucleotide
ggucaacguccaauguccg

SEQ ID NO: 2301077 - RNA, 19 nt, Artificial Sequence
  Description of Artificial Sequence: Synthetic oligonucleotide
gccguagaaacuggagcgg

SEQ ID NO: 2301078 - RNA, 19 nt, Artificial Sequence
  Description of Artificial Sequence: Synthetic oligonucleotide
gaggacugguuggagccuc

SEQ ID NO: 2301079 - RNA, 19 nt, Artificial Sequence
  Description of Artificial Sequence: Synthetic oligonucleotide
cugcgccucgugaagcauc

SEQ ID NO: 2301080 - RNA, 19 nt, Artificial Sequence
  Description of Artificial Sequence: Synthetic oligonucleotide
caguacacuucauccaggu

SEQ ID NO: 2301081 - RNA, 19 nt, Artificial Sequence
  Description of Artificial Sequence: Synthetic oligonucleotide
agacgccuaagugcugucu

SEQ ID NO: 2301082 - RNA, 19 nt, Artificial Sequence
  Description of Artificial Sequence: Synthetic oligonucleotide
ggugccuggucgugccugg

SEQ ID NO: 2301083 - RNA, 19 nt, Artificial Sequence
  Description of Artificial Sequence: Synthetic oligonucleotide
guccaauguccggaagccc

SEQ ID NO: 2301084 - RNA, 19 nt, Artificial Sequence
  Description of Artificial Sequence: Synthetic oligonucleotide
ccucauuccccagaucagc

SEQ ID NO: 2301085 - RNA, 19 nt, Artificial Sequence
  Description of Artificial Sequence: Synthetic oligonucleotide
uccgcucagacagguaguu

SEQ ID NO: 2301086 - RNA, 19 nt, Artificial Sequence
  Description of Artificial Sequence: Synthetic oligonucleotide
ugcucucggugggugugag

SEQ ID NO: 2301087 - RNA, 19 nt, Artificial Sequence
  Description of Artificial Sequence: Synthetic oligonucleotide
aguucucacggcgcaggga

SEQ ID NO: 2301088 - RNA, 19 nt, Artificial Sequence
  Description of Artificial Sequence: Synthetic oligonucleotide
cguuaaggcaguacacuuc

SEQ ID NO: 2301089 - RNA, 19 nt, Artificial Sequence
  Description of Artificial Sequence: Synthetic oligonucleotide
cgugccuggcuucuuauug

SEQ ID NO: 2301090 - RNA, 19 nt, Artificial Sequence
  Description of Artificial Sequence: Synthetic oligonucleotide
augaguccauggggaacag

SEQ ID NO: 2301091 - RNA, 19 nt, Artificial Sequence
  Description of Artificial Sequence: Synthetic oligonucleotide
gcucgccuuucucagccag

SEQ ID NO: 2301092 - RNA, 19 nt, Artificial Sequence
  Description of Artificial Sequence: Synthetic oligonucleotide
caggucgugggagccuggg

SEQ ID NO: 2301093 - RNA, 19 nt, Artificial Sequence
  Description of Artificial Sequence: Synthetic oligonucleotide
caagaugaggcugggccaa

SEQ ID NO: 2301094 - RNA, 19 nt, Artificial Sequence
  Description of Artificial Sequence: Synthetic oligonucleotide
cugguuggagccucucaaa

SEQ ID NO: 2301095 - RNA, 19 nt, Artificial Sequence
  Description of Artificial Sequence: Synthetic oligonucleotide
ccguagaaacuggagcggg

SEQ ID NO: 2301096 - RNA, 19 nt, Artificial Sequence
  Description of Artificial Sequence: Synthetic oligonucleotide
cugggccaauugcugccag

SEQ ID NO: 2301097 - RNA, 19 nt, Artificial Sequence
  Description of Artificial Sequence: Synthetic oligonucleotide
cccagggagugguagcgcc

SEQ ID NO: 2301098 - RNA, 19 nt, Artificial Sequence
  Description of Artificial Sequence: Synthetic oligonucleotide
ggcccagggagugguagcg

SEQ ID NO: 2301099 - RNA, 19 nt, Artificial Sequence
  Description of Artificial Sequence: Synthetic oligonucleotide
gcugugaguugccgcuggg

SEQ ID NO: 2301100 - RNA, 19 nt, Artificial Sequence
  Description of Artificial Sequence: Synthetic oligonucleotide
gcggcuucacgaucugcag

SEQ ID NO: 2301101 - RNA, 19 nt, Artificial Sequence
  Description of Artificial Sequence: Synthetic oligonucleotide
aggcagguaggagcggcug

SEQ ID NO: 2301102 - RNA, 19 nt, Artificial Sequence
  Description of Artificial Sequence: Synthetic oligonucleotide
caauguccggaagcccuug

SEQ ID NO: 2301103 - RNA, 19 nt, Artificial Sequence
  Description of Artificial Sequence: Synthetic oligonucleotide
gccaauugcugccaguggu

SEQ ID NO: 2301104 - RNA, 19 nt, Artificial Sequence
  Description of Artificial Sequence: Synthetic oligonucleotide
gucuuauuccgcagguucu

SEQ ID NO: 2301105 - RNA, 19 nt, Artificial Sequence
  Description of Artificial Sequence: Synthetic oligonucleotide
ccagggagugguagcgccg

SEQ ID NO: 2301106 - RNA, 19 nt, Artificial Sequence
  Description of Artificial Sequence: Synthetic oligonucleotide
gccuaagugcugucuccag

SEQ ID NO: 2301107 - RNA, 19 nt, Artificial Sequence
  Description of Artificial Sequence: Synthetic oligonucleotide
ggagccucucaaagacacg

SEQ ID NO: 2301108 - RNA, 19 nt, Artificial Sequence
  Description of Artificial Sequence: Synthetic oligonucleotide
gacagacgccuaagugcug

SEQ ID NO: 2301109 - RNA, 19 nt, Artificial Sequence
  Description of Artificial Sequence: Synthetic oligonucleotide
ccaagaugaggcugggcca

SEQ ID NO: 2301110 - RNA, 19 nt, Artificial Sequence
  Description of Artificial Sequence: Synthetic oligonucleotide
ggacagacgccuaagugcu

SEQ ID NO: 2301111 - RNA, 19 nt, Artificial Sequence
  Description of Artificial Sequence: Synthetic oligonucleotide
gagcggcuucacgaucugc

SEQ ID NO: 2301112 - RNA, 19 nt, Artificial Sequence
  Description of Artificial Sequence: Synthetic oligonucleotide
ggucgugggagccuggggu

SEQ ID NO: 2301113 - RNA, 19 nt, Artificial Sequence
  Description of Artificial Sequence: Synthetic oligonucleotide
ucgugccuggcuucuuauu

SEQ ID NO: 2301114 - RNA, 19 nt, Artificial Sequence
  Description of Artificial Sequence: Synthetic oligonucleotide
cauggggaacaggcccagg

SEQ ID NO: 2301115 - RNA, 19 nt, Artificial Sequence
  Description of Artificial Sequence: Synthetic oligonucleotide
ucgcgcagcucugcuguga

SEQ ID NO: 2301116 - RNA, 19 nt, Artificial Sequence
  Description of Artificial Sequence: Synthetic oligonucleotide
gcgugaaugugugcccagg

SEQ ID NO: 2301117 - RNA, 19 nt, Artificial Sequence
  Description of Artificial Sequence: Synthetic oligonucleotide
cguccaauguccggaagcc

SEQ ID NO: 2301118 - RNA, 19 nt, Artificial Sequence
  Description of Artificial Sequence: Synthetic oligonucleotide
agccucucaaagacacgcu

SEQ ID NO: 2301119 - RNA, 19 nt, Artificial Sequence
  Description of Artificial Sequence: Synthetic oligonucleotide
gcguacuugucuuccagcu

SEQ ID NO: 2301120 - RNA, 19 nt, Artificial Sequence
  Description of Artificial Sequence: Synthetic oligonucleotide
ggugggugauguccggaga

SEQ ID NO: 2301121 - RNA, 19 nt, Artificial Sequence
  Description of Artificial Sequence: Synthetic oligonucleotide
ccuuacgcauaguucccuc

SEQ ID NO: 2301122 - RNA, 19 nt, Artificial Sequence
  Description of Artificial Sequence: Synthetic oligonucleotide
caacguccaauguccggaa

SEQ ID NO: 2301123 - RNA, 19 nt, Artificial Sequence
  Description of Artificial Sequence: Synthetic oligonucleotide
cgccucgugaagcaucucc

SEQ ID NO: 2301124 - RNA, 19 nt, Artificial Sequence
  Description of Artificial Sequence: Synthetic oligonucleotide
guagcgccgggacgcggug

SEQ ID NO: 2301125 - RNA, 19 nt, Artificial Sequence
  Description of Artificial Sequence: Synthetic oligonucleotide
cagacgccuaagugcuguc

SEQ ID NO: 2301126 - RNA, 19 nt, Artificial Sequence
  Description of Artificial Sequence: Synthetic oligonucleotide
gggcauccuuggcagcucc

SEQ ID NO: 2301127 - RNA, 19 nt, Artificial Sequence
  Description of Artificial Sequence: Synthetic oligonucleotide
ggaggucauggcugaggac

SEQ ID NO: 2301128 - RNA, 19 nt, Artificial Sequence
  Description of Artificial Sequence: Synthetic oligonucleotide
cggugaacucagagaagcg

SEQ ID NO: 2301129 - RNA, 19 nt, Artificial Sequence
  Description of Artificial Sequence: Synthetic oligonucleotide
gaguugccgcugggcaucc

SEQ ID NO: 2301130 - RNA, 19 nt, Artificial Sequence
  Description of Artificial Sequence: Synthetic oligonucleotide
gagcggcugcugaaggaca

SEQ ID NO: 2301131 - RNA, 19 nt, Artificial Sequence
  Description of Artificial Sequence: Synthetic oligonucleotide
cacucugcguacuugucuu

SEQ ID NO: 2301132 - RNA, 19 nt, Artificial Sequence
  Description of Artificial Sequence: Synthetic oligonucleotide
gcgcagcuggacaggaggg

SEQ ID NO: 2301133 - RNA, 19 nt, Artificial Sequence
  Description of Artificial Sequence: Synthetic oligonucleotide
gggugauguccggagacuc

SEQ ID NO: 2301134 - RNA, 19 nt, Artificial Sequence
  Description of Artificial Sequence: Synthetic oligonucleotide
ggugauguccggagacuca

SEQ ID NO: 2301135 - RNA, 19 nt, Artificial Sequence
  Description of Artificial Sequence: Synthetic oligonucleotide
agaaaccggugaacucaga

SEQ ID NO: 2301136 - RNA, 19 nt, Artificial Sequence
  Description of Artificial Sequence: Synthetic oligonucleotide
agacacgcuucuggugggu

SEQ ID NO: 2301137 - RNA, 19 nt, Artificial Sequence
  Description of Artificial Sequence: Synthetic oligonucleotide
gugguagcgccgggacgcg

SEQ ID NO: 2301138 - RNA, 19 nt, Artificial Sequence
  Description of Artificial Sequence: Synthetic oligonucleotide
cugcugugaguugccgcug

SEQ ID NO: 2301139 - RNA, 19 nt, Artificial Sequence
  Description of Artificial Sequence: Synthetic oligonucleotide
gugaguugccgcugggcau

SEQ ID NO: 2301140 - RNA, 19 nt, Artificial Sequence
  Description of Artificial Sequence: Synthetic oligonucleotide
cugucuccaggucguggga

SEQ ID NO: 2301141 - RNA, 19 nt, Artificial Sequence
  Description of Artificial Sequence: Synthetic oligonucleotide
agcgccgggacgcgguguu

SEQ ID NO: 2301142 - RNA, 19 nt, Artificial Sequence
  Description of Artificial Sequence: Synthetic oligonucleotide
cucgauuuccgcagccaau

SEQ ID NO: 2301143 - RNA, 19 nt, Artificial Sequence
  Description of Artificial Sequence: Synthetic oligonucleotide
cucgcgcagcucugcugug

SEQ ID NO: 2301144 - RNA, 19 nt, Artificial Sequence
  Description of Artificial Sequence: Synthetic oligonucleotide
gcucucggugggugugagg

SEQ ID NO: 2301145 - RNA, 19 nt, Artificial Sequence
  Description of Artificial Sequence: Synthetic oligonucleotide
gcuggcgcagcuggacagg

SEQ ID NO: 2301146 - RNA, 19 nt, Artificial Sequence
  Description of Artificial Sequence: Synthetic oligonucleotide
cucccaggugcuggacaag

SEQ ID NO: 2301147 - RNA, 19 nt, Artificial Sequence
  Description of Artificial Sequence: Synthetic oligonucleotide
cuucgagcggcuucacgau

SEQ ID NO: 2301148 - RNA, 19 nt, Artificial Sequence
  Description of Artificial Sequence: Synthetic oligonucleotide
augugugcccagggacaug

SEQ ID NO: 2301149 - RNA, 19 nt, Artificial Sequence
  Description of Artificial Sequence: Synthetic oligonucleotide
cccagaucagcugccucag

SEQ ID NO: 2301150 - RNA, 19 nt, Artificial Sequence
  Description of Artificial Sequence: Synthetic oligonucleotide
ccuccugcgccucgugaag

SEQ ID NO: 2301151 - RNA, 19 nt, Artificial Sequence
  Description of Artificial Sequence: Synthetic oligonucleotide
augcucucgguggguguga

SEQ ID NO: 2301152 - RNA, 19 nt, Artificial Sequence
  Description of Artificial Sequence: Synthetic oligonucleotide
guguugggcaccgucuuau

SEQ ID NO: 2301153 - RNA, 19 nt, Artificial Sequence
  Description of Artificial Sequence: Synthetic oligonucleotide
cggcuucacgaucugcagc

SEQ ID NO: 2301154 - RNA, 19 nt, Artificial Sequence
  Description of Artificial Sequence: Synthetic oligonucleotide
gcucagacagguaguucuc

SEQ ID NO: 2301155 - RNA, 19 nt, Artificial Sequence
  Description of Artificial Sequence: Synthetic oligonucleotide
aggacugguuggagccucu

SEQ ID NO: 2301156 - RNA, 19 nt, Artificial Sequence
  Description of Artificial Sequence: Synthetic oligonucleotide
gcucgcgcagcucugcugu

SEQ ID NO: 2301157 - RNA, 19 nt, Artificial Sequence
  Description of Artificial Sequence: Synthetic oligonucleotide
gccgcugggcauccuuggc

SEQ ID NO: 2301158 - RNA, 19 nt, Artificial Sequence
  Description of Artificial Sequence: Synthetic oligonucleotide
gccggagaaaccggugaac

SEQ ID NO: 2301159 - RNA, 19 nt, Artificial Sequence
  Description of Artificial Sequence: Synthetic oligonucleotide
cagcuccuuacgcauaguu

SEQ ID NO: 2301160 - RNA, 19 nt, Artificial Sequence
  Description of Artificial Sequence: Synthetic oligonucleotide
gggugccuggucgugccug

SEQ ID NO: 2301161 - RNA, 19 nt, Artificial Sequence
  Description of Artificial Sequence: Synthetic oligonucleotide
guugccgcugggcauccuu

SEQ ID NO: 2301162 - RNA, 19 nt, Artificial Sequence
  Description of Artificial Sequence: Synthetic oligonucleotide
cuccgcucagacagguagu

SEQ ID NO: 2301163 - RNA, 19 nt, Artificial Sequence
  Description of Artificial Sequence: Synthetic oligonucleotide
cuggcgcagcuggacagga

SEQ ID NO: 2301164 - RNA, 19 nt, Artificial Sequence
  Description of Artificial Sequence: Synthetic oligonucleotide
uagcgccgggacgcggugu

SEQ ID NO: 2301165 - RNA, 19 nt, Artificial Sequence
  Description of Artificial Sequence: Synthetic oligonucleotide
ggcgcagggacagacgccu

SEQ ID NO: 2301166 - RNA, 19 nt, Artificial Sequence
  Description of Artificial Sequence: Synthetic oligonucleotide
ggaguaugcuguuggucuu

SEQ ID NO: 2301167 - RNA, 19 nt, Artificial Sequence
  Description of Artificial Sequence: Synthetic oligonucleotide
ggcauccuuggcagcuccc

SEQ ID NO: 2301168 - RNA, 19 nt, Artificial Sequence
  Description of Artificial Sequence: Synthetic oligonucleotide
gccuggcuucuuauugcgc

SEQ ID NO: 2301169 - RNA, 19 nt, Artificial Sequence
  Description of Artificial Sequence: Synthetic oligonucleotide
ggucgugccuggcuucuua

SEQ ID NO: 2301170 - RNA, 19 nt, Artificial Sequence
  Description of Artificial Sequence: Synthetic oligonucleotide
caaagucguuaaggcagua

SEQ ID NO: 2301171 - RNA, 19 nt, Artificial Sequence
  Description of Artificial Sequence: Synthetic oligonucleotide
gggacgcgguguugggcac

SEQ ID NO: 2301172 - RNA, 19 nt, Artificial Sequence
  Description of Artificial Sequence: Synthetic oligonucleotide
cgugaagcaucuccaugca

SEQ ID NO: 2301173 - RNA, 19 nt, Artificial Sequence
  Description of Artificial Sequence: Synthetic oligonucleotide
caugaugcucucggugggu

SEQ ID NO: 2301174 - RNA, 19 nt, Artificial Sequence
  Description of Artificial Sequence: Synthetic oligonucleotide
ggaccauguugccgacauc

SEQ ID NO: 2301175 - RNA, 19 nt, Artificial Sequence
  Description of Artificial Sequence: Synthetic oligonucleotide
gccucucaaagacacgcuu

SEQ ID NO: 2301176 - RNA, 19 nt, Artificial Sequence
  Description of Artificial Sequence: Synthetic oligonucleotide
caguuuccaggaguaugcu

SEQ ID NO: 2301177 - RNA, 19 nt, Artificial Sequence
  Description of Artificial Sequence: Synthetic oligonucleotide
gugccuggucgugccuggc

SEQ ID NO: 2301178 - RNA, 19 nt, Artificial Sequence
  Description of Artificial Sequence: Synthetic oligonucleotide
ccaggucgugggagccugg

SEQ ID NO: 2301179 - RNA, 19 nt, Artificial Sequence
  Description of Artificial Sequence: Synthetic oligonucleotide
ccauguugccgacaucacu

SEQ ID NO: 2301180 - RNA, 19 nt, Artificial Sequence
  Description of Artificial Sequence: Synthetic oligonucleotide
caggcagguaggagcggcu

SEQ ID NO: 2301181 - RNA, 19 nt, Artificial Sequence
  Description of Artificial Sequence: Synthetic oligonucleotide
ggacgcgguguugggcacc

SEQ ID NO: 2301182 - RNA, 19 nt, Artificial Sequence
  Description of Artificial Sequence: Synthetic oligonucleotide
cgcgcagcucugcugugag

SEQ ID NO: 2301183 - RNA, 19 nt, Artificial Sequence
  Description of Artificial Sequence: Synthetic oligonucleotide
gggaacaggcccagggagu

SEQ ID NO: 2301184 - RNA, 19 nt, Artificial Sequence
  Description of Artificial Sequence: Synthetic oligonucleotide
ccgacaucacugccguaga

SEQ ID NO: 2301185 - RNA, 19 nt, Artificial Sequence
  Description of Artificial Sequence: Synthetic oligonucleotide
gcuggacaagcucuucauu

SEQ ID NO: 2301186 - RNA, 19 nt, Artificial Sequence
  Description of Artificial Sequence: Synthetic oligonucleotide
cgggacgcgguguugggca

SEQ ID NO: 2301187 - RNA, 19 nt, Artificial Sequence
  Description of Artificial Sequence: Synthetic oligonucleotide
gcagguaggagcggcugcu

SEQ ID NO: 2301188 - RNA, 19 nt, Artificial Sequence
  Description of Artificial Sequence: Synthetic oligonucleotide
guccggagacucaggcucu

SEQ ID NO: 2301189 - RNA, 19 nt, Artificial Sequence
  Description of Artificial Sequence: Synthetic oligonucleotide
ccggagaaaccggugaacu

SEQ ID NO: 2301190 - RNA, 19 nt, Artificial Sequence
  Description of Artificial Sequence: Synthetic oligonucleotide
cgcgguguugggcaccguc

SEQ ID NO: 2301191 - RNA, 19 nt, Artificial Sequence
  Description of Artificial Sequence: Synthetic oligonucleotide
gcccagggagugguagcgc

SEQ ID NO: 2301192 - RNA, 19 nt, Artificial Sequence
  Description of Artificial Sequence: Synthetic oligonucleotide
gcggcugcugaaggacaug

SEQ ID NO: 2301193 - RNA, 19 nt, Artificial Sequence
  Description of Artificial Sequence: Synthetic oligonucleotide
uggucgugccuggcuucuu

SEQ ID NO: 2301194 - RNA, 19 nt, Artificial Sequence
  Description of Artificial Sequence: Synthetic oligonucleotide
cgauuuccgcagccaauga

SEQ ID NO: 2301195 - RNA, 19 nt, Artificial Sequence
  Description of Artificial Sequence: Synthetic oligonucleotide
ccccaagaugaggcugggc

SEQ ID NO: 2301196 - RNA, 19 nt, Artificial Sequence
  Description of Artificial Sequence: Synthetic oligonucleotide
gggcaccgucuuauuccgc

SEQ ID NO: 2301197 - RNA, 19 nt, Artificial Sequence
  Description of Artificial Sequence: Synthetic oligonucleotide
ccaggaguaugcuguuggu

SEQ ID NO: 2301198 - RNA, 19 nt, Artificial Sequence
  Description of Artificial Sequence: Synthetic oligonucleotide
cuggucgugccuggcuucu

SEQ ID NO: 2301199 - RNA, 19 nt, Artificial Sequence
  Description of Artificial Sequence: Synthetic oligonucleotide
ccgggacgcgguguugggc

SEQ ID NO: 2301200 - RNA, 19 nt, Artificial Sequence
  Description of Artificial Sequence: Synthetic oligonucleotide
gguagcgccgggacgcggu

SEQ ID NO: 2301201 - RNA, 19 nt, Artificial Sequence
  Description of Artificial Sequence: Synthetic oligonucleotide
gcgguguugggcaccgucu

SEQ ID NO: 2301202 - RNA, 19 nt, Artificial Sequence
  Description of Artificial Sequence: Synthetic oligonucleotide
cgccgggacgcgguguugg

SEQ ID NO: 2301203 - RNA, 19 nt, Artificial Sequence
  Description of Artificial Sequence: Synthetic oligonucleotide
cucacggcgcagggacaga

SEQ ID NO: 2301204 - RNA, 19 nt, Artificial Sequence
  Description of Artificial Sequence: Synthetic oligonucleotide
cggcgcagggacagacgcc

SEQ ID NO: 2301205 - RNA, 19 nt, Artificial Sequence
  Description of Artificial Sequence: Synthetic oligonucleotide
accuccgcucagacaggua

SEQ ID NO: 2301206 - RNA, 19 nt, Artificial Sequence
  Description of Artificial Sequence: Synthetic oligonucleotide
ccgcucagacagguaguuc

SEQ ID NO: 2301207 - RNA, 19 nt, Artificial Sequence
  Description of Artificial Sequence: Synthetic oligonucleotide
cagcucgcgcagcucugcu

SEQ ID NO: 2301208 - RNA, 19 nt, Artificial Sequence
  Description of Artificial Sequence: Synthetic oligonucleotide
cgugggagccuggggugcc

SEQ ID NO: 2301209 - RNA, 19 nt, Artificial Sequence
  Description of Artificial Sequence: Synthetic oligonucleotide
ccucgugaagcaucuccau

SEQ ID NO: 2301210 - RNA, 19 nt, Artificial Sequence
  Description of Artificial Sequence: Synthetic oligonucleotide
cgccuaagugcugucucca

SEQ ID NO: 2301211 - RNA, 19 nt, Artificial Sequence
  Description of Artificial Sequence: Synthetic oligonucleotide
cuccaggucgugggagccu

SEQ ID NO: 2301212 - RNA, 19 nt, Artificial Sequence
  Description of Artificial Sequence: Synthetic oligonucleotide
cgacaucacugccguagaa

SEQ ID NO: 2301213 - RNA, 19 nt, Artificial Sequence
  Description of Artificial Sequence: Synthetic oligonucleotide
ccaauguccggaagcccuu

SEQ ID NO: 2301214 - RNA, 19 nt, Artificial Sequence
  Description of Artificial Sequence: Synthetic oligonucleotide
gccuggggugccuggucgu

SEQ ID NO: 2301215 - RNA, 19 nt, Artificial Sequence
  Description of Artificial Sequence: Synthetic oligonucleotide
cugaaccuucgagcggcuu

SEQ ID NO: 2301216 - RNA, 19 nt, Artificial Sequence
  Description of Artificial Sequence: Synthetic oligonucleotide
acgcgguguugggcaccgu

SEQ ID NO: 2301217 - RNA, 19 nt, Artificial Sequence
  Description of Artificial Sequence: Synthetic oligonucleotide
cgcagccaaugaguccaug

SEQ ID NO: 2301218 - RNA, 19 nt, Artificial Sequence
  Description of Artificial Sequence: Synthetic oligonucleotide
gcugaaccuucgagcggcu

SEQ ID NO: 2301219 - RNA, 19 nt, Artificial Sequence
  Description of Artificial Sequence: Synthetic oligonucleotide
gcgcagcucugcugugagu

SEQ ID NO: 2301220 - RNA, 19 nt, Artificial Sequence
  Description of Artificial Sequence: Synthetic oligonucleotide
ccagaucagcugccucagu

SEQ ID NO: 2301221 - RNA, 19 nt, Artificial Sequence
  Description of Artificial Sequence: Synthetic oligonucleotide
gcgccgggacgcgguguug

SEQ ID NO: 2301222 - RNA, 19 nt, Artificial Sequence
  Description of Artificial Sequence: Synthetic oligonucleotide
cggaagcccuuggugacua

SEQ ID NO: 2301223 - RNA, 19 nt, Artificial Sequence
  Description of Artificial Sequence: Synthetic oligonucleotide
gcuucacgaucugcagcuu

SEQ ID NO: 2301224 - RNA, 19 nt, Artificial Sequence
  Description of Artificial Sequence: Synthetic oligonucleotide
ccggaagcccuuggugacu

SEQ ID NO: 2301225 - RNA, 19 nt, Artificial Sequence
  Description of Artificial Sequence: Synthetic oligonucleotide
cgguguugggcaccgucuu

SEQ ID NO: 2301226 - RNA, 19 nt, Artificial Sequence
  Description of Artificial Sequence: Synthetic oligonucleotide
ccgucuuauuccgcagguu

SEQ ID NO: 2301227 - RNA, 19 nt, Artificial Sequence
  Description of Artificial Sequence: Synthetic oligonucleotide
gcgcagggacagacgccua

SEQ ID NO: 2301228 - RNA, 19 nt, Artificial Sequence
  Description of Artificial Sequence: Synthetic oligonucleotide
ccgcagccaaugaguccau

SEQ ID NO: 2301229 - RNA, 19 nt, Artificial Sequence
  Description of Artificial Sequence: Synthetic oligonucleotide
aaaggcauuauauacagac

SEQ ID NO: 2301230 - RNA, 19 nt, Artificial Sequence
  Description of Artificial Sequence: Synthetic oligonucleotide
uuuaucaugagaauuauac

SEQ ID NO: 2301231 - RNA, 19 nt, Artificial Sequence
  Description of Artificial Sequence: Synthetic oligonucleotide
auuauauacagacuuauuc

SEQ ID NO: 2301232 - RNA, 19 nt, Artificial Sequence
  Description of Artificial Sequence: Synthetic oligonucleotide
uaaaauauggauaaacugu

SEQ ID NO: 2301233 - RNA, 19 nt, Artificial Sequence
  Description of Artificial Sequence: Synthetic oligonucleotide
auucuucuuaccuauaacc

SEQ ID NO: 2301234 - RNA, 19 nt, Artificial Sequence
  Description of Artificial Sequence: Synthetic oligonucleotide
aucauuuaauccuaggagc

SEQ ID NO: 2301235 - RNA, 19 nt, Artificial Sequence
  Description of Artificial Sequence: Synthetic oligonucleotide
ugagaauuauacaugaugc

SEQ ID NO: 2301236 - RNA, 19 nt, Artificial Sequence
  Description of Artificial Sequence: Synthetic oligonucleotide
uuaccuauaacccaguagc

SEQ ID NO: 2301237 - RNA, 19 nt, Artificial Sequence
  Description of Artificial Sequence: Synthetic oligonucleotide
uaauggaucgcucacaaag

SEQ ID NO: 2301238 - RNA, 19 nt, Artificial Sequence
  Description of Artificial Sequence: Synthetic oligonucleotide
aaaaugagagagugcaagc

SEQ ID NO: 2301239 - RNA, 19 nt, Artificial Sequence
  Description of Artificial Sequence: Synthetic oligonucleotide
agaauuauacaugaugccc

SEQ ID NO: 2301240 - RNA, 19 nt, Artificial Sequence
  Description of Artificial Sequence: Synthetic oligonucleotide
aguaauacuucccugacug

SEQ ID NO: 2301241 - RNA, 19 nt, Artificial Sequence
  Description of Artificial Sequence: Synthetic oligonucleotide
uuauauacagacuuauucu

SEQ ID NO: 2301242 - RNA, 19 nt, Artificial Sequence
  Description of Artificial Sequence: Synthetic oligonucleotide
uuuagguugaaaauuuaca

SEQ ID NO: 2301243 - RNA, 19 nt, Artificial Sequence
  Description of Artificial Sequence: Synthetic oligonucleotide
acaucauaaaaugagagag

SEQ ID NO: 2301244 - RNA, 19 nt, Artificial Sequence
  Description of Artificial Sequence: Synthetic oligonucleotide
ucucagaugcccaaaacag

SEQ ID NO: 2301245 - RNA, 19 nt, Artificial Sequence
  Description of Artificial Sequence: Synthetic oligonucleotide
uuggaaacaucauaaaaug

SEQ ID NO: 2301246 - RNA, 19 nt, Artificial Sequence
  Description of Artificial Sequence: Synthetic oligonucleotide
uaucaugagaauuauacau

SEQ ID NO: 2301247 - RNA, 19 nt, Artificial Sequence
  Description of Artificial Sequence: Synthetic oligonucleotide
uuugauucauugaaugaag

SEQ ID NO: 2301248 - RNA, 19 nt, Artificial Sequence
  Description of Artificial Sequence: Synthetic oligonucleotide
gauucauugaaugaaguug

SEQ ID NO: 2301249 - RNA, 19 nt, Artificial Sequence
  Description of Artificial Sequence: Synthetic oligonucleotide
uugaaaauuuacauguugu

SEQ ID NO: 2301250 - RNA, 19 nt, Artificial Sequence
  Description of Artificial Sequence: Synthetic oligonucleotide
ucauuuaauccuaggagcc

SEQ ID NO: 2301251 - RNA, 19 nt, Artificial Sequence
  Description of Artificial Sequence: Synthetic oligonucleotide
gaaaacuccaacacgauug

SEQ ID NO: 2301252 - RNA, 19 nt, Artificial Sequence
  Description of Artificial Sequence: Synthetic oligonucleotide
acagguuccaccuuugagg

SEQ ID NO: 2301253 - RNA, 19 nt, Artificial Sequence
  Description of Artificial Sequence: Synthetic oligonucleotide
uuaucuccagaacugauug

SEQ ID NO: 2301254 - RNA, 19 nt, Artificial Sequence
  Description of Artificial Sequence: Synthetic oligonucleotide
uacauguuguuuaucauga

SEQ ID NO: 2301255 - RNA, 19 nt, Artificial Sequence
  Description of Artificial Sequence: Synthetic oligonucleotide
aaacaucauaaaaugagag

SEQ ID NO: 2301256 - RNA, 19 nt, Artificial Sequence
  Description of Artificial Sequence: Synthetic oligonucleotide
uugauuaucuccagaacug

SEQ ID NO: 2301257 - RNA, 19 nt, Artificial Sequence
  Description of Artificial Sequence: Synthetic oligonucleotide
aauccuaggagccaggcau

SEQ ID NO: 2301258 - RNA, 19 nt, Artificial Sequence
  Description of Artificial Sequence: Synthetic oligonucleotide
uucuucuuaccuauaaccc

SEQ ID NO: 2301259 - RNA, 19 nt, Artificial Sequence
  Description of Artificial Sequence: Synthetic oligonucleotide
uuagguugaaaauuuacau

SEQ ID NO: 2301260 - RNA, 19 nt, Artificial Sequence
  Description of Artificial Sequence: Synthetic oligonucleotide
caucauuuaauccuaggag

SEQ ID NO: 2301261 - RNA, 19 nt, Artificial Sequence
  Description of Artificial Sequence: Synthetic oligonucleotide
uaaacuguauuagggaagg

SEQ ID NO: 2301262 - RNA, 19 nt, Artificial Sequence
  Description of Artificial Sequence: Synthetic oligonucleotide
aaugaaguugggguugagc

SEQ ID NO: 2301263 - RNA, 19 nt, Artificial Sequence
  Description of Artificial Sequence: Synthetic oligonucleotide
cuacaaaggcauuauauac

SEQ ID NO: 2301264 - RNA, 19 nt, Artificial Sequence
  Description of Artificial Sequence: Synthetic oligonucleotide
uauggauaaacuguauuag

SEQ ID NO: 2301265 - RNA, 19 nt, Artificial Sequence
  Description of Artificial Sequence: Synthetic oligonucleotide
acagacuuauucuucuuac

SEQ ID NO: 2301266 - RNA, 19 nt, Artificial Sequence
  Description of Artificial Sequence: Synthetic oligonucleotide
agguucacagaauuuauag

SEQ ID NO: 2301267 - RNA, 19 nt, Artificial Sequence
  Description of Artificial Sequence: Synthetic oligonucleotide
gaauuuauagaugagagcu

SEQ ID NO: 2301268 - RNA, 19 nt, Artificial Sequence
  Description of Artificial Sequence: Synthetic oligonucleotide
ucaugagaauuauacauga

SEQ ID NO: 2301269 - RNA, 19 nt, Artificial Sequence
  Description of Artificial Sequence: Synthetic oligonucleotide
ugugcacagacauugaccu

SEQ ID NO: 2301270 - RNA, 19 nt, Artificial Sequence
  Description of Artificial Sequence: Synthetic oligonucleotide
agugcaagcuucucugucc

SEQ ID NO: 2301271 - RNA, 19 nt, Artificial Sequence
  Description of Artificial Sequence: Synthetic oligonucleotide
aagcuggauauccaaggac

SEQ ID NO: 2301272 - RNA, 19 nt, Artificial Sequence
  Description of Artificial Sequence: Synthetic oligonucleotide
caugaugcccauuugauuc

SEQ ID NO: 2301273 - RNA, 19 nt, Artificial Sequence
  Description of Artificial Sequence: Synthetic oligonucleotide
aauauggauaaacuguauu

SEQ ID NO: 2301274 - RNA, 19 nt, Artificial Sequence
  Description of Artificial Sequence: Synthetic oligonucleotide
aauggaucgcucacaaagc

SEQ ID NO: 2301275 - RNA, 19 nt, Artificial Sequence
  Description of Artificial Sequence: Synthetic oligonucleotide
auggauaaacuguauuagg

SEQ ID NO: 2301276 - RNA, 19 nt, Artificial Sequence
  Description of Artificial Sequence: Synthetic oligonucleotide
gacagagcacucuacaaag

SEQ ID NO: 2301277 - RNA, 19 nt, Artificial Sequence
  Description of Artificial Sequence: Synthetic oligonucleotide
acuggaaagcuggauaucc

SEQ ID NO: 2301278 - RNA, 19 nt, Artificial Sequence
  Description of Artificial Sequence: Synthetic oligonucleotide
uuuccauaggauuaaaaua

SEQ ID NO: 2301279 - RNA, 19 nt, Artificial Sequence
  Description of Artificial Sequence: Synthetic oligonucleotide
uccaugguuggaaacauca

SEQ ID NO: 2301280 - RNA, 19 nt, Artificial Sequence
  Description of Artificial Sequence: Synthetic oligonucleotide
ucagaugcccaaaacaggu

SEQ ID NO: 2301281 - RNA, 19 nt, Artificial Sequence
  Description of Artificial Sequence: Synthetic oligonucleotide
uagguugaaaauuuacaug

SEQ ID NO: 2301282 - RNA, 19 nt, Artificial Sequence
  Description of Artificial Sequence: Synthetic oligonucleotide
aucauaaaaugagagagug

SEQ ID NO: 2301283 - RNA, 19 nt, Artificial Sequence
  Description of Artificial Sequence: Synthetic oligonucleotide
gggaggaugagucagagag

SEQ ID NO: 2301284 - RNA, 19 nt, Artificial Sequence
  Description of Artificial Sequence: Synthetic oligonucleotide
augaaguugggguugagca

SEQ ID NO: 2301285 - RNA, 19 nt, Artificial Sequence
  Description of Artificial Sequence: Synthetic oligonucleotide
uauuagggaaggaagguuc

SEQ ID NO: 2301286 - RNA, 19 nt, Artificial Sequence
  Description of Artificial Sequence: Synthetic oligonucleotide
gagaauuauacaugaugcc

SEQ ID NO: 2301287 - RNA, 19 nt, Artificial Sequence
  Description of Artificial Sequence: Synthetic oligonucleotide
guugcugugauucuguuuc

SEQ ID NO: 2301288 - RNA, 19 nt, Artificial Sequence
  Description of Artificial Sequence: Synthetic oligonucleotide
aggagggugguccacagac

SEQ ID NO: 2301289 - RNA, 19 nt, Artificial Sequence
  Description of Artificial Sequence: Synthetic oligonucleotide
auggaucgcucacaaagcc

SEQ ID NO: 2301290 - RNA, 19 nt, Artificial Sequence
  Description of Artificial Sequence: Synthetic oligonucleotide
uuguuuaucaugagaauua

SEQ ID NO: 2301291 - RNA, 19 nt, Artificial Sequence
  Description of Artificial Sequence: Synthetic oligonucleotide
uauacagacuuauucuucu

SEQ ID NO: 2301292 - RNA, 19 nt, Artificial Sequence
  Description of Artificial Sequence: Synthetic oligonucleotide
gacauugaccuucugcucc

SEQ ID NO: 2301293 - RNA, 19 nt, Artificial Sequence
  Description of Artificial Sequence: Synthetic oligonucleotide
cuguauuagggaaggaagg

SEQ ID NO: 2301294 - RNA, 19 nt, Artificial Sequence
  Description of Artificial Sequence: Synthetic oligonucleotide
uuaucaugagaauuauaca

SEQ ID NO: 2301295 - RNA, 19 nt, Artificial Sequence
  Description of Artificial Sequence: Synthetic oligonucleotide
auuuagguugaaaauuuac

SEQ ID NO: 2301296 - RNA, 19 nt, Artificial Sequence
  Description of Artificial Sequence: Synthetic oligonucleotide
ggaaacaucauaaaaugag

SEQ ID NO: 2301297 - RNA, 19 nt, Artificial Sequence
  Description of Artificial Sequence: Synthetic oligonucleotide
auaggugaggguuuaggag

SEQ ID NO: 2301298 - RNA, 19 nt, Artificial Sequence
  Description of Artificial Sequence: Synthetic oligonucleotide
uggacuugaaccccaguag

SEQ ID NO: 2301299 - RNA, 19 nt, Artificial Sequence
  Description of Artificial Sequence: Synthetic oligonucleotide
ucuagacacgucuacuucc

SEQ ID NO: 2301300 - RNA, 19 nt, Artificial Sequence
  Description of Artificial Sequence: Synthetic oligonucleotide
agacuuauucuucuuaccu

SEQ ID NO: 2301301 - RNA, 19 nt, Artificial Sequence
  Description of Artificial Sequence: Synthetic oligonucleotide
uucuguuucugccuggucu

SEQ ID NO: 2301302 - RNA, 19 nt, Artificial Sequence
  Description of Artificial Sequence: Synthetic oligonucleotide
gauugaggccauuuguugc

SEQ ID NO: 2301303 - RNA, 19 nt, Artificial Sequence
  Description of Artificial Sequence: Synthetic oligonucleotide
uccaggaaaacuccaacac

SEQ ID NO: 2301304 - RNA, 19 nt, Artificial Sequence
  Description of Artificial Sequence: Synthetic oligonucleotide
auauggauaaacuguauua

SEQ ID NO: 2301305 - RNA, 19 nt, Artificial Sequence
  Description of Artificial Sequence: Synthetic oligonucleotide
ucuucuuaccuauaaccca

SEQ ID NO: 2301306 - RNA, 19 nt, Artificial Sequence
  Description of Artificial Sequence: Synthetic oligonucleotide
aauuuauagaugagagcuc

SEQ ID NO: 2301307 - RNA, 19 nt, Artificial Sequence
  Description of Artificial Sequence: Synthetic oligonucleotide
cuucuuaccuauaacccag

SEQ ID NO: 2301308 - RNA, 19 nt, Artificial Sequence
  Description of Artificial Sequence: Synthetic oligonucleotide
aaauuuacauguuguuuau

SEQ ID NO: 2301309 - RNA, 19 nt, Artificial Sequence
  Description of Artificial Sequence: Synthetic oligonucleotide
uggauauccaaggacaccc

SEQ ID NO: 2301310 - RNA, 19 nt, Artificial Sequence
  Description of Artificial Sequence: Synthetic oligonucleotide
uggaaacaucauaaaauga

SEQ ID NO: 2301311 - RNA, 19 nt, Artificial Sequence
  Description of Artificial Sequence: Synthetic oligonucleotide
uauaggugaggguuuagga

SEQ ID NO: 2301312 - RNA, 19 nt, Artificial Sequence
  Description of Artificial Sequence: Synthetic oligonucleotide
aggcaucacuucuagacac

SEQ ID NO: 2301313 - RNA, 19 nt, Artificial Sequence
  Description of Artificial Sequence: Synthetic oligonucleotide
uauauacagacuuauucuu

SEQ ID NO: 2301314 - RNA, 19 nt, Artificial Sequence
  Description of Artificial Sequence: Synthetic oligonucleotide
ucauaaaaugagagagugc

SEQ ID NO: 2301315 - RNA, 19 nt, Artificial Sequence
  Description of Artificial Sequence: Synthetic oligonucleotide
aaaauauggauaaacugua

SEQ ID NO: 2301316 - RNA, 19 nt, Artificial Sequence
  Description of Artificial Sequence: Synthetic oligonucleotide
aaagcuggauauccaagga

SEQ ID NO: 2301317 - RNA, 19 nt, Artificial Sequence
  Description of Artificial Sequence: Synthetic oligonucleotide
uugugcacagacauugacc

SEQ ID NO: 2301318 - RNA, 19 nt, Artificial Sequence
  Description of Artificial Sequence: Synthetic oligonucleotide
uugauggauucauaguuca

SEQ ID NO: 2301319 - RNA, 19 nt, Artificial Sequence
  Description of Artificial Sequence: Synthetic oligonucleotide
ucccugacuggaaagcugg

SEQ ID NO: 2301320 - RNA, 19 nt, Artificial Sequence
  Description of Artificial Sequence: Synthetic oligonucleotide
ucauugaaugaaguugggg

SEQ ID NO: 2301321 - RNA, 19 nt, Artificial Sequence
  Description of Artificial Sequence: Synthetic oligonucleotide
cuccagaacugauugaggc

SEQ ID NO: 2301322 - RNA, 19 nt, Artificial Sequence
  Description of Artificial Sequence: Synthetic oligonucleotide
uugagcacaucuuccauca

SEQ ID NO: 2301323 - RNA, 19 nt, Artificial Sequence
  Description of Artificial Sequence: Synthetic oligonucleotide
ucuacuucccaguaauacu

SEQ ID NO: 2301324 - RNA, 19 nt, Artificial Sequence
  Description of Artificial Sequence: Synthetic oligonucleotide
auggauucauaguucagug

SEQ ID NO: 2301325 - RNA, 19 nt, Artificial Sequence
  Description of Artificial Sequence: Synthetic oligonucleotide
cuuaccuauaacccaguag

SEQ ID NO: 2301326 - RNA, 19 nt, Artificial Sequence
  Description of Artificial Sequence: Synthetic oligonucleotide
acugugcagauauagguga

SEQ ID NO: 2301327 - RNA, 19 nt, Artificial Sequence
  Description of Artificial Sequence: Synthetic oligonucleotide
ggauucauaguucagugug

SEQ ID NO: 2301328 - RNA, 19 nt, Artificial Sequence
  Description of Artificial Sequence: Synthetic oligonucleotide
uucauugaaugaaguuggg

SEQ ID NO: 2301329 - RNA, 19 nt, Artificial Sequence
  Description of Artificial Sequence: Synthetic oligonucleotide
uugauucauugaaugaagu

SEQ ID NO: 2301330 - RNA, 19 nt, Artificial Sequence
  Description of Artificial Sequence: Synthetic oligonucleotide
aaggacacccuaauggauc

SEQ ID NO: 2301331 - RNA, 19 nt, Artificial Sequence
  Description of Artificial Sequence: Synthetic oligonucleotide
gagagugcaagcuucucug

SEQ ID NO: 2301332 - RNA, 19 nt, Artificial Sequence
  Description of Artificial Sequence: Synthetic oligonucleotide
uaacccaguagccauauuu

SEQ ID NO: 2301333 - RNA, 19 nt, Artificial Sequence
  Description of Artificial Sequence: Synthetic oligonucleotide
acuguauuagggaaggaag

SEQ ID NO: 2301334 - RNA, 19 nt, Artificial Sequence
  Description of Artificial Sequence: Synthetic oligonucleotide
ugugauguuuccauaggau

SEQ ID NO: 2301335 - RNA, 19 nt, Artificial Sequence
  Description of Artificial Sequence: Synthetic oligonucleotide
gaauuauacaugaugccca

SEQ ID NO: 2301336 - RNA, 19 nt, Artificial Sequence
  Description of Artificial Sequence: Synthetic oligonucleotide
uccaucauuuaauccuagg

SEQ ID NO: 2301337 - RNA, 19 nt, Artificial Sequence
  Description of Artificial Sequence: Synthetic oligonucleotide
acuuauucuucuuaccuau

SEQ ID NO: 2301338 - RNA, 19 nt, Artificial Sequence
  Description of Artificial Sequence: Synthetic oligonucleotide
uccuugauuaucuccagaa

SEQ ID NO: 2301339 - RNA, 19 nt, Artificial Sequence
  Description of Artificial Sequence: Synthetic oligonucleotide
ugaaaauuuacauguuguu

SEQ ID NO: 2301340 - RNA, 19 nt, Artificial Sequence
  Description of Artificial Sequence: Synthetic oligonucleotide
aauuuacauguuguuuauc

SEQ ID NO: 2301341 - RNA, 19 nt, Artificial Sequence
  Description of Artificial Sequence: Synthetic oligonucleotide
agggaaggaagguucacag

SEQ ID NO: 2301342 - RNA, 19 nt, Artificial Sequence
  Description of Artificial Sequence: Synthetic oligonucleotide
aggcauuauauacagacuu

SEQ ID NO: 2301343 - RNA, 19 nt, Artificial Sequence
  Description of Artificial Sequence: Synthetic oligonucleotide
auacaugaugcccauuuga

SEQ ID NO: 2301344 - RNA, 19 nt, Artificial Sequence
  Description of Artificial Sequence: Synthetic oligonucleotide
gaaacaucauaaaaugaga

SEQ ID NO: 2301345 - RNA, 19 nt, Artificial Sequence
  Description of Artificial Sequence: Synthetic oligonucleotide
uccaacacgauugggagga

SEQ ID NO: 2301346 - RNA, 19 nt, Artificial Sequence
  Description of Artificial Sequence: Synthetic oligonucleotide
gacacuggcauugugggug

SEQ ID NO: 2301347 - RNA, 19 nt, Artificial Sequence
  Description of Artificial Sequence: Synthetic oligonucleotide
cuggguuggacuugaaccc

SEQ ID NO: 2301348 - RNA, 19 nt, Artificial Sequence
  Description of Artificial Sequence: Synthetic oligonucleotide
gauuaggucucagaugccc

SEQ ID NO: 2301349 - RNA, 19 nt, Artificial Sequence
  Description of Artificial Sequence: Synthetic oligonucleotide
agagggccaagacacuggc

SEQ ID NO: 2301350 - RNA, 19 nt, Artificial Sequence
  Description of Artificial Sequence: Synthetic oligonucleotide
auaaacuguauuagggaag

SEQ ID NO: 2301351 - RNA, 19 nt, Artificial Sequence
  Description of Artificial Sequence: Synthetic oligonucleotide
uacaugaugcccauuugau

SEQ ID NO: 2301352 - RNA, 19 nt, Artificial Sequence
  Description of Artificial Sequence: Synthetic oligonucleotide
uguauuagggaaggaaggu

SEQ ID NO: 2301353 - RNA, 19 nt, Artificial Sequence
  Description of Artificial Sequence: Synthetic oligonucleotide
ucuguuucugccuggucug

SEQ ID NO: 2301354 - RNA, 19 nt, Artificial Sequence
  Description of Artificial Sequence: Synthetic oligonucleotide
auguugugcacagacauug

SEQ ID NO: 2301355 - RNA, 19 nt, Artificial Sequence
  Description of Artificial Sequence: Synthetic oligonucleotide
acgauugggaggaugaguc

SEQ ID NO: 2301356 - RNA, 19 nt, Artificial Sequence
  Description of Artificial Sequence: Synthetic oligonucleotide
aggacacccuaauggaucg

SEQ ID NO: 2301357 - RNA, 19 nt, Artificial Sequence
  Description of Artificial Sequence: Synthetic oligonucleotide
auauacagacuuauucuuc

SEQ ID NO: 2301358 - RNA, 19 nt, Artificial Sequence
  Description of Artificial Sequence: Synthetic oligonucleotide
augcccauuugauucauug

SEQ ID NO: 2301359 - RNA, 19 nt, Artificial Sequence
  Description of Artificial Sequence: Synthetic oligonucleotide
auauaggugaggguuuagg

SEQ ID NO: 2301360 - RNA, 19 nt, Artificial Sequence
  Description of Artificial Sequence: Synthetic oligonucleotide
uaauacuucccugacugga

SEQ ID NO: 2301361 - RNA, 19 nt, Artificial Sequence
  Description of Artificial Sequence: Synthetic oligonucleotide
ccgauuaggucucagaugc

SEQ ID NO: 2301362 - RNA, 19 nt, Artificial Sequence
  Description of Artificial Sequence: Synthetic oligonucleotide
gauugggaggaugagucag

SEQ ID NO: 2301363 - RNA, 19 nt, Artificial Sequence
  Description of Artificial Sequence: Synthetic oligonucleotide
aacuccaacacgauuggga

SEQ ID NO: 2301364 - RNA, 19 nt, Artificial Sequence
  Description of Artificial Sequence: Synthetic oligonucleotide
uccagaacugauugaggcc

SEQ ID NO: 2301365 - RNA, 19 nt, Artificial Sequence
  Description of Artificial Sequence: Synthetic oligonucleotide
uuuacauguuguuuaucau

SEQ ID NO: 2301366 - RNA, 19 nt, Artificial Sequence
  Description of Artificial Sequence: Synthetic oligonucleotide
ugauucauugaaugaaguu

SEQ ID NO: 2301367 - RNA, 19 nt, Artificial Sequence
  Description of Artificial Sequence: Synthetic oligonucleotide
aucaugagaauuauacaug

SEQ ID NO: 2301368 - RNA, 19 nt, Artificial Sequence
  Description of Artificial Sequence: Synthetic oligonucleotide
aacacgauugggaggauga

SEQ ID NO: 2301369 - RNA, 19 nt, Artificial Sequence
  Description of Artificial Sequence: Synthetic oligonucleotide
ugauggauucauaguucag

SEQ ID NO: 2301370 - RNA, 19 nt, Artificial Sequence
  Description of Artificial Sequence: Synthetic oligonucleotide
cauugaaugaaguuggggu

SEQ ID NO: 2301371 - RNA, 19 nt, Artificial Sequence
  Description of Artificial Sequence: Synthetic oligonucleotide
cuugaaccccaguagacuc

SEQ ID NO: 2301372 - RNA, 19 nt, Artificial Sequence
  Description of Artificial Sequence: Synthetic oligonucleotide
cuagacacgucuacuuccc

SEQ ID NO: 2301373 - RNA, 19 nt, Artificial Sequence
  Description of Artificial Sequence: Synthetic oligonucleotide
ugacuggaaagcuggauau

SEQ ID NO: 2301374 - RNA, 19 nt, Artificial Sequence
  Description of Artificial Sequence: Synthetic oligonucleotide
acagguaaguaacuccaca

SEQ ID NO: 2301375 - RNA, 19 nt, Artificial Sequence
  Description of Artificial Sequence: Synthetic oligonucleotide
ugugcagauauaggugagg

SEQ ID NO: 2301376 - RNA, 19 nt, Artificial Sequence
  Description of Artificial Sequence: Synthetic oligonucleotide
cauuugauucauugaauga

SEQ ID NO: 2301377 - RNA, 19 nt, Artificial Sequence
  Description of Artificial Sequence: Synthetic oligonucleotide
uauuuagguugaaaauuua

SEQ ID NO: 2301378 - RNA, 19 nt, Artificial Sequence
  Description of Artificial Sequence: Synthetic oligonucleotide
caccauguccuucucacag

SEQ ID NO: 2301379 - RNA, 19 nt, Artificial Sequence
  Description of Artificial Sequence: Synthetic oligonucleotide
uucuagacacgucuacuuc

SEQ ID NO: 2301380 - RNA, 19 nt, Artificial Sequence
  Description of Artificial Sequence: Synthetic oligonucleotide
uacagacuuauucuucuua

SEQ ID NO: 2301381 - RNA, 19 nt, Artificial Sequence
  Description of Artificial Sequence: Synthetic oligonucleotide
ugccgauuaggucucagau

SEQ ID NO: 2301382 - RNA, 19 nt, Artificial Sequence
  Description of Artificial Sequence: Synthetic oligonucleotide
gaugcccucuucuucuuug

SEQ ID NO: 2301383 - RNA, 19 nt, Artificial Sequence
  Description of Artificial Sequence: Synthetic oligonucleotide
acagaagagcugaaguuuc

SEQ ID NO: 2301384 - RNA, 19 nt, Artificial Sequence
  Description of Artificial Sequence: Synthetic oligonucleotide
gugcagauauaggugaggg

SEQ ID NO: 2301385 - RNA, 19 nt, Artificial Sequence
  Description of Artificial Sequence: Synthetic oligonucleotide
cagacuuauucuucuuacc

SEQ ID NO: 2301386 - RNA, 19 nt, Artificial Sequence
  Description of Artificial Sequence: Synthetic oligonucleotide
augagagagugcaagcuuc

SEQ ID NO: 2301387 - RNA, 19 nt, Artificial Sequence
  Description of Artificial Sequence: Synthetic oligonucleotide
guaauacuucccugacugg

SEQ ID NO: 2301388 - RNA, 19 nt, Artificial Sequence
  Description of Artificial Sequence: Synthetic oligonucleotide
guuuccauaggauuaaaau

SEQ ID NO: 2301389 - RNA, 19 nt, Artificial Sequence
  Description of Artificial Sequence: Synthetic oligonucleotide
aaguuucucuccauguugu

SEQ ID NO: 2301390 - RNA, 19 nt, Artificial Sequence
  Description of Artificial Sequence: Synthetic oligonucleotide
ugaaguuucucuccauguu

SEQ ID NO: 2301391 - RNA, 19 nt, Artificial Sequence
  Description of Artificial Sequence: Synthetic oligonucleotide
agaugcccaaaacagguaa

SEQ ID NO: 2301392 - RNA, 19 nt, Artificial Sequence
  Description of Artificial Sequence: Synthetic oligonucleotide
gucucagaugcccaaaaca

SEQ ID NO: 2301393 - RNA, 19 nt, Artificial Sequence
  Description of Artificial Sequence: Synthetic oligonucleotide
cuccauguugugcacagac

SEQ ID NO: 2301394 - RNA, 19 nt, Artificial Sequence
  Description of Artificial Sequence: Synthetic oligonucleotide
uugugggugacagagcacu

SEQ ID NO: 2301395 - RNA, 19 nt, Artificial Sequence
  Description of Artificial Sequence: Synthetic oligonucleotide
agggccaagacacuggcau

SEQ ID NO: 2301396 - RNA, 19 nt, Artificial Sequence
  Description of Artificial Sequence: Synthetic oligonucleotide
cauguuguuuaucaugaga

SEQ ID NO: 2301397 - RNA, 19 nt, Artificial Sequence
  Description of Artificial Sequence: Synthetic oligonucleotide
acccuaauggaucgcucac

SEQ ID NO: 2301398 - RNA, 19 nt, Artificial Sequence
  Description of Artificial Sequence: Synthetic oligonucleotide
ugauucuguuucugccugg

SEQ ID NO: 2301399 - RNA, 19 nt, Artificial Sequence
  Description of Artificial Sequence: Synthetic oligonucleotide
aaccccaguagacucucca

SEQ ID NO: 2301400 - RNA, 19 nt, Artificial Sequence
  Description of Artificial Sequence: Synthetic oligonucleotide
ugauuaucuccagaacuga

SEQ ID NO: 2301401 - RNA, 19 nt, Artificial Sequence
  Description of Artificial Sequence: Synthetic oligonucleotide
uauccaaggacacccuaau

SEQ ID NO: 2301402 - RNA, 19 nt, Artificial Sequence
  Description of Artificial Sequence: Synthetic oligonucleotide
ggcauugugggugacagag

SEQ ID NO: 2301403 - RNA, 19 nt, Artificial Sequence
  Description of Artificial Sequence: Synthetic oligonucleotide
uuaauccuaggagccaggc

SEQ ID NO: 2301404 - RNA, 19 nt, Artificial Sequence
  Description of Artificial Sequence: Synthetic oligonucleotide
uggaaagcuggauauccaa

SEQ ID NO: 2301405 - RNA, 19 nt, Artificial Sequence
  Description of Artificial Sequence: Synthetic oligonucleotide
augguuggaaacaucauaa

SEQ ID NO: 2301406 - RNA, 19 nt, Artificial Sequence
  Description of Artificial Sequence: Synthetic oligonucleotide
uccauguugugcacagaca

SEQ ID NO: 2301407 - RNA, 19 nt, Artificial Sequence
  Description of Artificial Sequence: Synthetic oligonucleotide
uaauccuaggagccaggca

SEQ ID NO: 2301408 - RNA, 19 nt, Artificial Sequence
  Description of Artificial Sequence: Synthetic oligonucleotide
ugggguugagcacaucuuc

SEQ ID NO: 2301409 - RNA, 19 nt, Artificial Sequence
  Description of Artificial Sequence: Synthetic oligonucleotide
guuggaaacaucauaaaau

SEQ ID NO: 2301410 - RNA, 19 nt, Artificial Sequence
  Description of Artificial Sequence: Synthetic oligonucleotide
uuccaucauuuaauccuag

SEQ ID NO: 2301411 - RNA, 19 nt, Artificial Sequence
  Description of Artificial Sequence: Synthetic oligonucleotide
ccauuugauucauugaaug

SEQ ID NO: 2301412 - RNA, 19 nt, Artificial Sequence
  Description of Artificial Sequence: Synthetic oligonucleotide
ugagagagugcaagcuucu

SEQ ID NO: 2301413 - RNA, 19 nt, Artificial Sequence
  Description of Artificial Sequence: Synthetic oligonucleotide
aaggcauuauauacagacu

SEQ ID NO: 2301414 - RNA, 19 nt, Artificial Sequence
  Description of Artificial Sequence: Synthetic oligonucleotide
aaacuccaacacgauuggg

SEQ ID NO: 2301415 - RNA, 19 nt, Artificial Sequence
  Description of Artificial Sequence: Synthetic oligonucleotide
uuaggagggugguccacag

SEQ ID NO: 2301416 - RNA, 19 nt, Artificial Sequence
  Description of Artificial Sequence: Synthetic oligonucleotide
uacuucccugacuggaaag

SEQ ID NO: 2301417 - RNA, 19 nt, Artificial Sequence
  Description of Artificial Sequence: Synthetic oligonucleotide
uguuuaucaugagaauuau

SEQ ID NO: 2301418 - RNA, 19 nt, Artificial Sequence
  Description of Artificial Sequence: Synthetic oligonucleotide
acgucuacuucccaguaau

SEQ ID NO: 2301419 - RNA, 19 nt, Artificial Sequence
  Description of Artificial Sequence: Synthetic oligonucleotide
cacagacugucauuggcug

SEQ ID NO: 2301420 - RNA, 19 nt, Artificial Sequence
  Description of Artificial Sequence: Synthetic oligonucleotide
agaagagcugaaguuucuc

SEQ ID NO: 2301421 - RNA, 19 nt, Artificial Sequence
  Description of Artificial Sequence: Synthetic oligonucleotide
agcuggauauccaaggaca

SEQ ID NO: 2301422 - RNA, 19 nt, Artificial Sequence
  Description of Artificial Sequence: Synthetic oligonucleotide
aaauauggauaaacuguau

SEQ ID NO: 2301423 - RNA, 19 nt, Artificial Sequence
  Description of Artificial Sequence: Synthetic oligonucleotide
uucccugacuggaaagcug

SEQ ID NO: 2301424 - RNA, 19 nt, Artificial Sequence
  Description of Artificial Sequence: Synthetic oligonucleotide
acaucuuccaucauuuaau

SEQ ID NO: 2301425 - RNA, 19 nt, Artificial Sequence
  Description of Artificial Sequence: Synthetic oligonucleotide
acauguuguuuaucaugag

SEQ ID NO: 2301426 - RNA, 19 nt, Artificial Sequence
  Description of Artificial Sequence: Synthetic oligonucleotide
gucuacuucccaguaauac

SEQ ID NO: 2301427 - RNA, 19 nt, Artificial Sequence
  Description of Artificial Sequence: Synthetic oligonucleotide
gaugcccaaaacagguaag

SEQ ID NO: 2301428 - RNA, 19 nt, Artificial Sequence
  Description of Artificial Sequence: Synthetic oligonucleotide
ugcccauuugauucauuga

SEQ ID NO: 2301429 - RNA, 19 nt, Artificial Sequence
  Description of Artificial Sequence: Synthetic oligonucleotide
gacuuauucuucuuaccua

SEQ ID NO: 2301430 - RNA, 19 nt, Artificial Sequence
  Description of Artificial Sequence: Synthetic oligonucleotide
guugagcacaucuuccauc

SEQ ID NO: 2301431 - RNA, 19 nt, Artificial Sequence
  Description of Artificial Sequence: Synthetic oligonucleotide
cacagguuccaccuuugag

SEQ ID NO: 2301432 - RNA, 19 nt, Artificial Sequence
  Description of Artificial Sequence: Synthetic oligonucleotide
uuuaggagggugguccaca

SEQ ID NO: 2301433 - RNA, 19 nt, Artificial Sequence
  Description of Artificial Sequence: Synthetic oligonucleotide
uccaccuuugagguccagg

SEQ ID NO: 2301434 - RNA, 19 nt, Artificial Sequence
  Description of Artificial Sequence: Synthetic oligonucleotide
accccaguagacucuccac

SEQ ID NO: 2301435 - RNA, 19 nt, Artificial Sequence
  Description of Artificial Sequence: Synthetic oligonucleotide
uguugugcacagacauuga

SEQ ID NO: 2301436 - RNA, 19 nt, Artificial Sequence
  Description of Artificial Sequence: Synthetic oligonucleotide
uugaaccccaguagacucu

SEQ ID NO: 2301437 - RNA, 19 nt, Artificial Sequence
  Description of Artificial Sequence: Synthetic oligonucleotide
aauacuucccugacuggaa

SEQ ID NO: 2301438 - RNA, 19 nt, Artificial Sequence
  Description of Artificial Sequence: Synthetic oligonucleotide
gauggauucauaguucagu

SEQ ID NO: 2301439 - RNA, 19 nt, Artificial Sequence
  Description of Artificial Sequence: Synthetic oligonucleotide
ugcagauauaggugagggu

SEQ ID NO: 2301440 - RNA, 19 nt, Artificial Sequence
  Description of Artificial Sequence: Synthetic oligonucleotide
uaucuccagaacugauuga

SEQ ID NO: 2301441 - RNA, 19 nt, Artificial Sequence
  Description of Artificial Sequence: Synthetic oligonucleotide
ucccaguaauacuucccug

SEQ ID NO: 2301442 - RNA, 19 nt, Artificial Sequence
  Description of Artificial Sequence: Synthetic oligonucleotide
ucuuaccuauaacccagua

SEQ ID NO: 2301443 - RNA, 19 nt, Artificial Sequence
  Description of Artificial Sequence: Synthetic oligonucleotide
cuccaacacgauugggagg

SEQ ID NO: 2301444 - RNA, 19 nt, Artificial Sequence
  Description of Artificial Sequence: Synthetic oligonucleotide
uuaggucucagaugcccaa

SEQ ID NO: 2301445 - RNA, 19 nt, Artificial Sequence
  Description of Artificial Sequence: Synthetic oligonucleotide
gauucauaguucaguguga

SEQ ID NO: 2301446 - RNA, 19 nt, Artificial Sequence
  Description of Artificial Sequence: Synthetic oligonucleotide
ugaaugaaguugggguuga

SEQ ID NO: 2301447 - RNA, 19 nt, Artificial Sequence
  Description of Artificial Sequence: Synthetic oligonucleotide
gauguuuccauaggauuaa

SEQ ID NO: 2301448 - RNA, 19 nt, Artificial Sequence
  Description of Artificial Sequence: Synthetic oligonucleotide
gacuugaaccccaguagac

SEQ ID NO: 2301449 - RNA, 19 nt, Artificial Sequence
  Description of Artificial Sequence: Synthetic oligonucleotide
ccaggaaaacuccaacacg

SEQ ID NO: 2301450 - RNA, 19 nt, Artificial Sequence
  Description of Artificial Sequence: Synthetic oligonucleotide
aguagacucuccacuaugu

SEQ ID NO: 2301451 - RNA, 19 nt, Artificial Sequence
  Description of Artificial Sequence: Synthetic oligonucleotide
acuucuagacacgucuacu

SEQ ID NO: 2301452 - RNA, 19 nt, Artificial Sequence
  Description of Artificial Sequence: Synthetic oligonucleotide
cucuacaaaggcauuauau

SEQ ID NO: 2301453 - RNA, 19 nt, Artificial Sequence
  Description of Artificial Sequence: Synthetic oligonucleotide
agaugagagcuccaugguu

SEQ ID NO: 2301454 - RNA, 19 nt, Artificial Sequence
  Description of Artificial Sequence: Synthetic oligonucleotide
gauauaggugaggguuuag

SEQ ID NO: 2301455 - RNA, 19 nt, Artificial Sequence
  Description of Artificial Sequence: Synthetic oligonucleotide
uucuuaccuauaacccagu

SEQ ID NO: 2301456 - RNA, 19 nt, Artificial Sequence
  Description of Artificial Sequence: Synthetic oligonucleotide
agggcagaugcccucuucu

SEQ ID NO: 2301457 - RNA, 19 nt, Artificial Sequence
  Description of Artificial Sequence: Synthetic oligonucleotide
acagagcacucuacaaagg

SEQ ID NO: 2301458 - RNA, 19 nt, Artificial Sequence
  Description of Artificial Sequence: Synthetic oligonucleotide
cugugcagauauaggugag

SEQ ID NO: 2301459 - RNA, 19 nt, Artificial Sequence
  Description of Artificial Sequence: Synthetic oligonucleotide
cacuucuagacacgucuac

SEQ ID NO: 2301460 - RNA, 19 nt, Artificial Sequence
  Description of Artificial Sequence: Synthetic oligonucleotide
auccaaggacacccuaaug

SEQ ID NO: 2301461 - RNA, 19 nt, Artificial Sequence
  Description of Artificial Sequence: Synthetic oligonucleotide
gagugcaagcuucucuguc

SEQ ID NO: 2301462 - RNA, 19 nt, Artificial Sequence
  Description of Artificial Sequence: Synthetic oligonucleotide
ccaccuuugagguccaggc

SEQ ID NO: 2301463 - RNA, 19 nt, Artificial Sequence
  Description of Artificial Sequence: Synthetic oligonucleotide
ucacagguuccaccuuuga

SEQ ID NO: 2301464 - RNA, 19 nt, Artificial Sequence
  Description of Artificial Sequence: Synthetic oligonucleotide
acagacugucauuggcugu

SEQ ID NO: 2301465 - RNA, 19 nt, Artificial Sequence
  Description of Artificial Sequence: Synthetic oligonucleotide
agccaggcaucacuucuag

SEQ ID NO: 2301466 - RNA, 19 nt, Artificial Sequence
  Description of Artificial Sequence: Synthetic oligonucleotide
auuaucuccagaacugauu

SEQ ID NO: 2301467 - RNA, 19 nt, Artificial Sequence
  Description of Artificial Sequence: Synthetic oligonucleotide
guugggguugagcacaucu

SEQ ID NO: 2301468 - RNA, 19 nt, Artificial Sequence
  Description of Artificial Sequence: Synthetic oligonucleotide
ggguuuaggaggguggucc

SEQ ID NO: 2301469 - RNA, 19 nt, Artificial Sequence
  Description of Artificial Sequence: Synthetic oligonucleotide
ugggugacagagcacucua

SEQ ID NO: 2301470 - RNA, 19 nt, Artificial Sequence
  Description of Artificial Sequence: Synthetic oligonucleotide
cugucauuggcugugaugu

SEQ ID NO: 2301471 - RNA, 19 nt, Artificial Sequence
  Description of Artificial Sequence: Synthetic oligonucleotide
cuggauauccaaggacacc

SEQ ID NO: 2301472 - RNA, 19 nt, Artificial Sequence
  Description of Artificial Sequence: Synthetic oligonucleotide
uggguuggacuugaacccc

SEQ ID NO: 2301473 - RNA, 19 nt, Artificial Sequence
  Description of Artificial Sequence: Synthetic oligonucleotide
agagugcaagcuucucugu

SEQ ID NO: 2301474 - RNA, 19 nt, Artificial Sequence
  Description of Artificial Sequence: Synthetic oligonucleotide
cagacugucauuggcugug

SEQ ID NO: 2301475 - RNA, 19 nt, Artificial Sequence
  Description of Artificial Sequence: Synthetic oligonucleotide
aagguucacagaauuuaua

SEQ ID NO: 2301476 - RNA, 19 nt, Artificial Sequence
  Description of Artificial Sequence: Synthetic oligonucleotide
auacuucccugacuggaaa

SEQ ID NO: 2301477 - RNA, 19 nt, Artificial Sequence
  Description of Artificial Sequence: Synthetic oligonucleotide
gauauccaaggacacccua

SEQ ID NO: 2301478 - RNA, 19 nt, Artificial Sequence
  Description of Artificial Sequence: Synthetic oligonucleotide
agccagauggccaccaugu

SEQ ID NO: 2301479 - RNA, 19 nt, Artificial Sequence
  Description of Artificial Sequence: Synthetic oligonucleotide
cagagagagggccaagaca

SEQ ID NO: 2301480 - RNA, 19 nt, Artificial Sequence
  Description of Artificial Sequence: Synthetic oligonucleotide
augcccaaaacagguaagu

SEQ ID NO: 2301481 - RNA, 19 nt, Artificial Sequence
  Description of Artificial Sequence: Synthetic oligonucleotide
cucuggguuggacuugaac

SEQ ID NO: 2301482 - RNA, 19 nt, Artificial Sequence
  Description of Artificial Sequence: Synthetic oligonucleotide
ggugacagagcacucuaca

SEQ ID NO: 2301483 - RNA, 19 nt, Artificial Sequence
  Description of Artificial Sequence: Synthetic oligonucleotide
ugcugugauucuguuucug

SEQ ID NO: 2301484 - RNA, 19 nt, Artificial Sequence
  Description of Artificial Sequence: Synthetic oligonucleotide
cauuggcugugauguuucc

SEQ ID NO: 2301485 - RNA, 19 nt, Artificial Sequence
  Description of Artificial Sequence: Synthetic oligonucleotide
uggucugacuccugacacu

SEQ ID NO: 2301486 - RNA, 19 nt, Artificial Sequence
  Description of Artificial Sequence: Synthetic oligonucleotide
uagacacgucuacuuccca

SEQ ID NO: 2301487 - RNA, 19 nt, Artificial Sequence
  Description of Artificial Sequence: Synthetic oligonucleotide
gcaagcuucucuguccagg

SEQ ID NO: 2301488 - RNA, 19 nt, Artificial Sequence
  Description of Artificial Sequence: Synthetic oligonucleotide
augccgauuaggucucaga

SEQ ID NO: 2301489 - RNA, 19 nt, Artificial Sequence
  Description of Artificial Sequence: Synthetic oligonucleotide
cugacuggaaagcuggaua

SEQ ID NO: 2301490 - RNA, 19 nt, Artificial Sequence
  Description of Artificial Sequence: Synthetic oligonucleotide
gugacagagcacucuacaa

SEQ ID NO: 2301491 - RNA, 19 nt, Artificial Sequence
  Description of Artificial Sequence: Synthetic oligonucleotide
ggcacugugcagauauagg

SEQ ID NO: 2301492 - RNA, 19 nt, Artificial Sequence
  Description of Artificial Sequence: Synthetic oligonucleotide
auauccaaggacacccuaa

SEQ ID NO: 2301493 - RNA, 19 nt, Artificial Sequence
  Description of Artificial Sequence: Synthetic oligonucleotide
ggacuugaaccccaguaga

SEQ ID NO: 2301494 - RNA, 19 nt, Artificial Sequence
  Description of Artificial Sequence: Synthetic oligonucleotide
auuggcugugauguuucca

SEQ ID NO: 2301495 - RNA, 19 nt, Artificial Sequence
  Description of Artificial Sequence: Synthetic oligonucleotide
gacacgucuacuucccagu

SEQ ID NO: 2301496 - RNA, 19 nt, Artificial Sequence
  Description of Artificial Sequence: Synthetic oligonucleotide
guaacuccacacacagggc

SEQ ID NO: 2301497 - RNA, 19 nt, Artificial Sequence
  Description of Artificial Sequence: Synthetic oligonucleotide
ugcaagcuucucuguccag

SEQ ID NO: 2301498 - RNA, 19 nt, Artificial Sequence
  Description of Artificial Sequence: Synthetic oligonucleotide
ggaagguucacagaauuua

SEQ ID NO: 2301499 - RNA, 19 nt, Artificial Sequence
  Description of Artificial Sequence: Synthetic oligonucleotide
cacccuaauggaucgcuca

SEQ ID NO: 2301500 - RNA, 19 nt, Artificial Sequence
  Description of Artificial Sequence: Synthetic oligonucleotide
cacaugccgauuaggucuc

SEQ ID NO: 2301501 - RNA, 19 nt, Artificial Sequence
  Description of Artificial Sequence: Synthetic oligonucleotide
gcccaaaacagguaaguaa

SEQ ID NO: 2301502 - RNA, 19 nt, Artificial Sequence
  Description of Artificial Sequence: Synthetic oligonucleotide
uucucacagaagagcugaa

SEQ ID NO: 2301503 - RNA, 19 nt, Artificial Sequence
  Description of Artificial Sequence: Synthetic oligonucleotide
cugaaguuucucuccaugu

SEQ ID NO: 2301504 - RNA, 19 nt, Artificial Sequence
  Description of Artificial Sequence: Synthetic oligonucleotide
cauuuaauccuaggagcca

SEQ ID NO: 2301505 - RNA, 19 nt, Artificial Sequence
  Description of Artificial Sequence: Synthetic oligonucleotide
caucacuucuagacacguc

SEQ ID NO: 2301506 - RNA, 19 nt, Artificial Sequence
  Description of Artificial Sequence: Synthetic oligonucleotide
cuacuucccaguaauacuu

SEQ ID NO: 2301507 - RNA, 19 nt, Artificial Sequence
  Description of Artificial Sequence: Synthetic oligonucleotide
cuggaaagcuggauaucca

SEQ ID NO: 2301508 - RNA, 19 nt, Artificial Sequence
  Description of Artificial Sequence: Synthetic oligonucleotide
gccgauuaggucucagaug

SEQ ID NO: 2301509 - RNA, 19 nt, Artificial Sequence
  Description of Artificial Sequence: Synthetic oligonucleotide
aggucucagaugcccaaaa

SEQ ID NO: 2301510 - RNA, 19 nt, Artificial Sequence
  Description of Artificial Sequence: Synthetic oligonucleotide
ugggaggaugagucagaga

SEQ ID NO: 2301511 - RNA, 19 nt, Artificial Sequence
  Description of Artificial Sequence: Synthetic oligonucleotide
ugcccaaaacagguaagua

SEQ ID NO: 2301512 - RNA, 19 nt, Artificial Sequence
  Description of Artificial Sequence: Synthetic oligonucleotide
uccuaggagccaggcauca

SEQ ID NO: 2301513 - RNA, 19 nt, Artificial Sequence
  Description of Artificial Sequence: Synthetic oligonucleotide
uguuucugccuggucugac

SEQ ID NO: 2301514 - RNA, 19 nt, Artificial Sequence
  Description of Artificial Sequence: Synthetic oligonucleotide
agauauaggugaggguuua

SEQ ID NO: 2301515 - RNA, 19 nt, Artificial Sequence
  Description of Artificial Sequence: Synthetic oligonucleotide
uccucuggguuggacuuga

SEQ ID NO: 2301516 - RNA, 19 nt, Artificial Sequence
  Description of Artificial Sequence: Synthetic oligonucleotide
acacccuaauggaucgcuc

SEQ ID NO: 2301517 - RNA, 19 nt, Artificial Sequence
  Description of Artificial Sequence: Synthetic oligonucleotide
gaagguucacagaauuuau

SEQ ID NO: 2301518 - RNA, 19 nt, Artificial Sequence
  Description of Artificial Sequence: Synthetic oligonucleotide
gggcacugugcagauauag

SEQ ID NO: 2301519 - RNA, 19 nt, Artificial Sequence
  Description of Artificial Sequence: Synthetic oligonucleotide
gagcacucuacaaaggcau

SEQ ID NO: 2301520 - RNA, 19 nt, Artificial Sequence
  Description of Artificial Sequence: Synthetic oligonucleotide
ccaguaauacuucccugac

SEQ ID NO: 2301521 - RNA, 19 nt, Artificial Sequence
  Description of Artificial Sequence: Synthetic oligonucleotide
acacgauugggaggaugag

SEQ ID NO: 2301522 - RNA, 19 nt, Artificial Sequence
  Description of Artificial Sequence: Synthetic oligonucleotide
gcacugugcagauauaggu

SEQ ID NO: 2301523 - RNA, 19 nt, Artificial Sequence
  Description of Artificial Sequence: Synthetic oligonucleotide
auugggaggaugagucaga

SEQ ID NO: 2301524 - RNA, 19 nt, Artificial Sequence
  Description of Artificial Sequence: Synthetic oligonucleotide
cccaguaauacuucccuga

SEQ ID NO: 2301525 - RNA, 19 nt, Artificial Sequence
  Description of Artificial Sequence: Synthetic oligonucleotide
auccuaggagccaggcauc

SEQ ID NO: 2301526 - RNA, 19 nt, Artificial Sequence
  Description of Artificial Sequence: Synthetic oligonucleotide
cagccagauggccaccaug

SEQ ID NO: 2301527 - RNA, 19 nt, Artificial Sequence
  Description of Artificial Sequence: Synthetic oligonucleotide
ggcaucacuucuagacacg

SEQ ID NO: 2301528 - RNA, 19 nt, Artificial Sequence
  Description of Artificial Sequence: Synthetic oligonucleotide
ggccaagacacuggcauug

SEQ ID NO: 2301529 - RNA, 19 nt, Artificial Sequence
  Description of Artificial Sequence: Synthetic oligonucleotide
cuuauucuucuuaccuaua

SEQ ID NO: 2301530 - RNA, 19 nt, Artificial Sequence
  Description of Artificial Sequence: Synthetic oligonucleotide
ggucucagaugcccaaaac

SEQ ID NO: 2301531 - RNA, 19 nt, Artificial Sequence
  Description of Artificial Sequence: Synthetic oligonucleotide
caacacgauugggaggaug

SEQ ID NO: 2301532 - RNA, 19 nt, Artificial Sequence
  Description of Artificial Sequence: Synthetic oligonucleotide
ccaaggacacccuaaugga

SEQ ID NO: 2301533 - RNA, 19 nt, Artificial Sequence
  Description of Artificial Sequence: Synthetic oligonucleotide
gacuggaaagcuggauauc

SEQ ID NO: 2301534 - RNA, 19 nt, Artificial Sequence
  Description of Artificial Sequence: Synthetic oligonucleotide
gauuaucuccagaacugau

SEQ ID NO: 2301535 - RNA, 19 nt, Artificial Sequence
  Description of Artificial Sequence: Synthetic oligonucleotide
acacgucuacuucccagua

SEQ ID NO: 2301536 - RNA, 19 nt, Artificial Sequence
  Description of Artificial Sequence: Synthetic oligonucleotide
guuuaucaugagaauuaua

SEQ ID NO: 2301537 - RNA, 19 nt, Artificial Sequence
  Description of Artificial Sequence: Synthetic oligonucleotide
aggaugagucagagagagg

SEQ ID NO: 2301538 - RNA, 19 nt, Artificial Sequence
  Description of Artificial Sequence: Synthetic oligonucleotide
ggcagaugcccucuucuuc

SEQ ID NO: 2301539 - RNA, 19 nt, Artificial Sequence
  Description of Artificial Sequence: Synthetic oligonucleotide
cuucuagacacgucuacuu

SEQ ID NO: 2301540 - RNA, 19 nt, Artificial Sequence
  Description of Artificial Sequence: Synthetic oligonucleotide
ccagaacugauugaggcca

SEQ ID NO: 2301541 - RNA, 19 nt, Artificial Sequence
  Description of Artificial Sequence: Synthetic oligonucleotide
gcagauauaggugaggguu

SEQ ID NO: 2301542 - RNA, 19 nt, Artificial Sequence
  Description of Artificial Sequence: Synthetic oligonucleotide
aggccauuuguugcuguga

SEQ ID NO: 2301543 - RNA, 19 nt, Artificial Sequence
  Description of Artificial Sequence: Synthetic oligonucleotide
ccacaugccgauuaggucu

SEQ ID NO: 2301544 - RNA, 19 nt, Artificial Sequence
  Description of Artificial Sequence: Synthetic oligonucleotide
acuggcauugugggugaca

SEQ ID NO: 2301545 - RNA, 19 nt, Artificial Sequence
  Description of Artificial Sequence: Synthetic oligonucleotide
aggaaaacuccaacacgau

SEQ ID NO: 2301546 - RNA, 19 nt, Artificial Sequence
  Description of Artificial Sequence: Synthetic oligonucleotide
ugucauuggcugugauguu

SEQ ID NO: 2301547 - RNA, 19 nt, Artificial Sequence
  Description of Artificial Sequence: Synthetic oligonucleotide
caugccgauuaggucucag

SEQ ID NO: 2301548 - RNA, 19 nt, Artificial Sequence
  Description of Artificial Sequence: Synthetic oligonucleotide
uggcugugauguuuccaua

SEQ ID NO: 2301549 - RNA, 19 nt, Artificial Sequence
  Description of Artificial Sequence: Synthetic oligonucleotide
uggcauugugggugacaga

SEQ ID NO: 2301550 - RNA, 19 nt, Artificial Sequence
  Description of Artificial Sequence: Synthetic oligonucleotide
gauucuguuucugccuggu

SEQ ID NO: 2301551 - RNA, 19 nt, Artificial Sequence
  Description of Artificial Sequence: Synthetic oligonucleotide
cuaauggaucgcucacaaa

SEQ ID NO: 2301552 - RNA, 19 nt, Artificial Sequence
  Description of Artificial Sequence: Synthetic oligonucleotide
agucagagagagggccaag

SEQ ID NO: 2301553 - RNA, 19 nt, Artificial Sequence
  Description of Artificial Sequence: Synthetic oligonucleotide
gagagagugcaagcuucuc

SEQ ID NO: 2301554 - RNA, 19 nt, Artificial Sequence
  Description of Artificial Sequence: Synthetic oligonucleotide
guuuaggagggugguccac

SEQ ID NO: 2301555 - RNA, 19 nt, Artificial Sequence
  Description of Artificial Sequence: Synthetic oligonucleotide
gacacccuaauggaucgcu

SEQ ID NO: 2301556 - RNA, 19 nt, Artificial Sequence
  Description of Artificial Sequence: Synthetic oligonucleotide
ugagagcuccaugguugga

SEQ ID NO: 2301557 - RNA, 19 nt, Artificial Sequence
  Description of Artificial Sequence: Synthetic oligonucleotide
gccacaugccgauuagguc

SEQ ID NO: 2301558 - RNA, 19 nt, Artificial Sequence
  Description of Artificial Sequence: Synthetic oligonucleotide
guuucugccuggucugacu

SEQ ID NO: 2301559 - RNA, 19 nt, Artificial Sequence
  Description of Artificial Sequence: Synthetic oligonucleotide
caugagaauuauacaugau

SEQ ID NO: 2301560 - RNA, 19 nt, Artificial Sequence
  Description of Artificial Sequence: Synthetic oligonucleotide
gguuuaggaggguggucca

SEQ ID NO: 2301561 - RNA, 19 nt, Artificial Sequence
  Description of Artificial Sequence: Synthetic oligonucleotide
caccuuugagguccaggca

SEQ ID NO: 2301562 - RNA, 19 nt, Artificial Sequence
  Description of Artificial Sequence: Synthetic oligonucleotide
ccuaauggaucgcucacaa

SEQ ID NO: 2301563 - RNA, 19 nt, Artificial Sequence
  Description of Artificial Sequence: Synthetic oligonucleotide
ggagccaggcaucacuucu

SEQ ID NO: 2301564 - RNA, 19 nt, Artificial Sequence
  Description of Artificial Sequence: Synthetic oligonucleotide
ggcauuauauacagacuua

SEQ ID NO: 2301565 - RNA, 19 nt, Artificial Sequence
  Description of Artificial Sequence: Synthetic oligonucleotide
guauuagggaaggaagguu

SEQ ID NO: 2301566 - RNA, 19 nt, Artificial Sequence
  Description of Artificial Sequence: Synthetic oligonucleotide
caaggacacccuaauggau

SEQ ID NO: 2301567 - RNA, 19 nt, Artificial Sequence
  Description of Artificial Sequence: Synthetic oligonucleotide
gaggguuuaggaggguggu

SEQ ID NO: 2301568 - RNA, 19 nt, Artificial Sequence
  Description of Artificial Sequence: Synthetic oligonucleotide
gaaccccaguagacucucc

SEQ ID NO: 2301569 - RNA, 19 nt, Artificial Sequence
  Description of Artificial Sequence: Synthetic oligonucleotide
auguuuccauaggauuaaa

SEQ ID NO: 2301570 - RNA, 19 nt, Artificial Sequence
  Description of Artificial Sequence: Synthetic oligonucleotide
aguugggguugagcacauc

SEQ ID NO: 2301571 - RNA, 19 nt, Artificial Sequence
  Description of Artificial Sequence: Synthetic oligonucleotide
caguaauacuucccugacu

SEQ ID NO: 2301572 - RNA, 19 nt, Artificial Sequence
  Description of Artificial Sequence: Synthetic oligonucleotide
ggaaaacuccaacacgauu

SEQ ID NO: 2301573 - RNA, 19 nt, Artificial Sequence
  Description of Artificial Sequence: Synthetic oligonucleotide
agacugucauuggcuguga

SEQ ID NO: 2301574 - RNA, 19 nt, Artificial Sequence
  Description of Artificial Sequence: Synthetic oligonucleotide
cacgucuacuucccaguaa

SEQ ID NO: 2301575 - RNA, 19 nt, Artificial Sequence
  Description of Artificial Sequence: Synthetic oligonucleotide
cagaugcccaaaacaggua

SEQ ID NO: 2301576 - RNA, 19 nt, Artificial Sequence
  Description of Artificial Sequence: Synthetic oligonucleotide
cagggcagaugcccucuuc

SEQ ID NO: 2301577 - RNA, 19 nt, Artificial Sequence
  Description of Artificial Sequence: Synthetic oligonucleotide
guagacucuccacuauguu

SEQ ID NO: 2301578 - RNA, 19 nt, Artificial Sequence
  Description of Artificial Sequence: Synthetic oligonucleotide
cagaagagcugaaguuucu

SEQ ID NO: 2301579 - RNA, 19 nt, Artificial Sequence
  Description of Artificial Sequence: Synthetic oligonucleotide
agaacugauugaggccauu

SEQ ID NO: 2301580 - RNA, 19 nt, Artificial Sequence
  Description of Artificial Sequence: Synthetic oligonucleotide
ccaagacacuggcauugug

SEQ ID NO: 2301581 - RNA, 19 nt, Artificial Sequence
  Description of Artificial Sequence: Synthetic oligonucleotide
ggaggaugagucagagaga

SEQ ID NO: 2301582 - RNA, 19 nt, Artificial Sequence
  Description of Artificial Sequence: Synthetic oligonucleotide
agggugguccacagacugu

SEQ ID NO: 2301583 - RNA, 19 nt, Artificial Sequence
  Description of Artificial Sequence: Synthetic oligonucleotide
gagggccaagacacuggca

SEQ ID NO: 2301584 - RNA, 19 nt, Artificial Sequence
  Description of Artificial Sequence: Synthetic oligonucleotide
gcauugugggugacagagc

SEQ ID NO: 2301585 - RNA, 19 nt, Artificial Sequence
  Description of Artificial Sequence: Synthetic oligonucleotide
cacgauugggaggaugagu

SEQ ID NO: 2301586 - RNA, 19 nt, Artificial Sequence
  Description of Artificial Sequence: Synthetic oligonucleotide
cuucccugacuggaaagcu

SEQ ID NO: 2301587 - RNA, 19 nt, Artificial Sequence
  Description of Artificial Sequence: Synthetic oligonucleotide
uuccaccuuugagguccag

SEQ ID NO: 2301588 - RNA, 19 nt, Artificial Sequence
  Description of Artificial Sequence: Synthetic oligonucleotide
cacucuacaaaggcauuau

SEQ ID NO: 2301589 - RNA, 19 nt, Artificial Sequence
  Description of Artificial Sequence: Synthetic oligonucleotide
gugggugacagagcacucu

SEQ ID NO: 2301590 - RNA, 19 nt, Artificial Sequence
  Description of Artificial Sequence: Synthetic oligonucleotide
cgauuaggucucagaugcc

SEQ ID NO: 2301591 - RNA, 19 nt, Artificial Sequence
  Description of Artificial Sequence: Synthetic oligonucleotide
ccacagacugucauuggcu

SEQ ID NO: 2301592 - RNA, 19 nt, Artificial Sequence
  Description of Artificial Sequence: Synthetic oligonucleotide
gccagauggccaccauguc

SEQ ID NO: 2301593 - RNA, 19 nt, Artificial Sequence
  Description of Artificial Sequence: Synthetic oligonucleotide
gcaucacuucuagacacgu

SEQ ID NO: 2301594 - RNA, 19 nt, Artificial Sequence
  Description of Artificial Sequence: Synthetic oligonucleotide
ggacacccuaauggaucgc

SEQ ID NO: 2301595 - RNA, 19 nt, Artificial Sequence
  Description of Artificial Sequence: Synthetic oligonucleotide
ggucugacuccugacacuu

SEQ ID NO: 2301596 - RNA, 19 nt, Artificial Sequence
  Description of Artificial Sequence: Synthetic oligonucleotide
acaugccgauuaggucuca

SEQ ID NO: 2301597 - RNA, 19 nt, Artificial Sequence
  Description of Artificial Sequence: Synthetic oligonucleotide
cagaacugauugaggccau

SEQ ID NO: 2301598 - RNA, 19 nt, Artificial Sequence
  Description of Artificial Sequence: Synthetic oligonucleotide
ggauauccaaggacacccu

SEQ ID NO: 2301599 - RNA, 19 nt, Artificial Sequence
  Description of Artificial Sequence: Synthetic oligonucleotide
cacuggcauugugggugac

SEQ ID NO: 2301600 - RNA, 19 nt, Artificial Sequence
  Description of Artificial Sequence: Synthetic oligonucleotide
cccuaauggaucgcucaca

SEQ ID NO: 2301601 - RNA, 19 nt, Artificial Sequence
  Description of Artificial Sequence: Synthetic oligonucleotide
cgauugggaggaugaguca

SEQ ID NO: 2301602 - RNA, 19 nt, Artificial Sequence
  Description of Artificial Sequence: Synthetic oligonucleotide
ccccaguagacucuccacu

SEQ ID NO: 2301603 - RNA, 19 nt, Artificial Sequence
  Description of Artificial Sequence: Synthetic oligonucleotide
ccuaggagccaggcaucac

SEQ ID NO: 2301604 - RNA, 19 nt, Artificial Sequence
  Description of Artificial Sequence: Synthetic oligonucleotide
gccagccagauggccacca

SEQ ID NO: 2301605 - RNA, 19 nt, Artificial Sequence
  Description of Artificial Sequence: Synthetic oligonucleotide
ccaugguuggaaacaucau

SEQ ID NO: 2301606 - RNA, 19 nt, Artificial Sequence
  Description of Artificial Sequence: Synthetic oligonucleotide
ggagggugguccacagacu

SEQ ID NO: 2301607 - RNA, 19 nt, Artificial Sequence
  Description of Artificial Sequence: Synthetic oligonucleotide
gccauuuguugcugugauu

SEQ ID NO: 2301608 - RNA, 19 nt, Artificial Sequence
  Description of Artificial Sequence: Synthetic oligonucleotide
cccugacuggaaagcugga

SEQ ID NO: 2301609 - RNA, 19 nt, Artificial Sequence
  Description of Artificial Sequence: Synthetic oligonucleotide
gggcagaugcccucuucuu

SEQ ID NO: 2301610 - RNA, 19 nt, Artificial Sequence
  Description of Artificial Sequence: Synthetic oligonucleotide
ccaguagacucuccacuau

SEQ ID NO: 2301611 - RNA, 19 nt, Artificial Sequence
  Description of Artificial Sequence: Synthetic oligonucleotide
gggccaagacacuggcauu

SEQ ID NO: 2301612 - RNA, 19 nt, Artificial Sequence
  Description of Artificial Sequence: Synthetic oligonucleotide
gccaagacacuggcauugu

SEQ ID NO: 2301613 - RNA, 19 nt, Artificial Sequence
  Description of Artificial Sequence: Synthetic oligonucleotide
cgucuacuucccaguaaua

SEQ ID NO: 2301614 - RNA, 19 nt, Artificial Sequence
  Description of Artificial Sequence: Synthetic oligonucleotide
ggugaggguuuaggagggu

SEQ ID NO: 2301615 - RNA, 19 nt, Artificial Sequence
  Description of Artificial Sequence: Synthetic oligonucleotide
ggggcacugugcagauaua

SEQ ID NO: 2301616 - RNA, 19 nt, Artificial Sequence
  Description of Artificial Sequence: Synthetic oligonucleotide
ccagccagauggccaccau

SEQ ID NO: 2301617 - RNA, 19 nt, Artificial Sequence
  Description of Artificial Sequence: Synthetic oligonucleotide
ccaacacgauugggaggau

SEQ ID NO: 2301618 - RNA, 19 nt, Artificial Sequence
  Description of Artificial Sequence: Synthetic oligonucleotide
ucaaaauccauucuguaca

SEQ ID NO: 2301619 - RNA, 19 nt, Artificial Sequence
  Description of Artificial Sequence: Synthetic oligonucleotide
uauaaugauacauuucccc

SEQ ID NO: 2301620 - RNA, 19 nt, Artificial Sequence
  Description of Artificial Sequence: Synthetic oligonucleotide
uaagcgaagagaaagucag

SEQ ID NO: 2301621 - RNA, 19 nt, Artificial Sequence
  Description of Artificial Sequence: Synthetic oligonucleotide
augaguaauagccuggaac

SEQ ID NO: 2301622 - RNA, 19 nt, Artificial Sequence
  Description of Artificial Sequence: Synthetic oligonucleotide
aucaguuucgcugauaggc

SEQ ID NO: 2301623 - RNA, 19 nt, Artificial Sequence
  Description of Artificial Sequence: Synthetic oligonucleotide
ugcaacacaguucugauca

SEQ ID NO: 2301624 - RNA, 19 nt, Artificial Sequence
  Description of Artificial Sequence: Synthetic oligonucleotide
uuguuguuuauaaugauac

SEQ ID NO: 2301625 - RNA, 19 nt, Artificial Sequence
  Description of Artificial Sequence: Synthetic oligonucleotide
aaagcaggcucucagcugg

SEQ ID NO: 2301626 - RNA, 19 nt, Artificial Sequence
  Description of Artificial Sequence: Synthetic oligonucleotide
aaucagauucucuucuccg

SEQ ID NO: 2301627 - RNA, 19 nt, Artificial Sequence
  Description of Artificial Sequence: Synthetic oligonucleotide
aaugauacauuuccccauc

SEQ ID NO: 2301628 - RNA, 19 nt, Artificial Sequence
  Description of Artificial Sequence: Synthetic oligonucleotide
aaauccauucuguacaggu

SEQ ID NO: 2301629 - RNA, 19 nt, Artificial Sequence
  Description of Artificial Sequence: Synthetic oligonucleotide
auugaugagauaauggagg

SEQ ID NO: 2301630 - RNA, 19 nt, Artificial Sequence
  Description of Artificial Sequence: Synthetic oligonucleotide
ucuaacaggguuuugcaca

SEQ ID NO: 2301631 - RNA, 19 nt, Artificial Sequence
  Description of Artificial Sequence: Synthetic oligonucleotide
aaugaagaagaguuugggu

SEQ ID NO: 2301632 - RNA, 19 nt, Artificial Sequence
  Description of Artificial Sequence: Synthetic oligonucleotide
uucuuguuguuuauaauga

SEQ ID NO: 2301633 - RNA, 19 nt, Artificial Sequence
  Description of Artificial Sequence: Synthetic oligonucleotide
aaaguagagcucuuuggug

SEQ ID NO: 2301634 - RNA, 19 nt, Artificial Sequence
  Description of Artificial Sequence: Synthetic oligonucleotide
uuauaaugauacauuuccc

SEQ ID NO: 2301635 - RNA, 19 nt, Artificial Sequence
  Description of Artificial Sequence: Synthetic oligonucleotide
auaccugucacuuugucga

SEQ ID NO: 2301636 - RNA, 19 nt, Artificial Sequence
  Description of Artificial Sequence: Synthetic oligonucleotide
uucggaagcacuugaagag

SEQ ID NO: 2301637 - RNA, 19 nt, Artificial Sequence
  Description of Artificial Sequence: Synthetic oligonucleotide
agacaaccacaucaaaacc

SEQ ID NO: 2301638 - RNA, 19 nt, Artificial Sequence
  Description of Artificial Sequence: Synthetic oligonucleotide
uuuggguuucucuaacagg

SEQ ID NO: 2301639 - RNA, 19 nt, Artificial Sequence
  Description of Artificial Sequence: Synthetic oligonucleotide
ugcaucuucgcacaagagc

SEQ ID NO: 2301640 - RNA, 19 nt, Artificial Sequence
  Description of Artificial Sequence: Synthetic oligonucleotide
auaaugauacauuucccca

SEQ ID NO: 2301641 - RNA, 19 nt, Artificial Sequence
  Description of Artificial Sequence: Synthetic oligonucleotide
aagagcagucauuguagac

SEQ ID NO: 2301642 - RNA, 19 nt, Artificial Sequence
  Description of Artificial Sequence: Synthetic oligonucleotide
uguuuauaaugauacauuu

SEQ ID NO: 2301643 - RNA, 19 nt, Artificial Sequence
  Description of Artificial Sequence: Synthetic oligonucleotide
aggucuugcaucuucgcac

SEQ ID NO: 2301644 - RNA, 19 nt, Artificial Sequence
  Description of Artificial Sequence: Synthetic oligonucleotide
aucaacuccgucuucacug

SEQ ID NO: 2301645 - RNA, 19 nt, Artificial Sequence
  Description of Artificial Sequence: Synthetic oligonucleotide
caaaccaggagccuuuucc

SEQ ID NO: 2301646 - RNA, 19 nt, Artificial Sequence
  Description of Artificial Sequence: Synthetic oligonucleotide
gauaauggaggagcggucg

SEQ ID NO: 2301647 - RNA, 19 nt, Artificial Sequence
  Description of Artificial Sequence: Synthetic oligonucleotide
uuagcaucaguuucgcuga

SEQ ID NO: 2301648 - RNA, 19 nt, Artificial Sequence
  Description of Artificial Sequence: Synthetic oligonucleotide
aauagccuggaacugugga

SEQ ID NO: 2301649 - RNA, 19 nt, Artificial Sequence
  Description of Artificial Sequence: Synthetic oligonucleotide
uucuucucguugaagcagg

SEQ ID NO: 2301650 - RNA, 19 nt, Artificial Sequence
  Description of Artificial Sequence: Synthetic oligonucleotide
auacauggguaucugcuuc

SEQ ID NO: 2301651 - RNA, 19 nt, Artificial Sequence
  Description of Artificial Sequence: Synthetic oligonucleotide
cauaccugucacuuugucg

SEQ ID NO: 2301652 - RNA, 19 nt, Artificial Sequence
  Description of Artificial Sequence: Synthetic oligonucleotide
gucccgguggucuugaugg

SEQ ID NO: 2301653 - RNA, 19 nt, Artificial Sequence
  Description of Artificial Sequence: Synthetic oligonucleotide
acugggaucuuguaccggg

SEQ ID NO: 2301654 - RNA, 19 nt, Artificial Sequence
  Description of Artificial Sequence: Synthetic oligonucleotide
aucaucugccauccguucc

SEQ ID NO: 2301655 - RNA, 19 nt, Artificial Sequence
  Description of Artificial Sequence: Synthetic oligonucleotide
cuugauggggcacggaggg

SEQ ID NO: 2301656 - RNA, 19 nt, Artificial Sequence
  Description of Artificial Sequence: Synthetic oligonucleotide
auggagaccauacaugggu

SEQ ID NO: 2301657 - RNA, 19 nt, Artificial Sequence
  Description of Artificial Sequence: Synthetic oligonucleotide
caggucuuugccaugcucg

SEQ ID NO: 2301658 - RNA, 19 nt, Artificial Sequence
  Description of Artificial Sequence: Synthetic oligonucleotide
aauggaggagcggucgggc

SEQ ID NO: 2301659 - RNA, 19 nt, Artificial Sequence
  Description of Artificial Sequence: Synthetic oligonucleotide
ucaguuucgcugauaggcc

SEQ ID NO: 2301660 - RNA, 19 nt, Artificial Sequence
  Description of Artificial Sequence: Synthetic oligonucleotide
gaugucaacggccaaagua

SEQ ID NO: 2301661 - RNA, 19 nt, Artificial Sequence
  Description of Artificial Sequence: Synthetic oligonucleotide
gagaauugaugagauaaug

SEQ ID NO: 2301662 - RNA, 19 nt, Artificial Sequence
  Description of Artificial Sequence: Synthetic oligonucleotide
aguaagcgaagagaaaguc

SEQ ID NO: 2301663 - RNA, 19 nt, Artificial Sequence
  Description of Artificial Sequence: Synthetic oligonucleotide
aaaccaggagccuuuuccu

SEQ ID NO: 2301664 - RNA, 19 nt, Artificial Sequence
  Description of Artificial Sequence: Synthetic oligonucleotide
ucagauucucuucuccgug

SEQ ID NO: 2301665 - RNA, 19 nt, Artificial Sequence
  Description of Artificial Sequence: Synthetic oligonucleotide
uucucuaacaggguuuugc

SEQ ID NO: 2301666 - RNA, 19 nt, Artificial Sequence
  Description of Artificial Sequence: Synthetic oligonucleotide
cacaguucugaucaucugc

SEQ ID NO: 2301667 - RNA, 19 nt, Artificial Sequence
  Description of Artificial Sequence: Synthetic oligonucleotide
ucuuugucugucccguucc

SEQ ID NO: 2301668 - RNA, 19 nt, Artificial Sequence
  Description of Artificial Sequence: Synthetic oligonucleotide
uuagcaucaacuccgucuu

SEQ ID NO: 2301669 - RNA, 19 nt, Artificial Sequence
  Description of Artificial Sequence: Synthetic oligonucleotide
augucaacggccaaaguag

SEQ ID NO: 2301670 - RNA, 19 nt, Artificial Sequence
  Description of Artificial Sequence: Synthetic oligonucleotide
ggaguaagcgaagagaaag

SEQ ID NO: 2301671 - RNA, 19 nt, Artificial Sequence
  Description of Artificial Sequence: Synthetic oligonucleotide
agagaaagucagcuuccac

SEQ ID NO: 2301672 - RNA, 19 nt, Artificial Sequence
  Description of Artificial Sequence: Synthetic oligonucleotide
ugaagaagaguuuggguuu

SEQ ID NO: 2301673 - RNA, 19 nt, Artificial Sequence
  Description of Artificial Sequence: Synthetic oligonucleotide
gcauggagaccauacaugg

SEQ ID NO: 2301674 - RNA, 19 nt, Artificial Sequence
  Description of Artificial Sequence: Synthetic oligonucleotide
ugcaucuuugucugucccg

SEQ ID NO: 2301675 - RNA, 19 nt, Artificial Sequence
  Description of Artificial Sequence: Synthetic oligonucleotide
uaaugauacauuuccccau

SEQ ID NO: 2301676 - RNA, 19 nt, Artificial Sequence
  Description of Artificial Sequence: Synthetic oligonucleotide
ucaacggccaaaguagagc

SEQ ID NO: 2301677 - RNA, 19 nt, Artificial Sequence
  Description of Artificial Sequence: Synthetic oligonucleotide
caaaauccauucuguacag

SEQ ID NO: 2301678 - RNA, 19 nt, Artificial Sequence
  Description of Artificial Sequence: Synthetic oligonucleotide
gggaucaucacacugggac

SEQ ID NO: 2301679 - RNA, 19 nt, Artificial Sequence
  Description of Artificial Sequence: Synthetic oligonucleotide
auagccuggaacuguggag

SEQ ID NO: 2301680 - RNA, 19 nt, Artificial Sequence
  Description of Artificial Sequence: Synthetic oligonucleotide
uccagagaauugaugagau

SEQ ID NO: 2301681 - RNA, 19 nt, Artificial Sequence
  Description of Artificial Sequence: Synthetic oligonucleotide
cuuuggugagcauggagac

SEQ ID NO: 2301682 - RNA, 19 nt, Artificial Sequence
  Description of Artificial Sequence: Synthetic oligonucleotide
uucuguacaggugcguggg

SEQ ID NO: 2301683 - RNA, 19 nt, Artificial Sequence
  Description of Artificial Sequence: Synthetic oligonucleotide
ugagauaauggaggagcgg

SEQ ID NO: 2301684 - RNA, 19 nt, Artificial Sequence
  Description of Artificial Sequence: Synthetic oligonucleotide
uuguagacaaccacaucaa

SEQ ID NO: 2301685 - RNA, 19 nt, Artificial Sequence
  Description of Artificial Sequence: Synthetic oligonucleotide
agagcagucauuguagaca

SEQ ID NO: 2301686 - RNA, 19 nt, Artificial Sequence
  Description of Artificial Sequence: Synthetic oligonucleotide
gaagcacuugaagagggcc

SEQ ID NO: 2301687 - RNA, 19 nt, Artificial Sequence
  Description of Artificial Sequence: Synthetic oligonucleotide
auaauggaggagcggucgg

SEQ ID NO: 2301688 - RNA, 19 nt, Artificial Sequence
  Description of Artificial Sequence: Synthetic oligonucleotide
uaauagccuggaacugugg

SEQ ID NO: 2301689 - RNA, 19 nt, Artificial Sequence
  Description of Artificial Sequence: Synthetic oligonucleotide
uugcacaucuuucccauaa

SEQ ID NO: 2301690 - RNA, 19 nt, Artificial Sequence
  Description of Artificial Sequence: Synthetic oligonucleotide
uuccagagaauugaugaga

SEQ ID NO: 2301691 - RNA, 19 nt, Artificial Sequence
  Description of Artificial Sequence: Synthetic oligonucleotide
ugcucguccaggauggaac

SEQ ID NO: 2301692 - RNA, 19 nt, Artificial Sequence
  Description of Artificial Sequence: Synthetic oligonucleotide
ugagcauggagaccauaca

SEQ ID NO: 2301693 - RNA, 19 nt, Artificial Sequence
  Description of Artificial Sequence: Synthetic oligonucleotide
aucacacugggacucgaag

SEQ ID NO: 2301694 - RNA, 19 nt, Artificial Sequence
  Description of Artificial Sequence: Synthetic oligonucleotide
uucuaagcaggucuugcau

SEQ ID NO: 2301695 - RNA, 19 nt, Artificial Sequence
  Description of Artificial Sequence: Synthetic oligonucleotide
cuucggaagcacuugaaga

SEQ ID NO: 2301696 - RNA, 19 nt, Artificial Sequence
  Description of Artificial Sequence: Synthetic oligonucleotide
aauccauucuguacaggug

SEQ ID NO: 2301697 - RNA, 19 nt, Artificial Sequence
  Description of Artificial Sequence: Synthetic oligonucleotide
ucggaagcacuugaagagg

SEQ ID NO: 2301698 - RNA, 19 nt, Artificial Sequence
  Description of Artificial Sequence: Synthetic oligonucleotide
guccauaccugucacuuug

SEQ ID NO: 2301699 - RNA, 19 nt, Artificial Sequence
  Description of Artificial Sequence: Synthetic oligonucleotide
ucuuguuguuuauaaugau

SEQ ID NO: 2301700 - RNA, 19 nt, Artificial Sequence
  Description of Artificial Sequence: Synthetic oligonucleotide
guugcugugguccuccuca

SEQ ID NO: 2301701 - RNA, 19 nt, Artificial Sequence
  Description of Artificial Sequence: Synthetic oligonucleotide
agcgaagagaaagucagcu

SEQ ID NO: 2301702 - RNA, 19 nt, Artificial Sequence
  Description of Artificial Sequence: Synthetic oligonucleotide
ugaagagggccucugcauc

SEQ ID NO: 2301703 - RNA, 19 nt, Artificial Sequence
  Description of Artificial Sequence: Synthetic oligonucleotide
aaccaggagccuuuuccug

SEQ ID NO: 2301704 - RNA, 19 nt, Artificial Sequence
  Description of Artificial Sequence: Synthetic oligonucleotide
guuuauaaugauacauuuc

SEQ ID NO: 2301705 - RNA, 19 nt, Artificial Sequence
  Description of Artificial Sequence: Synthetic oligonucleotide
ucgaaguucuuguuguuua

SEQ ID NO: 2301706 - RNA, 19 nt, Artificial Sequence
  Description of Artificial Sequence: Synthetic oligonucleotide
ucuucucguugaagcaggg

SEQ ID NO: 2301707 - RNA, 19 nt, Artificial Sequence
  Description of Artificial Sequence: Synthetic oligonucleotide
uuccacugggaucuuguac

SEQ ID NO: 2301708 - RNA, 19 nt, Artificial Sequence
  Description of Artificial Sequence: Synthetic oligonucleotide
gaccccgucaucgagcucc

SEQ ID NO: 2301709 - RNA, 19 nt, Artificial Sequence
  Description of Artificial Sequence: Synthetic oligonucleotide
aucagauucucuucuccgu

SEQ ID NO: 2301710 - RNA, 19 nt, Artificial Sequence
  Description of Artificial Sequence: Synthetic oligonucleotide
uguagacaaccacaucaaa

SEQ ID NO: 2301711 - RNA, 19 nt, Artificial Sequence
  Description of Artificial Sequence: Synthetic oligonucleotide
cauggagaccauacauggg

SEQ ID NO: 2301712 - RNA, 19 nt, Artificial Sequence
  Description of Artificial Sequence: Synthetic oligonucleotide
ucucguugaagcagggauc

SEQ ID NO: 2301713 - RNA, 19 nt, Artificial Sequence
  Description of Artificial Sequence: Synthetic oligonucleotide
augagauaauggaggagcg

SEQ ID NO: 2301714 - RNA, 19 nt, Artificial Sequence
  Description of Artificial Sequence: Synthetic oligonucleotide
ucucaaaauccauucugua

SEQ ID NO: 2301715 - RNA, 19 nt, Artificial Sequence
  Description of Artificial Sequence: Synthetic oligonucleotide
ugucguucacucuggucag

SEQ ID NO: 2301716 - RNA, 19 nt, Artificial Sequence
  Description of Artificial Sequence: Synthetic oligonucleotide
ugaugagauaauggaggag

SEQ ID NO: 2301717 - RNA, 19 nt, Artificial Sequence
  Description of Artificial Sequence: Synthetic oligonucleotide
agcggucgggcuuagcauc

SEQ ID NO: 2301718 - RNA, 19 nt, Artificial Sequence
  Description of Artificial Sequence: Synthetic oligonucleotide
aagcgaagagaaagucagc

SEQ ID NO: 2301719 - RNA, 19 nt, Artificial Sequence
  Description of Artificial Sequence: Synthetic oligonucleotide
uucgcugauaggcccggag

SEQ ID NO: 2301720 - RNA, 19 nt, Artificial Sequence
  Description of Artificial Sequence: Synthetic oligonucleotide
ugaucaucugccauccguu

SEQ ID NO: 2301721 - RNA, 19 nt, Artificial Sequence
  Description of Artificial Sequence: Synthetic oligonucleotide
aggguuuugcacaucuuuc

SEQ ID NO: 2301722 - RNA, 19 nt, Artificial Sequence
  Description of Artificial Sequence: Synthetic oligonucleotide
ugucaacggccaaaguaga

SEQ ID NO: 2301723 - RNA, 19 nt, Artificial Sequence
  Description of Artificial Sequence: Synthetic oligonucleotide
uccgucuucacuggaagga

SEQ ID NO: 2301724 - RNA, 19 nt, Artificial Sequence
  Description of Artificial Sequence: Synthetic oligonucleotide
cuuguuguuuauaaugaua

SEQ ID NO: 2301725 - RNA, 19 nt, Artificial Sequence
  Description of Artificial Sequence: Synthetic oligonucleotide
aguucugaucaucugccau

SEQ ID NO: 2301726 - RNA, 19 nt, Artificial Sequence
  Description of Artificial Sequence: Synthetic oligonucleotide
uuugucugucccguuccgg

SEQ ID NO: 2301727 - RNA, 19 nt, Artificial Sequence
  Description of Artificial Sequence: Synthetic oligonucleotide
uugcaucuucgcacaagag

SEQ ID NO: 2301728 - RNA, 19 nt, Artificial Sequence
  Description of Artificial Sequence: Synthetic oligonucleotide
uaauggaggagcggucggg

SEQ ID NO: 2301729 - RNA, 19 nt, Artificial Sequence
  Description of Artificial Sequence: Synthetic oligonucleotide
ggaacuguggaguaagcga

SEQ ID NO: 2301730 - RNA, 19 nt, Artificial Sequence
  Description of Artificial Sequence: Synthetic oligonucleotide
caguuucgcugauaggccc

SEQ ID NO: 2301731 - RNA, 19 nt, Artificial Sequence
  Description of Artificial Sequence: Synthetic oligonucleotide
guuuugcacaucuuuccca

SEQ ID NO: 2301732 - RNA, 19 nt, Artificial Sequence
  Description of Artificial Sequence: Synthetic oligonucleotide
gacucgaagugccuggcca

SEQ ID NO: 2301733 - RNA, 19 nt, Artificial Sequence
  Description of Artificial Sequence: Synthetic oligonucleotide
uacauuuccccaucuucuc

SEQ ID NO: 2301734 - RNA, 19 nt, Artificial Sequence
  Description of Artificial Sequence: Synthetic oligonucleotide
uugaagagggccucugcau

SEQ ID NO: 2301735 - RNA, 19 nt, Artificial Sequence
  Description of Artificial Sequence: Synthetic oligonucleotide
guagacaaccacaucaaaa

SEQ ID NO: 2301736 - RNA, 19 nt, Artificial Sequence
  Description of Artificial Sequence: Synthetic oligonucleotide
aguuuggguuucucuaaca

SEQ ID NO: 2301737 - RNA, 19 nt, Artificial Sequence
  Description of Artificial Sequence: Synthetic oligonucleotide
uacauggguaucugcuucu

SEQ ID NO: 2301738 - RNA, 19 nt, Artificial Sequence
  Description of Artificial Sequence: Synthetic oligonucleotide
ucuugcaucuucgcacaag

SEQ ID NO: 2301739 - RNA, 19 nt, Artificial Sequence
  Description of Artificial Sequence: Synthetic oligonucleotide
ucgggcuuagcaucaacuc

SEQ ID NO: 2301740 - RNA, 19 nt, Artificial Sequence
  Description of Artificial Sequence: Synthetic oligonucleotide
gggcuuagcaucaacuccg

SEQ ID NO: 2301741 - RNA, 19 nt, Artificial Sequence
  Description of Artificial Sequence: Synthetic oligonucleotide
ucagcuggaagggagggau

SEQ ID NO: 2301742 - RNA, 19 nt, Artificial Sequence
  Description of Artificial Sequence: Synthetic oligonucleotide
ggguuuugcacaucuuucc

SEQ ID NO: 2301743 - RNA, 19 nt, Artificial Sequence
  Description of Artificial Sequence: Synthetic oligonucleotide
gaguuuggguuucucuaac

SEQ ID NO: 2301744 - RNA, 19 nt, Artificial Sequence
  Description of Artificial Sequence: Synthetic oligonucleotide
agggccugcacaaaccagg

SEQ ID NO: 2301745 - RNA, 19 nt, Artificial Sequence
  Description of Artificial Sequence: Synthetic oligonucleotide
ugccuggccacccugucgu

SEQ ID NO: 2301746 - RNA, 19 nt, Artificial Sequence
  Description of Artificial Sequence: Synthetic oligonucleotide
gaacuguggaguaagcgaa

SEQ ID NO: 2301747 - RNA, 19 nt, Artificial Sequence
  Description of Artificial Sequence: Synthetic oligonucleotide
acacugggacucgaagugc

SEQ ID NO: 2301748 - RNA, 19 nt, Artificial Sequence
  Description of Artificial Sequence: Synthetic oligonucleotide
agcauggagaccauacaug

SEQ ID NO: 2301749 - RNA, 19 nt, Artificial Sequence
  Description of Artificial Sequence: Synthetic oligonucleotide
ugaguugcugugguccucc

SEQ ID NO: 2301750 - RNA, 19 nt, Artificial Sequence
  Description of Artificial Sequence: Synthetic oligonucleotide
uuccggacguccauaccug

SEQ ID NO: 2301751 - RNA, 19 nt, Artificial Sequence
  Description of Artificial Sequence: Synthetic oligonucleotide
cacugggacucgaagugcc

SEQ ID NO: 2301752 - RNA, 19 nt, Artificial Sequence
  Description of Artificial Sequence: Synthetic oligonucleotide
guaagcgaagagaaaguca

SEQ ID NO: 2301753 - RNA, 19 nt, Artificial Sequence
  Description of Artificial Sequence: Synthetic oligonucleotide
augauacauuuccccaucu

SEQ ID NO: 2301754 - RNA, 19 nt, Artificial Sequence
  Description of Artificial Sequence: Synthetic oligonucleotide
cacuuugucgaaguucuug

SEQ ID NO: 2301755 - RNA, 19 nt, Artificial Sequence
  Description of Artificial Sequence: Synthetic oligonucleotide
agagggccugcacaaacca

SEQ ID NO: 2301756 - RNA, 19 nt, Artificial Sequence
  Description of Artificial Sequence: Synthetic oligonucleotide
ucgcugauaggcccggagu

SEQ ID NO: 2301757 - RNA, 19 nt, Artificial Sequence
  Description of Artificial Sequence: Synthetic oligonucleotide
uggaguaagcgaagagaaa

SEQ ID NO: 2301758 - RNA, 19 nt, Artificial Sequence
  Description of Artificial Sequence: Synthetic oligonucleotide
gagauaauggaggagcggu

SEQ ID NO: 2301759 - RNA, 19 nt, Artificial Sequence
  Description of Artificial Sequence: Synthetic oligonucleotide
acaaaccaggagccuuuuc

SEQ ID NO: 2301760 - RNA, 19 nt, Artificial Sequence
  Description of Artificial Sequence: Synthetic oligonucleotide
agauaauggaggagcgguc

SEQ ID NO: 2301761 - RNA, 19 nt, Artificial Sequence
  Description of Artificial Sequence: Synthetic oligonucleotide
cacccugucguucacucug

SEQ ID NO: 2301762 - RNA, 19 nt, Artificial Sequence
  Description of Artificial Sequence: Synthetic oligonucleotide
ucuucgcacaagagcaguc

SEQ ID NO: 2301763 - RNA, 19 nt, Artificial Sequence
  Description of Artificial Sequence: Synthetic oligonucleotide
gaacagagggccugcacaa

SEQ ID NO: 2301764 - RNA, 19 nt, Artificial Sequence
  Description of Artificial Sequence: Synthetic oligonucleotide
aagcacuugaagagggccu

SEQ ID NO: 2301765 - RNA, 19 nt, Artificial Sequence
  Description of Artificial Sequence: Synthetic oligonucleotide
gaucaucugccauccguuc

SEQ ID NO: 2301766 - RNA, 19 nt, Artificial Sequence
  Description of Artificial Sequence: Synthetic oligonucleotide
aucaaaacccaggcuucgg

SEQ ID NO: 2301767 - RNA, 19 nt, Artificial Sequence
  Description of Artificial Sequence: Synthetic oligonucleotide
acggccaaaguagagcucu

SEQ ID NO: 2301768 - RNA, 19 nt, Artificial Sequence
  Description of Artificial Sequence: Synthetic oligonucleotide
aacuguggaguaagcgaag

SEQ ID NO: 2301769 - RNA, 19 nt, Artificial Sequence
  Description of Artificial Sequence: Synthetic oligonucleotide
acgcaggcgaagcaggcug

SEQ ID NO: 2301770 - RNA, 19 nt, Artificial Sequence
  Description of Artificial Sequence: Synthetic oligonucleotide
cuuugucugucccguuccg

SEQ ID NO: 2301771 - RNA, 19 nt, Artificial Sequence
  Description of Artificial Sequence: Synthetic oligonucleotide
uuuuccuggguuccuccau

SEQ ID NO: 2301772 - RNA, 19 nt, Artificial Sequence
  Description of Artificial Sequence: Synthetic oligonucleotide
agaccauacauggguaucu

SEQ ID NO: 2301773 - RNA, 19 nt, Artificial Sequence
  Description of Artificial Sequence: Synthetic oligonucleotide
gugagcauggagaccauac

SEQ ID NO: 2301774 - RNA, 19 nt, Artificial Sequence
  Description of Artificial Sequence: Synthetic oligonucleotide
agcaucaacuccgucuuca

SEQ ID NO: 2301775 - RNA, 19 nt, Artificial Sequence
  Description of Artificial Sequence: Synthetic oligonucleotide
uucgcacaagagcagucau

SEQ ID NO: 2301776 - RNA, 19 nt, Artificial Sequence
  Description of Artificial Sequence: Synthetic oligonucleotide
aggcgaagcaggcugaguu

SEQ ID NO: 2301777 - RNA, 19 nt, Artificial Sequence
  Description of Artificial Sequence: Synthetic oligonucleotide
cuccgucuucacuggaagg

SEQ ID NO: 2301778 - RNA, 19 nt, Artificial Sequence
  Description of Artificial Sequence: Synthetic oligonucleotide
gcaucuucgcacaagagca

SEQ ID NO: 2301779 - RNA, 19 nt, Artificial Sequence
  Description of Artificial Sequence: Synthetic oligonucleotide
aguuucgcugauaggcccg

SEQ ID NO: 2301780 - RNA, 19 nt, Artificial Sequence
  Description of Artificial Sequence: Synthetic oligonucleotide
ggguaucugcuucuucucg

SEQ ID NO: 2301781 - RNA, 19 nt, Artificial Sequence
  Description of Artificial Sequence: Synthetic oligonucleotide
cuggguuccuccaugagua

SEQ ID NO: 2301782 - RNA, 19 nt, Artificial Sequence
  Description of Artificial Sequence: Synthetic oligonucleotide
caucuucgcacaagagcag

SEQ ID NO: 2301783 - RNA, 19 nt, Artificial Sequence
  Description of Artificial Sequence: Synthetic oligonucleotide
gggguuagcaucaguuucg

SEQ ID NO: 2301784 - RNA, 19 nt, Artificial Sequence
  Description of Artificial Sequence: Synthetic oligonucleotide
cuguggaguaagcgaagag

SEQ ID NO: 2301785 - RNA, 19 nt, Artificial Sequence
  Description of Artificial Sequence: Synthetic oligonucleotide
uggguuucucuaacagggu

SEQ ID NO: 2301786 - RNA, 19 nt, Artificial Sequence
  Description of Artificial Sequence: Synthetic oligonucleotide
cugggaucuuguaccgggg

SEQ ID NO: 2301787 - RNA, 19 nt, Artificial Sequence
  Description of Artificial Sequence: Synthetic oligonucleotide
cugauaggcccggagucgg

SEQ ID NO: 2301788 - RNA, 19 nt, Artificial Sequence
  Description of Artificial Sequence: Synthetic oligonucleotide
gcuucggaagcacuugaag

SEQ ID NO: 2301789 - RNA, 19 nt, Artificial Sequence
  Description of Artificial Sequence: Synthetic oligonucleotide
ucugucccguuccggacgu

SEQ ID NO: 2301790 - RNA, 19 nt, Artificial Sequence
  Description of Artificial Sequence: Synthetic oligonucleotide
uggaccccgucaucgagcu

SEQ ID NO: 2301791 - RNA, 19 nt, Artificial Sequence
  Description of Artificial Sequence: Synthetic oligonucleotide
gaagugccuggccacccug

SEQ ID NO: 2301792 - RNA, 19 nt, Artificial Sequence
  Description of Artificial Sequence: Synthetic oligonucleotide
cuggaccccgucaucgagc

SEQ ID NO: 2301793 - RNA, 19 nt, Artificial Sequence
  Description of Artificial Sequence: Synthetic oligonucleotide
cuucacuggaaggauccac

SEQ ID NO: 2301794 - RNA, 19 nt, Artificial Sequence
  Description of Artificial Sequence: Synthetic oligonucleotide
aacggccaaaguagagcuc

SEQ ID NO: 2301795 - RNA, 19 nt, Artificial Sequence
  Description of Artificial Sequence: Synthetic oligonucleotide
agugccuggccacccuguc

SEQ ID NO: 2301796 - RNA, 19 nt, Artificial Sequence
  Description of Artificial Sequence: Synthetic oligonucleotide
gauaggcccggagucggcc

SEQ ID NO: 2301797 - RNA, 19 nt, Artificial Sequence
  Description of Artificial Sequence: Synthetic oligonucleotide
cuaagcaggucuugcaucu

SEQ ID NO: 2301798 - RNA, 19 nt, Artificial Sequence
  Description of Artificial Sequence: Synthetic oligonucleotide
aggucuuugccaugcucgu

SEQ ID NO: 2301799 - RNA, 19 nt, Artificial Sequence
  Description of Artificial Sequence: Synthetic oligonucleotide
guuccggacguccauaccu

SEQ ID NO: 2301800 - RNA, 19 nt, Artificial Sequence
  Description of Artificial Sequence: Synthetic oligonucleotide
cagucauuguagacaacca

SEQ ID NO: 2301801 - RNA, 19 nt, Artificial Sequence
  Description of Artificial Sequence: Synthetic oligonucleotide
gagaccauacauggguauc

SEQ ID NO: 2301802 - RNA, 19 nt, Artificial Sequence
  Description of Artificial Sequence: Synthetic oligonucleotide
ugucugucccguuccggac

SEQ ID NO: 2301803 - RNA, 19 nt, Artificial Sequence
  Description of Artificial Sequence: Synthetic oligonucleotide
ugucccguuccggacgucc

SEQ ID NO: 2301804 - RNA, 19 nt, Artificial Sequence
  Description of Artificial Sequence: Synthetic oligonucleotide
ggcugaguugcuguggucc

SEQ ID NO: 2301805 - RNA, 19 nt, Artificial Sequence
  Description of Artificial Sequence: Synthetic oligonucleotide
ugcgugggcacgcgguccc

SEQ ID NO: 2301806 - RNA, 19 nt, Artificial Sequence
  Description of Artificial Sequence: Synthetic oligonucleotide
ucguucacucuggucagga

SEQ ID NO: 2301807 - RNA, 19 nt, Artificial Sequence
  Description of Artificial Sequence: Synthetic oligonucleotide
gaccauacauggguaucug

SEQ ID NO: 2301808 - RNA, 19 nt, Artificial Sequence
  Description of Artificial Sequence: Synthetic oligonucleotide
gucaacggccaaaguagag

SEQ ID NO: 2301809 - RNA, 19 nt, Artificial Sequence
  Description of Artificial Sequence: Synthetic oligonucleotide
uggucuugauggggcacgg

SEQ ID NO: 2301810 - RNA, 19 nt, Artificial Sequence
  Description of Artificial Sequence: Synthetic oligonucleotide
aggcucucagcuggaaggg

SEQ ID NO: 2301811 - RNA, 19 nt, Artificial Sequence
  Description of Artificial Sequence: Synthetic oligonucleotide
cauuuccccaucuucucaa

SEQ ID NO: 2301812 - RNA, 19 nt, Artificial Sequence
  Description of Artificial Sequence: Synthetic oligonucleotide
cagcucugcaacacaguuc

SEQ ID NO: 2301813 - RNA, 19 nt, Artificial Sequence
  Description of Artificial Sequence: Synthetic oligonucleotide
ugauaggcccggagucggc

SEQ ID NO: 2301814 - RNA, 19 nt, Artificial Sequence
  Description of Artificial Sequence: Synthetic oligonucleotide
caugaucuccaggucuuug

SEQ ID NO: 2301815 - RNA, 19 nt, Artificial Sequence
  Description of Artificial Sequence: Synthetic oligonucleotide
cugcaacacaguucugauc

SEQ ID NO: 2301816 - RNA, 19 nt, Artificial Sequence
  Description of Artificial Sequence: Synthetic oligonucleotide
aucugccauccguuccacg

SEQ ID NO: 2301817 - RNA, 19 nt, Artificial Sequence
  Description of Artificial Sequence: Synthetic oligonucleotide
acucuggucaggaucugca

SEQ ID NO: 2301818 - RNA, 19 nt, Artificial Sequence
  Description of Artificial Sequence: Synthetic oligonucleotide
guuucgcugauaggcccgg

SEQ ID NO: 2301819 - RNA, 19 nt, Artificial Sequence
  Description of Artificial Sequence: Synthetic oligonucleotide
caucgagcuccgucccucg

SEQ ID NO: 2301820 - RNA, 19 nt, Artificial Sequence
  Description of Artificial Sequence: Synthetic oligonucleotide
acguccauaccugucacuu

SEQ ID NO: 2301821 - RNA, 19 nt, Artificial Sequence
  Description of Artificial Sequence: Synthetic oligonucleotide
aggcuucggaagcacuuga

SEQ ID NO: 2301822 - RNA, 19 nt, Artificial Sequence
  Description of Artificial Sequence: Synthetic oligonucleotide
agcuccgucccucggcaug

SEQ ID NO: 2301823 - RNA, 19 nt, Artificial Sequence
  Description of Artificial Sequence: Synthetic oligonucleotide
gcaugccugaaugaagaag

SEQ ID NO: 2301824 - RNA, 19 nt, Artificial Sequence
  Description of Artificial Sequence: Synthetic oligonucleotide
augccugaaugaagaagag

SEQ ID NO: 2301825 - RNA, 19 nt, Artificial Sequence
  Description of Artificial Sequence: Synthetic oligonucleotide
ucaucgagcuccgucccuc

SEQ ID NO: 2301826 - RNA, 19 nt, Artificial Sequence
  Description of Artificial Sequence: Synthetic oligonucleotide
ucgcacaagagcagucauu

SEQ ID NO: 2301827 - RNA, 19 nt, Artificial Sequence
  Description of Artificial Sequence: Synthetic oligonucleotide
ucccgguggucuugauggg

SEQ ID NO: 2301828 - RNA, 19 nt, Artificial Sequence
  Description of Artificial Sequence: Synthetic oligonucleotide
ggagcggucgggcuuagca

SEQ ID NO: 2301829 - RNA, 19 nt, Artificial Sequence
  Description of Artificial Sequence: Synthetic oligonucleotide
ccgucaucgagcuccgucc

SEQ ID NO: 2301830 - RNA, 19 nt, Artificial Sequence
  Description of Artificial Sequence: Synthetic oligonucleotide
gcugauaggcccggagucg

SEQ ID NO: 2301831 - RNA, 19 nt, Artificial Sequence
  Description of Artificial Sequence: Synthetic oligonucleotide
guacaggugcgugggcacg

SEQ ID NO: 2301832 - RNA, 19 nt, Artificial Sequence
  Description of Artificial Sequence: Synthetic oligonucleotide
uacaggugcgugggcacgc

SEQ ID NO: 2301833 - RNA, 19 nt, Artificial Sequence
  Description of Artificial Sequence: Synthetic oligonucleotide
uuugcacaucuuucccaua

SEQ ID NO: 2301834 - RNA, 19 nt, Artificial Sequence
  Description of Artificial Sequence: Synthetic oligonucleotide
gagggccugcacaaaccag

SEQ ID NO: 2301835 - RNA, 19 nt, Artificial Sequence
  Description of Artificial Sequence: Synthetic oligonucleotide
aggcugaguugcugugguc

SEQ ID NO: 2301836 - RNA, 19 nt, Artificial Sequence
  Description of Artificial Sequence: Synthetic oligonucleotide
ugucgaaguucuuguuguu

SEQ ID NO: 2301837 - RNA, 19 nt, Artificial Sequence
  Description of Artificial Sequence: Synthetic oligonucleotide
gaguaagcgaagagaaagu

SEQ ID NO: 2301838 - RNA, 19 nt, Artificial Sequence
  Description of Artificial Sequence: Synthetic oligonucleotide
ugcugugguccuccucaga

SEQ ID NO: 2301839 - RNA, 19 nt, Artificial Sequence
  Description of Artificial Sequence: Synthetic oligonucleotide
ggucuugcaucuucgcaca

SEQ ID NO: 2301840 - RNA, 19 nt, Artificial Sequence
  Description of Artificial Sequence: Synthetic oligonucleotide
auaggcccggagucggccu

SEQ ID NO: 2301841 - RNA, 19 nt, Artificial Sequence
  Description of Artificial Sequence: Synthetic oligonucleotide
uccggacguccauaccugu

SEQ ID NO: 2301842 - RNA, 19 nt, Artificial Sequence
  Description of Artificial Sequence: Synthetic oligonucleotide
cuucgcacaagagcaguca

SEQ ID NO: 2301843 - RNA, 19 nt, Artificial Sequence
  Description of Artificial Sequence: Synthetic oligonucleotide
uaggcccggagucggccug

SEQ ID NO: 2301844 - RNA, 19 nt, Artificial Sequence
  Description of Artificial Sequence: Synthetic oligonucleotide
ccggagucggccuggaccc

SEQ ID NO: 2301845 - RNA, 19 nt, Artificial Sequence
  Description of Artificial Sequence: Synthetic oligonucleotide
ggcgaagcaggcugaguug

SEQ ID NO: 2301846 - RNA, 19 nt, Artificial Sequence
  Description of Artificial Sequence: Synthetic oligonucleotide
cccggagucggccuggacc

SEQ ID NO: 2301847 - RNA, 19 nt, Artificial Sequence
  Description of Artificial Sequence: Synthetic oligonucleotide
agggaugucaacggccaaa

SEQ ID NO: 2301848 - RNA, 19 nt, Artificial Sequence
  Description of Artificial Sequence: Synthetic oligonucleotide
cugggacucgaagugccug

SEQ ID NO: 2301849 - RNA, 19 nt, Artificial Sequence
  Description of Artificial Sequence: Synthetic oligonucleotide
ggauggaacagagggccug

SEQ ID NO: 2301850 - RNA, 19 nt, Artificial Sequence
  Description of Artificial Sequence: Synthetic oligonucleotide
cuaacaggguuuugcacau

SEQ ID NO: 2301851 - RNA, 19 nt, Artificial Sequence
  Description of Artificial Sequence: Synthetic oligonucleotide
cgcacaagagcagucauug

SEQ ID NO: 2301852 - RNA, 19 nt, Artificial Sequence
  Description of Artificial Sequence: Synthetic oligonucleotide
ccacugggaucuuguaccg

SEQ ID NO: 2301853 - RNA, 19 nt, Artificial Sequence
  Description of Artificial Sequence: Synthetic oligonucleotide
cuguacaggugcgugggca

SEQ ID NO: 2301854 - RNA, 19 nt, Artificial Sequence
  Description of Artificial Sequence: Synthetic oligonucleotide
agcagucauuguagacaac

SEQ ID NO: 2301855 - RNA, 19 nt, Artificial Sequence
  Description of Artificial Sequence: Synthetic oligonucleotide
ugggcacgcggucccggug

SEQ ID NO: 2301856 - RNA, 19 nt, Artificial Sequence
  Description of Artificial Sequence: Synthetic oligonucleotide
uagcaucaacuccgucuuc

SEQ ID NO: 2301857 - RNA, 19 nt, Artificial Sequence
  Description of Artificial Sequence: Synthetic oligonucleotide
ccauaaaucagauucucuu

SEQ ID NO: 2301858 - RNA, 19 nt, Artificial Sequence
  Description of Artificial Sequence: Synthetic oligonucleotide
cgggcuuagcaucaacucc

SEQ ID NO: 2301859 - RNA, 19 nt, Artificial Sequence
  Description of Artificial Sequence: Synthetic oligonucleotide
gcgaagcaggcugaguugc

SEQ ID NO: 2301860 - RNA, 19 nt, Artificial Sequence
  Description of Artificial Sequence: Synthetic oligonucleotide
caguucugaucaucugcca

SEQ ID NO: 2301861 - RNA, 19 nt, Artificial Sequence
  Description of Artificial Sequence: Synthetic oligonucleotide
gggcacgcggucccggugg

SEQ ID NO: 2301862 - RNA, 19 nt, Artificial Sequence
  Description of Artificial Sequence: Synthetic oligonucleotide
uggguuccuccaugaguaa

SEQ ID NO: 2301863 - RNA, 19 nt, Artificial Sequence
  Description of Artificial Sequence: Synthetic oligonucleotide
ggagggaugucaacggcca

SEQ ID NO: 2301864 - RNA, 19 nt, Artificial Sequence
  Description of Artificial Sequence: Synthetic oligonucleotide
cucguccaggauggaacag

SEQ ID NO: 2301865 - RNA, 19 nt, Artificial Sequence
  Description of Artificial Sequence: Synthetic oligonucleotide
acaggugcgugggcacgcg

SEQ ID NO: 2301866 - RNA, 19 nt, Artificial Sequence
  Description of Artificial Sequence: Synthetic oligonucleotide
ggaagcacuugaagagggc

SEQ ID NO: 2301867 - RNA, 19 nt, Artificial Sequence
  Description of Artificial Sequence: Synthetic oligonucleotide
cauacauggguaucugcuu

SEQ ID NO: 2301868 - RNA, 19 nt, Artificial Sequence
  Description of Artificial Sequence: Synthetic oligonucleotide
cucggcaugccugaaugaa

SEQ ID NO: 2301869 - RNA, 19 nt, Artificial Sequence
  Description of Artificial Sequence: Synthetic oligonucleotide
ggucccgguggucuugaug

SEQ ID NO: 2301870 - RNA, 19 nt, Artificial Sequence
  Description of Artificial Sequence: Synthetic oligonucleotide
uagcaucaguuucgcugau

SEQ ID NO: 2301871 - RNA, 19 nt, Artificial Sequence
  Description of Artificial Sequence: Synthetic oligonucleotide
ccguggcucagcaggacgc

SEQ ID NO: 2301872 - RNA, 19 nt, Artificial Sequence
  Description of Artificial Sequence: Synthetic oligonucleotide
ucccguuccggacguccau

SEQ ID NO: 2301873 - RNA, 19 nt, Artificial Sequence
  Description of Artificial Sequence: Synthetic oligonucleotide
caggugcgugggcacgcgg

SEQ ID NO: 2301874 - RNA, 19 nt, Artificial Sequence
  Description of Artificial Sequence: Synthetic oligonucleotide
ggacucgaagugccuggcc

SEQ ID NO: 2301875 - RNA, 19 nt, Artificial Sequence
  Description of Artificial Sequence: Synthetic oligonucleotide
gguuccuccaugaguaaua

SEQ ID NO: 2301876 - RNA, 19 nt, Artificial Sequence
  Description of Artificial Sequence: Synthetic oligonucleotide
cuucucguugaagcaggga

SEQ ID NO: 2301877 - RNA, 19 nt, Artificial Sequence
  Description of Artificial Sequence: Synthetic oligonucleotide
gagggaugucaacggccaa

SEQ ID NO: 2301878 - RNA, 19 nt, Artificial Sequence
  Description of Artificial Sequence: Synthetic oligonucleotide
guaucugcuucuucucguu

SEQ ID NO: 2301879 - RNA, 19 nt, Artificial Sequence
  Description of Artificial Sequence: Synthetic oligonucleotide
uaacaggguuuugcacauc

SEQ ID NO: 2301880 - RNA, 19 nt, Artificial Sequence
  Description of Artificial Sequence: Synthetic oligonucleotide
ggagucggccuggaccccg

SEQ ID NO: 2301881 - RNA, 19 nt, Artificial Sequence
  Description of Artificial Sequence: Synthetic oligonucleotide
augcucguccaggauggaa

SEQ ID NO: 2301882 - RNA, 19 nt, Artificial Sequence
  Description of Artificial Sequence: Synthetic oligonucleotide
ggccugcacaaaccaggag

SEQ ID NO: 2301883 - RNA, 19 nt, Artificial Sequence
  Description of Artificial Sequence: Synthetic oligonucleotide
caucaacuccgucuucacu

SEQ ID NO: 2301884 - RNA, 19 nt, Artificial Sequence
  Description of Artificial Sequence: Synthetic oligonucleotide
aggugcgugggcacgcggu

SEQ ID NO: 2301885 - RNA, 19 nt, Artificial Sequence
  Description of Artificial Sequence: Synthetic oligonucleotide
caucugccauccguuccac

SEQ ID NO: 2301886 - RNA, 19 nt, Artificial Sequence
  Description of Artificial Sequence: Synthetic oligonucleotide
gagcggucgggcuuagcau

SEQ ID NO: 2301887 - RNA, 19 nt, Artificial Sequence
  Description of Artificial Sequence: Synthetic oligonucleotide
ccauaccugucacuuuguc

SEQ ID NO: 2301888 - RNA, 19 nt, Artificial Sequence
  Description of Artificial Sequence: Synthetic oligonucleotide
ccuggaccccgucaucgag

SEQ ID NO: 2301889 - RNA, 19 nt, Artificial Sequence
  Description of Artificial Sequence: Synthetic oligonucleotide
gugcgugggcacgcggucc

SEQ ID NO: 2301890 - RNA, 19 nt, Artificial Sequence
  Description of Artificial Sequence: Synthetic oligonucleotide
cccgucaucgagcuccguc

SEQ ID NO: 2301891 - RNA, 19 nt, Artificial Sequence
  Description of Artificial Sequence: Synthetic oligonucleotide
ccaggucuuugccaugcuc

SEQ ID NO: 2301892 - RNA, 19 nt, Artificial Sequence
  Description of Artificial Sequence: Synthetic oligonucleotide
aggagcggucgggcuuagc

SEQ ID NO: 2301893 - RNA, 19 nt, Artificial Sequence
  Description of Artificial Sequence: Synthetic oligonucleotide
ggucgggcuuagcaucaac

SEQ ID NO: 2301894 - RNA, 19 nt, Artificial Sequence
  Description of Artificial Sequence: Synthetic oligonucleotide
gucgaaguucuuguuguuu

SEQ ID NO: 2301895 - RNA, 19 nt, Artificial Sequence
  Description of Artificial Sequence: Synthetic oligonucleotide
cgcugauaggcccggaguc

SEQ ID NO: 2301896 - RNA, 19 nt, Artificial Sequence
  Description of Artificial Sequence: Synthetic oligonucleotide
uggccacccugucguucac

SEQ ID NO: 2301897 - RNA, 19 nt, Artificial Sequence
  Description of Artificial Sequence: Synthetic oligonucleotide
ggacgcaggcgaagcaggc

SEQ ID NO: 2301898 - RNA, 19 nt, Artificial Sequence
  Description of Artificial Sequence: Synthetic oligonucleotide
cggcaugccugaaugaaga

SEQ ID NO: 2301899 - RNA, 19 nt, Artificial Sequence
  Description of Artificial Sequence: Synthetic oligonucleotide
ggcaugccugaaugaagaa

SEQ ID NO: 2301900 - RNA, 19 nt, Artificial Sequence
  Description of Artificial Sequence: Synthetic oligonucleotide
ccguuccggacguccauac

SEQ ID NO: 2301901 - RNA, 19 nt, Artificial Sequence
  Description of Artificial Sequence: Synthetic oligonucleotide
ggguuucucuaacaggguu

SEQ ID NO: 2301902 - RNA, 19 nt, Artificial Sequence
  Description of Artificial Sequence: Synthetic oligonucleotide
cccgguggucuugaugggg

SEQ ID NO: 2301903 - RNA, 19 nt, Artificial Sequence
  Description of Artificial Sequence: Synthetic oligonucleotide
gucuugcaucuucgcacaa

SEQ ID NO: 2301904 - RNA, 19 nt, Artificial Sequence
  Description of Artificial Sequence: Synthetic oligonucleotide
ucguugaagcagggaucau

SEQ ID NO: 2301905 - RNA, 19 nt, Artificial Sequence
  Description of Artificial Sequence: Synthetic oligonucleotide
ccgucccucggcaugccug

SEQ ID NO: 2301906 - RNA, 19 nt, Artificial Sequence
  Description of Artificial Sequence: Synthetic oligonucleotide
accccgucaucgagcuccg

SEQ ID NO: 2301907 - RNA, 19 nt, Artificial Sequence
  Description of Artificial Sequence: Synthetic oligonucleotide
cuccguggcucagcaggac

SEQ ID NO: 2301908 - RNA, 19 nt, Artificial Sequence
  Description of Artificial Sequence: Synthetic oligonucleotide
cccauaaaucagauucucu

SEQ ID NO: 2301909 - RNA, 19 nt, Artificial Sequence
  Description of Artificial Sequence: Synthetic oligonucleotide
ccaugaguaauagccugga

SEQ ID NO: 2301910 - RNA, 19 nt, Artificial Sequence
  Description of Artificial Sequence: Synthetic oligonucleotide
cgucaucgagcuccguccc

SEQ ID NO: 2301911 - RNA, 19 nt, Artificial Sequence
  Description of Artificial Sequence: Synthetic oligonucleotide
gacgcaggcgaagcaggcu

SEQ ID NO: 2301912 - RNA, 19 nt, Artificial Sequence
  Description of Artificial Sequence: Synthetic oligonucleotide
ccuccaugaguaauagccu

SEQ ID NO: 2301913 - RNA, 19 nt, Artificial Sequence
  Description of Artificial Sequence: Synthetic oligonucleotide
ggucuuugccaugcucguc

SEQ ID NO: 2301914 - RNA, 19 nt, Artificial Sequence
  Description of Artificial Sequence: Synthetic oligonucleotide
uggggcacggaggggcauu

SEQ ID NO: 2301915 - RNA, 19 nt, Artificial Sequence
  Description of Artificial Sequence: Synthetic oligonucleotide
ccggacguccauaccuguc

SEQ ID NO: 2301916 - RNA, 19 nt, Artificial Sequence
  Description of Artificial Sequence: Synthetic oligonucleotide
gucccguuccggacgucca

SEQ ID NO: 2301917 - RNA, 19 nt, Artificial Sequence
  Description of Artificial Sequence: Synthetic oligonucleotide
cacuggaaggauccacuuu

SEQ ID NO: 2301918 - RNA, 19 nt, Artificial Sequence
  Description of Artificial Sequence: Synthetic oligonucleotide
cacgcggucccgguggucu

SEQ ID NO: 2301919 - RNA, 19 nt, Artificial Sequence
  Description of Artificial Sequence: Synthetic oligonucleotide
ccagagaauugaugagaua

SEQ ID NO: 2301920 - RNA, 19 nt, Artificial Sequence
  Description of Artificial Sequence: Synthetic oligonucleotide
ggaugucaacggccaaagu

SEQ ID NO: 2301921 - RNA, 19 nt, Artificial Sequence
  Description of Artificial Sequence: Synthetic oligonucleotide
cguuccggacguccauacc

SEQ ID NO: 2301922 - RNA, 19 nt, Artificial Sequence
  Description of Artificial Sequence: Synthetic oligonucleotide
ggcuucggaagcacuugaa

SEQ ID NO: 2301923 - RNA, 19 nt, Artificial Sequence
  Description of Artificial Sequence: Synthetic oligonucleotide
cuccgucccucggcaugcc

SEQ ID NO: 2301924 - RNA, 19 nt, Artificial Sequence
  Description of Artificial Sequence: Synthetic oligonucleotide
ggcucucagcuggaaggga

SEQ ID NO: 2301925 - RNA, 19 nt, Artificial Sequence
  Description of Artificial Sequence: Synthetic oligonucleotide
gcacaagagcagucauugu

SEQ ID NO: 2301926 - RNA, 19 nt, Artificial Sequence
  Description of Artificial Sequence: Synthetic oligonucleotide
ccucggcaugccugaauga

SEQ ID NO: 2301927 - RNA, 19 nt, Artificial Sequence
  Description of Artificial Sequence: Synthetic oligonucleotide
gccuggaccccgucaucga

SEQ ID NO: 2301928 - RNA, 19 nt, Artificial Sequence
  Description of Artificial Sequence: Synthetic oligonucleotide
ggugagcauggagaccaua

SEQ ID NO: 2301929 - RNA, 19 nt, Artificial Sequence
  Description of Artificial Sequence: Synthetic oligonucleotide
gcggucgggcuuagcauca

SEQ ID NO: 2301930 - RNA, 19 nt, Artificial Sequence
  Description of Artificial Sequence: Synthetic oligonucleotide
ggucuugauggggcacgga

SEQ ID NO: 2301931 - RNA, 19 nt, Artificial Sequence
  Description of Artificial Sequence: Synthetic oligonucleotide
caugcucguccaggaugga

SEQ ID NO: 2301932 - RNA, 19 nt, Artificial Sequence
  Description of Artificial Sequence: Synthetic oligonucleotide
acgcggucccgguggucuu

SEQ ID NO: 2301933 - RNA, 19 nt, Artificial Sequence
  Description of Artificial Sequence: Synthetic oligonucleotide
ccuggccacccugucguuc

SEQ ID NO: 2301934 - RNA, 19 nt, Artificial Sequence
  Description of Artificial Sequence: Synthetic oligonucleotide
cugcacaaaccaggagccu

SEQ ID NO: 2301935 - RNA, 19 nt, Artificial Sequence
  Description of Artificial Sequence: Synthetic oligonucleotide
gcucugcaacacaguucug

SEQ ID NO: 2301936 - RNA, 19 nt, Artificial Sequence
  Description of Artificial Sequence: Synthetic oligonucleotide
gcacaaaccaggagccuuu

SEQ ID NO: 2301937 - RNA, 19 nt, Artificial Sequence
  Description of Artificial Sequence: Synthetic oligonucleotide
cgucccucggcaugccuga

SEQ ID NO: 2301938 - RNA, 19 nt, Artificial Sequence
  Description of Artificial Sequence: Synthetic oligonucleotide
gagucggccuggaccccgu

SEQ ID NO: 2301939 - RNA, 19 nt, Artificial Sequence
  Description of Artificial Sequence: Synthetic oligonucleotide
cacaaaccaggagccuuuu

SEQ ID NO: 2301940 - RNA, 19 nt, Artificial Sequence
  Description of Artificial Sequence: Synthetic oligonucleotide
gcgugggcacgcggucccg

SEQ ID NO: 2301941 - RNA, 19 nt, Artificial Sequence
  Description of Artificial Sequence: Synthetic oligonucleotide
ggccaaaguagagcucuuu

SEQ ID NO: 2301942 - RNA, 19 nt, Artificial Sequence
  Description of Artificial Sequence: Synthetic oligonucleotide
cugucccguuccggacguc

SEQ ID NO: 2301943 - RNA, 19 nt, Artificial Sequence
  Description of Artificial Sequence: Synthetic oligonucleotide
ggaccccgucaucgagcuc

SEQ ID NO: 2301944 - RNA, 19 nt, Artificial Sequence
  Description of Artificial Sequence: Synthetic oligonucleotide
gucccucggcaugccugaa

SEQ ID NO: 2301945 - RNA, 19 nt, Artificial Sequence
  Description of Artificial Sequence: Synthetic oligonucleotide
gcccggagucggccuggac

SEQ ID NO: 2301946 - RNA, 19 nt, Artificial Sequence
  Description of Artificial Sequence: Synthetic oligonucleotide
gcggucccgguggucuuga

SEQ ID NO: 2301947 - RNA, 19 nt, Artificial Sequence
  Description of Artificial Sequence: Synthetic oligonucleotide
ggcacgcggucccgguggu

SEQ ID NO: 2301948 - RNA, 19 nt, Artificial Sequence
  Description of Artificial Sequence: Synthetic oligonucleotide
ggccacccugucguucacu

SEQ ID NO: 2301949 - RNA, 19 nt, Artificial Sequence
  Description of Artificial Sequence: Synthetic oligonucleotide
cgaagugccuggccacccu

SEQ ID NO: 2301950 - RNA, 19 nt, Artificial Sequence
  Description of Artificial Sequence: Synthetic oligonucleotide
cgcggucccgguggucuug

SEQ ID NO: 2301951 - RNA, 19 nt, Artificial Sequence
  Description of Artificial Sequence: Synthetic oligonucleotide
ggcccggagucggccugga

SEQ ID NO: 2301952 - RNA, 19 nt, Artificial Sequence
  Description of Artificial Sequence: Synthetic oligonucleotide
cccugucguucacucuggu

SEQ ID NO: 2301953 - RNA, 19 nt, Artificial Sequence
  Description of Artificial Sequence: Synthetic oligonucleotide
cguccauaccugucacuuu

SEQ ID NO: 2301954 - RNA, 19 nt, Artificial Sequence
  Description of Artificial Sequence: Synthetic oligonucleotide
ggggcacggaggggcauuu

SEQ ID NO: 2301955 - RNA, 19 nt, Artificial Sequence
  Description of Artificial Sequence: Synthetic oligonucleotide
gccuggccacccugucguu

SEQ ID NO: 2301956 - RNA, 19 nt, Artificial Sequence
  Description of Artificial Sequence: Synthetic oligonucleotide
gggcacggaggggcauuuu

SEQ ID NO: 2301957 - RNA, 19 nt, Artificial Sequence
  Description of Artificial Sequence: Synthetic oligonucleotide
cggccaaaguagagcucuu

SEQ ID NO: 2301958 - RNA, 19 nt, Artificial Sequence
  Description of Artificial Sequence: Synthetic oligonucleotide
cggucgggcuuagcaucaa

SEQ ID NO: 2301959 - RNA, 19 nt, Artificial Sequence
  Description of Artificial Sequence: Synthetic oligonucleotide
ccccgucaucgagcuccgu

SEQ ID NO: 2301960 - RNA, 19 nt, Artificial Sequence
  Description of Artificial Sequence: Synthetic oligonucleotide
cggucccgguggucuugau

SEQ ID NO: 2301961 - RNA, 19 nt, Artificial Sequence
  Description of Artificial Sequence: Synthetic oligonucleotide
uuauaaaaguucauuaggc

SEQ ID NO: 2301962 - RNA, 19 nt, Artificial Sequence
  Description of Artificial Sequence: Synthetic oligonucleotide
auaaaaguucauuaggcuc

SEQ ID NO: 2301963 - RNA, 19 nt, Artificial Sequence
  Description of Artificial Sequence: Synthetic oligonucleotide
uaaaaguucauuaggcucc

SEQ ID NO: 2301964 - RNA, 19 nt, Artificial Sequence
  Description of Artificial Sequence: Synthetic oligonucleotide
aauauaucugguugguagg

SEQ ID NO: 2301965 - RNA, 19 nt, Artificial Sequence
  Description of Artificial Sequence: Synthetic oligonucleotide
agaugugacacucagagca

SEQ ID NO: 2301966 - RNA, 19 nt, Artificial Sequence
  Description of Artificial Sequence: Synthetic oligonucleotide
ucuuagguccacaaaaucc

SEQ ID NO: 2301967 - RNA, 19 nt, Artificial Sequence
  Description of Artificial Sequence: Synthetic oligonucleotide
uugagauugaggcuggagg

SEQ ID NO: 2301968 - RNA, 19 nt, Artificial Sequence
  Description of Artificial Sequence: Synthetic oligonucleotide
gaaggugucaaaauagugg

SEQ ID NO: 2301969 - RNA, 19 nt, Artificial Sequence
  Description of Artificial Sequence: Synthetic oligonucleotide
auuguuguguucaacaucg

SEQ ID NO: 2301970 - RNA, 19 nt, Artificial Sequence
  Description of Artificial Sequence: Synthetic oligonucleotide
uaaagcugaagucacacac

SEQ ID NO: 2301971 - RNA, 19 nt, Artificial Sequence
  Description of Artificial Sequence: Synthetic oligonucleotide
auaaugaaaggacgggagc

SEQ ID NO: 2301972 - RNA, 19 nt, Artificial Sequence
  Description of Artificial Sequence: Synthetic oligonucleotide
cacugcaugacucuaaugg

SEQ ID NO: 2301973 - RNA, 19 nt, Artificial Sequence
  Description of Artificial Sequence: Synthetic oligonucleotide
caauauaucugguugguag

SEQ ID NO: 2301974 - RNA, 19 nt, Artificial Sequence
  Description of Artificial Sequence: Synthetic oligonucleotide
aucgaaaccgcucccagcc

SEQ ID NO: 2301975 - RNA, 19 nt, Artificial Sequence
  Description of Artificial Sequence: Synthetic oligonucleotide
auuuccuccagaauaaggc

SEQ ID NO: 2301976 - RNA, 19 nt, Artificial Sequence
  Description of Artificial Sequence: Synthetic oligonucleotide
uccucauuaaagcugaagu

SEQ ID NO: 2301977 - RNA, 19 nt, Artificial Sequence
  Description of Artificial Sequence: Synthetic oligonucleotide
uuggaaggugucaaaauag

SEQ ID NO: 2301978 - RNA, 19 nt, Artificial Sequence
  Description of Artificial Sequence: Synthetic oligonucleotide
cuuagguccacaaaauccc

SEQ ID NO: 2301979 - RNA, 19 nt, Artificial Sequence
  Description of Artificial Sequence: Synthetic oligonucleotide
aagcaaaguguuuguagac

SEQ ID NO: 2301980 - RNA, 19 nt, Artificial Sequence
  Description of Artificial Sequence: Synthetic oligonucleotide
uauaaaaguucauuaggcu

SEQ ID NO: 2301981 - RNA, 19 nt, Artificial Sequence
  Description of Artificial Sequence: Synthetic oligonucleotide
aaggauaaugaaaggacgg

SEQ ID NO: 2301982 - RNA, 19 nt, Artificial Sequence
  Description of Artificial Sequence: Synthetic oligonucleotide
aaucaagggaaucuuggcu

SEQ ID NO: 2301983 - RNA, 19 nt, Artificial Sequence
  Description of Artificial Sequence: Synthetic oligonucleotide
gaaggauaaugaaaggacg

SEQ ID NO: 2301984 - RNA, 19 nt, Artificial Sequence
  Description of Artificial Sequence: Synthetic oligonucleotide
uguagaccucuucaguugg

SEQ ID NO: 2301985 - RNA, 19 nt, Artificial Sequence
  Description of Artificial Sequence: Synthetic oligonucleotide
uuaggcuccucauuaaagc

SEQ ID NO: 2301986 - RNA, 19 nt, Artificial Sequence
  Description of Artificial Sequence: Synthetic oligonucleotide
uucaacaucgagacacggg

SEQ ID NO: 2301987 - RNA, 19 nt, Artificial Sequence
  Description of Artificial Sequence: Synthetic oligonucleotide
ucuacugaggagugguugg

SEQ ID NO: 2301988 - RNA, 19 nt, Artificial Sequence
  Description of Artificial Sequence: Synthetic oligonucleotide
aaagcugaagucacacacc

SEQ ID NO: 2301989 - RNA, 19 nt, Artificial Sequence
  Description of Artificial Sequence: Synthetic oligonucleotide
agcugaucgaaaccgcucc

SEQ ID NO: 2301990 - RNA, 19 nt, Artificial Sequence
  Description of Artificial Sequence: Synthetic oligonucleotide
ugugcgauuggcaaccuga

SEQ ID NO: 2301991 - RNA, 19 nt, Artificial Sequence
  Description of Artificial Sequence: Synthetic oligonucleotide
cuugaaacgguuuuggaga

SEQ ID NO: 2301992 - RNA, 19 nt, Artificial Sequence
  Description of Artificial Sequence: Synthetic oligonucleotide
uguacggaggcuccgacug

SEQ ID NO: 2301993 - RNA, 19 nt, Artificial Sequence
  Description of Artificial Sequence: Synthetic oligonucleotide
uguuguguucaacaucgag

SEQ ID NO: 2301994 - RNA, 19 nt, Artificial Sequence
  Description of Artificial Sequence: Synthetic oligonucleotide
aaggucgcagcccugagcu

SEQ ID NO: 2301995 - RNA, 19 nt, Artificial Sequence
  Description of Artificial Sequence: Synthetic oligonucleotide
aaugaaaggacgggagccg

SEQ ID NO: 2301996 - RNA, 19 nt, Artificial Sequence
  Description of Artificial Sequence: Synthetic oligonucleotide
uuaaguggguaacagcaac

SEQ ID NO: 2301997 - RNA, 19 nt, Artificial Sequence
  Description of Artificial Sequence: Synthetic oligonucleotide
aaguucauuaggcuccuca

SEQ ID NO: 2301998 - RNA, 19 nt, Artificial Sequence
  Description of Artificial Sequence: Synthetic oligonucleotide
aaggauguuccacugcaug

SEQ ID NO: 2301999 - RNA, 19 nt, Artificial Sequence
  Description of Artificial Sequence: Synthetic oligonucleotide
ugcaugacucuaaugggag

SEQ ID NO: 2302000 - RNA, 19 nt, Artificial Sequence
  Description of Artificial Sequence: Synthetic oligonucleotide
agcaacgcagaauugucgg

SEQ ID NO: 2302001 - RNA, 19 nt, Artificial Sequence
  Description of Artificial Sequence: Synthetic oligonucleotide
acugcaugacucuaauggg

SEQ ID NO: 2302002 - RNA, 19 nt, Artificial Sequence
  Description of Artificial Sequence: Synthetic oligonucleotide
uucauuaggcuccucauua

SEQ ID NO: 2302003 - RNA, 19 nt, Artificial Sequence
  Description of Artificial Sequence: Synthetic oligonucleotide
uaccagauguaauccaggg

SEQ ID NO: 2302004 - RNA, 19 nt, Artificial Sequence
  Description of Artificial Sequence: Synthetic oligonucleotide
ugagauugaggcuggagga

SEQ ID NO: 2302005 - RNA, 19 nt, Artificial Sequence
  Description of Artificial Sequence: Synthetic oligonucleotide
ugucuggaguaccagaugu

SEQ ID NO: 2302006 - RNA, 19 nt, Artificial Sequence
  Description of Artificial Sequence: Synthetic oligonucleotide
gaagcaaaguguuuguaga

SEQ ID NO: 2302007 - RNA, 19 nt, Artificial Sequence
  Description of Artificial Sequence: Synthetic oligonucleotide
auuggugcugcugaugagc

SEQ ID NO: 2302008 - RNA, 19 nt, Artificial Sequence
  Description of Artificial Sequence: Synthetic oligonucleotide
aaaugugccuugguagccc

SEQ ID NO: 2302009 - RNA, 19 nt, Artificial Sequence
  Description of Artificial Sequence: Synthetic oligonucleotide
uguccaucaggacucagca

SEQ ID NO: 2302010 - RNA, 19 nt, Artificial Sequence
  Description of Artificial Sequence: Synthetic oligonucleotide
agcaaaguguuuguagacc

SEQ ID NO: 2302011 - RNA, 19 nt, Artificial Sequence
  Description of Artificial Sequence: Synthetic oligonucleotide
uccccacagacaaucaagg

SEQ ID NO: 2302012 - RNA, 19 nt, Artificial Sequence
  Description of Artificial Sequence: Synthetic oligonucleotide
auauaucugguugguaggc

SEQ ID NO: 2302013 - RNA, 19 nt, Artificial Sequence
  Description of Artificial Sequence: Synthetic oligonucleotide
auggcugucagccuaauau

SEQ ID NO: 2302014 - RNA, 19 nt, Artificial Sequence
  Description of Artificial Sequence: Synthetic oligonucleotide
aacgcagaauugucggccg

SEQ ID NO: 2302015 - RNA, 19 nt, Artificial Sequence
  Description of Artificial Sequence: Synthetic oligonucleotide
auauuggugcugcugauga

SEQ ID NO: 2302016 - RNA, 19 nt, Artificial Sequence
  Description of Artificial Sequence: Synthetic oligonucleotide
uguucaacaucgagacacg

SEQ ID NO: 2302017 - RNA, 19 nt, Artificial Sequence
  Description of Artificial Sequence: Synthetic oligonucleotide
acaaucaagggaaucuugg

SEQ ID NO: 2302018 - RNA, 19 nt, Artificial Sequence
  Description of Artificial Sequence: Synthetic oligonucleotide
gucagccuaauauuggugc

SEQ ID NO: 2302019 - RNA, 19 nt, Artificial Sequence
  Description of Artificial Sequence: Synthetic oligonucleotide
gauuuccuccagaauaagg

SEQ ID NO: 2302020 - RNA, 19 nt, Artificial Sequence
  Description of Artificial Sequence: Synthetic oligonucleotide
guguucaacaucgagacac

SEQ ID NO: 2302021 - RNA, 19 nt, Artificial Sequence
  Description of Artificial Sequence: Synthetic oligonucleotide
uggaguaccagauguaauc

SEQ ID NO: 2302022 - RNA, 19 nt, Artificial Sequence
  Description of Artificial Sequence: Synthetic oligonucleotide
ggcacaauauaucugguug

SEQ ID NO: 2302023 - RNA, 19 nt, Artificial Sequence
  Description of Artificial Sequence: Synthetic oligonucleotide
guaggcgcuauugagauug

SEQ ID NO: 2302024 - RNA, 19 nt, Artificial Sequence
  Description of Artificial Sequence: Synthetic oligonucleotide
ugcguugaaguccccacag

SEQ ID NO: 2302025 - RNA, 19 nt, Artificial Sequence
  Description of Artificial Sequence: Synthetic oligonucleotide
ucuucagugagcagaucca

SEQ ID NO: 2302026 - RNA, 19 nt, Artificial Sequence
  Description of Artificial Sequence: Synthetic oligonucleotide
aauugucggccggauuucc

SEQ ID NO: 2302027 - RNA, 19 nt, Artificial Sequence
  Description of Artificial Sequence: Synthetic oligonucleotide
cuaauauuggugcugcuga

SEQ ID NO: 2302028 - RNA, 19 nt, Artificial Sequence
  Description of Artificial Sequence: Synthetic oligonucleotide
ucuuccaggucguguacgg

SEQ ID NO: 2302029 - RNA, 19 nt, Artificial Sequence
  Description of Artificial Sequence: Synthetic oligonucleotide
guggguaacagcaacgcag

SEQ ID NO: 2302030 - RNA, 19 nt, Artificial Sequence
  Description of Artificial Sequence: Synthetic oligonucleotide
aauauuggugcugcugaug

SEQ ID NO: 2302031 - RNA, 19 nt, Artificial Sequence
  Description of Artificial Sequence: Synthetic oligonucleotide
uuguagaccucuucaguug

SEQ ID NO: 2302032 - RNA, 19 nt, Artificial Sequence
  Description of Artificial Sequence: Synthetic oligonucleotide
ggugucaaaauaguggucc

SEQ ID NO: 2302033 - RNA, 19 nt, Artificial Sequence
  Description of Artificial Sequence: Synthetic oligonucleotide
aggauaaugaaaggacggg

SEQ ID NO: 2302034 - RNA, 19 nt, Artificial Sequence
  Description of Artificial Sequence: Synthetic oligonucleotide
acuucuuggaggcacaaua

SEQ ID NO: 2302035 - RNA, 19 nt, Artificial Sequence
  Description of Artificial Sequence: Synthetic oligonucleotide
gauguaauccagggugugg

SEQ ID NO: 2302036 - RNA, 19 nt, Artificial Sequence
  Description of Artificial Sequence: Synthetic oligonucleotide
caaucaagggaaucuuggc

SEQ ID NO: 2302037 - RNA, 19 nt, Artificial Sequence
  Description of Artificial Sequence: Synthetic oligonucleotide
agccuaauauuggugcugc

SEQ ID NO: 2302038 - RNA, 19 nt, Artificial Sequence
  Description of Artificial Sequence: Synthetic oligonucleotide
uuccaggucguguacggag

SEQ ID NO: 2302039 - RNA, 19 nt, Artificial Sequence
  Description of Artificial Sequence: Synthetic oligonucleotide
uucuuagguccacaaaauc

SEQ ID NO: 2302040 - RNA, 19 nt, Artificial Sequence
  Description of Artificial Sequence: Synthetic oligonucleotide
gcuugaaacgguuuuggag

SEQ ID NO: 2302041 - RNA, 19 nt, Artificial Sequence
  Description of Artificial Sequence: Synthetic oligonucleotide
uggguaacagcaacgcaga

SEQ ID NO: 2302042 - RNA, 19 nt, Artificial Sequence
  Description of Artificial Sequence: Synthetic oligonucleotide
gcgcuauugagauugaggc

SEQ ID NO: 2302043 - RNA, 19 nt, Artificial Sequence
  Description of Artificial Sequence: Synthetic oligonucleotide
acucuaaugggaggguggc

SEQ ID NO: 2302044 - RNA, 19 nt, Artificial Sequence
  Description of Artificial Sequence: Synthetic oligonucleotide
gcuauugagauugaggcug

SEQ ID NO: 2302045 - RNA, 19 nt, Artificial Sequence
  Description of Artificial Sequence: Synthetic oligonucleotide
ugguccacuucuuggaggc

SEQ ID NO: 2302046 - RNA, 19 nt, Artificial Sequence
  Description of Artificial Sequence: Synthetic oligonucleotide
guuguguucaacaucgaga

SEQ ID NO: 2302047 - RNA, 19 nt, Artificial Sequence
  Description of Artificial Sequence: Synthetic oligonucleotide
uuguaggcgcuauugagau

SEQ ID NO: 2302048 - RNA, 19 nt, Artificial Sequence
  Description of Artificial Sequence: Synthetic oligonucleotide
gacucuaaugggagggugg

SEQ ID NO: 2302049 - RNA, 19 nt, Artificial Sequence
  Description of Artificial Sequence: Synthetic oligonucleotide
aguaccagauguaauccag

SEQ ID NO: 2302050 - RNA, 19 nt, Artificial Sequence
  Description of Artificial Sequence: Synthetic oligonucleotide
gacacucagagcaugucug

SEQ ID NO: 2302051 - RNA, 19 nt, Artificial Sequence
  Description of Artificial Sequence: Synthetic oligonucleotide
ugagcugaucgaaaccgcu

SEQ ID NO: 2302052 - RNA, 19 nt, Artificial Sequence
  Description of Artificial Sequence: Synthetic oligonucleotide
ugagguccggaucuuccag

SEQ ID NO: 2302053 - RNA, 19 nt, Artificial Sequence
  Description of Artificial Sequence: Synthetic oligonucleotide
auuaggcuccucauuaaag

SEQ ID NO: 2302054 - RNA, 19 nt, Artificial Sequence
  Description of Artificial Sequence: Synthetic oligonucleotide
cacuugagugcuucaacag

SEQ ID NO: 2302055 - RNA, 19 nt, Artificial Sequence
  Description of Artificial Sequence: Synthetic oligonucleotide
gcacaauauaucugguugg

SEQ ID NO: 2302056 - RNA, 19 nt, Artificial Sequence
  Description of Artificial Sequence: Synthetic oligonucleotide
uguggcgacacuccccuga

SEQ ID NO: 2302057 - RNA, 19 nt, Artificial Sequence
  Description of Artificial Sequence: Synthetic oligonucleotide
uggucugaaggauaaugaa

SEQ ID NO: 2302058 - RNA, 19 nt, Artificial Sequence
  Description of Artificial Sequence: Synthetic oligonucleotide
guaacagcaacgcagaauu

SEQ ID NO: 2302059 - RNA, 19 nt, Artificial Sequence
  Description of Artificial Sequence: Synthetic oligonucleotide
aaucucuucuuagguccac

SEQ ID NO: 2302060 - RNA, 19 nt, Artificial Sequence
  Description of Artificial Sequence: Synthetic oligonucleotide
uggggcaaucucuucuuag

SEQ ID NO: 2302061 - RNA, 19 nt, Artificial Sequence
  Description of Artificial Sequence: Synthetic oligonucleotide
cauuguuguguucaacauc

SEQ ID NO: 2302062 - RNA, 19 nt, Artificial Sequence
  Description of Artificial Sequence: Synthetic oligonucleotide
uagcccagucuacugagga

SEQ ID NO: 2302063 - RNA, 19 nt, Artificial Sequence
  Description of Artificial Sequence: Synthetic oligonucleotide
aaugugccuugguagccca

SEQ ID NO: 2302064 - RNA, 19 nt, Artificial Sequence
  Description of Artificial Sequence: Synthetic oligonucleotide
acagacaaucaagggaauc

SEQ ID NO: 2302065 - RNA, 19 nt, Artificial Sequence
  Description of Artificial Sequence: Synthetic oligonucleotide
ucuccaagagcuugggcaa

SEQ ID NO: 2302066 - RNA, 19 nt, Artificial Sequence
  Description of Artificial Sequence: Synthetic oligonucleotide
uauaucugguugguaggcc

SEQ ID NO: 2302067 - RNA, 19 nt, Artificial Sequence
  Description of Artificial Sequence: Synthetic oligonucleotide
gcugaugagcuugaaacgg

SEQ ID NO: 2302068 - RNA, 19 nt, Artificial Sequence
  Description of Artificial Sequence: Synthetic oligonucleotide
cagcaacgcagaauugucg

SEQ ID NO: 2302069 - RNA, 19 nt, Artificial Sequence
  Description of Artificial Sequence: Synthetic oligonucleotide
cuuguaggcgcuauugaga

SEQ ID NO: 2302070 - RNA, 19 nt, Artificial Sequence
  Description of Artificial Sequence: Synthetic oligonucleotide
ucagccuaauauuggugcu

SEQ ID NO: 2302071 - RNA, 19 nt, Artificial Sequence
  Description of Artificial Sequence: Synthetic oligonucleotide
gagguccggaucuuccagg

SEQ ID NO: 2302072 - RNA, 19 nt, Artificial Sequence
  Description of Artificial Sequence: Synthetic oligonucleotide
ucuaaugggaggguggcua

SEQ ID NO: 2302073 - RNA, 19 nt, Artificial Sequence
  Description of Artificial Sequence: Synthetic oligonucleotide
uucaguuggcucugcguug

SEQ ID NO: 2302074 - RNA, 19 nt, Artificial Sequence
  Description of Artificial Sequence: Synthetic oligonucleotide
gacaaucaagggaaucuug

SEQ ID NO: 2302075 - RNA, 19 nt, Artificial Sequence
  Description of Artificial Sequence: Synthetic oligonucleotide
ucuggaguaccagauguaa

SEQ ID NO: 2302076 - RNA, 19 nt, Artificial Sequence
  Description of Artificial Sequence: Synthetic oligonucleotide
uuuuaggggucauggcugu

SEQ ID NO: 2302077 - RNA, 19 nt, Artificial Sequence
  Description of Artificial Sequence: Synthetic oligonucleotide
gaaacgguuuuggagaaaa

SEQ ID NO: 2302078 - RNA, 19 nt, Artificial Sequence
  Description of Artificial Sequence: Synthetic oligonucleotide
gaucgaaaccgcucccagc

SEQ ID NO: 2302079 - RNA, 19 nt, Artificial Sequence
  Description of Artificial Sequence: Synthetic oligonucleotide
agaccucuucaguuggcuc

SEQ ID NO: 2302080 - RNA, 19 nt, Artificial Sequence
  Description of Artificial Sequence: Synthetic oligonucleotide
aaaaguucauuaggcuccu

SEQ ID NO: 2302081 - RNA, 19 nt, Artificial Sequence
  Description of Artificial Sequence: Synthetic oligonucleotide
aggguguggcgacacuccc

SEQ ID NO: 2302082 - RNA, 19 nt, Artificial Sequence
  Description of Artificial Sequence: Synthetic oligonucleotide
guaggccaagauuuccucc

SEQ ID NO: 2302083 - RNA, 19 nt, Artificial Sequence
  Description of Artificial Sequence: Synthetic oligonucleotide
aaaggacgggagccgguug

SEQ ID NO: 2302084 - RNA, 19 nt, Artificial Sequence
  Description of Artificial Sequence: Synthetic oligonucleotide
aaugggaggguggcuacug

SEQ ID NO: 2302085 - RNA, 19 nt, Artificial Sequence
  Description of Artificial Sequence: Synthetic oligonucleotide
uugaaacgguuuuggagaa

SEQ ID NO: 2302086 - RNA, 19 nt, Artificial Sequence
  Description of Artificial Sequence: Synthetic oligonucleotide
caacgcagaauugucggcc

SEQ ID NO: 2302087 - RNA, 19 nt, Artificial Sequence
  Description of Artificial Sequence: Synthetic oligonucleotide
auugagauugaggcuggag

SEQ ID NO: 2302088 - RNA, 19 nt, Artificial Sequence
  Description of Artificial Sequence: Synthetic oligonucleotide
ugguagcccagucuacuga

SEQ ID NO: 2302089 - RNA, 19 nt, Artificial Sequence
  Description of Artificial Sequence: Synthetic oligonucleotide
uugucuuugccuucuccaa

SEQ ID NO: 2302090 - RNA, 19 nt, Artificial Sequence
  Description of Artificial Sequence: Synthetic oligonucleotide
ucaacagggcacugcacaa

SEQ ID NO: 2302091 - RNA, 19 nt, Artificial Sequence
  Description of Artificial Sequence: Synthetic oligonucleotide
uugguagcccagucuacug

SEQ ID NO: 2302092 - RNA, 19 nt, Artificial Sequence
  Description of Artificial Sequence: Synthetic oligonucleotide
uauuggugcugcugaugag

SEQ ID NO: 2302093 - RNA, 19 nt, Artificial Sequence
  Description of Artificial Sequence: Synthetic oligonucleotide
uaauccaggguguggcgac

SEQ ID NO: 2302094 - RNA, 19 nt, Artificial Sequence
  Description of Artificial Sequence: Synthetic oligonucleotide
guaccagauguaauccagg

SEQ ID NO: 2302095 - RNA, 19 nt, Artificial Sequence
  Description of Artificial Sequence: Synthetic oligonucleotide
accagugacagguggucug

SEQ ID NO: 2302096 - RNA, 19 nt, Artificial Sequence
  Description of Artificial Sequence: Synthetic oligonucleotide
uaacagcaacgcagaauug

SEQ ID NO: 2302097 - RNA, 19 nt, Artificial Sequence
  Description of Artificial Sequence: Synthetic oligonucleotide
uugguaggccaagauuucc

SEQ ID NO: 2302098 - RNA, 19 nt, Artificial Sequence
  Description of Artificial Sequence: Synthetic oligonucleotide
gagugcuucaacagggcac

SEQ ID NO: 2302099 - RNA, 19 nt, Artificial Sequence
  Description of Artificial Sequence: Synthetic oligonucleotide
aucugguccauuguugugu

SEQ ID NO: 2302100 - RNA, 19 nt, Artificial Sequence
  Description of Artificial Sequence: Synthetic oligonucleotide
aagaaggucgcagcccuga

SEQ ID NO: 2302101 - RNA, 19 nt, Artificial Sequence
  Description of Artificial Sequence: Synthetic oligonucleotide
gaaggucgcagcccugagc

SEQ ID NO: 2302102 - RNA, 19 nt, Artificial Sequence
  Description of Artificial Sequence: Synthetic oligonucleotide
ucauuaggcuccucauuaa

SEQ ID NO: 2302103 - RNA, 19 nt, Artificial Sequence
  Description of Artificial Sequence: Synthetic oligonucleotide
ugaugagcuugaaacgguu

SEQ ID NO: 2302104 - RNA, 19 nt, Artificial Sequence
  Description of Artificial Sequence: Synthetic oligonucleotide
augaaaggacgggagccgg

SEQ ID NO: 2302105 - RNA, 19 nt, Artificial Sequence
  Description of Artificial Sequence: Synthetic oligonucleotide
agcuugggcaaggauguuc

SEQ ID NO: 2302106 - RNA, 19 nt, Artificial Sequence
  Description of Artificial Sequence: Synthetic oligonucleotide
uaauauuggugcugcugau

SEQ ID NO: 2302107 - RNA, 19 nt, Artificial Sequence
  Description of Artificial Sequence: Synthetic oligonucleotide
guucaacaucgagacacgg

SEQ ID NO: 2302108 - RNA, 19 nt, Artificial Sequence
  Description of Artificial Sequence: Synthetic oligonucleotide
ggcgcuauugagauugagg

SEQ ID NO: 2302109 - RNA, 19 nt, Artificial Sequence
  Description of Artificial Sequence: Synthetic oligonucleotide
gauugaggcuggaggaagc

SEQ ID NO: 2302110 - RNA, 19 nt, Artificial Sequence
  Description of Artificial Sequence: Synthetic oligonucleotide
aguggguaacagcaacgca

SEQ ID NO: 2302111 - RNA, 19 nt, Artificial Sequence
  Description of Artificial Sequence: Synthetic oligonucleotide
uccacugcaugacucuaau

SEQ ID NO: 2302112 - RNA, 19 nt, Artificial Sequence
  Description of Artificial Sequence: Synthetic oligonucleotide
ugacucuaaugggagggug

SEQ ID NO: 2302113 - RNA, 19 nt, Artificial Sequence
  Description of Artificial Sequence: Synthetic oligonucleotide
aggacucagcagcuuguag

SEQ ID NO: 2302114 - RNA, 19 nt, Artificial Sequence
  Description of Artificial Sequence: Synthetic oligonucleotide
ccugagcugaucgaaaccg

SEQ ID NO: 2302115 - RNA, 19 nt, Artificial Sequence
  Description of Artificial Sequence: Synthetic oligonucleotide
auguuccacugcaugacuc

SEQ ID NO: 2302116 - RNA, 19 nt, Artificial Sequence
  Description of Artificial Sequence: Synthetic oligonucleotide
cugcaugacucuaauggga

SEQ ID NO: 2302117 - RNA, 19 nt, Artificial Sequence
  Description of Artificial Sequence: Synthetic oligonucleotide
gguggucugaaggauaaug

SEQ ID NO: 2302118 - RNA, 19 nt, Artificial Sequence
  Description of Artificial Sequence: Synthetic oligonucleotide
augucuggaguaccagaug

SEQ ID NO: 2302119 - RNA, 19 nt, Artificial Sequence
  Description of Artificial Sequence: Synthetic oligonucleotide
aggucguguacggaggcuc

SEQ ID NO: 2302120 - RNA, 19 nt, Artificial Sequence
  Description of Artificial Sequence: Synthetic oligonucleotide
gucugugcgauuggcaacc

SEQ ID NO: 2302121 - RNA, 19 nt, Artificial Sequence
  Description of Artificial Sequence: Synthetic oligonucleotide
agcuugaaacgguuuugga

SEQ ID NO: 2302122 - RNA, 19 nt, Artificial Sequence
  Description of Artificial Sequence: Synthetic oligonucleotide
ggaguaccagauguaaucc

SEQ ID NO: 2302123 - RNA, 19 nt, Artificial Sequence
  Description of Artificial Sequence: Synthetic oligonucleotide
ucaguuggcucugcguuga

SEQ ID NO: 2302124 - RNA, 19 nt, Artificial Sequence
  Description of Artificial Sequence: Synthetic oligonucleotide
ccucauuaaagcugaaguc

SEQ ID NO: 2302125 - RNA, 19 nt, Artificial Sequence
  Description of Artificial Sequence: Synthetic oligonucleotide
guccccacagacaaucaag

SEQ ID NO: 2302126 - RNA, 19 nt, Artificial Sequence
  Description of Artificial Sequence: Synthetic oligonucleotide
gucuacugaggagugguug

SEQ ID NO: 2302127 - RNA, 19 nt, Artificial Sequence
  Description of Artificial Sequence: Synthetic oligonucleotide
ucagagcaugucuggagua

SEQ ID NO: 2302128 - RNA, 19 nt, Artificial Sequence
  Description of Artificial Sequence: Synthetic oligonucleotide
ugucggccggauuuccuug

SEQ ID NO: 2302129 - RNA, 19 nt, Artificial Sequence
  Description of Artificial Sequence: Synthetic oligonucleotide
ggaaggugucaaaauagug

SEQ ID NO: 2302130 - RNA, 19 nt, Artificial Sequence
  Description of Artificial Sequence: Synthetic oligonucleotide
ugcuucaacagggcacugc

SEQ ID NO: 2302131 - RNA, 19 nt, Artificial Sequence
  Description of Artificial Sequence: Synthetic oligonucleotide
uuccacugcaugacucuaa

SEQ ID NO: 2302132 - RNA, 19 nt, Artificial Sequence
  Description of Artificial Sequence: Synthetic oligonucleotide
gcaaggauguuccacugca

SEQ ID NO: 2302133 - RNA, 19 nt, Artificial Sequence
  Description of Artificial Sequence: Synthetic oligonucleotide
uuguuguguucaacaucga

SEQ ID NO: 2302134 - RNA, 19 nt, Artificial Sequence
  Description of Artificial Sequence: Synthetic oligonucleotide
uggcugucagccuaauauu

SEQ ID NO: 2302135 - RNA, 19 nt, Artificial Sequence
  Description of Artificial Sequence: Synthetic oligonucleotide
acgcagaauugucggccgg

SEQ ID NO: 2302136 - RNA, 19 nt, Artificial Sequence
  Description of Artificial Sequence: Synthetic oligonucleotide
ucugguugguaggccaaga

SEQ ID NO: 2302137 - RNA, 19 nt, Artificial Sequence
  Description of Artificial Sequence: Synthetic oligonucleotide
caucugguccauuguugug

SEQ ID NO: 2302138 - RNA, 19 nt, Artificial Sequence
  Description of Artificial Sequence: Synthetic oligonucleotide
gaaucuuggcuuccugugu

SEQ ID NO: 2302139 - RNA, 19 nt, Artificial Sequence
  Description of Artificial Sequence: Synthetic oligonucleotide
cuucaacagggcacugcac

SEQ ID NO: 2302140 - RNA, 19 nt, Artificial Sequence
  Description of Artificial Sequence: Synthetic oligonucleotide
aggugucaaaauagugguc

SEQ ID NO: 2302141 - RNA, 19 nt, Artificial Sequence
  Description of Artificial Sequence: Synthetic oligonucleotide
ggauaaugaaaggacggga

SEQ ID NO: 2302142 - RNA, 19 nt, Artificial Sequence
  Description of Artificial Sequence: Synthetic oligonucleotide
agguccggaucuuccaggu

SEQ ID NO: 2302143 - RNA, 19 nt, Artificial Sequence
  Description of Artificial Sequence: Synthetic oligonucleotide
ucugguccauuguuguguu

SEQ ID NO: 2302144 - RNA, 19 nt, Artificial Sequence
  Description of Artificial Sequence: Synthetic oligonucleotide
uccggaucuuccaggucgu

SEQ ID NO: 2302145 - RNA, 19 nt, Artificial Sequence
  Description of Artificial Sequence: Synthetic oligonucleotide
ugugccuugguagcccagu

SEQ ID NO: 2302146 - RNA, 19 nt, Artificial Sequence
  Description of Artificial Sequence: Synthetic oligonucleotide
ccuaauauuggugcugcug

SEQ ID NO: 2302147 - RNA, 19 nt, Artificial Sequence
  Description of Artificial Sequence: Synthetic oligonucleotide
agacaaucaagggaaucuu

SEQ ID NO: 2302148 - RNA, 19 nt, Artificial Sequence
  Description of Artificial Sequence: Synthetic oligonucleotide
gcuucaacagggcacugca

SEQ ID NO: 2302149 - RNA, 19 nt, Artificial Sequence
  Description of Artificial Sequence: Synthetic oligonucleotide
gaauugucggccggauuuc

SEQ ID NO: 2302150 - RNA, 19 nt, Artificial Sequence
  Description of Artificial Sequence: Synthetic oligonucleotide
cagagcaugucuggaguac

SEQ ID NO: 2302151 - RNA, 19 nt, Artificial Sequence
  Description of Artificial Sequence: Synthetic oligonucleotide
cagacaaucaagggaaucu

SEQ ID NO: 2302152 - RNA, 19 nt, Artificial Sequence
  Description of Artificial Sequence: Synthetic oligonucleotide
aaauagugguccacuucuu

SEQ ID NO: 2302153 - RNA, 19 nt, Artificial Sequence
  Description of Artificial Sequence: Synthetic oligonucleotide
augugacacucagagcaug

SEQ ID NO: 2302154 - RNA, 19 nt, Artificial Sequence
  Description of Artificial Sequence: Synthetic oligonucleotide
guaauccaggguguggcga

SEQ ID NO: 2302155 - RNA, 19 nt, Artificial Sequence
  Description of Artificial Sequence: Synthetic oligonucleotide
gcaaaguguuuguagaccu

SEQ ID NO: 2302156 - RNA, 19 nt, Artificial Sequence
  Description of Artificial Sequence: Synthetic oligonucleotide
gaggagugguuggaaggug

SEQ ID NO: 2302157 - RNA, 19 nt, Artificial Sequence
  Description of Artificial Sequence: Synthetic oligonucleotide
cauuaggcuccucauuaaa

SEQ ID NO: 2302158 - RNA, 19 nt, Artificial Sequence
  Description of Artificial Sequence: Synthetic oligonucleotide
uggcgacacuccccugagg

SEQ ID NO: 2302159 - RNA, 19 nt, Artificial Sequence
  Description of Artificial Sequence: Synthetic oligonucleotide
ugcgauuggcaaccugauu

SEQ ID NO: 2302160 - RNA, 19 nt, Artificial Sequence
  Description of Artificial Sequence: Synthetic oligonucleotide
cagccuaauauuggugcug

SEQ ID NO: 2302161 - RNA, 19 nt, Artificial Sequence
  Description of Artificial Sequence: Synthetic oligonucleotide
gucacacaccagugacagg

SEQ ID NO: 2302162 - RNA, 19 nt, Artificial Sequence
  Description of Artificial Sequence: Synthetic oligonucleotide
caagggaaucuuggcuucc

SEQ ID NO: 2302163 - RNA, 19 nt, Artificial Sequence
  Description of Artificial Sequence: Synthetic oligonucleotide
aggagugguuggaaggugu

SEQ ID NO: 2302164 - RNA, 19 nt, Artificial Sequence
  Description of Artificial Sequence: Synthetic oligonucleotide
ggauguuccacugcaugac

SEQ ID NO: 2302165 - RNA, 19 nt, Artificial Sequence
  Description of Artificial Sequence: Synthetic oligonucleotide
gagcugaucgaaaccgcuc

SEQ ID NO: 2302166 - RNA, 19 nt, Artificial Sequence
  Description of Artificial Sequence: Synthetic oligonucleotide
acaauauaucugguuggua

SEQ ID NO: 2302167 - RNA, 19 nt, Artificial Sequence
  Description of Artificial Sequence: Synthetic oligonucleotide
caugucuggaguaccagau

SEQ ID NO: 2302168 - RNA, 19 nt, Artificial Sequence
  Description of Artificial Sequence: Synthetic oligonucleotide
ggucugaaggauaaugaaa

SEQ ID NO: 2302169 - RNA, 19 nt, Artificial Sequence
  Description of Artificial Sequence: Synthetic oligonucleotide
cgauuggcaaccugauugg

SEQ ID NO: 2302170 - RNA, 19 nt, Artificial Sequence
  Description of Artificial Sequence: Synthetic oligonucleotide
gguaggccaagauuuccuc

SEQ ID NO: 2302171 - RNA, 19 nt, Artificial Sequence
  Description of Artificial Sequence: Synthetic oligonucleotide
guggcgacacuccccugag

SEQ ID NO: 2302172 - RNA, 19 nt, Artificial Sequence
  Description of Artificial Sequence: Synthetic oligonucleotide
cuucuuagguccacaaaau

SEQ ID NO: 2302173 - RNA, 19 nt, Artificial Sequence
  Description of Artificial Sequence: Synthetic oligonucleotide
guugguaggccaagauuuc

SEQ ID NO: 2302174 - RNA, 19 nt, Artificial Sequence
  Description of Artificial Sequence: Synthetic oligonucleotide
gccaagauuuccuccagaa

SEQ ID NO: 2302175 - RNA, 19 nt, Artificial Sequence
  Description of Artificial Sequence: Synthetic oligonucleotide
cuccgacuguccaucagga

SEQ ID NO: 2302176 - RNA, 19 nt, Artificial Sequence
  Description of Artificial Sequence: Synthetic oligonucleotide
ggcaaggauguuccacugc

SEQ ID NO: 2302177 - RNA, 19 nt, Artificial Sequence
  Description of Artificial Sequence: Synthetic oligonucleotide
augacucuaaugggagggu

SEQ ID NO: 2302178 - RNA, 19 nt, Artificial Sequence
  Description of Artificial Sequence: Synthetic oligonucleotide
gaggcuccgacuguccauc

SEQ ID NO: 2302179 - RNA, 19 nt, Artificial Sequence
  Description of Artificial Sequence: Synthetic oligonucleotide
caacaucgagacacgggga

SEQ ID NO: 2302180 - RNA, 19 nt, Artificial Sequence
  Description of Artificial Sequence: Synthetic oligonucleotide
gcaacgcagaauugucggc

SEQ ID NO: 2302181 - RNA, 19 nt, Artificial Sequence
  Description of Artificial Sequence: Synthetic oligonucleotide
auuggcaaccugauugguu

SEQ ID NO: 2302182 - RNA, 19 nt, Artificial Sequence
  Description of Artificial Sequence: Synthetic oligonucleotide
gcagauccagagcagaugu

SEQ ID NO: 2302183 - RNA, 19 nt, Artificial Sequence
  Description of Artificial Sequence: Synthetic oligonucleotide
gucggccggauuuccuugc

SEQ ID NO: 2302184 - RNA, 19 nt, Artificial Sequence
  Description of Artificial Sequence: Synthetic oligonucleotide
uggcuacuggggcaaucuc

SEQ ID NO: 2302185 - RNA, 19 nt, Artificial Sequence
  Description of Artificial Sequence: Synthetic oligonucleotide
ggaucuuccaggucgugua

SEQ ID NO: 2302186 - RNA, 19 nt, Artificial Sequence
  Description of Artificial Sequence: Synthetic oligonucleotide
ucccacuugagugcuucaa

SEQ ID NO: 2302187 - RNA, 19 nt, Artificial Sequence
  Description of Artificial Sequence: Synthetic oligonucleotide
gguugguaggccaagauuu

SEQ ID NO: 2302188 - RNA, 19 nt, Artificial Sequence
  Description of Artificial Sequence: Synthetic oligonucleotide
gagcaugucuggaguacca

SEQ ID NO: 2302189 - RNA, 19 nt, Artificial Sequence
  Description of Artificial Sequence: Synthetic oligonucleotide
uucccacuugagugcuuca

SEQ ID NO: 2302190 - RNA, 19 nt, Artificial Sequence
  Description of Artificial Sequence: Synthetic oligonucleotide
aucucuucuuagguccaca

SEQ ID NO: 2302191 - RNA, 19 nt, Artificial Sequence
  Description of Artificial Sequence: Synthetic oligonucleotide
caucgagacacggggacca

SEQ ID NO: 2302192 - RNA, 19 nt, Artificial Sequence
  Description of Artificial Sequence: Synthetic oligonucleotide
gagugguuggaagguguca

SEQ ID NO: 2302193 - RNA, 19 nt, Artificial Sequence
  Description of Artificial Sequence: Synthetic oligonucleotide
uaaugggaggguggcuacu

SEQ ID NO: 2302194 - RNA, 19 nt, Artificial Sequence
  Description of Artificial Sequence: Synthetic oligonucleotide
ugaaacgguuuuggagaaa

SEQ ID NO: 2302195 - RNA, 19 nt, Artificial Sequence
  Description of Artificial Sequence: Synthetic oligonucleotide
cgagacacggggaccaggg

SEQ ID NO: 2302196 - RNA, 19 nt, Artificial Sequence
  Description of Artificial Sequence: Synthetic oligonucleotide
gaagaaggucgcagcccug

SEQ ID NO: 2302197 - RNA, 19 nt, Artificial Sequence
  Description of Artificial Sequence: Synthetic oligonucleotide
guagaccucuucaguuggc

SEQ ID NO: 2302198 - RNA, 19 nt, Artificial Sequence
  Description of Artificial Sequence: Synthetic oligonucleotide
cuucaguuggcucugcguu

SEQ ID NO: 2302199 - RNA, 19 nt, Artificial Sequence
  Description of Artificial Sequence: Synthetic oligonucleotide
uacggaggcuccgacuguc

SEQ ID NO: 2302200 - RNA, 19 nt, Artificial Sequence
  Description of Artificial Sequence: Synthetic oligonucleotide
uaggcgcuauugagauuga

SEQ ID NO: 2302201 - RNA, 19 nt, Artificial Sequence
  Description of Artificial Sequence: Synthetic oligonucleotide
cugucagccuaauauuggu

SEQ ID NO: 2302202 - RNA, 19 nt, Artificial Sequence
  Description of Artificial Sequence: Synthetic oligonucleotide
ccacuugagugcuucaaca

SEQ ID NO: 2302203 - RNA, 19 nt, Artificial Sequence
  Description of Artificial Sequence: Synthetic oligonucleotide
gucguguacggaggcuccg

SEQ ID NO: 2302204 - RNA, 19 nt, Artificial Sequence
  Description of Artificial Sequence: Synthetic oligonucleotide
gcugaucgaaaccgcuccc

SEQ ID NO: 2302205 - RNA, 19 nt, Artificial Sequence
  Description of Artificial Sequence: Synthetic oligonucleotide
cuacuggggcaaucucuuc

SEQ ID NO: 2302206 - RNA, 19 nt, Artificial Sequence
  Description of Artificial Sequence: Synthetic oligonucleotide
ucguguacggaggcuccga

SEQ ID NO: 2302207 - RNA, 19 nt, Artificial Sequence
  Description of Artificial Sequence: Synthetic oligonucleotide
cugaugagcuugaaacggu

SEQ ID NO: 2302208 - RNA, 19 nt, Artificial Sequence
  Description of Artificial Sequence: Synthetic oligonucleotide
uguaggcgcuauugagauu

SEQ ID NO: 2302209 - RNA, 19 nt, Artificial Sequence
  Description of Artificial Sequence: Synthetic oligonucleotide
aggacgggagccgguuggg

SEQ ID NO: 2302210 - RNA, 19 nt, Artificial Sequence
  Description of Artificial Sequence: Synthetic oligonucleotide
agcagaugugacacucaga

SEQ ID NO: 2302211 - RNA, 19 nt, Artificial Sequence
  Description of Artificial Sequence: Synthetic oligonucleotide
cacuccagggucugugcga

SEQ ID NO: 2302212 - RNA, 19 nt, Artificial Sequence
  Description of Artificial Sequence: Synthetic oligonucleotide
gcagguucugaagaagguc

SEQ ID NO: 2302213 - RNA, 19 nt, Artificial Sequence
  Description of Artificial Sequence: Synthetic oligonucleotide
cacaauauaucugguuggu

SEQ ID NO: 2302214 - RNA, 19 nt, Artificial Sequence
  Description of Artificial Sequence: Synthetic oligonucleotide
ggcgacacuccccugaggu

SEQ ID NO: 2302215 - RNA, 19 nt, Artificial Sequence
  Description of Artificial Sequence: Synthetic oligonucleotide
cgacuguccaucaggacuc

SEQ ID NO: 2302216 - RNA, 19 nt, Artificial Sequence
  Description of Artificial Sequence: Synthetic oligonucleotide
guccauuguuguguucaac

SEQ ID NO: 2302217 - RNA, 19 nt, Artificial Sequence
  Description of Artificial Sequence: Synthetic oligonucleotide
cugugcgauuggcaaccug

SEQ ID NO: 2302218 - RNA, 19 nt, Artificial Sequence
  Description of Artificial Sequence: Synthetic oligonucleotide
cuccccugagguccggauc

SEQ ID NO: 2302219 - RNA, 19 nt, Artificial Sequence
  Description of Artificial Sequence: Synthetic oligonucleotide
cugcguugaaguccccaca

SEQ ID NO: 2302220 - RNA, 19 nt, Artificial Sequence
  Description of Artificial Sequence: Synthetic oligonucleotide
acagguggucugaaggaua

SEQ ID NO: 2302221 - RNA, 19 nt, Artificial Sequence
  Description of Artificial Sequence: Synthetic oligonucleotide
ggucauggcugucagccua

SEQ ID NO: 2302222 - RNA, 19 nt, Artificial Sequence
  Description of Artificial Sequence: Synthetic oligonucleotide
cccacuugagugcuucaac

SEQ ID NO: 2302223 - RNA, 19 nt, Artificial Sequence
  Description of Artificial Sequence: Synthetic oligonucleotide
uuuaggggucauggcuguc

SEQ ID NO: 2302224 - RNA, 19 nt, Artificial Sequence
  Description of Artificial Sequence: Synthetic oligonucleotide
gcccugagcugaucgaaac

SEQ ID NO: 2302225 - RNA, 19 nt, Artificial Sequence
  Description of Artificial Sequence: Synthetic oligonucleotide
cccugagcugaucgaaacc

SEQ ID NO: 2302226 - RNA, 19 nt, Artificial Sequence
  Description of Artificial Sequence: Synthetic oligonucleotide
cgacacuccccugaggucc

SEQ ID NO: 2302227 - RNA, 19 nt, Artificial Sequence
  Description of Artificial Sequence: Synthetic oligonucleotide
gccggauuuccuugcacuc

SEQ ID NO: 2302228 - RNA, 19 nt, Artificial Sequence
  Description of Artificial Sequence: Synthetic oligonucleotide
ucugugcgauuggcaaccu

SEQ ID NO: 2302229 - RNA, 19 nt, Artificial Sequence
  Description of Artificial Sequence: Synthetic oligonucleotide
cuacugaggagugguugga

SEQ ID NO: 2302230 - RNA, 19 nt, Artificial Sequence
  Description of Artificial Sequence: Synthetic oligonucleotide
gguguggcgacacuccccu

SEQ ID NO: 2302231 - RNA, 19 nt, Artificial Sequence
  Description of Artificial Sequence: Synthetic oligonucleotide
cuugguagcccagucuacu

SEQ ID NO: 2302232 - RNA, 19 nt, Artificial Sequence
  Description of Artificial Sequence: Synthetic oligonucleotide
uugggcccaaucuguucuu

SEQ ID NO: 2302233 - RNA, 19 nt, Artificial Sequence
  Description of Artificial Sequence: Synthetic oligonucleotide
gaugagcuugaaacgguuu

SEQ ID NO: 2302234 - RNA, 19 nt, Artificial Sequence
  Description of Artificial Sequence: Synthetic oligonucleotide
agcagcuuguaggcgcuau

SEQ ID NO: 2302235 - RNA, 19 nt, Artificial Sequence
  Description of Artificial Sequence: Synthetic oligonucleotide
cagucuacugaggaguggu

SEQ ID NO: 2302236 - RNA, 19 nt, Artificial Sequence
  Description of Artificial Sequence: Synthetic oligonucleotide
gacagguggucugaaggau

SEQ ID NO: 2302237 - RNA, 19 nt, Artificial Sequence
  Description of Artificial Sequence: Synthetic oligonucleotide
aucgagacacggggaccag

SEQ ID NO: 2302238 - RNA, 19 nt, Artificial Sequence
  Description of Artificial Sequence: Synthetic oligonucleotide
cugguccauuguuguguuc

SEQ ID NO: 2302239 - RNA, 19 nt, Artificial Sequence
  Description of Artificial Sequence: Synthetic oligonucleotide
ggucgcagcccugagcuga

SEQ ID NO: 2302240 - RNA, 19 nt, Artificial Sequence
  Description of Artificial Sequence: Synthetic oligonucleotide
cccagucuacugaggagug

SEQ ID NO: 2302241 - RNA, 19 nt, Artificial Sequence
  Description of Artificial Sequence: Synthetic oligonucleotide
cacucagagcaugucugga

SEQ ID NO: 2302242 - RNA, 19 nt, Artificial Sequence
  Description of Artificial Sequence: Synthetic oligonucleotide
ccggauuuccuugcacucc

SEQ ID NO: 2302243 - RNA, 19 nt, Artificial Sequence
  Description of Artificial Sequence: Synthetic oligonucleotide
aggucgcagcccugagcug

SEQ ID NO: 2302244 - RNA, 19 nt, Artificial Sequence
  Description of Artificial Sequence: Synthetic oligonucleotide
cgcagcccugagcugaucg

SEQ ID NO: 2302245 - RNA, 19 nt, Artificial Sequence
  Description of Artificial Sequence: Synthetic oligonucleotide
ggucguguacggaggcucc

SEQ ID NO: 2302246 - RNA, 19 nt, Artificial Sequence
  Description of Artificial Sequence: Synthetic oligonucleotide
gguaacagcaacgcagaau

SEQ ID NO: 2302247 - RNA, 19 nt, Artificial Sequence
  Description of Artificial Sequence: Synthetic oligonucleotide
cuggaguaccagauguaau

SEQ ID NO: 2302248 - RNA, 19 nt, Artificial Sequence
  Description of Artificial Sequence: Synthetic oligonucleotide
ccuugguagcccagucuac

SEQ ID NO: 2302249 - RNA, 19 nt, Artificial Sequence
  Description of Artificial Sequence: Synthetic oligonucleotide
cucugcguugaagucccca

SEQ ID NO: 2302250 - RNA, 19 nt, Artificial Sequence
  Description of Artificial Sequence: Synthetic oligonucleotide
ccgacuguccaucaggacu

SEQ ID NO: 2302251 - RNA, 19 nt, Artificial Sequence
  Description of Artificial Sequence: Synthetic oligonucleotide
ggcuccgacuguccaucag

SEQ ID NO: 2302252 - RNA, 19 nt, Artificial Sequence
  Description of Artificial Sequence: Synthetic oligonucleotide
guggcuacuggggcaaucu

SEQ ID NO: 2302253 - RNA, 19 nt, Artificial Sequence
  Description of Artificial Sequence: Synthetic oligonucleotide
aggcuccgacuguccauca

SEQ ID NO: 2302254 - RNA, 19 nt, Artificial Sequence
  Description of Artificial Sequence: Synthetic oligonucleotide
ccagucuacugaggagugg

SEQ ID NO: 2302255 - RNA, 19 nt, Artificial Sequence
  Description of Artificial Sequence: Synthetic oligonucleotide
ccacugcaugacucuaaug

SEQ ID NO: 2302256 - RNA, 19 nt, Artificial Sequence
  Description of Artificial Sequence: Synthetic oligonucleotide
ggccggauuuccuugcacu

SEQ ID NO: 2302257 - RNA, 19 nt, Artificial Sequence
  Description of Artificial Sequence: Synthetic oligonucleotide
ggccaagauuuccuccaga

SEQ ID NO: 2302258 - RNA, 19 nt, Artificial Sequence
  Description of Artificial Sequence: Synthetic oligonucleotide
guguacggaggcuccgacu

SEQ ID NO: 2302259 - RNA, 19 nt, Artificial Sequence
  Description of Artificial Sequence: Synthetic oligonucleotide
agucuacugaggagugguu

SEQ ID NO: 2302260 - RNA, 19 nt, Artificial Sequence
  Description of Artificial Sequence: Synthetic oligonucleotide
gguccauuguuguguucaa

SEQ ID NO: 2302261 - RNA, 19 nt, Artificial Sequence
  Description of Artificial Sequence: Synthetic oligonucleotide
augugccuugguagcccag

SEQ ID NO: 2302262 - RNA, 19 nt, Artificial Sequence
  Description of Artificial Sequence: Synthetic oligonucleotide
gucuggaguaccagaugua

SEQ ID NO: 2302263 - RNA, 19 nt, Artificial Sequence
  Description of Artificial Sequence: Synthetic oligonucleotide
gacacggggaccagggcuu

SEQ ID NO: 2302264 - RNA, 19 nt, Artificial Sequence
  Description of Artificial Sequence: Synthetic oligonucleotide
cuuccaggucguguacgga

SEQ ID NO: 2302265 - RNA, 19 nt, Artificial Sequence
  Description of Artificial Sequence: Synthetic oligonucleotide
agcccugagcugaucgaaa

SEQ ID NO: 2302266 - RNA, 19 nt, Artificial Sequence
  Description of Artificial Sequence: Synthetic oligonucleotide
cauggcugucagccuaaua

SEQ ID NO: 2302267 - RNA, 19 nt, Artificial Sequence
  Description of Artificial Sequence: Synthetic oligonucleotide
ccaucugguccauuguugu

SEQ ID NO: 2302268 - RNA, 19 nt, Artificial Sequence
  Description of Artificial Sequence: Synthetic oligonucleotide
gcguugaaguccccacaga

SEQ ID NO: 2302269 - RNA, 19 nt, Artificial Sequence
  Description of Artificial Sequence: Synthetic oligonucleotide
ggcuacuggggcaaucucu

SEQ ID NO: 2302270 - RNA, 19 nt, Artificial Sequence
  Description of Artificial Sequence: Synthetic oligonucleotide
gcccagucuacugaggagu

SEQ ID NO: 2302271 - RNA, 19 nt, Artificial Sequence
  Description of Artificial Sequence: Synthetic oligonucleotide
cacagacaaucaagggaau

SEQ ID NO: 2302272 - RNA, 19 nt, Artificial Sequence
  Description of Artificial Sequence: Synthetic oligonucleotide
gguccggaucuuccagguc

SEQ ID NO: 2302273 - RNA, 19 nt, Artificial Sequence
  Description of Artificial Sequence: Synthetic oligonucleotide
cagcccugagcugaucgaa

SEQ ID NO: 2302274 - RNA, 19 nt, Artificial Sequence
  Description of Artificial Sequence: Synthetic oligonucleotide
gcgacacuccccugagguc

SEQ ID NO: 2302275 - RNA, 19 nt, Artificial Sequence
  Description of Artificial Sequence: Synthetic oligonucleotide
cuggggcaaucucuucuua

SEQ ID NO: 2302276 - RNA, 19 nt, Artificial Sequence
  Description of Artificial Sequence: Synthetic oligonucleotide
acacuccccugagguccgg

SEQ ID NO: 2302277 - RNA, 19 nt, Artificial Sequence
  Description of Artificial Sequence: Synthetic oligonucleotide
ggguaacagcaacgcagaa

SEQ ID NO: 2302278 - RNA, 19 nt, Artificial Sequence
  Description of Artificial Sequence: Synthetic oligonucleotide
ucccagccagagcgggcuu

SEQ ID NO: 2302279 - RNA, 19 nt, Artificial Sequence
  Description of Artificial Sequence: Synthetic oligonucleotide
guacggaggcuccgacugu

SEQ ID NO: 2302280 - RNA, 19 nt, Artificial Sequence
  Description of Artificial Sequence: Synthetic oligonucleotide
ggacgggagccgguugggc

SEQ ID NO: 2302281 - RNA, 19 nt, Artificial Sequence
  Description of Artificial Sequence: Synthetic oligonucleotide
cguguacggaggcuccgac

SEQ ID NO: 2302282 - RNA, 19 nt, Artificial Sequence
  Description of Artificial Sequence: Synthetic oligonucleotide
cagccaucugguccauugu

SEQ ID NO: 2302283 - RNA, 19 nt, Artificial Sequence
  Description of Artificial Sequence: Synthetic oligonucleotide
caggacucagcagcuugua

SEQ ID NO: 2302284 - RNA, 19 nt, Artificial Sequence
  Description of Artificial Sequence: Synthetic oligonucleotide
gcuacuggggcaaucucuu

SEQ ID NO: 2302285 - RNA, 19 nt, Artificial Sequence
  Description of Artificial Sequence: Synthetic oligonucleotide
gugcgauuggcaaccugau

SEQ ID NO: 2302286 - RNA, 19 nt, Artificial Sequence
  Description of Artificial Sequence: Synthetic oligonucleotide
ccaagauuuccuccagaau

SEQ ID NO: 2302287 - RNA, 19 nt, Artificial Sequence
  Description of Artificial Sequence: Synthetic oligonucleotide
ggaggcuccgacuguccau

SEQ ID NO: 2302288 - RNA, 19 nt, Artificial Sequence
  Description of Artificial Sequence: Synthetic oligonucleotide
ccgguugggcccaaucugu

SEQ ID NO: 2302289 - RNA, 19 nt, Artificial Sequence
  Description of Artificial Sequence: Synthetic oligonucleotide
cgcuauugagauugaggcu

SEQ ID NO: 2302290 - RNA, 19 nt, Artificial Sequence
  Description of Artificial Sequence: Synthetic oligonucleotide
ucgcagcccugagcugauc

SEQ ID NO: 2302291 - RNA, 19 nt, Artificial Sequence
  Description of Artificial Sequence: Synthetic oligonucleotide
gguccacuucuuggaggca

SEQ ID NO: 2302292 - RNA, 19 nt, Artificial Sequence
  Description of Artificial Sequence: Synthetic oligonucleotide
ccaagagcuugggcaagga

SEQ ID NO: 2302293 - RNA, 19 nt, Artificial Sequence
  Description of Artificial Sequence: Synthetic oligonucleotide
cuugcacuccagggucugu

SEQ ID NO: 2302294 - RNA, 19 nt, Artificial Sequence
  Description of Artificial Sequence: Synthetic oligonucleotide
caguuggcucugcguugaa

SEQ ID NO: 2302295 - RNA, 19 nt, Artificial Sequence
  Description of Artificial Sequence: Synthetic oligonucleotide
caggucguguacggaggcu

SEQ ID NO: 2302296 - RNA, 19 nt, Artificial Sequence
  Description of Artificial Sequence: Synthetic oligonucleotide
cacuucuuggaggcacaau

SEQ ID NO: 2302297 - RNA, 19 nt, Artificial Sequence
  Description of Artificial Sequence: Synthetic oligonucleotide
cacuccccugagguccgga

SEQ ID NO: 2302298 - RNA, 19 nt, Artificial Sequence
  Description of Artificial Sequence: Synthetic oligonucleotide
cccugagguccggaucuuc

SEQ ID NO: 2302299 - RNA, 19 nt, Artificial Sequence
  Description of Artificial Sequence: Synthetic oligonucleotide
cgcagaauugucggccgga

SEQ ID NO: 2302300 - RNA, 19 nt, Artificial Sequence
  Description of Artificial Sequence: Synthetic oligonucleotide
cggaggcuccgacugucca

SEQ ID NO: 2302301 - RNA, 19 nt, Artificial Sequence
  Description of Artificial Sequence: Synthetic oligonucleotide
ccggaucuuccaggucgug

SEQ ID NO: 2302302 - RNA, 19 nt, Artificial Sequence
  Description of Artificial Sequence: Synthetic oligonucleotide
gagcuugggcaaggauguu

SEQ ID NO: 2302303 - RNA, 19 nt, Artificial Sequence
  Description of Artificial Sequence: Synthetic oligonucleotide
gucgcagcccugagcugau

SEQ ID NO: 2302304 - RNA, 19 nt, Artificial Sequence
  Description of Artificial Sequence: Synthetic oligonucleotide
gcucugcguugaagucccc

SEQ ID NO: 2302305 - RNA, 19 nt, Artificial Sequence
  Description of Artificial Sequence: Synthetic oligonucleotide
cgguugggcccaaucuguu

SEQ ID NO: 2302306 - RNA, 19 nt, Artificial Sequence
  Description of Artificial Sequence: Synthetic oligonucleotide
cgggagccgguugggccca

SEQ ID NO: 2302307 - RNA, 19 nt, Artificial Sequence
  Description of Artificial Sequence: Synthetic oligonucleotide
ggagccgguugggcccaau

SEQ ID NO: 2302308 - RNA, 19 nt, Artificial Sequence
  Description of Artificial Sequence: Synthetic oligonucleotide
ggguggcuacuggggcaau

SEQ ID NO: 2302309 - RNA, 19 nt, Artificial Sequence
  Description of Artificial Sequence: Synthetic oligonucleotide
uccuagaguacucagaggg

SEQ ID NO: 2302310 - RNA, 19 nt, Artificial Sequence
  Description of Artificial Sequence: Synthetic oligonucleotide
aaggagguagcuucagucc

SEQ ID NO: 2302311 - RNA, 19 nt, Artificial Sequence
  Description of Artificial Sequence: Synthetic oligonucleotide
agaaccaacagccacagcu

SEQ ID NO: 2302312 - RNA, 19 nt, Artificial Sequence
  Description of Artificial Sequence: Synthetic oligonucleotide
ucagauacagucuugggcu

SEQ ID NO: 2302313 - RNA, 19 nt, Artificial Sequence
  Description of Artificial Sequence: Synthetic oligonucleotide
cuuagcacgagacucacgg

SEQ ID NO: 2302314 - RNA, 19 nt, Artificial Sequence
  Description of Artificial Sequence: Synthetic oligonucleotide
uguccuagaguacucagag

SEQ ID NO: 2302315 - RNA, 19 nt, Artificial Sequence
  Description of Artificial Sequence: Synthetic oligonucleotide
uuugugggaagcauuuagg

SEQ ID NO: 2302316 - RNA, 19 nt, Artificial Sequence
  Description of Artificial Sequence: Synthetic oligonucleotide
ugugacagaggcuugagac

SEQ ID NO: 2302317 - RNA, 19 nt, Artificial Sequence
  Description of Artificial Sequence: Synthetic oligonucleotide
gaaacgugucuuuagcagg

SEQ ID NO: 2302318 - RNA, 19 nt, Artificial Sequence
  Description of Artificial Sequence: Synthetic oligonucleotide
uuuagcaggagguaagcug

SEQ ID NO: 2302319 - RNA, 19 nt, Artificial Sequence
  Description of Artificial Sequence: Synthetic oligonucleotide
  modified_base (11)..(11): a, c, u, g, unknown or other
agcaacuggcnguugaugg

SEQ ID NO: 2302320 - RNA, 19 nt, Artificial Sequence
  Description of Artificial Sequence: Synthetic oligonucleotide
caaucuaacugccuggccc

SEQ ID NO: 2302321 - RNA, 19 nt, Artificial Sequence
  Description of Artificial Sequence: Synthetic oligonucleotide
aggagguagcuucaguccc

SEQ ID NO: 2302322 - RNA, 19 nt, Artificial Sequence
  Description of Artificial Sequence: Synthetic oligonucleotide
cuuuguaguuugcugaccc

SEQ ID NO: 2302323 - RNA, 19 nt, Artificial Sequence
  Description of Artificial Sequence: Synthetic oligonucleotide
uccuaaaagcagcaggggc

SEQ ID NO: 2302324 - RNA, 19 nt, Artificial Sequence
  Description of Artificial Sequence: Synthetic oligonucleotide
cucagauacagucuugggc

SEQ ID NO: 2302325 - RNA, 19 nt, Artificial Sequence
  Description of Artificial Sequence: Synthetic oligonucleotide
uuucagaaccaacagccac

SEQ ID NO: 2302326 - RNA, 19 nt, Artificial Sequence
  Description of Artificial Sequence: Synthetic oligonucleotide
  modified_base (2)..(2): a, c, u, g, unknown or other
cnguugauggcagugaggg

SEQ ID NO: 2302327 - RNA, 19 nt, Artificial Sequence
  Description of Artificial Sequence: Synthetic oligonucleotide
gcuacaggaacuuggaagg

SEQ ID NO: 2302328 - RNA, 19 nt, Artificial Sequence
  Description of Artificial Sequence: Synthetic oligonucleotide
aaucuaacugccuggcccu

SEQ ID NO: 2302329 - RNA, 19 nt, Artificial Sequence
  Description of Artificial Sequence: Synthetic oligonucleotide
uagcacgagacucacggag

SEQ ID NO: 2302330 - RNA, 19 nt, Artificial Sequence
  Description of Artificial Sequence: Synthetic oligonucleotide
uucagaaccaacagccaca

SEQ ID NO: 2302331 - RNA, 19 nt, Artificial Sequence
  Description of Artificial Sequence: Synthetic oligonucleotide
agacaaucuaacugccugg

SEQ ID NO: 2302332 - RNA, 19 nt, Artificial Sequence
  Description of Artificial Sequence: Synthetic oligonucleotide
ugacaucccagucaccugc

SEQ ID NO: 2302333 - RNA, 19 nt, Artificial Sequence
  Description of Artificial Sequence: Synthetic oligonucleotide
gaaggagguagcuucaguc

SEQ ID NO: 2302334 - RNA, 19 nt, Artificial Sequence
  Description of Artificial Sequence: Synthetic oligonucleotide
cuuugugggaagcauuuag

SEQ ID NO: 2302335 - RNA, 19 nt, Artificial Sequence
  Description of Artificial Sequence: Synthetic oligonucleotide
uuuguaguuugcugacccg

SEQ ID NO: 2302336 - RNA, 19 nt, Artificial Sequence
  Description of Artificial Sequence: Synthetic oligonucleotide
guagcuucagucccgcacg

SEQ ID NO: 2302337 - RNA, 19 nt, Artificial Sequence
  Description of Artificial Sequence: Synthetic oligonucleotide
aggggcaagaccuuggaca

SEQ ID NO: 2302338 - RNA, 19 nt, Artificial Sequence
  Description of Artificial Sequence: Synthetic oligonucleotide
uuguaguuugcugacccgg

SEQ ID NO: 2302339 - RNA, 19 nt, Artificial Sequence
  Description of Artificial Sequence: Synthetic oligonucleotide
ugaggggcuguacaggcag

SEQ ID NO: 2302340 - RNA, 19 nt, Artificial Sequence
  Description of Artificial Sequence: Synthetic oligonucleotide
agaggcuugagacuguccu

SEQ ID NO: 2302341 - RNA, 19 nt, Artificial Sequence
  Description of Artificial Sequence: Synthetic oligonucleotide
acuguuggguggcagagug

SEQ ID NO: 2302342 - RNA, 19 nt, Artificial Sequence
  Description of Artificial Sequence: Synthetic oligonucleotide
aggccagacaaucuaacug

SEQ ID NO: 2302343 - RNA, 19 nt, Artificial Sequence
  Description of Artificial Sequence: Synthetic oligonucleotide
cacugucacuuucagaacc

SEQ ID NO: 2302344 - RNA, 19 nt, Artificial Sequence
  Description of Artificial Sequence: Synthetic oligonucleotide
auuuaggggaaugguuugc

SEQ ID NO: 2302345 - RNA, 19 nt, Artificial Sequence
  Description of Artificial Sequence: Synthetic oligonucleotide
gaguagccuucuuagcacg

SEQ ID NO: 2302346 - RNA, 19 nt, Artificial Sequence
  Description of Artificial Sequence: Synthetic oligonucleotide
ugacagaggcuugagacug

SEQ ID NO: 2302347 - RNA, 19 nt, Artificial Sequence
  Description of Artificial Sequence: Synthetic oligonucleotide
uguaguuugcugacccggc

SEQ ID NO: 2302348 - RNA, 19 nt, Artificial Sequence
  Description of Artificial Sequence: Synthetic oligonucleotide
ugaguagccuucuuagcac

SEQ ID NO: 2302349 - RNA, 19 nt, Artificial Sequence
  Description of Artificial Sequence: Synthetic oligonucleotide
uuaaguuccaggucaccaa

SEQ ID NO: 2302350 - RNA, 19 nt, Artificial Sequence
  Description of Artificial Sequence: Synthetic oligonucleotide
uugcuuguauccugcaggc

SEQ ID NO: 2302351 - RNA, 19 nt, Artificial Sequence
  Description of Artificial Sequence: Synthetic oligonucleotide
  modified_base (14)..(14): a, c, u, g, unknown or other
aucagcaacuggcnguuga

SEQ ID NO: 2302352 - RNA, 19 nt, Artificial Sequence
  Description of Artificial Sequence: Synthetic oligonucleotide
aagagagccaggaaacgug

SEQ ID NO: 2302353 - RNA, 19 nt, Artificial Sequence
  Description of Artificial Sequence: Synthetic oligonucleotide
uagaguacucagagggcag

SEQ ID NO: 2302354 - RNA, 19 nt, Artificial Sequence
  Description of Artificial Sequence: Synthetic oligonucleotide
uuggccggaggccaccugg

SEQ ID NO: 2302355 - RNA, 19 nt, Artificial Sequence
  Description of Artificial Sequence: Synthetic oligonucleotide
uugggcuuuggccggaggc

SEQ ID NO: 2302356 - RNA, 19 nt, Artificial Sequence
  Description of Artificial Sequence: Synthetic oligonucleotide
ucagaaccaacagccacag

SEQ ID NO: 2302357 - RNA, 19 nt, Artificial Sequence
  Description of Artificial Sequence: Synthetic oligonucleotide
acgagacucacggagccgc

SEQ ID NO: 2302358 - RNA, 19 nt, Artificial Sequence
  Description of Artificial Sequence: Synthetic oligonucleotide
caagaccuuggacaggccc

SEQ ID NO: 2302359 - RNA, 19 nt, Artificial Sequence
  Description of Artificial Sequence: Synthetic oligonucleotide
cuucucacgaagcagcuca

SEQ ID NO: 2302360 - RNA, 19 nt, Artificial Sequence
  Description of Artificial Sequence: Synthetic oligonucleotide
aggaaacgugucuuuagca

SEQ ID NO: 2302361 - RNA, 19 nt, Artificial Sequence
  Description of Artificial Sequence: Synthetic oligonucleotide
agcucagauacagucuugg

SEQ ID NO: 2302362 - RNA, 19 nt, Artificial Sequence
  Description of Artificial Sequence: Synthetic oligonucleotide
acuguccuagaguacucag

SEQ ID NO: 2302363 - RNA, 19 nt, Artificial Sequence
  Description of Artificial Sequence: Synthetic oligonucleotide
cauuuaggggaaugguuug

SEQ ID NO: 2302364 - RNA, 19 nt, Artificial Sequence
  Description of Artificial Sequence: Synthetic oligonucleotide
uguccuuaaguuccagguc

SEQ ID NO: 2302365 - RNA, 19 nt, Artificial Sequence
  Description of Artificial Sequence: Synthetic oligonucleotide
agaguacucagagggcagc

SEQ ID NO: 2302366 - RNA, 19 nt, Artificial Sequence
  Description of Artificial Sequence: Synthetic oligonucleotide
caggaaacgugucuuuagc

SEQ ID NO: 2302367 - RNA, 19 nt, Artificial Sequence
  Description of Artificial Sequence: Synthetic oligonucleotide
gacaaucuaacugccuggc

SEQ ID NO: 2302368 - RNA, 19 nt, Artificial Sequence
  Description of Artificial Sequence: Synthetic oligonucleotide
ggccagacaaucuaacugc

SEQ ID NO: 2302369 - RNA, 19 nt, Artificial Sequence
  Description of Artificial Sequence: Synthetic oligonucleotide
agggccaggcuccuaaaag

SEQ ID NO: 2302370 - RNA, 19 nt, Artificial Sequence
  Description of Artificial Sequence: Synthetic oligonucleotide
cugaguagccuucuuagca

SEQ ID NO: 2302371 - RNA, 19 nt, Artificial Sequence
  Description of Artificial Sequence: Synthetic oligonucleotide
aaacgugucuuuagcagga

SEQ ID NO: 2302372 - RNA, 19 nt, Artificial Sequence
  Description of Artificial Sequence: Synthetic oligonucleotide
ucuuuagcaggagguaagc

SEQ ID NO: 2302373 - RNA, 19 nt, Artificial Sequence
  Description of Artificial Sequence: Synthetic oligonucleotide
ucuuagcacgagacucacg

SEQ ID NO: 2302374 - RNA, 19 nt, Artificial Sequence
  Description of Artificial Sequence: Synthetic oligonucleotide
aagcauuuaggggaauggu

SEQ ID NO: 2302375 - RNA, 19 nt, Artificial Sequence
  Description of Artificial Sequence: Synthetic oligonucleotide
uggcugacaucccagucac

SEQ ID NO: 2302376 - RNA, 19 nt, Artificial Sequence
  Description of Artificial Sequence: Synthetic oligonucleotide
uuaggggaaugguuugcug

SEQ ID NO: 2302377 - RNA, 19 nt, Artificial Sequence
  Description of Artificial Sequence: Synthetic oligonucleotide
acgugucuuuagcaggagg

SEQ ID NO: 2302378 - RNA, 19 nt, Artificial Sequence
  Description of Artificial Sequence: Synthetic oligonucleotide
cuguacaggcagcugagug

SEQ ID NO: 2302379 - RNA, 19 nt, Artificial Sequence
  Description of Artificial Sequence: Synthetic oligonucleotide
agacucacggagccgcuuc

SEQ ID NO: 2302380 - RNA, 19 nt, Artificial Sequence
  Description of Artificial Sequence: Synthetic oligonucleotide
agcugcuacaggaacuugg

SEQ ID NO: 2302381 - RNA, 19 nt, Artificial Sequence
  Description of Artificial Sequence: Synthetic oligonucleotide
cuucagucccgcacguucc

SEQ ID NO: 2302382 - RNA, 19 nt, Artificial Sequence
  Description of Artificial Sequence: Synthetic oligonucleotide
ugguuugcuggaguagggg

SEQ ID NO: 2302383 - RNA, 19 nt, Artificial Sequence
  Description of Artificial Sequence: Synthetic oligonucleotide
aguuugcugacccggcaug

SEQ ID NO: 2302384 - RNA, 19 nt, Artificial Sequence
  Description of Artificial Sequence: Synthetic oligonucleotide
acuggagaaugccugcaga

SEQ ID NO: 2302385 - RNA, 19 nt, Artificial Sequence
  Description of Artificial Sequence: Synthetic oligonucleotide
gcuccuaaaagcagcaggg

SEQ ID NO: 2302386 - RNA, 19 nt, Artificial Sequence
  Description of Artificial Sequence: Synthetic oligonucleotide
uuuaggggaaugguuugcu

SEQ ID NO: 2302387 - RNA, 19 nt, Artificial Sequence
  Description of Artificial Sequence: Synthetic oligonucleotide
agccuucuuagcacgagac

SEQ ID NO: 2302388 - RNA, 19 nt, Artificial Sequence
  Description of Artificial Sequence: Synthetic oligonucleotide
agcacgagacucacggagc

SEQ ID NO: 2302389 - RNA, 19 nt, Artificial Sequence
  Description of Artificial Sequence: Synthetic oligonucleotide
ugggcuugcuuguauccug

SEQ ID NO: 2302390 - RNA, 19 nt, Artificial Sequence
  Description of Artificial Sequence: Synthetic oligonucleotide
ucuuuguaguuugcugacc

SEQ ID NO: 2302391 - RNA, 19 nt, Artificial Sequence
  Description of Artificial Sequence: Synthetic oligonucleotide
cuaaaagcagcaggggcug

SEQ ID NO: 2302392 - RNA, 19 nt, Artificial Sequence
  Description of Artificial Sequence: Synthetic oligonucleotide
gacccggcaugcuugggag

SEQ ID NO: 2302393 - RNA, 19 nt, Artificial Sequence
  Description of Artificial Sequence: Synthetic oligonucleotide
aggcuugagacuguccuag

SEQ ID NO: 2302394 - RNA, 19 nt, Artificial Sequence
  Description of Artificial Sequence: Synthetic oligonucleotide
guacucagagggcagccug

SEQ ID NO: 2302395 - RNA, 19 nt, Artificial Sequence
  Description of Artificial Sequence: Synthetic oligonucleotide
  modified_base (13)..(13): a, c, u, g, unknown or other
ucagcaacuggcnguugau

SEQ ID NO: 2302396 - RNA, 19 nt, Artificial Sequence
  Description of Artificial Sequence: Synthetic oligonucleotide
ugacccggcaugcuuggga

SEQ ID NO: 2302397 - RNA, 19 nt, Artificial Sequence
  Description of Artificial Sequence: Synthetic oligonucleotide
ggagaaugccugcagaaga

SEQ ID NO: 2302398 - RNA, 19 nt, Artificial Sequence
  Description of Artificial Sequence: Synthetic oligonucleotide
cuuggacaggcccugcuuc

SEQ ID NO: 2302399 - RNA, 19 nt, Artificial Sequence
  Description of Artificial Sequence: Synthetic oligonucleotide
uggggacacuguugggugg

SEQ ID NO: 2302400 - RNA, 19 nt, Artificial Sequence
  Description of Artificial Sequence: Synthetic oligonucleotide
cuagaguacucagagggca

SEQ ID NO: 2302401 - RNA, 19 nt, Artificial Sequence
  Description of Artificial Sequence: Synthetic oligonucleotide
  modified_base (18)..(18): a, c, u, g, unknown or other
ggagaucagcaacuggcng

SEQ ID NO: 2302402 - RNA, 19 nt, Artificial Sequence
  Description of Artificial Sequence: Synthetic oligonucleotide
uucucacgaagcagcucag

SEQ ID NO: 2302403 - RNA, 19 nt, Artificial Sequence
  Description of Artificial Sequence: Synthetic oligonucleotide
uaguuugcugacccggcau

SEQ ID NO: 2302404 - RNA, 19 nt, Artificial Sequence
  Description of Artificial Sequence: Synthetic oligonucleotide
ugggugcuaggcuggagca

SEQ ID NO: 2302405 - RNA, 19 nt, Artificial Sequence
  Description of Artificial Sequence: Synthetic oligonucleotide
acagcuggugacagggugg

SEQ ID NO: 2302406 - RNA, 19 nt, Artificial Sequence
  Description of Artificial Sequence: Synthetic oligonucleotide
gaacuuggaaggagguagc

SEQ ID NO: 2302407 - RNA, 19 nt, Artificial Sequence
  Description of Artificial Sequence: Synthetic oligonucleotide
ugcaggccagacaaucuaa

SEQ ID NO: 2302408 - RNA, 19 nt, Artificial Sequence
  Description of Artificial Sequence: Synthetic oligonucleotide
gcuuguauccugcaggcca

SEQ ID NO: 2302409 - RNA, 19 nt, Artificial Sequence
  Description of Artificial Sequence: Synthetic oligonucleotide
gauacagucuugggcuuug

SEQ ID NO: 2302410 - RNA, 19 nt, Artificial Sequence
  Description of Artificial Sequence: Synthetic oligonucleotide
gguagcuucagucccgcac

SEQ ID NO: 2302411 - RNA, 19 nt, Artificial Sequence
  Description of Artificial Sequence: Synthetic oligonucleotide
uucagucccgcacguuccc

SEQ ID NO: 2302412 - RNA, 19 nt, Artificial Sequence
  Description of Artificial Sequence: Synthetic oligonucleotide
uuagcacgagacucacgga

SEQ ID NO: 2302413 - RNA, 19 nt, Artificial Sequence
  Description of Artificial Sequence: Synthetic oligonucleotide
  modified_base (10)..(10): a, c, u, g, unknown or other
gcaacuggcnguugauggc

SEQ ID NO: 2302414 - RNA, 19 nt, Artificial Sequence
  Description of Artificial Sequence: Synthetic oligonucleotide
guggcugacaucccaguca

SEQ ID NO: 2302415 - RNA, 19 nt, Artificial Sequence
  Description of Artificial Sequence: Synthetic oligonucleotide
  modified_base (4)..(4): a, c, u, g, unknown or other
ggcnguugauggcagugag

SEQ ID NO: 2302416 - RNA, 19 nt, Artificial Sequence
  Description of Artificial Sequence: Synthetic oligonucleotide
ucccgcacguucccagccg

SEQ ID NO: 2302417 - RNA, 19 nt, Artificial Sequence
  Description of Artificial Sequence: Synthetic oligonucleotide
  modified_base (16)..(16): a, c, u, g, unknown or other
agaucagcaacuggcnguu

SEQ ID NO: 2302418 - RNA, 19 nt, Artificial Sequence
  Description of Artificial Sequence: Synthetic oligonucleotide
guaagcugggguuguccug

SEQ ID NO: 2302419 - RNA, 19 nt, Artificial Sequence
  Description of Artificial Sequence: Synthetic oligonucleotide
aacgugucuuuagcaggag

SEQ ID NO: 2302420 - RNA, 19 nt, Artificial Sequence
  Description of Artificial Sequence: Synthetic oligonucleotide
uuggacaggcccugcuucu

SEQ ID NO: 2302421 - RNA, 19 nt, Artificial Sequence
  Description of Artificial Sequence: Synthetic oligonucleotide
ugggcuuuggccggaggcc

SEQ ID NO: 2302422 - RNA, 19 nt, Artificial Sequence
  Description of Artificial Sequence: Synthetic oligonucleotide
cuguccuuaaguuccaggu

SEQ ID NO: 2302423 - RNA, 19 nt, Artificial Sequence
  Description of Artificial Sequence: Synthetic oligonucleotide
uucuuagcacgagacucac

SEQ ID NO: 2302424 - RNA, 19 nt, Artificial Sequence
  Description of Artificial Sequence: Synthetic oligonucleotide
gagacuguccuagaguacu

SEQ ID NO: 2302425 - RNA, 19 nt, Artificial Sequence
  Description of Artificial Sequence: Synthetic oligonucleotide
  modified_base (8)..(8): a, c, u, g, unknown or other
aacuggcnguugauggcag

SEQ ID NO: 2302426 - RNA, 19 nt, Artificial Sequence
  Description of Artificial Sequence: Synthetic oligonucleotide
gcuugagacuguccuagag

SEQ ID NO: 2302427 - RNA, 19 nt, Artificial Sequence
  Description of Artificial Sequence: Synthetic oligonucleotide
ggcaagaccuuggacaggc

SEQ ID NO: 2302428 - RNA, 19 nt, Artificial Sequence
  Description of Artificial Sequence: Synthetic oligonucleotide
aggagguaagcugggguug

SEQ ID NO: 2302429 - RNA, 19 nt, Artificial Sequence
  Description of Artificial Sequence: Synthetic oligonucleotide
cugacugaggggcuguaca

SEQ ID NO: 2302430 - RNA, 19 nt, Artificial Sequence
  Description of Artificial Sequence: Synthetic oligonucleotide
ccaggcuccuaaaagcagc

SEQ ID NO: 2302431 - RNA, 19 nt, Artificial Sequence
  Description of Artificial Sequence: Synthetic oligonucleotide
ggagccgcuucucacgaag

SEQ ID NO: 2302432 - RNA, 19 nt, Artificial Sequence
  Description of Artificial Sequence: Synthetic oligonucleotide
agcauuuaggggaaugguu

SEQ ID NO: 2302433 - RNA, 19 nt, Artificial Sequence
  Description of Artificial Sequence: Synthetic oligonucleotide
cuguuggguggcagagugg

SEQ ID NO: 2302434 - RNA, 19 nt, Artificial Sequence
  Description of Artificial Sequence: Synthetic oligonucleotide
uguggcugucucucuuugu

SEQ ID NO: 2302435 - RNA, 19 nt, Artificial Sequence
  Description of Artificial Sequence: Synthetic oligonucleotide
cuuccucucgcggaccacc

SEQ ID NO: 2302436 - RNA, 19 nt, Artificial Sequence
  Description of Artificial Sequence: Synthetic oligonucleotide
gcucagauacagucuuggg

SEQ ID NO: 2302437 - RNA, 19 nt, Artificial Sequence
  Description of Artificial Sequence: Synthetic oligonucleotide
  modified_base (7)..(7): a, c, u, g, unknown or other
acuggcnguugauggcagu

SEQ ID NO: 2302438 - RNA, 19 nt, Artificial Sequence
  Description of Artificial Sequence: Synthetic oligonucleotide
uggcccuguccuuaaguuc

SEQ ID NO: 2302439 - RNA, 19 nt, Artificial Sequence
  Description of Artificial Sequence: Synthetic oligonucleotide
acguucccagccguggacg

SEQ ID NO: 2302440 - RNA, 19 nt, Artificial Sequence
  Description of Artificial Sequence: Synthetic oligonucleotide
gcagugagggccugaguag

SEQ ID NO: 2302441 - RNA, 19 nt, Artificial Sequence
  Description of Artificial Sequence: Synthetic oligonucleotide
gaagagagccaggaaacgu

SEQ ID NO: 2302442 - RNA, 19 nt, Artificial Sequence
  Description of Artificial Sequence: Synthetic oligonucleotide
guaguuugcugacccggca

SEQ ID NO: 2302443 - RNA, 19 nt, Artificial Sequence
  Description of Artificial Sequence: Synthetic oligonucleotide
  modified_base (19)..(19): a, c, u, g, unknown or other
aggagaucagcaacuggcn

SEQ ID NO: 2302444 - RNA, 19 nt, Artificial Sequence
  Description of Artificial Sequence: Synthetic oligonucleotide
cuggagaaugccugcagaa

SEQ ID NO: 2302445 - RNA, 19 nt, Artificial Sequence
  Description of Artificial Sequence: Synthetic oligonucleotide
  modified_base (5)..(5): a, c, u, g, unknown or other
uggcnguugauggcaguga

SEQ ID NO: 2302446 - RNA, 19 nt, Artificial Sequence
  Description of Artificial Sequence: Synthetic oligonucleotide
  modified_base (6)..(6): a, c, u, g, unknown or other
cuggcnguugauggcagug

SEQ ID NO: 2302447 - RNA, 19 nt, Artificial Sequence
  Description of Artificial Sequence: Synthetic oligonucleotide
guagccuucuuagcacgag

SEQ ID NO: 2302448 - RNA, 19 nt, Artificial Sequence
  Description of Artificial Sequence: Synthetic oligonucleotide
guuugcugacccggcaugc

SEQ ID NO: 2302449 - RNA, 19 nt, Artificial Sequence
  Description of Artificial Sequence: Synthetic oligonucleotide
ccuagaguacucagagggc

SEQ ID NO: 2302450 - RNA, 19 nt, Artificial Sequence
  Description of Artificial Sequence: Synthetic oligonucleotide
cuguccuagaguacucaga

SEQ ID NO: 2302451 - RNA, 19 nt, Artificial Sequence
  Description of Artificial Sequence: Synthetic oligonucleotide
ugcugggcuugcuuguauc

SEQ ID NO: 2302452 - RNA, 19 nt, Artificial Sequence
  Description of Artificial Sequence: Synthetic oligonucleotide
ccaggaaacgugucuuuag

SEQ ID NO: 2302453 - RNA, 19 nt, Artificial Sequence
  Description of Artificial Sequence: Synthetic oligonucleotide
ugguggggacacuguuggg

SEQ ID NO: 2302454 - RNA, 19 nt, Artificial Sequence
  Description of Artificial Sequence: Synthetic oligonucleotide
uguauccugcaggccagac

SEQ ID NO: 2302455 - RNA, 19 nt, Artificial Sequence
  Description of Artificial Sequence: Synthetic oligonucleotide
agacuguccuagaguacuc

SEQ ID NO: 2302456 - RNA, 19 nt, Artificial Sequence
  Description of Artificial Sequence: Synthetic oligonucleotide
gagguagcuucagucccgc

SEQ ID NO: 2302457 - RNA, 19 nt, Artificial Sequence
  Description of Artificial Sequence: Synthetic oligonucleotide
ucugacugaggggcuguac

SEQ ID NO: 2302458 - RNA, 19 nt, Artificial Sequence
  Description of Artificial Sequence: Synthetic oligonucleotide
uggacgcccuuuguggcug

SEQ ID NO: 2302459 - RNA, 19 nt, Artificial Sequence
  Description of Artificial Sequence: Synthetic oligonucleotide
auggcagugagggccugag

SEQ ID NO: 2302460 - RNA, 19 nt, Artificial Sequence
  Description of Artificial Sequence: Synthetic oligonucleotide
gcuucagucccgcacguuc

SEQ ID NO: 2302461 - RNA, 19 nt, Artificial Sequence
  Description of Artificial Sequence: Synthetic oligonucleotide
ccguggacgcccuuugugg

SEQ ID NO: 2302462 - RNA, 19 nt, Artificial Sequence
  Description of Artificial Sequence: Synthetic oligonucleotide
uggggaccugccugggagc

SEQ ID NO: 2302463 - RNA, 19 nt, Artificial Sequence
  Description of Artificial Sequence: Synthetic oligonucleotide
ucucacgaagcagcucaga

SEQ ID NO: 2302464 - RNA, 19 nt, Artificial Sequence
  Description of Artificial Sequence: Synthetic oligonucleotide
uuuggccggaggccaccug

SEQ ID NO: 2302465 - RNA, 19 nt, Artificial Sequence
  Description of Artificial Sequence: Synthetic oligonucleotide
acggagccgcuucucacga

SEQ ID NO: 2302466 - RNA, 19 nt, Artificial Sequence
  Description of Artificial Sequence: Synthetic oligonucleotide
ggagguagcuucagucccg

SEQ ID NO: 2302467 - RNA, 19 nt, Artificial Sequence
  Description of Artificial Sequence: Synthetic oligonucleotide
cuugggcuuuggccggagg

SEQ ID NO: 2302468 - RNA, 19 nt, Artificial Sequence
  Description of Artificial Sequence: Synthetic oligonucleotide
gacuguccuagaguacuca

SEQ ID NO: 2302469 - RNA, 19 nt, Artificial Sequence
  Description of Artificial Sequence: Synthetic oligonucleotide
uugcugacccggcaugcuu

SEQ ID NO: 2302470 - RNA, 19 nt, Artificial Sequence
  Description of Artificial Sequence: Synthetic oligonucleotide
  modified_base (9)..(9): a, c, u, g, unknown or other
caacuggcnguugauggca

SEQ ID NO: 2302471 - RNA, 19 nt, Artificial Sequence
  Description of Artificial Sequence: Synthetic oligonucleotide
ccugaguagccuucuuagc

SEQ ID NO: 2302472 - RNA, 19 nt, Artificial Sequence
  Description of Artificial Sequence: Synthetic oligonucleotide
ggaaugguuugcuggagua

SEQ ID NO: 2302473 - RNA, 19 nt, Artificial Sequence
  Description of Artificial Sequence: Synthetic oligonucleotide
  modified_base (3)..(3): a, c, u, g, unknown or other
gcnguugauggcagugagg

SEQ ID NO: 2302474 - RNA, 19 nt, Artificial Sequence
  Description of Artificial Sequence: Synthetic oligonucleotide
cagucccgcacguucccag

SEQ ID NO: 2302475 - RNA, 19 nt, Artificial Sequence
  Description of Artificial Sequence: Synthetic oligonucleotide
auacagucuugggcuuugg

SEQ ID NO: 2302476 - RNA, 19 nt, Artificial Sequence
  Description of Artificial Sequence: Synthetic oligonucleotide
cagccuguggggaccugcc

SEQ ID NO: 2302477 - RNA, 19 nt, Artificial Sequence
  Description of Artificial Sequence: Synthetic oligonucleotide
gcacgagacucacggagcc

SEQ ID NO: 2302478 - RNA, 19 nt, Artificial Sequence
  Description of Artificial Sequence: Synthetic oligonucleotide
ucuaacugccuggcccugu

SEQ ID NO: 2302479 - RNA, 19 nt, Artificial Sequence
  Description of Artificial Sequence: Synthetic oligonucleotide
gagggcagccuguggggac

SEQ ID NO: 2302480 - RNA, 19 nt, Artificial Sequence
  Description of Artificial Sequence: Synthetic oligonucleotide
gugacagaggcuugagacu

SEQ ID NO: 2302481 - RNA, 19 nt, Artificial Sequence
  Description of Artificial Sequence: Synthetic oligonucleotide
accuuggacaggcccugcu

SEQ ID NO: 2302482 - RNA, 19 nt, Artificial Sequence
  Description of Artificial Sequence: Synthetic oligonucleotide
gggaugcugggagaagggg

SEQ ID NO: 2302483 - RNA, 19 nt, Artificial Sequence
  Description of Artificial Sequence: Synthetic oligonucleotide
acuuggaaggagguagcuu

SEQ ID NO: 2302484 - RNA, 19 nt, Artificial Sequence
  Description of Artificial Sequence: Synthetic oligonucleotide
ccuaaaagcagcaggggcu

SEQ ID NO: 2302485 - RNA, 19 nt, Artificial Sequence
  Description of Artificial Sequence: Synthetic oligonucleotide
gaggcuugagacuguccua

SEQ ID NO: 2302486 - RNA, 19 nt, Artificial Sequence
  Description of Artificial Sequence: Synthetic oligonucleotide
caggugaggagaucagcaa

SEQ ID NO: 2302487 - RNA, 19 nt, Artificial Sequence
  Description of Artificial Sequence: Synthetic oligonucleotide
aguagccuucuuagcacga

SEQ ID NO: 2302488 - RNA, 19 nt, Artificial Sequence
  Description of Artificial Sequence: Synthetic oligonucleotide
gagccgcuucucacgaagc

SEQ ID NO: 2302489 - RNA, 19 nt, Artificial Sequence
  Description of Artificial Sequence: Synthetic oligonucleotide
cacgagacucacggagccg

SEQ ID NO: 2302490 - RNA, 19 nt, Artificial Sequence
  Description of Artificial Sequence: Synthetic oligonucleotide
acucagagggcagccugug

SEQ ID NO: 2302491 - RNA, 19 nt, Artificial Sequence
  Description of Artificial Sequence: Synthetic oligonucleotide
gucccgcacguucccagcc

SEQ ID NO: 2302492 - RNA, 19 nt, Artificial Sequence
  Description of Artificial Sequence: Synthetic oligonucleotide
guggcagaguggccaggag

SEQ ID NO: 2302493 - RNA, 19 nt, Artificial Sequence
  Description of Artificial Sequence: Synthetic oligonucleotide
acucacggagccgcuucuc

SEQ ID NO: 2302494 - RNA, 19 nt, Artificial Sequence
  Description of Artificial Sequence: Synthetic oligonucleotide
ugcuaggcuggagcacugc

SEQ ID NO: 2302495 - RNA, 19 nt, Artificial Sequence
  Description of Artificial Sequence: Synthetic oligonucleotide
ccucucgcggaccaccucc

SEQ ID NO: 2302496 - RNA, 19 nt, Artificial Sequence
  Description of Artificial Sequence: Synthetic oligonucleotide
gcugacccggcaugcuugg

SEQ ID NO: 2302497 - RNA, 19 nt, Artificial Sequence
  Description of Artificial Sequence: Synthetic oligonucleotide
gugcaggaagggagaagag

SEQ ID NO: 2302498 - RNA, 19 nt, Artificial Sequence
  Description of Artificial Sequence: Synthetic oligonucleotide
ugggucccuuugugggaag

SEQ ID NO: 2302499 - RNA, 19 nt, Artificial Sequence
  Description of Artificial Sequence: Synthetic oligonucleotide
ggggaugcugggagaaggg

SEQ ID NO: 2302500 - RNA, 19 nt, Artificial Sequence
  Description of Artificial Sequence: Synthetic oligonucleotide
ucagucccgcacguuccca

SEQ ID NO: 2302501 - RNA, 19 nt, Artificial Sequence
  Description of Artificial Sequence: Synthetic oligonucleotide
aggaacuuggaaggaggua

SEQ ID NO: 2302502 - RNA, 19 nt, Artificial Sequence
  Description of Artificial Sequence: Synthetic oligonucleotide
aggcuccuaaaagcagcag

SEQ ID NO: 2302503 - RNA, 19 nt, Artificial Sequence
  Description of Artificial Sequence: Synthetic oligonucleotide
gccagacaaucuaacugcc

SEQ ID NO: 2302504 - RNA, 19 nt, Artificial Sequence
  Description of Artificial Sequence: Synthetic oligonucleotide
agauacagucuugggcuuu

SEQ ID NO: 2302505 - RNA, 19 nt, Artificial Sequence
  Description of Artificial Sequence: Synthetic oligonucleotide
ccaggagccucacagguga

SEQ ID NO: 2302506 - RNA, 19 nt, Artificial Sequence
  Description of Artificial Sequence: Synthetic oligonucleotide
  modified_base (15)..(15): a, c, u, g, unknown or other
gaucagcaacuggcnguug

SEQ ID NO: 2302507 - RNA, 19 nt, Artificial Sequence
  Description of Artificial Sequence: Synthetic oligonucleotide
uuguauccugcaggccaga

SEQ ID NO: 2302508 - RNA, 19 nt, Artificial Sequence
  Description of Artificial Sequence: Synthetic oligonucleotide
gccguggacgcccuuugug

SEQ ID NO: 2302509 - RNA, 19 nt, Artificial Sequence
  Description of Artificial Sequence: Synthetic oligonucleotide
gagcugcuacaggaacuug

SEQ ID NO: 2302510 - RNA, 19 nt, Artificial Sequence
  Description of Artificial Sequence: Synthetic oligonucleotide
cagaaccaacagccacagc

SEQ ID NO: 2302511 - RNA, 19 nt, Artificial Sequence
  Description of Artificial Sequence: Synthetic oligonucleotide
ggugaggagaucagcaacu

SEQ ID NO: 2302512 - RNA, 19 nt, Artificial Sequence
  Description of Artificial Sequence: Synthetic oligonucleotide
caggccagacaaucuaacu

SEQ ID NO: 2302513 - RNA, 19 nt, Artificial Sequence
  Description of Artificial Sequence: Synthetic oligonucleotide
cugcaggccagacaaucua

SEQ ID NO: 2302514 - RNA, 19 nt, Artificial Sequence
  Description of Artificial Sequence: Synthetic oligonucleotide
caacagccacagcugguga

SEQ ID NO: 2302515 - RNA, 19 nt, Artificial Sequence
  Description of Artificial Sequence: Synthetic oligonucleotide
gucaccugccaggagccuc

SEQ ID NO: 2302516 - RNA, 19 nt, Artificial Sequence
  Description of Artificial Sequence: Synthetic oligonucleotide
agccuguggggaccugccu

SEQ ID NO: 2302517 - RNA, 19 nt, Artificial Sequence
  Description of Artificial Sequence: Synthetic oligonucleotide
guuggguggcagaguggcc

SEQ ID NO: 2302518 - RNA, 19 nt, Artificial Sequence
  Description of Artificial Sequence: Synthetic oligonucleotide
aucuaacugccuggcccug

SEQ ID NO: 2302519 - RNA, 19 nt, Artificial Sequence
  Description of Artificial Sequence: Synthetic oligonucleotide
ggaccugccugggagccag

SEQ ID NO: 2302520 - RNA, 19 nt, Artificial Sequence
  Description of Artificial Sequence: Synthetic oligonucleotide
ggaugugacagaggcuuga

SEQ ID NO: 2302521 - RNA, 19 nt, Artificial Sequence
  Description of Artificial Sequence: Synthetic oligonucleotide
uccucucgcggaccaccuc

SEQ ID NO: 2302522 - RNA, 19 nt, Artificial Sequence
  Description of Artificial Sequence: Synthetic oligonucleotide
cagccguggacgcccuuug

SEQ ID NO: 2302523 - RNA, 19 nt, Artificial Sequence
  Description of Artificial Sequence: Synthetic oligonucleotide
gauggcagugagggccuga

SEQ ID NO: 2302524 - RNA, 19 nt, Artificial Sequence
  Description of Artificial Sequence: Synthetic oligonucleotide
cuuuagcaggagguaagcu

SEQ ID NO: 2302525 - RNA, 19 nt, Artificial Sequence
  Description of Artificial Sequence: Synthetic oligonucleotide
ggcugucucucuuuguagu

SEQ ID NO: 2302526 - RNA, 19 nt, Artificial Sequence
  Description of Artificial Sequence: Synthetic oligonucleotide
ggccaggcuccuaaaagca

SEQ ID NO: 2302527 - RNA, 19 nt, Artificial Sequence
  Description of Artificial Sequence: Synthetic oligonucleotide
ggggaaugguuugcuggag

SEQ ID NO: 2302528 - RNA, 19 nt, Artificial Sequence
  Description of Artificial Sequence: Synthetic oligonucleotide
ggagcacugcagguggcug

SEQ ID NO: 2302529 - RNA, 19 nt, Artificial Sequence
  Description of Artificial Sequence: Synthetic oligonucleotide
cguggacgcccuuuguggc

SEQ ID NO: 2302530 - RNA, 19 nt, Artificial Sequence
  Description of Artificial Sequence: Synthetic oligonucleotide
caggagguaagcugggguu

SEQ ID NO: 2302531 - RNA, 19 nt, Artificial Sequence
  Description of Artificial Sequence: Synthetic oligonucleotide
agguagcuucagucccgca

SEQ ID NO: 2302532 - RNA, 19 nt, Artificial Sequence
  Description of Artificial Sequence: Synthetic oligonucleotide
cugcuacaggaacuuggaa

SEQ ID NO: 2302533 - RNA, 19 nt, Artificial Sequence
  Description of Artificial Sequence: Synthetic oligonucleotide
agggccugaguagccuucu

SEQ ID NO: 2302534 - RNA, 19 nt, Artificial Sequence
  Description of Artificial Sequence: Synthetic oligonucleotide
ggacacuguuggguggcag

SEQ ID NO: 2302535 - RNA, 19 nt, Artificial Sequence
  Description of Artificial Sequence: Synthetic oligonucleotide
gguggggacacuguugggu

SEQ ID NO: 2302536 - RNA, 19 nt, Artificial Sequence
  Description of Artificial Sequence: Synthetic oligonucleotide
gacucacggagccgcuucu

SEQ ID NO: 2302537 - RNA, 19 nt, Artificial Sequence
  Description of Artificial Sequence: Synthetic oligonucleotide
cucucgcggaccaccucca

SEQ ID NO: 2302538 - RNA, 19 nt, Artificial Sequence
  Description of Artificial Sequence: Synthetic oligonucleotide
ugccuggcccuguccuuaa

SEQ ID NO: 2302539 - RNA, 19 nt, Artificial Sequence
  Description of Artificial Sequence: Synthetic oligonucleotide
gggaaugguuugcuggagu

SEQ ID NO: 2302540 - RNA, 19 nt, Artificial Sequence
  Description of Artificial Sequence: Synthetic oligonucleotide
ggugcuaggcuggagcacu

SEQ ID NO: 2302541 - RNA, 19 nt, Artificial Sequence
  Description of Artificial Sequence: Synthetic oligonucleotide
cugacccggcaugcuuggg

SEQ ID NO: 2302542 - RNA, 19 nt, Artificial Sequence
  Description of Artificial Sequence: Synthetic oligonucleotide
ggucuguagcugcugggcu

SEQ ID NO: 2302543 - RNA, 19 nt, Artificial Sequence
  Description of Artificial Sequence: Synthetic oligonucleotide
ggggaccugccugggagcc

SEQ ID NO: 2302544 - RNA, 19 nt, Artificial Sequence
  Description of Artificial Sequence: Synthetic oligonucleotide
gugcuaggcuggagcacug

SEQ ID NO: 2302545 - RNA, 19 nt, Artificial Sequence
  Description of Artificial Sequence: Synthetic oligonucleotide
cuggcccuguccuuaaguu

SEQ ID NO: 2302546 - RNA, 19 nt, Artificial Sequence
  Description of Artificial Sequence: Synthetic oligonucleotide
acgcccuuuguggcugucu

SEQ ID NO: 2302547 - RNA, 19 nt, Artificial Sequence
  Description of Artificial Sequence: Synthetic oligonucleotide
ggcuugagacuguccuaga

SEQ ID NO: 2302548 - RNA, 19 nt, Artificial Sequence
  Description of Artificial Sequence: Synthetic oligonucleotide
acgaagcagcucagauaca

SEQ ID NO: 2302549 - RNA, 19 nt, Artificial Sequence
  Description of Artificial Sequence: Synthetic oligonucleotide
gggucccuuugugggaagc

SEQ ID NO: 2302550 - RNA, 19 nt, Artificial Sequence
  Description of Artificial Sequence: Synthetic oligonucleotide
cguucccagccguggacgc

SEQ ID NO: 2302551 - RNA, 19 nt, Artificial Sequence
  Description of Artificial Sequence: Synthetic oligonucleotide
cagauacagucuugggcuu

SEQ ID NO: 2302552 - RNA, 19 nt, Artificial Sequence
  Description of Artificial Sequence: Synthetic oligonucleotide
cgcacguucccagccgugg

SEQ ID NO: 2302553 - RNA, 19 nt, Artificial Sequence
  Description of Artificial Sequence: Synthetic oligonucleotide
gucccuuugugggaagcau

SEQ ID NO: 2302554 - RNA, 19 nt, Artificial Sequence
  Description of Artificial Sequence: Synthetic oligonucleotide
gcaugcuugggaggaggca

SEQ ID NO: 2302555 - RNA, 19 nt, Artificial Sequence
  Description of Artificial Sequence: Synthetic oligonucleotide
gcuuuggccggaggccacc

SEQ ID NO: 2302556 - RNA, 19 nt, Artificial Sequence
  Description of Artificial Sequence: Synthetic oligonucleotide
ggaccuggagcucucuguu

SEQ ID NO: 2302557 - RNA, 19 nt, Artificial Sequence
  Description of Artificial Sequence: Synthetic oligonucleotide
agcuucagucccgcacguu

SEQ ID NO: 2302558 - RNA, 19 nt, Artificial Sequence
  Description of Artificial Sequence: Synthetic oligonucleotide
gggugcuaggcuggagcac

SEQ ID NO: 2302559 - RNA, 19 nt, Artificial Sequence
  Description of Artificial Sequence: Synthetic oligonucleotide
ccaaggaggucuucacugu

SEQ ID NO: 2302560 - RNA, 19 nt, Artificial Sequence
  Description of Artificial Sequence: Synthetic oligonucleotide
gcaagaccuuggacaggcc

SEQ ID NO: 2302561 - RNA, 19 nt, Artificial Sequence
  Description of Artificial Sequence: Synthetic oligonucleotide
ggagguaagcugggguugu

SEQ ID NO: 2302562 - RNA, 19 nt, Artificial Sequence
  Description of Artificial Sequence: Synthetic oligonucleotide
cggcaugcuugggaggagg

SEQ ID NO: 2302563 - RNA, 19 nt, Artificial Sequence
  Description of Artificial Sequence: Synthetic oligonucleotide
gacgcccuuuguggcuguc

SEQ ID NO: 2302564 - RNA, 19 nt, Artificial Sequence
  Description of Artificial Sequence: Synthetic oligonucleotide
cccggcaugcuugggagga

SEQ ID NO: 2302565 - RNA, 19 nt, Artificial Sequence
  Description of Artificial Sequence: Synthetic oligonucleotide
cugccuggcccuguccuua

SEQ ID NO: 2302566 - RNA, 19 nt, Artificial Sequence
  Description of Artificial Sequence: Synthetic oligonucleotide
gagacucacggagccgcuu

SEQ ID NO: 2302567 - RNA, 19 nt, Artificial Sequence
  Description of Artificial Sequence: Synthetic oligonucleotide
cacuguuggguggcagagu

SEQ ID NO: 2302568 - RNA, 19 nt, Artificial Sequence
  Description of Artificial Sequence: Synthetic oligonucleotide
cucucuguucagggucugu

SEQ ID NO: 2302569 - RNA, 19 nt, Artificial Sequence
  Description of Artificial Sequence: Synthetic oligonucleotide
gcccuuuguggcugucucu

SEQ ID NO: 2302570 - RNA, 19 nt, Artificial Sequence
  Description of Artificial Sequence: Synthetic oligonucleotide
ccuggcccuguccuuaagu

SEQ ID NO: 2302571 - RNA, 19 nt, Artificial Sequence
  Description of Artificial Sequence: Synthetic oligonucleotide
ccgcacguucccagccgug

SEQ ID NO: 2302572 - RNA, 19 nt, Artificial Sequence
  Description of Artificial Sequence: Synthetic oligonucleotide
cucugacugaggggcugua

SEQ ID NO: 2302573 - RNA, 19 nt, Artificial Sequence
  Description of Artificial Sequence: Synthetic oligonucleotide
gcuguacaggcagcugagu

SEQ ID NO: 2302574 - RNA, 19 nt, Artificial Sequence
  Description of Artificial Sequence: Synthetic oligonucleotide
ccggcaugcuugggaggag

SEQ ID NO: 2302575 - RNA, 19 nt, Artificial Sequence
  Description of Artificial Sequence: Synthetic oligonucleotide
ccaggucaccaaggagguc

SEQ ID NO: 2302576 - RNA, 19 nt, Artificial Sequence
  Description of Artificial Sequence: Synthetic oligonucleotide
ggacgcccuuuguggcugu

SEQ ID NO: 2302577 - RNA, 19 nt, Artificial Sequence
  Description of Artificial Sequence: Synthetic oligonucleotide
gggaagcauuuaggggaau

SEQ ID NO: 2302578 - RNA, 19 nt, Artificial Sequence
  Description of Artificial Sequence: Synthetic oligonucleotide
cccgcacguucccagccgu

SEQ ID NO: 2302579 - RNA, 19 nt, Artificial Sequence
  Description of Artificial Sequence: Synthetic oligonucleotide
cgagacucacggagccgcu

SEQ ID NO: 2302580 - RNA, 19 nt, Artificial Sequence
  Description of Artificial Sequence: Synthetic oligonucleotide
gcccugcuucugggaugug

SEQ ID NO: 2302581 - RNA, 19 nt, Artificial Sequence
  Description of Artificial Sequence: Synthetic oligonucleotide
ccagccguggacgcccuuu

SEQ ID NO: 2302582 - RNA, 19 nt, Artificial Sequence
  Description of Artificial Sequence: Synthetic oligonucleotide
cggagccgcuucucacgaa

SEQ ID NO: 2302583 - RNA, 19 nt, Artificial Sequence
  Description of Artificial Sequence: Synthetic oligonucleotide
aaugacguaagacugcagg

SEQ ID NO: 2302584 - RNA, 19 nt, Artificial Sequence
  Description of Artificial Sequence: Synthetic oligonucleotide
ucaacauuaacaaacacuc

SEQ ID NO: 2302585 - RNA, 19 nt, Artificial Sequence
  Description of Artificial Sequence: Synthetic oligonucleotide
uuuacaaggcuuuaguggg

SEQ ID NO: 2302586 - RNA, 19 nt, Artificial Sequence
  Description of Artificial Sequence: Synthetic oligonucleotide
ugaagauugauucugcgag

SEQ ID NO: 2302587 - RNA, 19 nt, Artificial Sequence
  Description of Artificial Sequence: Synthetic oligonucleotide
uuucucaacauuaacaaac

SEQ ID NO: 2302588 - RNA, 19 nt, Artificial Sequence
  Description of Artificial Sequence: Synthetic oligonucleotide
ugaauagugaauuccauug

SEQ ID NO: 2302589 - RNA, 19 nt, Artificial Sequence
  Description of Artificial Sequence: Synthetic oligonucleotide
aacuuugcgaagcucuugc

SEQ ID NO: 2302590 - RNA, 19 nt, Artificial Sequence
  Description of Artificial Sequence: Synthetic oligonucleotide
uuucaaacgagaaagaguu

SEQ ID NO: 2302591 - RNA, 19 nt, Artificial Sequence
  Description of Artificial Sequence: Synthetic oligonucleotide
cuuuacaaggcuuuagugg

SEQ ID NO: 2302592 - RNA, 19 nt, Artificial Sequence
  Description of Artificial Sequence: Synthetic oligonucleotide
agauuuucaaacgagaaag

SEQ ID NO: 2302593 - RNA, 19 nt, Artificial Sequence
  Description of Artificial Sequence: Synthetic oligonucleotide
uuuaauaacuuugcgaagc

SEQ ID NO: 2302594 - RNA, 19 nt, Artificial Sequence
  Description of Artificial Sequence: Synthetic oligonucleotide
acauaaaugcuugucaacc

SEQ ID NO: 2302595 - RNA, 19 nt, Artificial Sequence
  Description of Artificial Sequence: Synthetic oligonucleotide
uuaacaaacacuccucuga

SEQ ID NO: 2302596 - RNA, 19 nt, Artificial Sequence
  Description of Artificial Sequence: Synthetic oligonucleotide
uuuacuucuuccuauuugc

SEQ ID NO: 2302597 - RNA, 19 nt, Artificial Sequence
  Description of Artificial Sequence: Synthetic oligonucleotide
ggagcaauaauccagaaug

SEQ ID NO: 2302598 - RNA, 19 nt, Artificial Sequence
  Description of Artificial Sequence: Synthetic oligonucleotide
agacacgagauuuucaaac

SEQ ID NO: 2302599 - RNA, 19 nt, Artificial Sequence
  Description of Artificial Sequence: Synthetic oligonucleotide
guagagguuauccagaccc

SEQ ID NO: 2302600 - RNA, 19 nt, Artificial Sequence
  Description of Artificial Sequence: Synthetic oligonucleotide
uccuaaagaggaaaugacg

SEQ ID NO: 2302601 - RNA, 19 nt, Artificial Sequence
  Description of Artificial Sequence: Synthetic oligonucleotide
cauuccauaacacacaguc

SEQ ID NO: 2302602 - RNA, 19 nt, Artificial Sequence
  Description of Artificial Sequence: Synthetic oligonucleotide
uuccauaacacacagucgu

SEQ ID NO: 2302603 - RNA, 19 nt, Artificial Sequence
  Description of Artificial Sequence: Synthetic oligonucleotide
cuuguugaaugcaagcugg

SEQ ID NO: 2302604 - RNA, 19 nt, Artificial Sequence
  Description of Artificial Sequence: Synthetic oligonucleotide
uguacuggcguauaaauuc

SEQ ID NO: 2302605 - RNA, 19 nt, Artificial Sequence
  Description of Artificial Sequence: Synthetic oligonucleotide
aguacuacacauuaucuga

SEQ ID NO: 2302606 - RNA, 19 nt, Artificial Sequence
  Description of Artificial Sequence: Synthetic oligonucleotide
ucaaccuucuuguagaggu

SEQ ID NO: 2302607 - RNA, 19 nt, Artificial Sequence
  Description of Artificial Sequence: Synthetic oligonucleotide
uucacauaaaugcuuguca

SEQ ID NO: 2302608 - RNA, 19 nt, Artificial Sequence
  Description of Artificial Sequence: Synthetic oligonucleotide
ucuuguagagguuauccag

SEQ ID NO: 2302609 - RNA, 19 nt, Artificial Sequence
  Description of Artificial Sequence: Synthetic oligonucleotide
uguagugucgguauacuga

SEQ ID NO: 2302610 - RNA, 19 nt, Artificial Sequence
  Description of Artificial Sequence: Synthetic oligonucleotide
aaauggaagaauuccuacu

SEQ ID NO: 2302611 - RNA, 19 nt, Artificial Sequence
  Description of Artificial Sequence: Synthetic oligonucleotide
uaucugacauuccauaaca

SEQ ID NO: 2302612 - RNA, 19 nt, Artificial Sequence
  Description of Artificial Sequence: Synthetic oligonucleotide
aagaauuccuacuuuacuu

SEQ ID NO: 2302613 - RNA, 19 nt, Artificial Sequence
  Description of Artificial Sequence: Synthetic oligonucleotide
cauaacaacaucccugggg

SEQ ID NO: 2302614 - RNA, 19 nt, Artificial Sequence
  Description of Artificial Sequence: Synthetic oligonucleotide
guugaaugcaagcugguag

SEQ ID NO: 2302615 - RNA, 19 nt, Artificial Sequence
  Description of Artificial Sequence: Synthetic oligonucleotide
aacgccuucaaagaaauga

SEQ ID NO: 2302616 - RNA, 19 nt, Artificial Sequence
  Description of Artificial Sequence: Synthetic oligonucleotide
uuugaagauugauucugcg

SEQ ID NO: 2302617 - RNA, 19 nt, Artificial Sequence
  Description of Artificial Sequence: Synthetic oligonucleotide
aagaggcuguccuaaagag

SEQ ID NO: 2302618 - RNA, 19 nt, Artificial Sequence
  Description of Artificial Sequence: Synthetic oligonucleotide
ucaaacgagaaagaguugc

SEQ ID NO: 2302619 - RNA, 19 nt, Artificial Sequence
  Description of Artificial Sequence: Synthetic oligonucleotide
gauugugcaaugcuggagc

SEQ ID NO: 2302620 - RNA, 19 nt, Artificial Sequence
  Description of Artificial Sequence: Synthetic oligonucleotide
ugggauugugcaaugcugg

SEQ ID NO: 2302621 - RNA, 19 nt, Artificial Sequence
  Description of Artificial Sequence: Synthetic oligonucleotide
uugucuuuuauuucugcag

SEQ ID NO: 2302622 - RNA, 19 nt, Artificial Sequence
  Description of Artificial Sequence: Synthetic oligonucleotide
agugucgguauacugagag

SEQ ID NO: 2302623 - RNA, 19 nt, Artificial Sequence
  Description of Artificial Sequence: Synthetic oligonucleotide
cugacauuccauaacacac

SEQ ID NO: 2302624 - RNA, 19 nt, Artificial Sequence
  Description of Artificial Sequence: Synthetic oligonucleotide
gacacgagauuuucaaacg

SEQ ID NO: 2302625 - RNA, 19 nt, Artificial Sequence
  Description of Artificial Sequence: Synthetic oligonucleotide
caucauaacaacaucccug

SEQ ID NO: 2302626 - RNA, 19 nt, Artificial Sequence
  Description of Artificial Sequence: Synthetic oligonucleotide
uaugcccugagcuacucgg

SEQ ID NO: 2302627 - RNA, 19 nt, Artificial Sequence
  Description of Artificial Sequence: Synthetic oligonucleotide
uuugccuuuauuugguuac

SEQ ID NO: 2302628 - RNA, 19 nt, Artificial Sequence
  Description of Artificial Sequence: Synthetic oligonucleotide
auuugcaacuuucucaaca

SEQ ID NO: 2302629 - RNA, 19 nt, Artificial Sequence
  Description of Artificial Sequence: Synthetic oligonucleotide
uucaaagaaaugauuuagu

SEQ ID NO: 2302630 - RNA, 19 nt, Artificial Sequence
  Description of Artificial Sequence: Synthetic oligonucleotide
uccuauuugccuuuauuug

SEQ ID NO: 2302631 - RNA, 19 nt, Artificial Sequence
  Description of Artificial Sequence: Synthetic oligonucleotide
agaggaaaugacguaagac

SEQ ID NO: 2302632 - RNA, 19 nt, Artificial Sequence
  Description of Artificial Sequence: Synthetic oligonucleotide
agcuacucgggcuucaacg

SEQ ID NO: 2302633 - RNA, 19 nt, Artificial Sequence
  Description of Artificial Sequence: Synthetic oligonucleotide
aagauugauucugcgaguc

SEQ ID NO: 2302634 - RNA, 19 nt, Artificial Sequence
  Description of Artificial Sequence: Synthetic oligonucleotide
uugaaugcaagcugguagc

SEQ ID NO: 2302635 - RNA, 19 nt, Artificial Sequence
  Description of Artificial Sequence: Synthetic oligonucleotide
aguuuuccaucauaacaac

SEQ ID NO: 2302636 - RNA, 19 nt, Artificial Sequence
  Description of Artificial Sequence: Synthetic oligonucleotide
aaguuuuccaucauaacaa

SEQ ID NO: 2302637 - RNA, 19 nt, Artificial Sequence
  Description of Artificial Sequence: Synthetic oligonucleotide
auuuucaaacgagaaagag

SEQ ID NO: 2302638 - RNA, 19 nt, Artificial Sequence
  Description of Artificial Sequence: Synthetic oligonucleotide
uuucguaguaucuuuacuu

SEQ ID NO: 2302639 - RNA, 19 nt, Artificial Sequence
  Description of Artificial Sequence: Synthetic oligonucleotide
agugaauuccauuguaacu

SEQ ID NO: 2302640 - RNA, 19 nt, Artificial Sequence
  Description of Artificial Sequence: Synthetic oligonucleotide
ugucgguauacugagagug

SEQ ID NO: 2302641 - RNA, 19 nt, Artificial Sequence
  Description of Artificial Sequence: Synthetic oligonucleotide
uuuuauguagugucgguau

SEQ ID NO: 2302642 - RNA, 19 nt, Artificial Sequence
  Description of Artificial Sequence: Synthetic oligonucleotide
uguccuaaagaggaaauga

SEQ ID NO: 2302643 - RNA, 19 nt, Artificial Sequence
  Description of Artificial Sequence: Synthetic oligonucleotide
uucucaacauuaacaaaca

SEQ ID NO: 2302644 - RNA, 19 nt, Artificial Sequence
  Description of Artificial Sequence: Synthetic oligonucleotide
uuaauaacuuugcgaagcu

SEQ ID NO: 2302645 - RNA, 19 nt, Artificial Sequence
  Description of Artificial Sequence: Synthetic oligonucleotide
cagaauguccugaauagug

SEQ ID NO: 2302646 - RNA, 19 nt, Artificial Sequence
  Description of Artificial Sequence: Synthetic oligonucleotide
auuaguuugguguaugcuu

SEQ ID NO: 2302647 - RNA, 19 nt, Artificial Sequence
  Description of Artificial Sequence: Synthetic oligonucleotide
cuugucaaccuucuuguag

SEQ ID NO: 2302648 - RNA, 19 nt, Artificial Sequence
  Description of Artificial Sequence: Synthetic oligonucleotide
aacgagaaagaguugcaaa

SEQ ID NO: 2302649 - RNA, 19 nt, Artificial Sequence
  Description of Artificial Sequence: Synthetic oligonucleotide
uugaagauugauucugcga

SEQ ID NO: 2302650 - RNA, 19 nt, Artificial Sequence
  Description of Artificial Sequence: Synthetic oligonucleotide
uaucaaacccucgaagugc

SEQ ID NO: 2302651 - RNA, 19 nt, Artificial Sequence
  Description of Artificial Sequence: Synthetic oligonucleotide
auuaacaaacacuccucug

SEQ ID NO: 2302652 - RNA, 19 nt, Artificial Sequence
  Description of Artificial Sequence: Synthetic oligonucleotide
ugaauuccauuguaacucc

SEQ ID NO: 2302653 - RNA, 19 nt, Artificial Sequence
  Description of Artificial Sequence: Synthetic oligonucleotide
uuuucguaguaucuuuacu

SEQ ID NO: 2302654 - RNA, 19 nt, Artificial Sequence
  Description of Artificial Sequence: Synthetic oligonucleotide
uagugaauuccauuguaac

SEQ ID NO: 2302655 - RNA, 19 nt, Artificial Sequence
  Description of Artificial Sequence: Synthetic oligonucleotide
agauugauucugcgagucc

SEQ ID NO: 2302656 - RNA, 19 nt, Artificial Sequence
  Description of Artificial Sequence: Synthetic oligonucleotide
gaggaaaugacguaagacu

SEQ ID NO: 2302657 - RNA, 19 nt, Artificial Sequence
  Description of Artificial Sequence: Synthetic oligonucleotide
caaauggaagaauuccuac

SEQ ID NO: 2302658 - RNA, 19 nt, Artificial Sequence
  Description of Artificial Sequence: Synthetic oligonucleotide
aacacacagucguuuaagu

SEQ ID NO: 2302659 - RNA, 19 nt, Artificial Sequence
  Description of Artificial Sequence: Synthetic oligonucleotide
cuucuuguagagguuaucc

SEQ ID NO: 2302660 - RNA, 19 nt, Artificial Sequence
  Description of Artificial Sequence: Synthetic oligonucleotide
guagugucgguauacugag

SEQ ID NO: 2302661 - RNA, 19 nt, Artificial Sequence
  Description of Artificial Sequence: Synthetic oligonucleotide
auucaucuugcauggagug

SEQ ID NO: 2302662 - RNA, 19 nt, Artificial Sequence
  Description of Artificial Sequence: Synthetic oligonucleotide
uauuucugcagcagaguac

SEQ ID NO: 2302663 - RNA, 19 nt, Artificial Sequence
  Description of Artificial Sequence: Synthetic oligonucleotide
agcagcgagcuaucaaacc

SEQ ID NO: 2302664 - RNA, 19 nt, Artificial Sequence
  Description of Artificial Sequence: Synthetic oligonucleotide
aauuccauuguaacuccag

SEQ ID NO: 2302665 - RNA, 19 nt, Artificial Sequence
  Description of Artificial Sequence: Synthetic oligonucleotide
uguggugaaaguuuuccau

SEQ ID NO: 2302666 - RNA, 19 nt, Artificial Sequence
  Description of Artificial Sequence: Synthetic oligonucleotide
uuaguuugguguaugcuuu

SEQ ID NO: 2302667 - RNA, 19 nt, Artificial Sequence
  Description of Artificial Sequence: Synthetic oligonucleotide
uugguguaugcuuugucca

SEQ ID NO: 2302668 - RNA, 19 nt, Artificial Sequence
  Description of Artificial Sequence: Synthetic oligonucleotide
gugaauuccauuguaacuc

SEQ ID NO: 2302669 - RNA, 19 nt, Artificial Sequence
  Description of Artificial Sequence: Synthetic oligonucleotide
ugaucaguguacuucugcu

SEQ ID NO: 2302670 - RNA, 19 nt, Artificial Sequence
  Description of Artificial Sequence: Synthetic oligonucleotide
uccucuucacauaaaugcu

SEQ ID NO: 2302671 - RNA, 19 nt, Artificial Sequence
  Description of Artificial Sequence: Synthetic oligonucleotide
uuugcaacuuucucaacau

SEQ ID NO: 2302672 - RNA, 19 nt, Artificial Sequence
  Description of Artificial Sequence: Synthetic oligonucleotide
ugauuaguuugguguaugc

SEQ ID NO: 2302673 - RNA, 19 nt, Artificial Sequence
  Description of Artificial Sequence: Synthetic oligonucleotide
auagcagcgagcuaucaaa

SEQ ID NO: 2302674 - RNA, 19 nt, Artificial Sequence
  Description of Artificial Sequence: Synthetic oligonucleotide
auuaucugacauuccauaa

SEQ ID NO: 2302675 - RNA, 19 nt, Artificial Sequence
  Description of Artificial Sequence: Synthetic oligonucleotide
aagaggaaaugacguaaga

SEQ ID NO: 2302676 - RNA, 19 nt, Artificial Sequence
  Description of Artificial Sequence: Synthetic oligonucleotide
uuacuucuuccuauuugcc

SEQ ID NO: 2302677 - RNA, 19 nt, Artificial Sequence
  Description of Artificial Sequence: Synthetic oligonucleotide
cagaguacuacacauuauc

SEQ ID NO: 2302678 - RNA, 19 nt, Artificial Sequence
  Description of Artificial Sequence: Synthetic oligonucleotide
uuuagugggauugugcaau

SEQ ID NO: 2302679 - RNA, 19 nt, Artificial Sequence
  Description of Artificial Sequence: Synthetic oligonucleotide
uucguaguaucuuuacuuc

SEQ ID NO: 2302680 - RNA, 19 nt, Artificial Sequence
  Description of Artificial Sequence: Synthetic oligonucleotide
uccagcaaauucuucaaau

SEQ ID NO: 2302681 - RNA, 19 nt, Artificial Sequence
  Description of Artificial Sequence: Synthetic oligonucleotide
aggaaaugacguaagacug

SEQ ID NO: 2302682 - RNA, 19 nt, Artificial Sequence
  Description of Artificial Sequence: Synthetic oligonucleotide
cuaucaaacccucgaagug

SEQ ID NO: 2302683 - RNA, 19 nt, Artificial Sequence
  Description of Artificial Sequence: Synthetic oligonucleotide
uaguaucuuuacuucuucc

SEQ ID NO: 2302684 - RNA, 19 nt, Artificial Sequence
  Description of Artificial Sequence: Synthetic oligonucleotide
cacgagauuuucaaacgag

SEQ ID NO: 2302685 - RNA, 19 nt, Artificial Sequence
  Description of Artificial Sequence: Synthetic oligonucleotide
uaucuuuacuucuuccuau

SEQ ID NO: 2302686 - RNA, 19 nt, Artificial Sequence
  Description of Artificial Sequence: Synthetic oligonucleotide
ucgguauacugagagugcg

SEQ ID NO: 2302687 - RNA, 19 nt, Artificial Sequence
  Description of Artificial Sequence: Synthetic oligonucleotide
caggauacucuuuaauaac

SEQ ID NO: 2302688 - RNA, 19 nt, Artificial Sequence
  Description of Artificial Sequence: Synthetic oligonucleotide
uucuuguagagguuaucca

SEQ ID NO: 2302689 - RNA, 19 nt, Artificial Sequence
  Description of Artificial Sequence: Synthetic oligonucleotide
aacuccagacccaggauag

SEQ ID NO: 2302690 - RNA, 19 nt, Artificial Sequence
  Description of Artificial Sequence: Synthetic oligonucleotide
acgagaaagaguugcaaaa

SEQ ID NO: 2302691 - RNA, 19 nt, Artificial Sequence
  Description of Artificial Sequence: Synthetic oligonucleotide
auuucugcagcagaguacu

SEQ ID NO: 2302692 - RNA, 19 nt, Artificial Sequence
  Description of Artificial Sequence: Synthetic oligonucleotide
ucucaacauuaacaaacac

SEQ ID NO: 2302693 - RNA, 19 nt, Artificial Sequence
  Description of Artificial Sequence: Synthetic oligonucleotide
uaacacacagucguuuaag

SEQ ID NO: 2302694 - RNA, 19 nt, Artificial Sequence
  Description of Artificial Sequence: Synthetic oligonucleotide
agaauuccuacuuuacuuu

SEQ ID NO: 2302695 - RNA, 19 nt, Artificial Sequence
  Description of Artificial Sequence: Synthetic oligonucleotide
ggcguauaaauucaucuug

SEQ ID NO: 2302696 - RNA, 19 nt, Artificial Sequence
  Description of Artificial Sequence: Synthetic oligonucleotide
ucauaacaacaucccuggg

SEQ ID NO: 2302697 - RNA, 19 nt, Artificial Sequence
  Description of Artificial Sequence: Synthetic oligonucleotide
acuacacauuaucugacau

SEQ ID NO: 2302698 - RNA, 19 nt, Artificial Sequence
  Description of Artificial Sequence: Synthetic oligonucleotide
agcagaguacuacacauua

SEQ ID NO: 2302699 - RNA, 19 nt, Artificial Sequence
  Description of Artificial Sequence: Synthetic oligonucleotide
uuauguagugucgguauac

SEQ ID NO: 2302700 - RNA, 19 nt, Artificial Sequence
  Description of Artificial Sequence: Synthetic oligonucleotide
ucuugcuuguugaaugcaa

SEQ ID NO: 2302701 - RNA, 19 nt, Artificial Sequence
  Description of Artificial Sequence: Synthetic oligonucleotide
aaaauguggugaaaguuuu

SEQ ID NO: 2302702 - RNA, 19 nt, Artificial Sequence
  Description of Artificial Sequence: Synthetic oligonucleotide
uguagagguuauccagacc

SEQ ID NO: 2302703 - RNA, 19 nt, Artificial Sequence
  Description of Artificial Sequence: Synthetic oligonucleotide
gauugauucugcgagucca

SEQ ID NO: 2302704 - RNA, 19 nt, Artificial Sequence
  Description of Artificial Sequence: Synthetic oligonucleotide
augacguaagacugcaggu

SEQ ID NO: 2302705 - RNA, 19 nt, Artificial Sequence
  Description of Artificial Sequence: Synthetic oligonucleotide
ugcuuguugaaugcaagcu

SEQ ID NO: 2302706 - RNA, 19 nt, Artificial Sequence
  Description of Artificial Sequence: Synthetic oligonucleotide
ucguaguaucuuuacuucu

SEQ ID NO: 2302707 - RNA, 19 nt, Artificial Sequence
  Description of Artificial Sequence: Synthetic oligonucleotide
uacuacacauuaucugaca

SEQ ID NO: 2302708 - RNA, 19 nt, Artificial Sequence
  Description of Artificial Sequence: Synthetic oligonucleotide
auuccauuguaacuccaga

SEQ ID NO: 2302709 - RNA, 19 nt, Artificial Sequence
  Description of Artificial Sequence: Synthetic oligonucleotide
gacguaagacugcagguga

SEQ ID NO: 2302710 - RNA, 19 nt, Artificial Sequence
  Description of Artificial Sequence: Synthetic oligonucleotide
ugacguaagacugcaggug

SEQ ID NO: 2302711 - RNA, 19 nt, Artificial Sequence
  Description of Artificial Sequence: Synthetic oligonucleotide
accaccugcaauaaguucu

SEQ ID NO: 2302712 - RNA, 19 nt, Artificial Sequence
  Description of Artificial Sequence: Synthetic oligonucleotide
ugauucugcgaguccagca

SEQ ID NO: 2302713 - RNA, 19 nt, Artificial Sequence
  Description of Artificial Sequence: Synthetic oligonucleotide
ugguguaugcuuuguccag

SEQ ID NO: 2302714 - RNA, 19 nt, Artificial Sequence
  Description of Artificial Sequence: Synthetic oligonucleotide
ugagagugcguguucauuu

SEQ ID NO: 2302715 - RNA, 19 nt, Artificial Sequence
  Description of Artificial Sequence: Synthetic oligonucleotide
uaacuccagacccaggaua

SEQ ID NO: 2302716 - RNA, 19 nt, Artificial Sequence
  Description of Artificial Sequence: Synthetic oligonucleotide
aaacccucgaagugcuugu

SEQ ID NO: 2302717 - RNA, 19 nt, Artificial Sequence
  Description of Artificial Sequence: Synthetic oligonucleotide
auaaaugcuugucaaccuu

SEQ ID NO: 2302718 - RNA, 19 nt, Artificial Sequence
  Description of Artificial Sequence: Synthetic oligonucleotide
cuugcauggagugccauac

SEQ ID NO: 2302719 - RNA, 19 nt, Artificial Sequence
  Description of Artificial Sequence: Synthetic oligonucleotide
aaacacuccucugauuagu

SEQ ID NO: 2302720 - RNA, 19 nt, Artificial Sequence
  Description of Artificial Sequence: Synthetic oligonucleotide
gaaaugacguaagacugca

SEQ ID NO: 2302721 - RNA, 19 nt, Artificial Sequence
  Description of Artificial Sequence: Synthetic oligonucleotide
acacgagauuuucaaacga

SEQ ID NO: 2302722 - RNA, 19 nt, Artificial Sequence
  Description of Artificial Sequence: Synthetic oligonucleotide
uuuauguagugucgguaua

SEQ ID NO: 2302723 - RNA, 19 nt, Artificial Sequence
  Description of Artificial Sequence: Synthetic oligonucleotide
caauaauccagaauguccu

SEQ ID NO: 2302724 - RNA, 19 nt, Artificial Sequence
  Description of Artificial Sequence: Synthetic oligonucleotide
uggagugccauaccaccug

SEQ ID NO: 2302725 - RNA, 19 nt, Artificial Sequence
  Description of Artificial Sequence: Synthetic oligonucleotide
cuagacacgagauuuucaa

SEQ ID NO: 2302726 - RNA, 19 nt, Artificial Sequence
  Description of Artificial Sequence: Synthetic oligonucleotide
auuccauaacacacagucg

SEQ ID NO: 2302727 - RNA, 19 nt, Artificial Sequence
  Description of Artificial Sequence: Synthetic oligonucleotide
ucgaagugcuuguacuggc

SEQ ID NO: 2302728 - RNA, 19 nt, Artificial Sequence
  Description of Artificial Sequence: Synthetic oligonucleotide
aggugaucaguguacuucu

SEQ ID NO: 2302729 - RNA, 19 nt, Artificial Sequence
  Description of Artificial Sequence: Synthetic oligonucleotide
uggagcaauaauccagaau

SEQ ID NO: 2302730 - RNA, 19 nt, Artificial Sequence
  Description of Artificial Sequence: Synthetic oligonucleotide
ugucaaccuucuuguagag

SEQ ID NO: 2302731 - RNA, 19 nt, Artificial Sequence
  Description of Artificial Sequence: Synthetic oligonucleotide
uauacugagagugcguguu

SEQ ID NO: 2302732 - RNA, 19 nt, Artificial Sequence
  Description of Artificial Sequence: Synthetic oligonucleotide
auguagugucgguauacug

SEQ ID NO: 2302733 - RNA, 19 nt, Artificial Sequence
  Description of Artificial Sequence: Synthetic oligonucleotide
cauaccaccugcaauaagu

SEQ ID NO: 2302734 - RNA, 19 nt, Artificial Sequence
  Description of Artificial Sequence: Synthetic oligonucleotide
agaguacuacacauuaucu

SEQ ID NO: 2302735 - RNA, 19 nt, Artificial Sequence
  Description of Artificial Sequence: Synthetic oligonucleotide
acagucguuuaagucuggc

SEQ ID NO: 2302736 - RNA, 19 nt, Artificial Sequence
  Description of Artificial Sequence: Synthetic oligonucleotide
aaacgagaaagaguugcaa

SEQ ID NO: 2302737 - RNA, 19 nt, Artificial Sequence
  Description of Artificial Sequence: Synthetic oligonucleotide
ugugcaaugcuggagcaau

SEQ ID NO: 2302738 - RNA, 19 nt, Artificial Sequence
  Description of Artificial Sequence: Synthetic oligonucleotide
uuguacuggcguauaaauu

SEQ ID NO: 2302739 - RNA, 19 nt, Artificial Sequence
  Description of Artificial Sequence: Synthetic oligonucleotide
gauuuucaaacgagaaaga

SEQ ID NO: 2302740 - RNA, 19 nt, Artificial Sequence
  Description of Artificial Sequence: Synthetic oligonucleotide
cucgaagugcuuguacugg

SEQ ID NO: 2302741 - RNA, 19 nt, Artificial Sequence
  Description of Artificial Sequence: Synthetic oligonucleotide
gauucugcgaguccagcaa

SEQ ID NO: 2302742 - RNA, 19 nt, Artificial Sequence
  Description of Artificial Sequence: Synthetic oligonucleotide
auacugagagugcguguuc

SEQ ID NO: 2302743 - RNA, 19 nt, Artificial Sequence
  Description of Artificial Sequence: Synthetic oligonucleotide
caaacacuccucugauuag

SEQ ID NO: 2302744 - RNA, 19 nt, Artificial Sequence
  Description of Artificial Sequence: Synthetic oligonucleotide
auaauccagaauguccuga

SEQ ID NO: 2302745 - RNA, 19 nt, Artificial Sequence
  Description of Artificial Sequence: Synthetic oligonucleotide
uuagugggauugugcaaug

SEQ ID NO: 2302746 - RNA, 19 nt, Artificial Sequence
  Description of Artificial Sequence: Synthetic oligonucleotide
uuuucaagaggcuguccua

SEQ ID NO: 2302747 - RNA, 19 nt, Artificial Sequence
  Description of Artificial Sequence: Synthetic oligonucleotide
agguuauccagacccuucu

SEQ ID NO: 2302748 - RNA, 19 nt, Artificial Sequence
  Description of Artificial Sequence: Synthetic oligonucleotide
auaacacacagucguuuaa

SEQ ID NO: 2302749 - RNA, 19 nt, Artificial Sequence
  Description of Artificial Sequence: Synthetic oligonucleotide
uauguagugucgguauacu

SEQ ID NO: 2302750 - RNA, 19 nt, Artificial Sequence
  Description of Artificial Sequence: Synthetic oligonucleotide
ucuuuacuucuuccuauuu

SEQ ID NO: 2302751 - RNA, 19 nt, Artificial Sequence
  Description of Artificial Sequence: Synthetic oligonucleotide
uggcguauaaauucaucuu

SEQ ID NO: 2302752 - RNA, 19 nt, Artificial Sequence
  Description of Artificial Sequence: Synthetic oligonucleotide
uucaucuugcauggagugc

SEQ ID NO: 2302753 - RNA, 19 nt, Artificial Sequence
  Description of Artificial Sequence: Synthetic oligonucleotide
ugcaauaaguucuccucuu

SEQ ID NO: 2302754 - RNA, 19 nt, Artificial Sequence
  Description of Artificial Sequence: Synthetic oligonucleotide
uguccugaauagugaauuc

SEQ ID NO: 2302755 - RNA, 19 nt, Artificial Sequence
  Description of Artificial Sequence: Synthetic oligonucleotide
aacaaacacuccucugauu

SEQ ID NO: 2302756 - RNA, 19 nt, Artificial Sequence
  Description of Artificial Sequence: Synthetic oligonucleotide
acccucgaagugcuuguac

SEQ ID NO: 2302757 - RNA, 19 nt, Artificial Sequence
  Description of Artificial Sequence: Synthetic oligonucleotide
uuguugaaugcaagcuggu

SEQ ID NO: 2302758 - RNA, 19 nt, Artificial Sequence
  Description of Artificial Sequence: Synthetic oligonucleotide
gcuuguugaaugcaagcug

SEQ ID NO: 2302759 - RNA, 19 nt, Artificial Sequence
  Description of Artificial Sequence: Synthetic oligonucleotide
uucugcagcagaguacuac

SEQ ID NO: 2302760 - RNA, 19 nt, Artificial Sequence
  Description of Artificial Sequence: Synthetic oligonucleotide
aucugacauuccauaacac

SEQ ID NO: 2302761 - RNA, 19 nt, Artificial Sequence
  Description of Artificial Sequence: Synthetic oligonucleotide
gaauagugaauuccauugu

SEQ ID NO: 2302762 - RNA, 19 nt, Artificial Sequence
  Description of Artificial Sequence: Synthetic oligonucleotide
agaggcuguccuaaagagg

SEQ ID NO: 2302763 - RNA, 19 nt, Artificial Sequence
  Description of Artificial Sequence: Synthetic oligonucleotide
gauagcagcgagcuaucaa

SEQ ID NO: 2302764 - RNA, 19 nt, Artificial Sequence
  Description of Artificial Sequence: Synthetic oligonucleotide
uagcagcgagcuaucaaac

SEQ ID NO: 2302765 - RNA, 19 nt, Artificial Sequence
  Description of Artificial Sequence: Synthetic oligonucleotide
gucuuuuauuucugcagca

SEQ ID NO: 2302766 - RNA, 19 nt, Artificial Sequence
  Description of Artificial Sequence: Synthetic oligonucleotide
caggugaucaguguacuuc

SEQ ID NO: 2302767 - RNA, 19 nt, Artificial Sequence
  Description of Artificial Sequence: Synthetic oligonucleotide
uagagguuauccagacccu

SEQ ID NO: 2302768 - RNA, 19 nt, Artificial Sequence
  Description of Artificial Sequence: Synthetic oligonucleotide
acacauuaucugacauucc

SEQ ID NO: 2302769 - RNA, 19 nt, Artificial Sequence
  Description of Artificial Sequence: Synthetic oligonucleotide
auagugaauuccauuguaa

SEQ ID NO: 2302770 - RNA, 19 nt, Artificial Sequence
  Description of Artificial Sequence: Synthetic oligonucleotide
uaguuugguguaugcuuug

SEQ ID NO: 2302771 - RNA, 19 nt, Artificial Sequence
  Description of Artificial Sequence: Synthetic oligonucleotide
acuccucugauuaguuugg

SEQ ID NO: 2302772 - RNA, 19 nt, Artificial Sequence
  Description of Artificial Sequence: Synthetic oligonucleotide
guaucuuuacuucuuccua

SEQ ID NO: 2302773 - RNA, 19 nt, Artificial Sequence
  Description of Artificial Sequence: Synthetic oligonucleotide
aauguccugaauagugaau

SEQ ID NO: 2302774 - RNA, 19 nt, Artificial Sequence
  Description of Artificial Sequence: Synthetic oligonucleotide
guauaaauucaucuugcau

SEQ ID NO: 2302775 - RNA, 19 nt, Artificial Sequence
  Description of Artificial Sequence: Synthetic oligonucleotide
guccuaaagaggaaaugac

SEQ ID NO: 2302776 - RNA, 19 nt, Artificial Sequence
  Description of Artificial Sequence: Synthetic oligonucleotide
acuggcguauaaauucauc

SEQ ID NO: 2302777 - RNA, 19 nt, Artificial Sequence
  Description of Artificial Sequence: Synthetic oligonucleotide
caagcugguagcucacuuc

SEQ ID NO: 2302778 - RNA, 19 nt, Artificial Sequence
  Description of Artificial Sequence: Synthetic oligonucleotide
cuggcguauaaauucaucu

SEQ ID NO: 2302779 - RNA, 19 nt, Artificial Sequence
  Description of Artificial Sequence: Synthetic oligonucleotide
cacuuccuugccaggauac

SEQ ID NO: 2302780 - RNA, 19 nt, Artificial Sequence
  Description of Artificial Sequence: Synthetic oligonucleotide
ugccaggauacucuuuaau

SEQ ID NO: 2302781 - RNA, 19 nt, Artificial Sequence
  Description of Artificial Sequence: Synthetic oligonucleotide
aaugcuugucaaccuucuu

SEQ ID NO: 2302782 - RNA, 19 nt, Artificial Sequence
  Description of Artificial Sequence: Synthetic oligonucleotide
gguauacugagagugcgug

SEQ ID NO: 2302783 - RNA, 19 nt, Artificial Sequence
  Description of Artificial Sequence: Synthetic oligonucleotide
uacugagagugcguguuca

SEQ ID NO: 2302784 - RNA, 19 nt, Artificial Sequence
  Description of Artificial Sequence: Synthetic oligonucleotide
caaacccucgaagugcuug

SEQ ID NO: 2302785 - RNA, 19 nt, Artificial Sequence
  Description of Artificial Sequence: Synthetic oligonucleotide
acacagucguuuaagucug

SEQ ID NO: 2302786 - RNA, 19 nt, Artificial Sequence
  Description of Artificial Sequence: Synthetic oligonucleotide
uaauaacuuugcgaagcuc

SEQ ID NO: 2302787 - RNA, 19 nt, Artificial Sequence
  Description of Artificial Sequence: Synthetic oligonucleotide
acaaauggaagaauuccua

SEQ ID NO: 2302788 - RNA, 19 nt, Artificial Sequence
  Description of Artificial Sequence: Synthetic oligonucleotide
ugcaaugcuggagcaauaa

SEQ ID NO: 2302789 - RNA, 19 nt, Artificial Sequence
  Description of Artificial Sequence: Synthetic oligonucleotide
aaaugacguaagacugcag

SEQ ID NO: 2302790 - RNA, 19 nt, Artificial Sequence
  Description of Artificial Sequence: Synthetic oligonucleotide
agugccauaccaccugcaa

SEQ ID NO: 2302791 - RNA, 19 nt, Artificial Sequence
  Description of Artificial Sequence: Synthetic oligonucleotide
acgagauuuucaaacgaga

SEQ ID NO: 2302792 - RNA, 19 nt, Artificial Sequence
  Description of Artificial Sequence: Synthetic oligonucleotide
ucugauuaguuugguguau

SEQ ID NO: 2302793 - RNA, 19 nt, Artificial Sequence
  Description of Artificial Sequence: Synthetic oligonucleotide
caaacgagaaagaguugca

SEQ ID NO: 2302794 - RNA, 19 nt, Artificial Sequence
  Description of Artificial Sequence: Synthetic oligonucleotide
ugaaugcaagcugguagcu

SEQ ID NO: 2302795 - RNA, 19 nt, Artificial Sequence
  Description of Artificial Sequence: Synthetic oligonucleotide
aaguucuccucuucacaua

SEQ ID NO: 2302796 - RNA, 19 nt, Artificial Sequence
  Description of Artificial Sequence: Synthetic oligonucleotide
agagugcguguucauuucu

SEQ ID NO: 2302797 - RNA, 19 nt, Artificial Sequence
  Description of Artificial Sequence: Synthetic oligonucleotide
cauuguaacuccagaccca

SEQ ID NO: 2302798 - RNA, 19 nt, Artificial Sequence
  Description of Artificial Sequence: Synthetic oligonucleotide
gagagugcguguucauuuc

SEQ ID NO: 2302799 - RNA, 19 nt, Artificial Sequence
  Description of Artificial Sequence: Synthetic oligonucleotide
guacuacacauuaucugac

SEQ ID NO: 2302800 - RNA, 19 nt, Artificial Sequence
  Description of Artificial Sequence: Synthetic oligonucleotide
ccugcaauaaguucuccuc

SEQ ID NO: 2302801 - RNA, 19 nt, Artificial Sequence
  Description of Artificial Sequence: Synthetic oligonucleotide
cuacucgggcuucaacgcc

SEQ ID NO: 2302802 - RNA, 19 nt, Artificial Sequence
  Description of Artificial Sequence: Synthetic oligonucleotide
auucagcaacaaauggaag

SEQ ID NO: 2302803 - RNA, 19 nt, Artificial Sequence
  Description of Artificial Sequence: Synthetic oligonucleotide
ccuuuacaaggcuuuagug

SEQ ID NO: 2302804 - RNA, 19 nt, Artificial Sequence
  Description of Artificial Sequence: Synthetic oligonucleotide
cugauuaguuugguguaug

SEQ ID NO: 2302805 - RNA, 19 nt, Artificial Sequence
  Description of Artificial Sequence: Synthetic oligonucleotide
cugcgaguccagcaaauuc

SEQ ID NO: 2302806 - RNA, 19 nt, Artificial Sequence
  Description of Artificial Sequence: Synthetic oligonucleotide
aucuuuacuucuuccuauu

SEQ ID NO: 2302807 - RNA, 19 nt, Artificial Sequence
  Description of Artificial Sequence: Synthetic oligonucleotide
cuugccaggauacucuuua

SEQ ID NO: 2302808 - RNA, 19 nt, Artificial Sequence
  Description of Artificial Sequence: Synthetic oligonucleotide
uaccaccugcaauaaguuc

SEQ ID NO: 2302809 - RNA, 19 nt, Artificial Sequence
  Description of Artificial Sequence: Synthetic oligonucleotide
ggaaaugacguaagacugc

SEQ ID NO: 2302810 - RNA, 19 nt, Artificial Sequence
  Description of Artificial Sequence: Synthetic oligonucleotide
uugauucugcgaguccagc

SEQ ID NO: 2302811 - RNA, 19 nt, Artificial Sequence
  Description of Artificial Sequence: Synthetic oligonucleotide
uguaugcuuuguccagauc

SEQ ID NO: 2302812 - RNA, 19 nt, Artificial Sequence
  Description of Artificial Sequence: Synthetic oligonucleotide
uugcauggagugccauacc

SEQ ID NO: 2302813 - RNA, 19 nt, Artificial Sequence
  Description of Artificial Sequence: Synthetic oligonucleotide
guaugcccugagcuacucg

SEQ ID NO: 2302814 - RNA, 19 nt, Artificial Sequence
  Description of Artificial Sequence: Synthetic oligonucleotide
gcuucaacgccuucaaaga

SEQ ID NO: 2302815 - RNA, 19 nt, Artificial Sequence
  Description of Artificial Sequence: Synthetic oligonucleotide
gcguauaaauucaucuugc

SEQ ID NO: 2302816 - RNA, 19 nt, Artificial Sequence
  Description of Artificial Sequence: Synthetic oligonucleotide
gucaaccuucuuguagagg

SEQ ID NO: 2302817 - RNA, 19 nt, Artificial Sequence
  Description of Artificial Sequence: Synthetic oligonucleotide
ucguuuaagucuggcuucu

SEQ ID NO: 2302818 - RNA, 19 nt, Artificial Sequence
  Description of Artificial Sequence: Synthetic oligonucleotide
uguugaaugcaagcuggua

SEQ ID NO: 2302819 - RNA, 19 nt, Artificial Sequence
  Description of Artificial Sequence: Synthetic oligonucleotide
augcuggagcaauaaucca

SEQ ID NO: 2302820 - RNA, 19 nt, Artificial Sequence
  Description of Artificial Sequence: Synthetic oligonucleotide
gcuacucgggcuucaacgc

SEQ ID NO: 2302821 - RNA, 19 nt, Artificial Sequence
  Description of Artificial Sequence: Synthetic oligonucleotide
ugcuuguacuggcguauaa

SEQ ID NO: 2302822 - RNA, 19 nt, Artificial Sequence
  Description of Artificial Sequence: Synthetic oligonucleotide
ucuugcauggagugccaua

SEQ ID NO: 2302823 - RNA, 19 nt, Artificial Sequence
  Description of Artificial Sequence: Synthetic oligonucleotide
cuuguacuggcguauaaau

SEQ ID NO: 2302824 - RNA, 19 nt, Artificial Sequence
  Description of Artificial Sequence: Synthetic oligonucleotide
cauaaaugcuugucaaccu

SEQ ID NO: 2302825 - RNA, 19 nt, Artificial Sequence
  Description of Artificial Sequence: Synthetic oligonucleotide
cuuccuugccaggauacuc

SEQ ID NO: 2302826 - RNA, 19 nt, Artificial Sequence
  Description of Artificial Sequence: Synthetic oligonucleotide
acuuugcgaagcucuugcu

SEQ ID NO: 2302827 - RNA, 19 nt, Artificial Sequence
  Description of Artificial Sequence: Synthetic oligonucleotide
uucugcgaguccagcaaau

SEQ ID NO: 2302828 - RNA, 19 nt, Artificial Sequence
  Description of Artificial Sequence: Synthetic oligonucleotide
gaagcucuugcuuguugaa

SEQ ID NO: 2302829 - RNA, 19 nt, Artificial Sequence
  Description of Artificial Sequence: Synthetic oligonucleotide
ccuaaagaggaaaugacgu

SEQ ID NO: 2302830 - RNA, 19 nt, Artificial Sequence
  Description of Artificial Sequence: Synthetic oligonucleotide
ugcaggugaucaguguacu

SEQ ID NO: 2302831 - RNA, 19 nt, Artificial Sequence
  Description of Artificial Sequence: Synthetic oligonucleotide
uugcgaagcucuugcuugu

SEQ ID NO: 2302832 - RNA, 19 nt, Artificial Sequence
  Description of Artificial Sequence: Synthetic oligonucleotide
ucgggcuucaacgccuuca

SEQ ID NO: 2302833 - RNA, 19 nt, Artificial Sequence
  Description of Artificial Sequence: Synthetic oligonucleotide
uacuggcguauaaauucau

SEQ ID NO: 2302834 - RNA, 19 nt, Artificial Sequence
  Description of Artificial Sequence: Synthetic oligonucleotide
aucaaacccucgaagugcu

SEQ ID NO: 2302835 - RNA, 19 nt, Artificial Sequence
  Description of Artificial Sequence: Synthetic oligonucleotide
cuccuuuacaaggcuuuag

SEQ ID NO: 2302836 - RNA, 19 nt, Artificial Sequence
  Description of Artificial Sequence: Synthetic oligonucleotide
gucgguauacugagagugc

SEQ ID NO: 2302837 - RNA, 19 nt, Artificial Sequence
  Description of Artificial Sequence: Synthetic oligonucleotide
uugcaacuuucucaacauu

SEQ ID NO: 2302838 - RNA, 19 nt, Artificial Sequence
  Description of Artificial Sequence: Synthetic oligonucleotide
uagugggauugugcaaugc

SEQ ID NO: 2302839 - RNA, 19 nt, Artificial Sequence
  Description of Artificial Sequence: Synthetic oligonucleotide
cauuugcaacuuucucaac

SEQ ID NO: 2302840 - RNA, 19 nt, Artificial Sequence
  Description of Artificial Sequence: Synthetic oligonucleotide
gaaugcaagcugguagcuc

SEQ ID NO: 2302841 - RNA, 19 nt, Artificial Sequence
  Description of Artificial Sequence: Synthetic oligonucleotide
cuuuagugggauugugcaa

SEQ ID NO: 2302842 - RNA, 19 nt, Artificial Sequence
  Description of Artificial Sequence: Synthetic oligonucleotide
agcuucuagacacgagauu

SEQ ID NO: 2302843 - RNA, 19 nt, Artificial Sequence
  Description of Artificial Sequence: Synthetic oligonucleotide
cucugauuaguuuggugua

SEQ ID NO: 2302844 - RNA, 19 nt, Artificial Sequence
  Description of Artificial Sequence: Synthetic oligonucleotide
ccaggauacucuuuaauaa

SEQ ID NO: 2302845 - RNA, 19 nt, Artificial Sequence
  Description of Artificial Sequence: Synthetic oligonucleotide
aguuugguguaugcuuugu

SEQ ID NO: 2302846 - RNA, 19 nt, Artificial Sequence
  Description of Artificial Sequence: Synthetic oligonucleotide
guacuggcguauaaauuca

SEQ ID NO: 2302847 - RNA, 19 nt, Artificial Sequence
  Description of Artificial Sequence: Synthetic oligonucleotide
uagugucgguauacugaga

SEQ ID NO: 2302848 - RNA, 19 nt, Artificial Sequence
  Description of Artificial Sequence: Synthetic oligonucleotide
cuucaacgccuucaaagaa

SEQ ID NO: 2302849 - RNA, 19 nt, Artificial Sequence
  Description of Artificial Sequence: Synthetic oligonucleotide
agcgagcuaucaaacccuc

SEQ ID NO: 2302850 - RNA, 19 nt, Artificial Sequence
  Description of Artificial Sequence: Synthetic oligonucleotide
gaauuccauuguaacucca

SEQ ID NO: 2302851 - RNA, 19 nt, Artificial Sequence
  Description of Artificial Sequence: Synthetic oligonucleotide
uugccuuuauuugguuacu

SEQ ID NO: 2302852 - RNA, 19 nt, Artificial Sequence
  Description of Artificial Sequence: Synthetic oligonucleotide
ggcuuuagugggauugugc

SEQ ID NO: 2302853 - RNA, 19 nt, Artificial Sequence
  Description of Artificial Sequence: Synthetic oligonucleotide
cacagucguuuaagucugg

SEQ ID NO: 2302854 - RNA, 19 nt, Artificial Sequence
  Description of Artificial Sequence: Synthetic oligonucleotide
gccaggauacucuuuaaua

SEQ ID NO: 2302855 - RNA, 19 nt, Artificial Sequence
  Description of Artificial Sequence: Synthetic oligonucleotide
ucccguaugcccugagcua

SEQ ID NO: 2302856 - RNA, 19 nt, Artificial Sequence
  Description of Artificial Sequence: Synthetic oligonucleotide
cuucacuuccuugccagga

SEQ ID NO: 2302857 - RNA, 19 nt, Artificial Sequence
  Description of Artificial Sequence: Synthetic oligonucleotide
ccucugauuaguuuggugu

SEQ ID NO: 2302858 - RNA, 19 nt, Artificial Sequence
  Description of Artificial Sequence: Synthetic oligonucleotide
acgccuucaaagaaaugau

SEQ ID NO: 2302859 - RNA, 19 nt, Artificial Sequence
  Description of Artificial Sequence: Synthetic oligonucleotide
auaacuuugcgaagcucuu

SEQ ID NO: 2302860 - RNA, 19 nt, Artificial Sequence
  Description of Artificial Sequence: Synthetic oligonucleotide
acacuccucugauuaguuu

SEQ ID NO: 2302861 - RNA, 19 nt, Artificial Sequence
  Description of Artificial Sequence: Synthetic oligonucleotide
cugaauagugaauuccauu

SEQ ID NO: 2302862 - RNA, 19 nt, Artificial Sequence
  Description of Artificial Sequence: Synthetic oligonucleotide
ggagugccauaccaccugc

SEQ ID NO: 2302863 - RNA, 19 nt, Artificial Sequence
  Description of Artificial Sequence: Synthetic oligonucleotide
auggagugccauaccaccu

SEQ ID NO: 2302864 - RNA, 19 nt, Artificial Sequence
  Description of Artificial Sequence: Synthetic oligonucleotide
uccagaucuccacggcguu

SEQ ID NO: 2302865 - RNA, 19 nt, Artificial Sequence
  Description of Artificial Sequence: Synthetic oligonucleotide
agacugcaggugaucagug

SEQ ID NO: 2302866 - RNA, 19 nt, Artificial Sequence
  Description of Artificial Sequence: Synthetic oligonucleotide
ucuccuuuacaaggcuuua

SEQ ID NO: 2302867 - RNA, 19 nt, Artificial Sequence
  Description of Artificial Sequence: Synthetic oligonucleotide
caggauagcagcgagcuau

SEQ ID NO: 2302868 - RNA, 19 nt, Artificial Sequence
  Description of Artificial Sequence: Synthetic oligonucleotide
cugcaauaaguucuccucu

SEQ ID NO: 2302869 - RNA, 19 nt, Artificial Sequence
  Description of Artificial Sequence: Synthetic oligonucleotide
uugugcaaugcuggagcaa

SEQ ID NO: 2302870 - RNA, 19 nt, Artificial Sequence
  Description of Artificial Sequence: Synthetic oligonucleotide
agagguuauccagacccuu

SEQ ID NO: 2302871 - RNA, 19 nt, Artificial Sequence
  Description of Artificial Sequence: Synthetic oligonucleotide
caacgccuucaaagaaaug

SEQ ID NO: 2302872 - RNA, 19 nt, Artificial Sequence
  Description of Artificial Sequence: Synthetic oligonucleotide
gcugguagcucacuuccuc

SEQ ID NO: 2302873 - RNA, 19 nt, Artificial Sequence
  Description of Artificial Sequence: Synthetic oligonucleotide
augcaagcugguagcucac

SEQ ID NO: 2302874 - RNA, 19 nt, Artificial Sequence
  Description of Artificial Sequence: Synthetic oligonucleotide
auaccaccugcaauaaguu

SEQ ID NO: 2302875 - RNA, 19 nt, Artificial Sequence
  Description of Artificial Sequence: Synthetic oligonucleotide
aggcuuuagugggauugug

SEQ ID NO: 2302876 - RNA, 19 nt, Artificial Sequence
  Description of Artificial Sequence: Synthetic oligonucleotide
ucugcgaguccagcaaauu

SEQ ID NO: 2302877 - RNA, 19 nt, Artificial Sequence
  Description of Artificial Sequence: Synthetic oligonucleotide
cagaucuccacggcguuca

SEQ ID NO: 2302878 - RNA, 19 nt, Artificial Sequence
  Description of Artificial Sequence: Synthetic oligonucleotide
acuuccuugccaggauacu

SEQ ID NO: 2302879 - RNA, 19 nt, Artificial Sequence
  Description of Artificial Sequence: Synthetic oligonucleotide
cucccguaugcccugagcu

SEQ ID NO: 2302880 - RNA, 19 nt, Artificial Sequence
  Description of Artificial Sequence: Synthetic oligonucleotide
guauacugagagugcgugu

SEQ ID NO: 2302881 - RNA, 19 nt, Artificial Sequence
  Description of Artificial Sequence: Synthetic oligonucleotide
cgaagugcuuguacuggcg

SEQ ID NO: 2302882 - RNA, 19 nt, Artificial Sequence
  Description of Artificial Sequence: Synthetic oligonucleotide
uccucccguaugcccugag

SEQ ID NO: 2302883 - RNA, 19 nt, Artificial Sequence
  Description of Artificial Sequence: Synthetic oligonucleotide
gcaacuuucucaacauuaa

SEQ ID NO: 2302884 - RNA, 19 nt, Artificial Sequence
  Description of Artificial Sequence: Synthetic oligonucleotide
gcagcagaguacuacacau

SEQ ID NO: 2302885 - RNA, 19 nt, Artificial Sequence
  Description of Artificial Sequence: Synthetic oligonucleotide
acauuccauaacacacagu

SEQ ID NO: 2302886 - RNA, 19 nt, Artificial Sequence
  Description of Artificial Sequence: Synthetic oligonucleotide
cuacacauuaucugacauu

SEQ ID NO: 2302887 - RNA, 19 nt, Artificial Sequence
  Description of Artificial Sequence: Synthetic oligonucleotide
cgagauuuucaaacgagaa

SEQ ID NO: 2302888 - RNA, 19 nt, Artificial Sequence
  Description of Artificial Sequence: Synthetic oligonucleotide
gggauugugcaaugcugga

SEQ ID NO: 2302889 - RNA, 19 nt, Artificial Sequence
  Description of Artificial Sequence: Synthetic oligonucleotide
ugagcuacucgggcuucaa

SEQ ID NO: 2302890 - RNA, 19 nt, Artificial Sequence
  Description of Artificial Sequence: Synthetic oligonucleotide
ucaaacccucgaagugcuu

SEQ ID NO: 2302891 - RNA, 19 nt, Artificial Sequence
  Description of Artificial Sequence: Synthetic oligonucleotide
caucuugcauggagugcca

SEQ ID NO: 2302892 - RNA, 19 nt, Artificial Sequence
  Description of Artificial Sequence: Synthetic oligonucleotide
gguguaugcuuuguccaga

SEQ ID NO: 2302893 - RNA, 19 nt, Artificial Sequence
  Description of Artificial Sequence: Synthetic oligonucleotide
cucuugcuuguugaaugca

SEQ ID NO: 2302894 - RNA, 19 nt, Artificial Sequence
  Description of Artificial Sequence: Synthetic oligonucleotide
cuggagcaauaauccagaa

SEQ ID NO: 2302895 - RNA, 19 nt, Artificial Sequence
  Description of Artificial Sequence: Synthetic oligonucleotide
cgagcuaucaaacccucga

SEQ ID NO: 2302896 - RNA, 19 nt, Artificial Sequence
  Description of Artificial Sequence: Synthetic oligonucleotide
cagcgagcuaucaaacccu

SEQ ID NO: 2302897 - RNA, 19 nt, Artificial Sequence
  Description of Artificial Sequence: Synthetic oligonucleotide
cuuugcgaagcucuugcuu

SEQ ID NO: 2302898 - RNA, 19 nt, Artificial Sequence
  Description of Artificial Sequence: Synthetic oligonucleotide
caccugcaauaaguucucc

SEQ ID NO: 2302899 - RNA, 19 nt, Artificial Sequence
  Description of Artificial Sequence: Synthetic oligonucleotide
ggugaucaguguacuucug

SEQ ID NO: 2302900 - RNA, 19 nt, Artificial Sequence
  Description of Artificial Sequence: Synthetic oligonucleotide
cagcuucuagacacgagau

SEQ ID NO: 2302901 - RNA, 19 nt, Artificial Sequence
  Description of Artificial Sequence: Synthetic oligonucleotide
accuucuuguagagguuau

SEQ ID NO: 2302902 - RNA, 19 nt, Artificial Sequence
  Description of Artificial Sequence: Synthetic oligonucleotide
cccguaugcccugagcuac

SEQ ID NO: 2302903 - RNA, 19 nt, Artificial Sequence
  Description of Artificial Sequence: Synthetic oligonucleotide
aacccucgaagugcuugua

SEQ ID NO: 2302904 - RNA, 19 nt, Artificial Sequence
  Description of Artificial Sequence: Synthetic oligonucleotide
acguaagacugcaggugau

SEQ ID NO: 2302905 - RNA, 19 nt, Artificial Sequence
  Description of Artificial Sequence: Synthetic oligonucleotide
cuucuagacacgagauuuu

SEQ ID NO: 2302906 - RNA, 19 nt, Artificial Sequence
  Description of Artificial Sequence: Synthetic oligonucleotide
gcuuguacuggcguauaaa

SEQ ID NO: 2302907 - RNA, 19 nt, Artificial Sequence
  Description of Artificial Sequence: Synthetic oligonucleotide
gcgagcuaucaaacccucg

SEQ ID NO: 2302908 - RNA, 19 nt, Artificial Sequence
  Description of Artificial Sequence: Synthetic oligonucleotide
ccauaccaccugcaauaag

SEQ ID NO: 2302909 - RNA, 19 nt, Artificial Sequence
  Description of Artificial Sequence: Synthetic oligonucleotide
guccagaucuccacggcgu

SEQ ID NO: 2302910 - RNA, 19 nt, Artificial Sequence
  Description of Artificial Sequence: Synthetic oligonucleotide
cgaagcucuugcuuguuga

SEQ ID NO: 2302911 - RNA, 19 nt, Artificial Sequence
  Description of Artificial Sequence: Synthetic oligonucleotide
gugcguguucauuucuuuu

SEQ ID NO: 2302912 - RNA, 19 nt, Artificial Sequence
  Description of Artificial Sequence: Synthetic oligonucleotide
ggauacucuuuaauaacuu

SEQ ID NO: 2302913 - RNA, 19 nt, Artificial Sequence
  Description of Artificial Sequence: Synthetic oligonucleotide
ugcgaagcucuugcuuguu

SEQ ID NO: 2302914 - RNA, 19 nt, Artificial Sequence
  Description of Artificial Sequence: Synthetic oligonucleotide
ccucccguaugcccugagc

SEQ ID NO: 2302915 - RNA, 19 nt, Artificial Sequence
  Description of Artificial Sequence: Synthetic oligonucleotide
ggugaaaguuuuccaucau

SEQ ID NO: 2302916 - RNA, 19 nt, Artificial Sequence
  Description of Artificial Sequence: Synthetic oligonucleotide
ccaucauaacaacaucccu

SEQ ID NO: 2302917 - RNA, 19 nt, Artificial Sequence
  Description of Artificial Sequence: Synthetic oligonucleotide
gagugcguguucauuucuu

SEQ ID NO: 2302918 - RNA, 19 nt, Artificial Sequence
  Description of Artificial Sequence: Synthetic oligonucleotide
gcucacuuccuccucccgu

SEQ ID NO: 2302919 - RNA, 19 nt, Artificial Sequence
  Description of Artificial Sequence: Synthetic oligonucleotide
cguaagacugcaggugauc

SEQ ID NO: 2302920 - RNA, 19 nt, Artificial Sequence
  Description of Artificial Sequence: Synthetic oligonucleotide
ccugaauagugaauuccau

SEQ ID NO: 2302921 - RNA, 19 nt, Artificial Sequence
  Description of Artificial Sequence: Synthetic oligonucleotide
cugagcuacucgggcuuca

SEQ ID NO: 2302922 - RNA, 19 nt, Artificial Sequence
  Description of Artificial Sequence: Synthetic oligonucleotide
cagcagaguacuacacauu

SEQ ID NO: 2302923 - RNA, 19 nt, Artificial Sequence
  Description of Artificial Sequence: Synthetic oligonucleotide
ccucuucacauaaaugcuu

SEQ ID NO: 2302924 - RNA, 19 nt, Artificial Sequence
  Description of Artificial Sequence: Synthetic oligonucleotide
caaccuucuuguagagguu

SEQ ID NO: 2302925 - RNA, 19 nt, Artificial Sequence
  Description of Artificial Sequence: Synthetic oligonucleotide
gcuguccuaaagaggaaau

SEQ ID NO: 2302926 - RNA, 19 nt, Artificial Sequence
  Description of Artificial Sequence: Synthetic oligonucleotide
gcaagcugguagcucacuu

SEQ ID NO: 2302927 - RNA, 19 nt, Artificial Sequence
  Description of Artificial Sequence: Synthetic oligonucleotide
gugcuuguacuggcguaua

SEQ ID NO: 2302928 - RNA, 19 nt, Artificial Sequence
  Description of Artificial Sequence: Synthetic oligonucleotide
ccagaucuccacggcguuc

SEQ ID NO: 2302929 - RNA, 19 nt, Artificial Sequence
  Description of Artificial Sequence: Synthetic oligonucleotide
acucgggcuucaacgccuu

SEQ ID NO: 2302930 - RNA, 19 nt, Artificial Sequence
  Description of Artificial Sequence: Synthetic oligonucleotide
gggcuucaacgccuucaaa

SEQ ID NO: 2302931 - RNA, 19 nt, Artificial Sequence
  Description of Artificial Sequence: Synthetic oligonucleotide
gcccugagcuacucgggcu

SEQ ID NO: 2302932 - RNA, 19 nt, Artificial Sequence
  Description of Artificial Sequence: Synthetic oligonucleotide
ccagaauguccugaauagu

SEQ ID NO: 2302933 - RNA, 19 nt, Artificial Sequence
  Description of Artificial Sequence: Synthetic oligonucleotide
ccugagcuacucgggcuuc

SEQ ID NO: 2302934 - RNA, 19 nt, Artificial Sequence
  Description of Artificial Sequence: Synthetic oligonucleotide
gcaggugaucaguguacuu

SEQ ID NO: 2302935 - RNA, 19 nt, Artificial Sequence
  Description of Artificial Sequence: Synthetic oligonucleotide
ggcuuucauuugcaacuuu

SEQ ID NO: 2302936 - RNA, 19 nt, Artificial Sequence
  Description of Artificial Sequence: Synthetic oligonucleotide
cguaugcccugagcuacuc

SEQ ID NO: 2302937 - RNA, 19 nt, Artificial Sequence
  Description of Artificial Sequence: Synthetic oligonucleotide
cgggcuucaacgccuucaa

SEQ ID NO: 2302938 - RNA, 19 nt, Artificial Sequence
  Description of Artificial Sequence: Synthetic oligonucleotide
cgguauacugagagugcgu

SEQ ID NO: 2302939 - RNA, 19 nt, Artificial Sequence
  Description of Artificial Sequence: Synthetic oligonucleotide
ccaggauagcagcgagcua

SEQ ID NO: 2302940 - RNA, 19 nt, Artificial Sequence
  Description of Artificial Sequence: Synthetic oligonucleotide
ccguaugcccugagcuacu

SEQ ID NO: 2302941 - RNA, 19 nt, Artificial Sequence
  Description of Artificial Sequence: Synthetic oligonucleotide
ccuugccaggauacucuuu

SEQ ID NO: 2302942 - RNA, 19 nt, Artificial Sequence
  Description of Artificial Sequence: Synthetic oligonucleotide
ccacggcguucagcauuuu

SEQ ID NO: 2302943 - RNA, 19 nt, Artificial Sequence
  Description of Artificial Sequence: Synthetic oligonucleotide
aauuauucaagacucaacg

SEQ ID NO: 2302944 - RNA, 19 nt, Artificial Sequence
  Description of Artificial Sequence: Synthetic oligonucleotide
guuaaguuaacucugaaag

SEQ ID NO: 2302945 - RNA, 19 nt, Artificial Sequence
  Description of Artificial Sequence: Synthetic oligonucleotide
uuugggauagucaaggugg

SEQ ID NO: 2302946 - RNA, 19 nt, Artificial Sequence
  Description of Artificial Sequence: Synthetic oligonucleotide
aaaugcuucacggagaccc

SEQ ID NO: 2302947 - RNA, 19 nt, Artificial Sequence
  Description of Artificial Sequence: Synthetic oligonucleotide
ucuagaaauagcaucaaag

SEQ ID NO: 2302948 - RNA, 19 nt, Artificial Sequence
  Description of Artificial Sequence: Synthetic oligonucleotide
aaaguaacagauucuuccc

SEQ ID NO: 2302949 - RNA, 19 nt, Artificial Sequence
  Description of Artificial Sequence: Synthetic oligonucleotide
aaagcuaaugccuuuguag

SEQ ID NO: 2302950 - RNA, 19 nt, Artificial Sequence
  Description of Artificial Sequence: Synthetic oligonucleotide
gaaaguaacagauucuucc

SEQ ID NO: 2302951 - RNA, 19 nt, Artificial Sequence
  Description of Artificial Sequence: Synthetic oligonucleotide
aguaaagaaaguuuguauc

SEQ ID NO: 2302952 - RNA, 19 nt, Artificial Sequence
  Description of Artificial Sequence: Synthetic oligonucleotide
uagaaauagcaucaaaggg

SEQ ID NO: 2302953 - RNA, 19 nt, Artificial Sequence
  Description of Artificial Sequence: Synthetic oligonucleotide
ucauguacuguaaugagag
